United States Patent Application Publication US 2019/0348154 A1 - sequence listing, part 41

SEQ ID NO: 151962 - DNA, 492 bp, Enterobacter cloacae
atgtctggttttgcgaataccaaagcagataccgcttttctcaaatctcgcttcaacaaaaatattgcagctggcgagaagctgatcggctcagaattttggatgacgtttaaagggtacgacaatctgagcatccttgtgcgctccactcagattccggaaatgacacgtgaagacgtagaagattttggtccgggtggtatgaaattcaaccagcacggtacgctgcgcaactcaggggaatatcaggttacttgtgcagaaaccatcgatggaactgtattagcagccgtcaaagagcttgtttacggcaagaagtatatcgaagtcacggttcaagcagccgccgagtcaaacagcggcgatcacaaaggcttaatccgtaccttctcccactgcaaaatctattctgatgcagtggacttctcatctgaagacgtcacgaccgtagtccgtccgacactgcgcgtcgtatacaactgggttgagtaa

SEQ ID NO: 151963 - DNA, 594 bp, Enterobacter cloacae
atgatatgtggcgcgatcatgccggatggcattagccctctcatgaaaatctacatccgtactgatgaggatatggttgtaggttatatcggtgatggctcctcagccacgctttcagctatgtggcaatcaccgttcgagaatcagtcattgagcggaattatgggggctgtaagtcagaaactggacgctacagccaatgttattcaatccgcttcgggcgttacagcaaagacgatctttaactctatgctcgtctgggaaggtcagcagccaccggagtttagtttaacggttgatctcatggctacccaaaacgcgcaaatagaagttaatgctgctatcacaacactactaaaaatgtgctctccagagctcaatgagtacaccgcactcgggcgacgtccagagcaagtaacattaaatataggtcgcacaatagctctctcaggagtggttattaaagatgtgacttatcaattggatgctccacgaacctcagagggctatttttcccacaacactgtcactctccaatgcagcggtattacatcactcaatcgcagcaatatttccactgtgtttatcatttaa

SEQ ID NO: 151964 - DNA, 711 bp, Enterobacter cloacae
atgaaaaatttcacaatcgctaatcccctggctcgtgttctttttggtgccaccgtgccgggttctgacgataaggcaatgcttgaaagcgcaggagagcgtaaaccgggagagcaggagcagcctaaagatggtgaagccttaatgctggaagctgttagcgcgcgcgccaaaggcgatgagcgtggcctcgccgcgtcgatgatcgcgcaatggttggaggatgatgatcccgaagccgacgcctttgatgctttggccattattatggcggggcttgatggtgtagatgaagatgctgatttcaccgatgaacaagttgatgcctataacgctgcattagcctcgctggctgatgcagcagtgtccatgggcgcggaccaggatgatgtcaccgacatgatcgacgatatggatgattcagcagcggagcgagttttcgacgctctgtcagggaacgattcagacatgctggaggaggctattgcaatgtatacagttgcgggtggcgatacagctatgctcgaagccgttcgtaaaaaggttgttcgtgacggcaaggtgaaaattattcgtaagcgccctcgtcctcgtcgccttaactctttacagaaacaggcactgaagaaggctcgccgtaaggctcatacatctgttgcgaatttgcaccgcaagaagtccatgaagctgcgcaagaaacgcggcatgtaa

SEQ ID NO: 151965 - DNA, 1611 bp, Enterobacter cloacae
atgaataagatcggatattcagtagggcaagcagctggcgtcggcattatgcctgttaacgctgatgcgaccctatccaccggcagcggcggcagctccgttttcgctggtctggtgatttctcgccgtggcgcgccgggtaaggtgctacaggtcacagcatcgaactataaggatgtgcttggaacaccaatccatcctcgactgggttcggcattcgagccattccgtcacgtccagcaggcggttaaaggtggcgatggttatgtagtgcgcgtttgcccttcagatatgaaggtcccgggcatcatcatttctaaggcttctggggaagaaaaccaggttgaagaaggcgaatccttcaccgttctgggtgagtacgtgttaaaaggggctcagtttggtccccacgaaacaccagcacttaaggatggcgaactggccatcatttacatcaaagacggcgaggcttcaggcaatcgtacaatttcgcttgatagtgatgaggatagcgaccttctcaacctgacgctaaaagaaacccaatcggatggttctgtggaacaactcgaaactcatcaggtttctttcaacccagaggccgtcaacgatatgggccaaccagcatggttgcaaaccatgttggaaagcatgtctacccgcctaggttgcgtgatcaccagtgatgataaagatgatttgttcacaggcattacgttcacagatgtggcgttcgtgggtggttctgatggcacgttctcgaaagttactgctgaagaatacctgaaagcactggctattctggaacatgccccgatcaatgtaactgccattctctcgctgggttgttacgactcaactgtactagctgcactgaaggacctggcagaagcagttcgcgtcgacttcttctatgatctttcaggcaatcagacagctgcagctgcgatcaccgaagccaaaggtcatggctttggtggttcacaccagcccgcacgctactacttcccttattcctgtaaagacagtgcaactggcatgcaggttgtcttcggtattagctgtgacgcttttgtagctaaagcgaaaggcgttgcgatggtaccagatgtcggtggctggcattattcccctgcggggacatcccgaggcattatcgatcgtcaaaacatcaccaagattccaaacctcgatgctatcgacctggaagctttcgttacggcacgaatcaatcctgtaaaagtgtcggccagcggtgatgtttatattgatgacgcgctgaccacgtttaccaaaaagaactaccttcgcttccaacacgtctcctccttgatgaatgccatcgcccgtaacttctatgagctcgctgaagctatcaagcacgagccggacggtgttacccaagagtcactcacgaaaggcatgaccgaattactggagcgcttctattcagcaggtgcactggtaaagccccgagataagtctcagggcgaagagccatttgtaatcactgtggctcaactggagagcgattactggcaagtcgaatgggcagtgtgccctaccggttcagcgcgccgcatcatcggtaaaccaatccttatgcgataa

SEQ ID NO: 151966 - DNA, 279 bp, Enterobacter cloacae
atgccagatatcaaagtttccgttttccctgaaaacgccaccaacaaggccattactgtcgtatcaagtaaccctgcggtcgtatctgtgggtaaaaacaataaatgtaaagcagaaggtcctggcgaagccgaactgactattacaactgctgatggtggccacaccgttactcataaggttgtggttaaagcggcagtagttaccgtagagggcgtcagcgtggatagcgaaaaacaagacgctaccgtgggtgacaccttcaccgtaggcgaataa

SEQ ID NO: 151967 - DNA, 1701 bp, Enterobacter cloacae
atgatgagtcgggcggcttccgtcatggcgatgactatcgaaccaatcaccgacggtgcaggcaatttgattgccgatgaagccgccatgacggcgagccttacctcagcagtgcaaaaggtgccaatgttcgaaggtgtcgatcctgatgcagccctgcaaattgcaggtggctgggctatggctatgcaccagtataaacaagagcacggccgttacccggctgtagacgtgctggcaaactgtcacgtcgcgctcgaaaaccttatgacagaatgcgctaaagataagcatagcggcaccggtaaggcgatgttcgagtccgctgctgaatccatgcgcagttctgatggtgttatgcgcatcgctcaatttgcagcgctgattctgccagctgccctgggcgcagccacaagcgatgcctgcactttcatcccatgcgaacgtgatgaatcagacatctacgaactcatcaacatcgcaggcaccaattttggcactttcaagccaggcgatgaattgaatatgcaaagcgctggcgtctacagtcagatgaaacgactgtaccagctggcggcaaaaggcgatggtgtaaccaaagttttcaagttcgatattaaggactttgaaggacaaaactgccctatccgtgctggctataacaagctgttaatcaatcgtaaaccatcgaaagttgacgatggtgacggcaatctgtatttcaacggttcggatagcaaaggcaatctgtttgctgctactgcgaaggtggcatacgacaccggtgtaattgatatcacctttaccgatgcaccagcggaaggtaccgagcttgcagtacaggttgagatcaacatcgagcgcgctcctaacctgatccccgtcatcaaccaggcgatgcgtaactacaaagttaagccgtctcagtatgttgttgcatctgaacacaccatcatgtccgcgtctgatgccagccgtgaatttggtattaacatggctgcgactcagttctcagcaatgcgccagtggctcagccatgaacaagatgtaatgcgccttcgcacgctggttttccataccgtgtatggccgtgaattcgatgctgctcttccagaagcacaaagctatgaatcatgggtaagtctgatgcgccatgttgtgaatgctttgtcccaggatatggctaaccgcaccctggcttcaggtattcgcggtggcttcgctggtggcgatgcagctaacttcctgcgctcactaccacctcagcatttccagctggccccgggttatgtccaatctccgtacattcagtacatcggtaccctttttggatctatccgcatttacgaagtccctactccagtttgcgagcagttccagaaacagggttatgaccttggcctggatgacatctatttctacggtcgcggcaacgatatcggcaaagcaggtctgatcgccggtgatgcagtagcagcaattccttacgtccacgaaaccaacccgagcctggttaaccgtacaactctgtggggttcagcaatcaatgatgttcaccctcgtaacggtgaaaactatttcgcacgtttacgtctgacgcactccaaagaaggcgcgatcaacatgctgacaggccagattaactcctcagcatcaaatccaggggaaaccacggatgaagaagaaaaaaagtcggagtaa

SEQ ID NO: 151968 - DNA, 396 bp, Enterobacter cloacae
atgggatacaatatttttctaacttatcctggagggtcacagagtcacaaaatgaagactctgtgccgtgccagagcgcaagctcacctgcaaaaaatccttgatgatgccgagctcctggctatggcggaaaagctcactattcgccattctggccgcaagattttggatatagcgacaagtaagcctgttgatgaaatccaaaatgcgatcgagtggccagctgttggtgcgcaacggaaagttaaacagcctgtagcagccactctatatatgcctgaggcagtccgagactggctaaagggggagggtaatgggaatgttagcgcaggatttcgtaaagtgatgcagaagcaaaacccggcattaagtgacgaatgggttaaatctaagtga

SEQ ID NO: 151969 - DNA, 312 bp, Enterobacter cloacae
atgaaatcaaccgtctggaaaaagcacttctcaatgccggtgttagtgatgagcctgttcctgatgacgttatccggatgcagcgggaccgggcaaaagaaatcaaccgtagagcccgtgaaggttacgataacaacgaacagcaagcacatggcaacggtgatggattaccaaccgtgcatagttcctgaaaactctcccatcttgtttaaccagtatccggcgtacacggaaacaatcttcaccaaagttgatgagtgtaacgaacgaaattttctgataaacaaacgcaacaaagaagctttccaataa

SEQ ID NO: 151970 - DNA, 783 bp, Enterobacter cloacae
atgctcgatacccaaggccagattgatgccttcaatatccttaatcaggcaggcttaaatacgcctgcaactgtcaaattaagcagagaagctgaagatgccgctactaacttggcgacaactatcggaacgcttattcaacctggaatgtcttacccaccttcggtcagtgcgtatacgtctcagcttccagcgttcacagagatcattacgcaagcagctaatgctgcaagcgcacttgcaggagccatatctccatattgcacgccgtctgacctcttacagatgaagctgggttgggaatgccatgtaaaagcagcttcgttacctgtgagtgaaccattccctctcgttgccggtatgggagacgaaggcataccccggtcgcttaaaatgagcgtgaatgaattcaacatcgacgagttgcaggcgtccatgacagccataaacaataagctttcaaacggtacgactaccggcacagagggaggtgctggagctggtggtgcgccggtgccgccttctttaaccgacgaagagatattggcgctgaaaaccgccgtagaaaccgctgcggccgtaaccgacgagatcttaacagcgaccgctgcgacacaaatagcggcttcaaaaatcagtgaatcgacagtgctcgcggctgccagtctgcataacgcagtagctataaccctaacaggctcaatgatgactaatcaggccatcttacctgcattaagcctgctgatgcccgctggtgtaatcgaatctctgaaggaggaataa

SEQ ID NO: 151971 - DNA, 285 bp, Enterobacter cloacae
atgagtgctattgcgatcagcgatactgtttgctccgggcatggcgggtttccatcccgccaagtagcagagacagttccctggttcacagttaatggaaaaccggtagtagtggatggaaatgcgtttcctgatcatagcgacgggaatagctcacacccgggcgcggctgtttctactcgcccatggttcgtcattggaggtaaagcgggagtttgtgttggcgacccagtttcgtgcggatcggtagttgcgaccggtgatggctcatttgaggttgaataa

SEQ ID NO: 151972 - DNA, 957 bp, Enterobacter cloacae
atgcgcatttttatcgacgatggttcaactaatatcaaaatgttgtgggaagagggtggtaagaccttcactcacatcagccctaacagcttcaagcgaggatggtcggcaacgttcggttcaggaaaaccgttcaactatttagttgatggggagaagtattcctttgatctgattacgccggacgttctgcctacaaacaatgttgaatggcagtacagcccgttaaatgccctggccatacaccacgcactacagacaagcggcatagagccacaagatgtagaggttattgttaccttgccactggctgagtattacgacgaggatgctcagtaccgcctggataacattgagcgtaaaaagaagagtgtcatgcgctctgtggaactgaataaggggagcggcttcaacatcaccaaagttaaggtgctcccggagtctattcctgctggcgttagcctctgcgcggatctcaaaccgtctcattcagctttgatcgtagacttgggagggaccacgctcgatgtctcgatggtggccggtcaaatgacttcagtatcccgcgtctatggcgactcacggctaggagtatcattagtaactgatgccgttaaactggccctggctaaggcggaaacagcaacgtccagctacaacgtagaccagatcattattaaccgtaatgacgcggaatttttggccgaaaacattaacgaccctgcagccattgattttgtcaaaaaagagatcacgtccagcatcgagcgtctttgcaaacgcgtgaatgatgttattagcagtttcaaagggtattctcatgttattgtaattggaggtggcgcaccgctagtggctgactctatccgtgatcatgttgctatccgtgatgatcgcttttttgtggccgacgaacctcaatttgctctcgttcgtggccttaaactactcggttaa

SEQ ID NO: 151973 - DNA, 381 bp, Enterobacter cloacae
atgtcccaggaccgcagaaaggtacttctgtatcttcgccggactaaaatcgccaacgagcgttttgttgatgaacgattagaatcatatcctaatcgtgttcgcggcgatgttgctcggactgcgttgctggccggttttgcattagctgaaatcgatagccggttgcctggcattctcgctgccacactcggcgacgagacaaagggtgaaaccatacgcgctatattggcgtcattcttagaacttcagtcaccatcagctgagccagccgtaaagccaaccgaagaaacgcggttgcccggggaaacaagcaagggaaatcctgacgagactgataattcagcgatcaagcggttttccagccagttccctgaataa

SEQ ID NO: 151974 - DNA, 927 bp, Enterobacter cloacae
atggcggtgccggtaatgagatggataggcaagcgtatagatgatgctattcgcgaggctagccctctcaagagcaccgttacacaccttcgcgtcgttcgcgcgccggaagagtttgagcgcccgatcttcaaatgggctggtggcaagttttccgtaatggaagtgttgaatgagcacttgccgcacgggaaacgtttgatcgagccatttgtcggcggcggctcggtctttaccaatgcgggctataaacagaatctgcttaatgatgttaacggccacctaatcaatttctataaggtattacagcgtgaggggcatgctcttataaccctcgcccatcattacttcgagaactacaataccgccgattcatttcttcgaatacgtaggttgttcaatgagaaagctttagacgactgtcatttagccgctgcgttcttgtaccttaaccgtcacgcattcaacggccttgtgcgctataacctgtccggagaattcaatgttggttacggcaaatataaagcgcctcgcttcccacttgaagagatggagcagttccttggggcggcaaacataagcgagtttgtcactggcgacttcgctggcgtgatcacgcaggccggtgaaggcgatgttattttttgtgaccctccatacgagcccatgccgggcaagaatggtttcacgagctattctggccacagctttggttttgacgaacaggaaagattggtttcactgctggtggcagctaataagcgaggagcaaaggtgcttatcacgaacagcggcgcgcctaaaatacgggagttgtaccgcaataacggttttgacctccaccagctgcaggctcggcgttcggtgtcgtgtaaatccggtagccgggagatggccagtgatatcctggctaaacttggatgctaa

SEQ ID NO: 151975 - DNA, 486 bp, Enterobacter cloacae
atgttatcgatgaaacacgtattaaatctggccaccagccagcaatctcggtgtgggaaaatgttagcggagtcctcagctccacagataacgcattcggctgtttccttgccggattggctggtgaagatgatccatttgaaccaggtcaacgacctgcagacggaaaatccagtgctttttggacatggagcaaaaaagccagtcaacattttccaaagtggccaaagtctggttgtgttattgggcgaaagcgcaaagtggcctggcgaaccctcgatgcccaatacttcggcgtggcccaacaacgcaaccgtgtcttcgttgtctcaagtgctcgaacagacatcgatccatccgaaatactatttgagcgcgaaggcgagcgcagggatactccgccgggccggagcgcgcggcagaactctgccgacaatgctacgcatggcactggactcagttgcgaagtcgaaaaaaaccatctga

SEQ ID NO: 151976 - DNA, 906 bp, Enterobacter cloacae
atgaaatctatagcattcaaaggcattctgatttaccgcctctcgcgtgacgttgagctacagactgcagccgttaacgaatcgctgaaaagcttcctttttaaaccttgtgggtcacaggatatggccactgctgggtggatagaaacaatcggggataatctaacgtatgaaagcgggcaatatcttcttatgactatgcaacgtgaggaaaaaatcattcctacgcatgtcattaaggacgaattgaataaaaaaattacgaagcttgaaatcgaacagggacgcaagcttaagaagactgagaaggactcattgaaggatgaggtattacactcacttctcccccgagccttcacccgaaaatcgcgcaatcgcctgatagtggaccgtaaagaaggactcgtctttgttgaaggcaatagcgctcgtaaggctgaagatatgctggcgttgctgcgtaagtccctaggaagtctgccggtcgttccattcacccccgctgaaccagtagagttgaccatcaccgaatggattcgaagcggtttcccgcgcggttttactgccggtacagacgtaatgctcaaagccattttggaagatggcggcgctgtgcgctgtaagaaacaggatctgcattctgaggaagtcctgacccatatcgacgcaggaaaggtagctactgccgtcggtttaaactggtccgatcgtgcctcattccgcctgtgcgatgacatgacaatcaaaggacttagcttcaccgacgaactgtacgatcagaacgacgacatcgaccgtgaagatgtgcttcaaagatttgacgctgacttcattctttttactgccgagttatctgcgctgtttactgcactggtggaggtcgttggtggcgaagcacaacgctaa

SEQ ID NO: 151977 - DNA, 633 bp, Enterobacter cloacae
atgaaacgccgcgccgttatcgttggcacgaagcaccctggcggtctgatgcgcgcgcaagttcgcgtgttgcctgactggaacggggtggacgaaagtgatctcccctgggccgaataccagttgccaatcggaaatgcctttgtacctaccctggcgggcgatgctgtttgggttgagtttccatacaccgatgcaaatggccagatggatactcgtcgcccgctcattgtaggcgctgcgcaggacgccccgggcggcgtccctaatgtggctgcagaagcttcaggccaagggactccctggacgcctgaagagatcgaaggctcccccagccgccctgccctctcttccactgcggattttgttatccaccgcaacaacattctggaactgcgatcagctggtggaggttacgagatcgctaacactgcagctggtagccgtatcggcatgagtgaagacggtgtgccatacattatcggccccgctggattatttattcacgtgggcggcgacgcgaaagtagttgctggggggaatgtagacatcgaagctggtggagacctgaatttcaaggttaagggtgttttttcagccttggccaaaagctttagcttcaagaaggcgtag

SEQ ID NO: 151978 - DNA, 981 bp, Enterobacter cloacae
atggcgcaagaactccaccaactgtttctgcaatccgtcatgatcaacgacaacaaggtaccgcgtgagtggattgttgcaaccgtatatgtcgagaaagcaagcctcaaagcccctctgctgaaaatcgaagtgcgtgatgctactggtaccgttgttgatgactggaaagcgaaatacggagcagcattaatcgctgaaatgggtgatccacagggtgaggaaactgcttttaagaccgcgtttttcattacttctgcaacccaatcatctgacattgtgacgataatagcggtgagcgaagacgtccggcgatttaagattccttcccctcgcactaatctgcatacgaacaaaacaccgaacgaaatcttcaaaatctacataggtgcgttgaaactggcgaccggcacgcaaaagcgctctgttacgtaccatcttaatgccggtcaaaagccatctaagatgctggcagagatggcccgtgataaaggttcattatgttggacgtgccggggggaattcttcttctcatccctcgcggacctgatgaagcagaaaccagcgttcacttatgaggctaataacccaaaagcagaacgtacgatatcgaagataagctttatcaaccaggatcatgcagcaaccgccaacaaggaataccggttcgtcgggtattcaatgacagatgggtatatcgagtcgggagatccgtcgctgccggtacgctacatctctgacgctgatatggaaacgctaagaaacatgcagctcacgctcgtaccaaagttggatatagaggtacaggggaatcctgctattcggcctggcatgctcattgaaatccttattcatcgctatgacgaagaaaaccagctgaatgaatcactaccccagaaaatgatcgtcaaaaacgtagcgcactttgaggaccgcgtggggtacaccacgcgcatgattttaggagtaccaaatcaatga

SEQ ID NO: 151979 - DNA, 768 bp, Enterobacter cloacae
atgagtgataacagcaagctcctatccagaaccggtgagtggaaggtcagcaaaacaggtaagcagcagaccacgggatttgacgcggtagacgatgctctggccactctgatcagcaaagtattcgataatgtgctgctggtggaaccacgcccggttgaaaaacgttttcagtcattcctatcacgcccagctgcggaacggatttacgtgggccgcttcgatagcgtaatagaatgccttaaagctatccgccgtgctaatgcagggcaagggagaaagcctgatgatctgcagttaaaccgggacgcgttaccgctcatcaatatctctcgctcgatggatatcaactatgacaacaccgatcagcaggtagatcgccgtatcggttcatcatttagcgatcccgatgatggcaggccactggccagcctggaattcatgcaggcgatcatcacctatgacgtcactatcatggccaccgataaagacactctagggctgatgtgtaactccctgggcgcaagcattcgactattaatgtctactcagttcgaagccaatacaaagcttgtccgcgtgccagtaccgctgatctgttctttgcaagacgcaaaagaaataggattctctgatgtctctgctccgctggccgaagaacgtatttacgctgctcaagcaccaatctcagtgctggctgatgtcattaccgcctttgaattagatgccacccgggtagtgacagaaacgacgctggcagtggggtaa

SEQ ID NO: 151980 - DNA, 795 bp, Enterobacter cloacae
atgggccgttttgatgcgtggctaaccgacgagttaagccagaagcaggaggaaccagcaaatgacagcacccaggcagaaacgacaacgccgacagaagaaaatacgggaagtgtctcagaagcaaagcctgagcactccatctcgttcagcaacctggaagcgtccacctcctccatgggtgttgctcctgatgataatggtgatctcgctggtggttatggcgaaacagatgacaatgagcctgatgtagcatctcttcccgcttctctggcagctcgtgagcaaaataccaaactcaagacccgattcaatggtcacaagcagtttaatgatcagatccgtgcagactggatgctggttattgaaagcagtcctgactcattccaggcgcttatttatcgccctgatgttgggacgtatggcgttatagacgacgaaagcggcacggagtccttcaccgaaatcgacaataaccaacggccgctgacataccaggaacctgacatcgtgtacgtgctggataacccggatggacgcgagtctttccgcgcagttgatggtgatggtgaacaggacggattaacggatgacgttctggtgttgcgtatagcagctaataacgtgcccgtaggctccattctggaatggaatgaggaaatggctaacggtaccgcccggcgctggtggtatgtgcatcgtatcttcagctatggaactcagcacgtaggatcgctgtattactgtatcccggcccgcaatttcgacagcacgaatgggggtcacgtccaatga

SEQ ID NO: 151981 - DNA, 738 bp, Enterobacter cloacae
atgtcagacgaagtagcaaagccagggaatgaagaggctcttagtccaaaccagtctctgtcagaggcaataaaagataaaattttcaataaaatatatttttatattctagtttctttcctgttggtaaactggcaggagatattaattctcttcaaatcaggtgaagatattctttatacattgtctattatcttcacaagccaaatgtggttcggctacatgctttcgccttggtttgcacatttcggcttgccaatcctatttggcatccttgcatcagctttaactccttttgtaacatattggatttcaagggttacagcaaaaaggtttgctaaaattaggcgcgcagatagaaaagccgatcttgaggttgaagatgaatttcaagacttgcgaatcaagcttgttacaaaaacaaataaggcggaaagtcttttaaatagaatcaatctattagaaatgcaaaacgcctctatatcagagaaaaacatccaacttcaggagcatagaaaacagttgttttttggcattaaagcattggttgattattatgaaacaaaaggggcgttgaaaactccagaagattttgcggaatttctcacgttggttgagaaaaccgatttttacaaagatcaaacaataataggtagggtaaataaacttcttgaagacattaagaatatttactttgaagagccagaaggtgaaataactacaactgcaaacgaataa

SEQ ID NO: 151982 - DNA, 1200 bp, Enterobacter cloacae
atggctgaattcctcaaaaatgacaatggccgctatatcactgatgggctatcaccaaaggcattcaataaggtattcgacctgatacgcaaggagcagacgcgcaagcgtcgctctgcccatcggacattaacccctggcaggctcaagaaccggtctattgacgacatcctgaagctggggaaaaagaaagaaggcacgtttttcacactcgatgacctgaagggatttgaaaagcagcgtggcaagacgcgggagaagttcgataataaaaccgccggtatcacttatgcgcagctggtggcttccagccaggccatagatattaagcgtgccaataacgctgtagacgacggctcaggcattaagcgtgcggttccgctgtctctcaagcacaatgtgatcaatatccgcgttgaggcttctgataaatcggcccaccagcaccacttggtcaagttccgttttgaggaatgggatcagctggtggaggacatcgcagaagacgagaaggccgggatcaaggttacgaaggctctttgcgctggtcgagtgtcgttcgactgcgattgcggccgtcaccaatattggtatcgctatattgccacggcgggtaatttcgcgctggcaccgccgaaagagtacgcctaccccaaaattaaaaaccccaagttacagggtgtagcgtgtaagcatgttatccactccctcacgcggttgcagtcgtccagctggcaactgagtattgcccgtgccatgcagaaagcggcgacacagattgcctttggcgatgataagcgccgcaccacacagcacttcagcaaaacagatgagaaagaatttagccgtaaccgtaacgccaaaacgaacgttgccgcggctaagcgcgagtgggatatctaccaaaagcgccaggccgcgctgagctcgaagcttgctaagggctctgggaagatagaacagctccggacgcagctcaccaaagccagaaaactctctgatactcagaaaaagcgtgccgccgagaaggaggcagcattgcagaaagagaaagaaaagaacaagatgctcaagcagcaattagcagatcagttcgcactgaagaagcagtcgtttattgacgctctagtgatggctggaacagcaccgacgcaagcggaaaagatgtttatggaatatattaaaaaaggtggcgaatga

SEQ ID NO: 151983 - DNA, 330 bp, Enterobacter cloacae
gtgagctatagccgactcgatgaccgatatgttgaagatgacgttctccgcgccctactccaccaggagctgattgcccgcgtcagccaacgtcgatctgacaattttgagtacacgataaagattgatgaaacataccgatctgatctggcagcctaccgtgcctatggaaatgcagacctacgctgggtattccgcgtgctagtgggtcatgaatctgaagtggaagaaatgcctgcgggtaaaacgctcattcttcccgatcaggcatggatacgtaaccgcatccgtgacttcgcaggcaacgcgccggagttaagcaatggctga

SEQ ID NO: 151984 - DNA, 654 bp, Enterobacter cloacae
atggaacagatcgcgatatttagccttaccaccagcaaaccacagctgatgacggcagtgtttaaagaaggtgcgctgctgattaacgaagtaaagccgttggctatctcagcgcgcgagcagaaagaaaaaattcctgcggcgatacgtaagttaagagaaaaaagattcaaggtgctggtggatgaaatcactcccacagtttcagcgggcaccggtgccagccaggtaacgcttaaaacacggcatttagacggaagagcggcaatcatcgttggcatggagcgttacagggagttgaagcttcagcgcatgctctcgctaccaaaaggactcaaaggctcatttgaaataccggattccatcgtcgatatcgaatttaatggcaatggggaagaggtctatcgcgtcaactggcaagatatccgtccagaacacatcctgatgatcctttgctgcttcgcgaccgtgtatcacaacgtggccagcgcggattacgtaagccagatgacaggtgtaaccattgaacaagaagagcctgggctggtcgcttccttcttatccctcattggccatgaacagaaaaaggccgccacatcgcagccaaaatcacttgccggccgacgcatagatgacgatacgtacatcctataa

SEQ ID NO: 151985 - DNA, 834 bp, Enterobacter cloacae
atgagaataaaacttcttgttgcgctttctgcatcagtgctttttggtgcattttcggctatctcctttgcgcaagcgttaccggcaaacccgcacgccgggaggctggttctcaacaaaatccccggcaactatacacagtctcagattctggaattctgttcgtcaaatgacgtaccgttaaagccggttgggccgctgcagggctctaatgaattctgcgtaatggcgttctccgctcacttaacggataaggcgatcgccgcgatcggctattccactcaggacaccatttcaaagattgctaaggactacggtatctcataccagcgcgcgggactgggtgatgtccttctgccattcagtggactggcgtcgttccccgaggggcaggattttcttgttagccagagcatgatgcgcaccggcgacaggtcattatttaataaaacgcctgctattgagggtcacgtcgccgctgggggaagtgttcaggcaactgcgaacctggccgttgaatgcggtaaatacagcatcaaaatataccctggcgctatcttccttaacggcaacaaaatggactatcccaagaagcaaactgaatccgatgtaagtaattacttcttccaagagttcgctgaaatgggggggacctatacgctttattctctcgatattcctgctcggggtggaatgacattatctcaccaatggcaagatgccgacggcaatgcgttgcgtgatgttaaaacggagaagtgtggcaccttcaaatcgttctccggggaacaacccaacaagcaatctaccctagagcgtcaacaagcggggtaa

SEQ ID NO: 151986 - DNA, 177 bp, Enterobacter cloacae
atggttgttagatatctcaagttcgacattaagaacagcactggtggctgctacgactggacggctacgcttggcaaagatcacgtgtccggtgcgctgaatgaagtgaagcagaaagttatggcctatgcctgcaaattatcgcagcgccctacccgaaagagaaaggccgcttga

SEQ ID NO: 151987 - DNA, 186 bp, Enterobacter cloacae
atgaatatcttcgcaaatacccaatcggacaaacgtccgccgacctggatcttcgccgcgcagccgcgcatgcagaaagagattaagccccagacctttcatatcgaagctgaaactgagcgtgaagcgcgccgcttgctggcccctactcacatctgttttttcgcgggctgtattcgtcactga

SEQ ID NO: 151988 - DNA, 612 bp, Enterobacter cloacae
atggcagagcaaacgcagtgggaaaaacagagagaaaagcagcgcgcgaaaatgaaactcaagcttgcagatcctgcctggctggcacagcaacaagaaaaaaagcgagccgctgcagatagagctttgaagaaacacagggagaaaattgccagcccggaatacagggataagtgtcgggagaagttgcacaaggcacgggagaaagccagggaaaaggcgtccattcagacgcaagctatgtcgtccctgcgtcgttcttcttcgcgaggtctgaaaggtcgttcgcccacggcagaggagaagcgctaccaggaagcgatcgcaaagcttccatgtgctgcatgtgcgctgcacggagtatatagcccagttattgtcctacaccatattgatggccgtaccgcgccagacgcacataagaaagtgctccctctatgcaattggcatcaccagtacgccgcgccaatagagatgaggcacaaacacccttggctcgtcccggttcatgcagatgggattaccggcggcaagagtgagtttacccgccttaatgcttctgaggctgcattgctggctattgtttatgaacaatgcaattttctaacataa

SEQ ID NO: 151989 - DNA, 153 bp, Enterobacter cloacae
atgctcatagcaatccatgccttcctaaacagtctcgcaggagcctcgctgtatcagctggagttgatctatagcctgtctgcggttgaggcgtgttttgagctgtatgtattggtcatggccgcgctcgcaattaaaggaaaactacgatga

SEQ ID NO: 151990 - DNA, 243 bp, Enterobacter cloacae
atgaacacccagcaaacagttttaaccacgaacttagttagtcgcgttgaaggtgaggtggcttgtatctgccctcactgcaagcgaccggccttcttatccgcctcccgactcaatgatgttcgcggcgaacagttcaaacatagtgatgtggttaatctcaggacacgggcacgttgcaatggggtttttgaggttagcagcacggcaaaatacgacggttctctcttcaacgttgcttaa

SEQ ID NO: 151991 - DNA, 294 bp, Enterobacter cloacae
atgtccgacctccagttagccgttaagggggtttattttgacgcaatgcaaacaggggagaaggtggaagaataccgcctggttagcccttactggattaatcggttgatgtcgggatttaaacaacggaagtatgaccgcctgatcattacccggggctacccaaagcgtgatgacctcagcaagcggattgttgttccgtataacggttatgaaattaaggtcatcacacatgagcatttcggccccgacccggtgaaagtctttgcgattaaggtaaacctacaaccttaa

SEQ ID NO: 151992 - DNA, 996 bp, Enterobacter cloacae
atgagtgcaatcatcacccccttcgtacaaaaagaaaccggcgttgctgtgttctctgtggactcagccaccagcaacatgatcaagagcgctgaacggtttctgttaaccccattgccaaaagagcagggaaaagacactcctgacgggtttgtcgatctgaactactcgctggtggccaatgaaacgctaaagccattttttgaaagtgaacgcgtattcgactcccttggcggtcaaccctctgttatggactgggtgcaacgcagtgtgcatacctgccaggcagaaagtcgggaggattgtgataaccaactaactacgcattttcacaacggctctgctgtgcgtttgtgctggtatcacgacaatgaatatttgatgcggggctataaccgtctcaatgatgtttttcagcggaatcgcgccaattggatcatgtcatgggcgaacagcgaaatgaggctggagcccggccgtgacattagcctcatcgaattaacgttttgggcactgcgtcgcggattcaaagaccagctaccccaagaggctggacgcatcgccctctgcaagccagtagaagagttcacgacaggcaccatgcgtgaatccgatatcgtttggacctatggagtcaatgagctggtggagcagctggcggacaagattacagaaattgacgttgatgaagaatccggcttgctctacatggccagaccaaaaatccagttgggaaaaagcgcagcctatcgccggtttatcgtctcccgcccctgtgtaggttgctctggtgaggttaatcgccccttcatgtaccgcgcacgcggtttaaacgaacacgaccgttggtgtgtgcccctttgtgataaatgcgcccacgacgccgctcaggacgtcaggggatgggaagccgcacacggcaagcgtctctatgttctcgctaaccagatattcgactttgccatcgagcatggcgtgatcaacttcaataactga

SEQ ID NO: 151993 - DNA, 639 bp, Enterobacter cloacae
atgcaccagcgtttttacatgatgtgcttgcgtgaaactgtgggcacgaatgcttcattccatcgcaaagatggccatggctacagtagcgatatcgatgccgcccatgtctacacactgagcgaagcgcaaaacaactgggagaaagggaggagtatcgatctgcctatctcagctgagtgcgtagatgctctggccgtttggcacgtagaccaccagctaattccacatgagacggtggaagaagagggctgtagtcaatacgtggcctttcttaaaggggagtgggacggaaatgatgtgtactggcttgcaggtaccgagcggcctactaccgatttcagcaaagcctatatccatccgttcccggtgacatcgagtgaaggagtggtatggcttccttatcatctcgttgcggcagtaaaaagacgcactttcaatatccacctcttggaccgccgcaagatgattcaggctccaggcttgcgcatgcccaaatggctgaagcttcaaaaacgtcggcaccagaattcatccggcaaggttcgttggaattgccccagctgcggccgtatctcctggcaattgaatccctatgactttgacggttgctcaaacctcagctgcagggggaagtga

SEQ ID NO: 151994 - DNA, 255 bp, Enterobacter cloacae
atgagcactattaccagcgaattcaccatagagcagataaaggcgctaatttcagaggctgaagaatgggctgaaatttacgaacatccgattcacgataagcctcaaagggatttcttcgaaggcatggcgcgagcaatgaccgcttatcttgcggtattaaccaccgagcctgcgaaatgtgggcatatcgatcttgattgcgatgacggcaaggctgtttgtctgcattgcggcaaaacgtgggaggtctaa

SEQ ID NO: 151995 - DNA, 996 bp, Enterobacter cloacae
atggaatttaccagagaacaattaacgaaaatcatcgaaagcgcggaagtcgttattactgcattggatggtacgaatgaagaccttcatccaggcaataacaaagggatggtggaagcttgggaccatttgaatgatgttgcggccccgccgaaagttgtgaaggagctggcgcgtattgcgatggcagcaacagttgagcccctgtatcaataccgaattcgaaatggctacaacggacaggtaacagagtggcaaaccattagacgtgaccaggttgattttgttttgaaagctcagccgcataatactgagtttcaaattatcgccccgccagctccgattcctgatgtttccgccgtcgcccgcgcggcgctggattacatcgatgcacttccggacgaagtggtagccaagcttcctgcaatgcctggtttcgatcgagattgggctgaagagattctttccacggtcgccgcaccggcgcagagaacgctagccattgcgaacgagacgatcgactttgaacgcctgtgtgaaatcgcagaagaggacaaaggaagcgacgtggcgtctgaatcttcaataatggcgcgcatgctaattggcgtggccatgaacagcgagccggtggcgtatactgatgcagatgaattgcgtttcccgcacgccaccagcgacatgtggcccgcacctcttgggcacggtagggatgttcctctatacactgtacagcagcttaacgatagggaaagggctgagctcacgtcatatcgttggctggtggagcgccttgaggcagcgctccggcctgactgtcccgcttttgatgctgcatgccgcgcattatgggaacgtgaaccacacaggattttggaaaaggccggttacccgattgattacgactctcagccaccagcgattaaagctggcttaaagcggcaggtgttaacggttttaaggaccgtggaaaaggaggtgaggggtgaaggctga

SEQ ID NO: 151996 - DNA, 192 bp, Enterobacter cloacae
gtgaaggctgaaatatccatcgttcgtccgggcgcatgcgatgaccatgagatcaggttgattatccggctggcacgcgggaaaacgatcactgccatcatgacgccggaaaacctggcattagcgctgacagggaaatcagacctaccggcagaaatttccctacgtaatgtggatatagtggtgaagtga

SEQ ID NO: 151997 - DNA, 255 bp, Enterobacter cloacae
atgggtaaggatctgaaatatgaagttattccgcgagggactcatatcccttacatcacaccgggaaaatggaccttcatacagcgcaaacgtgaatatgggggaggctggtggttcgggagggcttatgacgatcactttcagcttgagtttgaacggccgacctcattgggtgaaggtattgactatataaatgcctacgaaaaagtaagcaaactacctgactgggatgatgattttaatttggagggttag

SEQ ID NO: 151998 - DNA, 312 bp, Enterobacter cloacae
atgggatttccttctcctgcaactgattacgcagagtctaggttaaccatagataggatctgccagatagacagtaactgtgttgttattgagacaacgaccggttacgcagtgattaaccggtcaatgaaggcaaagcagggtgatatggtgctgatctcgatgttcgggcgaaacctatttgccagggtccatggagcgaccttgcgagaaaacgacgggaaaataatagcgggtgaggagctcaatgaagttcatgttgagggcgtagtgaccttcacaattcacagaactccaagtacccgcacttag

SEQ ID NO: 151999 - DNA, 423 bp, Enterobacter cloacae
atgaaagtgaactatgtgaggaagagcaccggtacgcgaacgacgatcgttattcccgatcatctttgccagctctggttggccacaactccctccgacgcgataacacgggatacgcaacgcattaaagagcgtctggagttacttgacgaaccgggagagggagaaccttttcaacgcctggctgagtcggcgctggtggccgacattcaagcgtaccaagcccggttgcttgcggacggtgagaacatgaaagatcgcattattgatgccctcctcccgtggcttcagggggccgtcgagccaacagcgaccgctgtagaggtgttgaaggcgatcgagcggtttaaatcggtcccttggtcaataaccgaatcgtttgagagcctacaagaacaacgctacgccgaccaaaaggactaa

SEQ ID NO: 152000 - DNA, 354 bp, Enterobacter cloacae
atgaaaccgatactcaacaaagagatcaccacacttgccgagctggtggccacaactgaaaatcttgagccaacagacccgaaattactcgcggcgattaacgaagtgcctgctgcggcaaacactgacataacctctccactgcggattatttccgattacatgctgcgcttcctcagcaacaacaaggatgcaaaattgtatgaggcaaaagatcggctcgaacacaagatcatccagtttacctttgatggatacgatgagcagtgcttacgacaagcactctccaccgccaccagctgccacacacgggaagcgttcgccagcgccctcgaattggaggcaatccaatga

SEQ ID NO: 152001 - DNA, 456 bp, Enterobacter cloacae
atgaccgtatatcgcaactatgccacccgcacgcaagccgttactgcgttgaataagctgccgctgggagagtccattctgttagtgccgtacaaccctggcgcgtatcagcaggagtctggaagtcttaaagctgtagcttgtaagcagcgtattaaaattgagctgaaaaaggtgctgctggtggttgaggacgaaatgccgcagtccttcttgcgtgtgaggaaggtcgccggggagccagttccgctgaccgaaaaagagcaacgcaccgccctgcgtgatgaagctgccgcgctgctggagcaggctgaagcgctgttaactgagctaactgacggatacaccgaagagaaggacggcacattcagcgcctgccacccgcataatggctttgctagcgtgattcgtcagatctccagcctgcgtaaaccactggcgagggcgaaggtatga

SEQ ID NO: 152002 - DNA, 816 bp, Enterobacter cloacae
atgacacttcttaagccgatcacgcacgcacagatcatgacgctgcgccgcctgggctctggagtgcgtttctcgctccgtggtgatggcaagaaggtgatagaacgccgggggcaagccttggctcaccatgaccatattaacgtctccagcctcataataatggcttgctcggcgacaaagggcagggaggcggccccggctatggacctctataaaggagttatgtattcaacattccgcgcgaacgtacccgcaacacatcctgcaattgtcatcttgtcggcaaagcacggcttcattgaagctgaccgtgttatcgaaccttatgaacagtgcatgacagaagcgcgtgcagatgaaatgattgcgaagttgcctgatcttgactcaataagatggccaactggcgttcactcaatactgctggctggtggcaaaacctatcagcgagtgatgcgagcagcgattaaacgccgtattgaacttggcttgctggataacggcatcattatcgaacaaacgagtggtggcattggctatcaacgggcgcagctaggcgcttatctgcgtagcctgcctaactccaacgtgaaccatgataaagtaaccgcggacactacaatgcacataaaggggagggccatgagtaaccaactcgacgctccggcagagcaggacatagcagctgaaggctgcaatcccaaagagggattgatcatcaacggcttgggccagaaacctggtaatggtaaatcggtaccgtttcagatgcaggaaatgagcgaccgggcgacggctgaaggacaggagtaa

SEQ ID NO: 152003 - DNA, 465 bp, Enterobacter cloacae
atgttagatctacgaagttacgaaagccagctagatgatccagcctggcgcaaacttcacatatccgggccggtcgatgaattgaaagctgtggccaatgttgcccgattaatttttatcgccatactggaagactgccaacctggggttagcactgaggggacttgtgcttactcaactgtcctcgtgaagatgatgctggaaagccgcacaggatacaaagtcacccagaaaggcggcgatgggcaaggcgacggcggttatttcgatgctgctggtggtcacggccattactggcttgaggttgatacggctgcaggcgcatatgttgtggacattactgcagatcagtttggtgccgatcccgtggtggtagtgcccgccagcaaccctcaatacgtaccaggtgatcagcagctggtggatgagcaatttattggattcatccagggcattgtcagttga

SEQ ID NO: 152004 - DNA, 747 bp, Enterobacter cloacae
atgaaagaaaacacctccaatcattaccttttgcgcaacggattactggttgaaataggcgcagataagtccttcccgttcatcactattgaacgcgccgtaatgagctttttcggttacagggaagaggaagatcatgagaatggcgtcgccgtctggtcagaagtgggcggcggcgggcgcaattacattactgctcgcagagacgatatgacgaacgcagagctgatcgagcacgcgcaatctttcggctgcagatcgttgagtataatgaccgactatggcatcgctcaggatcttatcaatgccctgaaccttcacattagccccataattttccaaaagggctcactggctgggtgctggcgtgtagagcgtttatcttcctatgacccacttaataaagagcgtaacggcatactcagcggcgtgagtcagccggtggccacggaatcgccaaacctcctgcatgcggtgtatgcaacagcttgtcgggtaatggggttaggtaagcagatttttatccagttcccgaatggcccagatggagaagcagagttgctggcgtgtgactttgagctggtgggggagattgccgaatacattggccatagcctgttccatgccccttcgctcgatatgtacgccacattgggtacggcggaaaaaatccccccggatgttaaggcggccgccgttgaaaaagcgcgtttacagtgtctcgcggcgatcgctcacactgagtga

SEQ ID NO: 152005 - DNA, 666 bp, Enterobacter cloacae
atgacacataacgagcttaatgatatagcgcgccgctggcttcttcgagccgaatcagggcgtggcccgggctgtaagatcgctctcaatgaggtgggggccgtcggtgattcagagcgagctgacgcatggggctatcgctggggataccatggcggtagcgtgctggtggaagtgaaggtgtcacgttctgatttcctcagggacaaacacaaaccccatcggcaggcgggcgggctgggtgattaccgctactacatgtgcccggaggggatcataaacatcgcagaccttcctgaccgctgggggctgttgtgggtgaataagcgcgggcacgtaagactaatggcaggacatatctgttgtctggttggtaatagctggggcggtaatcgtgatctggcatgcttctgggcgcatgattccgataaggatgccgagcgcgggctgctgtcttatttacttcatcgggtaggtgatccggacgctcttttgcaagagcaacgctcatatctccgtgagaaccaccagcaggccaccaagatcaacgagctggaaaagctgcgccgcgaggattcccacaccatttaccgattacgtcggaaactggaggccgccggtattgacatgcctgaaacacggccagccaacatgctgggtttttaa

SEQ ID NO: 152006 - DNA, 642 bp, Enterobacter cloacae
atggttaatgtcactgtaagcaagaaaaagctctttcagatgcccaaattccttggccttaaggtggttcacgcttcgcaaatcattgacgttctgtcgtgtcccagctcggatcttgcacgaatcatgctccttgagcctgccgggatgtatgttgacgtagaaaaagagttcatagagttactatccgtaaaatctggaggatggcttatttccgatcgggctggctcgctttcatattgcccctcaaagcgattccatgacggtcattcactggttaaacaggagccctgctggggtgaactggcgcaatacgctatcaaccacactttaaccagtgctgaaaagatggactcgatatgcaactcaatatttggtggtcccagcgtaggtgaaactgtagctgctgaaattgatctcgaagcggccgatttctcagacgcccttatgtggcttaaagaagggaaaaaagtctctcgtaagggctggaatgctggtggccaacactgctggatggtgcatgcagctgatgattctccatatggagatcattttgcccttttgaacgcccaaaacatggtcgtcccctggcaaccatccgtaggggatgtattggcttgcgattgggtggttgttgcatga

SEQ ID NO: 152007 - DNA, 483 bp, Enterobacter cloacae
gtgatttatccaacactcaactgttacccatcctcttacccagagctatctaagcagttggtggcgttcttcattgatgcctctggtgaatgggtgcctccgtgcaatatctaccctttctttttggctgatggagagtttcgcgcccgcaatgagttacgcaacctctgccagcaaggaatcttgcgcaaggacgcgcgcggctatcagctggccatgcccgttgaagaagcccgggcgatttttgcttacaaagaaacggctactcagcggttgatgatggccgaaatactccataaaggctttgtttacgctcgtcagttccaactggcaggcaaggccgatgctacccagtttctacgcgccgcacgcgcgctggtggctcagggagtcatacagagtgatttggtgccagctccgcgtgtggggcacattaagcgccggatatacaccttcactgagaaggcgaagcggaatggttaa

SEQ ID NO: 152008 - DNA, 345 bp, Enterobacter cloacae
ttgcaggactcaattcagagcaccagccgcttcgaagttgacggcgttgttgtaacattcgccgctggaattaaacgccaaaagcccgtagtcgttttcggcatttataccggtcttgaagcggtccctgtattttctctcgataaagaatggcagaccattgaaggcgcgatccattacgtccagcatgtgtctgtcgtagctgccgaaaaattcctggcccactatcaggaacattaccaggctatgactgaacaggttaaccgcgtttttgcgcgcgagcataccggctttattgccccggacaccaacaagggacgattcccttcccgggggtgtaagtga

SEQ ID NO: 152009 - DNA, 1029 bp, Enterobacter cloacae
atgagtgatctaatcctaaaaagtgataacgctggcttccttcgaaatgtcggtagtcagcacaaagaggcagcgcaaaatctccttcattttctgcgcgaccaaggagcttactcaaagaacacgcttcgcgatctgcgcctggtctttgaagcatgggtgcgctggtgctctgcgcgcgggttgacttggtacccgatagatcctgaagctgtgagggaatatctactgcagctctataattccggccgcgcctcgaccacaacggacaaacattacgccatgctcaacatgtttcttgcacagtgtggccagccgtctctggccaccagcaaaagcgtatcacttctgatgaggaggatcaggcgtgaagcagtaacggaaaacaatgagcaaaccggccaggcggtaccgttgcattgggatgacctcaggctgcttgatgttttactttcccgttccggtcggctggtagacctccgcaaccgagcttttctttacgtagcatataactcactgctgcgaatgagtgaaatggcccgtattcgggtgcgtgatttagaaatgataggtgacactgtaacggttcatgtgggccacaccaaaacgagtgttacggctgcaggcatagagaagcgcttggcccgctgtaccacgtccgttcttgaagactggctcaaagcctctgggttgaccgaacatcccaatgccgttctctttccgccggtgcatcgctctaataaggcaaaagtaacagataagcctttgacggcaccggcgcttgaaaaaatatttagtgacgcatggcaacttgcgggcaagcgtgacgtagcggcaaataaaggtcgttataggacctggaccggacatagtgcacgtgtcggtgctgcaatggatatggcagataaacaagtttctatcgtcgaaataatgcgcgaaggcacctggagtaaaccggaaactctaatgcgttatttaagaaaatcttcaaagactgttagtgcaaacagcaagttaatggattcctaa

SEQ ID NO: 152010 - DNA, 1065 bp, Enterobacter cloacae
atgaagaaaactgcacttgaaaaggaataccgaaatttcatcgccgttgctgagcgctggcgggctattttggcggagcatgaagtgttccatgacaccaatggtaatggtgatgccttccgtttcattgctgtgacctcagacggtgcggttctggacgaagcgagagagtgtttacggaaatggcaggagtttgctgacttatgcctggcagaagagggcgcagcaacgcttgccatccctgaaccaactttcctaccagtaccatttattgtcgaggatacagcacaggccacccagatttatcatcgccgtgcgacgccttctactacacttacgcgcgagcagatcctgaaaaagtacgattccattatcaaaaaaggacgtgcttctccggtgctggcaccagtgattcgccctatgcttgccgagagaaaaatctttgaaaatgaacctgctggttcaaagtttcgcgttagaaaaacttcctttaccgaggcggtaatcggcactgcgaaatctaaaggtggagctcttactcgttaccgtgtcggctcccacggggcgctgatttttgcacaaataccgggcttacacgtaccagtagttgatcaatcggaacgccgtagcgcaacaatgtacgatgatgtgttgcctgtaccatgcgccccgcttggtgagtacaagttataccgagtcagtgatctcgatatggcacagcgcaccagcatgaccagatcgtacattcagaagtgcattgaggcccgcacagctaaattttctaagctggaagccgagcgtctgcgcgatgcaccaccagcgcttagacctgtcatggtggcaaagttcaagaatgcccgcgtgatgcttgaaaaggtgaacactatggacgctgaattgattgatgccattgcggccgccggtgatgatattggaaaaatcaaactccgcagcgcccgtgccctgtatggaaaagagatagaggcgcgtcatggcatctctttcgagaaggcacaaggcgaagcgaaggtttacacccctcgcgcggccaaacttaaaaaataa

SEQ ID NO: 152011 - DNA, 408 bp, Enterobacter cloacae
atgacgattcagcgtcgtgaagtctatctgcttgtaaaagaaacgtactctggcaaggtcacatacgttgaaggattgcagagtgtcagcaattactttttcgatgggcatgcacgagtaaatgatgatcctaatggtaaagcaacgcatgaagagttcatggacggcatgcggccagctcaggttttttacgtgcctagcaatacctctggaaaatggcaggctgctttccatagttttggctgctacccggaaatgggcgcgcctcaattggaattcatcatttttgtaggtgcatattctaacgaccacgatcgaacgctggagctgatgcgtgaagggatggaccgtgcctatgaagtgattgaaggcactcgccaattacgtgatggtgaattcacagactaa

SEQ ID NO: 152012 - DNA, 1509 bp, Enterobacter cloacae
atgtccggcgcaaggaagcttaagtgtgtcactaccgaccctcgctggcgcgatatggcggttaagtaccgctatgactatgcccgcgccgttgtagagctcttcgggatgatgccatcaccccagcagcaggaaatcattgaatccgttcagggcgtcggcagccgaacaacggtaacatccgggcatggtacgggtaagtcgtcgcttacggctatgctactactgatctatatgattctgtaccccgatgcccgtgtggttatcgtggccaacaaaatcgcacaggttaaaactggcgtattcaagtacgtgaaaacgtattgggccaatgccattaaacgtcacggatggctacaaaactactttgttttgtcggataccatgttctatgagcgctcgcgcaaaggtatctgggaagttctctgcaagggctaccgcctcggtaacgaagaagcgctggcaggtgagcacgcagcgcacttgttactaattctcgatgaagcctctggtatctccgacaaagcgatcggggtaatgaccggtgcactgacagagctcgataaccgcatgctgatgctgtcccagccgacacgtccaagcggttacttttacgattcacaccataccctcgcaaaaaacccggataatccaaacggtatatggacatccattgtcctcaattccgaagaatctcccttcgttaccacacagttcatcaagcaaaagctgttggagtacggcgggcgtgactctctcgaatacatggtcaaggtattgggtcagttcccgcgcgagattgctggttatctgctgggacgtgatgagtgcgatcgagctgctcgccgacgcgttctgctggaaaaaggttggggatgggtggcgaccgccgacgtcggcaatggacgcgataaatctgtcctcaacatacagaaggtatccgggcatcgggagaaacgacgtgtcgttagcttcaagatactggagatgccaggtactatggacccgctggcatttggggacttcattttcaatgagtgcacaccggataaatacccgaacataactattgccgtagatgctgacggcttcggttcggatacgtgtgcccagttggttcgccgcggcgctaatcctgtgcgcatacgctggggtaagcctatgtttgcgcagaaagataaggatcgcttcgtaaaccagcgtgcctacgcgaatattatggcccgtgacgcgattaagtcaggcagaatgcgcattgacgcgagtccgaaaacagctgagcaagcctcaaaaatcccatacatgatgaacgaggaagggcgtcttgtgatgatgcgtaaggagcacatgcgccaaaagctaaatatcaaatcccccgatcgctgggacacttactgcttcacctttatcgtggattacgtgcctgcagatgaagatgttgggggagagatggaagcattcagggaggaagcgctatccagtatggatgtggtagacctggatttgtaa

SEQ ID NO: 152013 - DNA, 1377 bp, Enterobacter cloacae
atgagcggcattagctgggatgagcaccgtgaaaggttcgcggcgcaacgtgcggacaccggaattactatcaaagagtacagcgagcaaaacggcctgagtttcaacacggccagaaaacacctgaacctgaaaaagaactcggcaatgaatgctgatcaggcaggggatcatttaggggatcattccgggaaaacggttaaaaaaacacgccatccaagagcaaataacaaacaaaatacggctaataataactcaaaacttacaaaaactgacaaattggcgggtgataaatcattccgtgcacccccaaaaaagcgcacatctgattccaagttacaatccaataaaaacaataggatagacaatggaagagccggatcattcgatgccaatgatccgcaaatgatccccgaaaaggtagctaaaaaagggatcaagaaaacggcgaaagcaacaaaggggcaaatgatccccttgcttggttctaacgtcgttgcattaccttccagcgaagctaccaaaaagatgctcgaacaggggccagagcaccatctgcgccttgtcattgagatggctaacgagtcagcgcttcgataccgggcagcggttgatcaggaggcagcgaggcttcaggaggaaatagatgatattcaacctggtgatgagatagagggcgtgcatccctcaattaagttgcgtgggttgttagaagattccgcttacttcatgaatgacttcaccagtcgcctggccgccatctatcagggcgaaagtaagctacagcagggtgcagagaagctcaggcaggctgcgcggcaacagcaattcaaagaggcagaagctcaagagaagctggggctagctcgtgagcagatggagatgaagcgcagggacttagagcaccgcataggggcagacgcacgcgcggctcgcgtcatcgccacagctctacgtatgcgtgagcgcgaggaactggatgatattggtgtcgctgaatatattgagcgtcaaggcgtatccgttccggcaatgttggccgcccaggctttacgagctattgccgctattgaaccaccagttgccgataacactgtagatgaagagcagcttgaaaaagacgcacaggcatatcatcagcagcagagagagcacccagaatggctagccaaccgccgtgctgaagtggcgaaagtggttgaagagttaggttgtggtgatatcgatgccaccggcgatcgcaaggccggtgagtttgacgccggtgatgaagatttggatctggacccgtcggccaccagcgacatttatgatgttccaaatgatgcgtatgacgatgatgaagagatagcgattgacccgccggaggaggtttaa

SEQ ID NO: 152014 - DNA, 393 bp, Enterobacter cloacae
atgggccagattagtagcgctgaaatagcagacatcatgttaaggcatggtgattttctcacggtgacggaagttacacgtcttgccgcatctgaataccccacactattagtcactcgcgatcgcgttactaacatcattcgtcacttcgctcgctccaaacgcgctcaatgtgagcgagaggagggggtttacccgcatcgctaccgtttgcacggcctttatggctatcagttcaaggtccgtggccggattcctgactacggcagcctaatggtggaaaacacgtcaaaagcgctggtggagagctcggagcgaaatcgccgggaagtggtcaatatggctaaccgtatctggaacagcgccgttcgctcacgtaaggccactgcatga

SEQ ID NO: 152015 - DNA, 615 bp, Enterobacter cloacae
atgaccggctttcggcatatctgcagtaaggggaatgacgtggcaaaagctgtagaaatggtgctatcggaacaggatcaggtgctcagtgatttccttggtcgccggtgggactggagcaatcaaaaacatgatttttacacagccctggtgcgtaaaaagttcagcgtagacactcagattgagggagcgcgcacaagggtgtcagttacggcatttgggttcactctatccgctgtagacgaagaaccatttaaggcattggcagaagctgcagtgagaacgatacgattccatgaagccaccacgaatggggatattcagctggccaaagagagcgttacgtttgccacagcttaccattggcttctccggggattggacataagacgggccaactggccgaaagggaaatatgtctcgctgatcatggggctggtgggggatcaaagcagcgtagcgagctttatgccggacgaattattccaagtggtatcaggtacgtccttaccaatgatgccacgactggtgatgactgatggcgaacagcaggcgcgatatgattggtgcgcgattggtgtcgacatcatggctactgattgggaggcattctga

SEQ ID NO: 152016 - DNA, 195 bp, Enterobacter cloacae
atgcaaagagctattttgagggtgttcgggctaggttcgataactctcataggtatcaccctgatggtcgctctgttcgccgagcctaacatggccacaggtaagacattgctctactacaacctgctcaatactgcgatctggtttgtcatagcagccttgtcacggaaaaatttgaacgtattgggtgtttag

SEQ ID NO: 152017 - DNA, 216 bp, Enterobacter cloacae
atgccgttcaccttctccaattcactccaccagcgtaaaggtaataaaacgcatcaggagcggcccgaatcgaactgtttgtggatctttgcagttcacacaaagaggatgacccgtaacagcccgaacctggcccacagatttatgactactgccagaccatcctctttgcgtgctgcggcgcttatggaacggcgcatcagtacaattttctaa

SEQ ID NO: 152018 - DNA, 1257 bp, Enterobacter cloacae
atgttacaaccaactgcagcgcaaaccaccaaagaagacatactcattgctgaaattgaatcaatgcgtagccagatagtccttatccagaaaaggactactggtgatgatctgactacccgactgtttgatacagctttaatgaccattgatagcctgttagagcgtttcgatgaaaggctgaacgcagaggctgaggattacaacgcccttgcggatcgtttcgaagctttccacgaaaaaacccgccaggcgatgaatacgctttccttggtccttaacgcgccggtagacatcgacactctcgaacaatctatttttgacctccgcaagatacatactgacacccttgagcaggtagcacttaagttcgaccagctgaaggctcgatccgtagcaaccgaaacagagcttaagcagtacaagaaagcttatccgacaactctcactgagcggatcgattctctcgaaaaggacaatcggagcctcaaaagggagcgccgcgagctaagagaagcgaatactcagctaaaccagaaattcataaaacaaacagcgaacttaacacaggcgaataagcgtttaaccctagcagaaaccaaagtcgaagagctgcgcgctcaatgccatcagatcggggaagagttaaatgtggccgccggatttggtacgactcctgaatcgttctcaatgatttttaatggccatgatgcagttggttatattcatacccatccatacggattgacggccaccagcgcacttaaaaccgaaatcctgacaatggccaacatccattatcagattcgcactaccgttcttctttcaatggatgtcctgccttccatctggggagtgccgatttatgttcgaatggatggttttgctgaagagtggaacaacgagatagacgaatgcttggccggtaagataatgacctacctcaaagatgcgtttccaaagctgcatgcacgtatcgttgcctctaaatcagcttcagtggacgagcttaagatgcgtcctgagactttggatgctatcagaaattcaaaatttgacacagtacatagcgtcgcttgtatcccgtcagctttccacgaacacatcccgtttatgcagggggagcagcgtagcgaagttattaatgcttgccgcgtttgggcggatcagtgggatagcgctaacggtggggtggagcaattatacgttgaagccaaaacgaagaaggctcccaagttcaacactgttagaaaatga

SEQ ID NO: 152019 - DNA, 303 bp, Enterobacter cloacae
atgacgcgattatattattgctcattgtcgttcgctgatgacggcggccgtgtgcaaagcactacaatgaaaacgccaactaaggttattacggacaaaatgctgcgagaaggacaaatggcactcggtatgagtgagaacgcagcgctacttgcggcctgttggctgggcaagatgactgataaagagtatgccgaaggggttaagcccatttcgaaggttcggattgcaaaatacgcgacgtatgcgctaacgccatttctgatagtggcactcgccgctgtcctagcgcgcttcttctga

SEQ ID NO: 152020 - DNA, 480 bp, Enterobacter cloacae
atggtagggaagcggcgaccagcgaggtccaaagcactaaagcgcctggaagagcgtgaatttctttcccctcatgccatcgctctgcgtttactggaaaagaatccagacctgattaagggcaacggtgaacattatgatcaagtgcgcgttttggattggctggaacgcaacatgaaagatgtttaccgctatacccatgcaacccccaatggtgggttaagaagcaaaattaccgcgattaagatggttgccgagggccagaagaagggctatccggaccttagcatagatcttgctcgcggtggctatcacggtatgcgaattgaaatgaaacatggttttaatcggttgacgacagagcagattgattggatgtcgcgtctttctgatgccgggtattactgttttgaagcccgtagtcctgaagaggctatagaggcgattaaagaatatgtcagtcttgatgagtggggttag

SEQ ID NO: 152021 - DNA, 258 bp, Enterobacter cloacae
atgtataaaaatcgtgcatttacgattgaagatgtaaaagcttacgctgagagcaagggctacaacctggaatttaagcgctatcacaaggtattcacccttactaataaaatgcagcccaaaaaatggggatggatcttctttcctcacactgaggagaagttggtcgcaaaggttaatgacctggatcaggctggctggcgagtggctgttgatttaaccatcgaacgcattgaaaagactattacggaagtttag

SEQ ID NO: 152022 - DNA, 438 bp, Enterobacter cloacae
atgaccacactgattgacactgttaaaccaactgaagcctacattgaagaaatcctgccacaggcgctggtggatcgtaaagaagaagaattcgttacgctgtacttagagaacatgtttaagcggatatcaaccaatccggtgctttaccacctatatggcccgtggtggccagcgctaaaaacaatgctattaactcgcgggctcactgatttagggcaaatcgttgatagtgatgtagctcagatttaccaaatgagccgaccggcgctaaccattttggctgcacaactctatgcagatgaacgttttgcatctaactcggtgaacaatccagttcacatgttagaaactgccagttatgctaacgacactgagccatatatttacacttcatacgatgagtcattagaaaagttcaagttaatgggggcgtga

SEQ ID NO: 152023 - DNA, 6879 bp, Enterobacter cloacae
ttggatcatttactcgaaacgattaacgatgccaaaagcgttgaccggcttatcgagatcgtcagtcgattacataaaccgcgcttaaaagccagtttcggcgtcactaaggttgatggcgttagtattcaaacaacccgccgcgccgcgaacagcgcagccgtagctcttcttcattcgcttcctcccggttttgatggcagtcaattgactgatgagcaaaggcagatacttgcaggctataccggggaaggtggccttaacgatggcgaaggcagccaatacgaatattacacacctcagtttatggctgagggcatctgggacttgttctctgattatgggattggtggcgggcatgtgctggaatcgtctgctggtaccggcattttccaggaaacaaaaaagcaaggcatggtaatgaccagtgccgaactctctcctatatctggccgaatcaatcagttgctgcacccggaagatgcggtgaatatcggtccattcgaagcgttagcggcaaaagacgctatgtacgatcatgctgtcggtaacgtacctttcggtgatggccgctctggggtggctggtcttgatccggcttatgcaaatgaaaagaacgtggggaactatttcgtactgcgcaccatcgataaggtgaagccaggcgggctcgtggtgctggtggtgcccaacggcatgacagatgggaataaatacaaaaagctacgcgataaagtcagtagaaaagcggaattcttgggtgcccatcgaatgccatctggcacgttctccgaatccggtaccgacacggttgttgacgtctgggtcttacgaaaacatccggaggaatttgccgagctcataattgacagcagcgatgcgcagttgcaatccgctaacgtgctttgggacactttcgtaaaagggaagtggtttatttcgccggaaggtagccgatttgtttatggcgatatggatcgcgccagcttccgtaatacgctggtggtcaagaaggacggcagggtttcaaacgagtcgatgaaaactgcgttgtcccgtcgttttgatagccgtatcgactgggattcactgggagtagtaacacttgcgtggcaaggagcaaagcccggtgataagcgcctagtcggagacgtctggcatgagtttgacggtatccactggcataaagattccaccacgagcaattcccgcctggacgcacaaaagtacggtgctggcagtttcggtgatctgcagaccgccttcaaatcagtgaagggtatcttgtcgctgtcttgggcgcaaatctctgccgttgcagcagattatccgcgtgctattgatgaagacgttagcgcgatgattcgctttgccaagaagcaacgagaaggtgatcgtgagcgaattatgcgaggcgctctaattgggcagttaataaacagggcgcttgatctacgcaacttgggtgtgagcagcgatgacgaattagccgatgctgcccggttgactgccgatgaagttgcgaagtacggccctccacatgcggtgaaattaggtgacattaccgatgccggtgcaaaaaactggatgacctttgcggggaacgtccagaaagacggtaccaactcggatctactggccggccgccttgatgttaccgaaggcgctgcgggtatcgatttcaccaagccagaacaggttgtagcgcatttattcagtgatgtggcactcatgccgatcacccttgagcacttccgcgaagtcttcgccggtgaattacctgcttcagacgaggacgcgctggagtatttggcgagattccccgatattgctctcgatgggtatggttgcttacttcctatcgggcgcgccaccagcggcgatatcactaccaaggtcgccgcgcttattgcttggcgtgacagtgccactggcgagcaaaaagccaacttcgaacgtcaattagctttgatcgaagaaaagcgtgaatttacaccgttaaataaggtgactgtaaatcttaacgcgcgctggctggatcgccgtctgattaaagaattcctcgcgacacagggttacgacgagtttaaatacacatcctcagatctcgaagttgaagacggaattctgatatccccggatgactacgaaggaaaagacggagtatttaccggctatcagatgcgtaccgttacaggccggacaggtaacgagttcaaaaaggctaacaacaaagacggattcctgaaccagctcgaaaactatctgaacggcgtcaaaccacgtggccagaacgccaatgaatacctcgataaaatcggccaactggaaacctcttttaatgactggttacgcacccacccgcaagctgatgagatagctcgcgattataacaatgccttcaatggttatattccgtttgcgcattccagcgcgcctttgggtctggaaggcattagtggtgaaaggctgccactgacgtatcagaacgaggaggtgcgccgcctttctgaagatgggcgtgggatcatggggttcggtaccgggctgggtaaaacaacgacagcgctagcgttggaagcatataacttcgagacgggccgcaccaaacgaacctgcattgtagtgcctaaggctgtttatcaaaactggtaccacgaagcgcgcagcttctacagtgctgaagcctttaacggcatgatgttcgtcggtttggatgaggtgttggatggtgagggtaaagcacttactgcgccggtgctcgatgaagatggtcagcctaaaataaatagcaaaggccagcagctgttccgcaacgtcgtcaaagagtcaagcagcgccactatcgcacagcggctcaacatcatcccgtcctccaacttgcgaatggttgtgatgactaaagagcagtttgcctcaattccgttacgtgatgacaccatagaaaaaaactcgcagcaggccgtttttaatgccgctgagatggggcgtttagatcttgcttctggcaagcaccgtgacgcgcaaaagaagaataaaatcaaggaccgtgcagctgataccggcacgaccaaaaagcaaaacgttccatattttgaagatatgaacttcgacagcgtaatcgctgatgagggacacaattaccgcaattcctttggtgccgggcgcgaagcaggccagcttgcatacttaccaagtccagctgtttccaaaatggcccgcgatatggccgttaaagctgcgtacatgatggatcgaaacaaagggcgtggtgttgtgatgcttaccgccactcccctggttaatagccctatcgatgctttcaacatgttgtcgaccgtcattccacaggccgattggctgaaaatggggatcattaccccggatgactttgtacgtgtgttcggtaagaccgagacggttcaggtacagaaaatctctggtgaagttgaagagaagcaagggctggtaggtttccagaaccttgatggcttgcgcggtattttccacagatggaccacgcttaaaacagctgcagatgttggcgctacggtaaaaataccggatatcgaagagcgcacgattcagatccctatgacgcaggctcagcaggaagcttatgaggaactgcgtaagcgtgcacaggaactcagtagccaaacagaaacgatagatgtcaaagctgcggacggcacgacaacccaaatgatgcgcatcaaggggccgaatgagaagccggacgattttatattctcgatcataagagatatggataaggtcgccattgatccggacctatacgccggtgccattacgttccagtttccgctggataatgagggggctgttaatgccatttcagcttcactccctgctgtagctggtggcaaagaggctgatgacgctgaagaggctgaagaagatgaggttggtggcctggtcagcacccgcaccagcaaggtggtcaaaaccgctgtaactacttaccctaatcacgttgaactgcgtgccagcatctcacttgagtcggatattctgaaggctatcgccgctgcgggcatctctatgcagctggtatcccacccggttccgccaaaatatgccgctctgattgagaacctccgggaggggctaacgcgtggtaaacagatcgtgtttatcgatgaaaaagcccagcatcagaaactgcgcagaatcattgcaggcgcgctgcagctgccggaagctgaaattggcattatcaacgcgacgaccgttagccaagccggtggagtgaagctgaaaaaggtaaagcgcccgagcgaaccgacggccaacaaagacggcgaatataaagacggagcctgggagtcgtattacagcaaattagcactgtacgaagattacgtatccgcaaaaaatgatgctggccttgaagggatggaagggatagctgcggattataacgagggacgcacccggatcattatctgcaataaaaaggctgaagtcggaataaacctgcatataggcacaacggacattcatcatctgacgcttccatggacgccagccagtattgatcagcgtaatggtcgaggtgctcgtgttggttcgcctcaggagaaggttaacgtccactactattgcgggaaaggtaccttcgatgatttccgccttgatacgctcaagcgcaagaaagactggatcaagatggtaatgacgtctgatctgtccgaagtgacgaacggagatgcagatgatgccgatgagcgagcggtaatgctggccgcaaacccggatgagcgccgagccattatggagcgccaggcccgcgagcgcgatgagcgcattaaagctaaagccgtccgagaggctaataacgcgctcgactcctatctaaaagcggccaacgccgccggtaaagatgtctcacagatggaagcggagctggtcagtctacaagaaagggcagaaaagactcagctatcacttgatcgtttgattgcttccgggactaatcgcaacggacaaaagtctactgtcgatgttctccgtgaccagaaaaaaagggttcgtgagttacgttttgctatatctcgggcaaaagatgcggataccacgatgaagcggtcccgtggggatattgaacgagcgataaaatccggtgtgttggatatcgatatcgatgtggttcaaaacccgcatgattatgtacgaacggctaaaaacgtgcttttgcataagggtagttattaccgcgcagtaattgatgaatcccgcgacctgacggctatcgtgcgtatcactgctatagaggctgagtcagaagagtaccagtgccgtattgcgtggttggataaggacacctactcgtcacgctccccgggttctactgtgaaactgctgtttagctcagttttagagccagtgaccttcgaagaaggaatagcagaatcacgcgaaagagctgcaagcggtgtagagagccagcacctatctgccactctcaatgtcgaccagttctatgatgcgatccgcaacgatgtcatgacggtaacagggccgagccgagggggctggagtggtccagagaaaattcattactggccattccgggagaagagcggggcgttagcaatcgcgtatatccctgatggtaaattcagcaactctggccgccgtcgcaaggatgaggatgctattgaggccgaacagtggatctaccctaacatcaatgacgaagctcttaaacgtgaaattactcagcaccagagtggagatgacgcgtttcaggcaaatgaaattgaaggtttccttcgagcattgttcggcatgcaatacgaccgcgcgatggagccttatggtaagcaggccagcatggatgatgttacgtcgatctttgattcttggatgacttcgcgcgagctcgatggccgaagcctgaacagcgtcacaattgaagacctgcgcagcctgtttcgtaaaccttccggagaaggcctggaagcattctggaaagggattatcacaaatcggcagttccgcgcacaaatgaaggacttcagtaactcgttcgacattgatcggatgtttgagcaggtaagagattcccgcataacccacaaaattcagcaaacgaaattagggctggtggagtggcgtaacgcactatatcagcaatacctagcccttagtgattcggaggcctgggctcaactcgatagtgcggctaagcaagagattcatggagcccaaagcactgtgaccaatgctgataacccactggaatcaccggctaccgtatggattaagatcggcgcgctgatccatgcgtttgaggcgaaatacataactgctgatgattttgctgattcagttgctgtcaaccgacttgtgggcatggcgataggtcacgccaaacgacttaaagctggtgagtacgtaaatgatcttcctgcaacactgcagggggccagttgggaggattacgtatccctaaaaaatggcggtgccaacgaggacgagataagggcagttttagaggctcaggaatcggctcgcgaacagcaagctatcgatgcgtcagacgcagctgatgcagctgcagaagcggactttacaatcaccgtaaatgaaaaccctatccgtgggcgggcccgggttcgtggccgctggtggagtgtaagcgaggacgctggagctgtttacctgattgctgacgttcctggttcctcaacaatccgcaaagcgaaggatgccatcaaaggaattggtgggaagttttggaactttgaggttaacccagtcgctgacatcgatttagatcgtccggcatggatggtttcgactcgctattcaattgacgaagtgcgcaaaatcatagctgaagcagcttaa

SEQ ID NO: 152024 - DNA, 486 bp, Enterobacter cloacae
atgtcaaacatcgaacctcgttggctgattgaaggtcgcaagcacattggccttgccgaaatccacgggccgaaacataaccctgaaattttgcaattctggcgcgacattaagcgcggcgggattaaggatgacgaaacgccatggtgtgccgctttcaccggtgcaatgttggagcgagttggtattcgctcaactcgttttgagtctgcaaagtcttacctcgactggggcgaaaagcttgacgcgcctatctatgggtgtgttgttgtgttcacccgcagcggcggcggtcatgtcggttttgtagtaggcaaacgtccgaatggagatctcctggttctcggcggaaatcagtcagatgcagtcaacatccgtgctttttcgactgaacgcgttaccggttatcgctggccaactggcgaaccacgcaccactcaagcgctaccaactggtgatgcagcattatccacgaacgaagcctag

SEQ ID NO: 152025 - DNA, 918 bp, Enterobacter cloacae
atggctaagaataactattcagattttttctcaggttttggttttgaaaaaatcattcgctgttgcccacttttaagtcagacccattgcaacatcatcagtgcgatgggcaatcttgccgcgtcaactgatctctatatgttcaaaaattcctacccttacatcgctcgaatgacaaataccagcgaaggcacggtgaggagggcgatttctgcagctgttaagtgcggaattttggtaaagacgcgcacgtatgattcagcgcgcaagaacggcagcaaccgataccagttctcgaattcattccttgaaatggcaaagcaaatagctattgcatgcaaagagaaatctgtctccatttttaacgagtcaccacggttaaggactattgctaaaatggtcttttccgggcttccttgtaaggatttccggtccgatcagcatgatcagtcacggtctgatcatgctgatcggacaaaagaaaagaagactaaaccatctgataaaagaataaaaagaccatgcttggagaagccttcggcctctccagctgtggataaaattaataaggttctaccagaagggaattccgccgttccggaagacgaggtgttcgccgagatggctgcagcaaaagcccgatctgacaaacaccgtcttgataaacgctatgcggcgcagaaactgatacatgcgcaagctgagaagttggcaaagaaattcgcctggctaaagggtgcgcctgctcgcaggtcgcggatgtcacacgatcaaatgtcgataggtgaatttgacggcatgccttcgtcgtgcactattcacgaggctatggaatacgccaagaagcgtggtatgcgatcagagtttgaagaaagaaactggagtattccccccgggttcagggggaataagggctag

SEQ ID NO: 152026 - DNA, 996 bp, Enterobacter cloacae
atgcagtcacttaaaacggttacggatcgattctccctcgttgagaaaatccgtaaacacaccccacaaaatgagcgcaattacgtcattgaatctgtcagaaagacattcaatgcggcggaaactcaggaacgtatggcgcttggggaaatgtttgggtattacgggcatggtcgccgcgcgatgcactacaaaaagtcgaaaagcctcaatttaccggaggttactgtagtgatggtggacggaaagcccgtggtgctagataacgttccttccaaccgaacagtagaggtgagcattgatgataacggcatcattactcacacccaggagattttagacacagaccccggacgaattgtgcaggggatgatcaactccaatgccggtggttggtcgtgggcaacgcacggaccggatggtgcggtttctctcgttaattctttccatggattcgattatgtaacagttccgaactacatcagcttggataaaaaatctctgatgcttgaatcatcggaagagagccggttgcttatgcacgctgagctggtggaacagggctttagtgaaaacgccgcaacagacttgatccatcatttcgattcaatgcgttcgaaccaggccatgtttgaagcggttgaatataactctgcccttgagacatccttgatgttgcgcgatatggaggttgagcgcctgaagaaccagctggccgacaacaacttaatgttagaaagccagggtgagaacgcacgcaaatgccgtcgtattttacgtgacgccatacaatccatgccgttgtttattagtgctgaacagcgccaggctctttgtcggatggaaactgaagaggatgcaacgatcgtagcagcaatgctggaatcgctgggtgcaagcgcaacctatggccttcctataccttcagcccaaagggataagctggtcactgcagaaaaacctaaaggcacaccgcttatgttcattagtaagtaa

SEQ ID NO: 152027 - DNA, 1680 bp, Enterobacter cloacae
atggcagagaaagaaaaaaaacagggctttcgtagtgcactgagaaaagttttcaccggcggtgatgtgaccactgctgacccagttgtattcatgagtggccacagcgtagtagcacggtctggcttggcttcattgcggcctggtggtaagcaaaatgcagacggaatggtaagcgcatccgattcggtaaaactcactgctgaactgcctgcagagcggctacagcgctacaacgttcttgaagaaatggcgaagagtcctaccgtttcaactgcgcttaatattcacatcgcgcaggccctggcaccgtcaaagaaaacaggtatgtcatttcagatagcccccaaaaacggtggcgacacggaagcagttaagcgttgcgaggagctcacggcagaccttgggacgatgattaacgatggcttgccgtcatgggcaatgattatggccatctttggcgtttcttatgttcggccatacggtgagccgggccttggtattacaggtattgattccagttattacaccttgcctcattttgtgcaggagtttacccgtggtagccagttggtgggctacggcggtgactatctactcgatactgagaagatgagccgtgttgtcgctgagccatggagcctggtttcaatcaaaaacccctattggatgccccagcataagcttatgccggttgcttacggcacaaagggatactcgctgctggatgctgaaaaaaatgcccctttaacagaaacgcagaattatgggacgtcgtttcttgaatatagctacgagcctttcctgaatctctgcgctgctttgaccgcgctaaaggcgactcgtaataacgcagctaaaattgatcgtctgattggtcttaccacgaatactctcgacccagttaacgctgctaactacacacgaaatgtaacccagtcgcttaaacgaaatgccgaaatggtcgcgagtcgttcaatcaatgccaatgctatgcccacagttttaaaccacattgtcccattaatggcagatggtaaaaacggcatggttgtcgacacgcagtcaatccctgcagatatcaccggaattgaggacgtcatgtttcacctgcggcaattggcagccagtttggggattgacgcgacaatgctgggttgggcagacatgatgagcggcgggcttggagagggaggttggcagcaaacagctattcaggcagcactgcgtgcgaactggattcgacaaggttcagcgcgagcaatataccgtctcattgatatacatcttgcttacaagtacggcaaaacctacacgtctgccgaccgtcctttcgaaatacaattcaactcaatgaataccgcgatccaagaagaagaaaatcgtgagcttgatgcccgcgctaacttcgtttcgataatcgcacagatcatggatcaggttcaaaacaatcccaaactggctggcagcgaagagttcatgcggtacctgttcactgatcagcttcgtattgatgctgacaggcttaatatcatgatcaaagagttcgcctcgaatgaaccagcagaagatgagcacgggatgtatgaatccgcccctgaggcagctggggatgatccaacaaaatggacgacagagcagttaattaattttgcaaaatttgtgatgagcagcaactaa

SEQ ID NO: 152028 - DNA, 294 bp, Enterobacter cloacae
atgcggattaagatcgcatcgccggagaaacaggacggcgtgattgagtgccatgaagatggttcattcatcattgccgaaggtcaaattactttagagcagatggcagaagagcttcgccttgttcatccgaactctgcgaccggcctcgttaatactgtcaagtcaaggccagagtttgttctacggagcctggagtatgttggttggttggttgagtggccagaggtggcaggtgctgaagttggcgatcagagcgaggaagatgaacctggtgactttaacgtgaattga

SEQ ID NO: 152029 - DNA, 3147 bp, Enterobacter cloacae
atgttaatcaacatgaaatttatgatgcacttaattttctcacagtcaaattgcatcgtcacgcagaaataccaaactccccacaatccctctgacaagggggaatttatgactttttccgtacaaaccgcattgtccgcggcgacagacatcgatgacgttattgcagtgttgacgtctttacccatacatcaaagaaccaccggccgggccagctacgttgtaacaagcaaaggagcagaggtcaaaaccgctttcaaagtcgttgaggtggcagttttgacaatttcgaacaaccttgatggcactattaaccctgattttccatctgagcttcaacctcgcgaccggacacgtctatccagtaagctccaagtcagtaagatcgcctccggcctacgcccggcacaactgaccgactcagggatgagtagccacggtgcaccgattgtcggccctgataacgtcgttgaatctggtaatggccgctcaatggggatctggcgtgcttaccaacaagaccaagcaaatgactaccgccagtacctgattgaccatgcagaggaatttggccttaaggcatctgacgtggctgcaatggaaatgccggtcttggtgcgtgaacgtctaactgacattgatcgcgcccagttcgcgcgagactctaacatttctgatctccaagaaatggcggccagtgaaaaggcatatgcagacgctcaattcctttcagaaagcgtgatggcgctgtttaatccttcagaagatggaaaccttctggcgcgctcaaatgatggttttatccgggcatttttacgtgaaataggtgacacggcgacggctggccttctaactaacgatgggcgcccgacaaagcaacttattgaccgcgtgcaaaacgcgattttcgccaaagcctacaaagatgagcgtcttgttcgacttattgctgaagaacccgatccggatatgcgtaatattcttaccgcgctaaacacggcggccagtgattttgcacaaatgcagtcattgtctggtgacatacaccatgacgctgtgaccgggctggtggacggcatcgaaaccattgatggcctggacaagcaagctatagccgcgctacaggaagcaataaatctggtcagagaggctaaggataatagccaagcactcgaagaggttattgcccagcgaggattatttggtgacagcactcccgaagctgaggcactggcgctcttcatcgtcaccaataaccgaagcgcaaaacgcatgggagctgcgttcaaaaaactcgctcagaaaataaatgacgaattgacgcaccagcagcaggctttgggcgatatgtttggcggcggtgaggttgacctgcgaagcgtgctgacggcggtttcccaggagattgagtcagagtttggggagggaaagggactgaacttcgctatgtttgaaagcgcgcccggggaagtggacccttatatttcggatcttatttcccgcgcttccgatgttagtgagctggtcagaattgtgcggctcagcgagcagattaaaagtaatgtgcacagtggcgagcaaaacgtcaaagaccttggtttcaagcttcgttttttcaattacaacaccgtccgagaatggataagtaacaacggctatagcgatggtgtagtgcgggcaatgatcagttcagttgataaaagcatgttttacagcagcgcgctgaaaacagcgatcgaagatggtcattcggccccttctttggttgacccgcgaaacatccactacgcgatagagcatcttaatgatgcagcacaaaatggaggcaatactgaaagggtaatcaggactttgcatcaacttgagaaccttgtccctagtgaaattagctggccagaagtacaagaagcttgcattaaatggttcgcgacgaaccaaaaattacccccaaaccttaaaaaatcattgttggccagcttcacgaaaaaaatgagtagtgccaaaacagtgcaacaactggtagcagcgatccagaatgcagagaagttagccaagaaaatgctttctgacattagcggagtaatggaatccggtaaggctgtactggaaagagtggggctgagtagagatatcgatatcaatgttatcgcagacggctatatttccgccttgaacagtctaaagcagattggcactgatgtggaccctggaaatattggattccagagcacggtagatttttatattgaacaaatcaataaagtgcaggataacccggaaaagctgaagccgtatttgaaagctgtttttgacaaaaattcagggttagcgcttgatgtgcgtcatttaaaaatgattttgcgggctcatcctgagcgagaccgtttagagcttgaaatggatgacctttcgaggttatttagtgatcgcgttgcgtatcctccggctataacgaccatgattcacaagaaggtaaaagctgctttcgatactcttcttgaaaccggtggcgtcactgcagaacaggcgagtgagtggagtgaaggcattaggctgtctgatcaagtagacgagctgaccgcacaagaccagcctgactacggccgcaagggttttagtataaaagaggtagccgcaaaagcctacgagctggtgggtggcaatcttgcttcgttaaaccacatttatcatagcgatggcgttagggcgtacgctaaccgtaatggggtaatcgctatagagggcaatactgacggtgagcatgtgctttggcatgagatagggcatcacattgaatactctaatccacacctgcttgaacgtgcgaaggccttcctcaaatccaaagccggtgatcgactgacatattacaacaccggcaccaggggggatgctgaatatatggtaaggtctgccttaagtgaccggtacatgtctaaaatttatatggaactaaatttcagtgctaagagcggtaagccgctatctaaaccaccggctttaaacaattgccgcagcacagagattttttctatgggcatgcaactgtatgccgacccggaagcagccgcaaaatcagttttgaacggtgatggtttggtagagttcttcctggggtgcatgaaggagatacatcatgcggattaa

SEQ ID NO: 152030 - DNA, 303 bp, Enterobacter cloacae
atgaaggttgtttttttaaggcgtgcaatgctcgccattaattccctaagaaatgaagataaaaaaatggtcacaaaattagttagtgatatgtcaactgattttgaagatgtcaagccaaatcaaataaagaaaatagaaagaaaccctcgcgtaagaatcttaagcgaaggccatagcaataaaatttatgcgtaccaaggagattatccaataaggatacttttctctataacaacaggtgttgcagaaaatattttgatagttgatatcgctttaccccatcaattggtggcagaatga

SEQ ID NO: 152031 - DNA, 618 bp, Enterobacter cloacae
atgaaaaatttacaaaagcacacatattcaaaatctgccgctatttcacaactcgctgagtattcgaatttactagctcaaaagcctactctatcagagagaagagacatactgccatttttcaaaagaagccctgaccttaatcttctgataagttatcatttacctaaaatgagacaggctgattgctatgcgtctgagttcgacatctatagtgatttcaaagcagatatgattgtaggtgatagtaaaaaccatcaatatttattaattgagtttgaggatggtcggcctgacagtatcttcagatcaaaaggcaataaagctactccagactggtctccaaggtttgaaagtgctcattcacaattaatggactggttatggaagatagaggatatgcgtggcacaggtgacttccttaataccttcggaagtagaagagcaaaattttctggcattataattactggaaaaaacatgaatttatccaatcaggagttagaccgcttagaatggcgaacatctaaaacaatagttgaaagtacgcatgtaatgtgtgtttcattcgatgagttattagaaaacttccaacattatatttcaatttataaataa

SEQ ID NO: 152032 - DNA, 531 bp, Enterobacter cloacae
atggctagtcgtggagtcaacaaggtaattttggtcggcaatctgggctccgatcctgagatgcgttatatgccgaatggtggtgcggttgccaacttcactttggccacctctgagagctggcgtgataagcagaccggggagatgaaggaacagactgagtggcatcgtgttgtgctgtttggaaagctggcagaggtagccggtgaatacctgcgtaaaggctcacaagtctttattgaagggcagctgcgtacccgcaaatggacagatcaatctggttcggaaaagtacacaaccgaagtcgtggtaaatgttggcggcaccatgcagatgcttggcggacggcaagctggtggagcgcagaacggtgttggccagcagggcgggtgggggcaatcgaaccaacctagcagtggcggccaggcgtccccggcttcaggcaatgagccaccgatagattttgatgacgatattccatttgcaacaatcggacttcagtacggtaagcaccgtatatatgctttataa

SEQ ID NO: 152033 - DNA, 375 bp, Enterobacter cloacae
atggcattgtctatcatggaacgcctggcactgggtaaagagctgtccggattaatgcaggagcaaaaatccgcgtcagttatgcagcgcatgacgatcggcaagcagattgtggaagtgatgatcaagcttggcctgggtgcagctgcagaacccaggcccgaagaagtgcccgctccggaactgcctccggaacctgaagatgctcctcaggtcgttaaagacttcttggcgggagtgttcacaaaagtgcctcagctggagttcatcgatacgctgcgcgcgattgcagaatacgtcggccagcacttaacgctggatcaggccaaagagcaaacggccttatgggtggcccaaaacgggtatgcagactga

SEQ ID NO: 152034 - DNA, 627 bp, Enterobacter cloacae
atgcgtcatggtgctgttacgtataaccgcaagctgaccgatgatgaggtcaaagggtttgatctcctgtatcttcccggcggtgatgaactgcagtctctcgcggagcagatcgccaatggccgtatgaaagagtacgcggcgcaatatctggaacagtcggaagaagaccctgcaaccttcaaagctcaagttaagctgtttttccgcaaagccttcccgaccgttgcatatccgcttgggaatgagcagaatttcttcctactgaacgtactggccgagctgaaaaaagttgctgaagctgatgtgaacaatggcaccagtgaagatgtgccaccggaacaacccccggtggaaaatgggccagcggaaacaaccacaacaggtacggaagaagtgagcgaagccgatcaggaagccaacaaggcactggactatatcaagtccgtaccatcacagtttaattcccgtaacctggcggaagtcagcgcagagttggatcacgtccaggaggctgctaacgcgctcatagcagcaagtcgtttcgatgaaaacgagaagttagtcgaagcagctgtggatcacctgattaagatattggctgaagttcagcagggagttgcttaa

SEQ ID NO: 152035 - DNA, 300 bp, Enterobacter cloacae
atgattaatcattttcgggatcaatggcttgaggatttttttctctacgggagatcgagcaatgttattcctttgaatctggaaacagcgcttgcaagaaagctcgacatcatcaatgcggccatgtcgcacctggatttacgatcgccaccgggcaatatgtttgaagcattgagtcctccgttgaagggatactcctctatccgggtaaacagacaatacaggcttgtatttcgctggtcagagggaaaagcagacgatctctatctctctccacacaagtacacgcaacacaagtga

SEQ ID NO: 152036 - DNA, 10800 bp, Enterobacter cloacae
atgagccaaatatctgttatatctaaattaactggcgtggaaacgaccacggaagggacacagataacactcgatcactcctcaatcgttaaacttaacgtggatcgcgccgacatctcaggttactcccgcagcggaaacgatctggtgattaccctcaactcgggcgaagtgattaccctcaagaatttctacgtcaccgacgcgcagggcgtgagccagctggtgcttgaggagagcgacggtgcgctgtggtggattgaagatccaaccggtgccgcaacctatgaatccatcgcctccacggacgccctactggcggcgtcagggagtgataccggcggcgccgcagcgtggccctgggtgctgggtggcctggccgtcgcaggtgggattgctattgcggcgggaaccggcggtggaggtggcggagatgacgataacaacagcccgaatcccggtaatccgggaaatccttccgaacctgatactacgcctccgaatgctcccactaatcttcaggtctcacctgacggcaaaaccgtaacaggtacggctgaaccgggcagcacgattacccttaaagatgccgatggcaacaccattggaacgggcaaggtcggcagcgacggcaaatttactatcgatctcggtacgccgctcaccaacggggaacagatcaccgccacggccaccgacccgtccggcaataccagccagggtggtcaggtcacagcaccggatctcaccgcgccggatgcacctgccaatctggaggtttcgcctgacggcaaaaccgtctccggtacggctgagccgggcagcaccgtgacactgaaagatgccgatggcaacaccatcggaacgggcaaggctggcagcgacgggaaatttacgattgatctgggtacgccgctcaccaacggggaacagatcaccgctaccgccaccgatccgtccggcaataccagcccgggcgttcaggtcacggcaccggattcaaccgcgccggctgcccccgagattgtcaccgtcaatgataacgtgggcaccgaagcgggcccgctgagcaacggacaacgcacggacgatgcacgcccgacgttcagcggcatcagtgaagctggcaccgttattaccttctatgacaacggcaagccgatcggcaccgccacggccgatgctaccgggaaatggagctttaccccgtcgaccaacctgtctgaaggaaaccacgccattaccaccaccgcgaccgatgcggcaggcaaccagagcggcctgtctcagccgatcaactttaccgtcgatcttacgccgccagacatgccggaggcgacgctcaattcgacaggcacgcaaatcaccggtactgccgagccgggcagtaaaattgtcatcaccaacaacgccggggtgcaaatcgggaccgccactgccgacagcaacggcaactacatcgccaacctgaaccctgcacaagtgaacggcgagatcatctccgtggtcgcctccgatgctgcaggcaaccagagttccccggcgctggttaacgcagcggacatcaccgcgcctgccgcaccgggtaacctggtggtggcggaagacggggcaagcgtcagcggaaccgccgagccaaacagcacgattattattaaagcgccggacggtacgattatcggccaggccaccgccggtccggacggcacctttaccatcccgatttcgccagcccagaccaacggcgaagcccttgaagtgacggccaccgacggcagcggcaacaccagtccgtccggctttgccgacgcgccagacagcacgccaccgctggcaccggaaaacgtggtgatctctgccgacggcaccacggtaaccggtacagccgagccgggcagcaccgtcaccattcgtgaaaatggcgttaaggtcggggaagcggtcgccgacgatcagggtaatttcagcgttgatctgatcccgccgaaagccaacggcgaagccctgaccgcagatgccaccgataccgccggaaacaccggcccgaccgcgccgtttgacgcgccggacatcaccgcggcacaaaccccagtcatcacaggcgtggaggatgatgcgctcgacgtcaccggtcctgtcagccagaacggtctcaccaacgacaaaaccccgaccatcaacggaacgggcgagcccggcacgacgatcaccctctacagcggcaccactgaaatcggcaccgcagtggttgggcctgacggccagtggtccatcacgctggaaacggatcttcccgacggcgggcacgtgctgacggcgacggcggttgacgccaacaataacctcagcgggacatcgaacacctggagcatcacggtggataccgccgcgccgggcgctccagccattacgcaggtcattgatgacgtaccgggccgcacggggccgctcgacaacaaccaaatcaccaacgacacgctcccgacgctgaacggtaccggcgagccgggctccaccgtgacgatccgcctggacggacaggatattggtactgccattgtgaataacggtggcgcatggaccttcacgcccactaccgcattagggaacgggcagcatacgttcaccgtcgtcgcgagcgatgcggccggcaacaccagcgcatcatcacccggctttacctttaccgtcgataccactccgccaccggcagccacccttgacaccgtctccgataacatcggcactgtgcaggttccgcttaacagcggggatactaccgatgacacgctgccgcaactgcagggaaccgcaccggaaggcaccaccatcactatctatgacgggaccaccctgctcggcacggccgtgcttgacggcagcggcggctggagctttacgccaaccacgccgctgacggacggcccgcattcgctgacggtccacgcgacggatgaggcgggtaataccaccatctcgccaccgtttgagctggcgatcgacacgaccgcgcctgcaacgccggatattcctgagatcaccgtcaacccggacggcggcacgccggggacggccctgaatccaggggagaccacccgcgatacgacgccaaccctgagcggctcgggcacgccgggggatatcgtgaacatttacaatggcgctactaaaattggtgaagccgagatcgatggcgacggtaactggagctggacgccggatgatccgctccctgacgggacctacgatctctccctgacggtgaccaatcaggacagcgccgggaacgaaagcgcaccgtccacgccagtgaccattaccattgataccgacgcgccgggccagccggggatcccgacggtgacagacagcgtaagccagatcaccgggccagtggacaacggcggaaccaccaacgatccgcgcccggtactgagcggcaccggtacgccgaatgacgtcattaccatctatgaccaggtgggtacaggcgagccgcaggccgtgggcagcgtcacggtggacggtagcggtaactggagctggcgtcctgagagcaacattggcgaagggacgcaccaatacacggcgaccgccaccgatgaagccggcaatgaatctctgccatcaaccggtatcacgataacggtcgacaccctcgccccggataccccgctcatcggttccattggcggcgctcagaatggaggctcaaccaacgataacacacctgtcattggcggaggcggcacgaccggcgaaacggtgattatctacaacaacggcgtggaagtggatcgcgttgaaatcgccaatggcgagtggtcatacaccctgccgacacaaaccgatggtccgctgaatatcaccgtcgccgcggtggacgacgcgggtaacctgagcccggtcagcccggtctttagcgtgacggtcgatacgcaggcaccgaccgtgccgcaaattgacgccgtctctgacagccaactgactaacagcgtgctttacacccgcgacggtaccccaaccctcaccgggattggcgagccgggttcgagcgtaaccgtttctgttgatggcacgccgtctccggtggtcgtggtggttcagccgaacgggacatggtcctggacagccgaccccgcgcttgcggaagggccgcacaccttctcggttgccgcaagtgacgcggcggggaatacctccgccagctccggcgatctcagcgtgacggtggatacgctgcttcctgcaacgccaaccaatatcaccattgccgcagagggcacgccgctgaccggtacggcagatgacggaaccacggtgacggtgcgtgacgccggcggcaatatcatcgggaccggggtcgcgacgggaggcaccttctccatcgccctctccccggcccaactggatcccgcgacgctgacgctgttcgccacggacgccgcaggtaatgcaagcccgacaaccacctttgacgtaccggactccccgcttattctgccagcggtgccggtgattacggcaatcaacgatgatgccgaacccgtcactggcgatgtgaaagataaaaccaccaatgacaccacgcctacccttaccggcaccgccgatccgggtagcgtcatcaccatttatctggatggggcgctggttccgcagaccgaaattgttgcggatacagacggcaactggagctacacgccgctgctgccgctcgcggaagggccgcacaccttcgccgtcaccgccacaaacaccaccaccggcgcgaccagcgggcagtcgccgatcgcgaccgtcaccgtcgacctcaccgatccgaccgcaccagccatcggtgcggtgaccgatgacgtaggcccggtcaccggcccaatcgctgacgggcagagcaccaacgacaaccgtcctaccctgaccggaacaggcacggccggggacaccattacggtgtacgatgacggcgacccgctgggcaccgttgttgtcggtccgaccggcacctggagctacacgccgcctgcgctggacgacggcagccacaccctgaccgtgaccgccaccgacccggcaggcaatgagagcgccccgtcggccgggatcaccatcgttgtcgacaccgtctctaccacgccggtgattaccagcgtgacggataacgcaggcaatgcggcaacgcctgtcccaagcggcgatccaaccaacgacactacgccaaccctgaccggtagcgccgagccgaacagcgtcgtcgccatttttgatggcgctacgcagattggtacggtggcagcagacggcaccggagcctggacatttacccctgaaaccgccctcggcgaagggacgcatgactttaccgtcagagccacagatccgcagggcaacgtcagccagccgtccaacgcctggagcgtcgaaatcgatctgactgcgccacaggtgccgacgatcgttacggtcagcgacaacgccccgggaggcgcaaccggcccgcttaccgccgggcaggtgaccaatgacaccacgccaaccctcagcggcaccggccaggcgggtaccatcattcacgtgcttaataacggcgtggagattggcaccaccacggtcgacggcagcggcaactggacctttacgccggatccggtactgactgacgggacgtataacctgcgcgttaacgccagcgatgatgtcggaaacgtctccgccaactcgccagtgttcgcctttacggtggataccgccgggcctgcggccccggtggttaccacggtaatagacgatgtcagcccgggaacgggaaccctcgccagcgacggctccacgaacgacacccgtccaaccttcaacggtacgggggaagtgggcgcaacggtacacgttattgtcgatgatgtggaaattggcacggcggtcgtcaacgcccagggtaactggaccttcacgccgaccactgaactgggcgaagggccgcacgttattaccttcaacgccaccgatgccgcaggcaataccggggtcacctcaccaccgttcaacctgacggtggatacctcggtgcccgaagcaccggtctttacccctgccaccgacaatgccggtcccgtactgggcccggtcgcctcgggacaaagcacagacgacaccacgccaacgctgaacggcaccgcggcagccaacgcgaccattaccatctatgagaatggtcagccggtgggcaccgccgtggctgatgccaacggcgtatggagctttactaccggcacgctggcaaacggcagccacacctggaccgccacggcaaccgatgccgcgggcaacatcagtcctgcctcaccgggctttacgctggttgtggatacaactgtgcctgccgcgccggttatcacccaggcgatagacgatgttggcaccatcaccggggcgattggctccggccagaccacgaacgatcctctcccgcggctggtggggaccagcgagccgctggccaccgtgaatatctacgagggcactacgctggtgggcaccggtactgccgatgctaacggcaactggaccgtcgatatcaccgtgccgctgggcaccgggtcacacacctttaccgcagaagcaacggatcaggcgggtaacatcggcgcgccgtccgccgacttcagcctgatcattgacaccacgccgccagccctaccggtgctgaccagtgtcaccgacgacgtcggtaatactgcgacgcctgtcgccaacggcgggctaaccaacgacgcgcggccaacgatcaccggtacggcagaagccggcgcgacggtcaccatctttgataatggggtacagattggcaccgcagtcgccaccggcggcgcgtggagctttacgccttccaccccgctggctgacgggccgcataatctgaccttctccgccaccgacgcggtgggcaacgccagcgcgcagaccggcggttacaccatcaatgtggatgccaccgcccctgtcgcaccggcaatcacctcgattgaggatgatgtggggaccgtcaccggacctgttactggcaccaacccaaccaacgacacccgtccgaccttaaacggtacggcagaagccaatgccaccgtacgtatttacgacggcacgacgctggtggggaccgtcactgccgatgccaacggcaactggacgctgccgcaaaccagcaccacgctgacggaaggcgcgcataacttcaccgcaaccgccaccgatgccgcgggcaataccagcgtggcttcaccgattatcacgattaacgttgacctgacgccgccaccagccccaaccgggctggcggtgatcaccaacgggacgcaggtcaccggtacagcggaagcgggaagcaccgtcaccatcaccagcagcaccggaaccgtgcttggaacggccgtcgcggacggtagcggaagcttcagcgccaccatcacccctgcacagaccgccggtgaatccctgatcgtctttgctaccgataaggccggtaacgcgggtatcaccacctccgtgattgccccgatcaccacgatcccgaacgcgccggttatcgctaacatcgacgataacgttggcacggtgacgggcaacctgaccaacgggaatactaccgatgacaccacgccaaccctgagcggcacggcgcagccgaacacgaccatcaccctctataacaacggggtgctgatgggcacggtcaccgcgaatgccagcggcaactggagcttcaccacgccggtgctgagtgaaggcccgcatgccttcaccgccacggcgagcaacggctcgggcaccagcccgatttccacgtcgaccaccgtcattgtcgatctcactgcgccaacggctccaaccgggaccttcaacgcagacggcagcgtactgaccggtagcgctgaagcgggcagcaccgtcaccatccgcctggcggataattcaacggtcaccgccacggcggacagcaacggttcctggagctacaccttcctcaataaacagacggaaggtcagacgctgcaaatcaccgccaccgatgcggcaggcaacgtttcgctgcccggctcagcccttgcgccggtggtgccgctctctgccagcaccaacgctgaagaactggcgctcacgaccaccgccacggtgaccaactcgcagtacagcgactatggtttcctgctggtaggcgccttaggtaacgtgctgacgctgctcggcaacgacaccgcgcaggtaggtttcaccgtcggcaacggcggcagtgcggatattgccgtgaacgccaacgccacgggtgccgttctttccctgctcaatacccttgagctggtggtacagcgcttcgacgccgccaataatacctggactaccgtggtcgataccgggcagccgcagttcgcagacctgttgaccctcggcgcgacgggggtgtcgctgaacctgaccgggctggcgaatggtcagtatcgcgtcctgagctacaacactaacctgctggcaaccggctcttacaccagcctcgatgtggcggtgaaagagaccagcgcaggcaccgtgtccggcgagaccagcgttgtcgggaacgtcatcactgacgtggatccaaccgcaggcagcgacaacgccccggcgggcaccaccgtcactacggtcaccaacgcccagggcaccaccaccagcgttacggctgacggcacggtgattcaggggcaatacggcacgctgaccatcaacctggacggcagctatacctataacctgaccaacaccagcgccgccgtcattggccgcacggagaactttacctacaccatcacccataacggcaccagcgcctcggcaaatctggttctgtcgctgggcgaaggcactaccagcagcgggatcgtggccgtggacgataccgcctcgctgaccttcgacaccaccgtggaggcgatcaacaacggcacctcgtcgcagggcggctttaccctggtggggatcaaccttggcaatacgctggggctgaacctgctggacgatctggccaacccgatcatctataacgtggaagaaggcaccacccgcaccatgaccgttcaggcgtccgtgggcggcgtggcgctggcctcggtgttcgacctctacatctataagttcaacaatgcgacgcagaccttcgagcagatgcgcgttgaacccggctggctgcgcgcgccgctgctgggcggcacctccccgcagctgacgttgaacctgcccgctggcgagtacctgttcctgctcaatacggcggcggggatcactgcgctgacggcctacacgctgaacgtcttgcaggatcatgtctacagcgtggcaagcgtgagcgagagcacgaccggggatgtgctggcggatgatattgcgccagcgggtaccgtggtctccgacgttaacggcgtggcggtgaacagcagcggcctgacggagatcaccggcgagtacggtacgctgcggatcaacgcggccggggagtacacctacaccctggacagcggggtcggcgctgacagcatcagcacgccggataccttcgtctacaccatcaccgcgccgaacggctcgaaagacacggcatcgttgaacatcaccccaaccgcgcgcccaatggatgcggtaaacgatgtcagcaccgcgatggacgtcacgtcggttcaccatacggccgcctattccgatacgacggtcgggtcggcgagctggaacgctgcgctgcttgcctcaacccagggcagcgggagcgggaccttcgtggtggatcctaatactgcactgcataacgtggttctgtcgtttaacgtcgcctcgctgctgacccttaccgggttaacggtcgactggacgctgaccaacggcaccaccaccctcagatccggctcatttaacggcgggctgctgctgggcggcagggcgacgatcaacctgacgggcctcgatctggaagcgggaacctatacgctgagctatacgggcaaaatggggccattgggggtaggaaatattaccatcaccccaagcgtgaccggcaccagctactcgctgtcgcagttcgacgcgacgggtacccacaccgttgacggcaatatcttcgacggcaccgactccgcaggggcgatggaccagctccactcggttgatacccgcgtgagcattaccggctacgacggcgttaccactacgctggatccgtacaccggcagcacgatgtcaaacatcacgggccactacgggacgctggcgattgccgctgacggcagttacacctacaccctcaacccgggtatctcgctctctaccattaccagcaaggaggtctttaactacaccctgaccgatgccaacggtgttaaagataccgcgtcgctgaccattgacatggcgccgaaatttgtcagttcggagcataacgatgtgattagcggtacggcctacggcgacacgttgatttatcaggtgttgaacaacacggcgggtaacgccaccgcaggtaacagcacgggcgaccactggacgaacttctccctcacgcagggagacaagatcgacattggcgatctgctggtggggtggaacggtagcgcgtcgacgctggggaactatgtctctgtttcacaaagcggtaacaatactgtgatctccatcgaccgtgacggcacgggagccgcctacactaaatctacactcgttacgctggacaatgttcagaccacctacgacgagcttgtaaaccagcaacacatcattacctga

SEQ ID NO: 152037 - DNA, 1602 bp, Enterobacter cloacae
atgtttgaaattccgaaggctgatggttctagctttgaattgaagttggctcctggagaggtcgttttcttgttagggccaaatggttccggaaagtcttctataattgattttctatacaaaaaatatcctaatagatttgagaaaataattgcgcatagacaaaattggattcagtctaacagatccaacgtatccaatcatgaaagtcatcaaacatcaggttatattaagagttgggattcgcaggaagagtcaagatacaaagatgattattccggtcgtagaacagagatcttactgaacaaaataatttctgcagagaatcatgcagccagaacttttgtaaataatttctccctagcttctcgcgaagggcgtggtaatttaactcttgcggaaactccagttgaaaaaattaatagatgcctgaatgaggcttttattaatattacaataagaatagatgattcggattctttgttggtaagtcgcaatggctcggatgaatatagcttggctcagctttctgacggagaaagaaatgcaatatttattgcaattgccatttttacagccccagatggcgccttctttttaatcgatgagccagagaggcatttgcatccgtcaatatctcattcgttgattaaatctcttttaaatgagcgcccagattgttcatacgtaatatccacacatgatttatctttgccatcagcagtgcctcattccagagtattgttgctgagagattgcgtgtatgaaaatatgcgaccagttcgttggtatatagacgcaattgactcattggcggaaattgatgagaggcttcgagaagacatacttgggtcaaggaaaaaaataatctttgttgagggtaatacatcatcaagcttagaccagaagctatactcgataatttttccaggttattcgataataccaaaagctagttgcgattatgtcgagcgttctgtggatggtctgagagaatcggaaaatcttcatcacgtcattccatatggcattattgataatgataataaacctgagcgacagatttttaatcttgaaatgaaaggggtttattctttaaatgtacactcaatcgaatcaatatactatcatccggaattgattttaaacgtaatgaataattataaggattctcaaaatatatcagatcccgatgcattatatgcgcggttgtgtgacgagtcattgtccatgctttccgagcacaaagaaagactatgctgtagagcaatagagaaagccattaggtctaagctattttcgcatttgccaactttgagaagtattgaagaggggaatgatgttaatataaatattaacgttggtgattttttgagggaagaaaatgatttttttgaaaactgtctacgtcagaaaaatctcatcagtttagtcgaaaaatatccaattcgcgaaactgcttatatcgctaaggtgcataagctattggggtattcaacgcgtcaactttacgagcataatcttttacgccttgtaacgtcgaattctgaggtgaaaaatattgttaaaaggctgattggcaatatttgcaatgttatatga

SEQ ID NO: 152038 - DNA, 1023 bp, Enterobacter cloacae
gtgacagaggtgctggataagcgcctgatgagcctgacgttgacggacaatagaggtttcgatgctgatcagctcgatctggaactggacgacgcggacgggcagattgtgttgacccggcgcggggcggtgatcaccctggcgctgggctggaaagggcagccacttttcccaaagggcagtttcacggtggatgagattgaacacgcaggcgcaccggacagactgaccatccgcgcccgcagtgccgactttcgggaaaccctgaacacccggcgggagaagtcctggcatcagaccacggtgggcgaagtggtgaaagatattgctactcgccacaacctgacaatggccctgggcaaggacctgaccgataagccgctggatcacctggaccagaccaatgagagcgacgcaagtttcctgatgaagctggcgcggcagtttggggccattgcctctgtaaaagacgggcacctgctgtttattcgccaggggcagggcagaactgcaagcggaaagccactgccggtaatcactatcacccgcaaggccggagacagccactgtttcagcctggcagatcgtggagcttatacgggtgtaattgccagctggctgcatacacgggagccagcaaagaaggaaatcacaagcgttaagcgccggaagaaaaccacgaccgcaaaggagccggaggcaaaacagggggattatctggtcggcacggatgaaaacgtgctggtactgaacaggacctatgccaaccgggccaacgctgaacgggccgccaaaacgcaatgggaacgcctgcagcgtggtgtggcgtccttttccctgcaactggcagagggccgggccgatctctacacggaaatgccagtgaaggtcagcggttttaagcggcccatagatgaagcggagtggacaattaccacgctcacgcatacggtcagcgctgacagtggtttcacaaccagtattgagtttgaggtgaaaatagatgagttcgcaatggaatga

SEQ ID NO: 152039 - DNA, 1320 bp, Enterobacter cloacae
atgattgagaaagcttctgagttgttagaacgatttatagaaatcgaaagaagtgaacttattaaagtagaaatgccgcacatgccaacacttggttctgcttatgaagaaattactaagcaaagcattgatcagaattttattatacccaaggggttaaacctaaaagtagtctcggggtttatttctatcaatgataaaatattatctaaccaaattgatgggatgcttgttcatggtgaagggaaacgctatggtcggactagtgattttatttatcccatagaccaagttttatgtatatttgaagttaagaaaactttgaataaatcagattacgcagatgcttttgaccatcttagatttatcagaaaagaattcgctaaatattttgagcttaaactgaaagactcttcatttaatccagatatttctatccctggtaagcatttttctcaaataacaggaagagaggctcctgctttttacagagatattcattctttatccagaacagatgctattcttttttatgctttagtacaagaaagtctagctccatcaagtattattcatgggtatggtggatattcaactgaatatggaatgcgaaatgctttttttgatatcttaactgagaaaagcaagttatctggagaaggctttggagtgcccagttttcctacattagtgacaactaataatatcagtattgttaaagctcatggcatgccttttcttggtatcaataaagatcagcaatgggcggctttggtgtcaatgagagataatgccgcaagaattatgttagaaatcatctggtcaaaaatagcattttattttgatgtaaaaatgccgtggggaaatgatcccaaaaatgaaattttggctccattcttgtatgccatacctgtgcatcaagacgggagaactggttggaaatttagatatgttgaaatgaaagaaagcgaactaaaaaaaagacaacttctgatagattgggaaccggaacgtatagatgaaaaagtgttggcggtatttcattgcatgttaataaatggtggttatatccatgaggttgatttagcttcgatagctgaagattataatgtttcacaaagagatttaataaaagatcttatgagtctgtttttgtttaaaaaaattaaccaatacattcgcccgatttcatcaagtgtttttcttgctaccgatgctaatagttttagctatttaacttcaaatcgagagaatttggatatatggtgtgataaaaaaggattggcaaaagattatattcatttgatagttgtagagtga

SEQ ID NO: 152040 - DNA, 1461 bp, Enterobacter cloacae
atgaatataccgggtgatgagctatacaccttgatccatgctgcgctgaaaaaacgtggggaagagacgctccagcgtgcgctctatcttgctttgcgggaggccatactgtgcggaaggctccggtccggcagccatttgcccggctcgcgaacgctggcgcagcagatctcggtgtcccgaaataccgtcaacgcggcgctggaccagctcacgctcgaaggttatttgctgcgtagccgccagggtacgcgggtgggacaattcgctcctcggacgcttgcccggacattaccggacccggacgtcaggctgacaaaacgtgtcgccctgctgcccgcgcccgtgccgcgcgacactccggtgatggcgtttacgccgggaacgcctgccatcaactatttccccttgccgctgtggcggcggttgtacgatcgcgtcctgcgcgaggagggaagcgccctgttagggtatggcgacccggccggcgagccgtcgctgcgggccgccattgcccgccatcttgcgctctcccgcggcattgactgcgatgccagccagatagtgataaccgaaggggcgctggagggcgtcaatctgtgcacgatgctgttaagcgagccgggggatgtcgcctgggtggaaaatcctggctatagcggcgccaaaagcgctttcgtcaaaaccggcctggcgatgaccggcataccggtggatgacgaggggatgtgctgggaagggctgtgtgcgccttcacccgcgctgatttttacctcgccatcgcatcagttcccttacggaagcgtactcagcgcgcggcggcgtctggcgctgctggaactggcccggcagcacagcgcgtggatcattgaggacgattacgacagcgaatttcgttataccggtgagcccgtcccggcgatgctgggcatgctcaacaatgcgcccgttgtgtatctggggacattcagcaaaacgctgtttccgtcgctccggatggggttcatggtgttaccgccagcgctggcgaaggcggcgcgtcctgccatcggctcgctgctgcgcggcgggcatcgcgctgaacagcgcaccctggcgctgtttattgaggaaggccactatgcacgacatcttgccgccatgcgccgcctttaccgtaagcgttaccgccagctgagggaggtgctgagcgcagagcttcataccccgcaccgtgttcttgccggggaagggggaatgcacctgacgctggcgattgacggtatcgacgatcatcggctggtggagcaggcaagagcgtttcagctggcacccgctgcgctgagcgggtattaccttgagacgaagcagggacaaaccggtctggttttaggttacggcaatacctctgcttcgcagtttgcgccgggtatccgacgtcttcaggcgctcattacacagcagtggggcgggaaagggtaa

SEQ ID NO: 152041 - DNA, 1179 bp, Enterobacter cloacae
atgactacatcatctgtgatacaagctgtaaacaataagcctgagaatcctccatatgttgatgatcacaggcataaatgtttttgggagtctacttttgatgaaagcatcgatctttcaatgtttttaccactcttgataaatgaagtaaataataaaagaaataacggcgatcatctaaagaactatgttattgactttggtgttcaagaacataatgagcaagacaaacccaatactactcgtattaccattgaaaatgcgactttcgaaacttgtgatttcaaaggcaataacaaagggcaaaaaataaccttcaaaaaatgtatattcaaaaaagtatattttgggtattccgagttacacggtgtaaattttgaagattgtaattttatagaaagttcgttttcgttaacaaaatttaatgactgcacttttaatgaaggctgtaaatttacgaagatatctatatctggaggaaaaacaagttttaacaatagcatattgtgttcagggcaattactgtttcactcttacgagtatgcaactaacaagtattgtgaaaatcatgggttgcataaagaagagcaagtatatcgaatgagcctctcacaggtaaaactcgcacgaaacattctcaattctgtatcaatcattggtgatgatgatatttattatgatgccacgaagactttattcaagttaaggctgaaagagcgagagtctaaaatcaagttatccgctagtaaatatttggctgaagcaaaaaaatcaaaaagttgtaaagctcttttgttatatttttataaaaaaatgagatcatttctctttccattagaaaaaggaatgcttaattcgtttggaatgattaatggttggggtagtaaccttttaagatgcatgttctttggtggtgttattttttcaatattttcaataatttactttttccaaagctatggctcatttagtgccgataatctatggtttgatacaatatttagaagcatgataaaaagtttagatataactttccttgctggatatactaagtattctcttgctagcgattcatcggaaaatcagttgctactcttatcgaatatgatccttggtttattttggtacggtgttagtcttccaacattaattaacaaaattagcgtagccagactatga

SEQ ID NO: 152042 - DNA, 693 bp, Enterobacter cloacae
atgatgattaatcaatataacgacaatctcaaaagtctcattcttttcggaagtcattctcgaggagataatacaattgactctgacattgacttactcggcattgacgacgcccaaaaatttaccgtccgtaatattggaaaggtgaatttttcattttattctacagagaaatctttagaaatgtgttcgcaaggtgatctcttctttttgcatattataagagaaggaaaatgtctttttaatgacactttctttaacgaattaaagaatagttttaaattcaaaaaaagttatcttagagaagctgccgttgcatattatttagctcaaaaaatcattgaacatagttctaccatttcaaactggataattgctaacaaaagaatatcttggtgtgttcgtacgattttaatcgctttaagtgcagaacaaagaagccctatttattcaaagttagaactttcttctaagttaatggagattggtttagaaaatcaaagcactatgctgttaatagacgccaaaaacttcaattttgaaaaccaggaaattctaagtattcttgcttactttcttaataaatatagctttcttgagaaagaattgaataaaaaagaattttattcaagcggaatcgttcattcaaccttagatgcaattttgaatagtatccctaaccagtatgaataa

SEQ ID NO: 152043 - DNA, 561 bp, Enterobacter cloacae
atgaatctggaaaaaggcggccgtggtgccatagagcgtatggtcgaagcttatggtttcaagacaagacaagctttgtgcgaccatttgggaatttcaaaaagtaccctagcaacacgctatatgcgtgactcttttccggctgagtgggtgattcaatgctccttagaaactggtatctctctaaactggctcaccacaggacaaggttcaaagcaaggttcacataaagcaaacactaaagaacttgaaaagcatgttttgaccaatgggtcattacgcaaagacggctcatatgtttttgatgcaagctttttgcctgataatctgaaaaatcctgttgttgtgatcgacggcacttcagaatttatctgcgatatggattatggggatgtgcgtgacggcatgtgggtagtgagtattgatggagaggttgctctaaggagtttgacacgtcttccaggtagccgacttcgcatagatgggggcaatagttcattcgaatgcgcaattgcggaaattgagatacttgcaaaagttttggttagttgcctccgataa

SEQ ID NO: 152044 - DNA, 585 bp, Enterobacter cloacae
atgacaacgatgtctgaacccaatgatgaacagaatgagaatggtgatcttagggccgtaaagcgtctctatgagctgactattcgcataagagactttgagataactcagttatctcaacgtaataattttttcatgatttttcagggcgttcttttcgcaggtttagccaccctataccaaaatgataagggcgaagcattcgttcctttcattgcacttgttggcctgattgtatcgttctatcagataggaatttcttctggtgcaaaatattggcaagaatattgggaagaggctgttaaagaaattgaggaagaattactccgtgtgatgtcactgaaagggcatgaaacacgtgagaaagtttaccgcatattcagcatttcgatggtagaagtagatgctaaggtcaaagatcgattaaatcgctctagcacaaacaggataataaaatttttagtgtcttgtaaattttcagttagtcgcataccaatatacactgctctaacatttttcgccctttggctatccctaggtatatatagttttgttggacgtcatttcttgattctttggatataa

SEQ ID NO: 152045 - DNA, 1074 bp, Enterobacter cloacae
atggaaaacttatactacacacagttcagccatatagattttaaagatcccttctttgattcactaaaaaatgattatccggactttgcaggatggattgaaaagaaaaaaaatgatccatcagcattagcctatgttctttttaatgaacaaaataatattgaaggttttttatatctgaaaatcgaaaatgagaatgttactgatgtaacccctcaattaccgatgagaaagcatctaaaggttggtacattcaaatttgaatcacgcggaactcttcgaggtgaacgttttattaagaagatattcgaccatgctttagaatgcgatgcagaagatatttatgtaacggtttatccaaaacacgcttatcttatcaggttattcaagtcgtttggatttgatactgttggttcgaaaggtcctgacgataatgcggaagacgttttactaaaagaattgcagaacgttcagttgaccggggatatagtaaatgactatccattcgtacatcattcagataataatagaaaatacatcctctcggtagatccccattaccatacaaatcttttcccggactccatactccgtacagaatctcctagcattgtcagcgacgtgtcgcatacgaatagcataagaaaaatatatatttgtgctatgcacggagttacatcatttagacctaatgaccttgtgttaatctataggacgaacaaaggactttccggcccagcgtattataattcagtaatcacttcgttatgtgtggttagcaatgttaggaatatcgatgaattcgatacagaagacagtttcataaattattgtaaaaaatatagtgtttttgacattaaagatttaaattatttttatcgttcaaaaaaatatccatttatagtttcatttacatataatttagcttttcctaaaagaccaaatcgtgctaaacttatttctgaagttggtttgaattctaatgcctactggggggtattagatttatccaaccagcaatttgaacatattattaaacttggtgaagtagatgaaagtgttattatcaattaa

SEQ ID NO: 152046 - DNA, 372 bp, Enterobacter cloacae
atgaaagtgttattatcaattaaacctgaatatgttgaaaagattcttgacggaacaaagaagtttgaattcagaaaaggaatcttcaaaaacccagatgttaaatctgtggttatttactcaactatgcctgtaggtatgattgttgctgagtttgatatcgctgatgttatagaagataaaccaagtaatgtatggaaaaaaacttgtcggtatgctggtattagcaaacagttttttgattcgtattttcacagtaaagagaaagcctttgctataaaaattggtgagctaaaaatttacgatcaaccccgccacctaagctcattaggcgacaacattactgcgcctcagtcttatcgctatctgtga

SEQ ID NO: 152047 - DNA, 624 bp, Enterobacter cloacae
atgcagatcccaatacctacgccaattcatgattttagctttaatattagcctattgcgtagattcatatatcagacagaagccgcaattagcgaaaatatagataaatacgaaaaagatgggccagatacctttgtcatagaagaacatccagaagataacatttacatcacattaaaccactacatgggtatcgatgatcagtctttcgacctcgataaaactttcaaaatacgttacccaagcataatgcggcgatcagccttcctgactatatttggtttattagaacacgaaatggaaaatttctgtaatatttactccaaggaaaaacaaacgaatgttaaattatctgatttaaagggttctggctttgaaagaatagacctattcttgaaaaaaatagtaggcctaacatcatctacaaattatcctgaactaaaaaaaataataaaacttaggaatagctgcgcccataacgatgcccgctttgtcacaaacgacaaccaaccgattaaagaaatagatgatctaatcaaaaaatatccagctctgcttgaaaaagatgaagagcaagtactattcaaaggtgatgtcttactgacatttctcaaagtattttaa

SEQ ID NO: 152048 - DNA, 960 bp, Enterobacter cloacae
atgaaaaagctgagaaacctattagcctttacactgcttgtattcagtggatactcctttgccacttgtacattggagggggggagtacagttacccagacagtgtatccaggaactattacggttcagagagatgttccggttggaacagtgttctggagcagtacattacctttgtcaaatcaggtaataggaggctgtacagccgatagtgtgacactctattattcttttgtttataacggggcgcagtcttcaggcttcactcattactataaaactccggtccctggcgtggctatgtccgtaacagtaacaggaatgagtggaggtttcttaggatattatgataatccccgctacgtagataatttcatggggccgtatactatctataccggcacaggcacaaaagtgtccctaattaaaacaggtccgataacatctggagtaatgccttcaggtcaaataggattatggactgcggattccggtgatacttttatgaaattgtttatgggcaacacgacggtcaaccaggttgcctgttctatatctacaccgagtctgactttcccaataggcgacatattggcatcaagatttggtagtacggtggggttcatccctacaggcgtacaaaatacacagaacctggggttggaatgcgacgccggagctaatatcaatattatgctacaaggcactagaaaccctgatgtcagtaccaccagcgtattagccttaaccgggcagggaaatgcggatgtggcaaagggcgtgggcgtccagctgttatataacggcacgccgttagtattaaataaccgacttgtgctgaagcggtcgtcaggcggacaagagacgtttccgattaccgcccgctattatcagactaaagccactgtttccacgggtaaagccgacgcatcagcgactctggatttaacgtaccaataa

SEQ ID NO: 152049 - DNA, 2535 bp, Enterobacter cloacae
atgagtagccataagcaggacgtgttatttaaacctgcacgtctcgcgtttttaatcgcatttgctctgggagcggtctcaacaaccggccatgcacgcgattattttaaccctgagctgattgagctggataacccgggcatgaagggagccgacctgtcggcgtttgaatccggttcgcagctgcccggcacttatcgcgtcgatgtcatccttggcgaagaggttgtcgatacccgcgagattaaatttgaggcggtgacaggcaccgatggcgaagcatcgcttcagccctgtctgagcgtcgcccagcttaaaagctggggcgtgaaaaccgagctgttcccggatctggcctctggtggcgagtgcgcgaagttgaacgccatcccgcaggcctctgcggagttcctgttcagcgcccagcgtctggttatcagtattccgcaggcggcactgtcaccgcaggctcgcggctacgtgccgccggagatgtgggacaatgggatcgccgccgcgatgcttaactacagcctgagcgggtcaaataactggttgcgcaatggcaacggcagcgacaccaacagccagtacgccaacctccgaccgggtattaacatcggcccatggcgcctgcgtaactacaccacctggagccgcgacagcaacggtaacgacaagtgggatacggtctatacctacgggcagcgggcaattattccgctgaaggcgcagctcacagcgggggatagctcctctcctgcagacgtgttcgacagtattccgttccgaggcgcgcagctggcttctgatgatgacatgatgccggactcgctgaaaggctatgccccggtggtacgcggtatcgcccgaacgaacgcgcaggtgatcattcgccagaacgggtatcagatttaccagagctatgtggccccgggtgcgtttgaaattaacgatatgtacccgaccggcggcgcgggcgatctggacgtcaccgtcaaagagagtgatggcagcgagcagcactttaccgtggcctttgcgtccctgccggtgctgcagcgtgaggggcgttttaaatatgcgatcaccggtggtcagtaccgctcgtacaacagcgaggtggagaaaaccccgttagcacagatgaccggcatttacggcctgccatatgggttgacattgtatggcggtgtccaggagtcgagtaaatatcagtcgctggcggcaggtatcggtaaaaacatgggtgacctgggcgccttctccaccgacgtcactcagtcgtggggtacccctaaagacatgccgaagagcagcggtcagtcctggcgtatccgctacagcaaaaactttgtcgagacggggactaacttcgccatcgccggttatcgctattcgaccagcggctactacggtatgcaggaagtgctggactcctacggcgattacagcgcgctgcaggaccgtcgtcgcaaccgcgcagaattgacgatgagccagaatattggtcaaaacctcggctcgctgatgctgagcgccgtgcgggaggattactggaattccggtaaaacgatggagtcgtacagtgccgggtataacaactcgctgaacagtgtgagctacgggatcacctatacctatagcaaaaacggcagtaccgacagctacgggcacagaactagctatgacaaggatcagcagattgcgctgaacgtcagtgtgccgctggataaattcctcccgagcacctgggccaactacagcatgaaccagagcaagaacaacggcaccacgcacaacgtgggtctgaacggttcggcgctggagaacaacgccctgagctggaacgtgcaggagggttatggctctgatggagtgggcaataccggcaacgctaacgctaatttcaaaggcacctacggtgaattgtcagcgggctacggctatgacaaagacagtaatcgtctgaactatggcctgcagggtgggattattgctcatgccgatggcgtgaccttctcgcagccgctaggtgaaaccaacgtgctggtgaaagcgcctggggcgaaaggggtgggcattcagaaccagagcggggcgaaaactgactggcgcggctacaccacggtgagcaacctgacgccgtaccgtaaaaatgacgtggcgctgatgaccgatacgctgccggatgacgttgaactcgagctgaccacaaaatccgttattcctactcgtggtgctgtagtccgtgccgactatgtcgcgaatgtaggcttacgtatgttattaacactaacaaatgtgaaaggggaatatattcctttcggtgccacagtaaccataaatgataatcttaagcagggtgctatcgttggtgatcagggccaggtttatttaacgggaatgaaaaatgagatcaacctaaccgttaaatggggagctaactcaggccaacaatgtaatgtccagacctctatatcaaatagcattagaaggggggatattgttcaagcaggggctgtgtgcagatga

SEQ ID NO: 152050 - DNA, 531 bp, Enterobacter cloacae
atgaaaaagaatattatcgctgctgctttcgttactaccgctgcactgtctatgtctaacgtattcgctgccgctggcactgtgaacttcaacggtgagattctggacgctgcgtgcaccgttgacgttggtagtcaaaaccagaccgttgaactcggccgttacaacaaaagtgaattttccagtgcaggtgccagaactgcggctaaaaaattcagcatcgtgctgaaagactgcccggcaagcgtaacttcagctgtcgtacgtttcgacggtacacctgatacgtctgactctgctctgctggctatcgacagctctgttgctggtgctgcgaccggtgttgctatcaacctgatgaccgctgacaaggctgacctgccgctgcacggttctaacggctacagctatgcgcttttttcaggcttagacaacaccctggatttctacgcgcagtataaatctaccgttgctgcggtaactgctggcccggctaactctgttgctaacttctcagttgtttacaactaa

SEQ ID NO: 152051 - DNA, 357 bp, Enterobacter cloacae
atgaataataaaactatggacaccgtgaatatcgtgaacaccctaattaactatttccacgacatttggcatttaccagcattgcagcttgttaatagggcgtggcgtgagagaacgccctccgtgctcctggaagcgttgcaatacactgaagaggcaatcaccgcccttgaacactggaacgctgctgtagagcacctggtgcagatgaacggggataccgtcaccgtggatcaggcgtggcacattgcaaatgatgtggaggaactcgccctcgcaatgcaacacatcaccgttgaactcggagagcttagcatcgagattgccaaggtttatggcatgattcattgtgaataa

SEQ ID NO: 152052 - DNA, 213 bp, Enterobacter cloacae
atgttttcttacattatgctcggaaccaacgacctgccacgcgccattacattctacgatccgctgatggagatgctggcgtatcctcgcgtcggcacggacgagggaggacctggcctgcgcccgcattacggcgaaggtttctacagcgcttatgtcagagaccccgatggcaacaagctggctttcgtctattacaccgcacaatcctga

SEQ ID NO: 152053 - DNA, 171 bp, Enterobacter cloacae
atggatgaagtcattggggacctgtgtttggaatcattgatagaatttatacaaacacaggttttcggatgtgacaatggaaatattttcaactgcgcaaaaatgcgtcagggatcacgtttcgtttgttgggtggtgacactcaataaagggtttttactcactcaataa

SEQ ID NO: 152054 - DNA, 189 bp, Enterobacter cloacae
atgagcagcaggagcgatattatcggggccgatgaatggcaggtaacgacccgcagcggcctcgtctacagtgaggtcctcggttggatcgacctggggcatgccaggggcgaagatatttccctgcttctggctgatttcagcagcggcgaagccagtggcagaccttattacacaatcagagaatga

SEQ ID NO: 152055 - DNA, 1176 bp, Enterobacter cloacae
atggctcgttttctgttctgtagttttgcgctggttctgctgtatccgtccggcattgatatgtatctggtggggctaccgcatattgcccgcgatctgggcgccagcgaggcgcagctgcacatcgcgttttcggcctacctcgcgggaatggcgtcgtcgatggtatttgccgggaaaatcgcggataaagcaggccgtcagcccgtcgccattacgggtgcagttatctttgcgctggcatcagtactgtcttcagtagctcaggaaagcacaatgttcctgtcgggccgttttatccagggcattggcgcgggtggctgttacgtggtggcgtttgctattcttcgcgataccttaagcgcccagcgccgcgctaaagtgctgtcgatgctgaacggcattacctgcatcatcccggtgctggcaccggttgttggctacctgattatgcttaaatttccgtggcagagtcttttctggaccatggccgcaatgggcgccatcgtctttatcctgtccgtgacggtgctgaaagagacccatcccggttcgcaacagccatatcacaccgcaaccctccatccggctgaaaagctgatgaatcgctttttcctgagtcggttggcaatcaccacgcttagcgtggcggtgatcctcacctatgtaaacgtttccccggtgttgctgatggagacgatgggcttcgatcgcggtgagtattcgacggtgatggcgctaaccgcgatggtaagcatggcggtttcattctccacgccctttgcgctcaacatcttccgccagcgcacgctgatgctcacctcacagacgctgttcctcgccgcaggcgtgatcctggcgaccgccacctcacacgctgtaatgctggtgggcattactctgatctgcgccggattctccgtcggctttggtgtggcgatgagtcaggcgcttggcccgttttcgctgcgggctggcgtggcaagctcggtgctgggcattgcgcaggtctgcggttcgtcactgtggatttggctggcggcggtgatcggccttaacgcgctgaatatgctgatcggggttctgattggctgtagcatactctgcattactttacttatggtcatccagcccgcagcgcactatgaagaagcccatcagcagtctcgatcttaa

SEQ ID NO: 152056 - DNA, 300 bp, Enterobacter cloacae
atgggtcgggagcgtaacattgccatgagtttgcccggttttgaacagtcgatgtttatggcggcccagccggatcacaactacattgccactgcgccgcactactgccatcactacaatcaactccaccagcgtaatctggtctgtctgcccattcccatcgatgaggcgcaggcagaaaagctcaccgtccccttcacgctgatctggcataaacggaacagccataatccgaaaatcctctggctgcgcgagacgatcaaagcgctgtataccgcaccaggtcaggtttttgcctaa

SEQ ID NO: 152057 - DNA, 3984 bp, Enterobacter cloacae
atgcagtccgaacaaaatcacaactcccgacatcttccattaccacaaagtgtcagagaagccattaccgcagcaagaaaacaggccggtacgttttacgcttttaccgaagcagatacaccactactgattcaatcccaggatggtacggcgagcggtaaaagctataacgtttttgctcaatacatcgaaagcgtaaatccagcaatcaaccctggcaatagtcatcgcaatctggtgtttatcacaccgttgaaatcacaaattgacatcccggaacaactcatcgctcgcgcccgagataagaagattgaattgttaccttatctttcgcaaggggatgtcgcagatcttggttttacgtcatgggtcaaatctcctgaagggaaaacacctacaaaccgggaacgttatcgtcgctggatcaagcaagccaacgaattgatgtcgggtgaaattaagcttatttttcaacgccttaaagctgaagttgatgcgcgtaatagtttggaagtacgtctggaaacagagattaaagtgggggcaacgtttgaacaaaaacgtctggaggatgagttacgtctcaatagttttcatttagccggccgcttacaggaagcgactgtggcgatgcttaatgccctgaatcaggatctggcggctttacttgatggggaagcgactaaccctcgatatgcactggcgacggaaatggttaaacatcttttcccgtttcagattgcactgtatcgccgatgtatcctgttggccacgacgaaaaagttcgatggcagcgtgctgttactgaaacgcgataaagaaggcggctatcaccggagttcacaaaacctggaccacgttctgggtcagaaaaaaagcctcaaagtgaatccgttaggcgagattgctaaccagactaatccacagcgaattgagagcttaaaagagcaatactggataaccgacgaagactcaccttttgcacaacgtgatattcgttttacattagttctggacgaagagcatgaagcctaccgtatcttccagcagaatgtttgccagacattaatgaacgacgatcagcaacttccttcgttactggcaattttacatcgtgtactggaatatgtggatgaatgttcttcagatgaaagagcgccagggtatacccctctgaaaaattatgtcgatgagatcaacaaagccttattacaatgtgatttacgaccagatttcgatcttaagaagctgaccagactctttagaaatagtttgcttgatatcgtcgtcgatagccgtaatgctgagcaggttatcgcgttaattggtaatattttcagttatcagattcagcgattttaccgtgagtcagatcttcgtcgtattcatttacgtagtcacgggcgtcactcatacactgaagtctatgtttctgaagatgaaaaaaaagttccagatgaatttaccttatatgaactgtatcagacactgaccgctctattattagcctctgctcggctggaaacacccaaacatgtctgcgatttgctggcacagcaggagatggcaaatcagaataacccattatcagttttcattcgtaaagcccaaaacattaaaggagatatagatcatttatcttccagtgagcctcagaaagaacagttgatagatgacttttttacctattttcaacccaaaacattgttttccctttcgccacgtgaacaggtaagaattgaggctgaacaactgaggggatgggtattactcaaatttcggatggagttaattaaggagttacccgaaatagcattattacgtgtgctttataatacacgtaatactattattttactgtcagctacagcaggatttcctgcaacgtataatgggcagtacagccgcccgtttctggataaatacgcccgtgacttgaactatcgcatcaggcagcgggatgttgattctgcttcgcccctgtcggcgatccgcgataacagaaaccttcaccgccctgtagcgctggaggtatttgacgatcaggtactggagtttttaccacaaaacgaggagcctgagttcaggaatgcatatcgtttctggctcaaaatgctcgaaccatactctacatcagttcagtttaatcgctatcataaacgagagtttcatcgtcagttacagagtatgttacttgcggcctatactggccggcacattttatgtattgggatcagtagccgtttttttgcgattatcgggaattttcttcgtgccaataagttaagtgcaaatccctatcgtggggttgctattcttgacaatgaaacacgtcgggggaatgatttacctcgtgtatttgaaatcactccttttgctgagcggcatagattgcgtgtcgtcatgtttgattcaaaactcaaccgggaagatccggtaagagactatctgcaaattgatcaccaaaacttagcaatatgcatggtttcccacttccagggggctggcacagggcttaattactatgtcacttatccggtaccgtcagaacctacaggagcagattcagagcaaatcgacttcgatgaattagcaatggtctgcggtagctactggagtcagattaatgcaactccatcgcgaaacacgctggaaaattatattaccttactcaagcattatgctcatggaagtgtgcctcgtcaggttggtgatttcgatacggatctagttgattctgatgctgcccaattgctggatactgaacataccgtcgagcttcataaaattgcaatgcaaactattggccgtacagaacggcgtgatgcccaaatgaatggggttattcgtttaccttctggtgttcatcataatgcattgtgtgtttttcgggatttggatcgtcacccaaatgcacaatcgttacttgcttccctgagtctgcataaccacctatggttcaaacgctcaaaaaaggatttattaaaagccagcttttcttccgatagtcaacgtagcgaatttgaaattaaagttgctaaagcaatagatatgtatagcgactttgaagctgaactgaaaaataaaattctgccactggcaaggcaaggtgatcgagatgcaattgagttaaatgaagcattacgtcaccgggacagttttaccgatcctcagtcatatataaagcgtcttaaacgcaacgtgattattaagaaaaatgcttaccttagcgactgtgtaagccatttttatctggagcgtactgccgattggaaaagtgtaatactggctaaaaccttagatggttatggattaacagatatttcagctggagcaaatccatacaaaccggaatattgtttaccccaatatcatgaagccatggctgaagagtcatccggaactgaacagcgtatttttgcgaagattctgggattagatgccaagcctttacaacaatacatccccattccttcattgatgccacttctaattggcaatattggtgaatggcaattacatcttgtgctccaggaaatgaatattacgcccattccatcacaagagctatcacactatctggatagtcattgttatgagttgtttgatgtgtattgcattaacaagaaccgaattgttgcaatcgatgtaaaaaactggcgaatgcaaggaaataaccgtcaattagcgaaaaaaatgcataataactcattgggaaaagtcagtgagttgcagaaaatagttgcagcaaaaacacagtttgatggtgttgacgtcgtttatcttaatacccgatatgctttaaacagcctcaacattcgtgccgaacactctaaccataagggcatctgctattataacctttttaaaaatatttcatcttatgaaaaagataatggcaaaaatccttatgatgcaaaaataaaatcagaattaagaataaatcaatacttacttaatattctaggagtgaattatgactga

SEQ ID NO: 152058 - DNA, 216 bp, Enterobacter cloacae; identical to SEQ ID NO: 39883

SEQ ID NO: 152059 - DNA, 693 bp, Enterobacter cloacae; identical to SEQ ID NO: 39882

SEQ ID NO: 152060 - DNA, 534 bp, Enterobacter cloacae
atgcaacagaatagcaaattaactaatgagcgcctggctcaggtctatcaaagtctgaagcgctgggctgaccacgatgacgctttaaatagctatatcagcggtcaaaagatagaccccatatttcatgattgtgttgtagctctggctgagctgcaggaataccggaaagctgccgctgagtccgctgagtccgctgagtccgctgagtccgctgagtccgctgagtccgctgagtccgctgagtccgctgagtccgctgagtccgcagggtggcaggccaaaaggccgggtggtaattgggtaagcatcaagaatgaggatattgaccactacaggtttaacgaagaggttccggtcagggaggtcttcaccgccccgccagcgctggtagtgccggatgaaattgacgttaatgaccccgcacttgatacgcatagaaaatggatggcagaaggctggaatcgttgccgctcagccatgcttcagactagacctgcaaataccagaggaccagattatgccaatgactga

SEQ ID NO: 152061 - DNA, 204 bp, Enterobacter cloacae; identical to SEQ ID NO: 39880

SEQ ID NO: 152062 - DNA, 294 bp, Enterobacter cloacae; identical to SEQ ID NO: 39890

SEQ ID NO: 152063 - DNA, 600 bp, Enterobacter cloacae
atggcaaaagcagagttagacaaaaaccttatcgctatagtggctggtggtatcaccgtatttaattacgatggtgagacccgtgaatatctctcttcatccgttgagttcttgccagttggtgtgggcattcccgccaattcgtgcctcgatgcccccggcacaattaatgaaggctttactgtttgtagaacagcggatggcaaagcatgggaagacattgccgaccatagaggtgaaacgctatacagcacaacgacaggtgagaaagtcacgatcaccctgccgggtgattacccgaaagataccaccacgcaagctcctgccacgccatatgataaatggaacggcaccgagtggaaaaccgacacaaaggcgcagcgtgctgcggagatggcggaggccgaacggcagaaaaacgcgttgttggcggaagcaacagccattattgcaccgctggcggatgcaaaggctggaggctatatcgaagatgaagacgcaccgagactgacggaatggcatcggtaccgatacaggctaactaaggtcgataccagtaccgcgccagaaatcatctggcccgagcctccggctgcgtag

SEQ ID NO: 152064 - DNA, 435 bp, Enterobacter cloacae
atgacaattgaatatgtatggagcccgtcaactgcgggtttttatccaatagttgagaaggatcgcctgatggccgccggaggatggcctgacgatggagtggacgtcacgggtgaagaatatgccgtgctgtttcctgcgcctccaggaaagtatattgatacgcttaatggacgcccacaatgggttgatgctccgccgctgacacatgagcagcaagtgttcgcggcagaacaactaaaggctaatctcaggaccgaagctgatactgaaatcagctggcgacaggatgcggtagatatagatatcgcgactgttgaagaaactgccgaccttgcagcatggaaaaaatacagggtgcagctgatgcgtattgatacatcaaaagcacccgatattgaatggcctacgcagccggaggctcgggccagatga

SEQ ID NO: 152065 - DNA, 237 bp, Enterobacter cloacae
atgtctcctgacgagatgggcgcattacaggatattctcaatagctgccctggtgcattctggaaacccaggaagattaaaatattcaatgtggattcttcaaacctccacaaatggcaaattcttaatttctcctcatacgaacattattgcggatggctttcggttaatcaccttaacaatttaacccgcgactttgacaccctatttgataccaaggaacattatgactcttaa

SEQ ID NO: 152066 - DNA, 327 bp, Enterobacter cloacae
atgaagtggcgctattcactcagatggaagttaccgcgcacgccgtgtccgggtccgcatgaactggtatctgaagtcgtggaggctggtcagcaggcgcccgagtccgtgatgtcgcgatgggtggctggcgcgggatatgcggtatgcgtggattttctggatgagagacaggtcagacgctggagcgatgaacggaaagctgccgtccgcaggcgaaatctggaacgccgtgtaaaccgtatcgcgccgttgtttgctgatgaactcatcgagcgtgaactggagaaccgcccggattattttcgcggaaaatcagcgtggtaa

SEQ ID NO: 152067 - DNA, 729 bp, Enterobacter cloacae
atgatccactcatcacacgcccttgtcacgctgaagccagcccgtcaggcggcattacaggccattatgacggtagaagagtcccgcaaccgtggggctcgtctgccagccctgccacatgtgcgcacctttttgcgcatgctgacaggcagcagccggattaacacagcggtggcgcagcgcattcctggtctgaactgggagccaaagaaccgaatgaccagcctcaaacaggtggaagaagcactcgatcgcctgattgccagcaagggggaacattgcccgctgccgttatccacggatgttctggccgaactgttcccggaggtgatgcacacgcgcacggaccgccggatgcagcgcgagaaaattgctttcacccgtaaaatgcgccgggaggaaagggcgctggaacatacctggctgctgcgccagaacctgctgggacaggccatgacagaacttaattttcagtcaccggaaactgtccacacctggtatcggcgctgggctgacgagtttgacgcgcgggagctggagcgtgggttctggcaatggcggacgcggttttcctcgctgaaatcgctggactggctgcgcgacagcggagagccgctgtacggcgtcattcatgaaatccggtttatcgtcagggataccccggaacatgtgcggcaggctgaacgctggctggttccgaacaagctgacggaccggagccggggatga

SEQ ID NO: 152068 - DNA, 432 bp, Enterobacter cloacae
atgcgtaacataatcacccccgcagtactgaagaccatgatcccccaggaatatgaagactggcgggacggtggcgaagatttacgccgcgaactgactcatgccgtgatgcgtgatctgacgtgtcccgaagactgggacatgaacggcgagtaccgcagcgagtttggcggtttcttcccggtacagatccgtttcacgccatcccacggcaatttcagcatcgcggtatgcagtcccggtgatatcagcccgtcctggatggtggtctttattccggtcagcggtcgcccgttctccattatcagcacgctacccgcctggtcgccggaggccatcactcatacactcagtctggtagccagcctcgatgccgatggttacagtcaggccagcattcttagtatcctggtaatggagggggctgcatga

SEQ ID NO: 152069 - DNA, 2049 bp, Enterobacter cloacae
atgtcagtcaccgagtctaatgcaaaaaaaaccaaaaaagccagtcccaaagcgactgcgcgcaaagagggcgcacaatcagatgtcctggttaccgcactggataacgcccccatccgttacaccgcctggtcccgcctttttatcggggaactgaactgccgcatcatcccgcacacgccggaagaaatcagggggtatgccgacagtattcatgcggtcgggcagatccataaccttgtggtggtggaatgtgacgatggtcggctggaagtggtatgtggcggcggccggacaaaagcgatcgggctgctggtcgcggaaggcaaggtagatcctgaaaacgtctggatttcttataaagcggtgccgcgtgaactggcaagggctgtctccctcactgaaaatggcagacacaagaaaatgcaccctgccgaacaggtcgccggattccgctcactggctgaagaagggaaaactccggcgcaaatcggtgatttgctgggctacggtgtgaagcacgtccagcgcatgctgaagctggcagggctggctccggtcattcttcaggcgctggctgaggacaaaattaccacagaacactgtcaggcgctggcgctggaagataacactgaccgtcaggtgcaggtctatgaagcggcctgtcgtgagagctggaacaataaaccggaagtgcgtgtgatccgtaacctgatcaccgaaagtcaggttcccactctcaacaacagcaaatatgcatttgtcggggaaagcgcattctccgtcgaagaaatccgcgctgacctgttcagcgatgagcagggcggttttgtggacagactggcgctggatgcggccctgctggaaaaactccaggtggcggcggagtgcctgaaagaggccgagggctgggcatgggccaccggacgcatggaggcggtcagttatcacggcgaggacagcgcggtgtaccgtattcaggatgagcctgacgcggtttacacggagcaggaacagcagcgcatggatgaattgcaggatcagtatgacgagaaccagaccgccagcgatgaaaccgacgcgatggagtcagagatggaggccattgaatgcgcggcacagcttcgggcgtggacgccggaaatgcgcgcacagtccggcgtggtggtgtcatggagtcacggtgaaatctgtgtccagcgcggcgtgatgttgcgtgaaacgtcagaaacggaagaagaacatgttcaggttaagacatatgaacgtcagcctgaaccagtggacgaaatcagtgttcccctgctgacaaaaatgtgtgcggaacggacgctggcagtccaggcggcactgatgcagcagccggaaaaatccgtcgccctgctggcatggacactctgcctgaacgtgttcggcagcggcgcgtataaccgacccgcgcagatctctctggactgtaagcattattccctgacgaatgttgccccgtccggtaaagagggcgtggcgtttctggctctgatgcaggaagggcaacggctggaagcgctgctgccgccgcagggctggaaacaggacttcaccaccttttttaccctcagcaccacagaccttagcgccctgctcagtttctgcacggcatgcagtcttgacggtatgcagacgcgcggcaccggaggcaccacccgcagtccgctcgatacgctggaaacggccctcgctttccacctgcgcgactggtggcagccgacgaaagccgatttcttcacgggccttaaaaagccgcaaatcatcgccgcgctgaacgaggccaacctgacaggtgcggcgcgggacgcagagaagatgaagaaagacgatgcggctgaactggcagaggacaaaatgcgggacacccgctgggtgcctgtctggatgcgcgcccctgatgcagaaaaagccccgtctgatgcagaaaacaacgtgtctgataccgaaaaaggcagtgctgatgcacccgatacggcttctgatgcagacagccaccacaccctgcccgatgcagcctga

SEQ ID NO: 152070 - DNA, 243 bp, Enterobacter cloacae
atgacagacaacacggcggcccccctgaaatccctgcctgatggcacgttcacccgcgaacaggccgaagcggtggcagcgcagtatcagaatgtcgccattgaagacgatcaggggacgcactttcgcctggtggttcgtcagaacggggaaatggtctggcgtacatggaattttgaaccgggtggcgagtactggatcaaccgctacatccgggattatggcatccgtaacacgcagtaa

SEQ ID NO: 152071 - DNA, 543 bp, Enterobacter cloacae
atggcagcacgaggcgttaacaaagtcattctggtcggtcatctggggcaggaccctgaagtgcgttacatgcccaacgggggcgcggtggcaaatcttaccctggcgacgtctgaaacatggcgtgacaaacaggacggggagatgcgcgaacacaccgaatggcaccgtgttgtcgtgtttggaaaactcgcggaaatcgccagtgaatacctgcgcaagggtgctcaggtctacatcgagggccagttgcgtacccgaaaatggcccgatcagtccggtcaggacagatacaccactgaagtggtggtcaacgtgggcggctccatgcagatgctgggcggtcgccgtgaaagtcagcctcagagtggtcagcagttcagcggacagccgcaacaggcggcgcaaaccccacctccggcagcgtccggcggggcaaaaggtcggggcaggggcgcaaaaggcaaaaacaccactgccgcgcagcagccgccagcgcaacccgatccggcgtatgacttcgacgatagcataccgttctga

SEQ ID NO: 152072 - DNA, 564 bp, Enterobacter cloacae
atgcatagtgaactcaaagaccgcattcaggcgatgcaggtcagactcgacgggcgcactcccgttaccgaaatccgggccagctcacagcttttcgtcacccccgatccggtctgtcgtcagctggtcgatctggcggatattacggattcagaccggatactggagccggaggcggggacgggggctattttacgggccatccgggaggcagcaccactggcgcggtgtgacgccgtggagcttaacgcggcgttagccgggcatctgcgggcggcatttccgggcgtgactgtctggtgccgggattttctggactggcagccggaaacccgctacagcaaaattctgatgaatccgccgttcagccatgcgcaggatatccggcatatacagcacgctttaacgctgctcgactccggcggggcactggcggcgatttgccccgacgggccacgccagcagaagatactccgccccctgtcggatgtctgggaaccgctgccgcgtggcacgttcacgtataccgctgtttcaaccgttctgctcagaatacaaaactga

SEQ ID NO: 152073 - DNA, 1383 bp, Enterobacter cloacae
atgacacaatccaccgcactggcactgactgccgacatgaccccgccgccagcgtccgaagacagccccgcgcagtcgtaccgggcgacgtactccccggatgacaacaaattacgcctttatgccgcgttacgcctcgatgatgagagttatcagaagatccacgccgtgggttttcgctgggcaccaaaacaggggttgtttgtcgcgcccgcctggacgccagcccgtgaggatatgcttctgtcccttgccggagacattgaagacgacgacaacaccctgtttgagcgtcaggagcaacgcgccgaccgtttcagcgtctacagcgacaaacgcgccggagagtcagaacaggaactcgtacatgtggatgtgctggcgtcggctattccggctggtcaaccgatcctggtcggccatcacagcgagcgacgcgcacgcctggatgcgcagcgcatcgagaacggtatgaaacgcgccgtgatgctgtttgaacgtgcggaatactgggcggaacgggcacaggcatccctgcgtcatgcgaagtataaagagcgccctgatgtgcgttatcgccgtattaaaaagattgaggcggatctgcgcaaatccgaaaaggccattgcacagtcgcagaaatatctgacgatgtggcaggcggagacgctggatctgaaaatggcgcagcttatcagtaattacgaccacataactgcctgtttcacgctcgataagtacccgcgtccgccggaaaaaaaccagtacgaaggccggatgtccctgcattcggcacttgataacgggattatcacctttgaacaggcccgcgatattgcggttcgctgtcacaagcgttcgatccgccatcagcagcgctgggctaatcattacctgaaccgcctggcgtatgagcgggccatgctggacgaaagcggcggagtggtcacccgtacgcaggagtttgagctgggcgggcaggttcagagccggggtgagtggctgaccatcatccgcatcaataaaagcaacggcgcggtcagttcggttgtcaccccgtcttaccgctttatgggctacaaagggacaatgacgctgacgcccgatcgtatcaccgactataaagccccgaccaccgaagaggccatcgctgcgaaacaggccgcaaaacgtccgccgatcgtcaactatccgggtgagggtttccgggagatgacaaaggccgaatgggctaaaaccccggcagattataaggccgtccggggtgtggcggaaaatgatgagcatggcgcgtaccggttccgccgcatcatgaccggcggttatacgctcgatacggtgtacatcaccgacatgaaaaccgtcgaaattccgaaaaaataa

SEQ ID NO: 152074 - DNA, 231 bp, Enterobacter cloacae
atgaccgtttctattgtttcaccttccgcagaggctgtaaagccccgccgacataagcgcatcagtcgcgccgagctttccgtgtcagagattgacccggcgttaaaggcattcgggcggcatattgccaggagtatccgcaaggggcgcggcgttcacattcccgcgatgaaaaacgccgctatcgggcaggtgctccgcacccttgaactgaaacgcgcatttaactga

SEQ ID NO: 152075 - DNA, 228 bp, Enterobacter cloacae; identical to SEQ ID NO: 79171

SEQ ID NO: 152076 - DNA, 135 bp, Enterobacter cloacae
atgtttcgcgggaacctgctgctgtattccctctggtatgaccttcacccgtttgagaaccttcgccgcaagggcgtaaacgagcacggcccggtgcagatgtccggggtgagcggtcaattttttacggtctaa

SEQ ID NO: 152077 - DNA, 132 bp, Enterobacter cloacae
atgccggttgacaggtttgtctggccagtgtgtggtgttttctgcctgtcggtgataatacgcttcctgttcctgttcctgttcctgttcctgttcctgcttatgattatgctccctgtctggtttcgctga

SEQ ID NO: 152078 - DNA, 255 bp, Enterobacter cloacae
atgtccggatttaatctcgccgcaaaatccagagaagaacaggataaggtcgcagtggacctggtggcgtcaggtgtggcgtataaagaacgtatggctatgccggttgtcgctgaactggtggtcagggaacagcctgaacatctgagagagtatttttgggcgcggctgcaccattaccgtctgctcagtgagcggctgccggataaaaattccccggaatatgcaaaaaatgatgatgaggttaaaaaatag

SEQ ID NO: 152079 - DNA, 438 bp, Enterobacter cloacae
atgtacggaactgtcagcgatatctgctgtaatttactgaaagtctttgagaataaagaaaaaattgccgtgattatctggaatgaagaagatgtgcgggaagtgggtgcggcttttaatccgactgttcccgacacgcaggcggttctgcgcgccatcggggacgcggacagcgatgcactctggcgtgacggtattggccggaactttgttgaaggagaactgcgatggctggccgcgctgcggccaccccgtcagattgccattcctgaagatgcgctgcgcacacttcttcccctgatggaagccggaatgaatatcccgcgttatcagacgcaggacaggatcgccgaagaagaggccgcgctggatacgctgcgatacctgctctccactgatacctcggcgcataacctgaccggaggaaaccagccatga

SEQ ID NO: 152080 - DNA, 429 bp, Enterobacter cloacae
atgcagcatgcagcccatcagcacaccctgaacgtcgaagaatccgatcgtctttccttcctgccgtatatgtttggcaatgattttatgctggctgaattacaggtgtacgcgctggcgaaacagtggatgcctgaatacagcggcggtttctggcattttatccgtctgccggaaggcggcggttacatgatgcccgattgtggtcgggtacatatgatcaacagtgaaaactggtttgatcgcaccgtcagcgctgacgcggcagggatcattctgacctcgctcgcgattaaccgccgttgctggacgcatcacgactgcggccatgccgcgctgacccgcctgtacatgctgcgtgatacccagctctggaatcacattacctttcaccctgaatgcaacgccatttatgccgcgctcgactga

SEQ ID NO: 152081 - DNA, 336 bp, Enterobacter cloacae
atgaacacatggcttgcagggttaagtgtcgaggtcgatggcactgaaatgatggtgcaccacctgattacagccacagatctggaacatgcggaatccggcatcatggaaatgggacgaacctggtggccagagctgaaacgggaggatgaccggcatcgctgggagtatcccggtggcgtggtctggttcaacagcatcactctcctcgatgacgtggaaaacagtatcctgcgcggtctgaaatttcttgatgcgtggactgtgaccggcacacctgatacccctgtactccgcgacgagtgggggagtgactggcgggatatcacccgctga

SEQ ID NO: 152082 - DNA, 222 bp, Enterobacter cloacae
atgaccgtaaaagcctttatcactcgtctgtcacgtttccctgatgatgcactctgctgcgggacattctggctggctgatgacttcctggcgctggacagcactctcactgaagacgatatcgacgtcgcaatggagctggcgcaggactgtcatgatgcgaatgacggatttaactggagccacctgcaatgggcaatcaatgaggtgaaacgcgtatga

SEQ ID NO: 152083 - DNA, 936 bp, Enterobacter cloacae
atgccgaactggtgtgccaaccgcctgatgttcagtggtattaaagaccgttatgccctcaaaacgtggattaccggaggtgagctgtctttgaaccgccgtgcgagaaaagaggggattcagcttttcctcgcgggctgcgcagggatactgcgtcccctgacagagcaggtatatccgccatacccgctactggtttccagcgggacggcggcagataacaggctttcgacgaaggcatacagcgactggctgacagcgtttatggccggagctgaactggatgcggaaacctgcaaaaaactgcatcagcactggctggacagtgatatccgtcattaccgctggtcgaccctcagtgacccggaacaggcggttatcagtcgactttatcagcagaaatcctttgactggggagacagtttccagccctcgccggtgaacgcatggtgggacagtctgtgcaacggggatgatgctgcgcctgccgctgaaccgatggatttccgtgaagtgctgccgggacgtctggatattgaagtgaacggttttaacggtggcctgctgacagatattccgtcttcatatggccattatgtgaatctgtacggctgtaagtggcctgtaggctatgacgctaatatctgcttcgaaggggaaaataccctgacggtggatttcgacacaccctggagtccggtcagtgaagtggttgttgcaacactcagtcagctctgtgacggtgaagttgagcactggttcgcagagcaggggtgcgactactgcggctacgcgcggtacatcaacggcgaaacggaggtgtatatcactgacgagctggaatgggacgagacagatcctgacgatgaagacagtttcctctgtgtaaccggcccggactggattatcaacaacgtggcacacttcggcggatga

SEQ ID NO: 152084 - DNA, 669 bp, Enterobacter cloacae
gtgtctgcaggaaatttctttctctatctgaatcatgatgaccatacggacatgcgtgcgctggctactattgagtcggtatcccgtccgctacgcggtgagtttattcgcaccgcatccgtggccggcgctgttctttaccgaattgatatccgtctgccggcgatgctggtagccatgtttgtcggcacgattaaggtgtcccagttttccggtatccttgcattactgcgggggaccggaggggctaatacttcaggcgagggagaagcatacccctggactccgggccgatacactggcccgtctcagcgccgccggttgaccctgcaactggatgacgatgcaagcgccagcctggtgatccccttgctggatgatgcttcagatcggcaacgtataacgcttctgcgcagcctgatgattgcaggctgtgtacttcacgaactggaaccacgttttccgcgactgctttcaagcatgccggaaccaccggtcacgctggatgcactgcagcagctggctacagggttactgaaggagagcctgattaatattcctgactccgggcagagggaagcatctcagcaagaggaggggagaggaacagagtctcaccccggatcagataccagtgttgcacgtaagaatatgaaaaaattcttctga

SEQ ID NO: 152085 - DNA, 972 bp, Enterobacter cloacae
atgattcatattttttgtgatgatggttctacgaacgtaaaacttgcgtggtttgaaaacgatgttctgaagacatttgtctctgccaactcattccgtcacggctggaaagtggattttggggggcaggtatttaactatatggtggctggtatgaaatatacctgggatgctgtcagccgggacgcggtctcaaccacaaacgtcgaataccagtatggtgatcttaacctgctgggcgttcaccatgcattgctgaacagtggcctggaaccacaggacgtctcactgactgtcacgctcccgctcagtgagtattacgatcaggactgccagaaaaacgatgaaaatatcagtcgcaaaaaggctaacctgatgcgcgatatcacccttaacaaaggtgaaacgtttacggttaaagacgtctacgttatgcctgagtcacttcctgctgcgttctctcgtcttgccgaaattaagccgggtgccggtgaaacgacacttattatcgatctcggaggaactacactcgatgccggtgtgatcgtgggggagtttgaagatatcagcgcgatccatggtaacccgtccgttggcgtatctcttgtcactcaggccgcgcagggggcccttcgtgcagcagaaagtgaaaccagcccactgattgccgacagggtcatccgtgaacgaaaagatcgtgcatttcttcacagcatcattaatgattcggacagaattggatatgtcactgacaaaatagaagaggctatcggggcactgggcgccagagtggtgagcgaacttacccgcttccgtaacgtgaaccgtgtcctgcttaccggcggcggcgcgccactcatcgaggagtcgattcgccgtgcctggccgctggcagcagaccgtatcgaggttattaaagagcctcagctggcgctggcccgggagatagcgctcttcaaaaatgagggctga

SEQ ID NO: 152086 - DNA, 429 bp, Enterobacter cloacae; identical to SEQ ID NO: 79167

SEQ ID NO: 152087 - DNA, 1275 bp, Enterobacter cloacae
atgttcgccctggcagacgtaaacagcttctacgcgagctgtgagaaaatcttccgccctgatatacgggataaaccagtcgtggttctgagcaataatgacggttgtgtaattgcaagatcgaaggaagcgaagcggctgggaatcaagatgggtgtaccgtggttccagctaaaagcgatggagtttcctgagcccgtcgttacgttctccagcaattacgaactctactctagcatgaacaacagagtcttttctcatattgaggagctggcgccgcgggtggaagcatattcaattgacgagatgttcgcagacatcagcggaattgaaggttgcatagattttgaggacttcggcaggcagctgcgtgaacacgtccggaacggaaccggacttacgatcggcgtcggaatggggccaacaaagaccctggcgaaatcagcacaatgggcatcaaaagagtggccccagtttggcggtgtgcttgcactgacaacaggtaatccgaaacgaacggaaaaactgctttcgctgcagcctgttgatgagatttggggcgttggtcgacgaactggtaaaaagctgaatacgtacgggatcaccaccgccctgcaactggcccgtatgaatataacctttgtgcgcaagaacttctcggtcgttctggaacggacggttcgtgagctgaacggcgaggcgtgtatatctcttgatgatgctccaccggctaaacagcagatcgtctgcagccgctcattcggggaacgaatcacaacatacgaagcaatgcgacaggccgtttgtcagtatgcagagcgctcggccgagaaacttagaggcgaacatcagttctgccggcacatcgccgttttcatcaaaacctcaccttttgccgtcaatgaggtgtattacggcaacatagccagtgaaaaactcctcatgccaacccgtgatacccgggacattattaaagcggcagtgaagtctctggatcggatctggcttgatggccatcgctatgcaaaagccggcgtgatgctgaatgacttcacgcctttcggcgtttcccagttgaatttatttgatgaaatacagccgcgtgctaacagcgatgagttgatgaaagctctggatgggattaacaactcaggacttggaaaggtatggtttgcaggaagaggtatagcgcctgaatggcagatgaaacgagatatgctgtctcctgcgtataccacccgctggaaagatattcctatcgcgagaatcagttaa

SEQ ID NO: 152088 - DNA, 969 bp, Enterobacter cloacae
atgaagcaaagaaaaacaattggcagatctattaactcacaaagtactgctgaagaccgctcttcttccgaaagaacgcaattctttacgttaaaaaccgggcgaaaagttaaatttacctttatgaccatagctccacaggatgtggaagcaaaaacttttgttcgccaggaaacaaatggacgtgatcaggaagctctcaccaaagcatcgttaaaagacataatcaagacaattaaatttcagcaattctttgcctgcatcggagtatggcatgacgataagattgaaattcttgacgggtcacggcgccgtgcttctgccatctttgctcatactgggctggatgtaatggtaacgtcagaaaacctttcggctgaagaagcaagacagcttgcaaaggatattcaaacagcaaaagagcacaatctacgggagataggactacgtctgttgcaaatgaaagagcgcggtcttaaccaaaaagaaattgccgaacaggaaggtatgtcccaggctaaagttacccgagctctccaggcagctgccgttccgccggaattgattaaactatttccagtgcagtcggaactcggcttttctgattataaaatgctgatagatattcatcagaacctgaatgtaaaaggaattggtcttgaagatctgactgaatgcatctcggctaatcttgatgaaatcatggcaaacagtgatttgccagaagaagatcaaaagcacgatatcctgaaactaatcagtaaagccagtcagtcactgatagctgcaccaccgaaagaaaaaccagttgtttcaccattatgggaatttaatgagaaagataaatttgccaggaagcgtataaaaggtcggacttttacatatgagttttgccgcctctccaaagaggttcagcaagaactagatgaagcgataaacgaagttctgctgaagcgtttttcttcttaa

SEQ ID NO: 152089 - DNA, 1254 bp, Enterobacter cloacae
atgatgtttttggggcagaatgacaaaaaatgtcatcaggtggtgaatatggaaaacatagagcagttgaaaaaagtggctgtgcgtgcccataagatgcttgtctctcttagtgaaaacatacggcaacagaaagacgaaatgcatcttaacgagttttatcaggtatacagtaaagcatcgttgtataagctaccaaaactaagcaaaggtattgttgaatacactgtcaatgaaatggaagcgaacgggtacagctttaataaaaagccgtccggaaacaccatgaagtatgcaatgacgctgcagaacgtcattgatttgtatcatcatcgcggggttcctaaataccgtgatcgctttcatgaagcattctgtatttatgtatcaagtttaaaaggaggtggtacaaaaactgtttcgactgcttctctggcgcacggattaagggcacatcctcacctcctttatgaagatctacgcatacttgtcattgattttgacccgcaggcatcgcttacgatgtttatgagtcatgagttgtcgatagggcttgtagctgagactgctgcacaagctatgcttcagaacgtcagtcgagaagaactactttctgatttcgttgtacagtccgtggtacctggggttgatattattcctgcgtcaatagacgatgcgttcatggcagagaggtggaaagaactatgcaatgaatatctacctggtcaaaatattcatgccgtcctcaaagagaatattatagataaattgaagcatgactacgattttatcttcgtggattgtggcccacatttagacgcgtttctgaaaaatggtattgctgctgcagatctacttttaacccccctccccccagcgactgtggattttcactcctcacttaaatatatagcaagccttccagagcttattgcaaagatagaggaagatggtcaggaatgtaagctgctgggaaatatcggcttcatgtccaagatcctgaataagcctgatcacaaaatttgccatagccaggcaaaagaggttttcggcggggacatgctcgatgctgtactgccaaggctggatggttttgagagatgtggagaaacctacgataccgtaatttctgctaaccctgcgacatatgacggcagtgctgaagccttgaagagcgcaaagctggcagcagaagatttctctaaggcagtgtttgatcgaattgagtttatcagaacaaataggggggcataa

SEQ ID NO: 152090 - DNA, 708 bp, Enterobacter cloacae
atgactacatcaacttcccctgtccaggtcaaaaaagcagttaacattagccagtcaaatgaactgacagaggctgcataccacctgcctctacaggcaaaacgtgttttgtggttatgcctgatgcaatgttatttcaacaaagaagatcctgctgaagagtcgccagtcttctcaataaccgttgcggattacgctaagttttttaaagttggtattgatactgcttccggcgatgttaaaaagggggtaagcgttcttgccgacagcaacgtaaccttctatccgaaggaaggggagttcgaagaagttaagcgtccctggcttgctgaggcaggtttaaagcgaggccggggtaagtggcaaattgagtttaactataaagttatgccgtatctgatgggacttacaagccagttcacaacttattcattgtacgactgcggtaagctcaagagtgtgaaagtgatacggctatatgagagtctgtgtcagtaccgacagtctggcatatggataaccactccagagtggttatctgatcgattcatgctacccgcttcccagcgaaccaatattgcggagatgaaaagaacctttcttaatcccgctctgaaaaacattaacgaaagtaccccgctcaaagcctcgatgaggcaagtggaggacggtaaactcatttttactattgttgatcgcaacagctga

SEQ ID NO: 152091 - DNA, 1353 bp, Enterobacter cloacae
atggcaatgaaacttatccgcaaaaaagctcccagaggtggactcatccgttggttaaccggggatgaagaaacggcagttaagaatatatcaggtcgcaaaacatcagcgggccgggaggaatacattctggcggaaaaggtgctgcttgaaatgcgccagcgtgaagcctggcttcagtgtgactgtgtacctggagactcgccggcaatgaacagcgccaggctgatgcaggataccggtaccctttttctggccgggtttaatcatgaacacgcaccagaatgtccaatgtaccgtaagttcagtggcgatgatggggctacggcaggcggaaccaggaaaacggcaggcagccgccgcataagttatcggaatttcctgcctccggacgagaacggtgccagagtaagagctccaggacatccggttgcgtccgccggtgatcgtacaagacgcactcgccgctcacgcatcgcacgtcttcttctttccctaatcgaagatgccggtcttaaccgacttgaaagtctctctcccctcccctcccggaaagcaatcgatgcgatcaacgacctcagaagagtagcagaatcacaggagtttatccgcggccgacagttgtcggatattgtccgtttccagcccgggatgacccagtacgggaaggagcagctaatggaatcacttgagaatcatgacgctaactggccagcaggcagagcccatatgttctttcagatcttcatgtctgagtgcgtcacccgggatgaggtcatgttcagttggccaggtggcgaagtttcgtttcgtcctgagcgcggtattagcataaatggagagtcaactgacgggctgcggcccccatattgggtgatcctggcgttccggcgcggtaccgacagtaaggtgatctgtagcgaaggttatgctcatgccctttaccgtaggggatgtccggtaccggtcgacagcgggctggaaaggaaaacgatagacggtattgcggaactggcccgctggcttagccgtaaccctgacgccccggtgctgagtctggtgaaacccctgtttgatattgaggtggtgactgaggatgagaaagggtttgtcctgccggatttcatcctcaatgccaggacgaatgcaggacagcattaccgcttcataatcgaaacaatggggtataccgatgaagattattgcgagcgaaaaacagagcagcatcgcgggatgaaaacgttaggtcaccttttaacggatccaccgagatggccgggggaatcggacaccagtttaagcaaatacctgtggggttatttcagacatctggactcaataacgcctttgtaa

SEQ ID NO: 152092 - DNA, 258 bp, Enterobacter cloacae
atgatgacgggaaccggaattaacacggtacgtatcaacggtgtggtaaaggccgttaccgaacttgatccagtaactctcagcaatgagtggtcaaagttgaaaaacgagaatgatgacctgtacagctataaccgtcagattaatcagggttggcgatgctttattcttcgcctgctgggtattcatctgcctgataaaaaccgtgtacgtcttgaaggcattaatgccagaaaagaatctgtttatccagaatga

SEQ ID NO: 152093 - DNA, 141 bp, Enterobacter cloacae; identical to SEQ ID NO: 79164

SEQ ID NO: 152094 - DNA, 198 bp, Enterobacter cloacae
atggataatttttataactttatcttatcaacatacccatttatttttttattcatggtagctatttcatttttaattaggataataacgctgccaccaatatttatggtaacgattagactcatgtactcaatattattgataatcgttattgtgagccttttagttacctggtggcatgtttataagcggacgtga

SEQ ID NO: 152095 - DNA, 549 bp, Enterobacter cloacae; identical to SEQ ID NO: 79163

SEQ ID NO: 152096 - DNA, 138 bp, Enterobacter cloacae
atgaagataaaaaatatattaacgattattatttatcactattacttagcaaaagcacaatacagttcgatgaagccattatttatcaataagtttaataatagaaccgacatcattttgtcgctcttttcgtattag

SEQ ID NO: 152097 - DNA, 171 bp, Enterobacter cloacae; identical to SEQ ID NO: 79161

SEQ ID NO: 152098 - DNA, 360 bp, Enterobacter cloacae; identical to SEQ ID NO: 79159

SEQ ID NO: 152099 - DNA, 312 bp, Enterobacter cloacae
gtgtccattacgctgcagaaaatatatgagagcctgagagtggagtacggtcatcacgagttatggctggactggcgggagtggcctttccggcagcctaatccggcgctggagcgccagccggttgtcatatcctgttccggtcgtcagcttgccgcctgggacggtaccggtgacagctggtcttttgttcaggggcgggagcagcttcactttgatgaccagtctgattacttcaatcccggaagaaataaggacaactttctcgacgccagacgtattgccgagttaaaggaaaaataccggttctga

SEQ ID NO: 152100 - DNA, 624 bp, Enterobacter cloacae
atgagcaaactgccttcccctgacatgatccgtcgcatcgaggacgccgcagcggcgctcatcgccgccggcaccccgaacccgaccaacgtccaggtccgtgaccacctcggcggtggctcgctggccaccatttccccggtgatgcgcgcgttccgcgcccggctgcgcgaacaggccagtgaacagacgccggaactgccgccggcgctggcgcagctgctgaccggccagctggccctgctgtggcaggcggcggtaaaacaggcggacgccggggcgctggccgcgcgcgagcaggccgacgccgacattgaacaggccgacctcgagcgcgacgccgcgcaggcccgggtggctgaactggaaagcgagctggcggtgctgcgcgaggtgatggccgaacgtgaccgcctgctgcaggacatccggcaactgcgggatgaggcgctgccgctgcacgagcaggtggcccgtctcaccgccaccggcgaacacctggcggcccagctgaaggaaacgaaggcggaactgaagggcgccagggaagaaaaccgcgccctgcaggccgagctgctgaccctggcccgggcggagccgaaagccgggaggggggcaaaatga

SEQ ID NO: 152101 - DNA, 546 bp, Enterobacter cloacae
atgacaccggaaatcagacgccgtatccacgcctttcacaacgccctggtgctggccgccgacacccgctcacatgagtgcttccggatgggccgctttcaggagctgaaagccttcccacacggctgctgcgatctggccagcaactttctggcgcagtatcttcaggacggtgatccgtccctgaagccggtgattatccatatgcagacgacaaaggatttccgggatgagtatcggtcgaccattaaatcccacgtcatcgtggaggtgacaggctggtttgtcgaccttaccctgaaccagtttgtggaatatcaggaccgggtggtgattgacgatcggaccgggatcctgggcaccctgctcagacgcatccgtggcagtggagggacagtcacggagcgtggtattcagctcaatgcagggctggacgaagacggacatgaactctatgcctggctgcgcgccaccgcggacagcctgctggcatcctcccggccgtcaccggcggccaccgacggaaaagaaaccgggcgcctgtga

SEQ ID NO: 152102 - DNA, 198 bp, Enterobacter cloacae
gtgaacctgttcagctttctgaaaagcagggaaaaaacctgcacgggaacggtgcgccgcacggccgccgtgatgacggcagcatcgaacgggacggcctttttcggcgttctgttccacggggagccggactggttgcgggtgtacaccagtgacctcagtctggcgagcgagggtggcgttcctgctgccggatga

SEQ ID NO: 152103 - DNA, 543 bp, Enterobacter cloacae
atgccttactacaatggccgctggcacctctatgacgaacgggaacggcgggaatacggagaacgaaaacggcaggagcgcagccagcaatggcaggcgaactggatcagccggcagggactgaaagcccgactctggacggacaaggccatcgcgacgttcctgcccccgccggagcacgcgggccccatccgggcctggcggagaaaggatgtgctgacggcagaagaaaagccggactttcaggcgtggatggcgacccgccgtgactggctcgatgcgcgctgccggctgccggagatcacctacgccacttacggcctgctggcgattggctgggaccggcgggccccggacaaaccgatccgctaccagcggctggtctggaatgaggcgaaacaggcgctgacggactactcacggcagtggcataactcgccgtttaccggcgcggattttgaagaggacgatccggatgacgtcgcctgcgcgatcttcgaatggtatctgcgccagtgcagtacatcaccggtaccggaatag

SEQ ID NO: 152104 - DNA, 873 bp, Enterobacter cloacae
atggataaggatgagttagccgcacggcgcgccgccgccattgcggaagacgcgtgttttacccggggacgcctgcgcgatgaattccggatgaagccggcgcccggggtggagccggtcagatggtataaaagcagttatggtggccagtatggcgtgtaccgtatcgctgactgcgtcccgatgcgggagaaacgcccgccgacggagaagcaacggcgcgccgggcagcgtctggccgtgctgtcccgcctgaacagcccccgcggcagactggcacagaaagcccggacctggctgagcctggcgccgttgttcctggacacggagaccaccggcctcggctaccacgccgaagcgctggaaatcggcctgacggaggccgacggtcgcgtggcttttgcaacccgcctccgcccgacggtcgacatcgatccgcaggccggtgccgtccacgggatcacggcaccggcactccgcgacgaaccgtcctggccggaggtggccgcaccgcttcagcacattatcggcgcccgtccgctgattatctttaatgcgccttttgacctgcgtatcctgaagcagaccgcggcggcacatggcgatccggctccgtggctggacgggctcacggtccactgcgcgatgcagctggccgccggctattacggggccaccaaccgctatggctccatctcgctcgccagtgccgcccgtgaggccggcctcacctggcaggatcgggcgcattcagcccttgccgatgcccggatgaccgcgggcgtggtggccgccatcgcggcggactatcttcagctgagacgggaactggccagttatgaagattccccgccggcagaaccgcaggattga

SEQ ID NO: 152105 - DNA, 1035 bp, Enterobacter cloacae
gtgaataaaaaagcgtattcaggcagtgcattgccatcccgcctggcgttaccgccccgggtgactttcgttctggagatcagcggactcttcctggtgtggtggttcctgctgacactggagtttacacccgtctcctcttacgtcggaaatatcgcagacgtcgcgcagttcattggcggaataattgtggtgatctgtgtctgccgggcacaaagtctggccgcgttcatacgcactttcgtgtatggcggtaccctgctagcgttgctgcccgtcattatcggggggctgtccgatacaatcagccagtccagcgatgaaaacccgttgttccccgtcgtcgtcatcatggtgtgttgtggcatggtgtacgctgtctgcaacctgcttaccggcaatgaccccgccggtgatacggaagtccgggaaggcacaaccgcgtgccagactgccagcagtgtacactatacggacaggcgcattgccgccgcccatgaagcgggccacgcgctgatgtatgccgcctggtctccattgccggcaacgctgcaggtgagcattaaaacgtcgacagataacagcggttcgctggggtacgtccggtgcggagagccccggccccgtctgatggacaaaaaccgggaagcgtgggaaatgctgctggcgctggcgggtatggcgggcgagcagcactataccggtgacgtctcatcgggcgcgttcgatgacggaagacgctggctttctcatgccgtgccctggctggtctgccacctgaccaccggtatctactatcctgaccccggcacaccgctggagctggcgtccaatcagcgtcaactgatggcactgaaagcggagcataacgcgctgctgacggaattcttcaccctgaaccaggacctgcatgccaggctgactgacgcgttgatgcccggggaaacactggaagcccgtcatctacacccgtacctggcggccgtgcagctgccggacgcctttccccgggtcaccgcgccagcccgaacctga

SEQ ID NO: 152106 - DNA, 255 bp, Enterobacter cloacae
atggataaagaatcagtgttttcacttagctatgagcaactgacccgggaagctgaggaagcaatatcaaaatgcgacctgaaccgggacgggattttttacaaccgggagctgagtaaagcctctgaagtactgcttttctggcacaggctggcgattctcggctatcagggcgtgacaggaaatgagcgtgttgaggccgacctgcagcgtctgaaagcccttatcttcggaaaagaggaccgcgtatcgtga

SEQ ID NO: 152107 - DNA, 1233 bp, Enterobacter cloacae
gtgacaacggtcaaagcccgccgcccgtcaccgctacagagaagaattctgattgtgctggccgcgctggctgaacgatgtcccggccccgtcgccacacgggatatcgagcagatactggcgaatggcagtgaacgccccgtctatggtaacaatctgcgcgactcctgccgtcgtatggagaacgcgggctggattcgtaccctgcgtacccggaacctgcatctgcacgtcgaactgacggcggcaggccgcgaactggcggccccgctgctggccaccgagcaggagcgtatgctggccgaacagcgtgcgacggccgtctgtgttctgccgctggtcccggccggaacggcggaggatgccggtacgccgggcgccgatcggccggtacagctggatggttcctggcacatggcgtgccggggcgattacgtgctccgtctcgacggaaccacctgcctgcaactgtggaacgccgccgggcagctgacgcgcctggcgggcgatccactgcaggtggccacctggcttcaggcctgccatgatgccggcattgttgtccggatgcagatcaatgaaagccacacgccggaagagggcgaacccgccggtaccgccacaactgacctgacggacacctggtaccgccagctggacgccgcgctgcaggcggaggggatcaccggtctgaatgaggagatcagacaggcagttattatgcccggcgaggcgctccgcgacctgccggcaccggcgcgcctgctgcgcgttctgcgcgagagtccggaggcgttcccgctctcggctgccgcatacgaggaagacacggaagccgcgctggccgacctgctggaacgtgcggggttcaccggcggccaggcgcaggagctgcaaatgcaccgcatccgctggcctctgatgagtcaggaagaatatgaccggcacgacctgaacagcctgctggacgaactggagcggcgacagctgttctgcaaacgtgaccagctggtcgccctcgtcttttcccctgtcagaaaagccggcgagaactggactgaacgtctgcaatggctcttatcaacggatggatttggattccacagtccgctatctcgtgaaaatgccacaccggcgctgaattatctggctggctacgtcggacaagacgccgttaaacagctgaccacctacgtggtatgggcgggagacaaacaggcgggaaagccctga

SEQ ID NO: 152108 - DNA, 567 bp, Enterobacter cloacae
atgggcgggagacaaacaggcgggaaagccctgagccagtcctgcggggccggtaccattcatcttatcgtcagctgcagcaggagcaagtcagcgccggcggctgagaatacctttccctacgagctgaagggacccgctgaggcaatagaggcctggagaaaccagattcgcgcaactgacaggcaaatcatcacgggtgatctctacaaaggcctgcactggcagcgcgccaggagcgttgctcatcgtcacgcagccgtcgagttatgggccgtatcagcagggctggggctccgtcatgttaccgatcctgccgtaccctatgaatgcacctttcatgccctgccgtatgcggcaggcgagcactggcaccgacttacagcgaagcctcccttaccaggacggtgcccgacactggctgaactgatgcggatctgcccccaggatcagtttgtccttgccgtctctcctgtgtaccttcgcgctattgagaacgatattctggcaggattaccggcactcaccagcgcagagcaacagttaaacatcatcacctctaaataa

SEQ ID NO: 152109 - DNA, 1809 bp, Enterobacter cloacae
atgtctcgcagctcagaattttcttcatatgtttttatcaaaaacgatcttgaaagaatgggatggaatacaaagaaccctagtaaaggtcatggagggcaagtatatactcagcaggaatgtcttgatcaccctgagatctcacttggattgggtaaacaacggccagaatatgtcataaaaatcagtgaagatacattctgggtgatagaggcaaaagctcgccaccaaaatcttgatgatgcttttaatgaagcatttaactatgcttgcgatataaataaatcagatattatcaaagcaaaaatagttacaggtgtggcagggaatgatgatgaaggctatttattaaaaacagcttttattgatacgcacggcaatcacactttaataaaatataacaataaattaattacaggtttactatctccacagcaggcaaagtatttatcagaaaatgacacagcaaatctcaatgagttggtaactgatgaaaacatcctcatggatattgccgaaagcataaacgaagagttgcacagggcctcaataaataaagattctagagcaacagttatgtcggcagtcttactttccatggtttctgacacattacccaacttcaacgcctccccagatgtttttataaaagacatcaacaacagagctgaagatattcttattcaccatgcaaaaagagaatttgcagattatattgaactaaaattaccacaagaatcctccgctaaagaaaaatacaaatccgctgttacaaaagtatttttcttattaagaaaaataaatataaaagcagcaatggacggtagccatgaccttttaggaaaattctatgaagttttcttaaaatacggtaatggagcaaaagatattggtatagtgttgacgcctaggcatataacggaattcgcagcagatattttagacatcaaagccaacgatctagtctatgaccctgcctgtgggactggaggcttcttggttgctgcatatgataaagtcagaaaagaagataaaaccggtgttgaaatgtttaaaaaacaccgaattttcggaattgaacaacaggcgaatgtagctgcccttgcaattgtgaatatgatttttcgaggtgacgggaaaaataacatcattaatggtgattgtcttagtgtagctttaaatcgtaaaatcagaaatgatgaagtttctgctgaatatattcacgatgagagaattaatgcttcaaggcaaaccaaaccttcgaatattccgcctgtgactaaagtattaatgaaccctccatttgcacttaagcgtgatgatgaacaagaatatactttcataaatcacgcactatcacaaatgtgcgagggaggcttattgctttgtgtaatacccatttccgttatgtattcttccggaaaagaagcagagtggagaaaacgaattgtcgaaaacaatactttattatgtataacaacccttcccaatgatctattttacccacaagcatcagtagaaccagttataatagtcattagaaaaggagttccacaaaacgcccaaaaatgccttttttgtagaattacggacgatgggtttctgaagcaaaaaagaagaagggttcaacatggtaaaatcagtcaattagaatcacttaaaggtgaaatatttaattatatacataatggaaattgtcgcgaaataaatggaatccttcaagccaaagaattatcttatgataataacgggttagaattcatcccacaacaatatcttgacaatgaaaaacaaacccgcatcttttaa

SEQ ID NO: 152110 - DNA, 483 bp, Enterobacter cloacae
atgcgcataaatcaaatatttaatattgaagctgcccgttcgaaaagtaccgaagattacggcatgggaaatgttccctttgttacaaatactgagattaataatggcgttgtgaaatatgtagagccattagaaaaagataaagttttctgcggacctgctatttgtatatccgggttaggatatgccaccgttcactttggtgaatttcttccaaaaggtaacggcggagactcctgcacagttttaactccattacaagaaatgagcaactacgaaatactctattatgctgcattgtttaatgtatcacatggttggcgatttacatttggtagaaaaagcaacactacaagaataaaacaccttgaattgtctccggttttctctgaaagccctttagacatgacttcagagattgataataacaacttaataattacgaagctacttttaaagaaagaagaagaattaaaaaaataa

SEQ ID NO: 152111 - DNA, 471 bp, Enterobacter cloacae
atgaataagataagtcatatcgtcagtctaatcgcccttgttgttgccgcttttgtcttcggcagaagcacacattttgaatacctgtcatggtattatgagaccaatgacttactatttaaagaaattactccatcattagtatccagtttatataacggattctactccgccctgtcagcatgtattatttacgcgttactatttctattaaagagaatccccaaaaatatcgtagtttcttgtctgcttcaattctgtattaatattgggatatatacgctttttgttgcagtagataaagaatatagtaatttgtatactttaggctctggtactactgacatcacccacagctatctttatggggcgttgctgatgagcactctcctgaccgtcgcgatcgtgagcgtaatacatgctaagtttctttcttcaaagcataaagatgggctacataagggcgtttga

SEQ ID NO: 152112 - DNA, 618 bp, Enterobacter cloacae
atggtcgatcgctatcctaaatggtggtttttctatcttgttgcaaagtcattattctatgtcgctggaatactaagccttatcttttatggaattgtatatatcaccgtagccaatagttatgatgaatacataattggttttggctgctgggtcctgcttgttgcgccgtttgctgtaaattattttatagcgaaaaaacgcaaacagaagatccagtcagctttagttgaaatcaaggctactggccatttcaacccaacgaaagagtctgaagcatggttcttctggaaaaacacctatcttggctttgactaccacaagggcacaatcgtgtacatccggatctacccgggcaatgtcatggatgttataggctttgatgcttacagcctcacccgcacagaggttgagggttctaagctacgcctgtacacgaagttagcgtcactgccaatgatccccattgatacttatgcagcttcaaacctggctaaccacatccatgcgatgaacaataaaggctactcatacaacttcaacttcccggagattgtgaagcaaaaacgtcagaaactcgaatctcttgccggaatgcctgtaccagatttagtgtaa

SEQ ID NO: 152113 - DNA, 2157 bp, Enterobacter cloacae
gtgaaaaaacaccttcttgcgctctgcgcaggctttcttgcgcctgtcgtaactgcacgggctgccgtcacctatgaagatatcgtgtcggcggccaccaatgcccaggatttatcgcgccaggctctggtgaccatatttggtgacgtagtcaccaacccgcttgccgggggtaacaccacgatggtcggtaatctgtttgccctgtttaacggcatcatcgctattcttgccgtcgtctggtttatcttcatcggcctgcgccatatcaataaaaccggccatcagggcaaggtgttcagcgccgatcgtgacatcgtcggcaccatgagcacggttgccggtttcctgatgattatccccacggcaaacggatggagtctggcccagctcattatgctctggggctcctccattatgggcgtcggctctgccaatctgatggtacagaaggccgcagatgacatagccagcggttattctctcaccgtccagcccacgcagtcctccacccgcacggccgcccgcggcatttttgagatgcagctgtgcaaatacgccattaacaatacgctggatgatttcaacagcacgatgccctcttccacaccgaagatgacagaatcgtccggcaccagcggcggtacttataccttccggataagtaacggcagcggcgtgtgtgggacggccagcattccggaacagcagggcagcgacgtttcgtcttccggtggcttttttaatccgttcagttccgcagacacccgagaagttgtggatgcgcagcacacagccatggatacgatgattaaagacatggatggtgtggccagcgagtttgtgaaagcgtttatggacaagcgggcaaatgatgccggcacgctgccggacattgaaagccgtatccagcaggcagcaaacacttacgaacagacggtgcagaaagcccttccggcgcaaaatgagcagagcggaatacaggacaacctgcgtaactatctcgatacgtatggatgggcatcacttggggcctggtaccagacgtttgcgactgcaaaccagcgtctgacggaagtggccagtcgctcaccatcgaccagcggcatgtccaccctaggggaagtgggtaacgcagagttgttcacggcaatgataactgcctaccgcacccagttgcagaactctacctacgcacctccacttggtataacagtatcagaagacgaacaaaaggctgtagatggcaatgatccaaacagtgttttaatgaatacgatagcgggaccaatgcagcgattcaccaataaaatagcaacaatagctagtgggacagggacagagagcagtcaagtcaacccattgataaaaatgaaaaacataggagattatacactagtagcagcagaagggacgcttactgcatttactgctacaagagtgctagcagcaatgggggaaggttctcttattggtaaagcgctcaaccttactaccggtactgtgagtggagtaaataaaggcttagacgccatatcccccgccgtgtatttcctgctcttattgttgtttacagcaggtttcacgttgtccatttatctaccttttatccctttcatctactggatgaccgggattggtaactggattgtcagcgttctggttggatgtaccgcaggaccgctatggggggcgacgcacctcggaacatcacaggatcgcggtagcagggctgcctacgggtatatctaccttatcgatacaatgatccgtccaccactgatggtgttcggatttttctttgcatcggtggcgatcattgctgtcgggacgattttgcatgctctgtttggtgcagcacttgtgaatgttcaggccacctcgttgacgggactgttcagcctgattggttttttgatgatctacgcccgtctctgtactgcactggtttccagtatgtttgccctgcaggcttatcttcctgactacgtcatttcgttcctgggtggacgcgatgcagccaatactctgggtaatatggcgagttctgttagagatatatttgcggccgggggacaaaatatgcgtagaacaccaggtgttgatgtaaaagctctgaataacaaaccatcagataaagatggtattaatggataa

SEQ ID NO: 152114 - DNA, 150 bp, Enterobacter cloacae; identical to SEQ ID NO: 79192

SEQ ID NO: 152115 - DNA, 840 bp, Enterobacter cloacae
atgtcgcggccggaagccgtcagggattttatggatatccatcttccggcggaactgcgcgcgctctgtgatttcagtacactaaaactggaaaacacctcttttgttgaagatgaattacggggctattacagcgatctgatctggtccctgcgcaccacgaaaggcggtgatggttacatccatctgctcgtggaacaccagtcatcgccggatcggcacatgggctttcgcctcatgcgctacgctgttgcggcgatgcagaagcaccttgaagcaggccataaaaagctgccgctcgttataccgatgctgtattacgcaggaaaacgcagcccctatccctacccggttaactggctgaaagagtttgatgatccggaactggccgctcagctttacagcaacgattttccgctggttgacgtcactgtcattccggatgaggaaattatgaaacaccgccatatcgcggcacttacgtggctacagaaacatgtccgcgccagggacaagccagacgatgtggagcgccttgcaatattgttccagtcagagtatacagacggacaaactctgaccattctggtaaactatctgatacaggcgattgacaaacctgagccagagaaattccttcaggcactggcccaacgtctgccacgatacgaggaggatctcatgactattgctgaacgtcttgaacaaaaaggtcggcagaatgaagccgaaaaaattgcgagaatgatgcttaaagatggctatgatgagtcagtcatcaaaaaattcactggctttactgtcaaagaactgaaagagacgaaagaacataagcactga

SEQ ID NO: 152116 - DNA, 480 bp, Enterobacter cloacae
atgcacatgaaactggtcaacggcaaacccattaaacacattgcaaagctctttatcgacagggcgtcagaatgccgggggaacatccttcttaccggggcttccggcacggggaagacgctgatactcgcgcattatctggcagacaacccggctgactggcatgatttcaatgaggtgatgcccgtaccgtccatgctgacgccggagacgctcttcccagcgcacagcgtcgccatcattgacgtgccgtatctcgatacggcatgccaggaagtcctgctgaatgtactgagaacggcccgccgcgatgggcggcggcttattctctcctgccagacagccccctactggctgatgcttccgcagtttgagatgctgttccgcctgaaacgccttcgtgacggtcacggcatcagcattgagtgtcacaatatgaacttactctcatgccgtaacgctgaaagccttcacgactga

SEQ ID NO: 152117 - DNA, 540 bp, Enterobacter cloacae
atgataaccgatgacaaaccgaagaaaccccgccgcctgtggcgtatcacccgcgggctgctgagccttttcctgccggtgcaggagacacagtggtacctgcgcagttcccgggacgtcaccgcccgcaacctggcacgtatccggaaggcctttccggaactggatgtgacggaagaacccccggagtctccggactgggaggcggccgtggccgcctccgggcaaacaccggaagcgctggaaagcaactaccttacgcagcgccggcgctggcggctcatgttctggctgctggccattccggtgccgctgttcaccctggggccggtatacgccggcaacggcctgacctttcatcagttcagcaccggcctggtgctgttctccggtgcgggggtggcctggtcaaaagcactgattgtgaccttccggctgtggcagttgcgtaaccgccgggtgagcgaggccgaacgcggaaccttccggcactttatcgcggaaacccgcgctgtgcgcgatgccattcgtggcgactga

SEQ ID NO: 152118 - DNA, 1203 bp, Enterobacter cloacae
atgcaacgatgccgactttccgcactgatgctgctcatggctgcgggtctgccgcagctcgcctgcgcctataccgtgaatgtgaactccagtatcccggtgaccacacaaatcctgcccgagatggcaaccatccaggggacgctcgccgaaatcttgcgtatgcagcaggccaccggcacggccatcaaccagaacgcggacaagctggccaccatcatcagccaggacgggcaggccacccgtcagcagatgatattcggcaacgagacgcagcggctggaagaggcccgacggagtttctccgtgccggactccatctgcagtgattccgcgtcaggggtggcagccaccacccgcagcgctgcgggcagcaccgcctcacggctctcgtccggtggcggcgtcagcagcaccccggtccgtcagcgcatcgccgcagtcgcggaatcccaggcccgcgatgcctatgacggcgcgaacgtgcatgcggcctactgtaccgccgctgaatatgcacgttacggcggcacggatgtctgtcccgccgtcagcgacctgcccggtggtgacagccaggtacgctcggtctatgacggtgccgggccggaaggccaggcaccggccggcacctggacacaggagcagatcgacgcggccatggcctacatgaaaaacactgcccgtccctctgccgggcgcactcccggcaagggggaagtgaaaaccctgaccgggcgcacgtatgtcggcttgctgaacgaatacaacggcatcattgatgccgcctcggagccccagctgtcgctgattgcggacagcaaacccagtgaggctacccgggatgcgctccaggaagctctccagtccccgtctgccgcccagtattttgatgaggtcgcctctccggaggcaaaagcgaagggatacatgagccagcgggaatttgagttatttgaggccgggcgacgctacgccaacacggcatatatttccgacctgcagcagatggacggggataacctgatacgtgagcttattcgcaccacttcgcagatgaactggcagctgaacgacatcaaggagcagttgcgcaaggggaatgtaattaacggacaactgctggccaccactgcccgcctggcgtataccccgaggctgcagcagctggaatccgccatgaaccaggggaccgctcgatga

SEQ ID NO: 152119 - DNA, 573 bp, Enterobacter cloacae; identical to SEQ ID NO: 79197

SEQ ID NO: 152120 - DNA, 3054 bp, Enterobacter cloacae
atgaacattaaacgcatggtcttcgccattgaagatatgatgaacacgttttcccgttttgccgtctcggcagactttgttgactactgtgacctgcgcacggttatcggcctggataaacaggatctggaactgcgcccctggctgcaggcaccgtatatcggcgtcacccaccaggggtattacctctccgtcttcgagattgccggcgcactacgggacatggacgaagaggccccggcagaccatccggatgcatttgaaggcctcattactcacctcgccacaacgctcagtaccagctacaaaaacaccggccacaagatggcgtttatctttgagcgcgatcaggaaaagggggaaagtgagatcagcacgatgatcgccccgcaaaaacgggccatccgccacacggccattcagcttgatgacattctggaagagaaaatcaccaccctctcaccctggctggtccgggaacgctgctggctggccgtctggagttcaccgctgctggtcagccagcaggaacgggcagactttaacaaaacgattcgtgaagtgaatgataaagccccgctggcccgtttcggtcagcagccctggcgctggatgatgtccggcctcaaaatccgccatgacagctttatcaccacgctggagaaggcgctcgtccggggcggtgaaggcctgctggtacgcctgatggacatcccggaagtgtgcaatgaaatccgtcgggaaatggctcgcaacagcacgtcatcacagtggcggccgctcctgcccggagacaccgcagtcgccggggtgcgtcaggacgacgataactctgccctgcttgcgccgtacctcaaccttcaggtgttcggcaactcgccggaaaccgtaggcaaccttattcacaccgggggcctctggcacgggatggtgaccctcacccttccgccacagcacccgaaaagttttaatgaactggtcaaagccgtcccccgggccgtcccctggcgcatccgcatcgatgtgatgcccggcggcatgaaggcgctgggcgggaaaaaatttctcgcctccttcgggcagtttattccgtccatccgcccgctgtatgacgcctgcacgcagttggcccggacggatgagcgcgatccggtgtgcgtcatgaccatcgtggccaccacatggggcccgacgcaggaaatctgcacccgcaaccagatgctgctggaatccgccctgcagggatggggcgtatgcagcaccaccaccgcattcggcgatccgcgccggggatgggtgaacaccatgctggccgcctcggcgggctccggccccgtacctctctatccgccgctgtcccatgccctctcgatgctgccctttaaccgcccggggaccgtctggcggggagaaggcaacctgatgctgcataccgaagacggctgcgcctgggaggtggggctggcgtcatcacggcagaacaagcacaccgagctggcccccggggattccggtctgggcaaatcggtgctcatcaacaccctcacggagatacaggtggcgtcggcacaggcgtcgctcccctatgtggcccatatcgacaaaggcttcagtgccgtgggaaccattgagcttatccgtgacgccctgccggaagggcgcaaggatgaggccatctcgatcattctgagcaacgatccgtcccagtcgcgcaacatcttcgacatcctgtacggtgcccgtgagccagttaccccggagaaacaattcatccgcgccatgctgacggcgttctgtatcgagccggataagggaacgcctccgaatccgacggacaccgggcagattatggatcgcctgattgagctggcgttcgatctgcgcagtagcgaagaacccaacatgtaccgggagcaggttgaaccggaagtggatacggctctgcaggagtcgggactgtgggaacagcatgatgcagactggtggcaggccacgccatggtatgaagtcagagatattctgcacgggaaaggattgctgcaggccgcccagcgcgcccattaccaggcggtacctgaactcgctgacatgccgtcctttctgaaacaccagtccatccgggagagttttggccggatccagcgtaacggctctcaggaacctttactggaatatatcgagcgctgcctcatccaggcccggcaggaatatccgatgctggccagccggacgcgtttcgcactgaacccggacacgcgtatcgtgagcgttgatctgaacaacgtggccggggacaaaacgccggcgggtcgcctgaaaactgggatcatgtacctgtttgctggtcacatcaccgccggggatttcaccctgccgcagtaccgcaacgaagtgctgaaagtgctgccggtggcgtaccatgcgggcattctgcgccgtattaaccagctcgacagcgagatgaagaccaaaatctacgacgagctgcacaacgccaaaggcatcgacttcatctgggatgcgctcgatacccaggacagggagcagcgtaagttcggcatccgcaccgtgctgagtacccagttcctgaccgattacccgaaaagtctgctcgattccgccaacaccctctggctgctgcgctaccgccaggaagacattccccttttacgggacagttttaagatccccgaacacaatcttcaggcattccttcgtatgcccgccggcccggctgcagacggcagtggcgtaccgatgctgtgtatgatgcgcacgacccagggcacgctggcccggattgtccgcttcacgcttggcccgctggaactctggtcactcaactcggacaaaaaggacggtgcgctgcgccgccacctgaaggaaagcctcggttctgcccgggcgcgccagcttctggcttcgaccttcccccgcggctcggcaaaaaaatacattgagcaccgggaacgtaacgccggcgcgcgcggcgaaaaaggtgtcatcgctcagatggcggaggagatgattaacagtctggggtacaacctttga

SEQ ID NO: 152121 - DNA, 819 bp, Enterobacter cloacae
atgagcatcgctaaaaaaacgcaggagcccctttacctgcatccgcttcccctgcccgacgtggtccacaccacggagcctatgttgccggcaccagagaaaactgacggcggacgctgcgtctgctgccgggctgacgtgaaacaccgctttgtgctgccggagtccctgccgctgacccggctgttacagacggcagaagacgcgcttattcgccttgaccgggcccgggatgccctgctgcgccttgagtcccgccagccgccgcaggagccggcagaacggcagaagtacctgaaaaacctgaaagccgccagaaccagcctggagcatgccaccctgtccgcccgtcgtctcgccctgcgtcatattccctggcgcagcatcacggaaacgggcgcgctgtcagcacaggagcggacagagctcagcctgccggcagcgccgttccatctttgttatctctgccatgcctggcatgcgctcaacggctatgcggccgcgcagggtaccatggtctggttgcctgatttgcatccgcgcagcgttgtggccctgaaccgcaaggccctgcgggctgtcttcagcaccagtccggcgacggtgcgtgaagggcgaaagatcctgtcagaactgctccgccaccgcctgccggtagaagaacgattcggaggatttcgtccggcagattttgccgatgccctgcgccgtttccccccctcgatgcgcgatgaactgcgggagaagatgtcgggcgtggcgctcattctgacgccggattcggttacggaccgggaatacctgcaggagaacaactaa

SEQ ID NO: 152122 - DNA, 195 bp, Enterobacter cloacae
atgctgatatcccccgctgttctgctgcccttacagggcctcaccgtgctgcgcgctgaccatgctaacgtcatcgcccgtgacgaacgggacaatcaggaatttgtactggcggagtgcagttctccggccatcgccggctgccggctggcgttgttcagacacgcctcaggaggtcaggatgagcatcgctaa

SEQ ID NO: 152123 - DNA, 405 bp, Enterobacter cloacae
atgtcactgttccgtgccctgacggctcgtctgtatgccgtcgtcttttatatccaactgacccggatggctctgcgcgaacgggcagttcgtggcctgctcgcgctcaccatcgggttgttgcccggtatttcgctggctgacggcgacatcgccgacatgtttgacagcgccgctgccggtgcgaaacgcgccaaaacatccggtctggatatctttcagatggtcggtctttttattttcggtgcctccctgctggcgttcaaaaaagtgggtagccacccgcaggttaccctggggcgatgtgttgccggccttctcattggcgccgggctgtttattatcccggaactgatcagccgctcccagaaacagatgggaacaagctcaatcactatcaactga

SEQ ID NO: 152124 - DNA, 528 bp, Enterobacter cloacae
atggctctcgatgcgctgaccgccatcgagaactttgcatcgggaatattcagcagcgggatcaacttcctgttcacctggggtgaaacgctgggatttatctgcctggcgcttctgttaacccgggcccgctcgacaacagccgtaccgctgtccccggggaagttctttggcggcctgtttgcctgcgcggccatggtatcactgccctccatcatcaatgccagcggcgcgcagttcggctttcattccaccacctttgatgccatcgcctacgtccagccttcaaccttcggagaggcggccggcgcggcaaacgccgtgctgtcgcttgcccggcttgccggtgtgggctttgttcattccggcctgaacatgtaccgcatggccggtctggaaggccacacagcgctgagttccagcgaaagcatccgctcagccaccgtcaaggtcgtggcgggtacagcccttgttttttcaccgcagcttatcgacaagctgctggccagcattggcctcgctttttaa

SEQ ID NO: 152125 - DNA, 765 bp, Enterobacter cloacae
atgagtcagcaagatgaacttatcaccgatgacgacgcagtcgatttcggtgaagccgataccggggagaaaaagcccttctggaagcgcgaactgctgtttggctactcgctgccctggcttctgggggctacgctgcttgccggtgccgggatctggtatctgtatggcccctccctgtcaggcctggtgtcccgccccggaagcgccgaattcagcgaggtggaccacaccctgaacaacacggccgggacagcacaacccgcagtgctcccgcagagcgggactcagacagggacacagcctgaggtgaccacgcccgggcagaccgccatacacgacgacaccgtggcgatgatgacggatatccgtgatgagctgaacgcgcgtgacagcaggataaactccacccttggcactctgaaagacagcgtcagccagatctcagaggccatcaaacgggacgaggcgtatgcggtggaaacccgtaaccagctgatggcgctgacgcagcgcctggctgcgatggaaagccgtctcgcggcgagcaccgtggccacgcccaaaccctcgtccggcaaacggcaggctgccagccctgttgccggtatgaaggtggtctcgctggaaaacggaatggcctggatcaaatggcagggcagtacctgggccgtccgggagggcgacacgctgggtaaggtcaccgtcagccggattgatccggccagccgctccgtcaccacctccggcggaacgctgcgctga

SEQ ID NO: 152126 - DNA, 1308 bp, Enterobacter cloacae
atgagcgcagaacaggatgccgcgaataacggtaaaaaaaccctttccattatcatgctgggcctgcttatcgcgctggccggggggtactggctgatctcctggtggcaccatgacgacggcacggactcggccgtaaacctgaacggcacggcaacaagcgcgggctctcagaccaccgaaactccgcgttaccgcgagctgctgaaagcgtccaacgaccgcggagcggcagaggccgcacgcaacaacacgacgtttattgcaagtctgccggtcggtcttgacagccgggaaccgcctcagacgcgtccccctgagcccgacaggcccccaccggtacagccggagccgccacccgcgccccggtcacaggcttccgcggccgcggagcagcaggcgaatgaaaaacgccaggaacggctgcagaaactgctgacccgcatcagtctcgcgcagggcaagggcacgcgcccggagcgggcccggttacttcatgagggtgacactgtcacgtcatcagccttgtccctggccaccgccagcctgtcgacggacgtggggcagacgccgacgccacagacgcttatccctgcccttacccgcgtgggggccaccatggaaaccgctgtcgactccgataaccccggttctcaggtggtggcagagatacccgcaggctttcttgcaggtgcccgtcttcatagtgcatcggtgaaacttgccggcaacggcgtggaaatccatttctcccgcatgagctggcaggggaagacgttcagtgtcaacgcatatgcccagagtgaacgcaccctgatgtcatctgtcgccagtgacgtcagccaccgatgggggacgcacattgtcctgcccgccatcctggggggactgggcaatgtgggtagtctgtacaaagagtccaacacgcagatccttcagaccaacatgagcaccgtcaccggccgggcaggtaaacctgatgcaggcaccgtagcaggcgttatcgccggcggaacggcccagaaaggtgcggaagtcatcagccaggaggtggcccgggagcccttccgtcaggtcaccgtcaaccaggatgaggtgatctccattctctttgtcgatgccgtcacccctgacgacgttgtcggacaaaaaaactccgcgtcacccgcagccagcacgtctgcaccatccggtatggccaccgcggaacaactatctgaaacccgcctgcaggaagccattgctcgccgtcaggccgaaatccgccgccagtatggcggcactgaacccagtaaggagtatgaatga

SEQ ID NO: 152127 - DNA, 1002 bp, Enterobacter cloacae
atgacattccgttatctcctggtcacgcttctgctgtgtggcccggccgttgcggcaaccgcggacgacagcggctggcagaaggcccggacgccggtggccgcctcaacgagcacagcagcagccggtgcgcaggccgcacagccggcgggacatcagggtaccggtgtgccggccagccagatgagtggcgaactgccggctcccgggcaggcgtctcccctggtggaggaagccgccagtctggactccccgctgtcgccagatgagatccgcgaactgcgcctgcgcctgacggacaacgaacgttccgtcagcgcgccggtcatcagcgtcgtgccgcgtatcagttccctcaccctgaacctgtcaccgggtgccagcctgccgctggtccgcaccgcgatgaacaaccagagtgtggtaacgctgacggatattcgcggtgcgccctggccccagtcagacgcgccgcttaacgccagtccggagaactttgacgtgcagtacaacaagggcagcaatatgctggccatcactcccctgcgtccgtgggcatcaggcaatatctcggtctggctgaaagggcttgatgtccccgtcatgctcaacgtcaccagtggcgagaccgacacacggaccgccagccaggagattgacagccgcctggatttacgggtgccgcgcacggggcccggctccgcgcttcccggcacgccggtggacaaaattgccctgcacgatgccacgctgcaggcatatctcgatggcataccaccgaaagacgcccgccgtctgaaatttcagggcaatgtgccggacaccgcgatctggcagagcggcgatgacctgatggtccgctcccgcgccatgctgcgcgacgagtttgagcagacgctctcgtccgccgacggcacacacctgtggaaactgccggtcaccccgctgctgaccttctctgtgaacggccagtccgtacacgtcaccccggagctggaataa

SEQ ID NO: 152128 - DNA, 699 bp, Enterobacter cloacae
atgacaaacctcacgcaaaaagcccccccggctaaggggcgggcacctgcccctgcgcccgatccgcttaaagccgctgtcaacatgatgcagacggcagaaaaacggcagcaactggtgccggacatgatgcagtccaacctccggctgggactcgccctgctgatcagcctcaccctcaacgccgtgctggtctgggggatcttccagaaagaacgggactactttgccacggacaatggacggctggtccggcttgccccaacaactgagccggcatggagccaggaggacgccactgcgttcggcagcaaggccctgatgcaggccttcaacctggatttcgtccattaccgtgagcaggtctcttcggtggccccgctgttttcagaagaggggcacgccagctatatccaggcgctgacagcctccaacattctggaagccctgaaggcccgcatgaacctgacggccactgttggtgccggtgtggtcgtgcgccgtggacgcctggctgacggtacctggttctggaccatgcagtacccgctacgcctgcgtctggtcgggcagacaaccagccggccggagcaggcctttacgtttgaaatcaccatccagcgggtggatccacgacagaaaccggtcggtatggaaatacgccagatgatctcccgcaacgccccccgcaactactga

SEQ ID NO: 152129 - DNA, 354 bp, Enterobacter cloacae; identical to SEQ ID NO: 79207

SEQ ID NO: 152130 - DNA, 4560 bp, Enterobacter cloacae
atgattaaccatcacagaacatggcttgccgtacctgttgaagaaaaggacgccgcagtacaggcccatcccagactcgaaaacggacaacaggccatcgtctgggataaagaacataaactgtggtatgcccgtcccggcgtggaactcgatcgactggaacgctggctgccccgcccacatacgttgtccatgaacgcagacgatccagtgacagaattcgcacagaaactggaagaagcaggtctcgtactgaaaggtcctcccgtcatggacggtacccgtcaacgcgtcccgacccgtgatgacaaaaagggcgctaaaagcggagtttacaaggccttccttgacggtcgtccggcaggctggtaccgaaattaccgcacatctgatgagaagcctacacagtgggtatattcgggcggaaatgaaatggatcccctggcccgacttcatctgcgcgcacaagcgcagcagacccgcgaggacaatacccgtgagctggaacagcaatataaccgtcaggccgcctatgccgaacgctatgtctcccgtctcccgcaggccaccgcgagtccctaccttacccgcaagggagtccaggccgcagaaggggtgcgcatcacccccagaggtgaactggttgtcccgttcagcaatgcgcaggggcaaatcagatcctaccagcgaatccctgaaaccggcggcaaggatgcccgcatcctgaaggacagtgagaaaaccggtaactggtttgccttcggcacaccggttaatggccagccactgctgtttgccgaagggtattccacagcggcctccgtgcatgaagccaccggcctgccggtgctgatgaccattgatgccggcaacatgattgccgtcgcccggaatgcccgtgccgtctggcctgacagtcgtttcatcttctgcgcggataacgatcatcacctccggaacccgcagacaggtgagccggaaaacaagggcattctcagtgccacgaaggctgcggaactgacgaatggccagatcctcgtgccggtttttacgcttgccgaactcgaccagaagctcactgattttaacgatctcgatgtcagccggggcagagaggcgttccatcaggagatcaacgttcaccttatcgcaatgggcgtgaccacgcctttcagtgactctcccgggatacgtgaggcgcttatccgcgccggtgtcggactcccctctgttcaggaaaccaccatggaaaaagaagaaaatacaggcctcgcgccgacaccagcaaatgacgccctgccacaacccgccataccggacgtggcgccgccctccgtcacagggctggaacaacaggctacacaggattatgccctcttaaagaaaagtgaactggatcctgccacgctcgtacgcaaggctgaagcagaccccgcctacaaagctggactcctgtcagccatgtcacaggatgccggagatatgcagttcaacggccagagagttgacgccaccgcctttgctgaagaaagtttccgcgccctgacggtatttgcgcagactgtttcggatctcactactcgccatcaggcggagagcgattttacccgctacagcaatcaggagcttgatgccgccaccctggtacagaacgccggtgccgacccggcctaccgggaggggcttctgtcggcgctggcgcaggatgccggtgacctgcagcttaacggccagcgtgttgacgccgccgcctttgccgaaaacgccctgcgcgccatggcgacggaagtgcaggcgaacgcggagaacaccacgcgccgtcaggcagagggcgattttgcccgttacagcgccggtgaactggatgcagccactctggtgcagaacgccggttccgacccggcctaccgggaggggcttctgtcagccctggcacaggatgccggtgacctgcagtttagcaacggccagcgtgttgacgccacggcctttgctgaaaccgccctgcgcgcccttacatcggaagcgcaggcagatgctgagcacgccacacaactgccgaccacgcttcagcaggaaccggcgcccgcgcagacggctgtacaggggccacttgcctcagaggcgcagccgcaggtaccacagcccacagctgagattcaggcaggtaccggacaaacggaagagaccgcagaacgctcactgcccccggactccgcgcagccatctgcagtgtcggataacaatgcacagccggcagcagtcgcgactgcaggtgaaaccgatacggccagtccggctcttctgacggaacagggacaacaggccgccgacgatcttgcccgtttcatccgttcagatctcgacgcaaccaccctggtacagaacgcggaaaccgacccagcataccgtgctggtctgctggccatgtttgaacagaccgggcgtgacctgcaggctcagggccacgatatcgatatcgccacatacgctgaaaaaaccctgcgtgaccttacaggggagatccggatggatgaatctgttgcggcatcctcccctgctgcgtctgagcccgtgatgcctggtcaggagagcagcaccgaacaggctgtcgtatccgggctctcccgggaagatcccggtgacaccccaccggcatcgttgcgggcaccgtcggtgtctgatgcagcggacgaacaggaggtggaggtgccgcaggtgatggatgacgccgttccggtcatcgatctcagtgcgctgtccatgaccgccggggacaccagggagccggagcccccctttattgacatgagtacattcgggaaggaaaaaccggagccgacccgcccagcagccggggaggcacaggaacaggcgggcactccggctgctgaacggacagaggccacagccgaaacggcggcccatgcagaagaggctgacggcattgtctgggggccccgccgtcctgatgtaccgcagaaagaagatcttgagaagataatcaaggccctgacgtgggaagaactgcgtgacaacagccggctgtaccggcttgatggcgaggatgcgttccgcgacctcggtaaccgcctggagatgtgcaacggagcaggtcaggacgaccgtaaggtgctggccgccctggccgtcgctgcaaaattttacggcggcgtgattgaactgaccggcagcccagagtttaaggaaaaagccatgcggctcatcatcgagcatgacctcgatatccgcatgaaaattccggcccagcgcgaacagctcgaagagatgcgtaaacagttgtgcaccacgcaggacgccgtggtcacgcatcaacccaccccggatctgaaccgccataccccggaatctcccccgcagacgacggcagaccaggccacacaggagaagacctccggcgggccgcaaccccaggtaccgttaccaccgaagccgactgcgccgggcaatacctcaccggcagcaacagaacaggccgccccggtaccgccagcccccggcgagggtccggctccttcaactgacgcaaacagcattaaggtaccggatatgcccgaagagcctgcgccggcggcattgtcgcccggagagagcgtcacggccgtactgatgaatttcggtgaagccatgtatgagaacaaggagcagcgtggcaacagcttctttatcgaactgcagaaccgggggggcagccacacatactggggacaggatctgcgtaagctcgttaaggaccataaggcgggcgatgtggtgacgctgaccctgaactcccgggacacctgggttgtcgacggggaggagcgtgagcgggtgaaaaacaactggtccctgacggctgcgtccaccggcatcgccgtggcccatgaccgtccggagcagggacagcagctgcagtcgttcccggttgataccttcggcaaactcacgcagcacatccgccaggcctggccggagtacatggccgacctgaaactgcctgcccgtctggaagaacgccagttcttccttggcgaagatcgtcatccggtggccgcaccgcagggggcggcaggcatcacgccggcaggccaggatgtgccggataaactgacgccggtcatggcctccatggacagccagtcaaaacagatggatttgctgctcgtccagtctgtcggtgaacacctgcagggtgttgttcgcctcaacggcacactctatccggcactcgcctcccccacggcggataaccgccagctggttatcaacgccatcaccgaccagggtccccgctttgcgggctacggccaggcggtgaatttcgaaccggacggcgttacccctgccgcccctcagctgatgacgtttcacctgaaaggccgtgaagaggatgccccgcttcccgcccgtctctacacaccggaaaaacaggatgatgccctttttcagcgcctgggtttcgaacagacgtggaaacagtgggacgacgcccgaaagccggagggcagacaggaaaaagcgcttcatcaggaacactcccacagccccggccactga

SEQ ID NO: 152131 - DNA, 402 bp, Enterobacter cloacae
gtgttattgacagcctgccggacatatatcaggcaacacggtcgtatccgaacgggggatgccgttcttacccctgcgggccatctcccctgccgttatgtgattcatacagtcggcccccactggctgttcgggctgagggcccgtcatcaggataagttgcttgcaaaggcctactaccaggccctgatgcttgcccataaaaatgcactacaacgtatcgcctttccctgcatcagtaccgggcattacttttatccgcacgagcgcgcggccaggattgctgtcaacacgatcatcgactttctggcagaaaccggcactgacatggacgtgttgtgcgtctgctacaacaaacgtgattttcgtatttaccagcgcctcctggcgccaggcacataa

SEQ ID NO: 152132 - DNA, 447 bp, Enterobacter cloacae
atgcaacccctcaagcgccgactgtcttgcagtctggtattgatttctggtttcgctctcggttttctggtctgcatggcctcaccgctggttgataaatacaactttattctcccatggaacagcgagtacacggcccatgacaggatgatacgggcggccatgttttctgcgaaagatgcgtgcgcctaccttacgtctcgtacctccttgcaggaaaaagtccccgacacggcgccctggtttgcctgcatagccgcacagtatgaggcatattcagatcagttttataaatttgcggtggcgaataaatatgtagcctgcaatgcggagctaactcgcaacaaatcctgccgttttattgtccgggatgcgtttacggaagatggtcgccccgccaggaaacttccgccactcccccaggcgtcccccgatacgaaggaataa

SEQ ID NO: 152133 - DNA, 288 bp, Enterobacter cloacae; identical to SEQ ID NO: 79210

SEQ ID NO: 152134 - DNA, 1161 bp, Enterobacter cloacae
atgagtcaactggccttacccgatgagttcgggcttttcccgttcagcggcgcgttcagcgctgacgagttcaggaccttcttcgcctggtgcgcaaaacacagcgtcagcgatgtggatctggtaggcggatcgccggtctcggtcagccgctacggccgccgcgtacgctgttctcaaagcgtgctacctaataccctgctcggcaatatgctggacgatctgctgggccgggaaatccgtccccgggttcagggcggcataccggctgaccgcgccattcagattgacggtgacatgcacggtcgctacggtctgggtcgcggagagcgggtacgcctgcgcacccattcaatccagggcacctccgcccgcgaggaccgggccttgtccgtttcactgcgggtgatcccccacgccatccccgatttcctcagcatgggaattgagccggatctggccgccgccatgctgccggacagcggactcgggttcatctgtggccagaccggctccggtaaatccaccctgcaggccgcactgtaccgttactgccagaacacgcagccggatcgcaaaatcgtgacctacgaagatccggttgaatacatccttggccggacggatgacctgctgccaccccatcaggcgcagataggccgcgatgtggccagctttgccgaaggactgcgttctgccgttcgccgtaatccggagctgattgggatcggggaaatcagggataccgaaaccgcagaagccgccgtacaggcaggtgaaaccgggcacctctgtatcggtaccatgcatacccgctcgcccggtgaatcgatcccccgcctgctggggctgtttcacccgcagatccgcgatgcgatggcctgggcggtactgggtatcatgcggtttattgtgaatcaggtactggtccgcaccaccgacggaaaacggcgcgccctgcgtgagtacattgtgtttgacgatgccctgcgcagcaaactgcatgacctgtcccacgaacagtgggcaagccacctcgatggcgttttgctcatggaaaaacgccgcatcgtcgaccaggttcgcgcgctgtattactgtggtgatgtggctcgtgacgaagcggcgcgttacctgcctgccggagaactgaccgcatga

SEQ ID NO: 152135 - DNA, 846 bp, Enterobacter cloacae
atgaagatcctcctcgctgtcattctccctgccgtcctgctgaccggatgcgccggaacacctccgcccgcacagcccgacttatccgcggccccgccggatcttaatacctggctgcatccacaggagaagcatcacggcgggatttccgacacacgctggcagatgctgacggaagccggcaaaacactgggcttccggggtggtaaggcacaacgctcatgggagctgactcaggcgctgatggcgcgcgactccaccctcaccgccctgtttgactttcgcccgctaattagcccggaaggctggctgccaccggtggtcgatgaggcgcaggatgtggcgcatatcacgccagaccagatacgcacctcttcccgggtctggagcatcattcgtcctgagcgctttgtcagtaacccaccgggctggcgggactggctgctgaaagggctggccaccacggccacacccggaaccgaaggccgggtggtgcctgaggacagcgcccagcgcgacgtctgggaaacggccctccgccagggctggaaggaggggcgggaaaatgcggacatgacgctggaagccaacatgaaccgccttacccgcgattaccggggcatgatgctgtatgccctgctctggcgccagggcatgatcacccgtcctgaagtcgcggagcagatgcagaccgtcaccggcaccggtcagaagatgatcaccggcgaccgcgtccgccgtctcaaaacccatgccgcgtttgaactgcagaagtcacggtggcgtccttccgtcacaacacaacccaaaggagcccacgatgagtcaactggccttacccgatga

SEQ ID NO: 152136 - DNA, 468 bp, Enterobacter cloacae; identical to SEQ ID NO: 79213

SEQ ID NO: 152137 - DNA, 258 bp, Enterobacter cloacae
atgaaaaatccacccaaacgcctgtgcgactggaacggcgcgaccgtgaagttgatacacgaaaccagaaatagcctggcaacattacctgccgggaccacagggaaaattcgtgtgggatacaaaagtcgtaatggtcttaccttcatcagcaatccgtgtgaatgctgcggcgttcaggtacacataacctgtatgcgtccggagcatttcgaattacttgagcttgtacagggtaatgcaggagaagagcaatga

SEQ ID NO: 152138 - DNA, 648 bp, Enterobacter cloacae
atgcaccaggttgatgatatcttccggcgtatcgccgaaatgcaaaaggtgatcacccgccgtaaacgttccgtacagcgtgcagagcgtaatctcgaggaagcagaagacctgctggcagcgctggaaaatgaacgtgatgaacacctcattgccagctggggcgacgcccccaactggcatgctattttcagtgcttacgagcccacacatgcactgcagacataccgggacaaatgggtaagcaccgtacccgggcttcgtacaaccggctaccacaatcttgagacccgccaggccgtgttcgcgatttgttttgaaaccagcacgcaggcagaactcatgcagactgtccgcatggtggaatttgtcatgccgtacctgcatgcagacagccgtggtgagaaaaccatgatgatctacaacgtgccggcacaagactgttcacgcagtttcgtgttcaacacccataccggccagtacggcattggcacggaccgctatatgcaccgtgccgaaacacagtcgttcccgtcactggaggccgccctgcgtcacctgcagagcatttcggacacggataacgtgccagaacatcagcatgagttaatcgattacacggacaggaactctggagaggcggaatga

SEQ ID NO: 152139 - DNA, 1191 bp, Enterobacter cloacae
atgaataaaaagatgacagcaaaaagccttattgccactgccgtactgatggcatttaacgcgaccgcagcaaccagttattttgaagcccgtaacgatgcgatgggcggtaccggggtagcctcatcccattacagcgccgccgcgctggcgaacccggccctgctgactaaagcaaaggcaaatgatgacttcgcccttatcctgccgtccgtcggtgcccaggtctctgacccggatcatctggaagacggtgcggatgacgttaaggatgcatgggaccgtttcgacgacagcctgaacaccggtgactcctcagcacaggccgctgagctgaaacgccagctgagcaagttcaaagatactcatgcgaatgcgcaggccggtgtctctgccgtggccacgctgccgaacgacaccctgccggccgccctgttcgtgaaagcatggggaacggcgaccgtagacggcaaagtctctcagcacgaccttgattacctcgaccaggtcgctgccggcgcaacggccgacaaggacaacctcacctcaaaagcctacggccgtgccgcggtcatcaccgacgtcggtatcgccctggcgcgtgagtttgaatccttaggccacacctggtccgttggcttcacgccgaagtaccagcgcgttgacctcttcaactacaacgttgccgtgaaggactacgacagcagcgactttgacggtgatcagtaccgcaacaccaaaaacggcttcaacgccgacctcggtctggccgctgacctgaccgagaactggaacgtgggcctggtcgcgcagaacctgatcccgcgcagcatcgacagtaaggaagtgaatggagaaaaagccactttcaaagtacgtccgcaggtcactgccggtacgtcatggaccaacggcttcttcactggcgcggttgacgtggatctgaccgaggccagcggcttcactgacgacaaaaaacgccagttcgccagcatcgggggtgaaatcaatgcctggagctgggcacagctgcgcgcaggttaccgccagaacatggcctcctctgacggcagcgccttcacggccggtatcggcatctccccgttcgacgtggttcatctcgatctgaccggcattgccggtaccgatcgtacttacggtgccgtggcacaactgtccttcactttctga

SEQ ID NO: 152140 - DNA, 849 bp, Enterobacter cloacae
atgacaaacagccttacgggcatcttcgcctcattactggcgcttccgggttttgagaaagagaaaattgccgcgctgctgagtgagaatagcagtaaaaaacttttatcgccgacaacgttaagattccggcccggtaccaaagctctggttgacctgatttcggaaaaactcggaatttcggcgtcagaggtgataaacctgattcttgagagcacgctgagggagatttacttccccttcagccatacggcagaaagtattgctgaccgttttgaatacctgctgaagtcccacggcctgagcccgccagatgtcgcgcagttgctctccccgtggaacctgcgcctgagtattctgcgggaccgggagcggacgatggactacctgacgcctcctctgcttgagacactggccagatggttttatgtctcgcaggactggcttttcgggcgaagcgattgccctgttgataccagcctgccgatccacaggtggcctcagagcgaggaggaattcaggaaacgaataattccatccgacgagaataacaatattaaaatcatattctggactaacgtaaattcgcccgataatgaatatgaaaaaagaacaggtattttaattaagaaaaaagaaacgtccggcaatgttatttatcacccggtattgtccatcacaccacagtgtttaaatagcgaccaaagagactgggtaaccagccttaagacttccctgaaggacacagcgagtataaggtttatcacgctcggtgagcgtgcagccactgcacttgaacagggaacgacgttacctgcatttattttaaataagtcagtgaatacctga

SEQ ID NO: 152141 - DNA, 549 bp, Enterobacter cloacae; identical to SEQ ID NO: 79218

SEQ ID NO: 152142 - DNA, 1161 bp, Enterobacter cloacae
atgtcgtcagttgttcgtattcgaaaattaacgttgagtcgtgcacttgataaatattacgaaaccgtttcggttcataaaaaaggccatcagcaggagttctaccggacacaggtgataaagcggcatccacttgctgataaatttatggatgagatcactactgttgatattgcggcatatcgcgaccaccggttgacgcaggccaccacccgatcgggtaaacctgtttcggggaatactgtccgtcttgaaatggccctgctctcctccctgttcaatatcgcccgcgttgaatggggaacatgccggactaacccggtcacgcttgtacgtaaaccaaaggtctcctccgggcgcgatcgccgactgacgtcatcagaagagcgccgtctttcccgatacttccgggaacgaaatccggaggtttacatcatttttcacctggcgctggaaacggccatgcgacagggtgagattctggggctctgccgtgagcatctcgatttacagcacggtattgcacacctgcccgaaaccaaaaatggttcatcacgtgatgtccctctttcccgtcgcgcacgtaatctactgcagtcactgcctgcgcagctcaacggcagaatattcagctatacgtcatccgggtttaaaagcgcatggcggactgccattaaggaactgaaaattgttgatctacattttcacgacctgcgtcacgaagccatcagccgcttctttgaactcggcacactgaacgtcatggaagtggcggccatttccggtcaccgttccatgaatatgctgaaacgctatacccacctgcgcgcctggcaactggtcagcaagctcgatgcccggcgtcgtcagacgcaaaaaatcgccccttatttcgtcccctatcccgcaaggatagaagagcaacagggacaggaagatggtatctgcgtgcacctctgtgattttgaagggctgaccgcgtccggtccgacccgcgaaaccgccttaagccgcgccagcgaacttcttctgcgtacgctggccatcgcagcacagaaaggcgacagggtaccggcaccgggcgaactgccggcagaaacccgggacaggatcatgatttgcccgcttaaccccacgatggcactgggcctcacccgttaa

SEQ ID NO: 152143 - DNA, 927 bp, Enterobacter cloacae
atggtggggtctgctctggtaagaaaacttagccagcagcagggcaatgaagtcattactaaaaaccgcgatgagcttgatcttctttctcagcaagcagtgaatgattttttcaaaaatgagaaaattgatcaagtatatttggctgcggctaaagtaggtggtattcatgcaaataatacttttcccgctgattttatttatcaaaatttgatgattgagagtaatattattcatgctgctcacattaatgatgttaatgaactgctgtttttaggttccagctgcatttatccgcgagaagttcctcaaccaatgcgcgaggatgcacttttgaccggtgttttggaaagcacgaatgagccatacgctatcgcgaaaattgcgggtataaaactgtgtgaatcgtacaaccgtcagtttgggcgtgattaccgtagtgtgatgccgacaaatttatatggttataatgataatttccatgttgaaaattctcatgttgttcctgcactgataagacgcttccataaggctaaggttgaaaaccaagcctcagttactgtatggggaagtggtacacctaagcgtgaatttctgtttgtagacgatatggcatcggcttcgatttatgtaatgaatctgccagcagagacttatgtaaaaaatacattaccaatgctttctcatattaatgtgggcactggtgttgattgcactatccgtgagcttgcagaaacaatcgcatcagtcgtgggctttaatggtcaaattgttttcgatactagtaagccggacggaactccacgaaaactcatgaacgttgaacgacttagtaatatggggtggagatggtctacatcattgcatgatggtctgacattaacttacgagtggtttttgaataaccaaaaaacctttagaaaatag

SEQ ID NO: 152144 - DNA, 447 bp, Enterobacter cloacae
atgcttgattttgcattgttcaaaacgatagtagatcatacaccactcatatcaattgatcttattgtttataatgataagtcagaggtgttacttggcaaaagagtgaatccgcccgcacagaattattattttgtgcctggtgggagaatatataaaaatgagaaaattgcggatgcttttcatcgaatatgtcactctgaattaggccattccgctgaatattcttccgcgaaattttgcggtgtatacgaacatttttattctgatgcttttgttgggcaagatgttagtacgcattatgttgtattaggatttgaggttcgtataggtgcagagttgttggaactaccctctgctcaacacacggaatattcatttatgacggttgaacacatcaggaatcattctggtgttcactattatactaagcaatactttagctag

SEQ ID NO: 152145 - DNA, 1428 bp, Enterobacter cloacae
atgtctaacaccattcttcccgtaataatggccggtgggacaggaagtcgattatggcctctttccaggactttatatccaaagcaatttctcagattgacgtcttcttcatcgatgcttcaagagacaattatgcgtttggatggggtagagcatgaagaccctctgattatttgcaatgaagaacatcgatttattgttgcagagcagcttcgacaacttgaattacaacatagtggtataattttggagcctgtaggtcgaaacacggctcctgcgattgcactcgcagccttacatgctatcaaaaatcaagacgaccctattctgttagttttagcagcggatcatgttatcaaggataattctgcgtttcttgcagcggttgaaaatgctttggatcttgcagttgagggtaaacttgtaaccttcggtataattcctaataaaccggagacaggctatggctatataaagcaaggtaagccggtttctaatcacgcttttaaagtatcagaatttgtcgaaaaacctgatttggatacggcaaaaaggtatcttgatgaaggaacttattactggaatagtgggatgttcattttcagagcatcacgctatatcgatgaactgaagctgtatagacctgatattcttgatgcttgtatcaaagcacttgatagtgcttctcttgatctcgattttactcgactttgcacaaattcttttacccaatgtcccgatgaatcaattgattatgcagtaatggaacggacatccgacgctgtggttctccccctcgatgctaactggagtgatgtcggctcatggggggctctttgggaagtagattctaaagataataatcaaaatgtaatccatggcgatgtgattgccattgatacacagcgtagttatctttattcacaacatcgattaatcagcgcggtgggcttggaagatgtggttgtcgtcgaaaccaaagatgctattcttgtttcacataaagacaaagtacaatctgtaaaaaatgtggttaatacgattaagtcgcgttcacgtaatgagcatttgcagcacagggagttataccgtccctggggaacctcagatgctgtttctgaaggaagccgttttcatgtccgaaaagttacagtgaagcctggggaacgaaccgcaactcaaattcactatcatcgtgcggaacattggattgtcgtcacaggtactgcaaaagtgtattatgctgagaaaacgcagttactgaccgaaaacgaatccacatacattccagttggtgtatcgcattctcttgaaaatcctggaaagattcctttagagattattgaggtaagaacaggcgcttacttggaagatgatgatatagtgcgacttgaacaatatactcacggtaataatcatgaaagttag

SEQ ID NO: 152146 - DNA, 744 bp, Enterobacter cloacae
atgaaagttagcattatcacagcaacttataatagtgtggcaaccatatcagatactttattatctttggattcacaaacatatgctgatattgagtatattatcattgatggagcctctcgcgactcaacgatcgaactgattcataatacatctcgtcgagtcactaaaatcatcagtgaacctgataaaggtatttatgatgctcttaataaagggatcctggctgctaccggggatattattggtttcttacattcagatgatttgctagcctatccagatgtaattactgacgtggttagtaaatttaaagaaagtcaatgtgatgcagtatatggtgatttagagtatgtatcgaaggacaatgttaataatgtcgttcgtcgctggaatagtggtgtgtttaaacgatttaaaatgcagttaggttggatgcctcctcatcctagcttctatatgaagcgcgaactttatttgaagtggggggcgttcaatttgcaatataaaatatcagccgactacgattcattggttaggtatttatgggtgaacagtgcttccgtgagctatttacctaaagttcttacgaagatgcgcgttggtgggatgagtaaccgctcttttgctaatattgttaaaaaatccaaagaagatatcaaggttatgcgcaataatggattgctttggcctgttgttcttgtctgcaaaaatttttcaaaactcccacaatttcttaaataa

SEQ ID NO: 152147 - DNA, 165 bp, Enterobacter cloacae
gtgatctactattccgaacagttatttagggcctatcatggcgcactggagcgatgggtgacatacagccacagcggtatgctggaggtactgaaaacaaattgtacggccctgaatatcagcctggccgggcatctgattgatgaacttgttgataatatttga

SEQ ID NO: 152148 - DNA, 213 bp, Enterobacter cloacae; identical to SEQ ID NO: 79253

SEQ ID NO: 152149 - DNA, 2028 bp, Enterobacter cloacae
atgaacctaaatcaaattaagaaaaaataccgtacggatattgatggcctcagggctattgcggttactgttgtgattttatttcacctcggcatcgggtacttcccgtcaggatttatcggtgttgatattttctttgttatatccggttacctgataactggcattattctatcatcactcagagaaggtactttcagttactcagatttttttgttcgtcgactctggcgcatacagcctgcattaatatttgtttgtattgtgacgttacttgtctcaagtgttctttttgtttccccggattatctggactatcttaaaagcgcaaaatataacaccttattaattgccaatcagtatttctcgcgtcagtcagtagcatatgcaacacctgaaagtgatatatttcctttgttacatacatggtcgcttgccgttgaatggcaatggtatatattccttcctttgttcatcgcgataaccatttctcttaaaaaaagagtcccggcaactaaaaatgttaatatcagtgataattatattttagtattatggtctgtcattacctttgtattcgcagcattagcattgtttatagcaaaaaatgaacctgggcagtcatattatttcctgagcacaagagtatttgaattctgtgcaggcggtacaacatatttactgacctgtcgaaaggaatatattcacaagggtatttcaacagttttaaataccctggcgattatcggaattatttacatttcgacaaaagagcatgtgattgatatttacccaaatgtcaatgcgttaatagtcgtggcctgcacatgcgttttaatcttctcaggaaaacaagaaagtaacttcatcagcaggttattatctttaaaacctttttcattcactggaaaaatatcatattcactttatttatggcactggccggttcttgcatactgtcgctatgtcaacatccagttaaccggtctgaacctcatatacatttgcggcagtattatcacactgtcgctgattggttattatcttatcgaacaaccaatgaggaaattcaggtatagtctgaaactcactgtgacactgcttttagctttacctgcaattttttacagtatcctgtattctgttgcagtaaaacaacagggttttcctgagcgtcttggttctgtatattcacatcagttcaaaacaatccagcactatgaaaggaaggccgttaccagaaaaaaatgcatcgatacgaatcattcgctggaaacctgtgtccttggcgctcgtgaaggtaataaatctgcgcttgtgattggtgactcgaattccaatcatttctggggatttttcgatgtactggggaaagatgccggaataaaaattaatgcactgagtgtttcgtcatgcctgaccctgccgggaatatggcaatatgactggtggatatataagaataaaaattatgagtattgccacagcaaaacggccgagtattacaacatcataaaaaataataaatttgattatgttattattggtgaagtctggcagaattattcgcgtggaccgcatcttattactaaaaaagatgatgcccgttctgatgctttaacaaaagaacgaatgacccgttccgcaaaacttgcgatttcaaagattattgaatccggggcaagacctgtcattattaaaacaatatatcccatgccaaagggctatcaggagtgccgacagcgtgaagctattctgagaaagacattctcagaaacagcctgtgattcccgacgcattcaggcacaagaaagtcagtacctgacaacgctttttgacatgcttaaagaagaatatccttctttgataattattgatccaaagaaaatacagtgcaaaaacaactcctgtatcagccatgtcgattctatacaagtctatcgtgatgtcgggcatttaactgactacgcctcttatatttttggagaaaggtatttaaacgagttcgggaatccgttacaaccttaa

SEQ ID NO: 152150 - DNA, 993 bp, Enterobacter cloacae
atgaataacaatcataagccctttattggtttccgtgacgcgggttccggtcagttctcagggccctacataactgaaaaccaactgagcaaccttatcaggctgcttccggttcccaggccttcaccaatccagtatgtgtttcccgatctgtcaccactgatccggcatatcaacgggcagatagctcacgcatttcaggctcacagtcaggggcaactggataagcagcttgcagaagaatacgagctgattttcactcactggaaccgggccagtggaatggaggagggaccgaaaaaggaacatgcctgggaaaaagtaaccgacagagccgatccgctgctgattcatctgcgtcaggccatgccggctgcaatgtcgcttgcatgctggaatgatgagctgataaataatattgaacacaaggggcgtatgtatactgaagtgttgcttttcattatttacgcccgtgccgcttacgagcggtcctctcttggccgggatccttccctgcgggaatactgccgacagatgaagaagatactggccgcgtatacgggcggtgaaaatacccagctgttaatgctgagcgccgcttcagaagtggagtgggcgccgtactacgccatgctgcgggaaatgaatggtcagggaccggaagatccggattcgtacctggcacaacatgtcaggggcataacggcagaaaccctctatgatgataatcgtcttatgcccctgtgctatgactttgacacgaccacggttaaacgccgtcatgtgacgttcaccagtttttccagcatgcactggcgtatggttatgaccctcgcccaaatccactaccggatcagccagctggaggtgctgcttgattcgctaaccgacagtgacgtcaaagtggactttgacggtaccagcgaaacccgcgcgcagttggagaagatgattttgcagctgactgatcaggaagaacggaaccagagatga

SEQ ID NO: 152151 - DNA, 498 bp, Enterobacter cloacae
atgatgctgaaatttacgaagtattcctcgctgtgtctgtttacagcagcctggtttgccagcgcggatatccatggccatgtggtgcgcgtgctggacggggataccgttgaggttcttgagccgggaaaccgactgacgcgtgttcgcctggctggcatcgatgcgccggaaaagagtcagccctttggccagcgttcccgacaggcgctgaccgcactgacggccgacaagtcagtgcatgtctctggaagtacccaggatcgttatggccgcctgcttggaaccatctggtcagacacaacagacattaatgccgttcaggtgaaaactggtatggcctgggcctaccggtatcacgacagggcatcggtagcggaatatgtcggactggagaggctggcacgggagagccggtcgggtctgtgggcagacccatccccggttgaaccgtggcgatggcgtacaatgaagaagggcggtcaggcaagtcactga

SEQ ID NO: 152152 - DNA, 351 bp, Enterobacter cloacae
atgatgccactggataaatatgacgactaccgcgctctgtgttatgaggctctgcaaagtgacatgccggacgcaattcaggacatttatgcgttaatgcttaagtgccgttctgaatacatgcttaattttcagcaacagtttcagggctgggttctgaataagtatcttatgccggcaatacaatccccgaacaaactggatatttttctcgcatgggaaagccggaatgcagactggaaacatatcctccgtatgtcattgcttggcggccgtgtgggctctgttgcccgaacgctgcggatgtctctgttaacttttgctgagcagcacagcaaggccgatcgctga

SEQ ID NO: 152153 - DNA, 483 bp, Enterobacter cloacae
gtgggacgtgtaacagcaccagaaccgctatccagttcacaccagctcgcagaattcgtcagtggcgagagtgtactcgatgaatggcttaaacagcgagggcttaagaatcaggctctcggggccgcccgaacgttcgttgtctgcaaatccggcacgaagcaagtcgctggcttttactctctggccactggcagcgttaaccatacggaatccacaggtagtcttcggcgcaacatgccggaccctataccggtcatcatacttgctcgtcttgcagtcgatgttgcattccgtggaaaagggatcggcgccgatctgcttcacgatgcggtgctgcgttgttatcgggttgctgagaatatcggtgtacgtgcgatcatggttcacgcgcttactgaagaagccaaaggcttttatctgtaccacggctttaaggcttcaaatacacaggaacgcacattattcctgaaactaccttga

SEQ ID NO: 152154 - DNA, 267 bp, Enterobacter cloacae
atgaaatcagatgttcagctcaatcttagagccaaagaatctcagcgggcactcattgatgctgcggcagagatccttcataaatcccgtacagactttatcctggaaatggcatgtcaggcggcggagaatgtgattctcgaccgccgcgtattcaattttaacgatgagcagtatgcagagtttatcgctatgctcgatgaaccggttgcggatgacccagccatcgataagctgttggcaaggaaacctcagtgggacgtgtaa

SEQ ID NO: 152155 - DNA, 267 bp, Enterobacter cloacae
atgtcacctcttatatccgaccctgttaaggctctgcaggcttgtgtgaacgtcctgaaggcccgcgggtatgacactcagaaaccaagtttgtttccggccaagacgcgcctgcgcgcagatccagcccttcaactgccggtcattgtcgcaagtacgttgcttgtagaaaaacaagcgcccgggctgaatcacacgcttgatgaggaactgaagaaagtattttcggaaaagcgcacgatgaaacatcgccatcgccgcaggtaa

SEQ ID NO: 152156 - DNA, 519 bp, Enterobacter cloacae
gtggtatccggcgagtcccaggaaagcctgtttctgacccgctggctggccaccgcacagaagcagaaacgctttccgcgtgaagtggcgccggacatcgagtggctgctgaaacagggacgcctctacggcgtcagggcgaagctggccagcaaactggaatacctctggcactcctgtacgggcgagatttcagcgcagagcgatctgttccggctgacctacgccattgaaaacgcgaaaagcatgcactggacttaccggttgctcagtgatcgtgagtggagtggccgccatgccgttccggtgaaccctgcggttaactgtattagtctgtcgaagtcatccctcgatgccgcgttcgatgacgacggcaggctgaagggcaacctgatggccagaatcaccggcaatctccccgggctttccgtcctgctctcgcgttgtggctgggaggctatggcggcagaaaatgtcggctctgaccccctttaccgtctgtgtgtaactacagtctga

SEQ ID NO: 152157 - DNA, 444 bp, Enterobacter cloacae
atgagcgattccgggcaaccgtccgtacctgaaaagatgacaaagaaagaacggaaaaaactcgcactcagcctggcgctgaaaaaagtctgtacccgctggccggagctgtggccgggatggaaaaaaagggagttccggccaatcgcccacggcatcagccaactgatgcacgaccagcttaaagctgacccggttcctgacctgacccataacgaagtcgcccgggttatgttttatgtgacgggaagcctgagttacctggagcagattaaagcaggcgcttaccgctacggcctcgacggtcagcctgtccaggaagtgacggcagaggatgagaagtactcacgtctgcgcattaaggaaatacatcagcgtatcaaggccagcgccgccagaaaagccacagagcaggatacttctgaagagactaattcaccgtga

SEQ ID NO: 152158 - DNA, 1017 bp, Enterobacter cloacae
gtgtctgagagaccccagtcagttcactggagtgagctgagccctgaagagcaaatccgctactggcagggggtggatgacggcagtattgattctttcctggtttcaccggagaagaaacaaacccggcgtcgtcgtggcgatcactccacaaaaccaaaatgcgagagtcctgcatggttccgtcctgcgcattacaaagcgctgggtggccagctcggctatgcctacaatcgtcttgtcaaaaaagacaaagagacggggcagatcagtcttcgcatgcacatctcccgtcacccgttttacataaaacaccgtgaaaaggcagggcgcaggtatgcgttccgtccggaaaagcgtcgtctgcttgatgctctcatgccactggccatcagtttctgcgatgccggtaaacacaccactgtgatatgcgtttccaggctggccagagagctcagtccgaaggatggcaggggaaaggtcattcctgaaatggaagtgaccgtatcccggctgtcacgtcttataaacgagcaggtgcagtttggtgttttcggcgttgccgagaaaacctgggatcgtgaaagtaaatcctggcttcctaaatacatctacatcaccgataccggcttcaggattctgggtgttgacatgcagaagctgcacgaacagcaacagaggaagctgaaagagagtgaagagcgccgcgcgctcatccgggaaggtattcttggtgaggatgaagagatctccgttcatgcggccagaaaacgctggtatgaacagaaatcccttgaggcactgcgctaccgccgtcagcaggccgcagcccgcaagcgggctaaccgcctggagaaactgccccgcgaccagcagattgaggatatctccggctggctgctgaagaccatgccagcggaagaagcatattactgttcagatgaacggctccagaagctggccattcagcatttgtaccagctgaagctggcgcttgaggagccacctccctggtag

SEQ ID NO: 152159 - DNA, 201 bp, Enterobacter cloacae; identical to SEQ ID NO: 79240

SEQ ID NO: 152160 - DNA, 258 bp, Enterobacter cloacae; identical to SEQ ID NO: 79239

SEQ ID NO: 152161 - DNA, 504 bp, Enterobacter cloacae
atgcaaatattaaatgaccgccagtggtaccttgcgcagtatattaccggtggcaaaaaccgggagaatttgttcggctggctccatgagcaaaaaataacgccatggacgccgctgacggtgaagaccattaaacgttccgacaagattaatggctaccggaagcgtattaccactgtattcccgggttatttttttcttaaggcaaatttcgagcatcacaatatcaccaatatccggatgcactcggcattctccgattttgtggcttttgggcgtcagataaaacctgtggattctggcgttgttgaacgcctcatgaagtacttcccggaacctgattcacatactctggcaaaagccgaactcgaagcagcctccgccatctggctaaccagagcgcagtacaactttatggtgaatatggaaaatgaccccatgccgctttcccgttcggccatgcttatggacctggtctatcactctggcaagcacggtttttaa

SEQ ID NO: 152162 - DNA, 729 bp, Enterobacter cloacae; identical to SEQ ID NO: 79237

SEQ ID NO: 152163 - DNA, 930 bp, Enterobacter cloacae; identical to SEQ ID NO: 79236

SEQ ID NO: 152164 - DNA, 462 bp, Enterobacter cloacae
atggcatggcttagcggtctctccccctggcagatatggttgatggtggcgggtctttgtctggctttcgaaatcataaccggaacgggatggctgctctgtctgagtctggccgcgctggccactaccggactggtgcagatattaccgctctcagtcacctggcagtggctcttttttgccgccgtggccattctgatggcctgcctgcgtcgcatcaaaaaaatgatttacctcggacagcacactgacggaaggccgccactcaatgaccgtcttgcgctgatgaagggcatggtactgacactggataatggattaatcaacggcacagggcagacccgaataggtgacagtgtctggtttgttaaagccgacagtgattatcccgccggcacaaaagtacggataaccggcacggaaggtatttttctgtgtgtcacagccacagagcagcagtag

SEQ ID NO: 152165 - DNA, 240 bp, Enterobacter cloacae; identical to SEQ ID NO: 79234

SEQ ID NO: 152166 - DNA, 579 bp, Enterobacter cloacae
atgaatgaaaagctcccatggctgttgcttatactgccggccttctctgccatgtctgaacccgtaataacctgtgagccggagagtgcgttttctacgtattttttaccggctgtcggtttttgtgttctgttaattgtcttcgtatattcaataatagatttattgttagatgacgcttccactttcagaaccggtaaaaaaccgtggttattcgtcatcgctgtgaattcagtcgttaccgtactgggtatactgctgaccagctatacccttcatctggagccggataaaaaagcggtcgttaacgaagccgtcatgatgtcatcacctgaggtaagtcagggccttcattaccagaaagactgtattctggtcagcagaaacgacactgctgtgacgctgaactgcagcccggatagccgaactgaaatcgttccccttgccgactatgctcacgcgaccagtgcactggaggatgccacagcgcatctgttggaactgaagatcaaagtcagccgaaataacatctgtcgcccggacaaaacgtcattttttgacgatctgttttcccgttag

SEQ ID NO: 152167 - DNA, 636 bp, Enterobacter cloacae
atgagaaaatctctttccgtcgccgctcttgccctggccgcggcgttaaccggctgccactacaccatgcccgacacctcaccgtccactgtcccgacaggaggaaccccgcccgacagcgccaccaggaaaatcccggcagataccgacaccgtcacgctgcaaaccatggtggttgaggtaaaaaaatccccggacgtgagctggaaaaccctgcttccggaatggcacgccggaaaggatatcgccgtactgcagggtgacggtaaagccatttatcaccgcctggcagccagtagccttgcggtgattaagtacagcaatagctcggtcacacccaatatgacagcgctccctctcctgtaccgcgattgttccgacacatcaggctctacacggaactgcagcagtatgggactggttctgcgtccggggtttaagcacaccgaaggcccactgagccttatgctggatttgcatatgcaggatccacagcacagcgtcagcattcgtcagttcgtcagtatgcaacccggtcagaccgtactggccggacgcgcactggaggagaacacgctgcaggtcgtgctgatcaccccatacattcattcccccctgcatggagcaaagccatga

SEQ ID NO: 152168 - DNA, 528 bp, Enterobacter cloacae
atgaaacaaggtcctgccgccctgcttctgccgttacttctgctgctgagtggctgtaccggcagtaaccggcctgacgctacccggcatatcacacagctggaaatcacggtctggccgctgaaaacgcagcgggacggtaccactgcacctgacttcagcgtacctgaaacctggaagctgggactcccggacgacagacgggcctatcttacgctttcatccctggacgatgacgttaagccgtctgccggtagcagcagggccagtgccgtaaacctggtgatcgaatcccgtgaccggagtccaaaagggcacacgctggatgtgacgctgtcggagttctgcctgaagttcactgatttcagcgtcgctgacagcggaacggtgcgcatgccgtctcccgtgataccgaaaacgaaaaaaacgctggtcaccggcgttcatcctgcgtccccgcttcgtattcaggccagtaataatgattgcccctccaccctgctggttcaggttacctccctggactga

SEQ ID NO: 152169 - DNA, 534 bp, Enterobacter cloacae
atgaaaacactgatatccgtccttctctccctgctgctgagcggttgcgccgtggcgcattcgtccttcactgagagcacacctctcctcactgccacggtggttcccgcgtcgtcacatgatccagccggggacaacatcgttctcccggtcaatgcccgtaccggggaggtgacaaccctgcgcagtacccggtcggtaccttacacccgtgaaaccgtctcgaggaacaacaggaaaacacaggaaatacgcgaccatgtggagtccggcaccgtcatcacggtggccgtcactcagacagacgctgggcagcaggcattaactctgcgcgttcagcatacctgcccaccgcagataaagaccttcacgccgggcagcaatcctgacgccaggattgatttgccgtccgtccggtcattctccctgcaaaaaacactggtggtgcaggaaggtgaaatggtccggatccgcagcgaggggatgacggcagactgtgcttttccccgtatagatgttcaccccactgcataa

SEQ ID NO: 152170 - DNA, 1146 bp, Enterobacter cloacae
atgaaaaaaatcaccctccccctgctgctctcccctttgctggcagggtgcaccgattttatggccagggagaccggcgcgcagatgccggccctggtgtttgttgatggtcagatcagtgaaagcgcggacattattgcgcagacccagcgcagactggcacctccacgccctgccagcgcacctgtggtgggggtgcaaaagtccgcaccagctgctgttccggcaggcaattcagtcccgctgccgtcgccatcactcgcgaaaaccgagactccggcggccaccgcgtcgtctgcccagccattaacgcccggcagccagccggcattaccggcgctttccgtcaccggcacgccgggtacggttgccgtcctgtcgctttctcctgcccggaacctcacgcttgagcagtgggtgcggcggatcatgccgtccggctggaagctggagtatgagaatgccctgcgtacagcgcttaatacccgcatcgtctcggtctacaccaacgatcagtggacgcgggtactgaaccggttactggcagagcagtccctgcacggggacctcaactggacaacgcagaccgtcacactgcgccgtccgggccagcaggctgctgcacgcgtgcagccagcagataaaccagcgacgccggcagcaccgcgtaatccgttcagcagcgtaagtgccacagtgccggccgcttcggccacggaaaaaacagagagccatccggccgccacaccagtgtcgacaagtcagcgacaggcacaggccgcctctgtcaccccgtccgtcccgtcccggcctgccgcgcccgtactgaccggcacaccggtcccggtcagcgacaccggtgggaaagtctggcgggcacagcccggcaccactctgcgcagaacgctgatgcagtgggcaggcgagacccggtgcgaaaccgctgacgggacaaaatggacggttatctggcccgcttccgtgaccgactatcgtcttgatgcgccgctgaccttccacggcagctttgagtccatgctgacccaggtcttcgacctgtaccacaccgccagtaagccgctctatgcgaaagcctcgcgaatgcagtgcctggtgtccgtcaccgacacaccggacgaaccgtaa

SEQ ID NO: 152171 - DNA, 438 bp, Enterobacter cloacae; identical to SEQ ID NO: 79228

SEQ ID NO: 152172 - DNA, 1686 bp, Enterobacter cloacae
atgaagaatcttcccttccgactccggcgcctcctgcaggcgtcttttttcgcgctggcctcgtccgtcacgctcctgtccggatgtaccttttccgaaatcaacaaaatgcaggaaaaggcgcagtcggatgccattgtggcccgcgcacaggcgcagttgccacgcacacagcatgcccgtcctctgacctggactgagcgccagtggatcaacacgcagccgcttccggcagaggcgcgggacaccgcccgcaaggcaccggactgctatatcacccaggcaaaaccgcagataacccttcaggaactggcacagaacatctccgaaatctgccgggttccggtgatcttcacgccggatgcggcgggagccacccggagtacgggcgggggcgtcacccgccagataaatggtccactgccggtcccggatgagagtggacgcctgccgctgaatgcggccacgccagccacctccacggtgagcgacggggcaccgcttgtcctcactaacctgatgtggcagggggaactggagggcctgctgaaccagatggcctcccgcagtgggctgtactggaagcaggatcacggcagcatcgtattctacctgctggaaacccgcacctattcgctggccatgctgaacacgaagacgaccagcaactccagcgtcagttcgggcacaaccagtacgatgggggcctccggcggccaggataactccgcctccggggatgcaacctcgtcacagagcacccgcatcgaccaggaatacgatctctacgcggatatccgcaaggggattgaagccatcctgacgccggagaaaggccgttactggctctcggcatcaagctcctcgctgatcgtgaccgacacaccggcagtccaggacgcggtggcgcgttatatcgatgaacagaaccgggtaatgaaccgccaggtggcactgaacgtggaagtgatgagtgtcagtaacacccgtaatgagcagttcgggatcgactggaacctggtctaccgttcactgggcacggcaggtgcggccctgaacaatgcgagcggcgaaatcaccggcgcgacatcggccacggtctccatcctcgagacagccaccggcaaggccgcgaagttcaccggctcagaactgttgttaaaagccctgtccgagcaaggggacgtcagcgtcgtcacctctcagtccagcgtcgtaaccaacctgacgccggtgccgatccagatggcagaccagaccgtgtatgtcgcccagtcggccaccacaaccaccaccgacgtaggggccaccaccacgctgacgccgggcatgatcaccaccggctttaacatgaccctgctgccgttgatccagcagatagggaaagtgcagctgcaggtgaacttcaacctgtcagatccaccgaccatcaggaactttacgtcgaaggatggcaacagctatatcgagatgccgtacaccaaactgcgttccctgagccagaaggtcaacctgcgcgcggggcagtccctgattgtgaccggtttcgaccagaacaacacccggaccagcaagtcaggcaccttcacaccggctaacccggtgtttggcggcgcacagagtggcaacaatgaaagaagcaccctggtgcttgtcatcaccccgacctttcctgcggggcagtaa

SEQ ID NO: 152173 - DNA, 1302 bp, Enterobacter cloacae
atgcaacatgacgatcacgtcaccctgcttcgagatcccgccctgccacgccacgactgggcggccggactggaatggaaaccccgggaaacaggaggcggagtacgccggtttctgccgttccggtctgcgggcactgcccgccgccaggggcttcctgtggtggccacgccacgcccgaaaacccgtagcaggtcgcccctgccggaaggtcggggcatcatcccgttccactaccgcagccacacgctgtactccctcgcgctggcgttctgcgacacggtgacggacgggtacggcgtctaccggctcgacagcacggacttcgtgtttctcgcctccatcaacggtatgccggccattgtggccgacatcaccggcaacgcagggaagatgcaggagaccctggcgctgtttcttgcgctgaacgacgaacccgaaactggctgggtatgcccctcagcgcccgacgcccctctggactggagcagtctgatccacggactcgccccgcgccagcgccgccgctgccggcttgtccggccggatcgtggtgcccgccaggccgccatgaccttgctgtcgggcctgctggtttgcgggggtatgctgtggtgggttaaccgggcgcccgccctggacgccccgcccacggctgaagaacttcgggcccgggcgcgggaattcatgaccgagccggcaccggttccacgcctgccccatccctgggccaccattcctcccgtcagcgacctgctcgccgggtgtgcggaacaggacggacgggctccggtgatgctggatgggtggaaactcacctccggctactgccggccggacggtgtctcgctggtctatctgatccagcccggcggaacggccgaagggctgcgccagcgcagtatggagatattcggggtggagcccgtgtttaatgtccgtgaaggcggccgtgaagccaccattcccctcccgctgtcggagatgcccctgcacgatgaagccgtgccggagccgtcagcccagatgatgcgaatactctcctggttccagcgccagcagatcctgccgaaccttaacaaggtggcgcaacccgatcccctccctggcgcagacggcaggccgcctgcgaagcaggactgggaggaataccagttcagtttcaccggaacggtgccgcccctcgtacagtttgcgggatttgatggcagcgggatccggctgagcagtgtgaaatttgaaatcaacggcaccgtgttcacctacaccacagaagggcagatgtatgccagtaagccataa

SEQ ID NO: 152174 - DNA, 495 bp, Enterobacter cloacae
atgccagtaagccataaccttcaccacggccgggcagccctgctgcttgcggccatcattcttgccaccgtatccggtggcgcacttgcatcggactcaacgtcttcacaggtcactcccgccctgaccaagggagagctcgaggcgctcaataaccgcaatatcctgttacaggcacaggttcagggcgcgcagctggagcgccagctgaaggagaaccgtgacggcacaccttcggccaccgcgccgggctcccaggtctggccacaggtgcccggcgacagcgtcaggccgccttcagctcagaccggcgggcgtaccaccgtgcttgagataaccggccgggatcgggctctccgggccaccctgatgctggcgaatggccagctcaccacagtcaccaccggcagccgcctcccgggctccccgctgacggtaaaaagcatatccctcgccggcgtgatgctcagcgacggcaccacactgacattctga

SEQ ID NO: 152175 - DNA, 1566 bp, Enterobacter cloacae
atgacagacactctccaggacaataatgccctgctgcttatcagcaacgaggggcggacagaaatcctcgtggacattaaccagcggggtaaccccggcgtgcaggtgacgctgctgaaactgatggaacgtaaccccggcgcgaaggccagttttgtcagtctggaacaactaagggatgcgcgggacaaggcgcttgtcttgacgccacagcaggatggtaccggcgggctgacgctcaacgacctgaaggacgtcagcggcagcgaaaagaaaattctcgactactttaatgtggcgaggacgctcagcgcctccgacattcacttcatcatttcgtcctctctgtttgtggtcaaaatgcgtatcttcggcacgctgcatacggttgacgcgcgccagccccgtgaagggatgtccctgtgcggaacggccgtgctttccatgtcagacattgccgagccgacgttcttcccgggccgcgagcaggatgcgcgcctgtctccagagctgatgcgaaaaatagggttgtggggcgcccgctattcccatcgcccgacggcagatggcctcattgccgtaatgcgacttatccctgacgacggcagcgccgtcccttccttcctgcaactgggttttctgccggaacaaatccgcctgctaacgcgcatgctggcgcgaacggaggggaaaatcatgctcaccgggccgaccggctcggggaaatccaccaccctgcgcaccgcctgccgttactacctcgatcacaatgaaggcaagcatctgctgtccattgaggatccggtcgaagggcagatgaaggatgccgtacagacgccggtgatagcagacaagtccgatgaggatgccattaatatcgcctggacgcgggggatccgctccgggatgcgccttgatccggatgtgatggttatcggtgaagagcgtgacctgatttcaatgctcacggggatttatgcctcgcagaccggacacctggtgctgagcacaatgcacaccaactcagcgctgagtattccggaacgtcttatcacacagggcgtaaacggagagctgatttatgacgcccagctaatggtcgggcttatcagccagcgactggtcccgacactctgcccgaactgcagggttccctgggagaagaagatggccagcctgaccgtcgaagagcgtgacatgctggaaaggtactgcaacgtggagggggtatgccgtaccgaaaacctcttcttccacaatccggacgggtgtgaagcatgccgacatgatgtggtgatcaacggacaggttcgcgccgtggtgggacacgggcttaagggacgaaccgtcatcggtgaggtgattgagacggataaccgtcttctgctccgtctgaaaaaagaggggaaaaccgctgcccgccagtactggctggaaaagatgaacgggatcagccgcgtccgacatctgctgcacaagctgaacgaagggcttgtggatccactgatagcagaccgcattgtccccctcgacgaagacgaaaggttgaaagcggatgatgagtaa

SEQ ID NO: 152176 - DNA, 1098 bp, Enterobacter cloacae
atgcgtgaaatgaacctgttctgccggatacggcattttatcgtgaggaaaaccttcgccggcccctaccgggtgcagttctatgaggccctgggttttctgattgaaaaccgccagcagttaaaagccgctctgcagcagatgcgcgatgcgtggacggacttcggccggcgctggcatccgttcgcagagcttaccgatgactgtattgaagccctgcgtgaaaatgccggcgagaagacgctggagaaaacccttgcccgctggttaccggaaacagaagcggccgtcatcatcgccgggatccacagcgacaaactcccccaggccctgaaatacgccaccaccctgaccgatgcgggcaaacgcatcatggagtccgtctggcagatgtccatctacccgctggctctggttgtcatgctggccgggacggtctgggtgctgaatgaggaactggtgccgtcgctgtcggaaatcatcccgccggagcagtggaccggggcgctggggtttttatacaacttttccgtcgcggtgaatgagtacggtctgatcggcggcatcattctggcgattgtggggtgctgggtggcctggtcgctggctcactggcaccggccggatgcgctgcggcgtgtcatggacggatttatgccctggtctgtttaccaggatattcagggggctgcctttttactcaatattgccgcgctgataagggccggcgtacagacaaaaagcgcgctgcagatgctccgtaaccaggcctcgccgtggttggctgtccggatcgacgccattatcgccagcgtccgggaagggggaaacctcgggcatgcgctgcgcgagtgcggctacaacttcccgtcccgcgaagccgccaactttctgtccgtgctacagggggacggcgcagatgagctcatcagtaactatggcctgcgttggctggagcagacacttgtccgtatccgacgacgggccgttgttgtacgcctgatcatgctgaccgtgcttgtcatgacgctcatgctgctggttttcgcggccatggacattaattcagtcagtgacccgggtatgggcacgttttaa

SEQ ID NO: 152177 - DNA, 603 bp, Enterobacter cloacae
atgtcattccacacagcagacaataatccggcatactgtcgccatcaggatcgcgggtgggggctgctcgaacagggctggatcgcccttgccgttatttttgtcatcgccgccgtactcggcaccgcgtatatgatcaaaagccgtaccagtgtcgggctggagtcatccaatattcagtcgctgatcaccggggctcagaacctgatgaaggcctcggacgggtactcctttaccagctcggccaaaatgactggtgccatgatccagatgaaggcggtgccgaaaggcatgaccgtccgtggtaccgcctcttccggtaccgccacgctttacaactcctggggtggggccgttacctttgcgccgctaaccatttccggttttaacaatggcttcacgctgacgtacgagcgcgtaccgcaggatgcatgcatccagctgaccacccagctgagccgttccggcgtatccgatggcatcaccattaacagcaccgcgcacgatgatggcaaggtgacaacggagcaggccagcacacaatgcacggccgacagcggcaataccggtaccaacaagctgatcttcaccgtaaccagttaa

SEQ ID NO: 152178 - DNA, 531 bp, Enterobacter cloacae
atgcaggggaaccgattctccctctgcgcactgatcctgaccgccctgctctgcttcctgacctcatcgccgtcacgggcctcgtccccgctcaccatcaccacctttaacgactgcttcgtccgggccggtatccgctaccagattgagccgttgctgctcagggccattgccataggcgagtcgtcgatggatccggtgataaccaacacaaacagggacaaaaaggggcggccggtcagtacggattacggtctgatgcagattaactccacccatattccgaaactggtccggatggaggttatcaggggggccgacgacctgctgacccgtccctgtctgaacattcagataggggcgtggatcctggcccgtcactttcaggtctgtggcgtaacgtggaactgcctgggctcatataatgccgggttccgcaaggatcggcatgagacgcgcgaacattacgcaaaccgtatctggcggatttacagcaggctgaaaggcctgcccgccgtgcaggggaggtga

SEQ ID NO: 152179 - DNA, 666 bp, Enterobacter cloacae; identical to SEQ ID NO: 79220

SEQ ID NO: 152180 - DNA, 525 bp, Enterobacter cloacae
atgggattttttaacgcgttcgacaaaatagacagtgcagttacccggggttatgcccgctggggaaaatggctctggggtgcactgttactgccggtggtgatatatcttggctggtcggtgtgggctgcggtctgggggccgccatcggggccggtaacgctgattattcatagcgagattgacagacctgttctggggtttagcgtaaacggggtggcggggtcaaatgcatttgcttatggcggaggaggcgccacctgctgtggcagcatcagtggcgatacggcagagataatatggaccctgagtacaaccagagcccaatacgattccgggctcagaagagagacccgtaagtcaagaattcccatgccaaaacgcgaatggggcgaaaattatctccatacctattttatgccgggtgacaaagtctacttatggtggagtacaggctttaacagccctgcagctgatgatattgccgcaaaggtggcgcaaaagcatcgccagaatatgcactga

SEQ ID NO: 152181 - DNA, 405 bp, Enterobacter cloacae
atggaaattaaatatatccctctccaaatacatggtgatgaacgcggttctttggttgctttagaacaagctaacgatgtcccattcgatattaaacgtgtgtattatatgtttaatactcaaaaggaaataaggcgcgggtttcacgcccataagcgacttgtacaaatagctattgttgttaagggaacgtgtaagtttttaatggatgatggtaatgaaaaggtcaacattactcttgataatccagctacaggcttacttattgaacctatgatatggcacgaaatgtatgattattccgatgattccgtgcttcttgtgcttgcaagcgatttatacgacgaatcagattacattcgtaattatgatgattttataaaattggtaagctatggaaaataa

SEQ ID NO: 152182 - DNA, 864 bp, Enterobacter cloacae
atgaaagggattattttagcaggcgggtctggtactcggttatatccaataaccatgggtgtttcgaagcagttattacctatttatgataaaccgatgatatattatccattatcggtattaatgttgtcagggattagagatatattaataataactacaccagaggatcaaagtaattttatcagagttttaggcgatggtagttctcttggcattaaaatctcttacaaagtgcaattgtctccagatggtctagcacaggcatttattattggcgaagattttattggagatgattcagtttgtttggttctgggagacaatattttctttgggcaaggtttcagtccgaagttgaaggcagtagctcagcgcgatgaaggtgcaactgtgtttgggtaccaagtgatggatccagaacgtttcggtgtggtagaattcgatgaggataataaagccatatcgatcgaagaaaaacccttgaagcctaaatcacattgggcagtaacaggattatatttttacgataactccgtgatagaaatagccaaaaatgtaaaaccatcagctcgtggagagctggaaataacctccataaatgatgtttatttgcaacgaggacagctaaatgtcgaattgcttggacgtggctttgcatggcttgatactggtactcatgatagcttgattgaggcaggtagctttgttgaaacagtacaaaaaagacagggaatgatggttgcctgtcctgaagagattgcatggcgaaacggatggttaagtgatgctgaactcgaagaacgtgggaatttattaaagaaaaaccattatggacagtatttattaaagttgacaaattaa

SEQ ID NO: 152183 - DNA, 1215 bp, Enterobacter cloacae
atgtattcttcccgtaccggtacgtctgtggatcccatggactactggggtgttcttgccgtgctgggcctgatgatgctcctggttgcctggctctttctcccggagtttgtctactggtcctgcttccttcttcatacgctgtggggcatggttgacttcgggccgttccatacctgggccgctccccgttataacctgctggccaccacaggtaacaatgctgaacacgtcaccctcgaccagtggataagcgtcatggagcaaaccaccggcatcctgatgatttttctcattccgttatctgcagcttccctgtggggatggatacgccacccggccagaaactggtacacacgccgccctctggatattcactcactgccgttcgcgatggaaaacatctcaccggctatcgcaccggtgctgcaggaaggcgatccgaaacgcctgttgctcgtaaaacgccgcccgcaaagacgtccggccataaggccggaagagttcgccgacgaacataagctaatcagtaatatgcagctcgatgtcgcccgctgccgtgaggttttcatggcgcagctcggcaaaccactttcctcctggaaaagccttgcgccccatgaaaaagccctgttcgccatcttcggcctgcagttctttctcgatgaccgcccggccgcgaaagcgctgatggacaccctgaaccgctcctgccgtatcaaaagccgtcgggacagtggccggttctccgtgccggtatacgcgctggcaaaaccggcttttatccgggtgatcaatagtgaaggcgcaaaacgctggctgaaagagcacaggtatgtcagaagtggcctggtctggctgtatgcgcacgacctgcggctgacgccgcccaactggctctggcttaaaggcgtcgaccgcacactgttctatggccttcaccgggcaaataccacaaagggatttatcgagggagccggcatcgtggccgtggctcgcacggagaacgaagccatccgtctgggtctcccctgcccgaaaccctgtgtggaggaagccatcgacggttttcgcgccgatatggtcgctctgggtcttatctgggatgagccgcaacccgatcgcgaccgtaaacgacgcatccgcaataactggtcactgactgacgacgtgctggcgcggccagggcaggaggatgacgaacagcctttctga

SEQ ID NO: 152184 - DNA, 1149 bp, Enterobacter cloacae
atgccctcagcaaacacttattccgcttttcactgtaacgacagcatcgtggtcctgcatcaacatggacaggatacaccgcagaccctgaccattttccgcgaaccacagcggctggccacgcatgaaggtaaactgattgccttttacaccttctcaaatgaggccgtcacgctgctcgacgatccgcagcacgatgccggagcggtcctcaatgccattgcattgccgctgaaaaaacgcagtaacgccgccctgtcccgttacctgaaatacctggcctgtgccgctggcggcgcccttctggcgtctgccatgtggtaccagccctccccggaagagttcgttcccgtggcgttcaacccggccaccgaatcagttgccccccgggctgccgacagtgaccctattgcccgcgcagccgctgccgaattgcagaacatgcaaagcacgatgcaggataaccgcaatgcgttaccggcatcgccatcagcagcgctgcagcctgcaccgtcggaggtccgtcccgtcagttcttccgtggggcccgccgcgcataccgcacctgaggtggcaccggaaaccgccgctcgccttcagatggcagaagtgcttaaacgcaacgctgaccgtggcatgttcaccattacgctgtccgccggtcacgaacgtaccctctacgccttcctcgatccgacgtgcagcgtctgccgggcaatggagcctgccattgaacgtctgacgcaggagtacaacgtgattgtcttcccggtttcggtggtaaatgacggcggcaatgccgtggagaaaatcgtgcccctgctctgccagaaagacgcgacaaaacgcgccgctggctggcaggcactgttccgtgccgacgccggaatgcccgttccggggagcagcagcgcacccgtcgatccggaatgcggaaaagccgcagaagcggccgtcgccgtgaacgacctcggtttccgccagttcggttttgaaggtaccccatgggtactgaccgacacaggtttccgtctgtcaacggggttactggccgaaccagccaaaatcgacctgttcctgaaaaccaccgaccagatgcaacctgaacaggccgatcgcttcctgaaaaccgtcaacactcaggagtaa

SEQ ID NO: 152185 - DNA, 2289 bp, Enterobacter cloacae
atgcagaacactcccgttaaccaggcgatgataaaccggaacgcctggggctccccgctgattgagctactgcgtgatcatctgttgtatgccgtcatcatggcgggcagcatggtggccggtttcatctggccgctgtccattccgctgtgcctgctgctggccatcgttgccagcatcagcttcagcacccaccgctggcgcatgccgatgcgtatacccctgtaccttcaccgggtggatccgtcggaagacaggaaggtgcgccgcagcctgtttaaagccttcccttccctgtttcagtatgaaaccctgcaggaaagcaccggtcgtggaatattttatctcgggtaccaacggcttcgtgacaccgggcgtgagctctggctctctctcgatgacctgacccggcacgtcatgttcttcgccgggacaggcggcgggaaaaccgagacaatctacgcctggatgctgaattcattctgctggggccggggattcacctttgtcgatggcaaggcgcagaacgacacggcaaggacggtctggtatctggctctccgctttggccgcgaagacgatgtggaattcattaacttcatgactggcgggatgtcacgcagtgagataatccacaagggagataaaagccggccgcagtccaatacctttaacccgttcggcctcagcaccgaggcctttattgccgaaaccatgcagtccatgttgcccaccaatgttcaggggggcgagtggcagtcccgggccatcgccatgaacaaggcgctggttttcggcaccaaatactggtgcgtgcgggaaaacaaaaccatgtcactgcagctgctgcgcgagttcatgccgctggagaaactggccgaactctactgccgtgccgtggatgaccagtggccggaagaagctgtctctccactgcataattacctggtggatgtgccgggatttgatatggcgctggtccgcacaccatcggcctggacggaagaaccacgcaaacagcactcctatctgaccggtcagtttcttgagacattcagcaccttcacggaaacttttggcgatatctttgcggaagatgcgggggatatcgatatccgcgactccattcacagcgaccgtatcctgctgacgctgatcccggccatgaacacttcccagcacaccacctccgcactggggcgtatgtttgtcacccagcagagcatgatcctggcccgcgacctcgggtaccggttggaagggctggacaccgaagcgctcgagataacaaagtacaaaggccaattcccctacatgaattacctggacgaagtcggtgctttctacacggaacgtattgccgttcaggccactcaggtacgttcactggaattcgcgctggtcatgatggcacaggaccaggagcgtattgaaactcagacgtctgcagccaatgtcgccacgctgatgcagaacgccggcacaaagatcgcagggaagatcgtcagtgaggacaaaactgcgcagaccatcagtaacgctgcaggcaaggaggccagggccagcatgctcaacctgcagcggcgtgatggcgttatcgggacgtcatggattgatggcgaccacatcaatatccagatggagaacaaaatcaacgttcaggatctgatgaagctgcagcccggtgaacactacacggtgtttcagggtgacccggtcccgggagcctcgttctatatcagtccggaggagaagagctgcaacattccgctggtcatcaaccgctatatcactgtgaatccaccaaagctggaacgactgcgcagactggttccccggacggcacagcgtcgtctgccaacaccggagaatgtcagccggatcatcggtgtgctcactgagaaaacctcccgtcggcgtaaaaagacagacacaatgccctggaaagtgatcgacaccttccagcagcggctggccaaccgtcaggaggcgcataacctgctgacagactttgacatggatttcgcggggcgtgaaaaaaatctgtgggaagaggcgctggataccatccgtaccaccaccatggccgaacgcaccattcgctatgtcatgctcaaccggcccgaatcttccgcgccttcccgggaagatgacgcgccagcccccaacgctcttcttaaaaatctgacgctgcctccggtcacccatgttcccgttgtcaggaaaaggaatgatgagcccccggtacaagctcccccgcccctgaaccaaatggagtggcctgaatga

SEQ ID NO: 152186 - DNA, 624 bp, Enterobacter cloacae
atgacagtaccgaccataaaaacaggaacgtcggattatgagcaactttgcgtccttatcgcattcgaaagccagatgctctgtctcctggcggaacatcgatgggggatactgaccgcttcagatgcagaactggtcgcctgggaactgggatgggaacacgccagcgatatatctgacttatcactctcctgcgctgacgtcctctcgtccatcaacgtaatgggagaagaactgcttccgggtggatgggttgatgcagtgcagaccggcagtgatgaccgcatcaggtatgaacgacatttcaggaaagctgaggaaaaataccctgccggtgacaagaacattgaacgccataacatgacgttcaggcgattgtatggctcgccggatgactctgcaggctatgtctttatacagacggctttgccgcgtaatgcaaactactgcgtcagtcagacagacaatgatgaaaaggtcatcgctgttctggactcccttaatgatgcgatagcagtagcacgctatgccgcatctcatgatggtggttatggtgatgtctgtatcgcaacatcagaccaccccaccacacattcggactttgaaagctggtttacagactga

SEQ ID NO: 152187 - DNA, 288 bp, Enterobacter cloacae
atgaaaaaattacttttagctcccctgctttgcgtccctacactggcaatggccattcagccggtctctgacacggaagcgacaaatcagctccggctgatgaacagccagcttgagttgattgccagtacgctggccagcaatcagcaaaaaatattcacctgcactgatggagagaagatctatacggtcggactggatattacacgcggtgcttcacagtacaggtgcatactgaaaggcaatcatgctgaatgggagcgacaaccccggctctcgttgaagtaa

SEQ ID NO: 152188 - DNA, 291 bp, Enterobacter cloacae
atgcccaaaaagacagaggccggtgagcagtacatcagagccgcaacggatgccatcaaaaatgcaggttcgctccgggaactgtatgtggccattcatggtactgagccaggaagatcggaactgcagcgttttgctaaccgccttaacccgtcacgatctaatcctggtaccgatatgcttggcgtttgcgtggcgcatctgccatccctgcatgatgtcactctgaaagaatttttcggtataacggaaaacgtggaaagtgacggtgcgcagcaggtgtctggttaa

SEQ ID NO: 152189 - DNA, 975 bp, Enterobacter cloacae
atgcatttttttaacactatagtcgacattccacctgcagaagaccgacggtctggttttgagcaacacatattacaatggggattctctgtcttacgcgatgagtgcggacagtatgcctctgaaatcacccgggcggcctggctaggtttttcactttatgccacatcacttaccgatgacgcactgtcgctgacgccggatgagccggttatcccggagacagacagcccgctggctgatttgtcggttctgtcaccggaacagttttttaaaggacaccgaacagaagccacggcaaacgtcaccaccacgcaaacgcacaccgtggatctgacagaagaggaacagcgggacataattgaaagccgcctcctgcagcgcgcattcagtgacaaaaacggtcatgcctcgaaaaaagaagccatgaagcaggcccggctcatcacggatgaatacctcaaaccgtcctgggtatataaaaataacgatcagtattatgtttccacccacggttttgacctctcccgacgccctgacgttaccatcacccagtctcaggttgacgccctgcagaaagtaaagggaatgccggaaaccggccagtcccgcgatctggaacccggcgtggtggcccgtttcggttataacggccgtattttccagcaatgtggccgctacctcgacgcagttgatgtcgtggaatggatagcggtacaacagcgtcccgccatttttatcagcattccgtctgactacagcagtgagcggaagatgcacattgacaggatcagacgtgagcttcttgattaccacgacatcatcaccgcatatcgctgggtgacaacagacacggtcgttatggccatcagccaccatgccgcaggtatacacgcccgggatcaggtacagaatccctggtggctcctccgggctttcaaccgtcccaactccctggtttttggcaggggctga

SEQ ID NO: 152190 - DNA, 336 bp, Enterobacter cloacae
atgaaatctaacagacgtgaaggttgctcagaggaactccggtggctgatccatctggaaagtgagctggtgatgaccgccgcatatcttcgggtattcggttcacttccggaaagtcagaacagtaccatcattgcgtactgggctggctatgaattcactgtccatgggctggagcaccgtgagtggcattcagcaaattatgcggatgtggccgtatcagtacgcgctatggctgccagcattaatgagcaggagtggacagacggatgtcagcaggctgagtatgaactaagtcagcttacgtcctcacggtacgcttttctcaaaaggtga

SEQ ID NO: 152191 - DNA, 303 bp, Enterobacter cloacae
atgacccgttatatccagtcagtcccctgcaataaaaaactgttccacggtatccaggtaattaccggttttatgctggctgttgttttcaggagcattacgcatctgccagcggcgctgctggccaccatatcggtaatcatactgctgaccggtaatgagcgtctgttatccgtacccgctgaattatcatcagcctccccggacgccatcattatcatgctgaagaacatgctgttatcagcatggtcacttgccattctgttaacgttggtggagcgcctgtacggtttgcataactga

SEQ ID NO: 152192 - DNA, 492 bp, Enterobacter cloacae
atgcccaacaaaatgcataactcaggtgtagctacaatttctgctcctgaatttgttctcagaaatttaaaaaagaaaaataaaataaacagaattcttcgctcaggaaagatagccgttattataggtgagccagggactggaaaaacattattagccgaaaactgtctaaggaatcacacattcattaaaccaacagagcgtgatcatcaaaatcgctatattttatcaaccgaggtagcacacgataaaaaaagtgcgttaataattgatgatgcttttctatttaataaggaaagtctcaaaaagtttgcagagtatacctggggaaaaaggataaaactcattattaccgccagctctccggaagatataccggggatagaacccattgctgactatatcagactcgaaatccctccggtaaacgtgcgttctccagacaacaacaaagacaacaccttccagctcgaccttccacccaacttttaa

SEQ ID NO: 152193 - DNA, 531 bp, Enterobacter cloacae
atgacagggagcgttttccatcggcagtccacttcagaagaggggcatcaacttgtctttgatgttgatgccttgctcgcattatcaccagataccttgcccggatttcagaaggcttattcagcattcattgattacaagactgaaagtgctgacctcggcaacattcctgctccggaaaatcacatacagatggagtatgcgtctgtagttgatctttttggtaaagataaacctaaccatttccccaaacctggcgcaaaaaaagaaaaactgcatcatgtgcacgtttttgatgggaaaacggatcaggaattggatgcctgggttagcaaggcgcagtcacgcagggtttgcgacacattgttgttttactcttactttgagtttcagggaattcatcactttttcatcctccagtttgtgttagatcccgatggccatgatttccagaacgaagacggaaacatgaaaaatctggtcgaacgagccagcgcttaccgagcaggcatactctcaggacagatataa

SEQ ID NO: 152194 - DNA, 141 bp, Enterobacter cloacae
atgaaaaaagctgttaaacaaaatcctaaggccagaagcaccagtcgtgaagacatgtttcttatggctgcggctgtgcgggcgttgcgtgttcccgtttctgaaattccggctaaagagcgtaaagcgtctcaggtttga

SEQ ID NO: 152195 - DNA, 2700 bp, Enterobacter cloacae
atgatcgccgtcattccaccgaaacgtaaagatggcaagtcctcatttgtggacctggtctcctatgtttccgtgcgtgatgaagaacgggatgatgatctaatggaagcggtgaaagcatccggaatgaaaccggaaatgccgcaccgcagccgtttttcccgtcttgtggattacgccacaaaactgcgggatgagtcctttgtctccctggttgatgtaatgccggacggcggtgagtgggtaaatttctatggggtgacatgctttcataactgcacgtccatcgaaaccgccgcagaagagatggagtttattgcgcagaaagccaggtatgcgcatgacaacagcgatccggttttccattatcttctttcatggcaatcacacgaaagtccgcgtcctgaacaagtttatgactcagtcagacattcactgaaaagactgggtatgagcgaccaccagttcgttgctgcgatacatacggacacagataatcttcatgtccacgttgcagtgaaccgtgttcatcctgaaaccggctatcttaactggctttcctacagccaggaaaaactccataaggcctgccgagaactggagctgaagcatggtttctcgcctgataatggttgctatgtgatcgcgcctgataatcgtatcattcgccgtacttctgttgaacgcgatcgtcaaagtgcctggactcgggggcgtaaccagagtctgaaagagtacattgccgacacgacaattgccggtttacgcgaatcccctgtgaccgactggtcctctctccatcagcgctttgcgaaagaaggtttgttcctgtcagcggataacggtgagcttaaagtaaaggatggctggaacagtgaacggcctggcgttacgctttctacatttggtcacgccttcgataccgataaacttattcgtaaaatgggtgagtttattccacctgcacaggatattttcgcgcaagttccggctgttggtcgttacgaaccagacaaggttattgtgccgtcgcgtcctgaacgtatgacagagaaagaatccttatccgactatgcgatcgcccgtttacgcgcgccgttgattgcacttgatcaggacccgtcgcagcgaactatacagtctgtacatacgcttctggcacagtctggtctgtatctgaaagaacaacatgaccgactggttatctgtgatggatatgatccaacccgaacaccagtcagggcagaacgtgtgtggcctgcgctaacgaaagcgatccttgactcgtataaaggtggctggcagccggtaccgaaagacattttccggcaggtgacacccacagaacaattcaccggcggcggtctggaagctactccggtttccgatcgggaatggcgtaaattgcgcacaggttcaggtccgcagggggcgctgaaacgtgagattttctcggataaggaaagcctgtggggatacgcaatctcacactgccgtcaggaaattgagacgcttatcggaacaggtcagttcacctgggaacgttgtcatgaacagtttgcacgacaggggctgttgctgatgcgggagcatcagggactggttgtgatggatgcgtacaatcatgagcagacgccggtgaaggcgagccatgtgcatccggatctgacgcttgcgcgggcagagcctcatgccggcgcattcaggcctgttcctgcagatatcttcaaacgggttccaccagaaagccggtataacccggagctggccgtcagcgacagggatataccgggcatgaaacgcgaccctgaactgcgtcgccagcggcgcgaagcgcgcgcagctgcgcgtgaagatctgaaagcgcgttatgcggcgtggcgtgcaaactggcgtaagccggatctgcgcggtcgtgaacgctaccaggatattcatgagatgtgccgccggcgtaaggcgtatatccgggcgcagtaccgtgatccgttgatccgtaagctgcattaccatattgcggaagtgcagcgcatgcaagcgctgattaaactgaaagagacgatgaaggatgagcgtttacagctgatcggtgaagggaaatggtatccgccgtcgtaccggcagtgggtggaggtggaagccctgaaaggggacaaggctgcgatatcgcagctgaggggatgggattaccgcgatcgccggggcgacgcagtgaaagtgaccacagataaacgttgcgtggtgatctgtgagcctggtggtacgccagtttatgccggtgttccggggcttaaggccgcgttgcagaaaaatggccgcgtgcagttccgcgatgaagaaaccggggaacatatctgcacggactatggcgatcgggtgatattcgggaacagtcgtgattacgacacgctgaaacggaatatggttaaggtgtccccgattttgttcagccgttctccggacgtggcaatgtcaccacagggcgacaatgagcagtttaaccaggcgtttgcgaaaatggtggcctggcacaatgttaaccgacaggatggtgatgaataccggatatcgagagccgatatcgacaggttgcgtgttgaaagcgaacaacagtttatgggtatgtcgggccagggtaatgattcccggtatgatcgggatgaaccgaagcagacctggaagccaccatcgcctctctag

SEQ ID NO: 152196 - DNA, 309 bp, Enterobacter cloacae
atgagtaagaaggcattttattcagatgaagatatcgaacaggcaaaatctgcgctggcaggattgccggatctgacaccacagcgtaaatcacaaaaggagtttctcgatgcaatccgtgatgatcttttagctctggttaaaacgaaaggttacacggtctctgatatcagggagactttaaaaacaacgggatatgaaatcagtgaaagggcgcttcgtgaaatcgtccgtgatgccgaaaagaacaaatcagcacgtaaaaagcgcaaatcagccataagttctgcatccacagaagcgaagtaa

SEQ ID NO: 152197 - DNA, 567 bp, Enterobacter cloacae
atgcctcactacatcccccgcgcgcctcatggcgtcacctgtatccgactggataacggtgatgaagctctctatgtgaacggagaactgatttccacctgctacgccagtgaacctcacccgcgtattattgcatcaggagttaatctttcggcggtacttaatctgccatttcaacagatcaatgctaaggttcctgatgtccctgaatggacgtgggaaaacgttatcacttcgctgggatggggtgaacgcattgagttgagtaacagagtgatacgttctgtactggaatgtagtcttagtcatattacgcgacgggacagcgatattctgagcgaactatgccacacagagtacgaaagcgaatggatccatgaatccgatctgggttacatcatccgtgttgatgccatcagctatccgcttctggtactgaagcgacatggtatttcaaaagcggcaagaatgctgatttacacagctatgataaaggctgatatcagtatggttcattttacatcatggggagaaatgctggcagacgtgccgacgtttaactggtaa

SEQ ID NO: 152198 - DNA, 243 bp, Enterobacter cloacae; identical to SEQ ID NO: 79174

SEQ ID NO: 152199 - DNA, 264 bp, Enterobacter cloacae
atgactggttacgaactgcgcttatggcgaaaaggaatgaactggagcagtgacagggcggccgaagagctgggggtcagcctgcgtacatggaaagtttatgaaaagtcagaaaaggttacacgggtcgtagagctggcgaccataacgctgtctctcgcagcagcactcccctactttgaacaccggaaaacctctaaagagaggattgtaaacaggatccagacgctgaccgggtcggcaggactcagagggagacaatga

SEQ ID NO: 152200 - DNA, 903 bp, Enterobacter cloacae
atgttaaagcaacagtacaagttaattgagtacaagctcagagccttgcggactttattagtttctgatgagtattatcgccgtaaaaagttcagaaaaatcttcaataaggagttaaacctgtcactaccatcaaccttaaacgagaaaatcaactaccggatggtttacaaccgagattttttcttaaccattgttgctgataaaattgctgtccgtgactatgtggaaatgatggtggggaagaaatacctgatcccgttgcttgccgtttttgacagaataagaccccgcgactttgaggcacttccagattcttttgttatcaagtgtaaccatgatagcggtagttccattatatgtcataacaagaaggcaatagacaaaaagaaattagtcggtcatttcaatcgccggttgcgcatgaatccatattatacaaatcgggaatggcagtataaaaacataaagcctcagatactggttgaaaaaaaattgaacgtttttgaaggcaaagaccaggatgtcacgcctgaaatgttccgcgtacattgttttcacaaaaaacccatgtatatcgaagcagattttacctgcgtgaacggccgggaatatgtcaacatttatgactcagagtgggtgctacaaccgtttacgcttggatacggtaacaccccttacgacattgaacgcccccgttctttagacgacattcttgatgtttcagcggaactggccactgattttgattactgcagagttgatcttatggttgaaaacgaaagggtctacttcagtgagatcacgctgacgcctgaaagcggtcagctgaagttcagtcctgcagagtgggatttacggcttggctgcttgtgggatatgcctgtggcgagagtcggttaa

SEQ ID NO: 152201 - DNA, 255 bp, Enterobacter cloacae
atgagatcgagctgcagtggacgccaacacggatatctgggctgtattagccaaggtggagggccgatcgaacccaacgataaggcgattgccggacatgtcattgcggctgatgcagtacttgtgaagaataatacccaggagtttgcgcgggtgccgggcatgacgctggaaaactggctgaaaaaaatgatggctaaagaattgcttctgatgtttaaattcatgaaatcctttaatatatctctgaaataa

SEQ ID NO: 152202 - DNA, 585 bp, Enterobacter cloacae
gtgagcaggaaactgacaaccaaggcggaaaacaaaaagaaaaaaattgttaatgcaacacttgaggttctcagaaataaagggatagcttgctgtaatcacaggtctgttgccgaagaagcaggtgtgtcactgggattgacaacccattatttcaaagatctggatgaattgcttattgcggccatggatgcttatcttgtaatttttgaaggcgagatagaggactggtttaaaaataatgcccatcctgaagccgtagatatgttgacagaatttatgtttgactctctgcgtgacagaaattttcttcactacgaatatgaaatgtacgttgcggcgatatccagaaaagccttaagaccctacagtctaaaatggctgagaattactgaaaataaattaatgaagtactctcatattgataatgtttctgcgcaaatgatagcttcgttaatggactccgttttcatcagaagcgtaatggatcctgacagtattctgctggaaaaaaatatcattcgtgaaagcgttaatgcgttaatcaaccgcgtaagccatggcaatcagtaccgccccgcttaa

SEQ ID NO: 152203 - DNA, 2283 bp, Enterobacter cloacae
atgagtatcattccccggtcaaataaaacttttggtaatcaaatcatgtccagaaagtccgtatcctgtaagaaagtcgtcgggaaaacgctggctgttgccctgtatggcttagctgttccggtgattgcgacagagggcccgacccttgctgaaacaaaggctgaaaacgttcctgcagtaaatcatgaagagaaaacaaatgaggaagccatgattgtcactgcgcaggagatgctcaaacagcagcccggagtgtcagtcattacctctgaagatctcagtaagcagcctcctgttaatgacctctcggacatcatcagaaaaatgccaggcgttaacctcacgggtaacagcagctctggccagcgtggaaataaccggcagatagacatccgcggtatggggcctgaaaacaccctcattctgattgacggcgtccctgtgacgtcaagaaacgcagtgagatatacatggaatggcgaacgcgatacgcggggggattccaactgggtgccggccgagcaggttgagcgtattgaggttatacgagggccagccgctgcccgctacggttccggtgcatccggtggcgtggtaaatatcatcacaaagcgaccgaccaacgcctggcacggctcgctcagctattttctcaatcagccggaaagtagcctggagggcaatacaaaccgcaccaacttcagcctcagcggtccgcttgccggtgaccggcttacgatgcgtctttacggtaactggaataaaaccaaggctgacagtcctgatttaaatggctacgatcctgcaaccggccttaccccggccgggcatgaaggcgtgagaaataaagatgcaaacgtagttttttcatggaagcctactctgtcacagattattgatttcgaggcggggtacagcagacagggaaacatctacgcgggtgatactcagttcagcacagcaacagacaaatcggccgccctggccagctcgggtgctgaaacaaaccggatttaccggcagaattacggaattactcataacggcatctgggactgggggcagtcaaagctctcttttcagtatgatgaaacccgtaacagcaggctggaggaaggacttgccggccggggcgaaggtacaatcggtgacgatgccgggttcaaagacagcatcctgaaagattaccgcgtcgctggcgaaatcaatgcccctctcgatattctgtttgaacagaccgtgacgctgggtgctgaatggactcgttctcaattgaacgatcccgcatcaacgggtttagaaacagaaagcggtgatgttatccccggtctgacagatggcagacggtctacagaaagcaattctgaactcagcggcatctatcttgaagacaatatccagctgacagatacaacgcagtttattcccgggatgcgcttcgactatcagaaggagtttggagcaaattacagtcccagcctgaatatttcccaggagctcggagaaatgttcaagctcaaggcgggtatagcgcgagcctttaaagcgcccaatctttatcagatgaaccctaactatctcctttattcccggggttatggatgcccgctttcggttggcgggcaaccctgctatctcaaaggtaacgacgagcttgaaccggaaatcagcattaataaagaactggggctggaattcagccataacggatggatggcgggccttacatatttccgtaacgattataaaaataaaatcgtttcaggtactgatgtgctgggcatcacttcaggcggtaacacagttctgcagtgggagaataccggtaaagcggtaattcagggcgtggaaggaagtgtgacggtgccggtcacggcagatcttaagtttacaaccaacgctacctacatgattgagtctaaggataagaccactggtaatcctctttccatcatccctaaatacaccgtgaattcaatgctggactggtcgatttcatcccagctcaccgcaaatctgaactatacgtactatggcccacaaaaaccgcgcacacaggcaacctcagaacttgatttagtgcaggggatcaaccagacgcgcgtgggttcatatggactggttggcctgggcataaagtatgagatgacaaagtatcttgacgttaaggcaggcgttacaaacttattcgacaaggatatcaaacgtactgctgagggcgcttccagctataatgagccgggacgcgcctattacgccggggtgagcgtcaggttctga

SEQ ID NO: 152204 - DNA, 579 bp, Enterobacter cloacae
ttgactgcaaaacgactgcaggtagcagcgctgtcgcggtttgccaggcagggctatgctgccacatcaatgagcgaaattgcggctgacgtaggtataagaaaaccgtccatctatacgcattttcgtaataaagacgaccttttcctaagtctcataccagtcgtgattactcaggaacttgagcatgctaaaagtatgattaagggcggagaggctgttcgcgaacaactttttggttatctgaacgatatacagttacgctatgaaaaatcccataccgttgaattctggctgagaaaccttttcatgcctccggctcatttgtatgctgacgtcatggcgcccctgcatacttttatgagcgagcttgaaagcattatctataaggcaatagaggattctacgctaatcccgaatgactgccagcttgatgccggcacgattgctgtttcttatatgagcatggtcgacagcctgcaaagcgagcttctttatggtggtgcagaaaaatataaacgacgtcttgaagcgctgtggctatttttccttgcggccacgaaaagttctgtaggttga

SEQ ID NO: 152205 - DNA, 1227 bp, Enterobacter cloacae
gtgagtaagcatattgattccccgtctgtcgttatcaggctgcccttgatccttctgctggccttgcttacggctctggacgcaatggccatcgacatgtacctgccgggcatgcctgatattgccgctgatttaaatgtcggcgcaggcaggatccagcagacgctggcggtattcctggcggggctggcaattggtcagggatgttatggtcctttcctcgaccggtttggccgtcgcgggccgcttctgacgggaattgttatatttatcgcgggctcagtgctgggcgcggtagctccttcagtggaatggcttttactcgcaaggtttattcaggccattggggcgtcggcgggcctggtgacaccccgcgcgattgtcactgacatgtgcacccttgatgaatcatcacggatcctgtccctgctgatgcaggtcatgatgataggtcctgtgctggcgccaattgcaggaagttttcttcttggacacggcggatggcggtttattttctgggttctggcggggctgggcgccgcagggctggtatgggctgcccgtattctgcctgattcgctaccagtgacgcagcgctcacccattaaaccagcgtccgtggcgcgggcatattgcttccagctgcgtaatacagcttttatgtcctacaccctctcaggcggctttgtgctgagtgcactgttcgtttatatcagcagctcggcttttatttttacgcagttctacgggcttacagcggcgcagttcagctacatttttgcgggtaattccatggggctgatcgcggggggattcatcagtaatatgctgctgagcaggggtgctggcacccgtgccgtactgctggctggtcttctgatccatacatcagccgcactggttctgtttttatgtgtaaaaacaggcgcaccggatgttcacgtttatgccggattgctggcgctgtccgtagccgcactgggccttatttttggtaacctgacggctctgacaatgaatcatgccggccctcaggtggggaccgcttcagccctgatgggcatgctgcaatatctgatctctgccgcagtgggatatgttgtaacgctgttcagtcaggagccaggcctcatgcccttgtccatcacggtatgcggcgcgctggctcttattttccagaggctcgctgatcgtgccgtgcgaaaaacacgcacgcggcatgattag

SEQ ID NO: 152206 - DNA, 651 bp, Enterobacter cloacae
atggaatctaacaaaaggaaagtagctgtattaggaacgggcgattcagggagcacgcttggccaggctctgcataaggccggttataccgttatttatggctcaagaaatccggccggaaaccacgccagtgcaatcccggtcaccgattacacgaatgccgcgaaacatgccgatattattatcagcacgattccaggccagcacacactggatgtgctgggaaaaatagaaccggaggcacttgcaggaaagatactgatagatgtgggcactgcctttaacgatgattttacgattctgcttcatcagattatttcaggtggggagcttttacaggagaaatttccctctacaaaggtcataaaaacattctgcaccatgacggcaagtattatggttaagccagattcactgggtgaagaaaccactattttcctttccggaaatgatcatgctgccaagggagaagtatcttctctcctttccgatctcggctggagcaaatcgtctcaggttgatctgggcggtatagaaacggcacggggacaggagcattttgctgtgctttatttcgcacttgccaataaatatggccacggtgagtttaacatcaaggttcacgttaaaaattcacatggggataattaa

SEQ ID NO: 152207 - DNA, 1059 bp, Enterobacter cloacae
atgtttactaaaaaaaatactaagcgtgccttgctctcccttgtaatctcccagttgctcttctcagcacccgggatggctaatacgctgaaggaatcagatttcaaaactcagcctttaggacatggtgtttatgaactggcattcgtaaaaaaagataatgcgctttatgccgcctcaacaccctcctttgacaagagtgaaaaggagggcgttgtgtttcaactggcagctgattcgttgcaaattgataaaagaatacccataacccgtggcacgttcgcagtagcactggatgaagataaccacctcctttatcttggtaacgcgatggatggttcggtaaccgtgatggatatccgctccggaaaagaactccgcacgctacagttaagtgatgatgccgttccggagaaaaaagcgcatgtgcgtgaagttgttctcgataaaaaacaccatcggctgtatgtgtcaggtattggtgaaaaggacacagggctgctgtgggtagtggatacgcagaagcagcagctcattaaaacgcttgataaaatggagcctgttggtttcgcggttgatgaagcaggagataaagtttatgcagtgaccggtaaaggggaaattatgacgctggatggcaaatcatccgaactcctctcaaaagtaaaagtcgatcctgcagatactaatcattactttctgaatattgccctaaatgcatctaaggggcttggttatatcgtggatacgcacacacgtgacgtgttggtagtccagctggattccggtaaactccttcaccgcatattcacaccgaactctatagcggtggtctataacgctatccgcaatgaaatctatgttacccaccgcaacgcccgtcaagtcagcatcatcgacgctggcgattatcacataaagcacactattgatacgtcagccatgcccaacagcatggtgctctcacccgatgccactaccctctacgtcagcgtgaagcaggacgggaagagtgaccagaatgattacgtccttaaggttgatttaacacaactttaa

SEQ ID NO: 152208 - DNA, 654 bp, Enterobacter cloacae
atggaactgttcttcccttccgcttttctcgccctggcgctggcgcattttgttgccctgttaagcccaggcccggatttcttcctgctgatgggctacgccgcccgctatcgactgcgcggcagcgccggattgtgcatcgggatagcggcaggaaacgggctttacattttgctggtcattatgggatggagcgcgctgcgtcagttcgcgtggctgttcacgttgattgaattatccggcgcactgtatttgctctggatcggctcgcatcttgtacgcagccgaccgcagacgctggcgctaaatgaaacacatgagcgctgcccctcgctgcgtaagcagatcctgctggggctgggttcggcgctgttgaatcccaaaaacgcattgttctacctggcgctgatgacggcgttactcgggccggacatcacgctgcttcagcaggcgacctgcggcgtctggatggtgatggtagtactggtatgggattttgcgctggtgtcgctgatggggttaccggcggttcagcgaaagctcagccgttcgctctggctgatagagcgcacggcgggggtggtattgatggggtttggtgggtgggtgctgtggcggtttttgcacttttcccccgtatccctctatccttaa

SEQ ID NO: 152209 - DNA, 450 bp, Enterobacter cloacae
atggctttaagagtcttttcccctattataagtagctctctccagcagagggggtgggatgtccttggactgggttcccgggatggtattgctttgataagaaaaatcaacgacgggcttgaagggagtgttgtaaaacgtatttctgaatgggcgaaaatcacgccgacggaactacaaaaaatgtcgggtattccaatcactacgtttaaacgttctaccaaaaaacgatttactgctaatcagagtgagcgattggtgcgtgttatacggataatcgaacgggcggtcgcattgttcgagggtgacaaggaggctgcaaaaaaatggctacatgagccaaatcgtgctctgaattggaatattccagctgaaattgtagcttctgaaactggggcccatgaagttattcgccttattgttagaattgaggatggtgtttatttatga

SEQ ID NO: 152210 - DNA, 1428 bp, Enterobacter cloacae
atgcgaagagaaaaagcagaatatcaccaggcaattttaccagagcacagaggaaaccctctgattgaagcactgaaacctaaattaggtataaatgagcttcttgagcagttttcaaattatccagttttggatgaacatatccgacagcaccccgatcctttagttagagaagaatacacaatacgcctgaaacaattgcgtcagccttttcttatttattatgaatgttttagagcgatagaaactgcaattaaagacggttattcgacaaaaaatccctttagcccaactactgctcagtatcttcactatccagttgatgccagacctgcgattgaaccgagaacaggttattttgagcctaaagcagaaaacatcacattgataggtgctagtggagtaggtaaaaccagtatgctcgagcagatactgaattatctaccaaatgtgatagaacatgatttctatcatgggcatagaatggagttcacagaacaggttgtctggattaaggtggaatgtcctaataattccagtgttcgtgatctctgtgaggagatcttggtagcattagatttagctatgggtagagaaaaatcaatatctgcaaatacaatcggtagtctgatgagacaaatagaacagcgaattaaatcaagttttttggggatcttagttattgatgaaatgcaaaggttggtgttcaagcgcacgggaggtgaaaataaccttcttaacttccttcacagcctagtaaataaattaggaatccccctctttttctgcggcaatccaccattcgatgacacgctatcaaaaactcttaaggcagcccgccgtgctgaaagttctggatacttccgaatggaatccttaaaaaaagagagcgatgagtgggcagcatttattgaggaactttgggaaatgcaatggacttgtatatataacgagctaacggatgagttgaataacaaaatgtatgagttatctctcggtaatttggatattgctcaccgtatttatcgggaggcgcagagacttgttatcttggctgattcagatgatgaaagaattaatactagtgtactggaacaggcatatgtaagagcttgtggtttgtctgctggtaccgatgaaatcaaagagttacgatcaaaaatgtctttaccaaaagggcatcgagggcaaaaaatacgtagaccacagtgtatacccgataatcctcgggaatttattgcagatattactcgggctcagcatcccgagttcgagctgagtttacgtgagctggttggcgcggttaacctttcggaaaggatcggtgatccagatattttccaacgggccgctaagcaaaagtatcctgttgatctgcttagacaggtagggattattgatgatgatcctttgggccgactgtcttga

SEQ ID NO: 152211 - DNA, 2112 bp, Enterobacter cloacae
atggctattgatataaatagtgtatgggatttgaatgatgtagaaggtctgaaagatggaccttaccgtatcatcgatattattcctcatttggactgtattatcttgttccccttaacgaacaatcaccgcttgcgaagacccactgcaatattactatcatcttttgaaaattacatggcttcaggcagtgttatgctgattgattttcaaattccaagctttcttttgcttgcagaggagaatcttccatcttcttttaaagaaaagagagatgctaattttagtttgattagtgatttggtttcagaacgtgattttttgtttacttacgctacttcaaaaaggatgaccagtttagttcaatatgctcaagagaaaggtactgatcggaagaagttatctcgactactgaatgctttttggcaatatggtcagacgaaaaatgcattattacctgcctactcaaatagtggaggggctgggaagactcggaaggcaaagaaaggaacacttggtgctccaaaaatatcaagaacactcagtattcaacgtgcagataaatatatgcttaccgtgatagataaacagaatattcgtaaatcactgatggcgaattatttaagggtcaatggtaaatctcttgccgaatcctataaggagtatcttcgtaaataccatgaagatgaattgaaaatggcaagtatcagtaatagagcacctagtgtaccttcactccgtcagttttcatactggaaagaacgcttattttcagatgatatagtcattcgcaagcgttcaactgagcgtgactacttactaaataaacgtagtgtgcttggttatgccgcgcaggatgatttagttcctggtagctgttttgaaattgatgcaacagtagctgatgtacatatcgtatccagttttggcgagcaatatattctcggacggccaactatttactctattgtcgatcgggcgacgcttatggtagttggactgcatgtctccttatattatgcctcttggcgtgctgcgcgccaggcattggttaattgtttctcacctaaatctgaatactgtgctcagtatgggatttctattgatgagtctgagtggccttgtgcgcatgttcctaggcgcttcatctgtgataatggtgaaatgattggcctaaaaccacaggaaaaagttgtaccttttactgaactgagttttgctccttcttatagacctgattataaaagtttcgttgaacgtcgtttcaaaattttaaatgatagtttgattcaccaactgcagggatcgacgaaaggtgggagagttgtacgcggggatagagatccgcgtaaggactcaaaacatacattgtatgaagtgacttcaatgctgattgatgccgcgctagagcataacagaaccattcagaaatcccttgccttcacccgacctcttttgattgaaaaaagtttaagtcctactccgctcaatacgtggaagatatatatttctcagcacaggcattcacttagtcgagttgctcctgatgaagtgattgctcgattgttaccaccagaacaggtcagcatgacccgaagtggtatcaaatacaaagaaatgttttattcttgcgcacagattgaagatgaaagccttgctgctattgcgagggtacatgggcgctggaagatggatgcccgggttgatgataatacggtgaatcatatttatgtgagattagatgagaagcaaccgtttacgaaatgtcatctatcatcccggaatgtaatgcttaaagacatacccgtgagtgaagctgagtttatccaggactggctggggtcacatttagagaaaatgcctgttacagtagaatcgatagacatgaagaaacggcatgttcaatttgaaaagcaggctaaaaagaggacaaatactcactctgtgccatacagggaaaaaataaagaacattcgggaaaatcgccttgaggagctcaggagaacaacacattctttccctgagcatggtgaagacaatactgctgagattaagctggaagcaaaggtggtagctatgctgccaaggcgaaatcgtaagccaggaaaatag

SEQ ID NO: 152212 - DNA, 483 bp, Enterobacter cloacae
atgacgacggatttcctgctgacgtgccagaaagacggccgtaagttctatcatgctgtttctgtaaaaccagagaatggcattgaccagagaactgctgagaaactggatattgagcgtgtatggtgggaattgctgggtgtcaagtattcgtgctttatgggaaatgagctaacaaagatccagagcgacaatattaggtgggcaacagcaccgttcagatctggtatgactgtatacgattcttctatagttcagcgggttttaacagcggttgaaccgggcaaatatttattatctgatttatgtaaagatcttaccctcatgtgtgatagagagcgtgaggatggtctaaatttgctgcgctatcttatcgcagataaatttataaatgttaatttagattattcgattgaggcttgtggaggagttgaaattcagtctgttagcagtgataaaaggctggtttctaatggctattga

SEQ ID NO: 152213 - DNA, 528 bp, Enterobacter cloacae
atggcgattaaactaaaaaatttacgttctgcagctagtcgttccggaagagtctttgttgctaaatcgcttaatgaagctgtggccaaaaaacagcaaactgcttttttatgccatagccatcaagaccatgaattagctaagggccttcaagttttattgaaggagaatggatgggacttatacattgactgggaagacagcgaaatgccaagtattcccaacaaagaaactgcaaacataattaagttaaaaataaagactactgattggttcttgtttttagcaacaaaaaattcaactcaatcacgttggtgtccttgggaaattggttttgcagacatagccaaaggctacgaaaagatattgattattccgacagaaaatgactcaggtgtttggtatggcaacgaataccttcagctatataaaaggatggatgaaggagttaacaatcaaacgggtaagtctggatatgcggtgtatgacgctggaataaattccggcacttgggtggaaaatatttaa

SEQ ID NO: 152214 - DNA, 486 bp, Enterobacter cloacae
atggctaaagttcctgttttttacagctttcattttgataacgatgtaatgagagttcaacaaatacgtaacatcggtagccttgacggtaaccctccaacctccccaaatgaatgggaaaagctcaaacgtactggtaataaagcagttgagaactggatagatcaaaatatgaaatacaaacgatgtattattgttttgattggtagcgaaactgcttcaagaccatgggttgaacatgaaattatcaaggcatggaatgacggaaaagctcttttaggcatccacattcataacctaaaatgccctagaaatggcattagtagaaaagggaaaaacccctttgacctgattaagttcactgatggtagagcactgtcaagtgttgttccttgttacgaccctagctctatcaatacttatcaggacatagcaagcaatatttcaaactggattgattacgccattcgacataaggcaaattga

SEQ ID NO: 152215 - DNA, 1617 bp, Enterobacter cloacae
atggcaaccacaaggcgtctatccggagtcagagttcatctttccgggtcgaataaagaactgcgagcagacatagatgattttgtgcagaaaattgccgctaaagttttcagtgaaggaggctcaattgttcatggaagccatccttcgttcattgcgccactccgtaaagctgctgaagatttcatccaaaccggtggtagaagggaagcgcttacacttgtgcgggcgaagagttactcaactgacgagtacgctgctgaaattgaagagcagagaacatttgcttctgtagaaattgtgcctgcagataacagcgatggccaggctgtagacggcttgaccccaatgcgtgattggatggctgatcgttccgatgtagtcatctgcatcggtggtgcatggtgggacataaataaagtaaaagcaggcgtccccaatgagctagatgcaatgcttgatcttggaaagccaggcttcgttgttgcgggctttggcggcgctatcgcaggatatctcgaagaagatccttcattgctatctcgtttgcgaaacggactatgtcacgaaacgaatgcgactattgccaacagtacatcggttgatctggttgtgaagctgattgctgatcagttgaagaacctgccacttactcggcgtactttctcgcgtggccgtaatttccgtattttggcgctcgacggaggggggctcagaggcaccttcactgctgcagttttggccaagtgggacgatatgttgaaggccggtggcgggagtaatttaatttctcatttcgatttggtagctggtacatccacaggtgctattttggctattggactggcgatgggtttgcagccacgtgaaatccttgagttctacgagaaaaagggtccccagatttttccgaaggatcggaaacttcggcactggcttaaatccaagcatgactcagcaactctccgtggacttttggccgaggtgtacgggaacaaaacgctggctgaagattctcgctgccgcttggtgatccctacggtgagggccaaggaaggtcaagctgaagcgattgttaccccacatagccccgaccggactgcattcagagatatttcagccgttgaggccgccctagcttcttccgctgcacctacctattttgatgaagttaccttcgatgggcctgttgcgttggagacgttcctggacggtggcgtctgggcaaataaccccatcctcccggcgttggcggaagcggttcgatacctgaagattcccctagaaaggattgatgtgctgagcatcggcacactcagtagcgaaagtgatttcactgaccaactcggaaagggcaaagtaggctgggcacctcacagtgtagatctcttttttgcagcccaagagcatggtgctctggtactcgctcaaagtttcttgggtccaacacgtcatatgcgtgttaaccaacagaccagtgatgaaattaagatggatgatgctgaagctatccaagacatggtccgacgcggcaatgaggctggcaaagaacactttgctgaggtgcgctccagattctttgacggacaacacgttgaggtgtgggagcgattttaa

SEQ ID NO: 152216 - DNA, 828 bp, Enterobacter cloacae
atgtttatcgatctaactgttagtaatatctacccaacatttcgttttagttctgacgaaatagtggcgtacaaggccagaaaaggggaactgttgatcagcctcgaaaaataccttcttgatggacgtaatatacttgatgctgacaaaatacagaaatcgatctttccgcagcacgatattgatgtttttatctctcattctcatgctgatgaagacgaagccattaggatagccctcagcctggagaatattgggctcacggctttcgttgactcatgtgtttgggggtatgctgacgaacttttgcggaaaatcgatgataaattctgtataccacagggatggagccattacagttacaatctacgtaacagaacaacgaccaacgtgcatttgatccttaatgcggctttacagcaaatgataaagcgatcagagttgttcatgtttttgggcactgaaaacgcaataaatatcgatgactacatgtctggagaggggcgtctgtcatctccatggattttttcagagcttacatttgctaaaagtgtcaagcgttcggaacgtagaattttccaacagggtaatgagagtttcgagaaaatgaagagcgaaagtagagctcttgagccgggcttcagttatcccctgccgaagctgaaacatgaaatgagcctacaggagtttaatggttggctagataaaggaatatcagtcgaggctggttttgccgggcgaataagcgggttgacgcacttggatacgttgtatagcaagctggggttcagtgaagttcaactgagtgagccaagatttaagatttag

SEQ ID NO: 152217 - DNA, 1143 bp, Enterobacter cloacae
atgtcattcatatatagtttggctgttttgggcttaccgaccgctactcaactctctgagcttgaaaacgctgtcactgatgctgtttccatgtttggattgagggtgggtcaggagatcggctgggaagttagtcctgatacttttatccctaatcaacagcgatctgctgctgttgtatttttcggcggattaggtgctgatcatcccagcttacctagcttgctgcgtagcggtgtgcctgttgttcccgtcgtgtctgatttatgcgaagtggcgaccaatgtaccggagatcctgcgtccattgaattgtttgtcctacgccaatggtggggcaaaaagggtagccactgcacttttggagtgtgcaggcctgcttccgaagcaacgtcgggtttttgtaagttatcggcgagacgaggctcgtcaggcggcactgcagatgttcgatgccctctctgctaggcattttgacgttttcctggatacacatagtattgccccggcagaagattttcagaccatgttatggcatcggctttgtgattctgacgtgttgttgatgctcgacactcccgactactttaacagtcgatggactgcagcggagttcggaagggccttggctaagggtatcagtgttcttcgagtaggatggccgggagttctgtgctcggcgcggttagcgactgcaagcctttctgagcttggtgagagtgagttagatgtcgtatcgggacgtattagtgaccacgcgattgaccggatctgtctgcagcttgaagaagtccgcagcaagagccatgcggtgcgtaccgttaacctaatgagcaatctccgaataggccttgagactatcggtggagaagtgattggcatgggcaccggccgagggattcgagtgcgtctgcccgatgaccgcatggttgtggtttatccaacggtgggcgttccgacctccacgactatgcacgaagcatcaatgaattctcctgatgaatccgtagccatactctatgatcatgtaggcctgcatcctcagtggcttagtcacttggattggctgggtcaatacatccaagtcacgcgatgggttaaggcttgcgaggcgagttggcaatttgcagattggagggtatag

SEQ ID NO: 152218 - DNA, 570 bp, Enterobacter cloacae
atggcggcgattttcctctcagcaagtatccccgtgattggacgagggcaatattacgagaccgctgacccatttcttatccagtgcgctgtccgtgaactgactattgcgaccgttcgcaggcacaaaatcgtatggggcggtcatccagcaattacccctatgatttggagcatctgtgaagatcttggggttgattacactaactctgtcatcctgtatcaaagccgcttcttcgaaggtcgctacccggaagagaatcaacgatttgacaacgtggtttataccgaccccgtgcccggcgacattcaaggtagcttgcaactaatgcgcgagcagatgctctccagaaaagatcttatcggtgcagttttcattggggggatggatggtgttgaggtcgaatacaacatttttaggcggttccatcctggggcattcatccttccagttgccgcgccaggcggtgcggcgcttaatcttgcacgggataatggttatttcagcgggagagagcttgaagatatagatttcgccacgctctttagccgttatttagttgatcaatag

SEQ ID NO: 152219 - DNA, 573 bp, Enterobacter cloacae
atggctataattcgtaaatctgagatacttcgtcgctacaatgccacacagacaacattattagaggaggccagtgaaaggcgctgggcagcaaatagcctgcaaaaagcatttgaatctttctccgtttctgagcattacgatatttttctttctcatgcttattctgatgcgcgaatagttatgcaaattagaagcatgctaatcgaaaaaggttattccgtatatgttgactggatagaagatgagcatttagatagaggaaaagtaagcgaatttactgcaaccgtactgcgtaatagaatgaataattgctcatctctaatctatttaacttctaattcagcagaaaaatcggtttggatgccatgggagttaggatatatggatgcgcgaactggaagagtatcagttgcgcctattatggaaaatgatgatgaagagtttgatgggagagaatacctaggcctgtacccttatttagatctaactctagaaagcttttatatacatagcggcgccgggtcatgggttacgtttggagattggatgcaagggaaaaaaccgaagtaa

SEQ ID NO: 152220 - DNA, 4953 bp, Enterobacter cloacae
atgtgggatggtggcttgcaagagcaagaagtggtagcaatcgagaaaataaaggctgctttttcagataacgtatctaagcctgacaaacctgtacgtggaggctcaattggcgagcagctacaaagctatggctatactggcaacggaatgtttccctggaaaggttatgcaggttttcgttttgttgaggcaaaaaaagaaggtgaattcgatttagtcattgttacgcattgtaatgtgatcattgttgaattgaaggactggaatcatcagcctgtaacagcacgcggagagacctggtataagggcggcaaaaacatggggcgctcgccagtaagcgtaacccgtggaaaaaagttcacgctggacaacaaactcaagcgtctggcagagcgttttacgaacaaaggctatgttccaattgtacatttctttgttgtgatgactggcaatgcggacttcagtgagttaccggaagaacaacttcaccatacaatctcgttaacagattttcttaaatttgctgatcgcaacacattcaacaactacttcagaccccatccaggttcccaagttctgaacaaagattttcccctttttgataaccttttcttaggacctcagacagcgcccaaagctctgagggttaatggcttcgaagctaaagatatgattttcgagcatcctaaaaaggtgtatcgggaatacctagcaaaatcagagatatcggcaaatagcgaagcattactcagagtatggaatttccggaatatcccaggggcgaaagcgtacacgccggaaggaagaactgagatcgtttcacgtgagcgtgaagtgttacagcacatcaatcaccagaatcgggacctttataaccactgcctgaggtcactaaccagttttcagaaagatgaggtgacagctgagtacagcgaagtctatgagcttccgccaggtcatgttcggtttaacgaattcatcgggaagtatggtaagtcgttttctgaccaagaccgtttaaatgtagtcaaactactcattgcaaagtttagcgatctccatgagatgaaaattgctcacagagatatcgccgatcacagcctgtggatttcaccttcaaaagaagtcgccctgtcaaactttatttcggcataccatcgaccagttggaacggtcggagattatcgtaagcttttatcagtgggtgctgtcgaggtaaaagacatgcttgatgggggcgaacttacgccttttcagcaggatgttcatgccctgggtcttgtagcctggcacttattaagtggtatgcgaatgtcgccaaagagtctggagactgtacaggagagtatgttaaacagtcagcactggtattcagatgtattactggatgctgttgctgcaaaatttacttccgcgacggatttctttgatgcccttaaacaagctgaacctgctggcgaggcgctcccaacatttgatgatactgagcttgacccttacaggcatcctattaaccactctcgtcagtatcgggaagatgatgattttctggtagaaacatctgataaagaagtctatatctcgggtggaaggctcgtgaaggcgtggctaaatgttggtgggcaaggagacgattcatcaataaacttccaggttttgaagtttttaaaacagatcgaacagctttctttagttaaaccaacgtatctgcctgaaatccgtgaatttggtatcgcatctaaatcatcgagtctttacatggtcactgaccagatacaaggagatacctgggacaaaatggtggtcccggatgatgaaaaaatcgatctcattgataagtttgtcgcttcagttgagcatttacacggtcttggtgtttctcacggagacatccacccaggcaatgtgatgcttaggacggaggggcgctcgcttttcctcatcgatatccccgacttttcaccgtcgggtgacgaacctaaaaaccacagctacagccctgaatatattgataattgcacttcctttgaacgcgataactatgcagtgatgaagatgtcctgcgagttgttaggtttgtcctggggggatgaatcagacctttacccaacgattgcgaatgccatccgggctgaactggaagatcctatttttgggtttaaagatttaggccggtttaaaaaagcggtagacagttatgaccaagcgtcaacacaagatctgatagagattacagcaggaaacgccgatgaaataatctctgttctgcctgataacgggcatctgtatgtcaaagttgagccaaatcgtaaagagccagctgaagtaaaagtcactttcaccggaattggtggcagtttttctgcaatgttcagcaaagaacagaagacgctgctttatggctttaatccaagggctcgttcatcaattcgtaagcaagatattgatgaaagccagttcgaaattggtacgggtatcaggattactccaggcagcccgcaggatatgtcggcgttgacagtattgcttaataaagaagaatcttttgcccgggcaatcgagttgattaccgcatctgaagacattcagtcgcaggacccgcttactcttcagttaaaagatgcctttgccagactggataagcgggtgcttgagcctgctttaaaagaagtgctggaaatcccaacggtgaaactgtggcgtgcaatcctggatactgaaacagaatcctatccgaacattgaagtcagtggggaggtaatacctgttgcagatgctcacggggagctactcattccttactctgcagacgttgatcctcttggcgcatttagaagtagtgatgacgttgaagccttgcaggtcgatcaggaaggggttgagcgatttataggtgaggtgtcacttaagaagtcagagctcaaggagattcgattggttagggtacgttcagcagcctataggttgaaagattctgatattgtcttcttccgcacaaagcaggatcgggcgtcttatcagaagcgtaaacgagcgctggaacgcctcatcgatcgggagagtgtgctacctgacttaattgacctgttcgacccatcctgcaaacaggatgctcaaaattatggtgtcactgtcagcgatgccgattttgccagatacgaccgtgaagaccaacacggaaacaagatcagtctgaatgaacagcaaagaaaggcgtttaacatattggttaataatggacctctctccctgttgcagggaccaccagggacaggtaaaactgagtttatcgcggcctttgtccactacctgattgagaaacagaacaccaaacgcattttattagttagtcagtcacacgaggctgtgaatacagcagccgagcgcatcagaaagcactgttctcgacttggtacagagctggatatcgtcaggttcagtaaccgtgaaggggctgtttctcctgggctgaaagatgtctattcgaacgcaatcacaacagagaaacgcgaactgttcaatgctgaaattaagtaccgcgttgaagcgctgagtgaagccattggtctggagccagggtttatttcgggtgtcgtgcttgcggagctcaggctgttcaagcaaatagatcatcttgagaaattgctctatcaggttaacgatttaaccgatccaaaagagatcaacgaactgaaagatattgcagtcgaactcaacttttccatccgctccagactgagtcaggagtatgggattaacctggacaaagacgcaaaggtctctgcagcaaaagacattctgatctcaaggctatgtacggagtatggtgtcagacctgatgaggctcgacgagtaaaggcattagctaaaatatcccgggatatgcaggatgctatgtcgggagagcgagtgaaccttgatgagttttattcacgttccaggcagctagtggctggcacatgcgtcggtattggacaggggcatattggtatccaagagaatatctacgattgggtgattattgatgaagctgcgcgctcgattgcgagtgaactggccattgcgatgcagtcggcgagacgcgtcctgttagttggagaccatctgcagcttccaccattgtactcagatgctcacaaggcggcattagcgaggaaattgggtatcaataattctcgcactgaaattgatgaggtattacgaagtgactttgctcgcgccttcaactctacttatggtgcacaagctagtgcagctctgctgacccaatatcgtatggctcctccaattggtgaacttgtatcaaagaccttctacgaagggaagcttcgaaatggagagcgagcaattcctgatgtctatcagcatgcaccagaagctttacgtaacgtagtgacttggctggatactgcctccttgggtcatcgggcccaccaccttggagaccgtggaacaagtatttacaaccgaagtgaagctgacgagattatttctgtacttaaacaggtgtcagagaatgaagaattcgtcgctcagctttcaaagctcgttaataaagatgaagcagcaatcggagtaatttgtatgtatgccgaacaaaagcggttgctacgtcagaaattcaatcaggaaatctggagcgatggcttcaaggatattgttaaaattgatacggttgacagctatcagggcaaggaaaatcgaattatcattttatctctgacgcgttcggataagcaacatagcccaggtttcttacgcgcaccaaaccgtgtcaatgtagcaatgtcacgagcaatggatcgcttattgatagttggtaatgccgatatatggaagggaaataataaagagctgccattaggctccgttgttcgctatatgactgaacgaggtcaggacgctggatatgtgttcctctccgctcaacagggagggaaaaagaaatga

SEQ ID NO: 152221 - DNA, 1428 bp, Enterobacter cloacae
atgatgtctgataacaaagtaacctatcacgaagttgacttcttactgcctgcacagaaatttaacattcagttctcatatatttcccagaaaggactaccatttatccgggaatttgttctgaggcttgttcatgtagcctcaatgagcaaagcacaaatatcaacttatttcggcttgagccactgtgagacggaggaggcaatctcagatcttgtacagcgcggcgaacttacgctctccgcggaaggtagactgaccttaactgacaaatcaaatggatatttttctgaggttggagagatgccacacctttcaactgtccaagatagtggtggtacattatcatttgatttagccacttttagttgcttcagcaaccaaaatatccaagaccactggaggggggggatattattaaaggttgatgacaacaatgtttctcaaagtgagaaattggttgagaaacacttccagtatcagtttaatcagattctagataaaggctatctttctcacttacaagttcagggcggaaaagaacagccttctatttatacagttaattctgttaataaactccggcaaatgccgttacgtttaacaactgagtttaaaatggataacgatggtaaagctgtcgagcgtgaagactatgagcacttaaatagctctgaatgtgttcatgagttaatggctattgaaatatcaaggttattacgacctaacaatacaatgagtattgttaaatccatggtatcactcaacgatgaaaatacacttaagctatttgactcaaaaactaatcagcttaatccggcctttattaaggatatgcaggccttggaagaatactctgcctcaggtagaacaactttcttaggcccaatatacgctaaaaataattgggaaaggctgctgagagctttggctccagtgctcagtcagcgaatcaaagataaagctgatcatggcggtagtcatttcatatggatagcaccatcagatccatactggtcaaagagcgaacgctttatctctagcctgagtgattttatccacaagtcgagcacgaaagataagcggttatataaacctgtgctatatgtacccgtctcagatgatgttgattccagggcagctaggcaatggaagcatgaactaggtccgttccacgagcacactaaagggcttgttgaaggattgttagatggtaatgtagagatccttcatctcgaggatgaattatctgttgttatctatcatatttctcaaccagaaactttgccagtgacgatgccattgggatttataacaactaacaaagagtcagttaaaattattggatcgctaattactgaatatgtgcatagtagttctggttttgataaaccgcatgactgtggattgatctcttcaatggtttag

SEQ ID NO: 152222 - DNA, 1110 bp, Enterobacter cloacae
gtgaatattccattagatgaatcattgcaaagcttccttcttagacaacagttggtttttgcagatgtctttgaccctaaaggggtagtatcaggtgatggtcaatggtttagtaaaccctatgcacatcatgaagtttcatatgtcttccatagatttgatgatctttttttacttgaaacctcagatatcgggaaaaaaataggtaggatgggacatggtctatttgatacaccatcagcttattgtcataatctcccatccatatttctctctggagagcgatctataacatataaatcagataaaaaaataagaataaaattctgtcaaaaatgtattacgcaagcaattattgattttgggtttggttattttaagcatgactggattcaggcccgacggtgtcatgaacacaatacaccactttatcgtcttcagctgacttcgtataataatgctcttattaatattaagcaggttatgaatggagaacttcctaggaatgcagttgagatcgtcgattcatatcaaagaaataatcctacattcgcagagcactctatatcaagacctgagtttatatttccaattagagcaatgaagtgtgtcggtgaggttattggggttatcattttaaataatataagaaaattaccaagttttgatggcttattcgatatcaaggcatggttgctgttaggcgaagatttgcttctctggggaaaagataatttacggtttatgaaggctactctggctgttgaaaatgccatagtgttgctgagtaaatgtgatgattttaattatgagcttcaacaggctgtggagtatgttaaagtaattatctctcctagaaaacaattttctgaaattataatggttcctaaatttagatattgtgcgtcttgcttggaatgtcgaacttgtgctgccgttggggaggatacagaaaatattagagacaaagtcgatcttcattttctatttcaacactccacatcattcaagcgatatgtttttgataataatataattttactaaccggcaaccatgtctggtcaccatttagggtgaaaagagatatattaaatgaaaagtcagcatag

SEQ ID NO: 152223 - DNA, 489 bp, Enterobacter cloacae
gtgctttcactgatcgatgagctcggtgaaacagaagcaatttcacgtatcaagaagatgatcgcggaacttgagcaggccgatgcgaatggcatcacggtgaaaaaaacccaacatggtcaggtacgagtcagaccttcagacttcaagccagcacggattccgccggttattgccacaaaagccgtagaaggcgtcaaactcatcaccaccagcttattacagaaactgggggatattgaattgccggagatgacagattcaagtgctgacgaagaaatcaacattacgttgaaccgcagtactctggagatgctgagaaatctttcaaaagagatcacagaatcagagaacaagcagcttcgccgtgcggagaatcgtcaggcaaaacttaatggtgagaagccaaaatacccacgtaaaaaaaatgctaagaaggcaggggaagagaccgatcaggatactgacccacagccggacgcagaataa

SEQ ID NO: 152224 - DNA, 381 bp, Enterobacter cloacae
atgaaaataactaatcagctgaagaggaagttattggtcctggatggtatagataatgactttatagattatggcgcaaaaatagcatgccctgaatgcgagggtgtaatagtctattccatcgtaaactcatatgagtttgactcgctctctgaagaggtaaaatactttttggttaagaaaatgagaggagtgaagcttgttagcgatcataatgaatttagctatgatgaaagccaattacacatttcgaaaaaagcatgttcaaattgtttaaaagaattttctactgtattaacgtataaagaagtgcagccagcccgataccgggtatatcttgtggggctttttgaagatgatttgaaacagatcaaactttaa

SEQ ID NO: 152225 - DNA, 675 bp, Enterobacter cloacae
gtgaatgccaccaaatctgcatggcttgaagcacgtcgtcagcagaaagcggcagcggataatattgcgacaatccgccagcgccgcgctgaaatggaagccacgacgaacgtccttaatgaggagtggcgcacactatttcgtgaaagtcagggcgtagtctcaaaggaaatgaaaaaactgcgcacggaaattgcgctgggacgagaaacgcttgaggattttgatgaactgctggcagcccaggaaagcgaaaatgcatttttaccgcagaaggctgcgcaactggccggacagtatatccacgctcacgaaaaccttctgagtattcgcgcaaaacaaatctgggaagattttatgcaggcgcatggtaaggcgctaatccagacgctgagcctgctcaaatccacaatggggcgggaagccagtgctgttaccggggtggtgcattccgtaaacgatccggacacactgctgcaagactttatccgcaaacaaatcaccgaaccggcactctctaacgacgcgatgccggaacaggatccggtgtttaaactggcgggcgttgcaccggattatgcggcccgtctggatttcagtaatcaaccctctccggcagctattcataaaatgaaggttcgtcaggaacgggctgagaaggagaaatcagtatga

SEQ ID NO: 152226 - DNA, 552 bp, Enterobacter cloacae
atgaaggcccgggccactcctgcgcaggcgcttaccagttttcgaaacgcccgtattctgtgggctggacatagtgagagccgaaaagccgctgaacaacagatagaatctctcctcactgccacggaaaaaccagcagattatgcccgacagctcgggttactgcgggatcggctggatgtgctgaaatggcagattaactgcgctgcgcgtgagtgtatgtactcgcagcatctgctgatggaggcctgcacagaagacgctctcagcagttttatgcaggcgaatggagcagccctgacatctgcactggctccgtttcttaaggggcgtggaggggttgacgttgcgtcccgtatgttacgcagtgccctggttcgacagctggcaataacaccgcctgaaatcgccggggattatcgtgagatactggatgaatccggtgtgatgcctgaccccaagatggttcgtgactgccagggtacttacactccggcacaacatctgcgctttcagcaacgcctgaatgacattaacgatatgctggagtga

SEQ ID NO: 152227 - DNA, 525 bp, Enterobacter cloacae
atggctgacgctaaattatccggaccagatgagaagttattttaccaaagccgtcgactatatcgaaagtgttgcaacatttattacatccaagtgagcatgatggtgaaaaaattcaaaaagttacttttagagttcattgtagcagttatgctttcgctttctataccgggtatggctatggcagcagatgctggagtccctggggctatgtgtcagtcagctggagtgtggcagggcttgattaagaatatctgttggagctgcatttttcccatgaggataatgggcataggggcagctccagaaggcgctgctccttcacgtccgggttgctactgcacagatcagaacggcgtaccggaaataggttggcaattgaacttaatatcgctgtgcttttgctctgagctgaaaatctctccggtatttgttttggttccaggagtagtattgggattactgcttataccaatgttgccattagcatcccgagagagcagctttgccccttccttggtatag

SEQ ID NO: 152228 - DNA, 600 bp, Enterobacter cloacae
atgaaacttagaaaaacgatagcttcaactattattgcatcaatgattgccaatactatgagttgggctttttatatctctctcataaatatggtaatgactcctcgtatttatgcggcagacgctatatttgaccagctcgaaagtaactttaatcttgctaatcctaacgcaaatcgcaatgcgacaaccagtgctcaggacattgttgagaagtacaagaatgcggattcaggcgagaatgtcagtgggaagatcaccgagaaatacgtgggtaaagccgaatccgctaatcttaatctcggaaagtatggggcagggaactcaaatgaaagtgtcatgaaaaatgccgcatccgatggaaagtccattggtagcgccgtacaactgccgagtatgtctggagggacaatcaattcaaactataccaaggaaggggcaaagctgctctctcgggatgctaatggcaacattggtataagcagtaatcccaatactactcctggaaccaaaacaaataccggagagattttcagctcagagcaaaagcacagcgatattaagttcaattgccaacctatttccggtacgccgttctga

SEQ ID NO: 152229 - DNA, 684 bp, Enterobacter cloacae
atgcaaaaaagaagagctatattaaatagcgatgggataatttgtatatctgagaacacgaaaagggatatgcataagttcattcctgaatcagtcaatattgaaactcgtgttatttacaatggtgttgctgactattcattttgcaatgcaaatgagtcatttgaaccatatgttgtgtttattggtgctaggggagggtataaaaatttcgaaatgtgtgtttctgcccttcaatatatacctgaaataagacttatcgtggtcggtggtggacgatttactgatagcgaattgagacttttagatgataaaatacctcgtcgctatgaacatacagggttcatttcagaaagtgagttagagtttatttatcaaaattcacttgcattagtttacccttcattttacgaaggatttggtattccggtaattgaagcaatgaagtgtgggtgccctgttattgcatctaaatcatcttcggtacaagagattgcgggtgatgcagctgttttaattgaaaatattacggcagaaaagatcacacagagtcttattaaacttaaggatcctgttgttcgcaggcaaaaaataacgtcaggactagctaacgctgaacggttttcttggaataaaatggcgttagaaactctagatttttacaacagcgtaagaggtaaataa

SEQ ID NO: 152230 - DNA, 1203 bp, Enterobacter cloacae
atgacgcaactggggatgattggcctgggcttttccatcacctacggcgtggggaaaacggttgtgtcctactacgcggacggcaaaaataccaagcagttcctgccgtttatgctgatcctctccgccatctgtatgctcggcttcagcgccagcatgggcgcagggtccgtcagcctgttcctgatgatcgccttctacgccctgagcggttttttccagagcaccggcgggtcgtgcagctactccaccatcaccaaatggacgccgcgccgcaagcggggttcgtacctcggcatgtggaacatctcccacaacctcggcggagcgggcgcggccggcgtggcgctgttcggtgcgaactacctgttcgacggccacgtgattggcatgtttatcttcccgtcgattatcgccctgattgtcggcttcatcggcctgcgcttcggcagcgactcaccggaatcctacggcctcggcaaagctgaagagctgttcggggaggagatcagcgaggaggacaaagagaccgaagaaaacgagatgtccaaatggcagatctttgttgagtacgtgctgaaaaacaaagtgatctggctgctctgcttctcgaacatcttcctgtacgtggtgcgtatcggtatcgaccagtggtccaccgtgtatgccttccaggagctgaagctctcgaaagaggtggcgattcagggcttcaccctgttcgaagtgggcgcgctggtcggtaccctgctgtggggctggctctcggacctcgccaacggtcgtcgcgcgctggtggcctgcgtcgcgctggcgctgattatcgccacgctcggcgtttaccagcacgccagcaaccagtacgtttacctggcgtcgctgtttgcgctcggcttcctggtgttcggtccgcagctgctgatcggcgtggcggcggttggctttgtcccgaaaaaagcgatcggcgccgccgatgggattaagggcaccttcgcctacctgatcggcgacagcttcgccaagctgggcttgggcatgatcgctgacggcacgccgattttcggcctcaccggctgggcgggcaccttcgcggcgctggatgcggcagcgatcggctgtatcgtcctgatggcgatggtcgcagtgctggaagaacgtaaaattcgccgcgagaaccgcgcgcagaaattaaaagcggcctga

SEQ ID NO: 152231 - DNA, 135 bp, Enterobacter cloacae
atgctctccttggtggagagcaactttagaatggacaatcattctttgcgtaatattaatacccagtacaatattattttcaggctcattatctcaatggctttttcaaagagcggattattattgggtaattaa

SEQ ID NO: 152232 - DNA, 1221 bp, Enterobacter cloacae
atgaaagtgataaacttgattttccctgcgctgttaagcatgtcaatccccattgatatgcttaacggttatgtattgaatacatatgatactggggtggtttcgcaaatatacaaatcattcattatattagtttgcttttccattttgataataaaaaaacctttagttgtatcatggtatatctccgcagtaatattccttgtttgcggctcggcatttgtgctcgcgttaagcggaggtggagaaacaatatctgaaacagtgcagatagcaataagatgcatgatgttcttcatcgtaatgacaacattaacatatttaaatccaagtaaagaatttatcggaaaaatatgtgcaatactgcttatattgctttttgttaatttcttgcttggtttctttggctttgggtattcttcatatggcaacgaactagtatcagctggtgatagcatgggcgtaaaaggatacttttactcgggaaatgagctttccttcgttattatgattttctcattattttctgtatgctattttaaaaatgaaattgtatgcatatttgcaatgtcaatgcttctcttttgttcagtcatgctttctacaaaagcatctctggcatctactgcaataatatttgctgtttgggcgtttggcagaacaaatgcagttgtaaaggcgttcactactattatcataatgatatttacagtattgttttttgacgatttaatttctaaagtgacttcttcagatattgttagcagattatcatggatgtatgagactggtggtttgttaagggcggttctttctgaccgtgatacgtttataatagatgcattaaaccagttgaatttactagacttcagtgccggttacgtatttggatttggaagggattatttgacattctctggtgttaaaagctcaacagaaatggactttgttgatgtttacttatggtttggaattccaggaattattttctttgtaagttatttctataagctaaaacgactcctcaacaagatcacttacgaagctaaaaataatttaatctgcgtggcatttttttggatgacgctctttgtttcattcgttgctggacatattgtgtactctggaactgctgtaatacctctatgccttgtcttgtatgcccttggaaaagaaggtattagagagagagggttttcctcatctcccgttggttgctga

SEQ ID NO: 152233 - DNA, 1548 bp, Enterobacter cloacae
atgtcagatatcaccgcaaatgttgtagtgagtatgcctagccagttattcactctggcgcgttcattcaaagcagttgcaaacggaaaaatctatatcggtcagattgataccgacccaactatacccgctaaccagattcaggtttacattgaaggtgaggatggggatttaattcctgtatcccagccaatcttgatcaacgccggtggttatccagtttacaatggtcagataaccaagttcgtgacggttaaaggtcactccatgtctgtgtatgatgcatatggagtccagcaattttatttcccgaatattttaggctatgagcctgaccaatttgcaagcactcttaatctttcatggctaagggggatgaacggatttttgggcggggatgtatacccgccatcaattggcgtaaatgcaaatgttggagaaattattcctgccggcacgagatatatcaggctaaatggagttgtgatgatgcttagcgcactattatcatctcctttaactattgcgagttatgacacaacgtctatcaatggttctgtagaactttaccctgtaaccttttttcatgaggttaattcagggtggaaaatcgcacagaatgacgcccagttacagaggttgcttggtgttggtggaaatataattctgtcctcagaaaactatacgctgtcaggcgatttcacggtaaatagtgatttaactattaaatcaaaatggaaaaaaacaaaattcacagtcaaccaattttggctgagaacaccattaacagcgtcaatcaggcaaccatatgacataacaattgatggttcgatagattgggatttttcacagcaatcagataacaatgcaccaaatccatcatttgcaatcataactggggggaaatgtttcttaagggatatttctatgcatggatcgtggtacagcaatgcagagtgcaacactggaacagaattctatgcatacaacgtatatagctacgatgcagggctagggaagcaatctggagggtcaggagatgcagaaactaggctaggctctggccttgtagttaaaaactttggtaaagtatttatagatggcttcagaggcataaacacctaccagtcaaccctatttgtctacgctgacattgcaaacagaacaagcaccattgatatttcaaggactgaaattaacagctcaggaggtaacggtatcagggtgatggggtcggatacagatcacgttggtgcaaccagggtagttataagcaacttcatcatcaaaaactgtgagtctcatggaattaggtgcaactttagactcggtgttattaacacaggttatattgagtctagcaatgcatctttggcgatagaatatgcaagtgatttgctgatatctgatgtagtgtctagcaggtgtgccaccgggatactatgtagatattatccattagatggcacagataaattaacatatttccaatatcaagataagcaacccatctgtacaggcaatttatttcgcaagaaactcaggtaa

SEQ ID NO: 152234 - DNA, 696 bp, Enterobacter cloacae
atgaacaggatggttatttccgttttgcgcccctaccaaacggaggtggagtttactgccagccaactcactggatgccactcccctcacctccagccaaataacaaacccgcacatcgcgggtttttctttatccggagcccgtatgcaactcaacccagtggcagccgtcatcatggctcttattgcatgggcggctatctcttcactcattcacatgtcagagggcttgttatggctgcactggtatatgtattagcaatttgcgcagctaactacctggtgtttgtgttcggcccatggtggtcaatcatcaactccttcgttctcattggactcgacttcatccttcgcgacgttcttcatgaacggattggatttataaaggttactgggctttctgttctctccggagtcatcagttacaccataaatccagcaggcgggatgatagccattgcctcttcaatctcgttcgttctcgcatcgctaggtgacggtagtgtctatcaattattgattcgcaagccgtggtcagttaaggcaaatgcctcaaatataactgcttcagccattgactctatatcgttcccgcttatcgcattcggctctcttatgccaggaatcattgccggccagttcattgctaaggttggcggagattttatctggtcattaattttaaggaagagatga

SEQ ID NO: 152235 - DNA, 309 bp, Enterobacter cloacae
atgaatgaggtgtttaccgagctatacatcaatagaaattcggaagttaagcttcacggattgaggatgctagatgtcagggtgcttggtatgtacccattcgccagcgcagattctaccaatgttgctattaacgtaccaaaaaccgagaaacgatttcctgagataacagacaaattagctcgcacagctgtgctgcgcgcagccatagaaaatgtccaccctccatcaataccggagtgggtagaaagaaaggcaaaagaaccggctcaggccggttttttatttgaattcacagacgcagcgtga

SEQ ID NO: 152236 - DNA, 546 bp, Enterobacter cloacae
atgactttgcttgaattgctggttaaggaattgccatctaggggcgggtggcccgatggcgttgaacgccttgagcaatatcctgatggggctctgtttgatggtcctaattatcaaagtaactttaagttccaaagggcagatgactttggtgatgatgaagtaacccgcgagcaatacgaagccgcactagttgccagcaagccagaatgggatggtgagggattgcctcctgtggggtgtgaatgtgagtatgaaactaaatttgatggatggcagccagtacgaattgagctaatcaaatctgaagggatcgcctttacatggctgtcaaatagccaggcttacaatgggcttgattgtgtcggagtgcaaaagtcaggctctttccgccctatccgatcagaagcagataagagacgccacgagacaatgcgacaactgtctcattctctccgggcaaatggatcggttacagaagagcaactaaacagactgtacgcagatgttgcagcaggaaagattccacacatccgcatcgactag

SEQ ID NO: 152237 - DNA, 210 bp, Enterobacter cloacae
atgtcagacagcgaagaaatcaaaatcgaaggcggctgcatttacgagtcacagaatattgatggcgataattcaaagttcatcgttacagtggttggactctcccgcgtcctgtttgctgactttccgatgattaaattcaacgaaagttatcttgaatattgcgtaacaaggaaagaattccagaagcgattcaagctatcggagtaa

SEQ ID NO: 152238 - DNA, 2784 bp, Enterobacter cloacae
atgagaaaagaaatcgcttttgcgaatcttaaagaaagtcgcgttttagaatgcaaactggcgaatggaaaaaacggtaaaggggcattgccaattgatttttgggaaagttatagcgctatggcgaattcttgcggaggcttggttttattgggcgttcgagagaaaaatggtgtgtttacaccagaagggattgaagatattgaaagagtgaaaacagacctctttaatactttaaacaacccccaaaaagtaagctgcaacctcctaaatgataatgatgtatacgctgaggaagtagatggcaaaaatattttattcatagaaattcctcaagcaaatagaaaacaaagacctatctacataaacaacaaccctttaacaggaacatatatacgacttcatgaaggagatagaaaatgtactagtgagcaagttaaatctatgttagcagagcaaacgactgacactctagatgataggatctttgaaggctacacaattgatgacttagataaagccagcattcaaatttatagaaaaatgttggctgatagcaaaccgagtcatgtatggttggagttggatgatttcgatttcattactgcactgaagggatggaaaaaggatagaaaaactaaaatagaaggtctcactttagcgggaatattgatgtttgggaaatggtccacaattcaagaagccttgcctaattatttcatagaatatcaggagattactgaagacaatcggtgggatgatagattatttccggatggcagctggacaggtaatttatttgaattttacagaaaggtataccgaaaattgattgaagatcttaaaatccccttccaaatcaatcaaggaattagaaaagatgacagccctgttcatgttgcactaagagaagctttagtgaatagcctagttcatgctgactataatggtcactcccccataaaaatcacaaaacaaaatggattattttctttccgtaatccaggaactatgcgagtacccattagcattgctaaagtcggaggtgaaagtgattgcaggaataaatatttacatcaaatgtttctaatgattggccttggcgaaagagccggatcaggtttaccaaaaataattagcggctggcgttcacaacattggtcagagccaaaactaattgaaaactttgaaattaacaatacaatactcgaacttggaaccaatgatttcattcctgaagagaccatgtctacaatacgaggtatttgtggtgataagtttgacaccctgacaaaattagataggataattttagctacagccgcagatgaaaacatagtaagccatgaaagaatcaaaagtttaacgatggaaacaacgcgtagtattacattatcactttcaaaacttgtgcgcttgaaatttttgaattccgatggagtacaaaaacacaaacgttattttcttccaacttactcgcctataagacctgatgatgcaaaaggacatcaactgttacagttagcattcatccacccccctaaagatattgccttaactgaaatcagtaataatgaagctccgttatacgatttaaacgaagaatttaatgaatatttcacccgcaaggatgcatataaatacattgtacaaatcagcatattagcaacggaacttcaaaatgctacaaaaacactaagcaaaagactttttatcgcaaaaaaacttttaacccagaatagtaaagaacagaaaaataacaatagttcagagttattttataacgtagtatccgaatcacttgatgaatataatgactcacctcaaaggatggggcaacagcagtaccttagtactgagcaacaacaacaccttcgtactgagcaacaacaacaccttagtactgagcaacaacagtaccttagtactgagcaacaacaacaccttaatactgagcaacaccaccttaatactgagcaacaacaacaccttagtactgagcaacaacagcaccttagtactgagcaacaacagcaccttagtactgagcaacaacagcaccttagtactgagcaacaacagcaccttagtactgagcaacaacagcaccttagtactgagcaacaacagcaccctagtgctgagcaacatcagcaccctagtacttccgttagtatcaagcagcccctacagagggttgaaaccccttatcaggaaaaaaggcacaaagaggttcttaaagagattggcttgaatactgatctattaagtatgagtgaaagtgatttattattagaaatcaatgaattagagtccagccttgcaacagctgatgatacatacaggaatatgctttgcaacgaaaatggtagaccaaaaactctctatgaaatgattaaagggaaaccttttgaatgtgaaattgataatccagaggatcaggtaaaaactaaagcagattttttacgattaacacaagaaatagcttggaaagaattaatggatttatcatcagatataagagagggaagtaaaagaggggttaaaaaatcaaccataatgagggtgatcgttacattagctctaagaggatatttaacagttagagactttagtgaattgcttggccgtaatcccaattccctcagaagagactatctggcaccgttagttaaagaaaaaatattaaccttagcttatccttcaacaccaacacatgcctatcaaggatataaaagtgacatttctaagctatccatagacttgcaaaaattcgacaattag

SEQ ID NO: 152239 - DNA, 333 bp, Enterobacter cloacae
atgaaattaacgccgattaaaagcctgtgcctgatgctgatcagcacaacatttaccgcccacgcggccattaacctggaccgcacgcgcattgtttttccagaaagcgacaaggccagcagcctgaaagtggacaaccagagcaaggcgctgccttatctggcgctctcctggattgaagatgaaaaggggcaaaaagaagatgtgcactttatggcgcttccccccattcaacgtatcgaagcgggcgcctcgtcgcaggtaagaattgttaaacaagccgctacccgccagttgccaaaagacagggaatcgctatttcaacctgcgtga

SEQ ID NO: 152240 - DNA, 1197 bp, Enterobacter cloacae
atgattgtgactgcacagttcgaatacggggcaatttccatagatagtaatatattgtattcattgggttacaagtttgattctggtatgttagatcagttaaaacaattcaaaaacaaacacattttaataattcaacccagaattattcataatgaaatggttaaacatgtatcagagccatttgaaaaattacacagagagatagataagctatgtagagaatcaataaggaagttaaaaactgatgagaataattctgtccaagctgcctctcaactaaaaggggatttagatccaatagctttagctgaaaagattatcttcgacttttatagagaaattaatggtgaggttttagaaactaaagattatctggatgtggatgagttaattgaactttattttttaaatcaacctccatttgaaaataataaagaaaaaaagaatgaatttcctgatgctatagctttattatgtcttgattcatgggcaagtgagaaaggttttaaagttgttgcagtaagtaatgataaaggatggaagttattttcagaaggtgtcgctaatgttgaggtggttgatgacttgcaaagcgccttggctatttttcaacctcatcagcgtgctatggaaataatcgagtcattattgggtaacgattttttagatgatggaaagcgattattttcagatataaaagttagggttgctgattacgtttcagatgcaactgatttaactcttgatgcatcgtcctcctatatgtttgattatgatgacgtgcaagttgagtttgatgatgtgaaaatacttcaaaagtttggtaaaactgacccaatagatcttatcagaatagaagatgatgaaattactctatctataagtgttgaagttcaatgcacgataaaggctgatttcagcttttacgtcgaggatagtatggatagagacgaaattttaattggtcgatctatgcaagcaacttctgaaagttttaacacattacttttagttacattatcaggtgactttacaaaatcacttgatgaaattaaattggaacatgttgaaatgcagaacaacattgactctgtggattttggttctgtagaacctgaactcgagccagactatgatgaaaaatatgattactattgcccatcggatataatcgatgggcaacaaacagaatga

SEQ ID NO: 152241 - DNA, 456 bp, Enterobacter cloacae
atgagcaacatcgacaaacaggcgctgacagacgaagcaatcagcaaggcctttgctggtacaaactttggtagagatgactttaaaaacattctggccgaaacggttattgatgccgctgcgggttggcgttgcggctacacagcaacaactatctgtactcagcttggacttttgacaccgaagggttgcgcgtccgcacttggattgaggtttatcagtgagcatgttcagcgcgaaacaaagcgcctgaaggatgagctggaagccgcaggcaagaggattgctgagctggaggcgcgtacgttggttccggtcgagcccacgcttgatcagctggtagctggtaagcgccgattgacttcaaccgggcgcatgtctcgactgatgtcacagcgcctggctgaagtatatcgtgcgatggttaacgccgccgcagccggcaaaggagagtga

SEQ ID NO: 152242 - DNA, 327 bp, Enterobacter cloacae; identical to SEQ ID NO: 128614

SEQ ID NO: 152243 - DNA, 351 bp, Enterobacter cloacae
atggctatatccgctggtaagctcatacaaattattgtgatacaaaaccccgtacatattcgtgacgcatcaggccagccagttgaaacatgggtggatggtgaaaacatccgcgcagatatcagaggccggagcggaagagaattaatggcagcaggcgccgaaattgcccaggctgatgtcagagtatgggttcgcggaaaatcgggtgaaacaataactgcggcatccaggctaaaggttcagagtgggccataccgaggcaaaacacttaacgttataggcccgcctatccctgatgaaaagggtgagcgtcttgagatattgtgcaaactgggggctgaaaaatga

SEQ ID NO: 152244 - DNA, 711 bp, Enterobacter cloacae
atgagctggaccgcaaacaaaacgttatctccaccgccagatacaaaatgggtcaatgttgaagtaaaaaatccgtctcagtatacaagacccttcccgctggaagtcagatacatctcgtatgaatgtaagaaaaaaagaatcagtggatttgatggctcagttattacggaacccagcgataacgttatcaagatccccatgcagcaagagagcggggatatctggaaagcaaaagttgctatgaccggtggtggtacgtgtaaatggacattgagtgcggttaatttaggtatcgagtatatagatgcaacacatcttggcaaagatcttgtacctggaacagcggtgggggtgtcgcttgcttttgataatgatgcttctcgaaacgggcagtataggtctgtgcaaggggatttaaatctatccccaaaatattatccttatattagagaaaggaacatagcagagaagaccaagtcactctctttgtttggggaggaagattttattttattacggacatctaatcttaataaggttctttatcatccggtgattgatgagttgaaagttgtaaaatacattgagccagagaagaaaattgaaggtgtctactctcaaataatatatccggatgggagtgttgtatttgatggaacagtatttccaagttttgataagattgataaaatgaatgttaaaaagtaa

SEQ ID NO: 152245 - DNA, 795 bp, Enterobacter cloacae
atgtctaatcaatcaaaaattattctgctttcgctgatgttatttattgtggagggttgcagtatgacccggaccgtaaacaaaacgttatacccgccggcggatacaaaatgggtcaattttgaagtaaaaaatccatctcagtatacgaaaccgtttccgcttgaggtcagatacatctcgtatgaatgcatgaaaaagagaatcagtggatttgatggctcagttgtcacagaacccagctataacgttattggggtccccatgcagcaaggtggcggggatatctggaaagcaaaagtggctatgactggtggcggttcatgcaaatggactttaagtgcagtaaatgtaggtattgaatatatagatgcgactcatcttggaaaggatcttatcccaggtcccgctgtaggtgcaacagttgcatttgatgctgatgcttctagaaatggacagtttgaaatcataagtggaaataaattcaattattcccctaaatattaccctgtattagaaaggtggagcgctcaaaagaacgctacaaaatcagataagctgaacttgtttggggaggataattccttttttgatgttcgtatgattataaaagataatgacgcttggattaattaccatccaacaatcgaagagaataagaaagttgagatgatattcccttatgaaaagaaaaaaggagtggcgttcacttttgtataccccaatggtgaaaaggtgtcatcgcgagaaataaaacctgactttaaaaagcttgatgaaatgaaatttaattaa

SEQ ID NO: 152246 - DNA, 1587 bp, Enterobacter cloacae
atggcgaccattcattccctgctcagcgcctgtctggccacagcagaagagacggggaccagagcgcaggcgcgtatcgccctgtgggaaaactggcttgcgccagttgccacaaacaatcctgccggggatgaccccggttacaatgatgacttccagctgatgcgtgaggaggtcaataagctctccggggctgataccgagcttgtctgccagcttgcggaaaaggtgctgaccgcgacggccaaggatatccgtgtggctacgtactatacctgggcccgtctgcacagggacggggaaagcggtctggcggacggcctggagctgctggccgggctgctccagcgttatggcggtcagctgcatccgctacgcgaccgcagccggatggcggcgctggcgtggctgggcagtacccgcatgctggacagtctctccctttatcccgaggtggtgaaggctgataccctgcgtatcgccggtgcgctctggctggtcgagcaaacattcactgatgatgcttcccgcccggcactgggtggcctgtatcaggcgctcgaggccaggctgatgaaatccggcggtgttgatgccattgtgccccagaacgtggccgatacgcctgctcccgctgcaggcagcagcgcacccgtcttgtccggtatcacctccgggcaggacctgctctcgcaggcaagggtgctggcgaaatacctgcgcgatcagccagacggctggctcgcaggccatcatctgatgaaaagtatccgccacgacacccttcatcagttaccaccgctatcggcagatggaaaaacccgtattgagccgcccaaaccggaccagcgtgcgctgctgaaacggctgtacctgcagcaaagctggctggaactgctggagcagagcgatagcatgtttacccggggagccaaccacctgtggctggatttgcagtggtatagccatcaggcgctgctgaaggccgggcaggaggcgcttgctgatatcgtacagaacgacctgaaggggctgctcacccgcctgccgggccttgagacgctgggctttaacgacggcacgccgtttgcggatgaagtgacactgaactggatacgccagcaggtgatggaaagtggtattcactggcaggacgagacatccgtgacagcagcggcggcctccggagataacgatattctggcgctggagccggaagccttacaaattgccgacagtgaaggagcggatgcggcgttttcctggttacaggggcggcccggcattatcacaacacgccagcagtggttgttgcgcctgctgatgggacgtattgctgagcaggtcggcaaaaatgagctggcggtgcatctgtttgcaaaactggatgaacaggctggcggggtgacgctcagtgactgggagccggaactgctgttcgaagtgcgcgcccgtcacctcaagctcctcaggctgaaagccggacgcagtgaagccgataaaacccgcctggctcctgtgatggacacgttactggctgggctgattgctattgaccctgcccgcgcggcggtattgtgtggataa

SEQ ID NO: 152247 - DNA, 1764 bp, Enterobacter cloacae
atggacgatttaaccctgcgttattttgacgccgaaatgcgttacctgcgcgaagccggaaaggagttcgcacaaacccatcctgaccgggcggcgatgctggatctcgataaggccgggactcctgacccctacgtggagcgcctgtttgaaggttttgccttttccatggggcggctgcgtcagaaaattgatgatgacctgccggagctcaccgaaagcctggtcagcatgctctggccgcattacctgcgcaccattccctccctgtcggtggtggccctgacgccccagctgtcggcaatgaaaatggccgagatcgttcccgccgggctggaaattagctcccggcccgtgggtccgaaaaataccgtctgccgttaccgtaccacccgcgatatgccgctcaaccccatggcggtggaacaggtcaccctggccactgaaccggacggccgttcgctcctgagaatacgttttgcctgcagcacacaggcggactggtcgcaggctgacctgaaacgcctgtgcctgtacctggcggcggaagccccggtcagcagcacgctacacctgatgttgacgaaacgtcaggcggccctgtacctgcgtctgcccggacagaccgacagaatacgtctcgacggctggatttccccaggcggctttgcggaagaggatcgcctgtggcccaaaggcgacagcgccttcagcggctaccagctgctgctggaatattttaccttccgggaaaagtttatgttcgttcacctgaacgggctggaaaacattaccctgccggcaggtataccggggtttgatattgaggtggtgctgaatcagcagtggccatctgacctgccggtgacggatgatgccttgcgcctgcattgtgtgccggtgattaaccttttcacgcttgaggccgatccgctgaccatcagcggtctggagagtgaatacctgctgcgtccgaaacgcgtgcaggacggacatacggagatatattccgtggattcggtgaccggctccgggcgttccggaagcgcggaatacgtcccctttaccagtttccgccaccggggcggcatgctgcgtcaggaggcgccagagcgttattaccacacccgcgtgaagcggggcgtcaccggcatgcacgatacctggctgattctcgggggacagcaacaggaggctgtcagtatggcagagcgggagacgttatcactgcgcatcactggcaccaacggccaactgcccagaagagcgcttcagggcacactgcttgaccgctgcgagcagacgttacagacccgggtgagcgttcgcaacctctgcaagcccaccctgccagtgtatccgcctgcggaggaccgctttcactggcgggtgatgagccacctggggaccggatttctcaatatgatgagcagcgcagaagtgctgcgcggtacgcttgccctctacaactggcaggaggatgagctgaacaaccgtcgtcttgatgccattcttgcggtggtgcaccatcgtatccagcgctttgaggaagggtatctgctcaggggactggatgtggaggtgacggtcgacggtaacggttttacaggagagggcgatgtccaccttttcggtgagatgctcaaccgcttcctggcgctctatgccgacatgaaccagtttaaccagcttaccctgattgttcagccagaaggaaaatgcatccggtggaaagagaaccacagtccgcgtctgcccggctga

SEQ ID NO: 152248 - DNA, 1101 bp, Enterobacter cloacae
atgcatccggtggaaagagaaccacagtccgcgtctgcccggctgattgcgcagtacagggagttgctcccgtataccagtttttaccgtttcggccagttacttgaacagagcctgccggatgcgcccgttaccggcagcagttggcaggtccgccaggagccggtgcgcttccgtcctcatccggggatgggcttccctgctggtgaaatcagaggggcggaagagcctgcgcatccgcatctgccgccctccgtgcgtatcaactttatggggctctacggcgtcgaatcgccgctaccgtctcactatattgatgatattgcgcagcagcgggaggggtatgaagcgacggcggattttctcgatatcttcaaccatcgccttatcgcccagtattaccgtatctggcgtaaatattcgtacccggccacttttgaggctggcgggcaggacagaacgtcacagtatctgcttgggcttgccgggctcggcatttcgggatgtgcgcagaacatagccacaccggtttcacgcttcctggcgttattgccggtgatgctgctgccaggacgcacggcggaaggattggtatcgctggtcagcctgctggcacccggaacacaggggcgtgtctggcatcatgaccggcgtcgcatcgcgctgaacgccccggtgaccatgagcgtgcgtcagccggtcagcctgaaaggacgtccggtgatgggagaacatgccacggatgtgaacggccaggtgctgttgcagctcacaaccggagatgcccgtgaagcgcaaggctggttacccggagggcgactgtacactgatcttctggcgctgctgcatgtttatctcggaagccgcctggacgttcgcatgcagctctgtgtggatcgcgcgctgctacctgatgcacaaatctgttgccgcacggcaccggacagtccgcaactggggcgaacagccatcttgaaaccactggctacgggggcgtcacagtccccccgtccgatcattatcagtctgggccgatatcagcgggttcaggaaaatcatcaacgtaaggagactcatgaggatggcgattaccgctggtaa

SEQ ID NO: 152249 - DNA, 537 bp, Enterobacter cloacae
atggcgattaccgctggtaataccggttcctgtctggctgctgtagtgctttccctgtcactgtcaggctgtggcctgacacagaaggtgacggatggtacggtggccgtgacaaaatccattttctacaggcaggtgaaaacgctgcacctggacatccgagcgcgcgaagcggttaacagcaatgccggaggtataccgctgtccaccgtggtacgcatttatcagttgaaggaccgccaggcctttgacagcacggactacccgtcactgtttgcccgtgacagtcaggcactgaaagccgatatcgtcgcgcagaaagacatccggctgttgcccggaggggctgtactggtggatatgccgatggatgatgcggcacagtatgtggcggtagcggccatgttcctggcacctgaccaggccaatgatacctggcgggtggtgctcacccgggaggatctcgaccccgacaaaccccgtatcattgatgcgggtgacaaccggctggtgctgaaacctgtggagggcaactga

SEQ ID NO: 152250 - DNA, 444 bp, Enterobacter cloacae
atgccgcgtccttccctgtatgacatgctgtatggcaacgtggccggtgggctggagttgaaccacgtcagcgaagaaaaccagcttatcctgtcggtgctagacaacatgcagcgcattcttaactgccgggcgggcacgctggcgcatctgcctgactacggcctgccggacatgacaaaaatcctccaggggatgcccggtaccgcccatcaattgatagccaccctgtcaggggtgttactgaaatatgaaccgcgcctgaaaagcctgactgtcactctgctcgagcagacgcagccgggcgagctgcgttacgccattgatgccgaattgaagggcctcgggctggtgcgttatggcaccgagttcatgccggagggaagggtgctgttacggcaccttaaacaacaacagtacctggacagcagggccaggatctga

SEQ ID NO: 152251 - DNA, 462 bp, Enterobacter cloacae
atgtcagcaaaaatgcagtttctcacaaagctacaggcccggaaggagcccctacgcggcagtaaaaacaggaaccaggcggacattgcggagtttcgtctccgaatggagcaacttcaggaacagttctccggctggctaacgggtaccggcgtcgcacctgaattatccgacgtattgctctccgacctgttggtggaaggccgggtttttaaggtgccgggtatttcgctgtgttatgaagacaggatgatcaaatttactccgctgtttttgtacgcccagggcgtgacaggcggtgtggaagtctctcttcatgcagaaagtaccgtcaccgcgctggggcgtttatttatgcgcgcaggtcacgttaaacactggacctttactcagcaaaatgggcctgtctgcacatttgatgaagaggtttttttcgacgtcattgcggggcttttgccatag

SEQ ID NO: 152252 - DNA, 1380 bp, Enterobacter cloacae
atgaacaccctacacgcatttccctggcagcaggttgtcagcgctcagggctacacggcggaatcgaaagaccgtgtgacccactttagcgacacgctgttctgtatcgatggcagcggcaccattgtcgatattatacgaggtgacgatggcgcgttcagccccgtgcgggacgctgcccgcatggcaggcaagctgaccgaactctcttcagaccagtacctgcttccgggcctgattgatcttcatgttcatgcccctcagtggccgcagatgggcaaggctctggataagccgctggcagagtggctgaatgactatacgttcccgctggaggcaaaatacgccgacattgcgtttgcccgccgccactacacggaactggtcaatgcactgctggcgaatggaaccaccaccgccgtctacttcgccaccctgcacacggaaagcagcgtggaactggcccgtatctgtctggcgcagggtcagcgggcgctggttggccgggtggcgatggatgatccctcccagtgtcctgactactaccgggatgaaagcgcggagacggccctcgccgaaacccgggcatttattcacgcggttgcacagcttcccggcaatacggcaaaacgcgtgctgccggtcatcaccccacggtttattccgtcctgtacggatgcgctgctggaaggtctgggcaagctggccactgaaacaggctgccacgtgcagacccactgctcggaaagcgactgggagcatgcttacgttaagcagcgtttgggtaaaacggataccacggcgctgcgggattttggcctgctgaccagaaagaccgtactcgcgcattcaaaccacatcgaagatgacgatgccgacctgatcaagcaaactcaggctggcgtcgcacactgccctctgtccaacttctactttgccaatgcggtcttccccctgcgcgccatgctggaccgcgggcttcacgtcggcttaggcaccgatattgcgggcggccatagcccttcggtatttgatgcctgccgccacgccatgaccgccagtaaagccctgaatgatggcgtcgatgcccgtatcgccgcggaacaacgcggcagacctgactcggcaatcagcttccgggaagcgttctggctggcgactgtcggcgcgggagaggtgcttgatctgcgtgtgggcaagctggcggtcggctaccagttcgatgccattgtgatcgatacccgggccgccgggagcgacatttatatcgatacggctgaggacgcaccggaagaccggctgcagaaaattatctataacgccagacgcaataatatcagccgcgtctgggtggacggcaaagctgtcaatattcagtag

SEQ ID NO: 152253 - DNA, 423 bp, Enterobacter cloacae
gtgagcaccacggtgcgaaacgtgatcctctctggcttcttcgactccattggtatttatcaggcggtatccgacaagcagcacaagctggcgcagcagtggctggatattctgggtatggataaccgggtcgccgatgcacccttccaaagcctgtcgtgggggcagcagcggctggcattgatagtccgcgcgctggttaagcaccctacgctgctgattctggatgaaccgttgcaggggctggatccgctcaaccgtcagctgatccgccgctttgtggatgtcctgattagcgaaggtgaaacccagctgctgtttgtgtcccaccatgctgaagatgccccgtcctgcatcaccaatcggctggaatttgtccctgacggcgagcaataccgctacctgctgaacaaaatcgattaa

SEQ ID NO: 152254 - DNA, 720 bp, Enterobacter cloacae
atgggagccagttttggggtgggtctgggaggaatgagcggttctcagaaggtagaagagtcacgaaaagttgaaacagatgctcctgctcaaattatttatcgcatagataaaaatcgatacctgacgctggaaaactacatatcctgtgataggggtggacaagtatattacaatgactctcagaggggaataaaaacacacctgggatgggataacgatttttatgatttctcatatcgccggggaaataatattgcggcttatcaaggctctattattaatggggcggataatggttatctggcattccctggcgcatctaccagacaatattgtggtagtggaaggtcagaaacaggttgccctgtgtttttcttcttttcagcagatcatgggaacacatttatatataaaattgtagctatggaatacagcaccccagaacgttttagtcagcttaaagtagtagtagctaatgatggtgtttatctaagggatgagtctaaaacggaggatagctattctcgccctacaggtctcaatgaccttagctcagtgaataaattaaggttttctgacggcaatttaatcagtgtttatgatgactggcagaaaaaaattgatgagttagtgaaagaagaactgataagaaaaaaatgccctatgcaaacgagtatggacctagatttcatatattcgactatctcagaacattaa

SEQ ID NO: 152255 - DNA, 132 bp, Enterobacter cloacae
atgcaggaggaagtaaactgggaggataaagagacgggacacccacgggggtgggttgtgaaagtatttcctatggtcttcgaccttattgcacctaaaatgaccagacacattttgggaaggagtctttaa

SEQ ID NO: 152256 - DNA, 744 bp, Enterobacter cloacae
atggcattatgtcttgcggaaacgcttcttgagaaaggcgatgctgatactatatgtttcaggaataagcttctggaatggtatcagcatggttataacagttcaaatggcgtctgttttgatataggtaatacaacgcgatttgctttagagcaatatttaacaattggcccaggatggagcggcaatactgctccagaaactgcgggtaatgcttccattatcagacaagcccctgtctctattttttttagaaagtcattaagcaaagcgttttatgaagctaaaaaacaatgtatcgcaacacacggtgccgcggaagcaatcaatagcacgcagtatttaagttatttgcttgtgcatatgattaacggtaacaataaagattttgttttttctccgcacgttatgccgcttcagccacgcgtaatgattatcaacgcgggtgaatataagcaaaaaactcgcgatcagattcgttcaagtggttatgttatcgatacgcttgaagccgcgatgtggtccgtatggaatacggataatttccgtgatgccattctgctggcagccaaccttgccgatgatgctgacagcgttgcggcgacggcgggacaaatagctggagcattatatggttattccggtattccgcaggagtggaaaaacaatcttgtacaacatgaacgtatcgccaaaatggctggtgaattgttcgatagagcccccgaagacactttcttataa

SEQ ID NO: 152257 - DNA, 1119 bp, Enterobacter cloacae
atggtctgtcatatgaccccccctgttgctctatttaaagggtgtgtgatgcaagatcttcacagtaaagactcagtaatcaatcattatgccgatcgttatcaatgttatatgccaattgatgtccgtaatggattaagaagcaatagtatagatgcgtcgaattcatctctcccatgggatgtaacattacctttagtcacgactgaagatgtttcacgtgataaagcgcttggggcgtttgtgggattggctgttggggacgccgtcggcaccactcttgagtttaagaaaagagacagtgaacatgtagcagatatgattgatggcgggccttttcaattaaaacccggtgaatggacagatgatacgtccatggcattatgtctggcagagacttatctttcagaaaacagaatgcacaccgatgtgcttagaaaatatctcctgaaatggtatctttacggagagaatagcaataatggtcggtgcttcgatatcgggaatacgacgcggttcgcgcttgaacagtatatgcgtgtcggaccttcctggtatggtaatatagagaaacacactgctggtaatgctggggttattcgtcaagcaccggtgtctatctttcgtcgaaaatcactgcgtgcgatttacttcgaatcacaggctcagagtcgagcaacgcatggcgcggtagaatcaattaacgcatgccaatttctcggattggtattgcactatttaatcaacggttatcaaaaagaagaagctttttcgcctcatgttttcccactgtgcgcgcgtgtaatgatcataaacgcgggtgagtataagcaaaaaactcgcgatcagattcgttcaagtggttatgttatcgatacgcttgaggctgcgatgtggtccgtatggaatacggataatttccgtgatgccattctgctggcagccaaccttgccgatgatgctgacagcgttgcggcgacggcgggacaaatagcgggggcgttgtatggttattccgctatcccgcaggactggaaagataaactcgtacaacacgaacgtattgccacaatggcgggtaaactattcgatagagcacctgaggataattttttatag

SEQ ID NO: 152258 - DNA, 1959 bp, Enterobacter cloacae
atgctcaaccgaattaccgttcagctcccggttgaggggctgcttttctggaaactctccggccgcgaggcgatgtccgagtcgttcgcgctgacgctgaccctgctcggcacggatgcgcgcattgaccgcagcaggctgctcggtcagccggtcacggtgaccatccccacgcagagcctgcttactccccgctttatcaacggcaaggtgacgcgcgtggcggtgagcgccgttgagctgacgggcacccgctacgcggtgtaccagctgacggtggagccggacctgtggccaatgaagcgcgaccgcaacctgcgtatcttccagggccagacggtgccgcagattgtcaaaaccctgctgggtgagcatcaggtcaacgttgaggacaaactcaccggcagctaccgggtgtgggactactgcgtgcagtatcaggaatcgagcctggacttcatcagccgcctgatggagctggaggggattgcgtactacttcagccacgaggcggacaagcataccctggtactgaccgacgccgccacccagcaccagccgttcagcggctatgaggtcattccttaccatcagacgccgtccggcggcagtacggacgaagagggtatcagccagtgggcgctggaggacagcgtgacgccggggatttacagcctcgatgactatgacttccgcaagccgaacgcgtggctgttccaggcccagcagaacccggcgtccccgaaaccgggcagtatcgacgtgtacgactggccgggtcgctttgtggagacgggccatgcggaattctacgcccgcatccgtcaggagcgctggcaggtggagcatcagcagattcaggcgacggctaccgctgcgggcattgcgccgggccacatctttaccctcaccaacgcgccgttcttcagtgataacggcgagtatctggtgacggcggcgggctaccatttcgaggagaaccgctacgcgagcggcgagggggagaccattcaccgcaccgatttcaccgttatcccggcgtcggtgtcctaccgtccggcgcagagcacggcgtggccgcggacctacggcccgcagacggcgaaagtggtggggccgcagggggagagtatctggacggacaaatatggccgcgtgaaggtgaagttccactgggaccgcctggcgaagggcgatgacaccagctcctgctgggtgcgcgtgtcgagcgcctgggcgggccagggctacggcggggtgcagatcccgcgcgtgggcgatgaggtggtggtggactttatcaacggcgacccggaccgtccgatcattactggtcgcgtgtataacgaggcaagcatgccgccgtgggcgctgccggctgcggcgacgcagatgggctttatgagccgcagtaaggatggccacaaagataatgccaatgccctacgattcgaggataaggctgggcaagagcagatctggattcatgctgaaaaaaacatggacaccgagatcgagaactgcgagacacatgacgtaggggtagaccgtaaaaaaattatcggccgggatgagcacgtaacggttaagcgtaaccgggacgtgaacgtgggggcgaattcaaccagcaacacgggtaatcagcacaaattcaatgtaggtaaaaaccaaaccgtattgactatggataaagagggaaatgctctgctggaagcgacaacctcgattaagttaaaggtgaatgataactacattcttatcacgccatcgacaattgaaattatcgtttccgaagggacactcaaggctgagagtattactgtggcatccttcaaagggacggagttgacgaagttaggcggcggaataaatgccgagatgaaagctaatgatactcttcatctcaatggtacaaacctgacagatattaaaggcgctgttgttaaaattaacagctaa

SEQ ID NO: 152259 - DNA, 447 bp, Enterobacter cloacae
atgagcaactattccgatttgtggcaggtaattaagatgcgagtttgtcgcaataataaatttgcagaaagctcacttgcaaacagcaattcctttgatgccgtaagagtgaagttaagaatactccaaatcttcgcgcttgaatgtgctttacaacagtatcgcctgaagcatggaactcctttcaatccgctcgaagggaaaaaggcattgcatcatatgatttttgaaaaaacaaaatggcggcttgatactatcagaacgctatcacttaacgattcattgttcattatcaacgatgaattgcgtttgttagagctgccaccaaaagccagtgactttattcagggtcttgagatcggactgcatgttcatcctcttgacgatttttcagaagaggactgggagcccaaggaaaactcaactttccttcaaaccctccagtag

SEQ ID NO: 152260 - DNA, 282 bp, Enterobacter cloacae
atgcaagacggtaaacaacagctatatttttttaacccaggcatgacgcctgaggagcttgaagactggcttgggcagcagaaaacccaccttgcccactttaatcgtctggtgaaagaaaaagccgctctagaggaacggctttgtgaaatttcgctggtaatgagtaagatgtctactggagggtttgaaggaaagttgagttttccttgggctcccagtcctcttctgaaaaatcgtcaagaggatgaacatgcagtccgatctcaagaccctgaataa

SEQ ID NO: 152261 - DNA, 1311 bp, Enterobacter cloacae
atgattaacaagttgataaaaaacaactttttttccttaattgtattaagcacagtgttcatcttgatttattcattaaatcatatgacgatgtatgttgctgatgactttgtgtatagatttgtataccagacaaatccatctcccactgctgttcctattgacggaattcagtcaatcattgagtctcagattcgtcactatgaaatatggaatggacggttcgtggctcactcgctagtgcaatttttcatgcaattcgacaaaccaatattcgatatatttaattcgattgcattcattatcataggcatgctggctttgctggtagcaaagtcaatttcgaatattaaggaaattggctttgcagttctgattacatttatgatgttatggcttataattccagagtttggttcatcagttctttggatatctggctccatgaattacttatggatgtctataatttatactgcatttatattggtaagcatgagagaggataggcctcgagcattcaaacttttcctgtatctaatcttaagcttcttggctggcgctacaaatgaaaacagcggcccagcctccgcacttatcgttgtgatgctggcgggttatgaatacatggtaaatagacgaatcagttggtggaaaataagcggcgctgttatcgcaatgggggggtttatcctaatgatgagctcccctggttcgcagaagaggggtggtagcaatttctcgttagatattttcgcctctcgttttgctgacatattatactccagcatttctttatttttgcctttttatgcactcctaactttcatactagtggtatgcacatacaaaaatttagtttccaaaagagatgtgtcgttcaccataatctttcttaccgggcattttgcgtcaatatatagcatggtagcggcaccttctttccctgaaagaacggctttcggggcggccatcatgctactaatattattggttcattacatatgcaagattagctcttcatcagcattgtttaaggcaatagtgttttctttatacacgtcatgcattgccacctatacttatgcagccactgacattcacaacacatacaaagagttgaggatgcaagttaatgtaatacaggcttccgcgcctggttctgatatcattgtgccgatgatttctaaaccaaaatcacaagctaatgcttatagaaatgcgatatatttaacacaccgtaaaaattcatggatgaatatgtgggcggcaaggttctataatatgaaatcaatatctgggaaagactaa

SEQ ID NO: 152262 - DNA, 2424 bp, Enterobacter cloacae
atggctacgacaccaacaaaccttcctgttccaagcgaatcaccacgtgacctgaagtttaatgcggggaaaattgatgagtttgtgacttcaaaaaatcatgcttatgttgacagatttggtgaccggcatcgtacaatcactggaataaattacgatgcaaatcaggcaattcttggttatggctacatcacgaagaagtcttttgaaattggtgctaccgtcgacaatattaacactgctctccagtgggaaagtaatggggagttctacagatgggacggcgcactccccaaagtagttcccgctgattctacaccaaatagcactggcgggataggtgaagggaagtgggtaagtgtaggggatgcttcacttcgcacggagctgagcagagggcagtacagggaagatgcaacatcttgcttctatgtgccgggttttgtcgttgatcaaaccacggataacagaaatgcagcttatgccttccaaggagtaatttatatccctgaagatgtaactgtacgctgtaactttcttccagaagatgatgttcgtaaattcatcggtgaaggtaagattttaacgagagatccttggggatttgatcatgaattcgatgtttcaaaatcctgcaaaggcagcttgtttacagtgcgcggcgtaattcatcaaggcatggagaaaaagggtgcgcagcaagtaagcattggggttattggtgattctattactgacggtgcatggggcaagcagacatggacaatcaacccaaattctggcggaacagaaagaaacctcagctcaactaattataatcattctgataatggaggaagtcattcctggtttgctcactttgtttacacgttaaacatgacaatcagccgatggacttcaaaccctgcatttaaaggttacaactgcgcaaagtctggtgctaaattaactgatggctggggctatcgtaatttcgattacggattcttccagaatgcggcatatggtaatacagcacctgatacactgcttatttctatgggatggaatgacgtcgatggggttaatttcgaaagttatctagataattttgatgccttaatcagaaaatcgtggggctatggttgttccgtgggattggttacttgcaatatgaatgatagtagccgctctgggcttgagggagcaattaagcgcacactggcatcgaagtaccctggagttgaatattttgaccttggaacgtatttacgtaaacgaggcagctcagatcttcgaaacctcaagaactattacgttaagtcagacggtacatttgactacacacatccgcagccactcggtcaggcagatatgggtaacgcaatgctttgggaggtatgtaaagacacgtttataccttctgtaaagccgggggaaatggtttcatgggcaaatgctgacaaattctgggattgcgtaggagctagctcaggaacgcattatcaattcacatgggagaatgcggcaggtactcccgcgttaaacaagatgagtaaagttgctcaagcaaccgtttcatcagagaacgtaacattgtctactttcatattttgtgaagaagatgatatgagcctgttccttctggagccatatactcgtgacagtgattttactgcggcaggaagaaaccacatcataaatgtcagatcaccagctggcaaagatatggcagaggcagagcctgaaaacctgcgtagattacataactctcagcgccttgcatctggtgttttgggcgaaaagaaaacattgaccacttatataggaaggctacggtatgggatcaattacatcagtgtacgttacgacgggagcccaaatctggtgtatgttccagcgttgatcactggaaaaatgaaccagacaaaggtttcgataaataacctcaggcttgcaaagcaagccggctttagtggaacattaatagagcgtgtaaatgcactggatgggataacatcgaatctctttgatggatcacaatatgcttcattaccaaactggtttagtgctggacagaatctcgctggaagtcttctgataaatgagcccttatcagatcaaactggaatgatactattttacgatcctgatgaaaaaaatgggtatgccattcaacgtaatggtgcagtgcttcgggttggtgaaatggtttctggtgtagtgtctacttggacaaataccactgtagatgccactaaagtctttcaggtgtacttctaccagacagtaagtcctatcaacggtgcttctatgaacattgttggtacaaatacatattcagcattctataaaaagccaggcggggtgttaggggttatgaatgcctcatcatctagcgcgactttcaacgtaacttacaacgcctacgatatgggctcataa

SEQ ID NO: 152263 - DNA, 291 bp, Enterobacter cloacae
atgattaaggatttagttaatgaattacagaatattgaacacagaataacctcagccaagaaaaatgaggctggcttctcgagcagtgattttgatcaaataatggaggatttttccaagtccagagtagaattcaagaaggcagacaaaaaagataaacactatccattaattagagatttaatagttagaatagatggtattttaacttcagttcaagaacaggaagaattaaacgattcgcttattaatgaaaatgttgcggaaagtttgccaccaaagagactctag

SEQ ID NO: 152264 - DNA, 324 bp, Enterobacter cloacae
atgattgatcagaaaactgtagtgcaagttaattacggacaagaaaaagacgttgttttgggagagattgttaagttcggttattaccagcctactcctggtgggcatattgaggttacagcgagtggcattccttcagactgctcttcagtttgcaaagaattagtcgcacgcataggcaagatgattcagctacgccttgtttcttcaataagtacttctgagtttactatcaaacttgaccagttatcagttagcgaatcccctgtagatccgggcgcaatcgaaatttatttatccggcatccaaccagacaagcaataa

SEQ ID NO: 152265 - DNA, 150 bp, Enterobacter cloacae
atgagcaaaacagtaacattcagttcaaaagtatctcttcgtccatacatgaagccgatcctgattctgtcaactttactccactgggactggctgactaacaagtgcttcaaaatcgaaactgtaaccagcgatacggtgcacctttaa

SEQ ID NO: 152266 - DNA, 615 bp, Enterobacter cloacae
atggaattacgagccccccaacgtggagacgtaataagaacaaaacgcgaagaagttagactgcagattaagcttaccttctggcattgggctgtattcgtatcaccgacagaagtaatccactacacgtcaccaacaagtgatgcaggcggtgatagtatgaaaatacaaccaactgactttgaaggatttttaaagggtaacaatcaatttgagatagtcgaattcccctccgaatacgagtctcaaaagagtttctatcaaggattaatcccttcgagcaaggtaaccaaacaaccgcctatcaatcctcttaaatggctgcttccaggatttttaagcatcccaatggctgccgcaaaggttgtagcaacaataaattcgttcaattacaaactagcaaccccagaaatagtagttgagagggcaagaaacagatgtggagagcaaaactataatttcttgtttaacaattgtgagcattttgcggtttattgcaaaacgggggtctctgaaagcgagcaagcagatctatggaaatacctcgaaagtatcaacaggaagatcgataacgtcggagaatactctagacatattcataatattgtaatgtaa

SEQ ID NO: 152267 - DNA, 516 bp, Enterobacter cloacae
atgacccttacgcaaaacaggctaaaagaagtgcttcgatatgaccccttaacaggggttttttattggctaaaccctaccgcctattgcatgcatccaggtgatgttgctgggtttgtagattacacaggctatgcatacataaagatagacagggttaaatattcagctcacagactggcgtggctatatgttcatggctctatgccggatgaacaaattgaccatgtaaacaacaacagatcggataacagaatatcaaatcttaggctcgcctctcgctcacagaacatgatgaatcagtatgtcagaaaggacagcatttcaggggtaaagggggttgggtgggataagaaaatgcaaagctggagagcgcgctgtcaggttggcggtaaaagggttgttataggctggtttgactccgtagaggaggcagaagaaagcctgagagtttacagagagaaaaatcacggtgaatttgctaaccacggagttaatcatggcaacagaatttaa

SEQ ID NO: 152268 - DNA, 459 bp, Enterobacter cloacae
atgaaggtttttgtcacagtaggtacaacttcttttgattcaatgattaaaagaattgatgagtacttttttggacgaaaagactatgaggtaacgttccagatggctgatggaaaatatatgcctcgtagcggtgagtactttggttttactgatgatatccaaagttactatatcaattctgatttaataatcacccactccggagctggtactatttattctttggttgaaaaacgaaagaaaattatagctgttccaaatttagaaaggatagacaagcatcaaagtgacttagcatgttatatggagagattcggttatctcttagtatggtgggattatatcaattttgaagatttaatgaaaaggatcgaaacttttgtacctaacgaatatcaaaagatccctttcaataagtatgacgcaatagcggattatattaactcattgccttaa

SEQ ID NO: 152269 - DNA, 495 bp, Enterobacter cloacae
gtgtttttcaataaaaaaactaagcaagtattgatgtttgtttatggcgaaggtgggcatgaagctcaaatgaatagatttgcgccgaaccttttaaataaacttgataattactatgctataacattatctgattctaagaaaaagccattatgggcagatgagcattttattactcaagagttcagaaataaatatgcttgggtaaatgtcctgaaaaatttagggccgttgaacatttttttaaagactttcttaattatacgtcggactaactgtcgtgcaattgttactacaggacccggtattgcgatttctgctgcaattgcagcgaaactactaaatgttaaaatcattcatattgaaacatggtcacgctttacaacacgctcattttcaggacgaattatgtatcatttggcttcaaaattttatgttcaaaatgagtctttattgcaattatatcctaaagcaattttttcaggaagattatga

SEQ ID NO: 152270 - DNA, 765 bp, Enterobacter cloacae
atgaatattgtaagccatgtacatggcggtgatattaaactcttgaaaggaagaaataaattattccatcgattgaaaaatcaacttactacatcaatttttaaaaaaagttccacaataatatgcccttcacccagttattcagaattcttgctcgcaaattttaaagcaaacgataaaaatattgtcgtatatccttctggaggcgtggataggtgctttaattataagggggcagttctaagatccaaagatgaaatagtgattggatatgctggaaggttggttcaatcaaaaaatgttgatctgataatcaaggcaatcaaaggaactgaaaagttaaagttatcaattgtaggagacggtgagcagaaaaatgagttgatggcgatcagcaaagatgtaaatgttgaattcatcaaaccattacctcataccgaacttgcttcttggtttaaaaaaatcgacctgctaatttatccttctgaaagtgaaagccttggattagttcctttggaggctatggcttgtggtgtatactgtgttttaacaaaaatacctgcttttaatgaattcaaaagccaggggttgaatttcttacaaattgataattttgaatctgacgcgattcgagacgctattgtgaaattttcccagtttggggacgatgaattaaataatataaacaaatgcaatagtgaaattgttattcaaaaatatggagctgataatgttaaagaggtgctaaaaggtgtttttcaataa

SEQ ID NO: 152271 - DNA, 378 bp, Enterobacter cloacae
atgtgtgatatgcctgcagtctttggtcaggagcagcgaaaggcccgcaaagagcataagtgctgcgagtgtggagtcatagttaagtcaggcgagcattacacgtattcgcacggcgtctgggatggaagcggacagagtttcaaacaatgcctcgactgtgcagaggtatcgagcgccgcagccgcatcagttgatgacccagaggaaggcccggcgtttaccgggttgcgcgaatggttcatgggctactcatgtcgcgaatttaacggtgatgaactggttaaaagattcgcctctgacctgaatgtagacgaaaacaaaatccgcaaagttttgcgaatggggccagccaatgttcaggataatccagcctaa

SEQ ID NO: 152272 - DNA, 240 bp, Enterobacter cloacae
atgttcaggataatccagcctaacacctggtacgccgatgatttcggggcaccctgcaaaatcctccgcgctacccacgaagtaatccactacatccgcaacggccgcacctgcattgccagcatgggccgctttaatcaggatttcgagccgctgaccaaagcagaggccgagcggatcgccgaagaaatcgaaacagcagaacacctgaagaagttgcgcgcccagcgtgcggcatga

SEQ ID NO: 152273 - DNA, 1752 bp, Enterobacter cloacae
atgaaattcttagagaatatcccgtcttacctgtttttcaccggtaagggaggtgtaggcaaaacttcgatttcctgcgcaacggctatacgtctggctgaactgggaaagcgtgttctgcttgtcagtaccgacccggcttccaatgtcggtcaggtattcgatcagactatcggtaacactatccagcccgtgactgctgtgtctggtctttcggctctggagattgacccgcaggacgccgcccagcaataccgcgccagaatcgttgaccctattaaaggtcttttgcctgatgacgttgttaacagcatcagtgaacagctttcaggagcttgtacgacagagatcgctgcattcgacgagtttactggcttactgactgacgcttctctgctgacccgctttgatcacatcatttttgatactgccccaactggccacactattcgccttcttcagcttcccggagcctggagcagcttcatcgaaagtaacccggatggtgcttcctgtcttggtccaatggctgggctggaaaaacaacgcgagcaatatgctcatgcggttgaggcattatccgatcctgaacgaactcgccttgtgctggtcgcgcgattgcaaaaatcaacactgcaggaagtcgctcgtactcatgacgaattatcagctattggccttaaaaatcagtatttagtcattaacggtgtcctgcctgcgagcgaagcagaacgtgatgcactggccgctgcaatatggcaacgggagcaagaggcgctggcaaatcttcctgccgggttatctgatttgccgacagacaacttatacctgcagccgctgaacatggttggtgtatccgcattgaaaggcctgctcaacgaacacgctgagataacatcgcttcctgaacaaagcccacagaacaagccagagaatatgtcgttgtctgtcctggttgatgatatcgcccgcagtgaacacggtttgattatgctgatgggcaaaggtggtgtgggcaaaaccacaatggctgcggctatcgccgtcagtctgacggataagggttttgatgtgcatctcaccacctcagatcctgctgcacatctcagtacaacgctcaatggcagcctcaaaaatctgcaggtcagccgaatcaaccctcacgatgaaactgaacgctatcgtcagcatgttcttgagacgaaaggcagggatctggatgaggctgggaaacggctgctcgaagaggatttacgttctccttgcacagaagagattgcggtgttccaggcgttttcacgcgtaattcgtgaagctggcaaacggtttgtggtcatggatacggcacctaccgggcatacgctattactgcttgatgctaccggggcttatcaccgtgagattgccaggaagatgggggataaaggtcattttaccactccgatgatgcagcttcaggaccagaaacgtaccaaagttttgctggtcactctgcctgaaaccacacctgtactggaagcggcaaacctgcagtccgatcttgaacgtgcggggattcatccctggggctggattatcaataacagcctttcgattgcacagacgcaatcgccgctgctttgccagcgcgccctacaagagcgtcctcaaatcgaggttgtgaaaaaccagcatgcaagccgcatagcgttagtaccggtaatggctgcagagcccactggcatcgagaaactcagagagctggttgtttaa

SEQ ID NO: 152274 - DNA, 3006 bp, Enterobacter cloacae
atgcccgttgattttttgaccactgagcaggttgagagttatggcaggttcactggcgaacccgatgaacttcagctggcgcgttattttcatcttgatgaagcggataaagaatttatcgggaaaagccggggtgatcacaatcgacttggtattgccctgcaaatcgggtgtgtgcgttttctgggcacttttcttactgacatgaatcatattccttccggcgtccggcattttaccgccagacagctcgggattcgtgatatcaccgttcttgcagaatacggtcagagggaaaatacccgccgtgagcatgcagcgctgatacgtcagcactatcagtatcgtgaatttgcctggccctggacatttcgccttacccgtcttttatatacccggagctggataagcaacgaacgtcctggcctgcttttcgacctggcgacagggtggcttatgcaacatcgtattattctccccggagccaccacgctgacccggttgatttcagaggtaagggaaaaggcgacgttgcgcctgtggaacaaactggcactgataccgtcagccgaacagcgttcacagctggagatgctgctggggccaactgattgcagccgcctgtctttactggaatcactgaaaaaaggccctgtgaccatcagtggtccggcgtttaatgaagcaattgaacgctggaaaactctgaacgattttggcctgcatgctgaaaacctgagtacactcccggctgtgcgcctgaaaaatctcgcacgttatgctggtatgacttcggtgttcaatattgccaggatgtcaccgcagaaaaggatggcggttctggttgcctttgtccttgcatgggaaacgctggcgctggatgatgcactggacgttctggacgccatgctggccgttatcatccgtgacgccagaaagattgggcagaaaaaacggctccgctcgctgaaggatctggataaatctgcattggcgctcgccagcgcatgttcgtacttgctgaaagaagaaacaccggacgaatcgattcgtgctgaggtgttcagctacatccctaggcaaaagctggctgaaatcatcacgcttgtccgtgaaattgcccggccctcagacgataattttcatgacgaaatggtggagcagtacgggcgcgttcgtcgtttcctgccccatctgctgaataccgttaaattttcatccgcacctgccggggttaccactctgaatgcctgtgactacctcagccgggagttcagctcacggcggcagttttttgacgacgcaccaacggaaatcatcagtcagtcatggaaacggctggtgattaacaaggaaaaacatatcacccgaaggggatacacgctctgctttctcagtaaactgcaggatagtctgagacggagggatgtctacgttaccggcagtaaccggtggggagatcctcgtgcaagattactacagggtgctgactggcaggcaaatcggattaaggtttatcgttctttggggcacccgacagacccgcaggaagcaataaaatctctgggccatcagcttgatagtcgttacagacaggttgctgcacgtcttggcgaaaatgaggctgtcgaactcgatgtttctggcccgaagccccggttgacaatttctcccctcgccagtcttgatgagccggacagtctgaaacgactgagcaaaatgatcagtgatctgctccctccggtggatttaacggagttgctgctcgaaattaacgcccataccggatttgctgatgagtttttccatgccagtgaagccagtgccagagttgatgatctgcccgtcagcatcagcgccgtgctgatggctgaagcctgcaatatcggtctggaaccactgatcagatcaaatgttcctgcactgacccgacaccggctgaactggacaaaagcgaactatctgcgggctgaaactatcaccagcgctaatgccagactggttgattttcaggcaacgctgccactggcacagatatggggtggaggagaagtggcatctgcagatggaatgcgctttgttacgccagtcagaacaatcaatgccggaccgaaccgcaaatactttggtaataacagagggatcacctggtacaactttgtgtccgatcagtattccggctttcatggcatcgttataccggggacgctgagggactctatctttgtgctggaaggccttctggaacaggagaccgggctgaatccaaccgaaattatgaccgatacggcaggtgccagcgatcttgtctttggccttttctggctgctgggataccagttttctccacgcctggctgatgccggtgcttcggttttctggcgaatggaccatgatgccgactatggcgtgctgaatgatattgccagagggcaatcagatccccgaaaaatagtccttcagtgggacgaaatgatccggaccgcaggctccctgaagctgggcaaagtacaggcctcagtgctggtccgttcattgctgaaaagtgaacgtccctccggactgactcaggcaatcattgaagtggggcgcatcaacaaaacgctgtatctgcttaattatattgatgatgaagattaccgccggcgcattctgacccagcttaatcggggagaaagccgtcatgcagttgccagagccatctgtcacggtcaaaaaggtgagataagaaaacgatataccgacggtcaggaagatcagttgggagctctggggctggtcactaacgccgtcgtgttatggaacactatttatatgcaggcagctctggatcatctccgggcgcagggtgaaacactgaatgatgaagatatcgcacgcctctccccgctttgccacggacatatcaatatgctcggccattattccttcacgctggcagaactggtgaccaaaggtcatctgagaccattaaaagaggcgtcagaggcagaaaacgttgcttaa

SEQ ID NO: 152275 - DNA, 174 bp, Enterobacter cloacae
atgattcaattatttttactgcgattggttaggtctttttggctggtttgcttactcgtcgtgagtgtgttgctcatcatttcggccattagcaacttaatatcaccggtcactcatgatgatttcgtggcgtttgccagcctcccggtagtcaacatagccatgatcgtttag

SEQ ID NO: 152276 - DNA, 420 bp, Enterobacter cloacae
atgaaaaaccttatacctacggtactcaactcacctaagagcctgctctttgtctcattgttcctgcttacggtcggccagatggtcgatcttcaggtcgcggtgtccggggcaccgcagtggcagcgcgtggtcagtggtctgtttttttatattcttttccctgtacttttatactaccgcctgtaccgggcggtgctgccggtactgtccgatcggcgtcagctgcgcatcatgcactgtgtcgccagtttcttcggaactacactggccagccagttcattatccgcctggtggcgtattcaaaaccctggccgctgctgcatctgctgctgaccatcgccaatatcgtgctgaccataacgactatagccctgctggctcgtcacttttttcgactgctacgcgcgcagccttaa

SEQ ID NO: 152277 - DNA, 1140 bp, Enterobacter cloacae
atggtcttgcattccacacgctggctggcgctcagctactttacctacttctttagctacggtatttttctgcctttctggagcgtctggctcaagggaattggtctgacgcctgagaccattggcatcctgctgggcgcggggctggtggcacgtttcctgggtagcctgctgattgcgccccgcgtcagcgatccctccttactgattaaagcggtgcgaattctggccctgctgacgctggtctttgcggcctgcttctgggtcagccatcagtttgcctggctgatggtggtaatggttggctttaacctgttcttctccccgctggtaccgctgacggatgccctggcgaacacctggcaaaagcagatcaccatggactatggccgcgtgcgcctgtggggatcgattgccttcgtgatcggctctgcgctggtcgggaaactggtcagcctctatgactatcgtgccattctggcgctgctaacgctcggcatcgcctcaatgctgctcggtatgttgctgcgtccgtcggtgatgccgcagggcgaaagccgccatcaggagagcgccggctggcccgcctggcgctcgctggtggcgcaaagctggcgtttcctggcctgcgtctgtctgcttcagggggcgcatgcggcctattatggcttcagcgccatctactggcagggggcgggttactcggcttctgcggtaggctacctgtggtcgctcggcgtggtggcggaggttattatcttcgcgctgagccaaaaactgttccgtcgtttcggggcgcgtgacctgctgctgctttccgccgtgtgcggcgtggcgcgctggggcatcatgggctggacgacggagctgccgtggctgattgtggcgcaaattctgcactgcggaaccttcaccgtctgccatctggcggcgatgcgctacatcgcggcgcgagagggtggggacgttattcgtcttcaggcggtctattcagcggtggcgatgggcggcagtattgcggtgatgaccgtatttgccggtttcctctatcagcacctggggcacggtgtgttctgggtgatggcgctggtcgctttaccggccatcgttattcgccctaaagtcgctgctcgcacgtaa

SEQ ID NO: 152278 - DNA, 1224 bp, Enterobacter cloacae
atgccaaaacttaccgatatgcagatccgagcgtggatcaagagtggcgaacgattcgagggtaggtccgatggcgaaggactttatctccgctttcgcaaagaagacaaaactccattctggcgttttcgatacaaacttgccggcaagcctcggaccttaatgattggttcttattctgttatctcgcttgctaaagcaagggagattgctaaggaacttgcagcccgtgttgctcttgggcatgacgtggctgcagagaagcaacaacgcaaggctgaagcgatagcgaaaattgaagctgaaaagaacgctatccacgtttctgaacttgcagctgagtattactctcgtcagatcgagcctacgtataagcatccagagcttttcctcgctagcctgcaaaagaatcttgtggccttaattggaaaaatgaaggtcgaagaagttcgcccacgccacgttgatagtgttcttcaagacgttcttaagcgtgggtcgcccacagtcgctaatgacgttctccgtatgctcaaacgcctgtttgacttcgcggtcgttcgaggcatgattgatgttaatcctgctatatcattcggctcaaaagatgctgggggaaaggagaagggaagaaagcgggcattgagtcgtgatgagttaataatgttctttaaagcgctgcgtagtgggcaaggaatcagcagggaaaatgagctagtttttaaacttattttggcgctgggtgtgcgcaaaatggagttatgtgctgctgaatggactgagttcgatcttgagaagggcgtctggcatcttcccggctcaagagcaaagaatggcgatgacattgatataccattggcgcagccggtgatcgagtggataaaagaaataagactttttgctggaaacagccgttggtttatacccggcaggagagccagtagcagaactcacattagccgagcaactctcaatatggtcatgccgtctgtgttgagggaaatgcatggaatcgagccgttcagtattcatgacttgcgccgtactatgcgcactcaaatggcggcgttaggcattgatcctttgatagccgagcgttgcttaaaccataaaatccccggcgttgaaggtatctataaccggcaccagtacttcgaagagagaaaagctgcattatcgtgttgggccgaattaatggtgacgttggaaagaggggataactga

SEQ ID NO: 152279 - DNA, 651 bp, Enterobacter cloacae
atgaaagacatcttgaggaaatcaccaattgagaggttatgtgcttctgtatccatcacgccacaggaaatggcattggcactcgccggtttgaatccactaatgcgtctcagtgatgtaccccctgagcactctgactatgttgatcttactcgcaaatcaattgcgagggcgctaaaagttcacagggataaaaaaataactacagatgaagcttgtaacgccttagacatttttttagctgctttcccgttcgttgaagaaagtacacccgaagtaatcgctcaaaaagttaaagaagctattgatgatttgcgcggcactaaaggatgggaggagaaggctcgtaatttaggtgggctgcagcttataaattacataaaagaaacaaacagaagtggacgtggccaacatcgtaaacaagatgaacaggaaggaacgatgaagatgatgggggttctcattcatctcttagttaaaaagtccggggcatcctcatatgttaactcgggaaagcccaatataagtgcaatttatagtgacgtattggaattgttagaatctgaaggtttatcaacgaaaggcataagccgagcggcatttgcagcaaaggcaaaacaggcgctattagcgatgtatgctgcagaatag

SEQ ID NO: 152280 - DNA, 216 bp, Enterobacter cloacae
atgttggaaaaacaggaagtttactcagctattcctactgaaggttacatccgtcgtttccgtatgcctgcgttgcttggggtatccatgcccacaattgatcgttgggtcaaaaatggaatcttgccacgtcccgtcaagttaagtgacaacgtgactgcttttgatgcgctagagattaatcgctggctagaagagcggcgcaaagctaactaa

SEQ ID NO: 152281 - DNA, 627 bp, Enterobacter cloacae
atgaaatcaaataatggccttaatggtcagggcttccctcaccctgaaaactgtagtgatgatatttccgttatcaattttgaggggctaaaagttcgcattgttaagctcaatggtgaaccgtggttcgttgcaaaggatgtttgcgcggcgctggaattatccaattcgcgtatggcgttgcaggctctggatgatgacgagagaaataccgtaactttaacttacggtattcgtggaaacccaaatcatagtgctgtctctgaatctggtttctacaaactgatcgcccgtagccgcaaagctactacggcaggcacattcgcccatcgtttcagtaattgggtatttcgcgaggtgattccctcaatccgcaaaactggctcttatggcgtgccgttcgtgttcctgaacgattttagccggcgtatggcagcctatcagcaggaggccagtaaacgcggttataagttgcagcaatgtaagggtgctaaagaggctcttgagcgcgaggagattcaactgtggcgtaagtatcagcctgagctgttaggtgaagatgttcacgagccgttcactgaggttcgcccagctacggatggaaacaacaatcgggttcatgaataa

SEQ ID NO: 152282 - DNA, 123 bp, Enterobacter cloacae
atgacaacggttatcccgatttgccgtctcggcacttttctcgagcacgtatctgagcaattaaatagcgcgcgatattgttttgcccgccagtcattaagggacggggaggagaaattatga

SEQ ID NO: 152283 - DNA, 669 bp, Enterobacter cloacae
gtggaaaatagatatctgggggtgattactggtgatctatacaggtcaacagcaggcttagagagggggatttcttatcaaaacattatgagtttgcttcgaaaaaaaatattacaatcaaaacgatatgatattgaaggtatcgaattttttcgtggagactcatttcaaatatcatgcaatgacccagcatatttaattgaaattgcggcttatttgagaagttttttgttgtcactttctgaggacattgatgacaataaatatgatgctagaatgtctttgaatataacgaagtttaaccgtttttctggttataatagttctgtatatgaaaaggcttttattgaatctggtagggcattagatgatatgccaaaaaacagaatgctaatattttcgtccgatattcaattgctgacaatatcattgaatagttctgttttattacttgataccttgtttagtatgttatcaaaacagcaggcagagattttaaaactcagcatagagaatggacgtttagatatgccttacttagtgcatgaaacgaaaaaggctaggcagacaatacataaactagtaacgcggtcaggtgttgaaaatattttagagtatcttaggctaagtcagcaagagatctcatatcatataaaagggagcatataa

SEQ ID NO: 152284 - DNA, 618 bp, Enterobacter cloacae
atgatggagcaacgcacccctgaatggtttgctgcgcgctgcggcaaggtcactgccagtcgactggctgatgtcatggcccggactaagtcgggctactccaccagccgccagaactacatggccgagctgatttgccaacgactgaccgggaagctggaggaagttttttcgaatgctgcgatgatgcgtggcactgaacttgagccagtggcgcgcgaaatgtacgcgctgaatgagttcgatgcagaaatcactgaagttggactcattgatcacccaaacatacccggattcgcagccagcccggacggacttgttaacgacgacgggcttatcgaaatcaaatgccccaacacctggacccatcttgaaacgctgaaaactggcgagccaaagcgccagtacatgctgcaaatgcatgcgcagatgatgtgtaccgggcggaaatggtgtgatttcgttagtttcgatgatcgcctgccgcctgacctcgcctatttcaagaagcgcattcatttcgatgaagagctggcgcacgaaatcgagtctgaggttaagagcttccttgcagatctggaatctgaaattcagaaaatcacagagcgtgcagcatga

SEQ ID NO: 152285 - DNA, 153 bp, Enterobacter cloacae
atgactcacgctcacgacgacatcagggttggcactctgtgcattcccttcattggtaacggctggctaatgccatggggtgaagtggtcagcaatccattaaaagtgcagcggctcgctgatgaatttcgggaaaggcaggaggcggcatga

SEQ ID NO: 152286 - DNA, 246 bp, Enterobacter cloacae
atgagcgaaatgaccttaatcgtgcccaacgactgggtaaccgaagaaaagctcgtcgagattaccggccttcgcccgggcactatcgagcgggcccgcaaaaaatgctggatggtcggccgggaataccttcacgtctcaccggacggcgtgccgaagaaaaacagcgaatgcatgtacaaccgtaaagctgtcgaccagtgggttgagagcatgtcaaagaaacagccgggtgcgcgccaatga

SEQ ID NO: 152287 - DNA, 282 bp, Enterobacter cloacae
atgttaaacaaaaacaaatttgaaaaggtgttggcgagagtcatcaacaagaacagtaaccgatgctcagtgtgcaaaaagccgttttctgggccttgccacacatttggtgggttggatgcagatagtaaggtgcagaacgtcggtcagtgctgccgaagcaacatagtggacctgaggcatggtggtgtctataccaccgctccggtcggtactgatgaaggcgagcgccaggcccgtgagcttatggcttctcatccttgtgctcgtcgtatgatgtag

SEQ ID NO: 152288 - DNA, 999 bp, Enterobacter cloacae
atgattaagagcataattcagcagggagctcgtcagtttggctacatgccggtggaaaagctcaactacgcgagaaacattgccaaacgtcttgatgagcatcgggaactggtcgaagccatagccagcaagaccaccttattgtcgcagtgtggatggcacatagggcatcttgctacacaggatgacttcctgatgcgactctactaccaggtgcattccaagtggcctgaggaagatccatttgtaaggcagaggcctccaattcttgggccttcgaccctcccagaatatcccagcgaacttaatactcacctcctcaatagggaaggtaaaaaaaactcgcacttggcgcaggaagcagaatttgactatggcgaagccaagcaggggcacttctacttttactacatcggtgatgtgaacggttttgctattggaaagcgtgactgggttcctgtcagcgttctgatcggtttggtatccggtcgccaatggctgctccagaagctatctgatgggacttggatagatagagagtctccactctgggttgactgggttaatgctaatctcgacgcggtgatgaggactgtagccccgagcagggaaaggttctctcgcaacattcctgatgagctgcacttagcagaggagaactattacgccgatgttcaggatgttgatgtcgaagagcgcgtgatggcccacacccggttcgacacaatgacgcatgaataccttcgagtgatggcaattacgtgccctgtaaaagccactacagcattcgctcttgcggtccctcctgaaatttatcgttatcagcagacagcgacgtcaaaggccctgaacaaggccactggtgaggcaatagtctctgccaacaagatggctgttgcctggttcaagcataacggttttgaagtcgatgaagagcagcaactcgtgaaggtcccagactaccagccactgttctttgtcggcagtcaagatttatag

SEQ ID NO: 152289 - DNA, 486 bp, Enterobacter cloacae
gtgagccttttttcgctgcaaataatcttcatcggcacgaattttatcccaccacgttttgaataccgcagcggcctctgcttttactggatcgtgatcgaggggtttgacctggcgcttctcatcatacttttttccgcctttatgattggcgtatcgccgggcacgagtgtatcccatctgtatgaatttacgcgccatatccatacctacaaaatcgttattcctgcggtactcttcaaagagggcgtagatctcttctgccgaacgcgctgcgacttcagcatttttataacgccagtgtggaaggatttcgcttttataaggctcgaccatcaatacgccctgctcaccccggcccacctgataccgttcgggatgttcgcgaaaattaatattggcaaaatcttgttgataatcaaagggacgagtcaaagcggcaccattgttaaaattgttttaacaattgtaagccggataaggtga

SEQ ID NO: 152290 - DNA, 207 bp, Enterobacter cloacae
atgggatttggtgtggacaagatagatcggcaaagttggctcgttaaattcaggcgagcgaagtgtcaggacactttagacacgatgcgggatgcggccattcgcaactatgaagggaatattcgtgttatcgcggatattgtattggcccatgaggcgagagagacagaaattgaaaaagggatgttttgtcgaatagttagatag

SEQ ID NO: 152291 - DNA, 300 bp, Enterobacter cloacae
atgggctatcaggtggtgattatgaaaaagagaatacttcatctgcccgtaaaaaagatttacttcgatcagatcaaatctggagaaaaaccagatgaatatcgcctcgttacagactactggataaaaagactagaggggcgcgagtatgatgaagtccatgttaagtgtggctacccaaaggctggagatatgtccaggatagagattcgtccttggcgtggcttctcaaggaacgtcataacgcacccgcattttggagattgtccggttgaagtattcgccatccatgtgaattaa

SEQ ID NO: 152292 - DNA, 408 bp, Enterobacter cloacae
atgttgattgatgatgcacaagcgcaggcgactgcggccatgaacagaagaagcgaacagaattcgccggggctggttgatggtgttgaaattgatacggtggccagtgggcgaacgaaagcggaaatgtcgttgacgatggacgcagtgataagccgcgagaacctgatgctggcgtatcagcgggtggtagaaaacaaaggtgcggcgggggtggataacctcagtgtgctggagttaaaaccatggctgaaacagtattggccgagcgtcaaaagtacactgatggcaggcagttatctgccacgggcaatccgcaaggtggatatcccaaagccaaatggcgatgtgagaacactgggtatcccaaccgtggcagaccgatttatccggcactgttgcaaatag

SEQ ID NO: 152293 - DNA, 1431 bp, Enterobacter cloacae
atggccgcatttatgacggaagactttttactcaaaaatgagattgcccgcatgctctaccacaggtatgcggcagtaatgcccatttacgacttccattgccacctgagcccgaaagagattgcgcaggatcgccgttttgaaaatcttgggcaaatctggcttgaaggggaccattataagtggcgagctctacgtactgcgggggtagaggagaggctcattaccgggaaagaaaccagtgattacgaaaaatatcttgcctgggcggacacggtgccaaaaacactaggtaacccactgtaccactggacgcacctcgagttacgtcgtcccttcggcatcacgaatacgctgctggatccgcaaagcgctgatgctatttgggaacactgcaacgcgaagctggctaccccagagttttcggcccgcgggatcatgcgacagatgaatgtaagaatggtcggcactaccgacgatcccattgacgatttgcggtatcaccggcaaatcgccgaggatgcaagcgttgatatcgatgttgcaccgagctggcgtcctgaccgggtctttaaaatcgagctggagggttttgttgattatttgcataagctggaagctgcagcggatattagcattacccgcttcgatgatctgcgctgtgcgctgcgccgtcgtctcgatcattttgttgcacatgggtgccgcgtgtcggatcacggtattgaaacggtgcgttttgcccagataccgaacgacgcgcagctcgacgctattcttgctaaacgtctcgcgggcaatgaactcagcgagctggagattgcgcaattttctacggcggttttggtctggttgggtcgccagtatgctgcacggggatgggtgatgcagctgcacattggggctattcgtaacaacaatacgcgaatgttccgtttacttgggccggacagcggttttgactcaattggcgataataatatcagtcagccgcttgcccggttgctcgatagcatggatatgaccaacgagctgccgaaaacgattctttactgcctcaatccacgtgataacgaagtgctggcgacgatgattggcaacttccaggggccgggtatttccgggaaggtacagtttggttctggttggtggttcaatgatcagaaagatggtatgttgcgccagctggaacagttatcacagatggggttgttaagtcagtttgtcggcatgttgaccgactctcgtagttttctgtcctatacccggcatgaatatttccgacgtttattgtgtaacctgattggccgatgggctgaagagggtgaaatccctgatgatgaagtaatgttgagtcgtatggtgcaggacatttgtttcaataatgctcagcgctattttacggtggatcaggcattatttgtcagctaa

SEQ ID NO: 152294 - DNA, 1470 bp, Enterobacter cloacae
atggaacaaaatatcgttagcggctcgctttccgctacccgtccgcaatgggacggttcgcgtctggtttcccgtatcgtccacctgggatgcggggcgtttcaccgtgcacatcaggcgttgtttactcaccatttgctggagtgtagcgacagcgactgggggatctgtgaagttaacctgatgccggggaacgatgcacggttgattgaaaaccttagagcacaaaatctgctttataccgtcgcagaacgtggagcggaaataacagaacttaagatcattggctcaatgaaagaagctctgcaccctgaatttgatggatgtgacgggattctgaaagccatggcgcgtcccgagacggcgattgtttctctgacagtgacggaaaagggctactgcacggaggcagccagcggcaagttggatctgaacaaccctctgattaaacatgaccttacatcaccacaacaacctaagtcggctattggatacatcgttgaggctttagacatgcgtcgtctgcaggggataaggccatttaccgttctgtcatgtgataacgttcgagagaatggtctcgttgccagagcggcggttataggactggcaaaggcacgttcgacggagctggcgacgtggattgcgcaaaacgtaacattcccttgtaccatggttgaccgtattgttccggcagtaacggaagagacactgcaactgattgccgatcagcttggtgtgttcgatccctgtggtatagcctgcgagcctttccgtcagtgggtgatagaagataactttgtcaatggcagaccggagtgggacaacgtcggggcacagtttgtcgaagacgtcgtaccatttgaaatgatgaaactacggatgctgaacggtagtcactcttttctggcgtatcttggctatctggccggctatgaaacaatcgccgataccatggctaatccagaatatcgtcaggcggtacggaagttgatgctgaatgaacaagctcccacgttgtcgatgcctgagggcactgatttatcgggttacgctgatttactgctctcccgttttaccaacccttcactcaggcaccgtacctcgcagattgcaatggatggcagtcagaaattaccgcaacgcctgcttgatccaattcgtatccatttggcaaagggaaccgatcatcgtcatctggttcttggcgttgctggatggatgcgctacgttcgtggtcttgacgataaaggacaaaagatagatatcgtcgatccactttttgcccgctatcaggctatccatcagcagtatcatagcgcgcaagaacgtgtacgtgcgctactggcaattgagtcaatttttggtcgcgatctgccagaaaatagctcgttcgtaaatgcggtcatggagacgtacgtccggctggaacagcgcggagcacgcgcggtgcttgaatcgctacagtga

SEQ ID NO: 152295 - DNA, 1185 bp, Enterobacter cloacae
atgaaacaaacctggcgttggtatggccctaatgacccggtaacgcttgccgatgtacgtcaggctggcgcaagtggcgtggtaaccgcattacaccatatcccgaatgggctggtttggtctgttgaagagattctggagcgtaaaactattgtcgaagaggcggggctcgagtggtctgtggtcgagagcgtgccgattcatgaggatatcaaaacccacagtggtcaatacgatctgtggataaacaattatcaacagacgctgcgtaacctggcacaatgcgggatctacaccgtttgctacaacttcatgcctgtactggactggactcgcactgatcttgaatatgttttgccggatggttcaaaagcgttgcgttttgaccagatagagttcgcagtgtttgaattacaccttttacaacgccagggggcagaaactgattacacagcagaagagatagagctggccaatcagcgcttcgctgccatgagtgaagaagataaagcacgcctgactcgcaatataattgctggtcttccgggagcagaagagggctatacgctagatcagttccgcgcccatctggcgacttatcaaaatattgataaagcaaaattgcgtgacaactttgcgtatttcctcaaagccatcgttccggttgccgaagcgaccggcgttcgtatggcggtacaccctgatgacccgccgcgcccgatcctgggtctaccgcgtatagtctccaccattgaagatatgcagtggatggtggagaccgtcaacagcatggcgaatggtttcaccatgtgtaccggctcttacggcgtccgtgcggataacgatttggtcggtatgattcaactgttcggcccacgtatttacttcacgcatttacgctcaacattgcgtgaagataacccaaaaacgttccatgaagcggcgcatctgtatggtgatgtggacatgtatgccgtggtgaaggccatcgtcgaggaagagtatcgccgtaaagccgaaggctacgaggatctgatccctatgcgtcctgaccatgggcatcagatgctggacgatttgaaaaagaaaacaaatccgggctactcggcaattggccgtctgaaagggttggctgaagtacgaggagtcgaactggcgattcagcgcgccttcttcagtcattaa

SEQ ID NO: 152296 - DNA, 1266 bp, Enterobacter cloacae
atgaataaaataacacgtttaacggctattgctatagccgtggcctcggtgtgtacctctgtgttagcggaacaaatctctgacgatgaagcagcattaagatttagattaaaaaatgagttgcgcagggctgacaaacccagcgccggaactgggaagaatatatatgcctgggtgcagggagggcttgttgattttaatagtggttattactctcaatttataggggtagagggtggtgcctattacgtttataaacttggtgcccgagataatatgagtacgcgctggtacttagatgaccatgaaagttttggctatgcacttggcgctctaaaaataaaagctggtgacaatgttagattgaaaatagggcgttttggaacggattatagttacgggagtttaccgtggcgaatcccccttatcggtggcagttcacagcgtacgttacctacagtttccgaaggcgctttaggttatttcgctccgacagagaattttgagctttgggcaatgtggcgcacaagagtatttcaatggaccgactcggcaaccggtattcgtgatgaaggtgtatataacagtaagaccggaaaatacgataaacatcgaactcgctcatttttaaccgccagctggcatgatgatcgtagccgttattcactggggggctcagtacagagagatgtctctcaccagctgcagagcattattgaacaaacaattccgttgtcgtcgggatatgccctgaagggcgagctattgggtttctatgccggacttgatgggttgagccgctcgtccagccagccgaatgagactgcattggtcagcggtcagttgacctggagtgcgccgtggggaagtcttttcgctagcggtggatatctccgccattcgatgaatggtgcggtggttgatacagatattggctatcccttctcactcagcctcgatcgcaaccgcgaagggatgcagtcctggcagatgggggccaactatcgactgacaccgcagctgactttaacactggcaccagttgtcacccgtggctacgaatccagtcagcgagatgtacaaattgaaggtatggggctgctcagtgcggttaactatcgggttgccgaggggccactcagcgggatgaatatattccttgccgccgataagggccgtgaaaagcgcgacggcagttcgctaggtgacaggcttaattactgggatgtgaagatgagcatccagtatgactttatgctgcggtga

SEQ ID NO: 152297 - DNA, 1374 bp, Enterobacter cloacae
atgagccagcagctctcctggcgcgccatcatcggctatagcctgggtgatgtcgctaataattttgccttcgctatgggtgcattatttcttctgagctactacaccgacgtcgcaggcgtcggtgccgcagccgcaggaacgatgctgctgctggtgcgcgtttttgacgcctttgctgatgtctcggcggggcgtattgttgacagcgttaatacgcgttggggaaaattccgtcctttcctgcttttcggctcagcacctttaatggctttcagcgttttggtgttttgtgtccccgcagagtggagtcacagtagcaaagttatttacgcgtatattacttatatgggactggggatttgctatagccttgtgaatatcccttatggctcacttgcaacggccatgacccaacagccgcaatcacgtgcccggcttggtgctgcgcgcagcatcgcggcctcactcacctttgtttgcctggcgtttctcattgggccacggattagtggtgccagtccgactgagatgcaggatgtttatctcttctggactattatcctggcagttgcaggtactgtgttgtatttcgtctgttttaaatcgaccaaagaaaatgtcgtgcgtatcgtggcgcagccttcgatgaagataagtttacagacggtaaagcaaaatcgacccttgattatgctgtgtgctggggcactgtgtttacttatctcgacctttgcggtcagtgcatcttcattattttatgttcgttatgttttaaatgatgctggacttttctcggtgatggtattggttcagatgttgataggaactgttgcctcggctcctatggttccgcgattggtcactcgagttgggaaaaagaacaccttcctgattggctcgttgcttggaactagcggttatttattgtttttttatatgtcggctcattccgttcctgttgcgctcaccgcactggccatcgcttctgttggtcagggaatatcgatgacggtgatgtgggcactcgaggcggatactgttgagtatggcgagtatctgacaggtgtgcggattgaggggttaacctactcactgttttcctttactcgcaagtgtggtcaggccatcggtggttcaatcccggcatttattctgggactcagcggatatattgctaatcaggcacaaacgccagaagtcattatgggtatccggatttcgattgcgctggtaccttgtggcttcttattattagcatttattattatgtggttttatccgctaacagatcagaaattcaaagaaattattttagagattgatactcgtaaaaaaacgcaacaaaaactgatcgacgactttaaaaaataa

SEQ ID NO: 152298 - DNA, 1812 bp, Enterobacter cloacae
atgttacgtcctgttgaaacttcaacccgagaaatcaagaaactagatggtctgtggtcattctgtctggatactgctgattgcggcatggcacagcaatggtggaagcgcccgctttctcaaagtcgtgcgattgcagtacctggtagctttaacgatcagttcgccgatgctgatattcgcaattacgttgggaacgtctggtatcagcggcaggtatttattccgaatgggtggggtaaccaacgtattgttctacggtttgacgcggtcacgcattatggaaaggtctgggttaacgataactttttgatggaacatcagggtgggtataccccttttgaggctgatattagccatcttgtttcaccgggtgaaaatgtccaggtcacagtctgtgtgaataacgaactcagctggcagacgattcctccgggaatagtgacatgtgatgataatggtaagaagcaacaatcctatttccatgatttctttaactatgccggcattcatcgcagtgtcatgctctataccactccacgctctttcgttgaagatatcactgtggtgacccatgtcagtgacaatggtgaagaggccaccatttgttggcaagttacgggcaagggaaatattgctgttgaattacgtgattcggaacagcaacttgtcgcttcagggcaaggggctgagggccagttacgattgacttccccatgcctgtggcagcctggtgaaggatatctatataattttaatgtggttttgtctgattcggcagagcgtgatgaatacccgctgcgcgtggggatccgttcagttgaagtgaagggagaacagtttctgattaacaacaaacctttttatttcactgggtttgggcgtcatgaagatgccgacttacgagggaaaggatttgataacgtcctgatggtccacgaccatgcgctaatggaatggattggtgcgaactcatatcgaacatcacattatccctatgctgaggagatgctcgactgggcggatgaacagggcattgtcataatcgatgagacagctgcagtcggctttaacctgtctctgggcattggctttgatgcgtgcgaaaaaccgacgtcattgtacggcgatgacgcaattaatgatcggacccaactggcgcaccttcaggctattcgggaactcatcgcacgcgataaaaaccatccaagcgttgtcatgtggagtattgccaatgaaccggatacacgtcctgaaggggccagggaatactttgagcctctggcgatttcgacacgcgagctcgatccgacccgacctattacctgtgtcaatgtgatgttctgtgatgctgaaagcgatacgatcaccgatcttttcgatgtggtttgccttaaccgctactacggatggtatttacaaagcggcgatcttgagaaagctgaacgtgtgctggaaaaagagctgctggcatggcaggacaaacttcaccgccccatcattattaccgaatatggtgttgataccatggccggactgcattcgatgtacaccgatatgtggagcgaagagtttcagtgcgcgtggctcgatatgtaccatcgtgttttcgatcgggttagcgccgtggtgggtgagcaggtctggaatttcgctgatttttctacttcacaaggaattatgcgtgttggtggcaaccgcaaagggatttttacccgcgatagaaaaccgaaatccgctgctttcctgctgaaaaaacgctggactaccatggcatttggcgagaaacctcagcagggagagtcattatga

SEQ ID NO: 152299 - DNA, 609 bp, Enterobacter cloacae
atgggtaaaaaattatccggaatgtcaacgcgtaccaggatcctgaatgccgcaagagagtgctttgcagaaaatggttttcataacacgtcaatgaaaaccatctgcaaggccagcgacatgagtcctggaaccttgtatcaccacttcgtgtcaaaagaggccttgattcaggccataatccttgaagatcaggaaagagccttaacccgctttcgtcatccactcgaaggcgttggcctggtagattatctggtggactctatgattgacgtcacacatgaagattgcgctcaacgcgcgttagttatggaaataatggcggaggggatgcgaaatcctcaggtcgcggacatgctcaaaagcaaataccaaaccatcacagatttcctcgttgcacgtttcaacgatgcgcaggccaaaggggagatcggcaataatatcaataacagaaaggcggccaggttactgttatctctgacctatggcatcttgtccgatattgaagcagatgaaaattcacgggatgctgatttcgcaatgacatttcgcgatatgatcggcggaatgctgcatgtaggaaacaccgtcaacaaacaaggtacatga

SEQ ID NO: 152300 - DNA, 381 bp, Enterobacter cloacae
atgctgggtgcagtagagcgtcgcttcggtaacaggctgccgacatcccccgttgagtggctgacagacaacggttcagcctaccgttctcatcagacgcgtcagttcgccagaatggtaggactggagcctaaacatacggcggtacgtagcccggaaagcaacggaatggcggagagcttcgtgaaaacgatgaagcgcgactacatcagcatcatgccaaaacctgacgggttaacagcggcaaagaaccttgcggaggccttcgaacattacaacgaatggcatccgcacagtgcactgggatatcgttcgccacgggaatatctgcggcggcgaaccagtaatgggttaagcgataaaaagtgtctggaaatatag

SEQ ID NO: 152301 - DNA, 594 bp, Enterobacter cloacae
atggcagggaaaaggatgacgtccacagagatatggttacggcttataaacatcgggtcgttatacggtgacgcgatgctggagattgcgcagaggctgcttcgccaggcaaccgttgatgctgaagctgtcaacgcggcagggctttcgcccaaacatgccgtaaagttttttcgttcagcgagagtgagcttgaacgtagtctggaatggctggaacacaccgacaaccaccttctcacggcggatgatcctcgttttccgccattgttgcgttctatacctgattttcccggagcgctctttgtgcgaggccgcgtcgacgtgcttaatagcatgcagcttgcggttgtgggcagccgtgcgccctcgtggtacggcgagcgttgggggaaaatgctcagtgaacagctgtcccaatgtggctttacgatcaccagtggcctggcttgcggcatcgacggtgtggcacatcatgcggcgttgtcagcgaaagggcgaagtgtcgccgtgcttggcaatggtctttttagtctctatccgcgtcgtcatcacattctggctgagcaacttatcgcttctgagggggcgatag

SEQ ID NO: 152302 - DNA, 891 bp, Enterobacter cloacae
atgaacagtatagcaattcttgaagcagttaacactacctctctgccgtttcacggccagcatatcatcactgcgctggcagccggcatatcttacgtggcgatgaagccaatcgttgaaaatatcggtctggactgggctagtcagttcgtcaagcttaagaagcagggtgagaaattcgggtgttgtgatatcacaatcccttctcttgggggcttgcagcgcatgctgtgtctcccattaaagaaactcaacggctggctgttcagcatcaacccggcaaaagtacgcgatgacattcgtgaccgtctgattcgctatcaggaggagtgctttaccgcacttcacgattactggactaagggtgtggcggttagaagcgcgccggaaacctcggttgatgatcgcactccactgcgcggcatcgttaatcgcatcatgggcaagtacggcatgacttatcaggctgtttataaaatggtgcacaaagagtttggcgtaaaacacatcgacgaactgtcgccaaagcaaaccgcagaggccattgagtatctggccggaaaggttattgaaggtgagtttatcggtaaagaaaaacaccaaccggtaaagccacaattcaacgatgaagagttgatcagtctttgctatctccagctctggatggagaagagccagcgggttagccagcaactttacccggcaatgaaacaggcgaagtcagaatacgcaggaatgctttacgacatcgcccatgacattcgctatatgacaggggagaccaagaagattctgcttcgtgaagcgcagtccctggatagcagcaatattgtcgtgaagcatgcacagccaatgttggcaatgcttcgcggtgaggaatggactcactga

SEQ ID NO: 152303 - DNA, 753 bp, Enterobacter cloacae
atgcaacaatcttcatcaactgttgtaaatgtagcaaatcatcatcacgctgtcactatgtccagccgcgagatcgctgaactcactggcaagcgccacgacaatgtgaaaaccgacattgaaaaaatgctcactgacctcggggaagatatcctgaattttcaggacatctatttcgataagatgaatcgccagcaaatcgagtaccatcttgaccgccgtcacgtcgaatgtctgcttactggctacaacgcagtgctgcggatgaaggttattgaccgcatgcacgaactggagtcaggaaaaacgcagatggcgactccagctttggctgatagcctgctgtttatcgaggtgacatctcgccttctgcatctttcgccatcaggtactctcggcatgcttcgcaaggcagaggatgctcatcaccttccagagctgcttccagcctatacagtggattcagttgacgatagtggttccagtgacgcgacattcgcactgaccacgctcttgaaaatgaccgggatcaccagatcggctgcaagcgtaaacaagttgctggaaaaggccggtatcattcaaaaaatgaaacgtccaagcagcaaaggcggggagaaagagttctggaacgtgaccgaggcagggcttcgcttcggcaagaacgtaacaagcgatcgcaatcctcgcgagactcaaccgcacttttataaatctcaattcggcaaaatgctggctgccatcggaatttaa

SEQ ID NO: 152304 - DNA, 249 bp, Enterobacter cloacae
atggctttatgtgttctggaagatgtaatgctggctaagagtcgccaccgcgttgaaggcgatggcgtaaccgccaggctatcagtgcttacctgcgaaaacgacgatggtgataccgagtacgtgtattgggttgagcttcatgacagtgagggaaatacagtaatgaaagaggtgtccccagacttcatgatcgcaagtgatatctacgaacgacttaagtcaacccttgggcctgctgtagcctaa

SEQ ID NO: 152305 - DNA, 1383 bp, Enterobacter cloacae
atgagtggggggaaattgccggaggggtgggttgtgacaaacctgcaaaatattgcaaattggggttccggtggtacaccatcccgcagtcatgacgagtattataatggtaatataccttggatcaaaactggtgacttagggcctaaattaattaccgaagcaagtgaatacattaccgatgctggcgtaaaaaactcaagtgctaaatattttcccaagggttctgttgccattgcaatgtatggggcaactattggtaaaacgtctatcttgggaattgatgcaactactaaccaggcttgtgcggttggttcgcccatagaaggtattacctcaagtattttcttatattattttttactcaacgagaaaaatgcattcataaaaaaaggcaaaggtggggcccagcccaatatttctcaagcagttataaaagaacatccgttatctctaccaccttatgctgaacaaaaaatcatcgccgaaaaactcgatacgctgctggcgcaggtagacagcatcaaagcacttctggaatgcgcgtttaacaaactagaaatgttcaaacgtgtagttatggattttgcggttaaaggtgatttaactaaagaatggcgtaataaaaatgaaattaatgagtggaaaataacccattgggaaaacattctcctagataaaaaagattcatttagaagaggtccttttggaggcgcactcaaaaaagacatattcgtagagcgaggatataaagtgtatgaacaatattgcccaattaatgatgattgcagtttttcccgttattacataacagaggaaaaatttcatgaaatgaataaatttgaggttcatgccggtgatttcctcattagcggagctggaagtataggaaaaattacattagtacccgaaggttgtgaaaaaggaattattaaccaagctctattacgtgttcggattaacaatgaaatttacgataagagatttttcctgactctttttagatctccaatgttccagaaggttattattgaaaatagtactggctcagcgatgcaaaacttaaaaagtgttaaggagttaaaacaaataccagtaccgttaccctgtttatccgaacaacacgaaatcgtccgccgtgtcgaacaactcttcgcctacgccgataccattgaaaagcaggtcaacagcgctctgacccgcgtcaacaaccttacccagtcgatcctggcgaaagccttcctcggcgagcttaccgcccagtggcgtgctgaaaacccaagtcttatcagcggtgaaaacagcgccaccgcgctgctggaaaggattaaagccgaacgcgcggccagcagcggtaaaaaatcctcgcgtaaaaaagcgtaa

SEQ ID NO: 152306 - DNA, 657 bp, Enterobacter cloacae
atgcttatattaggtaaatgttatgaacttgacgagttaaataaagtcattccatatcaagtaagcaatcgcaacttggtaccaatagtatgcattgatgatcaaggaatgcaatatgatcaaattcttataaatcatggatttaaccttaaggtcctgagtgatattacagatatacgtgcagtctctgactacccgattgtgatatgcgacatcaaaggtataggtaaatcctttggttctaaatttgaaggtgggcatattatcgaagaaattcataaaaattaccctgaaaaaatattaatatccttcagcggcaatcaattcgatgctagatataataagttctttaaactttgtgattatgttttaacaaaagacattgattcggatcagtgggtttccgttctggatgaaacgataaaaaaagtcacaacaccaatagctcaatggaaaagaatgcgggcatttctctatgagaagaatgtctcaacaagaaaggtatttgagctagagcaggaattcattacagcaatcattacaaaggacaaaaataaatttgccacaaataaaacattagaaaatttatctcaagatacgagaactgtacttacaggcttcctttctagtttattatttaaaatggttatcggctga

SEQ ID NO: 152307 - DNA, 597 bp, Enterobacter cloacae
atggcgcgtttaaccaccattcgtctgtatggcgcactgggcgcccgcttcgggcgtgtgcataaactggcagtgcagacatctgccgaagcggtaaaagccctgtgcatcaatttcgacgggctggaagactatctgatgaatgccaaaaaaaacggcatgaccttcgctgtgttccgcgggaaaaggaatatcagcactcaggacttccaggagctgacaggagacagcgatatccgcattgcgccgattatcgaaggttcgaaaaaagccggattgtttcagaccatcctcggcgccgtcatggtggttgcaggacttgccctgggcccggctggttgggggggtattggggcgactatggctggtgggctaattgctggcggcgtcagctccatggccggtgggatctaccagatgctatccccacaaccaagcggtttgcagatgcgccaggatgctgacaataagccaagctacgcctttggaggtgcggtcaataccacagcaatgggaaacccggtcgcgcttctctatggcgtccgtgagattggcggcgccatcatcagcgctggcatagtcgccgaagacatctga

SEQ ID NO: 152308 - DNA, 915 bp, Enterobacter cloacae
ttgggctgtctggcgcacgacaacatcggcaatagccagcgcgtttccgatgattgcttcagcggtctgcttgttcgagccaaccgcagcagcaaggccgtctgcgttctctttgattgcatcagccagttctgccagttttccgctgctgtccaccgcgttctcgatcaggtctttaaacgtatcggagcctttcatgtcctccagaatggcatcggtgatatcggatacatcgatgctggcctgcccgcgcacccagtcggtccatccgctctgattcccgatcctgtcgacaagccgcgcctggtaccagaattcctgccccgccttcagccccatctgctgataaagtttctgcggatacggtacagatgccaaaagcatcggattcgaaccgtcagcggcaatgctgtattgcagctcagtgctcagggtgtcgccggtattagccgggaatccccaggtgacgttgattccgaatacgacgtcttcggaggccttaagcccgacaggtttgggtacctcacccgcgcgtcccttcaggtgtgtaagcgcggaagttgcccagagactcgatgcaccgccggagttgatcgcgcgtacacggaccagataatcaccctcgaagatgccaggcacttcgatattgcgaaggccggtctccggtacgttaacccactcattgtcgccgcgcttccactgcacccgataggctatgacatccgcctgtggtttgccgttcttgtcgaccggcgcatcccaggatgccgtcagggtagccactcgctgcccctggcgcactgcgtcatagctcgctaccacgatattggtcggctggttgacgaggccggttggtatcagactaattggcggcgtgtccaggcgggcattgttatcgaccgcatcatattttga

SEQ ID NO: 152309 - DNA, 501 bp, Enterobacter cloacae
atgagcgagaaaagcttccagaatgagattccgaaggcgcgcgttaatttaaaactggatttacataccgggggagcccagaagaaagttgaattgccgcttaaattgctggtgactggcgatttcagtaatggtgcagaacaaagaccgttatcagagcgtgaaaaaatcgatgtaaataaaaataactttaatgctgtgctttccgaatattccccaaaagtgaatctcactgttgaaaatacactggcgggtgatggcagcgaagagaatatcagcctgacatttcgcgacatcaaggactttacgccagaagaggtcgcgcgccagatcccccaactgaaggccatgctcgccatgcgcaatttgcttcgcgatttgaaagcgaatctgctggataaccagggcttccgaaaagagctggaaaaaatcctgcttgacccggcgctcagccgcgaactgcgcgatgaattgtctgctctggcaccgaaacagccgtaa

SEQ ID NO: 152310 - DNA, 1542 bp, Enterobacter cloacae
atgtctgtagaaaatcaaaatgccgttacgggcgaaagtgttgtgctggaacgcccgcagacgggcggtgtttatgcttccctgtttgagaaaatcaatctcagcccggtttctgaactgagcgcactggatatctggcaggatgcgcaggccatgtctgatgcgagcgctgacgagcgtctgactgccggaatgcaggtgttcctggaatgcctgagtaaatcaggtgcaaaaattgagaagctggataagaccctgattgaccatcatattgccacgctggactaccagattagccgccagctggatgccgtgatgcacaacccggaatttcagcgggtggaggggctgtggcgtggtctgaagcacctggtggacaacaccgattaccgccagaacgtcaaaaccgaaatcctcgacgtctccaaagaagacctgcgccaggattttgaagattctccggaaattatccagagcggactgtacacacacacctatatcgcagaatacgacaccccgggcggtgaaccgataggtgcggtgatctccgcgtatgaattcgatgccagcccgcaggatgtggcgctgatgcgcaatatctccaaagtatcggcgtcagcccatatgccgtttattggctctgccgggccgaaatttttcctcaaggaaaatatggagcaggtggctgccatcaaggatattggcaactactttgaccgcgcggaatatatcaaatggaaatctttccgtgagacggatgattcccgctatatcggtctggtgatgccccgcgtgctgggacgtctgccttacggtccggatacggtgccggtgcgcagcttcaactatgtggaagaggtgaaaggcccggatcacgataagtatctgtggaccagtgcgtcattcgcttttgccgccaatatggttcgcagctttatcaacaacggctggtgcgttcagatccgtggccctcaggcgggcggcgcagtgcaggatctgccgatccacctgtacgatctgggtaccggcagccaggtgaaaatcccgtctgaggtgatgatccctgaaacccgtgaatttgagttctcaaatctgggcttcatcccgctttcttactacaaaaaccgcgattatgcctgcttcttctccgcgaactccacgcagaaaccggcactgtatgacaccgctgatgcgacggcaaacagccgtatcaacgcccgtctgccgtatatcttcctgctgtcgcgcattgcgcactacctgaagattattcagcgtgaaaacatcggcaccactaaggatcgccgtctgctggaactggaactcaacaactgggtgaaaggtctggtcaccgaaatgaccgatccaggcgatgcgttgcaggcgtctcatccgctgcgtgaggcaaaagtggtggtggaagacatcgaggataatccaggcttcttccgcgtacagctctttgccgtgccgcacttccaggtggaaggcatggatgtgaacctgtcgctggtcagccagatgccgaaagccaaagcataa

SEQ ID NO: 152311 - DNA, 1338 bp, Enterobacter cloacae
atgaaaatatttcgcccgttatgggaagacggggcctttctggccccgcaacagttccagcagcaggccatatgggatgcccatatggctgatacggtggcccgaatggggctggcacagccgtggggcgtggtggcggcagagtttgatgacagcctgctggcgctttcccgcctgaacgctacacgtctgtctgtccgcttcccggatggcacgctgattgataccgatctgtctgacaacctgccgccagtctgcgacctctcggcggcctcagacagaacgacggtggatattgtgctggctctgccattgctcagcgcaaacggtggcaatcttgatgacggcagcgacagcgagcgtccgcgccgctggaaagctgaacgggttaccgtacaggagctcgccggacatgagcgcagtgaactggctgtcctgcgtcacagcctgacgttgcgtatggcccatcaggaaaatgcggcgtacctgacctgtccggtcacccggctggtacgggatgcgcagggactgtggcggcgcgacagcagctttatcccgccactgcttgccctgtcggcctgcccggcgctggtctgtgaccttgccgatttactgcatcgtcttcaggcccgccgtcagcggttgatgtccatgcgccgggaaagcaatgcccggcttgccgattttgccgtggctgatgtgtcgctgttctggctgctgaatgccctgaacagcgcagaacccgtactggccgaactgcttgctgtaccggaccgtcatccggaactggtttaccgtgaacttgcccggcttgccggcagcctgttgaccttctctctggagcacgatacgcgtgatattcctgcgtaccgtcatgatgcaccggagcaggttttcccaccgctgctctccctgctcgacaaactactggaagccagcctgccgccccgggtcgtctctattgaactgaaacaggatggcgtgatgtggaaaggcgctctgcatgatgctcgcctcagggaaggtgccgatttctggttatcggttcgctccgccatgcccgctcatgagttgcagacgaagttcccgcagctgtgcaaggccgggagtccggatgacgtctccgaggtggtcaatgtggcgctgagtgggatggttattcgcccggtcacccatgtaccggccgctattccgctgcggctggaaaaccagtatttcgcgctggatttaagcacggatgcggcgcgggccatgctggacgcgggaaactgtaccttctataccccggcttcgctgggtgaggtgaaactggaactctttgcggtgctacggacatga

SEQ ID NO: 152312 - DNA, 654 bp, Enterobacter cloacae
atgaatcaatccggaatcattcaggctgaacagattttctatcccggctggctgatggtgagccagttgcgtagcggccaggaggtgcaggacggcagggcgctgtaccgaaaggcccggcaactggtcacgcaggcgcgtgagaaactggttgaggaaggcttctgccagtcgaatatcgataccatgctctatgcattttgcgccctgctggacgagagcgttcttaaccggggcaaagcagatgatggctggcgcacctggcagcaggacccgctgcaggcgcacttttttggccggcttgatgcaggtgaggagctctgggagcgtattcgcgagcagttaaaagccccggtagcggatccggtggtgctgatgtgtctgtaccgtacgctgcagctcggctttaccggccagtaccgtagccaggatgacgagcgccgtgaagatgtggtgcgcgctctgggcgaacgggtaccgccattcgccctcagtcaggatgcgccagtggtggtccgggctgccgggcgtcgaaccgggcggcggatgtactggctgtcatggggcgcggggatcgtggcgctggcggtagtctggtttgtgctctcatccttgctggccgggcaggtagcgcagattacggggctgggatga

SEQ ID NO: 152313 - DNA, 576 bp, Enterobacter cloacae
atgggtctcaaagtcaaaaaaaacactcctaaattaccgaatattggcacgggtatacactttaaaaattgcggtcacgtattaatttcaggagtaaactcttctgataattatggcactggaatcacagcacataatgttcaaagtctaacatgtgtgcaatctgtgtttaataataataccgatataggcatttcagtctctaacacacaagcatcaagctcaaaggaaacaaaaaaaatggcattgaatatttttaacaatacagtcaacaattctgaaataggaataagcgttccagaatcaatgcagggaaatatctctggaaacattactaacaatacaaagatagctcttcaggtaagagataatcctttactggttcaaatgttaaaggaaggataccctcatgataaattacttgaattaatcaaagaactaaaaaaccatcaggttcttccagaggacggtggcaggggcattgccgaaaaacatggcattatcgaatggttggcacctggcgtcacagtgatggaattcataactgcagctatagaattagctaacaatttataa

SEQ ID NO: 152314 - DNA, 522 bp, Enterobacter cloacae
atggataaaacaagaaaatacgatagagcattacagctggaaattctcaacgcacttatagactgtgcccccaacactttgaacaaggcacaagagattgaactcattgaaaagttcgataattatgatcacttcgtggcctgtatgctttatctcgaaatgcatggcctagtaacaacaccattcgtacgcagcgacacaatggccggtgtggaatttattttcaatgcaccggtatgctacatcaccgagaaaggtatagatttcttactcgatgatggcggcttgagtgccattttaaaagttcaaactgtacgactgcataacgacactataattgcgcttgaggacataatccgcgttgcaaatatgcctgaagatcagaagaagggattgatttcaaaacttcgagagcttccggcagacgccataaaacatttgaccctacagctactgactcagggggttctgaatctgccgaacgcaattcaactaattcaaagagccctccagaagggctga

SEQ ID NO: 152315 - DNA, 357 bp, Enterobacter cloacae
atgctgagaaggtacgctataacaaacgccgtgtatcagccgcggcagtgtgatgtagtcagcctgagtcttatcagcaactatcagccgttcggctatctgtatttgatactgaggtgggcgaccagtgcccagataaaaactaatcaaggaatcagggaagcgtttcaaccagttcgatactggtgtgtagaacaaatccacaggcagcgcgtcatcctcaattacgacaacccggcatgtttgttctgctgcccactcaagcgcgcggcgatgattccagttcgcgccgtggttatcgtcatcaaccagcagatgagcatgcagcagtgcagcaagacgttgtgcaggccctaa

SEQ ID NO: 152316 - DNA, 156 bp, Enterobacter cloacae
atgtctccagcacaagctaaacaaaagcagcatgaacgctacgaagccgtagcggtgcaggttttgcgtggtcgtgccggttacaaacctgccgtgaaaagccgcttcagtaagtcagccagtagcaaattctctcatactatcgcttttgcctga

SEQ ID NO: 152317 - DNA, 174 bp, Enterobacter cloacae
atgaaacgaccagcactgaaagaatgggatgttgttgatcatcttgatagcaaagaagaaatcctgctgtatctggaagaggtttttaacgaggatgatttagcatttgcgcttaaggcgctggatgatgcgaaacgggcacttgaaaagctctacggcaacgtccagtcatag

SEQ ID NO: 152318 - DNA, 1263 bp, Enterobacter cloacae
atgaagctgataacaggtttactttttttactggttccggggctggttatggcgaagggcgtcagtctggagctcaacgctgttccgctgccgcaggcgctgaacatgatttacgttcaggtgttcgataagccgtttatgcttgacccggagcttgccaaatccgataaggtggtgacgttccgtatcacgccggatatcgatgaacgggcatttattaagcgctatctcggcaatatgaacattgcgatttataacaaacagggtattgactacgtggcgccgttcacgccgaaagcgtatgtgccgccgcaggagacctttgtttatcggcctcgcttccgttccgtggcgtatctgtctgacattctggccggacagtttaccgggcagtttaacagtcagcgtaactcgttaccatccgggcagatatcgccggaagcggccgtagcgggtacggcatcggactttatgaaccgtaccggggatgtgctggtttattatggacggaagtcagagattaagcggttgcagacgcttttaccgctgattgatactgcctctgaagaagtgattgtcgcagcttacgtgtttgaggttcagaccagtgagcgtaacggttccgggctggcactggcggcgaagctgctttccggcaagctgaatatacagattggcgcgtctggcggctttgataactttatccgggtgaatacaggctctcttgatgcgctgtatgagcttttcaggacggacagtcgttttcatgtcgtcagttccccgcggctcagggtgaaggatggcgcatctgccacgttttcagtcggtaacgaggttccggtgctgggtcaggtgagctacgccgacaacaggccgatccagtcgattgaataccgctccagtggcgttatcctcgacgtgaaaccgcaaatccggactgacaatattgaccttgtgattaagcagcagctttccagctttgcgaagacggatacgggcgtgaataacagcccgacgctgattaagcgcgaggttaatacggaggtatcagcggctgacggggatattattctgctgggtggcctggctgaatcgaaggtcacaaacgccgataccgggttcagctttctgccaaaaggctggctcaccagttcatctgacgagaagaacaagacggatattcttgtcgtgttacaggcgaaaaaagtcaggcgcgccagcgccgcgcacgcaccgagttcccacgaggagcgcgcgcggtga

SEQ ID NO: 152319 - DNA, 1035 bp, Enterobacter cloacae
atggctatttctgcgtatgtgggcattcccgggagcggtaaatcttacgaagtggtggcaagcgtcattattcccgcctgtatcgcggggcgtcgcattgtcagtaatatttacggccttgccacgcaaagtatttatgattactgcgttgatattaaaaaggcagacagagaatcacttggagaaattttacttgttcagaatgaagacgttcagaacgagaatttctttccctacaaaacggattcaggcattgcggatgatacgttctgccgtccgggggatttaatctgtattgatgaagcatggcgcatatgggagaacgataaagggattcctgcaaatcatcgctctttcattgcagaacaccgccattttgccgatgaaaaaacgggcgtaacctgtgatttagtggttatgaatcagtcggttgccaaccttccgcgattcattaaagaccgggtggaaacaacgtatcgcatgagtaagcatgtggcgctgggtctgcataaccgttaccgtgtggacgtatttacgggtatcaaactgtttaagtcgaatctgacgaacagttatcagaataaatatgacaaggcgatattccctttatataaatcccatgaaaacgggcagggaagggagcttgttacggataagcgtcagaatatttttagttctaaaatgctgtggtttaaagccgctggtttactgattctggcggtaattgccattttttatctgttctggtttttcacgtcaaacggtagttcagagcctgaacagcagactaaagatttacccgccgcaaataattcagcgtcttttgtacctgccgcgccagctaagcccgttgtgtcggacaaatggcgacttgccggacggcttaaacgcgatggtcaggcatgggttgttgttgcggacacctcaggcagattgcgtatagagccggcttcgcagttcagctttgatggcatgatgatgacgggtgaaatcgacggcgaaacggtgacggtttattcaggggcgatacgatga

SEQ ID NO: 152320 - DNA, 288 bp, Enterobacter cloacae
atgtttggtattctggtttcagcctttaacgtggcgctgggttttgtgctgcgaacggtggttgtcaaatttattctgttttttggcctgtactttgtcgtacaggcgtttgttccggttctggcgtcactgttgccaaaatctgttgatattgccgggttgttttcctcactgcctgatagcgtatggtatttcgtgaatctgtttatggtcacggaagggattaaactgatgttttcagcattgttaacgcgctttattattcgtcgcattcctttgattggttaa

SEQ ID NO: 152321 - DNA, 1863 bp, Enterobacter cloacae
atgcgcctgggcggtcattcagggtctggaaagttaggtattactatattgtccttactggtttcatccggtgtacatgctgatgcagtaacagcagacggatttggacgtgtaattcagcaaatggttgaaacccgtgaagctcaggttgtttctcaatctgcggggcgtgtattcgcaacgggtgccagttctctcggtatgggcgcgggtatcgctgtcgctgcggaggttatacgcgaacgtcctgacgtttttgattcaatccgcatgtgtggcgagaaagtgggtaatcctcagctttgcaccggaacgtcagttttcgcggctgcttatggccttgcgaagcatacaattgacgattcgatatctacgggtatttcaagttttggcagtaatatgatggctgccggacagacaacatggggattgctggggcaggctgcgggtgttatttccgttgctgaccttgctttaaagcagggcgcaaaagctgttgaatatattacaagtggaataaaacaggatgatggaacttatttacttaatttgtccaatggcgctactgttacttcttctgttgcaccttcacctaaaagccctgttgctgtttatttgccctctgatgctactggcttttctgcgaagaatattcaggactcgataaacccttttaatcagcaggttaaacctgttcagattgcgccaacctattacaatattgatgcaccaccgccgataagccagccatttccgaatgatgtatatcgtgtgtcagtaaagggtactaaatatccttattcgactgatatcagggatgcaaagggcgatgctgtacttgtcagtgataatccggtaatgattgcgctttataagtcgattaatggttattctcattccaatgtgacttatcatgaggcttctgacgacaataacttacatatcaggatgccaagaaattttaaggtttattcggtttccgttaaagactttcagtatgaaaagccgaatccttattttggtggatattcatcgaatgtaactgttgttttatctgttgcgacaacaacggttacgcttgagaatgcatgggatttatgtaaaagcgagaaagtacctgcgccgggcagtacggctgataatcccaaaacgcagtggaaaagtatttgccaccctgagaaggccgtgtataaaacgacgaatgatgttcaggatgttaaagaccagatattttttaatacagaatttgatacatcaaatttacctcaggtaattaatggcgaggttattgataatatagatttcaagccggaggaacagttaaacccggctgcgctggttaatcttattaatggccttgcaggtcagactgttgttcaggaaggatatcaggggataccgcttgataaaccttttacggcggctgaactgacggctgcggctaatgctgttggcgtaaaacttgataagggcttgctttatagtccggttgtcgttcctcagtcgtgggttaatgccagacccggtgcgggaacggatacaggtgtacaccctggtacaggcacagataccgatacttctgttgatttaggcgaagaccccggcattaaagcgccggaacttgaaaaaccgcctacaggtgaggaaattctcaagccaattacggaattaatgccggacattaaaaacctgagtatttcatcgaaggatgttcagtgtccggtatggtcgttcgaactctgggacaataaatattccattgattctcactgcgagcttctggaaaaaatcaggccacttctgaaagcggtattcctgcttatctggggcattatttcgctgcgtatcattctgactgcgtga

SEQ ID NO: 152322 - DNA, 249 bp, Enterobacter cloacae
atgtttggtaagactaaacaggctttaacccgtattggtgcttttactctggctgttgctgcacctgctgtatttgctgctgaaggtgatgttgttggtggtaaaggtattgaccttacgccgctgactaacagcgttaatttcggttccgtcctgaccggaattatggcggtagcgggttctcttattgttctgtatgcaggttctgcgggtgtccgctggattttgcgtatggttcgtggcgcttaa

SEQ ID NO: 152323 - DNA, 270 bp, Enterobacter cloacae
atgtcagatgaggtaatcatcaagacaaaatattgcaatccgaatatgagctttggtagccctgacggatgtgatgaagtgactttgaaattaccgaagtcggaggtttttaaattacagtcttcggtagtttctcagtataagcctgttcccgatattgattattcagtcgcggcgcaattttgggggctggcttttacgacaacctttttcctgtggctgtttgcaaagggaataggtgaaattcttaaacacgtaagaaatgcataa

SEQ ID NO: 152324 - DNA, 336 bp, Enterobacter cloacae
atgggacaggaaacacttaaagtattttttgtgcagtttggtacaatgaagaatgacagaactaatgaagattttgattgggggaatgctcaggcattttctacggaatttgaatccacaaatagctcctgtggtttcgcacctgcaaaagtaaaaatctctcctgataatcgccatgcagtttgtcttagattacgcgatgatttacaagaagcatttaaatcaggtaagtcattccttgaaattattccatcatatggaatgaaggcttctaaaggggtaatgattcccattgtggttgattataaagttgttgggaaatcagatgtgaagtga

SEQ ID NO: 152325 - DNA, 1173 bp, Enterobacter cloacae
atgcaactgactgaaagaaatgtaaaaattgactatctggcctttaccatgcctttctgttctctcaagtcactggaaacttacccgcatgagttgaatgagtggcgtaagtacggcatttatccgacatttcataaccatgtatctcataaagatgcttttttcaccgatgtgattaaaggcggtaaatggtgtccgtcagacgatgaacttaatgaacaggttcatagttacagtacacgctcaaaaaacgaactcgaacaaaaaataaacgacctgaacagggaaatttatttagcgcgtatgcatcgccttaaattgtggctttccgcagtctttggccttcatcttggccctgaacgagacaggggcggctataactatgatcgttccgcacctttgtattcagttgatggcggctatgaacatctcggaatggtgttctggggcggtaataacgacacgatttatattcagatcggcggtgaaggttgtactcatgtttttaatggtacgtcaccgcatgaaatctataactggctcaatcatcttgatgtaacgatgctgaagcgtatcgatcttgcggttgatgattttgacggtgtctttactgtttctgccgctatgaaagaccataaatgcgaagctttttacggcggtaagggacccaaacccgggcttggtatttctcataaatatcatggcgatggttctttacagcaggaaatgattactgttggttcccgtgagtctcgcgtttactggcgcatttataataaggcgcttgaacagaaagttgatgatgtctggcatcgttctgaggctgaacttaaaggcttcccggttgaggtattactggacatagaaggagcttttactggtctttgtgaatacgcgcaacagataaacccatccagcccgaaaacgtttcaacgctctggtgttatccggcttgcgattaatagctttgagtctgatgttcgttggcttcgtaagcaggcatcgaaaactattgccagaatttttcatcagcttggcaatgattatgaggctgtattttcgtctattgttcgaaaagaacatatggatgacttaacaatcaaattcaggacgcctgatatttatcaaaatattgtggctcagaagttttacaaccgtgaatgtgcattctaa

SEQ ID NO: 152326 - DNA, 198 bp, Enterobacter cloacae
atgcaaatcatctactttgactacacgccaaattttggagtcaacgccagcgttggcggggagtgggatttttaccgttcctttgatgaactggtagatgagtgcacaggtttctatggtgatgattttcttttagtttctgtggttttgaattccggctctttcgtgggttacagggagtcactggcatgcaactga

SEQ ID NO: 152327 - DNA, 336 bp, Enterobacter cloacae
atgaagaacaaaagactgagaaaagcgattaaagaatggacaacggcagttcaccagaacgaagccaaggaaggaattgtcggttatgccctgttcgacacggtgaagcgggcttttgtgacctttgaagatgtcgggcatggtccttttgaggcctataccggaaacattgaggttgcatatgttgcagatacccgtggcgaagcattccacaccatgatgactgaggtagaagataatttagacacaaaaataatcccgttaatttcaaatgatctattcggactgtcacctaaacccggctcattagatgataatgatctaaccttcgaataa

SEQ ID NO: 152328 - DNA, 438 bp, Enterobacter cloacae
atgaataatggggtgtttactaccgtcattactggtgtttcagtgtttgtgttgggtcagatatttgtaaaatccatgcttgatccttacatttcattcaaggaacatttggggatggtttcggccattctcctgcgtgagcaaaataaaatccttagcatcaatgcgaaaagcgaagtaataaacgaaatcaaacaggcgtcagctttgctgttgtcaaaatctaatgccatacccttgtatggaatgttggctactttacgtctccttcctcgatacaaagatgtccttaaggcctcgtggaatctgaatcttattgcgtctattttagaagaaggaagaaacaccacccccaaagaaacctatacaactatttctaattctctcaatgcggtaggcagtaagttaggggtggttgttacatacagaccatcttag

SEQ ID NO: 152329 - DNA, 624 bp, Enterobacter cloacae
atgagcaacatcgacaaacatgacgtgcaagcagttgccgatttgaaagctggctacaccctcggtcacgctgatgtggcaatcctgaatgagctggcgcgtatcgcgctggcatcgctcgaagcggagccggtggcgtacatcttcaagcatccggcaggcaggctgttctggtctttgactgacgagagcaataaagggcaaagcgacgttatgcctgtttacaccgctcagccagcgccggtatttgtgccggacgagatgacacgagaagagtacaagcgtcggttcatggaagatgacgactttgacgacactttccgtggtggctggaacgcctgccgcgccgccatgcttcatggtgccgaacctgtaagtaatcgtgatgagttgacagacggttgggtggcttgcagtaagcggatgccaagcccatcaacaggtgtgatagttgctgcgccatggcaatcagctcctggcggctatgcaatgaagtgggcaacaaattgccctgggcatccggatgcagatatagatggctggattataccaggagcatcatggagcccaacccactggatgccgctgccggcagcgccgcagcaggaagatattatttgctga

SEQ ID NO: 152330 - DNA, 312 bp, Enterobacter cloacae; identical to SEQ ID NO: 141582

SEQ ID NO: 152331 - DNA, 714 bp, Enterobacter cloacae
atggttacagaagagtcggacaaagagttaattgacttctctattcatgaagtcagaaaattcaatggtgaaataaaaagaatctctgaagaaataatgggttcaagagacatgagccccgaacttttaaaagcaaaagtaaaaagtatatttgcttccagttcattaatttcggttcgactaggtgtgtatgacatagaggaaaacccacaattattggaatttcagaaaacttattcagctggagtctataaaaaattccaaaaagcaagtcattgcctcgaaaactatgcaaaagatcaccgggttaaaatattaggattccatggtaaatcgcatcatgaaattgaaatattccctttttttgatttcgtaccgtttgttattttagagaatgcgattaaatattccttgcctgatcaagatatagaagttcattttgatgaaatatctaaaaacacacttgaagtctctgtcatttccactggcccacataatacaaaagccgaactattaagtatttttgacaaaaaatcaagaggggccaatgcaattctagctgataatacaggtggtggttatggcttgtattttgcaaaactcgtttgtgaccttcatgatatcaaaatacaagtgcactcagctcagcccagtctaaattataatgggatagactactccgagttcaaagtagtgctaactataaccatataa

SEQ ID NO: 152332 - DNA, 390 bp, Enterobacter cloacae
atggtcagccacgtctggctgaccatgcgcagcatccctttcgtacgctggctcatggctgaggacagcatccggtcgtggtcgtggatggcggcgctgattctcttctcgctttcgttcagttccgctctgacagacttctcgtgctcgctgaatgcggctttcagcatctcgccggtagtctgctgctgcactttcgatttctgctctaagtccttcgccagcgttaaaagactgttcatagatggctcccttcagtcggatgtttcgccccccgtccgggtcggcaatgctgatgctgctttttgtggtgcgaaccacctcaaaacctgcgctttccagcgcctcagtgacgtcctgacgcgttttcagctccccggacgaggctaa

SEQ ID NO: 152333 - DNA, 1683 bp, Enterobacter cloacae
atgaaaatcaaagactttagtgtgggtatcaggctggctggcagcttcagcctaattctggttcttgtcatgatcatgacagtgaccggagtgtggtacctgaactctatgctcacttccaccgatcgcgtgatgaataattatcttctgcaggagcgtatggcgaatgaatggcagaccgctattgaatcaaacggtgcgcttggactggttctgctgacgtcgggggacccggatatcaggacatatgcacagcagcggataaagaaaaactctgctcgcgtggatatactgcaggataaatttaacagggagcttacttcagagcagggtattaagctgctgaaaaccattggtgaaaagcgtcaggtgtatgcagatacccaggtaaaagctcttcagatcagtgagcagggggaccgtgaagccctgaacaacttcattcggtcacagcagttaccgatcataaatgactacattgccagtctgcaggcactggtggaatacgaaagaacaagcatagataaagcgggtgaagttatcgatgatcatggtacggcagccatactgacactgatcatcactgggtgtatggcgcttcttctgggaggtgtgctggcatggctgatcaccagaagcattacctgtccgttgatttcagccgtccggattgcccgggaagtggcggaaggtaacctgtgtgtggagattaaagtggactcacaggaccagctggggcaactgatgcaggcactgcgtgatatgtgcgggagtctgagtaacaccgtccgggaagtacgtcagggagcggacaatattgcgctgactgcagcagaaatcagcagtggtaatacagacctgtcagcccgcaccgaagagcaggctgccggtgtggaacagacggcggccactctggaacaactgacggccaccataaacaatactgccggcaatacagcacaggtttaccagtttgtgacagaaacaacggccattgtgaaacagaatggagtggtcatgagtgaggtgtcttcccggatacaggagatttacgacacctcgtctgaaatgacagccatcatccaggtcatcgacgggattgccttccagaccaacattctcgcgcttaatgctgccgtggaagccgcacgcgccggcgagtccggccgtggatttgcggttgtggccggagaggttcgtaatctggctcagcgcagtgcttctgccgcgcgggaaataaaagagctcattgatgactccgtttcccgcattgcatccggccgtaccctggttgaaaaagcagacaggggaatggaggatatcatcagtaacgtccagagcatggaagggctgattgacgaaatagccaaggccagtcgtgagcagggagatggtattgcccagattaacagcgccatgggccagatagacagcaccacccaacaaaatgcagctctggtggaacagtctgcagccactgccgcttcgttgcagaatcagtcacggattctgcaggagaaggtgagcgtatttcgtctccgtgataataaaaaacgcgatgctgaacgaaaaaataccatagtaccgacaatcagcaacaccagcccgcagagtaaggttaaagcggtaaagtccgttcgtgaaacggaacaacacgccagcgagaactgggaaaccttctga

SEQ ID NO: 152334 - DNA, 732 bp, Enterobacter cloacae
gtgacgcactcttcgaagaatgccgttgagaaccacttcgacacctcttatgaactcgaggcgctgcttgagcagcgcgttaagcgtcagcttctggctgaagttcagtctatctgtcctcctggcgtgaccatcatgaacgtgcgtcaggcgcagccactgggtctgggccactcaatcctctgcgcgcgcccggtggtgggtgataacccgttcatcgtggttttgccggacatcattattgataccgcttccgccgatccgctgcgttataacctggcggcaatggtcgctcgcttcaacgagacgggccgcagccaggtgctggcgaaacgtatgaatggcgatctctccgagtattctgttattcagactaaagagccactggagacagaagggcaggtgagccgtatcgttgagtttatcgaaaaacccgatcagccgcagactctggactctgacctgatggcagtcggccgttatgtgctgaatgcggatatctgggctgagctggaaaaaaccgagccgggtgcatgggatcgtatccagctgaccgatgcgattgccgagctggggaaaaagcagtccgttgatgccatgctcatgaccggcgacagctatgactgcggtaagaaaatggggtatatgcaggcgtttgtgaactacggtctgcgtaacctgaaggaaggggcgaagttcagagaaactgtagtcaagttgctttcctcgtaa

SEQ ID NO: 152335 - DNA, 1338 bp, Enterobacter cloacae
atgtctattgcaaacgatctgaacgatgttgttgaggcatctggcgacatgctggctcggctggccatttttgccgaccatattcccgacgaatggattactgccgctgccgccttgtctgaaaaggccactatccgccgacgccgcttaccttctgatatggtcttgtggctcgtcgtggggatggcctttttccgcaatgagcccatctccgaggtcgctcggcgcctcaacatctgtgcagaagggttggccaatgatgccttgctcgcggacagtgccctgtctcaggcccgtcagcgactcggcaaacagccgctcgagtggctgttcaaacagtgcgccgatgtgtgggggcgggaacgttatcctgaagaccattggcacggtttacaggtctttgccatcgatggggccctgttccgaacccaggatatgcctgaactcagagcacatttcggctcgggtaacacctcaaccaaccggcagacaccctacccgatgctgcggttggtcacgctcatgaatgtccgctcgcatgtcattgccaacgcggccatcagcccgtaccgcaaaggggaaatccccctggccagcgagttcattcactcattgccggacaagtcagtgaccctgctggataaaggcttcttcggtgccgacctgttgctgcgtattcaggccgaagacaccgaccgtcactggctcatcccggaacgcaaggggctggtatacacggaacttgagcgctatggcgacggtgaccgtctgttgcaaatgacggtctcgcctcaggctcgcaagaaaaacccggcgttgccgacacactggcaagttcgcgcagtgacctatgaggtggcaggcaaggagaaaacggtctttacctccctgcccgtggcgcgattcagtgcagctcaggtggcgaccctgtaccacgagcgctgggaaatcgagctgggataccgggatatcaaaagcgcgatgcagcacaacgccatcacgctgagaagcaagaaagtggacttggtctatcaggagctgtggggattgctgcttggatacaatctggtcaggcgggaggccagccaggccgccgtagcccatcagcgagcgcccaatgaggtgagctttaagtttgcctgtcagttcatcgcgaaccagatggcagtgatggcgggcgcgttatcgccagcccatacgccacggaggttggcggagttgcggggctgcataggcgtcatgttcatagaaaaacgccccaggccatcgagacccagggcggtgaagatatcaaagacccgttttccggtaaatcgcaatgcggctccgcttaagtga

SEQ ID NO: 152336 - DNA, 453 bp, Enterobacter cloacae
atgacggtagactggatccccatttcgcacgacaactaccatcaagtgcgtggcccgttttatcacggaacaaaagccgaactcgccattggcgacttaatttcaaccggatttatttctcactttgagcgggacagagcactaaagcatgtgtacttttccgcgctgatggagccagcaatctggggggccgagctcgctgtagcactctctggctctgacgggccaggccatatttacatcattgagccaaccggcccgtttgaagacgaccccaatctcacaaacaaacgattccctggcaatccaacacagtcctatcgcacatgccacccacttaaaattgttggcatactgcgggagtgggagcgccattctcctgaagcattgaagaccatgctagattctctggcagacctcaagcgacgcggcttggccatcattgaagaatga

SEQ ID NO: 152337 - DNA, 234 bp, Enterobacter cloacae
atgacggcaagcgagcttctgatgtggattgagtacgacaggcaaagtccggttggcgatatccgtggtgacattcaggcagctcagctcgtctctgccatctacggctctcagggggcaaaagtaccgctggacgatgcgatcctgcgatggggtggcgatgagcaatcagaaccgaaggacccgtttgcagggcttgaggctgctttatcaaacgcagcggcaactaattaa

SEQ ID NO: 152338 - DNA, 228 bp, Enterobacter cloacae
atgacggcaagcgagcttctgatgtggattgagtttgacaggcaaagtccggttggcgatatccgtggcgacattcaggcagcccagctcgtctctgccatctacggttcgcagggggcaaaagtaccgctggacgatgcgatcctgcgatggggtggtgatgagcaatcagaaccgaaggacccgtttgcagggcttgaggcggcgctaactgctgcaactcagtga

SEQ ID NO: 152339 - DNA, 207 bp, Enterobacter cloacae
atgattggaatgcactacggcaccgcatcagtgccacgtggcgaggttttaccgggcacaatgctgcaacaccacggcaaaacttatcgcgcctctgcgaacgttgagaaaggcctgtacgccttcaacatcttcgaaaaaaccatcatcaaaagtgattccgtcgttgtgctgctgaatgagcgcggcgagccaatggttcactga

SEQ ID NO: 152340 - DNA, 252 bp, Enterobacter cloacae
atgtttgggcagacgttctattggattggcggtatcctatgcggtttaattatttttatatttgataaaataatatcgtcttcaaaaacacgctacatgaaactattattgttaagtagtattggatatctgttcttctgggtgcaggacggatttgaagtatattgctatgtcttgataaagttcgggataataatgatgattatgtatgcttttaattcatttatgagttcgttgattataagaagatga

SEQ ID NO: 152341 - DNA, 321 bp, Enterobacter cloacae
atgaagatcaaattcgcttttacgctcctggctgtcctggtttctggccatgccgcggctaaaacctgggtgctgacaagtgctgaaagcagcgtagagaaaggaaactggaagatttccagtgatgagctgaaagttaaagatcagacgttcagcattgagcaaaaagtcttgcacggcggcaagcaggaaggcagtaaagtcatcattattagcagtaaagatggcctgacgattacgctgagcccgacccgcggcatgaaccttctgcacgttgaagggtttggcacccgactgggatggaattcacccgtcaaatag

SEQ ID NO: 152342 - DNA, 231 bp, Enterobacter cloacae
atgatatatttcttagaaagaaaagatgctgaaaaacttctccataaatttttaaagaatactttaaaaaatcagactgatattgataagctaatgggtctggcaattaatcatgattacggcattcctatgaaaggaataatttatgaatatgataaaatggagaaaaacaaaccaaccaaacaagatttagatgatcttaacacattgatgcatttttatggtccgtga

SEQ ID NO: 152343 - DNA, 528 bp, Enterobacter cloacae
atgagaaaaatcataaacatacaaacagacactaccactttagttatttataatttgatgtcattaaagcatagaattaatgaagacgtagattggtggagtcttccagaagatgaagtagaagaggtaaataaatggagtgtattatttctcaatcttggggatgatggcgcctataaagtcaatattaaaaaaaatttacctaaaaacatgtttagaatgagtgacggaaaacacttccaggaagcgaacagacaattatattatacaatgaataatgacccatcatatagagcttcccttgaggaaaaattcccgggaatatttgaaaaggtttcaccaggtaagcgtggcgcattcctaagaacagctccaacaggttctggttgggaaacaacttggcaacatcatgagcgagttggtgggttgttacaattggttgatgggccagatcataactctaagcatctggattatcacccgaaaggatatggaggaagaaaaacttggggggctcgatgcagataa

SEQ ID NO: 152344 - DNA, 474 bp, Enterobacter cloacae
atgaaaatatgccagttagcaatagacaggttaaataaaattaattggtttgttaatcttggtatggcaacgacactccccggggttatccaggctcattcccttagcttatttataaaaggcttgaaaagtgatgaatgggaaagtgtcactttggaggctggtaatgaaataacgggttatctcgcaaaaaaacacactaacaaatatcaatactggaactttttggtcaaagaagctaagaaagttgttgagaatgatattatcccaaaaatcaccttgccagagtctgagaaaggtacaatgactgagaacttaaaatgggaccttgtgaatttcttgcttgaagatgcatatagttctctactacaagagccattcttttttaacggattaattagtgtttatgaagctgggcatatgccctgtggatggacaggtacttggccagcgggaaaactggttatttattga

SEQ ID NO: 152345 - DNA, 753 bp, Enterobacter cloacae
atgttcaaaaaaatcgtattatcttcattgttttctcttagtttgatttgttcaatagattcctcacttgctctcgatttggcgcaatatagtaaaccggagacggtgagtcggatctttaaggataaagaagtcattaatgatctcaggcagacgcttggaaaggactacgagacttttaccaacaattttgatgtgtttggtgagccacatgttaccccagatggaggggtgtttattgaagggtggttaaaagatctttatcaggagaatgcctctgctgcggttattagcccagacggcaagatttatgctgcctgggttgttcctgaatctgatgtgatcaactataaatcgtcagaacaaggacaacctgtcaataaagatattcagcgctgggctgaaagatttaagaatatgaattttgctacgcaaataaacaacaataaagatgcagctaaaacagaatattttaatacaaaggcatatgccattaagttaacaactgtttgttcagataacggcgagtgcaatgacgcaacttattatgggaaacgaaaaaaagatggcgcagctgtaaccttacatggtaaagctatacgagcagagtgttctgcctcgccttgtcctattattgggtacaagtttaaaaatgcgtccacaacttatatgcttagtaaagctgataatacactgacagtaattgagaataataaaatattaatgaaccagaagggtggctggagtaattag

SEQ ID NO: 152346 - DNA, 1470 bp, Enterobacter cloacae
atgaatagaataagttttcgtgcattaggtgtcgttttttctatatcaatcctttactgcatcggactgatcatatcaggtcggaactatcttgatgactatggaaggtatactcatggttatacttcatggtcgtcaaacggaaggccttttgctgatctggtgatgagcataatcaaccttggcaaccctattgttgatattagcccacttccattaatcattgcattactttgcctgtcagtgatgggggtgatggtgtcaagaaggtttgctaaagatgcaaacgtaatggcattgtctgcaatctccattatgattatcacaaacccattcttgcttgaaaacctgtcattcaaatatgatgttcttgccatgagcttgagcatgcttgtcgtatccctgcctttcgtatcaataagggaaggtgcaagcgctacatggcgcttcattatatcatcaggatgtgttttcgtatctctaggattataccaatcatccattggaacttttataatactaaccatactggagtgcatttacatttcagcaacaataagtagatctacaaagacttgcatttacaatgcagccacaagagcattgcagcttatcgttggttatgtgttttataactttcttattgttcgaacgttcataaatgatgaatacacaagaagccactcagagattatttcttttaatggagaaggtctaaataccgctttaaataatcttctagggtacattgatcttttaaataagtacgtaatatcacttccaaatattgtagtgtacttttatttttctgttattttactatgctcaatattctgctttatttttttaataaagaaacatcacaacttctttggtgccgcacttgctttgatatccccggccgcattgattattttttccttcgctcactttttgatactaaaagagccggtcttatcatcgcgagttatgacttcttttagcgcaacactcatatcctttgctgtcttgatatgtttatgcgtaaaaaataacaaagcaaggacgatcgccattttaccaatttttggctgcagcattatattctccatgtcttactcaaatgcatccaaagcacaaaatgtaaaggacgatcaagttgcacaatccatatatattgcaacatctgaaaaattaaagaatgtgagatatgtgtatttctcaggtgagataaggttcgcggaacaaagaaaattagcaatctctagatttccagttcttgctgacccgcttaagtcttacttcggcaaggatcagttctggagttcatatatgctaacttataatggagttcatgttaactcaagggtgttatctaacaaagaaattgaagatatatgctctttgcctccacaaatagttaccacagattacagcatttatagtaatggagatacaatgattgtttcactaaacacaaaatgcttataa

SEQ ID NO: 152347 - DNA, 546 bp, Enterobacter cloacae
atgaattcatcaaaacaaattgatgttaattttctccatgaatgcttctcctatgacgccgatactggggatatatattggaagtcccgcccaagcagtcatttcaaaaatgagtcagcctgtcaaaactggaataataggcacgctggcaataaggctggtgctgttgacgcgaaagggtatcgagttattaagcttctaggaacgccacataaggcccatagaataatttgggcattatcgcacggccaataccctgaaggtttcattgatcacatcaacgggatcactgatgacaatcggcttggcaacctccgcatagtggattttgtcaccaatgcgcaaaactcgaaaaccgcaaaaaacaacacaagcggatctcaaggtgtttggctggacaaagaaactggcaagtggagggcttccattgtccacttaggtcaaagagtcagccttgggtcgcatttgacgcgtgaagatgccaatgaggcgagaaagaaggctgagcgagattattgttaccatccaaatcacggccgaatgtaa

SEQ ID NO: 152348 - DNA, 426 bp, Enterobacter cloacae
atggaacaagaagaaaaattgcaagaagtaatttcctacccacagaatatgaaagatagtgccttatcgcatcttgtactatgcgcaaatctaaacgcagccgtggatgtcacgctcattattggtggacaagtagttgctgggcaattggtctcaggaaaggaatatgctgaaactatggctggaaatctcagatctgcgaatgccagcgaagagttaaaagatgcaatggcttcgtttttcgactctttagcccaagagtatcgaaatgaagaagggcattccattccactaaactttcttcatattcgtaatcccgcctacttgagaggtgatggggggtggactaacgtgcaagggactattgttagaatccctatcgaaaaggttagtggattctcgctgggaaaagacagccaactttga

SEQ ID NO: 152349 - DNA, 543 bp, Enterobacter cloacae
atgtttgattattcccgttactacacccttaccctagagaatggacgggctgacaaactcatggccttaattaattctcaagatgacataggcatctacttaagagcccacctgctaattgaacaaaccatggagtcttggatactttgcgcatcgggtaacagggagtttttctctgggttcggggaaaacataaatctagatttcgcagccaaagcacaacttgctaagaatttcggcatgagcagcgagttgcatagatttgtaaaaaaattcaaccatttcaggaacaagcgctcacatcaaatcgatcattctgaaattaccagtagcgaaattgattcgcttacaggtttaatgcagcaaggttatccctcagagctaccttcaatgagagatttcagattaggagtctatgaaggacaagtccggcatgtatgttttggcgactcaaacacttcccttagagataaattgattatgttatatgcaatgttctcaatgagagctaacttcgaagctgaatgtcaaagcgttaattag

SEQ ID NO: 152350 - DNA, 276 bp, Enterobacter cloacae
atgccaaaattcaagagaataatcattagctacttcagtggagagccaggggggctaatgaggaaggctgggtttacatggaagttctccaggtctgttccgatagccgactctgttgagttttattgttgcgagcgtaggaaaaaagggccgttgccggaccactttcatagtgtcggctggagtgatgatggggcattttcccacttcacagaagagcaggttaaggaatgcaagcagtgggcagcagcaccgcagcagggggtgaagccgtga

SEQ ID NO: 152351 - DNA, 966 bp, Enterobacter cloacae
atgacgcgcctgctgtttatgcttctgctgctggtggccagcggcagttgggctgactgtcgagtcagtacggtcaacgccgcgtttgggagtgtaacctcattcgcgctgagtggttctggcgaagtggcaaccaccggtacactggtcgtagcctgtgatgcgctggtgaacttgctgaccggggacaccatcacgctgaattttgtctcagcaaccgtttcggccaatggtcgtgcgaccatgaagcgcaccgacaacgcggccatcaccgatgtgatcccgacgcgcctgtgcgggcagtcgggctgcgctaacaacagcgaagtgcagaccagtaaaacctatacctgggacagcagtaccttgttaaatctgatcggcggcaaacaatacaatatccctctctatttccgcacggtaccggggcaaaatgtgaccgcgggtccttatcaggtgacgctaaacttcgatatcacctatagagtctgctcggtgggcgtgctcaacgcgtgtttgtcgggactgcaaaccggaacgaaaggaaccagcatcacgttggatatgaccatcaccaacgactgcagcgccatgaccacgccggacgtcaacttcaacagcgcgccgctggtacaaagtttccccaccgtctcacaggcgattgccgtcacctgtaccaaaggcagtacgtataccatcggcattaacaacggtgctaacgcgctgaataacgtgcgccggatggtaagcggcagtaactacctcagttatgacatctataaagaagccacgggtaaccgctggggcggcagcggcagcgaacgctggaccagcgcgacgtcgtcgcaggtcagtgctgacggtttactgcgtacctacaactacaccgcgaaagtgctaactaatcaggccacgccacccgccggaacctacaccgatacgctgattgtcgacgtggctttctaa

SEQ ID NO: 152352 - DNA, 2961 bp, Enterobacter cloacae
atggcgatataccggttacctgagcagttggatcaactctctgacgaacaatcttccgagcgacatagcgttgtaaaaacggaactggatgcactcgatgaagtaatcagttatgcagaagagcgtcggcgttccgcgagtgcttttcagcgaagaggctatgaagagctttatcgccatggcttcgggaaaacagtcgtcattgacactgaatattcgggccgtcaggtgctgcgtacctccctggcgacctgtgattacgccagcactaagttaggatacgcgacccctgactcacctattggccggttatgccgccaggcccaaattgggttgaaatctgaaagcaatcaatgggggcggtacactattgttgaaatccgcaatttcgctcgttttagcggtattgaagcggcacagaacatcaagaattttcaggtcatggaatcaacgtcaattgcggataaaggtaagcagggtcttcagactgtaattaataatctgaaactctctttacagcgctggtatcgacctaaacatcagcaagccgttgtaacagatgtggcattgtcaccgctcctcgaaaacattccagctgacggtatcgagcaggagtcggaaaactggttggattttgcgactggacaagattatgagttgttccaggatgatgccgaagagcaattaaatcactacgatatttatggtcgcagcgatgatgaccgtgacgattatattgggctgagcagctatttctttctgaacccgacagaagaacagctccgcgttatgactggcgcgaccactacgggccccatgcttgttgaaggtgtcgccgggtcaggtaaaacctgtgtggcactggggcgtgcgaagacactatgcgacttagcccgtacccccgatgaagaacagtttaatgctgactttttagatgaaagcagtgtgggatttgtacgaacgggagagctggtaaactatctgaaggcttcctgccagtcgctgagcatcgataaactaccaatagaagagtaccgttcattggtttatcggcttaacaatgttcgccagcttgagcagcgctccacatcgaccggcgcggaagggcagaaagtgactcgcgccaggtatacgaatgtctcagaaaatctttcctatgatttctctgctgaaacaaccatgaactggcttcatgcgtcagcgcaagcgatcggcgctcttcttcagcttgaactggaaaaacaactggcctcactcagcatccccgctgagctactcaaagcacatttcctggcagaaactaaagccggaaatgccttactggaactcgtgaaacggagcctggcatcagattatgcttctcttttcaatcagctctctgggcattctggcgacgcttttgctctggataaccttctgagccggttggtcaatgcatatgagaggatcgaacgtgatttgtttgataagaatacgctctgggtgcatccgtctgaggaagaatggctgattgtaaaagaggctaaagcggcagtaacaaccctgcgtgaaatgagcgtggtgttagtcgttgtcgaacgggtccgtgatgagaatgaccgaattcgccggaaagcgacggagatattgattgaaacatacaccgatttgctcaacatttttgcgcaaaatggcagcgtgcgaagcgaagatggtctgagcgtttatgttgctgaagatgctgagattatttgggaatgtcgcaccgatcttaaactggtgtgtgatattccaccggtggtgaatagcatcaaaatcacgtgggcgaaagattttgacgcggtcaacatccatctcatcaaccaaaagctgtttggtattaacaagaaacgcattttttcgttgtctgagtcgaacccctttgtacgcaaaattgaagtgggtgaagagaaaacgcaaacctctctcgcagcacggcttcgttctcagatgcaacggatttatagctcgtggcagtatgccgatctctatcgggatgcgttgctctccttcccgcaatactggcaggactactcgcatgtgagtcaggcgtcagaacgtctgaaagcgaaattactggcagatcatgacaaagatattctgttagcgcttgctcaaatcataacgcgtggtgcgcaatccagtcggcttgctccacgcttgcaggagcaaccttgctatccttctgttttcattgatgaagttcaggattttacagaggtgcaggttttcctgatggctcaacaggccgatccgaaatatcacgcggtaacgctagtgggggatatgcatcagcagctagggcgtgggaatgttcgcgatcttgatgcctgtttcccttaccattcattgacaaaattcctgctaaaagaaaataaaagacaggaacgagagccgcagctggcggcgacgtcgatgctctttcgcgcgttagttcagaacgatagtcgcctgcaggagtcggcagggcagctcactctctggcgagaacaagcgcaaaacgggactaataaaaagttcatcaaccaacctttcgacaatattgatgctgaattggtcgatctcattagtgaacaacctcatgggcggactattgctgttatctgtccagacctggctctagcacgggaactggaggagcgtgtacgcaatgatttgattcagaagtcttcaaggactccgcgcgttgcagaacatatcgatctcgcccaaaagtatcaggttcatttttcctgcgctgagaatgtcaaaggcctggagtttgacaccatgatttatgttgggcttgagaaaatagactgggctaatccacaagagctcaacaaagtatatgtaacgatatcaaggccaaggaagcggctgattatgtttggtaatcaatatgatttacccgacactgtcgcaacatgcttacttacttattctgaatgcaggagtgcctga

SEQ ID NO: 152353 - DNA, 4032 bp, Enterobacter cloacae
atgtcgtggctaactctgtctgaacaacttgttggcagtgtggaccttgcggacagaatgagaggcagttttacagagttgtctggacttgagcttactaaacaacagtttgctgatttttgtttatacagtgagtttggtcgtcgccctaaaaatgcctggaccctcgaaagtctggggctggtggccatttactatccatttattgataaagtcacaacctgcccgcaggactggaaaacattattacccgaccccgataagcaattaccggaatggcgtaatttattgaagattacccttgatttctttatacgtgaaaacagtgccgttttttacgaaaacgaggagtaccctcgctggatgggggcacgttttccggtaaaaatgctgcagggaccagataaaaaatataaagggcagaaacgtgatcaactttggccacaaatacgcgatcgccattataaccgggtaattaagcttttaattgccgtctttccggcaatacagcctgagcaggctcactggaaagcgttggttaatcacttaatgattgaagtctgggaagctattcgaccatgtctgcgtcagtttgaatctggttatcaactggacattaaaaaacaagctgaattttacagtcctaagcaagtctggcgttgcccctatactcgccgtgcgttagatgtcactttattgggttattctccgtatttaccaggtagcaaagagatagcacctgaaaaagctgtagtgattgaaatgcccgagcttcctgtgcgtcactggcgtttatccggtggtggagaaatggcgcgagaagagcgcctgcactggttggaaagtaatgggctaattcaacatgctcgggaggagggggtatggtcaactcgcagcgatagattggccctgaaagatagctggtatcgtctggaggaacactcagcgcagcgaacgccagagaagaaccagttcaatgaaaagcaatttaaggcagggaaagttaatgtgctgaactgttccacgaccatggaaatgggcgtggatattggtggtatgagtttggtcgcgatgaataatgttcctccggctccggcgaattatttgcagcgtgctggccgtgctggccgtcgcggtgaaagcgcatctgcggccattacgttatgtaaaaacaccgcgcatggaatggaggtattcaaagaccctctctgggcgttcaacaccgttgcgagtgccccacgggttcgttttggtagcagtagtattgttcagcggcatgttaacgcattggttttaggtgcgtttttacgagctgaagttcctgatgcgacaaaactgagttgtaaatggttctttgaaggtgatgatagccagtgtcttcgttttctccattggttaaatcatcaggccgatcaactggcggacaaacttaaacgccttacccagggaactgttctgatgtcattgacgccgacacagctcttgactcgtacgcatacgatgatgcagctggttgatactcgttggagaagccaacttgccatactgttggaaaacgtcgaagcgttgaaagcagataacagcgcgtgggaagaaacgccagcaggtaaagccatcacttatcagcttcgtgattatcgcggggcttatctgttttctaaactcatcagtgaagcgttcctgccgggtcatggtttcccggttggcgtggtcaatttcaattatctgaccgcggatgaactggaaaaacgtcgcgcaataaaagccactcaggctgaccctaatgaagggggagaaaacttttctcgccgcattgaaaaactgcccagccgtgacctacccacagcattacgtgaatatgctcctggtgctgatgtggtattgggcggaaaagtgtatcgttcctcgggtattatgcttggtaaagtacttgccagcgggcaggagctgtctggcgatcatcatattccgtggttttggcattgccgtaaatgcggcgcgggagcgaccagcgccacccgccctgtcgaatgtagccactgcaaggcagagatacagcagcttgatgtgaagcggtatttacagcctgtcggttttgcgacagacattcgttatcaggcacataatgatgtatccatgcctgcgcaacttccctggaaagatcctcgtgttcttgtaccttcttcggtgtgggtctccttacccgatgctggactcggacgttaccgttttagtcatagcggggaattgttccacttcagtgagggtgaatttggtcatggctacgcaatttgtctttcctgtggccgggcagaatctcaaacccagccccagcgtactccggagaatctaaagaacccggagaaggaaaatacgcactacctgttgagaggcggtagtaatgatcggcaggggaacaataaattgtgccacggtcatgttcataaagatctgtggttgggatatagcagccgtactgatatggttgagctgcaactcagtgatgataatggtttattgatcagggatgatgttgccgcgcgttcccttgcggttgctttgcgtgaaggattagcgcataaattgggtatcgaaaatacagagctgggcgtgacgacgcagcaagcgcgcgatatcgatggcttcactggatattctatctttatttacgataataatgctggtggtgcgggttatgcagtgcaattgatcgataattggtcggatgtctttaattacgccagaaaattgcttgattgcagctgtgataaattctgtcaccactgcttgctcagctacgacagtcagcattatgtcggtaaattagatcgtcaccaggcattaaccctgctcactaatcttcgtcttcagcggcttaatctcgcgccagaatatcagtacttcggagaaagtagtcgggttgaaaccaacccactcagtctgcgtattgcgcaatgcctgaacagcgaggtttatgattcttgctcgttggttcttgctggggcgcaggaacagtggagttttgcgcaatggccattatttaaagagttactccagtttgcttcctctgggggcaatgttgagttgctgattgccacgcagctggaaaacttagctgatagcaccagacatcagctttccgcgctagcggcgataccaggtgaacgcttgcaagtgaaatctatagccactgcgcaacttgtgcaagggaaagggcacttactggcacaggtcactcgtgaggggcaaacccaacagtgggccgctgccgacagtgccaccgtttcgcccggtgaattatggggacaaagctcggcatcgccggtagtgacgattaaaggggcgtccaggaaaacattctcgggtcaggctttgagtgcagaagacttactgccagcattgcccgccggggcggtacgcatcaatctcagccaacaacttgacggtcaggtggaaggttttggttcgcgtttctgggtactgatagctcagcagcatgctggctggaagaaggcttttactaatcgatgcgaaattactcacgtccattatagtgatcgttatctcaatagcccgtttactgtacgtttgttaggtgaaattttgacggaactggttgaacaggggctggcagaacgcgccgaactcactgtttcagttaaaaagttagagtacagttctcgccaacacgattcactctataacgcatggcttgatgagcaggatcgccagcaagttatgaccacgttgctggaagagggctaccttgggccagcctggtcagggaaaatctcatggttagcaggagataatcagaacaccgatcatggacgtgaactgaccgtgaccttcagcgatggcagtgaacattatgtgttgctcgatatgggactaagttactggcgttgtacgggtgacacattcttcgatttttcaggacgaataccgaatcaggtcgagcgcctggcaacatgccgggcattagttatagccccggataatggattgaagagttatatcatcgcaggctaa

SEQ ID NO: 152354 - DNA, 1665 bp, Enterobacter cloacae
atgacttcataccgtagaatgcttaccaatttcgggcaccgattacccgtgacctcagaacggatactttttatgaaaaaactaacttctgatatgacagaactacaatcaatgaatatcactgaagataatatctgtaagctcaaatcattgtttccagaagcttttaatgaagatggcattgattttgatgttttaaagcagcttttaggtaaaaatatagacgataaagaagagcgctacggcctgaattggcatggtaaacgacaggcacgccaacttgcgctcaccccttctagtgggaccttacgtccatgtaaagacgaaagcgttgattggtataacagcaaaaaccttatgatagagggtgataatctcgaagttttaaagcttcttcaaaaaagctattctggtaaggttaagcttatttacatcgatccaccttataatacagggaaagatttcgtttatccagataattttcaagataatatgaaaaattatcttgaaattactggtcaaatagaaaatggcaagaaaataagttctaatattgagaaaggcggtagatttcatacaaactggctcaatatgatctttccaaggttacaccttgcacgtaatcttttgaccgaagacggcgtgatttttatttctatggacgattcggaaatagataatttaaaaaagatttgtagtgaaatcttcggagatgataattttattgccaatattgtttggcaaaaaaaatattctccacaaaatgatgccacttattttagtgatatgcatgatcatatcttggtatatgctaaaaatgccaaattagcaaaaaatcaagaaaaaggttggtccattgatttgcttccaagaactgatagccaaaataaagcctataaaaattatgataatgaccctagaggagagtggaaggccggcgacctttctgtaaagacctattcaaaagcaaatgattatgaaattactaccccttctgggcggatagtttctccacctgctggaacttgttggcgagtatcacaagagcgatttgaagaactcgtcaatgataatcgcatttggtttggtcaggacggaaataatgttccagcaataaagcgattcttatcagacgtgcaggatggtatcgttccaacaacatggtggacgtatcaagaagttggtcataatcaagaggggaaacaagaactaaaaaaaataatgaaaggggatgatatattttttgatacaccaaaacctgtaaaattgattaaacgcattttagatttggcgacaaacaaagataagaatgcaattgtacttgatttttttgcagggtcagggacaacagcacaagctgtaatggaaaaaaatctagaagataatggtagtcggcgttttatattagttcaacttccagagccgatcgagagtataaaatataaaaccatcgcaaaaattacagctgaacgtattagaaaagcagggggtaatattaaatcactctcaaattcgaacatattagatacagggttcagactatttagcttagatacatcaaattgtcggctttcaatgtttacactcaggtctataccacgtttgagcataagttcaataagcaagtccgcctcattacgtccctgcttaattgggctagcatag

SEQ ID NO: 152355 - DNA, 216 bp, Enterobacter cloacae
gtgggtgtagcactgttggtttccagtatcatttttttttgtatcttcggcctcgtaacgttcatatgtgccgctgttgataaaaaaacaaacaaagcaagcgtaattaacatgcttgacaaattcttctattttctaacaaaattgattgttaccccaggttttgttatattaacattctccatattaacatttctcgtatataagagcaggtaa

SEQ ID NO: 152356 - DNA, 366 bp, Enterobacter cloacae
atgaaagttattaatgaaaatagagagattactcactctggtgtatacataattgaaaaagaaacatccatatccttcaattttactgaggactcagacgcagcaaaagttacactggaatttatttttgatgaacaaaaaaacaatggggaaaggacatccagctcaattgttgatcctgacaataaaggaataacacttaaattatataactttaaaagtgatgatggtgaaggtgtctttcctaaaaggtataaactttatgaaaacagtaaggccatacacagcttaatgttttcaacatatatttttaatgaaaatgtaagaaacttgaccataactttttttaaagaagataaaaaatag

SEQ ID NO: 152357 - DNA, 132 bp, Enterobacter cloacae
atgtttaatggcgtgatgttgctgtgtcgctgggaaattttaccgacttcgcgggacatgttgagggtacaaaaaagcccgcagggcttacgccgtgcgggctttcaggacttcatcagtcgactctggtga

SEQ ID NO: 152358 - DNA, 321 bp, Enterobacter cloacae
atgaaaactctacctgctacaatttcgcgggcggcgaagccctgtctgtcgcccgtagctgtctggcaaatgctactgacacgcctgcttgaacagcactatggcctgacactgaacgacacgccattcagtaatgaaactgttattaaggaacatatcgatgctggtatctctttagttgatgccgtgaattttctggtggaaaagtacgaactggttcgcatcgatcgtaaggggtttagctggcaagaacagtcgccttttattactactgtagatattttaagagccaggcgaactatgagggaaacaagaacttaa

SEQ ID NO: 152359 - DNA, 321 bp, Enterobacter cloacae
atgagcagtaatgtcacatggggactgcagcgggatatcacgccacgcctgggagcccgtctggtgcaggagggcaaccggctgcactatctggctgaccgggccagtattaccggtaagttcagtgacgccgattgtcttaagctggatgtggtatttccgcattttatccgtcagatggaatcaatgctgaccactggtgaactgaatccccgtcatgcccactgcgctaccctgtaccacaacggttttacctgcgaagccgatactcttagtagttccggctacgtatacatcgctgtttatcacactcatcgctaa

SEQ ID NO: 152360 - DNA, 867 bp, Enterobacter cloacae
atgatgaataattctgaaggtctacagccaattaagcgatctctatcggatttgccgcagtggttgactgaacgcgttttgcagcaaatcaatcagcttactagttacgagcccgtaatcggaattatgggtaaaactggttcgggcaagagtagtctgtgtaatgccctgtttgccggtgaagtatcaccagtcaacgatgtctcgtcctgcacccgtgaacccttgagttttcgcctgcaagttggtgagcgctttatgaccatcgtggacctacccggtgttggcgaaagcggagttcgcgatacagagtatgcagagctttatcgtgaacaactccctcggctcgacctggtgctgtggttgatcaaggccgatgaccgggcgctgacggtggatgaacatttttaccgggaggtgattggtgaggcataccggcataaggtgttgtttgttatcagtcagtccgacaaggttgaacccacctgcggtggtgaaaatctgtctacagagcagaaacaaaatatcagccgcaaaatctgcctgctacatgagttgttccagccggtaaacccagtctgtgctgtgtcggttcgttttcagtgggggctacgggtgatggctgagcggatgatccgttgcctgccacgggaagccagcagtccggtggcagtacagctcagtgcgccgcttcgtaccgatgccgttaataaaaaagcgcgtgacgattttggtgaaacggtcggctcagtactggatacggtaagttctctgcccctgatatcggtcccggttcggacagtcatccagtctgtacgcgacatcgtggtatcggtcgcccgtgctgtctggaacttcttcttctga

SEQ ID NO: 152361 - DNA, 2289 bp, Enterobacter cloacae
atgtttaattttctgaagaaaaaaaaagctattaaaaccatctcgttagacaacgattgcaccagcacttcaagcgaagtgatagcaacaaatgaccaattcacttcggatcaacctataacgggtaagtcccaagaccgttttaatcgagcaccatttgccacccgaatagcggaaacgatcgctaccagaggggagcattcaagcattgtcataggtatattcggtccatggggggacgggaaaacctctgttcttgaaatgatgcaagaaacgcttcaatctcatgctaacgttgttactattcgttttaatccttggcatttccagagtgaagaactactgttaagaggttttttcacgaccttagctgatgggatgggacagtctcttccgaatatgaaagagaaagctggcgagcttttgaaaaaatatggaaatctactttctcttgcatccataaccgttggtggagtaattcaaattactccaggtgagacagccaaaggatttggcgatgcgatgtctaatgttggattagatgaacttaaagctcgcattgaagggatgttagatgaagcaaataaaagattggtcatcatgatagatgatattgatcgtttagaccgtacagaaactcatgcaattttcaagttagttaagctatccgctagttttaagcatacatcttatgttcttgcatttgatgatgcagttgtatctgcatctctcggagaacgttatggggatggcggctccgctgctggccgtgcctttttagaaaaaattattcaggtgccattacacctccctcctgcagatcaaaatagcctacgagcacttgctttagaaagcattcagaatactttaaatcaaactgaaatacaattaactcaaccgcaagtagatacattcattagacattttgatgatgctgtactaccaaatcttgaaacaccaagacgtgcaaaattatattctaatgcattaatgtttgcattgccgattcttaagggggaggcaaatccggttgatttaatgctaattgagggaattagagttatattccctagtttgtatataacaataagagaaaacccagagctttttctaaatggagagagagatagatctcaacgccgactccaagatagaggcggggaaattgacagtcttattgagcaagctactcccttgttgacagatagcgagcgtgaagtattaaaatcgcggcttctggtcccactttttcctcgcattggaaatatgggctatggccacgaatgggaagaaacttggggtaaagagcaaaaaatatgttccagtcagtatttcaagaggtattttacgtatagtatacctattggagatgtccctgatgcacaaataaaatccctatgtgaagacctaccttcagcgactgatctagaaaagcgagcgatgttagaaacattagctttacggcaagcattgccacgtgcaatttcaagactgcgccaattagtggactcgttgacgccaacgcaagccatttcccttattactgcattaacaatgaatggtgattttttaccccgtgaacgaggcatgatgattcttgccgatacacaggccaaagcagcaatgctaatttcggaactattaagacaaataccggataaacaatctcgacagattgaagctgaacgcgctattcaattggctacacctattagttttgcgatggagtgtattagatggataagtcactacgatggtaaatcagaggaaaaaagagttttatctgacgacggtgaactatcgctaaaagtgattctcactgcacgtattgaagatgcggataacttatctcctatttttgtaagttactctaaagacgcatcttctttgtattggtgctggattgatggaacgtctgaaacacacgttcagaagaaaataatatctcattttgataaagacccagaactattggacgttttcttagcatgctatgttggagaggcgtggggaatggagagtggtctcccaaggccagcagactttagaagagatcaatacaacgcggtatgtagcattgttcccgcagaatatatagcttcaaatcttaaattacgttatggggaagagcttgaacaccctgaaagttatccatctgaaaatatgttgcaagctcgccgtgttgcgcatcaattcatgaatgtacatcaatatgttcttgcagaaaagaaaaatgccaaactgccttcagatgatgctccatctgacgaaataagcactaaagagtaa

SEQ ID NO: 152362 - DNA, 498 bp, Enterobacter cloacae
atgattacaatattgaaaaaaatggccaaatcatccgctactccagttttttgtactttattaggagtgataatctctagtggattaggttggtttggtagctatcagtcaagccaggtaaactacaaatcatcctgtatcgcgcgtatagaccaacaagaagcaatacttcgggataagtacagtcaatttcttgtggcgctgactaacttctcattctccccagacatcgtgggaagagataacccacagatttttaggaaaatttcgctcccccttgctgcaagtgcaatggaagtgacagcttatgcacctacatcacttacactagtaacattaaaagttactgaagcattaaatgcagcaatcaatgctggcgatgatcagattaagcgtgaagaatctattcaaaaggcattacaatcatcgtcaggttcgtataaagcttatcatgcgtcattggatgaattaaccaaacaaagggctggctgtggataa

SEQ ID NO: 152363 - DNA, 516 bp, Enterobacter cloacae
atgaagctaagatcatccactttatctataatcccattgttcttattttgtggaattgcactagcaagcgatcctgttcaaattacggtaacaggacaaatagttgcaagtccatgcagcatatcgaccgaaaatggaagtcagactgtcaatctcggagatgatttacagtctgctgacctgcagaatgccgggagtccaaccccctggaaagactttacagttatactggataagtgccctgccgggacgaccacggtagacgcaacttttcatggaacaccagatgatgatttcccggcttactacaagaatcttggtgacgcaaaaagccttgtaattcaattagacagtaaaggtggtacttatgtattacgtaatggttatgtttggtctcaatctgttgttaatgggactgttacctataacttttctgtcagagcctattcagacaaaggcggtgtaacgccgggtactatttcatctgttataactattgatttcgcatataagtaa

SEQ ID NO: 152364 - DNA, 948 bp, Enterobacter cloacae
atgcacactattctgggcgccagcgggcaaattgcccgtgaacttgcccgcgagcttaaacgccaatataccgacgagatcaggcttgtcagccgccatccgcagaaagtcaacgccagcgatagcacggttgcagccgatctcctggatgcgcagcagacgcaggtggcgattaacggtagcgatacggtctattttaccgccggtctgccgcctgattccgcgctgtgggagcgtcattttccgaccatgctggacaatgccctggaggccacgcgtaaggcgggggcaaaattcgtctatttcgacaacacctatatgtacccccagagtaacgtgccgcaaaccgaagagacgcgctttgcgccccgggggcggaaaggccacgtgcgcgccctgatggcaaaccgggtgcttgacgaaatgcaacggggcgacattcccgtcctcatcggtcgggcgccggagttttacgggcctgagaaaacgcagagcttcaccaatacgctcattatcgacaggctgaagcagcataagcgtccgcgcgttccggtgcgtgacgacacgcttcgcaccctcatctggacgccggatgccagtcgcgcgctcgctctgctgggcaatacccctgaggtctacgggcagacgtggcacttgccctgctgcgatgaaaggctgacgtaccagcagttcgtcactctcgcctgtgaggtctttggacagccagcggactactccgtcctcggcaagttggccttcgccgcgacggcgctgttttcgcaaggcgcgcgcgaaatgcgcgagctgttgccccggtacgaggctgacaacctgtttgattcgacgaagtttaaagagcatttccccgcgttcaccgttacgtcataccggaagggactcgagaacatctggcaagagtggaaatcaaaagagcccggtgcagcgtaa

SEQ ID NO: 152365 - DNA, 570 bp, Enterobacter cloacae
atggcaaagaaaaaaccgtttagttttgctcaccttatgggtcttggcgcttccgcttcagaggaagaagaggataaaaaagccaaaaaagcgaaagcccgtcgtgctgaagaagaagaggaagaggagaccgcagaagaggaagaagaggaaactgcggaagaagaggaggaagagacagcctccgaagaagacgacgatcctgaagcagaagaagatgaagacggtgatgacccaaaagaaagtaagtcagcccgacaggcgcgtagtgcagagcgtaagcgctgcgcccgtatcttcggtagtaagcatgcagccgcgaatccttcactggccgcgtctctggcgttcaataccgggatgagttctgcagcagcaattaacgtcctggcctcttcggctccggcagcagcatcagcgcagccaccccgcaaacgctctctcgatcagcgtatgcaggaaagccaccaggttcggcttaacccggatagtggacggaaagagaccggaaagtctgcgctggtaagtaaaatgaccggcctctacaactccacaagaggagagaaataa

SEQ ID NO: 152366 - DNA, 186 bp, Enterobacter cloacae
atgatacggaaaccggtttccattcataaaagacagaactgtgacaaccatcaagatccaatacttatgaggctaattaaccggatgaaggtcacattatttggctgttttgacatcatttggagtggaaacggaaaatcggtttccatggaaaacggaaacggatatactccgctctggctataa

SEQ ID NO: 152367 - DNA, 387 bp, Enterobacter cloacae
atgataactttccgtaagttgatgggaaaaataaattcaaaaccaaactctgttcagaaatcatcgcttgaacaatggtttgaacgtgtcattgatataccaatagaagagctgtccgtagaagatctttgtcgtgctattcgtcaggatctctttatcgaccagctaatgccaagagtattaaaagtattggaggaagaaccattggcgggggaatattacgatggtgaactcattgcagctctggcaacagtaaaagtagaggatctaaaaaatcatatggactgttttgaacaggctaagatgattataaataaaataaacacttctgatattgataatgaattaagaaaggatatattgaaaatcaataaaaaaggtacgtga

SEQ ID NO: 152368 - DNA, 276 bp, Enterobacter cloacae
atgcattgcgcagaggtaagcgcatccatgaaaaaggagctattttatggctttgacaagaaattcattagctatgctgctgtaggggctgccacgccgttttcgacgcctgatgatgctttttttgtccgcttttcccaaaccctttcgaccggcgcggatacccagatgctgaccaaaggtaccagtaaaccttctgtgtatatgggttacggttggcgtgactggtacagtcgggaactgaaattggtccagcaatttaatactgtattgtga

SEQ ID NO: 152369 - DNA, 261 bp, Enterobacter cloacae
atggaccataaaaaaagaatcactgattattctgaaactgagtttttagagtttgttcgcggaatttttaatccagcaaattcttctgtaaataaagacgttgagaatgtgctttattttgaggaaataacagaacatccagagggttctgaccttattttttacccttcaaaaactcgtgaagatacccctgagggggttgtaaaagaaatcaaagaatggcgagcagcaaatggtaaacccgggtttagaccggaataa

SEQ ID NO: 152370 - DNA, 285 bp, Enterobacter cloacae
atgtcaaatattcgttttaccccgccaacacctgaacaacgccgcaccattctcgcagaatatggcattaagtttgatcgccgtattcgtgaaagtgaatgcttcgaaataaccagcctttcccgttccacccgctggtatatggagaatgaaggtaaattcccgccacgctgccactttggccgtaatagttgcgcatggcttttgtcagatgttctttggtgggttcgcaatccacctgctgttgagaacgtcaacaccccttacaaccgtaaatccgcgtaa

SEQ ID NO: 152371 - DNA, 780 bp, Enterobacter cloacae
atgcaaaaattaaatgagttggttccggttaaccccggaaatattggcggcgtgacggtatcgctggtcagtgcaaaaaaactccatgagtttctcggcgttgggcgtgatttcaccacatggattaaggggcgtatcagccagtatggttttactgctggtgtagattttacggtggtggaaaatttgagcgcccccgtttcggggagcgcaaaatatcgccaacaaattgcacatgattacctgatcaccatcgacatgggtaaagagctggcaatggttgagcgcaacgaaaaagggcgggaggtgcgccgctacttcatcagctgcgaacgccaggcaaaagccgccgctaatatcccccagacgttgccggaagccctgcgccttgctgctgatctggccgaaaaggcaagcgaacttgaaaaccggctggtggccgctgcgccaaaggttgatttcgctgatcgcgtggcggagatcagcaagggtatttccattcccaactatgccaaagccgtagggcttggccccatcaaattattcggctggatgaggcaacaggggattctcatcaacggcggccagcgccacaacctgcctatgcagcgttatatcgatagcggttattttgccgttcgccagggaacgtatgaaacgaatggcgaggtaagagcctcattcacaacgatgctgacggggaagggtgagcagtggttaacgaagaaactgatcgctggtggcgtattgccggaggtgccgaatgctgacgctgaataa

SEQ ID NO: 152372 - DNA, 270 bp, Enterobacter cloacae
atggctgacaatcagtctacccaaactcgcccggaatttacatggttattcctggcaacccccgatcacactcctgaatgcacaccagtagtgcttcgctttgatgctgacacggaagctaaagcccgcgccgctttccccggctgggatttagtttttgccgccaaaatccgcgctcaggctccttgccgcgttgcgttcttcgattacaccacccgccgtggctgggagttcgacagtgccgcgattcaggaggtgcgccatgcgtaa

SEQ ID NO: 152373 - DNA, 189 bp, Enterobacter cloacae
atgcgtaaggtcaaatggtcggaaattgacattgaagatgaactgcgccgcctggaagcgttgctctcaacatcgctgtatatgaattttgatgatgaaaccgagtacagcgttgcgatggatctgatcagtatgtcgttgtcccgcattcgtgaactaaaagcggcaagtgaggtgacccatgcgtga

SEQ ID NO: 152374 - DNA, 315 bp, Enterobacter cloacae
atgcgtgatatttaccatcagcttgttaagagcactcctgattttaaaaacttcactgatgaggctttggctgaatccagcgatttatattctactggcgcatttgccatcaatagtgcgctcacactgatcggcaatctggcgtttgatgcaaccaatgcagaggactattccgatgaagatgcccggcgtgatttgatccttgtaagccatgcattgcgtcaccttcccagaatggcgcaagcactcaatcagagtagtgatgctgcggattatgtgcgtacccagcgtaataaagcaggggagcaatcatga

SEQ ID NO: 152375 - DNA, 366 bp, Enterobacter cloacae
atgaccgatatttttgaagtgataggcccattgttccgcaaactgaccgaaacctgtattgctcaccagatagcggaaaccggttcggcaaccttgctggtggaaagcgataagtatatggcccgctatcgcttcacgctggagccgcgcgtaactgaaaacgtattgatgaaatatatgatttttggctgctttgaagaattcgggcgcgatgaggggttaaggcgtttgcgggatattctgctgacctgctttaccgacgatggcgatattaacgaaatggggttgcagatagtgaaaagctgccaccttgagtacctgcatgaagacctgggcgcggatatgtccaataaggtgttgcactga

SEQ ID NO: 152376 - DNA, 1251 bp, Enterobacter cloacae
atgtggaatatctggccgtttggccgcaagtctgaatcctctgagcaacgcagcataggcagcatgaccattgatgagtttctggcgatggcagggattccaaataccggatcaggcgaatatgtgtctgcgggtactgcggaatctctgcctgcggtgatgaacgccgtgtcagttatcagtgaggccgtggcaacaatgccctgctacctttaccgcgtccgtaatgataacgggcgtgaggcgcgggaatggctgagcaatcatccggtagattttctcctgaacgagcagccgaacgactgccagacgccttaccagtttaaacgcacaatgatgcgtcactgtctgctgaacggtaacgcctatgcggtgatccagtggggccgagacgggcaaccgcaatccctgcacccgtatgcgccggggagcgttgttcctgagcgtatcggccagcataaatataaatacaccgttactgagccgtttaccggggctgtgcgcacctacctgcaggaagagattctgcacctgcgttactccaccgatgatggttttctggggcgctctccgatcaccatctgccgtgaggcgctggggttaggtctggcacaacagcgccacggtgccagcattatgaaagatgggatgatggcttcgggggtagtggtaactaaagaatggctcgacagcgtgaagggcaaacaggcaatggatgcgctggaacgttacaaaggtgccagaaatgccgggaaaacgccgatccttgaaggtggcatggactataagcagcttggcatgagcaatcaggatgctgagtggctggcctcccggcgcttcaccatcgaagatattgcccgcatgtttaacgtttctcccatcttcctgcaggaatacagcaacagcacctacagcaattttagtgaggcgagccgcgcctttcttaccatgacaatgcgcccgtggttggcgaacttcgagcagcagattaaatctgcgttgctggtggcatcgcctgtacctggaattcgttatcaggtggagttcgactctgccgatcttcttcgagccactccaaccgaacgttacgcaacttatgagcgcggtatcaagaacgggatcatgaacccgaacgaagcccgcgaacgcgaagggatgccgccgcgtgaaggtggcgacgaatacagccaggcatggaagcaggaagtgaaggtcagtaccggttctgagactaaggaggatgcgtcatga

SEQ ID NO: 152377 - DNA, 336 bp, Enterobacter cloacae
atgaggccgggaggattaaggcaacgcgtcacgattcagaattttactaccagccgaaccccttctggtggcgtcattcaggaatggtatgacgttgcgacagtctgggcagaagtgaaggggatcagtggccgtgagctgattgctgcgggtgctgaaatgtccgaggttacatttcgtatgtgggtacgttaccgctctgacgtaaccagcgccagccggatcatctggaaacagaaaggacatgatgcaaaagcatttgatattcagtcggcaattcctgatgaaaaggctaccaggctggagttgctttgtaagggagggcttaagccgtga

SEQ ID NO: 152378 - DNA, 300 bp, Enterobacter cloacae
gtgagtgaactaattgggcttgatgaggcaaaacttcactgtcgcatcgataacgatgattcctatgaagatgcaatgattcaggcatacatcgaagcgtcgctggaagtctgccagaagcatatcggtaaacggttcggtgctggcctggaattcactcctgccatcaagattggatgccttatgtacgtttcccaactgtacgaataccgcacgatgattagtgatgtagaggcgaaagagatcccccttgctatctctgcattgtggtctgtgtatcgcgatgtgggggtgtactga

SEQ ID NO: 152379 - DNA, 360 bp, Enterobacter cloacae
atggacgtccatctcagcttgctccaacattatcagcagttattaacaaccagtaacattatgcttgttctcacccaggcggggcgctgggatgagcttatcgcttacgaagttgactacctgacatcagttgaaaaactgactatgttccaggatgccagcgaaattccgcctcatattcaggctcaaatacgccctattctgaaaaaaatactcgataatgaaatcgagttgaaaaccttgctgcaccagcgtatggaagagctgaaagcattagttggacagacgtcgagacaacataatctgaactcaacatatggacgtttatcaggaaatgttctctttccatcagatctctag

SEQ ID NO: 152380 - DNA, 411 bp, Enterobacter cloacae
atgtatacaaaatcgggaattcaggcatatgctcaggtcggcgttgaatcggccgttctgagtgccagcccacatcaactggttgtgcttctttttgatggcgcattaagcgccatgaagaaagccatcattttgattgaacaaggtgatattcccggtaaagggcaggccataagtaaagcaatcaatatcatcagcaacggtttgcagtcaggtctaaaccatgaggtcggtggcgacctggcggcaaatctcgatagtctttatgactatatgaccaggcgtcttttacaggctaatcttcataacgacatcaatgccattaatgaagtagtggagttactcaataacattgctgatgcctggaaagagataggccctcattctcaaaacatgcgggacaattactaa

SEQ ID NO: 152381 - DNA, 1404 bp, Enterobacter cloacae
atggcaagtattagttcactcggcgcaggtacttcactggacctcaatacgttgtatgacaatttacagacagctgagcaaaccaagctaaagcctattactacccagcaaacgtcatataaagccaagctgacagcatggggggtggtgcagacagcactcactaaattacagactgcttcagatgcattaaaaaatacctctgctattgcacaatcaaaggtttccagcactaacacagcgtttagtgcgacgcttgccagcagcgcagctgcaggatcttattccgttgaagtaacgcaactggcggcagcgcagtctctgttgagccctaaagtcggcagcaaggatacagaactcggcgacagcagcatgagcacgcgcaccctcacaatcactcagccggggcagaaagatccgttaacaatcaccctggcgagcgataagacaagccttgccgatgtgcgtgacgctattaacgccaagcagggaagcgtaagcgccagcatcatcaaagcggatgacaacagttattacttagcgctgacttcccgtgataccggtacagcaaacgagatgaccattacgacggatgatagtcaactggcacaatacgtcagctacaatccatccagcgccaccaatgtgatgagtgaacaggttccagctgccgacgctaaagtcaatatcaacggtatcgagatcgttcgtagcagtaatgccatcacggatgcaccagagggcgttaccctaaacctgacgaagaccaataaaggcagcccggagacattgtcaattgtcaaagacaaccagccaatgaccgatgccattcaggcttttgtggatgcgtataactctctgcagaccaccattgccaatcagacgaaatatacggcggtcgatcagggaagcaccaaccaggacagcagcaatggcgatctgttgggcgacggaacgctacgtaatattcagacccgcctgcgctcgatgatttcggctagtcagggctcaggcgatctggccaccttatcgcagattgggattacgcaggatatcaccggtaagctgacggtggacagtaccaagctcaacaaggcactgaacgaaaaatcggccgacgtcgtcgcattcctgtccggcgatggaaaaaccaccggttttgccacccagaccagcagtctgctgaaagacatgctcggaactgatggttccgtacagaatgccaccgcgggcatcaacaagacgctgaaaaaactgtcggacgaatacgatcgcgtaaacgcgcagatcactgccaccatggcacgttataaaacgcaatttaccagtctgagccagcttgtctcaaagatggatcagaccggaagctatctgacccaacagttcaacgccatgaaccgttaa

SEQ ID NO: 152382 - DNA, 933 bp, Enterobacter cloacae
atggctgttattaatactaacaccctgtctctgatgactcagaacaacctgagcaaatctcagtcttctctgggcaccgcgatcgagcgtctgtcctccggtctgcgcatcaacagcgcgaaagacgacgctgctggtcaggcgattgctaaccgtttcacctctaacatcaacggtctgaccgttgctgcacgtaacgccaacgacggtatctctctggcgcagacggcagaaggcgcactgagcgaaatcaacaacaacctgcagcgtatccgtgatctgaccgttcaggcacagaacagctctaactctgcttccgacatcgactccatccaggctgaagttaaccagcgtatggaagaagtgaaccgtgtgaccaagcagaccgatttcaacggtatcaaagttctggataccggtacaggttcaagcacctacaacttccaggttggctctaaagataatgaaactatcggtatcactctgagttctagcgatagcttcaacctggcagctgctggcaacaccggcgcgacgctgaacaccaaagcgatgacttctggtgatgttgttaacggcaaccaacgtacgactgcagcagaaggttttgacgttctgcacggtgcggtaaccggtggtacaggtggtaccgcagcaggttctaccccactggcagacatcgataaggcaatcaaatctgtagacaaccagcgcagcctgctgggtgcctctcagaaccgtttcgagtccaccatcaccaacctaaataacaccgtgaacaacctgtccgctgcccgcagccgtattcaggattccgactacgcgactgaagtgtccaacatgtcccgcgcacagatcctgcagcaggctggatcttccgtactggcgcaggccaaccaggttccacagaccatgctgtccctgctgcgttaa

SEQ ID NO: 152383 - DNA, 906 bp, Enterobacter cloacae
atggcagtgattaatactaacactctgtcgctgatgactcagaacaacctgagcaaatctcagtcttctctgggcaccgcgattgagcgtctgtcctccggtctgcgcatcaacagcgcaaaagacgatgctgctggtcaggcgatcgctaaccgtttcacttctaacatcaacggtctgaccgttgctgcacgtaacgccaacgacggtatctctctggcgcagacggcagaaggcgcactgagcgaaatcaacaacaacttgcagcgtatccgtgatctgaccgttcaggcgcagaacagctctaactctgcttccgacatcgattccatccaggctgaagttaaccagcgtatggaagaagtaaaccgcgtgacgactcagactgacttcaatggtattaaagtgctgaacactggcactggctccagcagctacagcttccaggtaggttctaaggatcaagaaaccatttctattagcctgagcagctctaactcctataacctgttcaacgcctccggcgcaacctctgttaccactggtcagactatcaatggtaatgcacgttctactgctgcagaaggtttcgacgttctgagcggtaccgtgacttccggtggtactaccgatggtaacccgctggcagacatcgatgcggcaatcaaatctgtagacaaccagcgcagcctgctgggtgcctctcagaaccgtttcgagtccaccatcaccaacctgaacaacaccgtgaacaacctgtccgctgctcgcagccgtattcaggattccgactacgcgactgaagtgtccaacatgtcccgcgcacagatcctgcagcaggctggctcttctgtactggcgcaggccaaccaggttccacagaccatgctgtccctgttgcgttaa

SEQ ID NO: 152384 - DNA, 3639 bp, Enterobacter cloacae
atgcctgaaattctgataagtgtagacaaactggacgcatggtctgcttcgtgcacggaagtgctcgacatagctgatgccctgctaagacgggaatggcatgtgattctatgtacctcctttattgggaagcgtcttcagccagaaatggccagactgcaggcaactggagacctgacgattgttacagagaatgcgggagaactggccgcacgctatgacgttatatgggtcgttaaaggctttttttgcgagaaactgcttactgctctgtatgagcagaaaacggcgggctcttttatcttccgtcattatagtgattacaatgatctttatattccatggggcgccgagctggagaatgctctggcaacacgagtgcttggcctgtcggcgtttacgcagactatcctgctacacacggggatcgaggaagacaagctacacctgatgccgtggctcgtgccggacgcttactgcgaagattatgctgatcgtgaggcgcaagagttgcgccgaattctctatatcgcggataaaatgtccgctgaaatgtatgaagttcagcaacgcgcagcccagtcgcagctatacattgaatggctcgatttaagtgctcaatccgggcgtattgaaccagagtggctcgcgggttatgacgttattatcacggatgaacagtatgttccaaaagcacttgttctcggtgtaccggtctttttagcgcacgggaactacgttgaagggtatttgagcgatacaaatcttgcgtactatgaagctaactatttctccggggtaaatttgcgtttttgcccaggggcagacgagtggattcaactgctgaccgacggctatgaagatgccataaaatgggtgcataaaaatcatcagacgttcgtatcacgctggagccttgagcagaatattctcactgtgctagattttcctgtgtcgcaaaggccttatacgctttctgaaaaagatcgctatgcgctggcatttcacagcaaagcgctgttgctccagcagagcgaaaactactctattactcgctggataaaggatcgaaatatcacgagcgcgcgtcgcgaggctttacgtgcctgtgctgatgcctttccggacagagccagacttggtgttgttatcctcgcgcagaataaaacgactgaagagtaccagattacccatgcatcggcgctcgctcaatcgctagtgcctatctctatagaggtggcgtattctatttccgatattaatgcgttactggaaaacagccctgctcaggcgttgctaatgctccctgcgggctacacccttttagatgacgcgctgctgcgattcgctgagcaccgaattcattacccggaggcaagtgtcgcctattgtgatgaaatgacggttgccgaaaacgatgaaccgattgttaccttgcgccccggagttaatatcgatctcctgcgcagtaagccttatattggacaggcgctgctaattgattgccatgcggcaaaggccgctggtgggctgaaccctctctttgcttatacgccttttatcgatttgctctggcgtctggtcgagctgcagggtaccagtgtcttaacgcatgtgcctgaagtgctgctctgcaattctgaacctgcgcaacgctggactgagcagccaggtcttatggagcagcatcggaacggcgtactggcccaccttacgcgacttggtatttctgcctcctatgagccgggagccgttaaagctctaccgcgccttcgctatcactgggatgcccagccgatggtctctattattatccccacgcgcgatcgatttgctttactaaagaactgcattgaaagtctgatggaaaagacccgctacgctcgctatgaactgatgattgttgataaccagtcagtagagggcgatgcctgtcagttcctgagcgatttagcgagtcttgggctggagcaggtacggatattgcgttatgacgagccattcaattttgctgaaatgggcaacgccgccgcgcagcaggcgaggggagatgttctcgttttccttgataatgattgtgaaatcattgatggcgcgtggctggaagcgttactggaacacgcattacgcccagaggtgggcgtggtaggggctcgcctagagtttaaggatggccggatccagcatggtggctacctgactggcgttcaaaacggtgtggaggttgcttttgccggagcgggaggggctgactcaggttttcacgactatctttacgccccgcataacgtaacggcagtgagtggttcttgtatgatgctacgaaaagatgtgtttttcgcgcttaatggatttacgcaagaacgttatcccgtctattttgccgatgttgatcttggaataaggctgcaaaagcagggctatttaaacgtctggacaccctattcgcgcgttcaacatatgggcggagcgacacgccttctggccaataaataccaggttcccgaacgaccgatgctggaacactacgcacagttgcgtaacgagtggaaggccgagctgctcatagatccttcatatcatccgctcatgcaaaaatccggcgcgcttttcaccctgagtgaaaacagtgcgcgtctgcatgcccctcttccgggacgtcctgtaccagttgtgctggcgcatcatgttgactggaatggctgcgggcatcaccgggttatgcagccgtttaaagcattggagcgtcatcatatgctggagggcggtatggtgaacagcattccttcagtcatggaagccgcgcaacttcagccagatgtgattttacttgagtcactcaccgggagccgtttcccgaacattattcagcaactgcgtgaggtctgtaatgccaaagttatcattgagtacgatgatttcttacttaacgtgccgttgaaaaatggtaatcgtgaaaactacccgcaacacatggtcaagagcttccgcaaaatactcgaaagcgcagacagaattgtagtctcaacggcgccgcttgctgaagcctatagccgtttccatcatgatatccgcattgcgcagaaccgccttgctcccgaccagtgggggcatttgctgagtcagcggggggtaggtaaaaaattacgcgttggttgggcgggggggagtacccatgcaggggatctccaaatactgctacctctgattaaggcgctggagaatgacgttgaatgggtgtttatgggaatgaagccgcgtaatgtccattgtgagtttcaccctggcgttcctttcgaaatgtaccctgaaaagctggccaatctgaatctcgatctggcactggttcctctagaaatcaatcagttcaatgaatgcaagagtaatttacggctgctggaaattggtacctgtggagtaccgatcgttgccacggatattgctccgtaccgttgtggactaccggtgaccctagttgaaaaccgttttaaagactggatgaaagccattcagtcctacctcaatgacgcggattaccggagccgccagggggatgaattacgaaatgccgtacagcgcaactggtatctgcgcgaaaatggactcaatgactggcaacaaggttggttggcacaatga

SEQ ID NO: 152385 - DNA, 3399 bp, Enterobacter cloacae
atgactatgcatatagatcttcattctccctacctgattgccgcaccggactaccgtgaatcgtcgttgggcattcaggtacttcaccgcttatgccatatgatcaatgagcgtggtggtcgcgcctggatggttggctgtgccgtcaaccccgaatggaatgcgccagcgctcacggaagaagcctatgaacaggtcatctccagcggcaggtcatggattgctgtttacccggaggtcactacgggaaatcctttttctgcgccggtaaccgtccgctacatgctaaacagggaaggggtcatcatgcaaaacgccattgaggccggtgccgacgatctctttttctggtatcgccctgagtttgcagataaagaacccgatccgaatattctggggattgaatgttatgacctctcactctttcaggatgaccagccaattaaagataaagactttctctacctgaacaggatccctgaatctgcgcttgatttatctgggttaccagaaaacatcactattttgtcaatgcgcaaccctttgtcattacgcgaactggcgatgcttctgaaacgcgggcgggtgctttacacctatgagtcgtcaggcacctgcctgctagccatgctatgtggctgcccggtcgtttcgctgtctgttccaggctatgagcattatgcgttgaacgagcaatcgttacaggatattggtggtgccggtttcggttactccgattctccggaagcactggacgtcattcgggaaggtctaccgattgtccgcgacgttgttctggccaaaaggcgacttctggaaacccagtttgatcacttcctgtttctaacccaggcaaaagcgcagcagcacgatgaggtaaaggagcgcaactcattcagccactggatttctcaccgtactctgccgactacggttacagcagaaactcgtctgctacacgttattctttgcctgaatgcgcaggtgagcgctatcgaagcatccgtcgcctcacttacccgtcagggtgttgattcacgcacgattcttcttgttgcgccagaacctgggtatcacgctacgactatggatattcgcgcggttacggtagatagctgggttagtgctgtcaggcaactggctgaaactgaggacttcgactggctgcattgcatcgacgcgggtgttgaatatactgcggcaagtattgggttgatgcgtaatatgctcacgaaggccggggaatgtcaggccatttatacggatgaggcagtgcgcgctgatgatggtgaaatcactccggtacggaaaccggatttcaatctcgatctattcctcgctgcgcctcaccgctatttacgacgcgtctggttccggcgcgagagctggctggccacgggaaaatttaaccctgaattcagtcagtctttcgaatttgacgcgttgatcgattacttgctgcaatggggaacgggctgtattgggcatattacggatattattaccctggtgcctgcctcagtatttgatttcccgtctacgctcgaagaagcacagattctccagcgttatctgcagcatcgtggattttctcaggcccgcgccgtacagcaaaaaaatctgacatggcgtattagctatccacagccagaacgtgaaaaagtcagcattctgcttgatgcgggtgacgatccgacgcgactgatccgctgcgttgagagtctcataagtaataccgagtggcagaacaaagagattctgctggcggttgtcgaaaataccagtgcagaaatgattgatctcatcaagcagatgcaggaggtgatgccactaacggcgatcgtctgtggcgctgagcaaaattacgcaagtcgtatgaacctcctggcgcaaaatgtggctggtgattttattttacttcttgatctccaaacgctttttgtactgaaaaactggctgacgacattgcttagtcatgtaattcgccctgaagtaggaagcgcaggaccaaaatttatcaccgccgaccaacggttgctgagtgcgggaatgatcgctggggccgatggttgggttgggcatgttggtcaaggggaaccctggcaaacagaaggcgagctgtcacgctaccagtgcgagcaaaactattccatcctgagcagcaactgcctgctggtcaagcgcgaagcatggcaacgggtcggtgggctgtcggttgaatatgacgaccagcacgtcaatgatattattctgcctctaaagttgaaacgggctggttatcttgccgtctggtcgccgttcagtgttgtggtatcggacaatacacagcttcttgaaacggtgtgcgtcagtgagaattcgcagcgccagacattactcgctgagatgccggaggttttcactgacgatccggcctataaccgctatctcagtctacaacgtccattgttccgccatggacctcttacgaccaacgtgtctgacaatctctccttgacgctcgcgaaggttctgttgctgaaaaatggtgaggactgcgaatactcgaaacgtatagccgacttgctgcagaatctgtcgacagataacgcgatctgcctgatacgtgattcttccgaccttaccgtgccagaaatattgcgtctcgtaccgaaaattgtggttctaacccatgccccggataaggctctttcagcacgtcttgcggccgtgagccggattatccctttgcgaatttatgcgctggcggattcagccgggtcagacaataacgatcgggatcaggtaaacgtggtgacgcggtggcttacatggtctgcaaagcgtgcagcccagttaagcaaacgaaaaaggccggtgtcgtgtctgccggtgttgctagggtgtgaatgggtggcacagtcgaggccgacgtcggccgaacgcagacgcgttttgtgtataccggaagcattatccgtaaaagagcgagaatttattagccgggttatcgccgccacgtacgccagggtggattggatcattttgggggcctggcccgcggcgtggctaccgatggtcgcagaaacggttcgctggcaagaggaacggatgtcacctgaacagctgcatcagttgcgagccgacatagcaattattttcaggctgaactgcgaccacaaccgttttaaagatgactatcaggcggttcagctcgcagcctgtgggatagcgatcttggctagcgatgtcccttcattgcacaacaatctccccttccggcgccttaaagctgaccctcaggtctggcagaacgaaatcgttaatgccgacagatacgtggttagtcagcgggagattagcaccttcatttacgatcgggagtccatccctgaggttatccgcgggctgtttatgtaa

SEQ ID NO: 152386 - DNA, 1155 bp, Enterobacter cloacae
atgagtgataacgtctatgttaccagcccgcttttgcctcccctcgaggagtttattccttatctggaaaaaatttggcaaaaccggatcctgacaaacggcggcgagtttcaccaacagcttgaacaggcgctagcgcgttatcttggcgtaaagtacgtgagtttattctcgaatggtacgcttgctctgctgacggctatgcagactttgcggatccgtggcgaggtgatcaccaccccgtattcctttgttgcaacttctcatagtttgctctggaatggactaactccggtctttgcggatattgatcccgatacgttcaatattgaccctgagaaaattgaatcacttatcacgccgcaaacgtcagcaatattaccggtacattgttatggtattccttgtgataccgtacgtattcaacagattgccgatacgtatggactcaaggttatttacgatgctgcccattgttttggcgtaaaagagaataataccagtgtcctgaactatggcgatctttcggtcgtgagtttccatgccaccaaagtatttaataccttcgaaggtggtgcgattatttgtcatgacagtaaaaccaaacagagaattgactatctgaaaaactttggttttgccgatgaggtcaccatcatggccccaggtatcaatggcaaaatgaatgagatccaggcggcaatgggcttgctccagttgcagcatattgacgcggctcttgcagaacgcaaagcgatctatctgaagtatgtacagctgcttgatgaatggctgccggaacttcgctatataaccccagctaactcgattgaatggaatttcgcctatttcccggtcctctttgatgctagcattataagcgcgcgcgatgaaatttatagcaccttacgacagcagaatatttttgcacgacgttatttctatcctctgatcagtgagtttcagatgtatcgtcagtttgctacagctgatgcccgacatcttcctgtagcgtggttgatttcgcgaggcattctctgtctgcctatctatcccggcctgacatatgaaaaacagatccagattgtggaaattattagaaacacgttttcgctttataaaaatccacaatgcgtcgcacatagtgagtcataa

SEQ ID NO: 152387 - DNA, 702 bp, Enterobacter cloacae
gtgaaaatcgcagtaatgcaaccttactttctgccctatattggttactttcaactgatgtcagcggttgaccgctttgttctgtttgacaatgtgcagtacgtcaggcaaggctggatcaatcgcaatcgtattttgcaacacaaccaacctggcgttattactcttccattagcgaaggattcccgctttctcgctatcaacgatcgtcacttgtcagataattttattcgtgggaatttgctcaatcaatttattgatgcctaccgtaatgcgccttactttcattcgatatttccggttgttgaagagatcatcaattgttctcatgagaatttgtcagcctatatatgtcactctctgatgatattgcgtcagatgctatctctggagtgtgaaattatgctctcgtctgatgttgccattgatcataaattgcgtgctcaggacaaaatattgtccatttgctctactctgggggcgcatacttatatcaacttgcctggcggtcgcgaactttatgatagtgaaagcttccagcggcaggatatcaatttacagtttatccaaccagaatacgtttgttatcggcagtttggcgctgagtttgtcccctggctctcaattattgatgtcctgatgtttaatagtaaaaatgaggtaatcaatttttgtcagcatcgctgggctatgagtggttaa

SEQ ID NO: 152388 - DNA, 459 bp, Enterobacter cloacae
atgatattacgcgttaacaccgccactgccatacagattgcagggcatcttcgcgttggcgaatctgattttgtcgatcatctcatgaagcaggttaatattgaaaactatgcgtctaaaattaaaaaatatggctgcacctttgaagcgtggagcgataaccagttgattggtcttgtcgcggcatatctgaataaggaaaatcggaccggatttattactaacgtctctgtactacccggttggcaatcatgtggcatcgggaatcaattgttgcgaaacagtattcgctatcttgaagaggcgggtgttgaacacatcacccttgaagtgcttagcatcagagaaaaggctattagattgtattcaaaacatggctttatcattctttctgcagaacaggatacgctcatgatgatgcgaaaaagtagaatgtcaggtccgtcccaacccctttaa

SEQ ID NO: 152389 - DNA, 495 bp, Enterobacter cloacae
atggtgcctaaggggtggattacaaaggccttggaattaactggcgtaaaagtgattgatggagatcgaggtaaagaatacccaaaggcttcagatttttctggggatggttactgtttattcttgagcgcgaagaatgttactaaatatggatttcaatttaatgagttgcaatttattgatgccgaaaaagataaaaagctcagaaaaggacgagtaaaacgtagcaatatagtgctcacaacaagaggaagtgttgggcacttcgcctactacgatgcttcagtaccatatgatgtcatgcgcatcaattctggtatggtaatccttgacgctgatgagtcggacttggaaccgaactttttatatgctttgtgtcgatcattcatagtacaaaaacagatcgaagcagcatcatttggctctgctcaaccacagttaacagtaggaatagtaaaaggattgaaattacctattccaaccttagtagagtaa

SEQ ID NO: 152390 - DNA, 861 bp, Enterobacter cloacae
atgaatttgacgaaaaaaaagcttggagcccggaaatacctcccagtgatccatgagcttttagatttgggattgccaggagaaattttatcaattcgtactacaggtaaaaagggaaccttgatacctgatctgactgttgggttaggtaaagccaggcgagtcaaaactggcgattgggacatcgcagatacaagaacgtttgactatgttgttttgcgtgttgagcgacccgatagttatcatgatgtctacaccggtcagttcgttcgactctatcggtcagaaagaagcggcggacaaatcgtcgaaatgagtaatcccaggctggcgggcatgacgaaatccatttcgaaagtttttaatggcggaaaggtcagtggtagagggaccgcgtatgtctcaatctcaccaggcgtgagcaacactgtgattttccctactcgcgtgtataaagaagggcgggaaagcaatgcaacttacagttccgaccagtcacccttttcacaagatgtcaggaagaattgttttgaccgctgtgttgttaccggagtccaatcgcgttggaggaccgaggcagctcacataacgccgcgacacgaagaaggcatcccagacgttacgaacggtcttctattacgtagggatattcacaacctatttgaccacaaccattgtgctattgatcccgataatatgaaagtttacttcagccctcaagtctgcgcgatggatgaagacctcttagagtggcaggggagcactatcattgcatcgcgtatgcagacacacattaatattgaatatctgcgtccgcggtggagcaagttcattgaaattcatggaaaaatgatggactaa

SEQ ID NO: 152391 - DNA, 2088 bp, Enterobacter cloacae
atgtcaattaacatcaatactttgaagaatctacgtactggattacttactgcactggaactctccattaagcatggtgaagctgtagaaaatgtcgatcacattaccgatgttttgcgtcaggtggagctgacgacgcttttgcagaaagaaccaatttatgctatcgccggtatgcaaggggctggtaaaacaaccttggctaaaacgatcctcggtattaatgatgaatggttagacggcaatccgggtcgtggcgagcaggtgccgctttttatcgaacaggtggatggtgaccccgcctactttccacaggtagtttatcagtgcctcaaccttaaaactggcgaaattcagcagcaaaaaggcgagggcggggagcaacttcaaaacctccttcgtgactggaacagtgttcgtcgctatgaaaaagcaggctttaagctgctctaccccaaactgctgatcagcaaaaaaagctcgttcattgatgaacaggtgacctgggcgctgttgccgggctatgagttgaccaccagtaaaaactatctctggcaggatatgatgcgccacgtattggttaacgcccgtggcgtcatgttcgtaaccgatgcctcgttgttagcgaacgacagcaaatctggtgttttgcaagatttgcgagataacttcagtgaccgaggtcctgtggtggtcatcagcaaaactgagatgctcggtttacaggagatcgaacagctcaagaccagtgctgctgaacgtgtattcccgaatgttggaatgaaaaaagaggatatcgtagcgacaggctccggcaatagcgatatttggattgatgcattgcgccagacggtgaccaataagctcactagcagcgcggcgtctgaagcaattgctttggataattttatggggcttattcgcgaagatgtatccgaaattattaatgatttgaaaatattggcggataagcagcagcatcatgaatccatggtagaagagatccttgtggcctttgatgaatcagccgccaaacatgagcaaaaattacgcgcagcgataaaaaagcagacccgtcagcactttactgatgcacttatgcattgtgaagaaaactataaaagcgaagaggttggttttcaaaacaatcttaaaatttttgcgcggcgtctgtcgttgcgcggcgtagaagtggatgacgagcgcagtcgacgcattcttgatgcttggaataaacaatacgaaaacgtcagtatccatgagcataacttcaaggcactgacatatacaaatacacgggtgcttcgtgctcatgggctattgcctaatgttgaaaatcagcagttactaccgacaacagcacccgggagaatgggatatctggttcaggataagcagacggagtactcgatgacagatcctgagctgatgacgggactgtatacactgctcaaaaaaccgagcaaagagcatcaagttcctctgcgtacaaaactcaccgcagctctggatattttgcctgccttaatgctggaaaacgcacgttctaggcttgcaatgcaactcgatcctgcttgtactacccaactggcagaagagatccaacctaagcaaatatttgatgctctcttttccagcagtgaacagtaccatccaattaaaacagccatgatggcgtttttgggggctgatgctgcagatggaacggtggatggtaagggtacaccaaataacgaagggggattgactccgctggcgttagtaggtaaagcggcgttggtagccagtgtggcgtatggtatttaccaaataacgggcgtgattcgcgacagcgataaagcgcagatctattacattcgtcgtgctatggaggaactggcattccataacgaacaaacagtgatcggcaactatcaggagatgattgccgaactgagagagcatatcgcgtataacctgaagcagatctttggcgaaacggatgccctggcaaatcgaagtgcgttggtactcgcgattaacaagctaactgcggcacaaaaggaagcaaaactgtatgaaactcacttccgaaaaatcttgggttga

SEQ ID NO: 152392 - DNA, 1896 bp, Enterobacter cloacae
atgaaactcacttccgaaaaatcttgggttgatctcagccgggaacgttacttgtgggcagaagagagttttgtcgcctttctaaagaaatttgacgagcaacggctaatccaggcgacggacaatgccagaaggcagatttcagtgatcctttacggtccggctcaggttggtaaaacctcactgatcttgaccttgctgggcattcgtgatgactgcttcaccgaactaaatactttgctacgtggcgagcaggatctgggtacgatgtccacggcgcgcacttatcgctatcgtatgtcgaaaaacgacttctggtactttagtcaccgcgagaacggtacagccaggtttaacgacgaggaggctaaggccatttttgccggttttcgcaaggaagttgagcagggtgtgcgagaattcgatagcgtggatgtattcctgccccgacgcttttttgatttgcagcaacagagcagtgctcagctgttgatccgtgatttaccaggcactcactcaaccaacgccaatgagcagtactatgtcaacatgcttgccagtcgttatcttgcctctgccgatgtggtgctgctgacaggcaaggcagatgcgttgtccttcctaaaaccagaagagttggacaatgacctgctgaaggactggcactggcaacgccatcgctacaaggttgtcctgaccagggcttattctgatgcaacacttcagcgtctgatcaagcaaaaacggtttgataaaaaggcaatgcggactttcttgcttgagcaaatcaataccatggagttgggcttgcctgaaagtatcagtgaactgatctaccccgtagagtgcggccacacttggctggcaatcaatgccgtagatgacgagttcgcttgccaatgccgagatttgcggcgagacgtgctgcaagagttactcgactctctgcaccaggcgtcgaacccgctttcacgcttgcgcacgggctacgctttgccgcatatcattgaacagcaaatggccgtcgaaaaggggaattacgaaacagaaaaaacgttgctgcgaaaacagatcttacggttggaagagcatgttgatatgtaccgggaacgtgtgagctgtaatagagataagcaccagaaattactggagaagcagcaaacgttattaaaaaaacgtgatgacgcatcgggtaagaattttggtgagcattcgaacgtatctcagataatcgcgcaattaacgacatgcaaatcgccatctctagatttacttaagtcgaagattcgtgaatgcgttgaaacctatacccaatgctgggatgacctgctggaagccttccagcttcctcctgaaagggtgccggagatggcctatctagagcgggtcttaaccagactgaatggctactggtttgaaacctattttcgcgagaaaacacgcagggaagatcaggatgagatcaaaggggcgtgcctcaaagacgccaacttcttaacggctcttttccacaaacgcatcaagtctaagctcgatgccgaagaatgcgccctgaataaaaatattgtcaaaaatgagcgcacaacgcggcgactggagcgtatcgttgctcagttattgaaaaaaaaagagtacacacatctgcggaacgtccggattaagcaggagttcgacgagtcgttaactcgttattcccagcggcttcacgagagtaaaaactttctgaatgtcattctttcggcgaaaaatacccgggcgcatgaaatcgaggtcaacgttaaaaacccagacatcagccgcagtgagcgcctcggctggttgctgatgtataaagcgttgaacaacgattttgactacgtaaaatctttagccgaggagagcagtaaaattgaataa

SEQ ID NO: 152393 - DNA, 729 bp, Enterobacter cloacae
ttgaataaaaaacttgttgtagccgaaacggccaacgatgaacagttactggaccaactggtccaggaactgtttttggagcatttacgacgcgagctggtcgggcaaaagaagagtattgacgaaaataatgacaaactctttaatctcgagcgaaaattcgtcgctgaatttaaaaaactgaccgtaccgcttgagacgatgtccgatacgctcggtgagcagacacgcgaactgaacgatgccaaagatgatgctcaaaggcattatcttactttattgaacagtctggcgcagaacagggcggacactaccgctctgcatgacatattccagcaacagaatcgtaagcatcatcaggaacagatcgaacaactacaatgcatccatgaacatttgccccaacagagcgctagacttcaggagcaaaacgcagcattgacagcccttacggaacagcaagtgtcgttaagccatcagcaggtagcccttcaggaacaactgttctccgctactcttgccgagatgaaggcgcaaaacgtgatgctggagtcgctcacggaacagaataaatctctgcatcaacaaatgctcaccttagaggataaacaacgtgcagagctacagtcaaaccgcctctggggtaagctggtcactggattcacactggtaaatacactcattctggtgagcatgaccaccctatttttcattcagcatggcacctga

SEQ ID NO: 152394 - DNA, 132 bp, Enterobacter cloacae
atgaatcagatctctgagctctatacttccttcacggtctgcaacatcagaaccgccacggatcattgctccgccatcgtctttcaaaaagaggtgtactggtacagccatttctataactccttatgttaa

SEQ ID NO: 152395 - DNA, 2106 bp, Enterobacter cloacae
gtgaaaactccagttaacccacttttgcgatggctcaatgcattttttagcagtcgctcattacccggagctgatggtagggcgctgtatgcttaccgttgtcatgatgcagagtatgaaagtttgactgctcttcttcgtgcccatgttccacgtaactaccctaaaaccatattcatttcttacagtgatgttttgttcagcatatacgccgctgagtttatccgccgtaaccatacttcaggacatccaagatgggacgttattttagaatcgattggctggaaggtaccttacgcacatcggcaaaagctggtaaatgatgggattcgttactggaaaagaaaggtgagaagtctgggtcaagcatcgggttatctgcatactctggcttgcgaaggcggtttgcccatccggatgattgaaaatgaaagtggctatttaataacctatttcagacgaatttatcaggcactacgcgggcaatcgtcaaggcgtcctgcggagataatcgcacaagaactgggcgacactattcctgtgacaatgcaaaatgaactcgtctacgaaatagctggtgaattttgcgagacacttcatacgttactcaatgagcataccactcatggtcaggaccccgtatcctcactacgcaaacaatatcctgactggcatcttcaacttccgttggttctcccggaagagaatgcctcagagattgtaagacgactactttctcaatcttcagagccccgtatatcaagcaatgtgctggttgaaaggatatggattgatgttgatgacagttggtattgcgatgcccggtttcgatttccggccacaatgcgtactgagcagttaatatccctgtttgaatgcaatattcagccggaacagacacgactcatcatttctgcaaaatggagaaatggtggtgcccggttagcaatgctaagccgttatgaacagcaagattggcgagtagagttattacccttcgctatgcaaaaactctctggggcagatgcgatgaccgaaatctcgttgtcgctcaatgaaggaccgattctgctaggtcacgtaattcccaaaggggggtatgagcttactgaagatttaccatgggtttttgaagcgatgaatgagagcgagtcacagttaaaacttgtcggcatgggctctgttagttccaggcaaaactctctttttatttcgctaccgacaaatagtcatttggatattagtggagaaggtgagtttgatatcccgaggttgctgaaaaatagtgaacgcagcttaactaaaataagcggagtattcagcgttgttttacatgatggcgcagtttgtacgattcgcacgcagcaactttatgattctgcgattgagtattatataaaaccgacagagatcgatctggtaaaatctgattatcctgtccatcgtgcctggccaaagttcggctggaaaaaggatatgcagcatggcattgtcccagagaacgaacttttttggcgatccattcgttcaggtaacagctcctggttttctgtcgcatcagtaatgccgaaagggcaggtagaagtcaggcgaatagtcaatggtgaagttttatttagcggtaaagttgtgattttgccagcagatttcaatattcaaattattcccgagactgctcagcaaggcgttattgtactctctggtataacggatgcaagagttgataaatattcaaacaatgaaaaggtaacacttaaatcagattatttgcaaaacgagtgtgttattgattgtaattcatcacagatgctagagagtaccatcaatttacgagtgtcctggaaagatggttctaatcttaaattattattacctaagcccgttagcggtggacggtttgtaagtaatgatggttctgttcattttggcggtgttgcatctatagcacatttgcatggcgtgaacgctgagttgttaacaatatcttgtgctgggaaaggatatcttaatatcgagttgttggatgaaaacccgatgtctgaaaaatttcattatttacatgcggatattccattgttatctggccgagtaaaaatcaacacgtaa

SEQ ID NO: 152396 - DNA, 456 bp, Enterobacter cloacae
atgacaattaaattcagtgttaaaacacaggcattttatgatgataatacagatgctatacccgatgatgcagcagttgttacccatgaccagcacatatcgctgattaatggtatgaacgatggtgagagacgtgtttacttcggcacaactggtgagctaacactgtcatacagcaagccatctcaattgcatacctggaacagtgataccaatgagtggttcatttctgcggatgcgcaaattaaattatccgacgacgaaaaatcacgcttaatccatgagggaaacgactatataaacagtaagcagtggccggggaaagctgctatggggcgactaaaggatgctgaaaaagctcagtacaacgcgtggcttgattatcttgatgcattggcggttgtagatacctccaacacggatgatattcactggcctgaaccacccaaagattaa

SEQ ID NO: 152397 - DNA, 984 bp, Enterobacter cloacae
atgacgatttattcagaatttgggatcattttctatattgcaatttttgcttatacaattaatttaataattaaaaacaaatggtacgaattaacaccagccaatctttttagacaaaaattatttttgttttctattggcttccctgttttctcatttttttactttggggtatttgcatggtggggaaaaacacctgttttgagcgctcatggatatgctagattttatgaaatcagtaaattcccgctgatgttactagcaagctccgttccgttgggggcgatagttaacaacattcacagaacaattcagacagaaaaccaactattgcgtacagaacttcaaattgaattggtaaaagcaaaaaacaaatctgattcattctatgcgcaccagaaaagctatgcggatattttcaaaaccgttccatcattttttgtaggtagagaatttaacgaacaggatgaaaacaaaaaatatatagagctttcaatttctcacccctatattctttacatgaacattttcacaaaatcttctattgatgaaggatacagcaaagttgtaagcccattattcatggggagggttcaagattattataaaaaaatcagcaaagccattgaaaactgttaccataaagatgcttcgtatgatactcaagtcatttgtctgcagcaacttgaacttaatgttatattactgtgccgagaattaggaatcgactatcgttatgaaaagcacgaatttcttgttttcgagccttttgatgataaacatttcacaacttcattctctgatgaaaagcaaataaaacaaatggttactggtatacgtgatctgttggtccatgtatacactttgattggcttaaaccctgagttcttccaaactcccaaaggactatgggactttattccagactatggcaatgatggttcgaagttgttccccggcattcttcctatcgtaaggaattag

SEQ ID NO: 152398 - DNA, 726 bp, Enterobacter cloacae
atgatgaaagagcgggcctggaactccaagaaatttggtccgggaatattattgtattcatcctcttatctgaaaaagcataggtacactgactctcataaggactttccatcaaatgcgaaaagcatcgagttagctacgcttattgaacgttattggagttcattagaggctgaacttctgagggataatgttgctgtcattatccctgagtatatctctatggatgaactctttaaatttcatcttaggtatgcacagaagtgctataaatggggtgaattagttatatcagacaatgaggatgttgcatttgaagcatttaaaaaagcatctgagttatttgataaaagtatggggatggtttggtataaaacttctgtagataaacgaaataaacttttaagtatcagaaaggagtctgggcgaaaaggagggatgaaaaaagctgaagtttatggaattatccaagaaaagcttgtggagcttattaatgttttagccccagagcagggatggggaagtaaagctgctgccgtgagagctctcattgaacctttgtgggaatttgttgaggaatcagattttatgattgataaccaaagtaaaaaatatagattagcaactgctagtcaagatgccttagctgaaactatcataaaatcttggtcgcaaaataatgaaagtattaaacaagcttttgatgcgaatgtaagaaaaaaataa

SEQ ID NO: 152399 - DNA, 138 bp, Enterobacter cloacae; identical to SEQ ID NO: 100845

SEQ ID NO: 152400 - DNA, 1515 bp, Enterobacter cloacae
atgtctaaaaaaaacagctcaacgcaaaataaagaacttggactaaagttccagacgcttcccacttttgcacaacggttaataagctacatacattataaaacaggagccgccgctgaacttattttaatagtgttacttggggtaatggcacttgcctgccaggacaaatttgatattcagcttaaaaatgggagaacctttacatcactttatctgatgcttttggcacgctcaggtagcaggaaatcaacggtattcaggctgttgatgggggaaatttatcaactggaaaaagagctgcgaaatgattttctgttaaaagagaaaattcataagcttaaactagtatcctgggaaaccgagctaagagagcttaaaaaacaatttggcaaagctgttcgtcagaaggttgatgtaactgaggcacttgaggcgttggaggagtgccaaagaagaaaaccatctgtcccagaaagaaagtatcttactaaaaatgattcgacaagtgagggacttagaaaggcattagcgctgggttctccatcattgatgctcggctctgatgaagccggtggggtgattgacagcaatctttttcgcaatatatcagtttttaactctctttggggagaggggagaatctctgacagcagagcatctcgtgacagctacgatgttgatgatgtccggctgaccgtattgctgttgttacagcctgaattgtttaacgactttataagtaagcaggggaaaaaattaagaaaatcaggattcttagcgcgtttattattgattgatctggagcaacttcctgaactatgcagcatccctgatgcgtgttcatggtctgatgaaccaggacttgatggttttttctctattctcgttaagcatttgcaagacgggatagagcgtagagaaaaaaatgaagaacgtatctgtattactttatctgaagaggcgaaagcgtcatgggatacacaaagtaaacgaatcagggaactaatgcaaaaaggagaggagttgcatcactatgatgatttcgcctcaagaattatggaacaagctacgagaatcgcagcagtaatgcaaatgtttattacacccgactcaccaataattaccaaggaaacgttaatgtcagctactaaaataacacaatggattattaatcaccttatcactaaggtcgatactacccgagaacctacaactgcagaaaaattggtatggttcatggaggagcatcttgttagtaatggttcttacgatttcaagaggaatgatatcattaaaaaaggtccatattcagtcaggagttcagaaagtctgaagtctgctttagaaaaacttgaatctgaaggaatagtacaactatttgtacgaggtggggttaattatgtcagatttattggttccaaaatgaaacctagtgaactcgctgaaaagactaatatcccgttgttagattcaggaacagttgcgatgagtaaactacgtttacctgaataa

SEQ ID NO: 152401 - DNA, 726 bp, Enterobacter cloacae
atggaatcacaatattcacttaccaacgaagaaaacgatgacttggtagaaatagcctccagaaagtatagatcacccattgacctcaatattctcaattcactgcttgaaatggtctacaacacgctggggcagcataaccggatactggctattcgtactgacacgaggttcgctctgtctcatgtaccgggagagcctgatctaccaatatgcttccagcgcgaagatgcgcaggcaatcactcgcttcttcgagtcactgaaaagtcagctacgggtagatcataaccggtccaagagaccgggtgacccgacatttccatcttatgggtggtgtagagaacgtgacacaagtgagcatccccattaccacctgatgctgttgtttaatgcagatgtgtatggatacttgggcaattaccaggaactaaatgctaaaaacatggctacccgtatacagaaagcctggtgcagtgctataggacttgctcacgaagattactcaacattagctgagttcccaccaaatgctgtttacaggtttagcagacttgatgctctggatcgtaacccagtctactgggatttcctgattcgactgacgtacttggccaaaaccagaactaaggatgtccacagcggttaccggaacgttggcacaagccagtgtccacgcttaggcggaattgacctgcccccacgattagatacaacactcagttag

SEQ ID NO: 152402 - DNA, 2187 bp, Enterobacter cloacae
atgtccgatcgtgtggatagagacgtgattaatgcgcttattgcgggtcatttcgctgaccccttttctgtgcttgggatgcaccgtactgaggcaggtctggaagttcgtgccctgttgccggatgccacagaagtctgggtgattgaacccaaaaccggccgcaaagtcggtaaccttgaatgcctcgattcccgtggcttcttctcgggcgtgatgccccgtcgtaaaaacccttttcgctatcagctcgccgttctctggcacggccagcagaacctgattgacgatccctacagcttcggccctctgcttaaagagatggatgcctggctgctctccgaggggacccatctgcgtccttatgaaacgctgggcgcccatgccgataccatggacggcatcaccggcacgcggttctccgtgtgggcgcccaatgcccagcgcgtctccgttgtcggccagttcaactactgggacggccgccgtcacccgatgcgcctgcgtcgggaaaccggcatctgggagctgtttatccccggggcacaccacgggcagctttataaattcgagatgatcgacgcccacggcaagctgcgcattaaagccgacccgtatgccttcgaagcgcagatgcgcccggataccgcgtcgctgatctgcggcctgccggagaaggtcgtccagacggaggagcgtaaacaggccaaccgttttgatgcgccaatatccgtctatgaagtccatctcggctcctggcgccgccataccgataacaacttctggctgagttaccgggagcttgccgaccagctggtgccatacgccaaatggatgggctttacccaccttgagctgctgccggtcaacgagcatccgttcgacggcagctggggctatcagcccaccgggctgtatgcgccgacccgccgcttcggcacccgcgacgacttccgctatttcattgatgccgcgcacgccgccgggctgaacgtgatcctcgactgggtgccgggccatttcccggcggatgattttgcgctggcagagtttgacggcacgaagctgtacgagcatagcgatccgcgcgagggctatcaccaggactggaacacgctgatctacaactacggtcgccgtgaggtctcaaactacctggtcgggaatgccctgtactggatcgagcggtttggcattgacgccctgcgcgtggatgcggtggcgtcgatgatctaccgcgactacagccgcaaagagggggagtggatcccgaacgagtttggcggccgcgaaaacctggaagccattgaattcctgcgtaataccaaccgcattatcggcgagcaggtggacggtgccgtgaccatggcggaagagtcaaccgactttgcgggcgtctcccgtccgccgtcatcaggcggcctggggttctggtataagtggaacctgggctggatgcacgacacgctcgactacatgaagctggatccggttcaccgtaagtatcatcacgacaagctgacgttcggtatgctctacaactacaccgaaaacttcatgttgccgctgtcgcacgatgaagtggtacacggtaaaaaatcgattctcgaccgcatgccgggcgacgcgtggcagaagtttgccaacctgcgcgcctattacggctggatgtttgccttcccgggcaagaaactgctgttcatgggcaatgagttcgcccagggtcgcgagtggaaccacgacgccagcctcgactggcatctgctggaaggcggcgacaactggcaccacggcgtgcagcgtctggtgcgcgatctgaacctgacctatcgccaccacaaagcgctgcacgagctcgacttcgatccgtacggctttgaatggctggtggtggacgaccacgagcgctcggtgtttgtctttgtgcgtcgtgacaaagcgggtaacgagatcatcgtcgccagcaactttacgccggtgccgcgcgaacattaccgcttcggcattaaccagccgggaaaatggcgcgaaattctgaataccgactcgatgcactaccacggcagcaacgccggtaacggtgggctggtacagagcgacgccattgaaagccacgggcgacccaactccctgagcctgacgctgccgccgcttggcaccatctggctaatgcgggagggcgaatga

SEQ ID NO: 152403 - DNA, 237 bp, Enterobacter cloacae
atgattgatgaatttcatgtgttgtatatgtacaaaaaaatccaagccgaagctcaggcaacagatatgaaaacactcgaacgtttattgaagaagttccgcaaagttgttgcggagcgtcgggaagaatactatcaggagattggtgagaagaaggctcaaaagctaagggcagaaagattacaacggttgcttaagaaaatggagcgtgatcgtgtatcaccacatgagttataa

SEQ ID NO: 152404 - DNA, 2496 bp, Enterobacter cloacae
atgagtaataatcctccattaagatacagccataaccaccacctgctggcggtgaagggatgtgaagcagaactcgatgtgctggcgtttgaaggcgatgaggccctgagcacgccgttccgctatcgtattgaattcaccagcagtgaccacgctatcgccagagaggcgatgctgatgaagccctgttcgctgacgctgcaggccccggtagaccagggttacggcattaaagtgcagcaggccgtgcgcactcttcagggcgtggtgaccggttttgaacgcctcagcacgtcaaaagatgaaacccgctacgccctgacgctccggccacgtctggcgctgctcgaccgctcgcaccagaacgccatttaccaggacatgtcggttccgcaaatcgtggaaaaaatcctgcgcgagcgccacggtatgcgcggtcaggattttctgttctcgctgtcaaaagaatacccgcgccgtgaacaggtgatgcagtacggtgaggacgacctgcactttatcacccgcctgctgggtgaggtcggtatctggtttcgcttcaccaccgacacgcgcctcaacattgacgtggtggagttttacgacagccagcaggggtatgaaaaaggtctgacgctgccgtcggtaccgccatcgggccagcattcaaaaggcgtggattcagtctggggaatggaatgccatcacaacgtggtgcagaagcaggtcagcacccgggactacaactaccgtcaggccacgcaggacatgaacaccctggtggatgcgacccgcggggatgtcaccacgtacggtgatgcctatcactgggcggataactacctgacgccgggcagcgcgcatgaccgcaacccggccccggagtccggggcgttttatgcccgccttcgtcacgaacgctacctgaatggtcagacccgggcgcagggcatcaccagctgtccgaccctctcgccgggtcaggtactgaaagtcaccggcgggtatgaagtggccgacgtgtttgcgcagggcgtggtcatcacggcgatgcacacatatgcccgccgtgataaggactttgcggttgattttgacggcattccggacagcaccgattttggtttccgcccggaacctggctcacgcccggtgatggctggcaccttaccggcccgcgttaccagcaccaccgaaaatgacacctacgggcatatcgataaagacgggcgctaccgcgtcaacatgctgtttgaccgtgataactgggaaaccgggttcgagagcctgtgggtgcgccagtcgcgcccgtacgccggcgacacctacggcctgcacctgccgctgctggcgggcaccgaggtggcgattggtttcgaggacggtaacccggaccggccgtacattgctggcgtgctgcacgactcggcgcacggtgaccacgtcaccatccgcaactacaaacgcaacgtcctgcgtaccccggcgaacaacaaaatccgcctcgatgacgagcgcggaaaagagcacatcaaggtcagcacggagtacggcggcaagagccagctgaacctcggccacctggtcgacagcgaaaaacagcagcgcggtgaggggtttgagctcaggacggacagctggggggcgatacgggcgcagaaggggatttttatcagtgctgacgggcagagtgcggcgcaggggcaggttcttgatatggaacccgcgctcgcacggctttcagcagcattagttgaaatggaatctcttgccgccagcgcacagcaggcacaggcactggctgccgacgtcggccgccagcaaaaacttctgaaacaaaaaatcgagcaattacatgaggaagttatcctgggtagtgccccgaaaggaatggcactggtgagcggtgaggatatgcagctgtcagccagtgataatctgacgctgactgcgggtaaacaactggatgtgggcgtgcagaagaacttcacgctggcggccggtaagcaactcagcctgtacagtcgtgaaggggcaagactgttcagttcgcaaaacgatattgatattcaggctcagggcggaaacattaccacgtggtccacgcaggacacctatatatcaagcggaaaaaaactggtgatcacagcacaggatgaactggcgctgatatgcggtggcggctatatcaaaataaaaggtggaaacgttgaaattggcgggccgggcaaactgctgattaagaacacgggcatcaggaaggcgggctcaggcagtatgcagggggtgatgaagtcgtttgaaccctcaacgtttgatgagaaattcgtcatcagaaatgcgctgacaaaagaaccattaccaggtaaagcgtacaaaattactatgccagatggttctgttctttccggtattacagatgcttctggagcaacgtcactcaattcttctgatgttatcgacaatatgattatcagcttagttaaggcgaattaa

SEQ ID NO: 152405 - DNA, 1539 bp, Enterobacter cloacae
atgtctgtacaaaataatattgctggcggggaaagcgtggtgctggaacgtcctgctgtgggtggtgtatacgcctcactgtttgagaaaatcaatctgaatcctgtctccgagctgagtgcgctggacatctggcaagatgcacaggcgatgtccgatgcgaccgctgacgagcgtctgaccgcgggtatgcaggtctttctggaatgcctgaccaaggcaggctcgaaagtcgaaaaactggataaaagcctgatcgatcaccacatcgctgagctcgattaccagataagccgccagctcgacgccgttatgcaccatgaagagtttcaggcggttgagagcctgtggcgaggcgtgaagtcgctggttgataaaacggattttcgccagaacgtgaaaattgagcttctgagcatgtctaaagaagagctgcgccaggactttgaagacagcccggaaatcatccagagtggcctgtataaacacgcctatattgatgaatatgatacccctggcggcgagccgattgcggcgctgatttccgcttatgagttcgatgcttcagcgcaggatgtcgctctgctgcgcaacatctcaaaagtatccgcagctgcacatatgccgtttatcggctcagcaggcccgaaattcttcctcaaggagtcaatggaagacgtcgctgcgattaaagatattggcaactattttgatcgcgccgagtacatcaagtggaaatcgttccgcgatacggacgacgctcgctacatcggtctggtgatgccccgcgtactgggacgcctgccatatggcccggataccgttccggttcgcagcttcaactatgtcgaagaagtcaaaggtccggatcacgacaaatacctgtggacgaatgcgtcgtttgccttcgcgtccaacatggtgcgtagctttatcaataatggctggtgtgtacagatccgtggcccgcaggccggcggtgcggttcaggatctgcctatccatctgtatgacttgggtaccggcaatcaggtaaaaatcccgtctgaggtcatgatccctgaaacgcgcgaattcgaattcgcgaatctgggctttattccgttgtcctactacaaaaaccgcgactacgcctgcttcttctcagccaactccgcccagaaaccggcgctgtatgacaccgcagatgcaacggccaacagccgcatcaacgcgcgtctgccgtacatcttcctgctgtcgcgtatcgcccactacctgaagctgattcagcgcgagaacatcggtaccaccaaggatcgtcgactgctggagctggagctgaacacctgggtccgcactctggtaaccgaaatgaccgatccgggtgacgaactgcaggcgtctcatccactgcgtgatgcaaaagtggtggtggaagatattgaagataacccgggcttcttccgcgtgaaattgtatgcgattccgcacttccaggtggaagggatggacgtcaacctgtcgctggtttcccagatgccaaaagcgaaatcgtaa

SEQ ID NO: 152406 - DNA, 537 bp, Enterobacter cloacae
ttgcaacttcaccccacccgactgtatcttcgtcccgtaactgagtctgaccttgatgatcttttcagaatttatggtgacccggctacgaacacctttaacccagctgggccgtatcctgatataaagcatgcaaaaaatgttttagctcgttgggtcaaccactgggaaacccacggtttcggaaactgggcaatctctttgaaggatagccctgatagaatcattggttttggcggtctgagtatcagcagttatgctgatataataattaataacttaggatatcgtttcgccacagaggcatggggtaaaggtctggcgacagagttctcgaaaaactctgtcagatatggttttggtgagttaaagctgaccgagatctctgccgtagttagaggtaaccacgtggcatcgcagaaagttcttcgaaaagctgggttgaaatacataaaagagatttatgatgtgaaagacgcgccgccgagcctgcttttcactctcacgcatggtgaatggttaaaacaatcattgtga

SEQ ID NO: 152407 - DNA, 810 bp, Enterobacter cloacae
atgtatctggggatatctttgccttggggagaaagtggaactgtgagttataacgctcaaacaaatgatggcgaaacgacacatacggtcggatattatgatcgaattgatgataataataattatcgcctcaatgccggaacgacaagcaatggagaaggaaccggcagtggttattttactcatgacggcgatatggcaagtattactgcaaatgcaagcatcacaggaaataatgaaaatgcctacggcttgtctatgcagggtggattgactgcaactgcacaaggggctgctgcacatcgtatatcagcagctggggggacgcgtatgttggttgacacggatggcataagtgacgtccccgttcgtggatacggtggaatcacgcatacaaatgccttcggtaaagcgattgtcggagatgtcaacagttactatcacaacaccatcaacgtggatcttgatgcactgcctgataatgtggatgcaacacgctcagtagttgaaggaaccttaacagaaggtgcgattggttatcggagatttggaattttggccggcgagaaagcaatggcaatcattaaacttgccgatggtagtacaccaccatttggtgctgagataagaaataaagatggagcgtcaacgggtattgtgggtgatagcggtagtacctggttagcgggtattcgccctggagagaacatggatgtgagttggggcggaggggtgcaatgtgaaattacgttaccgtcgccgctgcccgcatcaagtaaggggctattactaccttgtcattctaaataa

SEQ ID NO: 152408 - DNA, 588 bp, Enterobacter cloacae
atggttaacttgctgattaaaaccggtgtgtttagtcttttcggaacaatgatggttatgccttgtcaggcaaaagatagctggaacatagatggtgaacatggagagttacatgtctatggttctctgattgaaagtgcttgtcgacttgatatgcgatcagcttttcaagatgtggagcttaaagatacttcacttacttctttgaataagcaaggcgatagcggcaaatcaacgacattcgtattgcagcttttggactgtcagcgcactcgtggtgagctaaccaatatcagaacagggacgttggtttgggactcaatacaacccgtcatcagtgtgacattcaatggcgtaaaagatcctgatgacccctccctttggctgatgaaaggtgtaagtggcgcaggcctgatgattaacgacagcaaaggacatcagatcgtgcccggtgtaccggagaagcctcagtttgtcacacccacacaagaccaacttgtttattcaatttcctccgtgcgcaccaaatcaccattaattgcgggtggatttcgaacgatagtggactttaaggtgaattatgaataa

SEQ ID NO: 152409 - DNA, 567 bp, Enterobacter cloacae
atgaataagccttcaaaaaaaacagtatcgcgtactatcctggcagtaatatttgttgttacagaattttttatgccttgcatcgttaaggcagatacaggggatcggtatactcttgacatcaatatttccggtactgtagtcgccaatgggtcttgtagttttaatcaaggtggaactttaaatattaatttcggtactgtgaagctagaaaacacaggtaatagcacagtacaactagagggtgattatcagcgcgaactggcaagtgattttttttgttccggagatacagcaggtcttctgcaaatgcagttcacgtccgctgatggacaatatgaaacatataacggaacgaaagtgcttaatacaagcagaggtattgttgcgatccagctcctggttaatggagcgccccaaaatatgggaacatggtttgatgtcgatccggcaagtactcagaatttgcatgcacagttggtacaaattagtacggccaataccacgggtgtcacaagtggagatacgtttaccgcatccggcacgctaacgctggcatttaattaa

SEQ ID NO: 152410 - DNA, 510 bp, Enterobacter cloacae
atgaaaaagtttaagctaatctcgaaaacgattttcatgattctgttttttttaccgtttatgttaagagctgaacaaacaggagatattgttacctataatttttctggcacgtttgtgctttctacaccctgtacggttaataatgatcaggtactgaatattgcttttgggaatgtaggtgtaaacagagtaaatggccgtgattatatgcagccaattccatacgaggtggattgccacggtgcgccagatgattcaccgatgacactacagattagcggaagttcagttgcatttgattccacagcgcttgtaacaaacgtacaagggcttggaattcaaattcaggccaatggagttccggttgacatgaataaagaattaaatactacacttggagagatatcttccttaaatttaacggctgtaccaataaaagatccctcaacagagttaacagaacagccttttagcgcaactgctactttgacggccgaatatcagtag

SEQ ID NO: 152411 - DNA, 534 bp, Enterobacter cloacae
atgaaaaataaaatttggtcagtattaacgatagtatcgatactggtaatcattactacaaaggatgcctgtgctattgataataacttacagtttactggtacactggtgagtgaaccgtgtgatttggatcccgacacgacagatattactgtagacttcggaacagtgattcaaaagtatttgtatgccaatacacgcacaaagagtattccttttgttatcaagctcataaactgtgacttatcattaggtaatcaagtgtcctttatttttaagggaacagaaagcattgcaatgccaggtttccttgaaatatcaggcacggcacaagggattaccattgggatggaagatcaaaatggcaatggattgccattcaataaacctactccactatatgttttaaataatggtacaaacagcctgtcgttctattcgtttattgagggcaagccagatgctattaaaaatcaaactataactgatggttcgttctcggctatcgccactttcgagatgaattacccatag

SEQ ID NO: 152412 - DNA, 933 bp, Enterobacter cloacae
atgaattttaaacataacaatttcactcatcgtacttcaacgtattatttgattatatgcgtttcgcttttatcattattgataactccgataaagagctatgcgacatttcaaaatgtttatggtcctgcctatggtaccagcgcaccttcttctgctcaatattgttcccctgggcaaagtgttcctggtgtaacaaatacaacactatattttgtacctacatgcactttaaatgtacctgataataactatgtccctaaatctggtaattataggattgtaacagaagtaggtaatgcgtttatatcaagtccttatgtcaccttaaaagcaaatgcaccgattagtcaacaagacatttcattcccaagctcaggtgcggaatattcacaatggtcgtttggcaacctttgttattatgtatacggtaataaccaatattatagattaaatggctttaattatactggctgtaaaaatggttccagaccgccaattccaccagatccaccggcgccaccgacatcttgtactttgaataattcgaatgcactaaatgtcaacttaggcactttggatcgttcattactggtcactgtgcccggcaccggatctgccagacacatccaaattccagtaagttgtaccggtgatgcgacgacaatagatgttgatatgaaactaagttacaccccattatcagtagggggaaaagaagttgtcaaaacatctaccaatggtttaggggtctcaattatttataataatacggtactctcaacaacggataccaccacattatcattcgttccgggatccaatcagcttgatttggcttttgaagcgatgcgtgatccgaccgttgtcgtaggtgatgtagctaccggagcattttcagcaagtgcaacattgataatgacacagctataa

SEQ ID NO: 152413 - DNA, 1602 bp, Enterobacter cloacae
atgatgtttcttgtttcccttattctctgcggtactatttccgctttctatatcccctcgcaaggaggcgtgggggtagacttaggatttaatctctccttaatcctttgtttaggcattctattaattgggttaacatttcataatcatatcaatgagaggttaaataaaagcaataaattcatttttctgggtattgcggctatggggttaccttggacgttaagtattgcagaaagcccggggatcattgttcttattgtagtttttctactatggtggataagtcaaagctggtttttaagtaccaatgtaaaaaaacaaatcattttattaatatttagtctcgccctcatccaatgtatcatagcgattttccaaactttctttccgtctcaggcctttaagatctatgaatatagctggatacataataatggacgtccctatggcatatttcaacaatataacttattagccagttttttggctactggggtgggatgtggctttttcttggtacagaaagaaaagcggaagtttgtagttggattatacctttcaggtttgactgtactttgttttgtaattgcattaattcagtcacgggcagggatgcttggtgcaatactggtaatcatcgctattactactttacatggctttgatcaaaaagttaagacattcatctgtctgattttcatggcaactggaatatcggcaggcacttgggtggtccaccatacccacattattgttgatggtcagttaatttcaatggcaagagaatttaaaacatcgacctatgcacggttaagcatactcaaagccacgcttgaaatgattgccgtcaagccattatcaggatggggttatggcacctttgaatatgaatttagccgttatattatcgctcacccctcactgaatgtgaaagatgttggaatagtaccccatccacataatgaaatattattcgcctggttccagggtgggatcattgcattaattggcattttattactattacttgcatggataaagaatattttatcagcatggaaagaaaaaaatggctctgtcgggattacaatgctaataataccactattaatacatgccaacctagagtaccctttttatcaatcatttattcacttagctgtttttgttattttgttccgcatcggtgaaaatgactcatccgaaggggatgcacatacaaagcgagacaaaataataatgttgtttatggggttttgtttagtgggatacagcttaatagcactctatgcccatacgcaacttactcgatatgagcgtacaggttatattaactttccaaaaaatatgccatggtattttaagacaaataacgaaagagccaggtatgatgcaatggtcgcactcttgatagattataataacacccataaccctgacgacctggctctgtttatgagggatgcagaaaaatactcgctgaaacataatgacaggaacatttggcttagcatgattatgataagcaaatttcaaggcgatgtccagaagacgcattggcttgaaaatgactttaaacagatatttcttgacaattaa

SEQ ID NO: 152414 - DNA, 591 bp, Enterobacter cloacae
atgaaaattaagacttttaatgaaattattagcacaaattattcaataatgagtgtgataactaacaattcttatcttagaatttcacttgatgccttcataaaaaatagtgaattaaagaaaaatgtatgcattattgatattgattcatatacaagcatttgtagtatttataatatccttaagataaataaagatagtgagagttatagccattatcttataaagggtgatagagttaattcattcgtgctctcaagtgcaaccttaatccgtaagaatgattcttttcaaaccctgcttaataagatatcacgttatcctggacattgttacaatgatgtattaaatatattgtctacttacatatctcttagcatactctctgaccaagaaagattaatatttcatcaattaaaaattgaaaatgaaatacgccagattgctataaatttaaatttaccaataaaaagtgtttatcgcagtatcagctctatttgtaaaaaattaaatttaacctcaattttctctattagaatctttgcaaaatctttaagtccgaacattcagacttatgagccaatatcataa

SEQ ID NO: 152415 - DNA, 156 bp, Enterobacter cloacae
atgtacaaggggggaacgatttgtggcttacacgaaaatttctcgcatgacattgagcattacctgcagaccgaagctgcacagtacgcaggtaaaaaaccagtccatcgacagaaaatgcaggttcatttgaatgaaaccctagacgatgattga

SEQ ID NO: 152416 - DNA, 672 bp, Enterobacter cloacae
atgaatacagagcagaatagtcatgtcgaagtgacacacgcagccaaaaactttacagtaataagacctaatgaagccatagaaacgttgattaatcatctctcaccattaggctctgtcgagtattttaggtcgggccagcgagtgcctatggtttataaaggagagaaagtcatctacgtactactaaaggggtacttatcttactacaatggtgaaaatgatagagttttagggtatgtctacccaccgagtttaattggagtgattgagatgttttcttcggtggcggttggttatgtccgtgtcgaggaggaagcgaaactcatttgcgtcaaacaaacagttctaacgcaattacttgatacaaatcccaatctttggacccctcttgcccagtttatgagttatgtagttctgcgtgttctccatcgagaagctatgcttcaagtgaaggactcttatacaattatccgcaacttactgtcagatcttgcttcgcaaccaccagaagttcgtagtagcgtaacagcttctcgtttcattcttgaacgagctatgatagcgcgcagtacggtaatgagtattttatcgcaactacaaagaggagggtttatcactttggagaaaggactgcttgttgcaatgcgtgtattaccagaaaagttctga

SEQ ID NO: 152417 - DNA, 534 bp, Enterobacter cloacae
atgaacatgaaaaagattgttcttgcggtagctatggcgtcaggtatggcaatgggtgctgcacacgcagcctccccggatcagggacatggcacagtaacttttactggctctattattgatgcaccatgctctatttctccagatacaatcgatcagacagtcaatcttggtgagatttcaagcgtagctctgaaagacggtggaacttctcagcctcgtcctttcgatattaagctggaacagtgcgataccacaacactgaaaaccgtacagacgacatttactggtgctccatctgcgggtaatccagacttattgggtatcactggtactgcaaaaggcgcgtctattgcaattaccaacggctctgggcaggttgtaactctgggtagcccaactcctgctcaaaccttacaggatggcaacaatactctggaattctctgcttaccttcagggtgatggtgcatcagcaaccatcgtcccaggtagcttccagtctgtagctgattttaccctgtcctatcagtaa

SEQ ID NO: 152418 - DNA, 540 bp, Enterobacter cloacae
atggataaatattacagggaaattgtgcttccctgcatgatgatgctttgcttatcgggaacagcttttgcgcagctccctttgaaacagcaagggagcgtcaacatgcaagggagtattattgatacgccttgtgctatcgctacagaagatcaggatcaaaccattaatatgggcatagctactgttaatgaaatcatacgtaacggtgctggatcagaacgtaatttctcacttaatttagttaactgtaacttaaaatcctctgatgttataaaagaagactggagtcatttccaggttacgtttgatggtccggctgaacataatttttttaatgtgagtggcgtttcaggagtaggactgcagatcagtgatgcgataggtcatgtggcaataccaggagaacccatgcctgcaagtttgcttgcggcaggctctcagcggcttgattataagctgcgcctgatgggaaacagacaacgcataaaaacaggtatgtatcattcaatcatccgttttaaaattgattatttctga

SEQ ID NO: 152419 - DNA, 543 bp, Enterobacter cloacae
atgatgccagcactgccaggccatagcggggctttttcctctgctcagctgccggtggccatcgattacccggccgcgctggcactgcgccagatggcgctcgttcaggacgaactgccgaaatacctgctggcgccggaagtgagcgccctgctccactacgtgcccgatcttcaccgtaagatgctgctgaccaccctgtggaacaccggcgcccgtattaacgaagcactggccctgacccggagtgatttttccctggccccgccctacccgttcgtgcaactggcacccctcaaacagcgggtggagaaagcggcccgaacggccggccgtgctccggccggcagccagcctcatcgtaacgttccgctttccgatccgcagtatgcccgccagctggaaatgatggtggccacccgctggaacgccggaataagcgcaccggcagaacggaaaaggtgcgcatctgggagatcaccgaccgtaccgttcgcacctggctgggcgaagctgttgaagcggcagccgccgacggggtga

SEQ ID NO: 152420 - DNA, 495 bp, Enterobacter cloacae
atgttttcgaaacagatgattgcacaattacttcatactttcacctgccatatatgcgactcaaaaaaaaaaggacgtctccggcaggagtcgtccaaagcataccaggctttcgatacacgcactgcgctgcagatgcgaactcgtattgattttttcatagccttatggactcatcagctaccagaactggtaataaaggatgtcggttccctccgccttattgccgccagccggcggcgtgttcaacgccgtgccttcacgctaacccggccgctgcggccgcaagggaagctcatcgccgttctcctcacccgttcgcacccttcacggtgcattcagcccgtgaagggcttgcgctgcggcttgcgggaacgcccctgcgtcctccgctcagagccgggtttttgtggcggcacggcgcaagagggtgccgcatatcagagaggagagtgtctatgtcccgttttattctgggtgactgcgtgcaggtga

SEQ ID NO: 152421 - DNA, 492 bp, Enterobacter cloacae
gtggctatcggtgatgatgctatccgtgatgctttttatatctttacacaacaagctgccgaaatggatgataaagggctccctcaggaagtttgggaaacgccttgcttcacttatttgatgactaaaaagcaattcaaccagatgaaggttgtttgtcagagaaacggatgggacatacctgcatcacctgcaatacctattacttgggctatgttccggcatgttctgtctgcacgtaactcgaaggataaattgagctggcaggaatgcgcggagattttggctaccgctttttcagtgcagagtaatgtgtacgttaacagggattattcggagcagactattgtgcttaacgccgttcgccgtatcagcgtcgctggggcagggtttttcgcaatggcgatagttgatgtctctgaaaataatttggcccccgtgactgcatatcatgcaacggaggccaaatgtaaagctatacagcgagggtga

SEQ ID NO: 152422 - DNA, 1281 bp, Enterobacter cloacae
atgaatcagcaagaaaaagtaacgcctatcgaggaagccaaggccaagcgtgggcgtccgtcactccccaaaaagatgcctacggtagcgttccctgccgatctggtcgttgattataaaaaaggcaaatatgagagctcgctggagaacgtagtggcagcgcttcgctgtcatgacgtaacgggtgtacagctggcctatgatagcttttttgcagaggagggggttttcattaacggcgaatggatgccgctttctgacaacctgatcaccgaaatgcgcctgcgtctggcggggatggattttgccaaagtgagcaaagataacgctcgcgacgccatgttttatgtctgcgaaaacagcaaatttgacagcgctcagcgctggcttaccgctcaggaatgggatggaaagccacgcgtggagaaatttttctcccgctacttcaaatgcgaaggcgacgaggaatacatagcagctgtcagccgctacacatggacggcactcgccggacgcgtcatgcagccgggcatcaaagccgatatggttcctttgctttacggcgctcagggtgcccgcaagtctactggcgtgcgccttatttccccattcagcgagtcatacgccagttttaaccttaacgacaaggatgacgtactggcccgtaaaatgcgcggctgtatcgttggcgaactggaggaactgcgtggccttcatggtcgagacgccgagtctacaaaggcatttttctccagcccgcatgacgagtgggtgccgaaattcaaagagttcaaagtgcgcagcccgcgccgcgtcgtgtttatcggcacaacgaacaatagccaaatcctcaatgactccaccggaaaccgccgctatttgcccatgagctgcggcctcgttgactgtgaggccatcgagaaaaaccgctctctcctctgggctgaggctctgcacatgttcaaagagaacggcattatgtggcagcaggccgaggagctggcccgcaaggttcacgatgatttccgcgttatagatccgtgggaggatgctctggcggattatttggaggtcgacaacgaccacgccaagccgatggagtacgccaccactgaggcactgtttgcccgtctgggcattgatattggtcgagtctcagccatccagcacaatcgcctctccgcaatcatggcacggtttaactatgagaaagggcagcggcgaatcaacggtaaatcaacccgtggctacttctggcgggataaaaatagccctctgtga

SEQ ID NO: 152423 - DNA, 384 bp, Enterobacter cloacae
atgaaaatcaatatacctttgctgtttgctttaacctttggctgcatcgttaccgtacaggccagcactatgcgtacagattcgctcggtaatacctatgtaaccgatgacaacggcaaccagaccagctatcgcacagattcgctcggtaatacatacggatcagatggctcaatgtctcgcactgacagccttggaaacacctacgtaacagacgggaacgggaaccagacacagtatcggactgactcattagggaacacttacggcagtgatgggagtagtgcccggactgattcactgggaaatacctacatcacatcaccgaatggggatcagaccagctgccggactgacagcctgggaaatacttactgtaattaa

SEQ ID NO: 152424 - DNA, 627 bp, Enterobacter cloacae
atgaattgcatgatttacatgagggccagcactgagacacaggacgccagccgcgcagaggatgagctcaaaacctttgccgcagctaatggcctgacgatctgcggctggtatcgggagaatatctccggcacgcagctggagcgcccgcagctcaataaactgctgcacgacgccgggccgggctttgtcctgctggttgaaaagctcgaccgcctgagccgcctcacccgttcagagtgggagcagttgaaagaacggatcagagccaaacggctgcgcatcgtctgctgcgacatccccacgacgctggcggtattgcagggagaacagccgaccggggcgggcggtttcgacgttcgcaacgtggtactcgatgcgctcaactcgatgctgctcgatattgccgcagcatgggcccgcgacgattacgagacacgccggaaacgtcaggcgcagggaatccaaaaggcagtagaggccgggaaatataaggggaaacagcccaacacggcactgcataagaagattttgaaatacgcagccgcaggacataaaacgggggagatcgccagactggcgaactgctcacgctccacggtgctgcgagtaacgcgagagcagtag

SEQ ID NO: 152425 - DNA, 4395 bp, Enterobacter cloacae
  misc_feature (4346)..(4355): n is a, c, g, or t
atgactttaaataaaaaatcagccccatccctgaacattggcaagaccactcatctacctccggctgaaggcgaacgtcgagcaatacgtggttacatgggccagtatgaaaaggcaggtgcagccatttatgctgagttggagtatgggcaattaaagtggattggggttgcagatcgcagtgcaggtatcgctgatgatctcgttctgggatttgatggagtggtcatcgggcaccaatttaaaacatcacgattcccaagttcatttactctaccaacacttttgactggatctgctggattactcaaaccattagtttacgcttgggaaaagctatgcaatacccatcccgattcccgagttgaaatccgcttggtagtaaacgattacccatctgtgaaagatactattggttcagaagaaccagcacatagcgccgcttttctttatgagtttgggcgttttcctgaccgttctctacaagaatggcgatccggcaactggcataattttatcgaaaaattaatgcaacattctggattaaatgacaataacttcgaaatgttcattcatgcgttacgcgtaatatacggttctgctgcagattttgttcagtcatataagctgagtgctgagcaggctaggttagcgtctgaaattgctcaactattacctcggctcgtttcagattcaagagataaggatcgctggtcccgggacgaaatattgcatgaactgggttggaaagatccgattaaaactcgtcatattcatcaattcccgatcggtgcccatgttcagcgcaatcgggatacagaattacaactgctccaaacactacgcaacacagttaatggttatatagcgctaattgggcctccaggttcggggaaatcgactttactgcaactggctctggctgcagagccaaatgtccgggtggtgcgttatctggctttcgtgcctggagcggcacaaggagtaggacgcggagaagccgatgactttttggatgatatatctgcccagttacgtaaaagtggattattgggcatccgtcttcgaaataataaccaatttgaaaggcgtgagcaatttggggaacttctcaaacaagccggtgaacgttacataagcaatgctgtcaggacagttattatcgtcgatgggctcgatcatatacctcgtgaagaattaccagtccgttccctattgagcgaattacccctcccctcggccattcctgaaggtgttacctttgttctcggtactcaacaccttgaacttaagcatttaaaaccagcagtgcaagagcaagctgcagcctcaggacgttttgtaacgatgcgtccactgggaagagtggcggtcgcaaggatggcagatacccttggtcttagttcaacaatttcgcgggtaaaactttacgaactcagccgtggtcatcccctggctgcaaattatctagttcaggcgctgcttgtttctgatgcggatgctatatcaaatatcctcgccggaggaatgaaatttgatggtgatattgaatcggtttacacctcagcatggagagaaatcgtaaatgcccctgatgtaatgcatgttttgggattccttgctcgtattgaggctccaatgcccctgaggcttttggcaacaatcattgatgttcaatcaattgaacgtacgctaaaaactgtccagcatttacttaaagaaacacctcacgggtggaccgtattccacaatagctttcgcctttatgtactctccaaaccaaaaataacgcttggcagtatagatgaaacttattcacaaaatatttatcgaaaattagctcacttatcgcgccatgcacctgatcactcgctccagtcttggttagaactgcgttatctcgctcgcgctggtgatcaagaagaactcctgacgctggcaacacctaaatatttcaggcaacaatttgcccatggacgttcattggcagatattgatgcggatattcgcctcgctatgatcgctgcgcgttcatcgttcgatggtgtcgtaatcacgcggttactactttgcagcgatgaaatgtccaggcgtgcagcagcattggaacatgctgatgaactgcccagggcaatgttaaaggctggatatgttgatgctgctttttcattcgttcaagattttcctaatgccggttatgaagtagtagatgcacttttggagctaaatgagttcgatcgcgcaaaagaactttttgaagaacttgagccactgtcacaattacattcatctcgatttgaaaattacggtcattctcataatctcaatgagtttaaaaaatgggcaaggagagtttttcattttagagactatgagcagatcaagcaggcaatagactttatttcagttgaaggcatgacaaaatccccagagtacttagcagaaggaaatatcgattcgataaatacacagctgagattagaggtggctagggcaattgtatgctggcaagcagatgtggatatccaggatatctgcgataagttagaaattaaagaagaagaacacctagggcttacaattcaggctgggttttcggctagagatcgtggagacaaaaaactagcactagacttattcagcaaagctattaaatcacctggctttgataatatccataatggatggagacgttctatcgcattattttccgcttcatccaatttttttgaaatagcttcacgactttttgacacccttttcatgccacaaataaaaatggctgacaaagaaatggaatcagtaaaagcgcttgtaactgcaataatagaacatgtgcagctagctacaattcttggaaagaaattacctgaagcaacattatccgagcatataatttttcggcccttgcaatctcatgcgactgaggcaggacatctgctcggtatggcaatgaaagaaacagactctataacatctggcagtgttcaaagagcctgccgtatgcttatgaaatatatattaaaactcaattcccattctggaagtgaccattatcaagctcaagtagctttacaaggtacgttacctattattaaaacattaatccaaactgcagcattatgtggtttgaaagaatatagctccgtaaaaaaagaaattgacattgtatttcccgtgctagcactaaaaggtaattttctactgcgtcatgagttagcaattgtcatgtatcaggctgatggcgatcgggaaagcgcagctgcgcggcttgaaccaatgataaatgagcttatagaaaatacgcctagcgagcaacttgaagctctagcttatttagcaaacagttttactgccattggagagattgagcgtgcccgaagcttactttcttcagcgcatgaccattgttttggttatgctttggcagcacgtaaggatccgttatactcgatttggcgaaatattctagtcttagctaatgccaccgatcctgatcagcgtgaccaacgaataagacagcttatgcgccaagttgatggcatgaaagagactgaaggggcaaacgcagcatatcgtttaactgaagtattgattaatgaatccatgtatattaattcacatagtggatatcaaattgctcagacgctgacgaattggggtatgataccgtggcccaatcaggttaatgagctaatgataggcattctgagaggcagaccagaattgctgcttacatgtatttcaatttggtgtaacttatgcctgccattctgtatggaaccacattatcgtgatccctcacatgtcggtgattttatagacatagctgtcgatacttctgaattgacgttactcgttgaagttgtttttattttattagatgccatagaagttcgcagtcgagctcacgaacgtctcactttactcaaacgcttacatgctgctgcgagcagacattcgtttgaaaacattcagagaattgacaatgctattagccgctggtcatttgaagaacctccggcacgccattcctacacaccgcaaaaatacgacgatgcctcaacccttgacgaactgcaattagcatttgaaacggatggaaagaagcttgattataatgcgtcctctcgctttcgtgaacttgcacactctgcttcattagatcaagttatgcatgtttatgaaagctgggattgtttaaagtctgatgcacgttgccgtttttttattgccgagcggcttgtgaaagatggaaagactgaattagtaagaaaattagtacaagaatatgatgccagtaatgaactaatcttgcgacagcgagcgagtttttatcgagatannnnnnnnnnggatgggagggagacagctcgacttctatcgcatacgtaa

SEQ ID NO: 152426 - DNA, 549 bp, Enterobacter cloacae; identical to SEQ ID NO: 124434

SEQ ID NO: 152427 - DNA, 168 bp, Enterobacter cloacae
atgaacatctttagcatgttctggatgagaagggagcaaatctttatatgctgggcttttgatcgctttgagatattcttcttcaaatatacgagcatattcacccggttcacgaagcccttcttcgttattctggcgatagaaatcaaccttatcaatgaaaaatag

SEQ ID NO: 152428 - DNA, 237 bp, Enterobacter cloacae
ttgactcccttcagcatcggtatgataacaagcgacgactggggaagttatgccagagaagtgccgaaggagaagcacctgacaggtaaaatctttacacagcgcattgagcgaaacaatctgacgttacgtacccggattaaacgtctggcactaaaaacgatttgcttttcacgctccattgacgttcacgaaaaagtcatcggctcctttatcgaaaagtacatgttctactaa

SEQ ID NO: 152429 - DNA, 171 bp, Enterobacter cloacae
atgggtgagggtggtgccgttctccttacctttccgggcactacccatcaggttattctcaaccgcattcttcccggcatgcgcggccagcactgccgctgtcagattatctgcttcggttttttcggtagtgctggtagtagatccaccaatagcctattgctccaataa

SEQ ID NO: 152430 - DNA, 312 bp, Enterobacter cloacae
atgaatacagatgataaaaacagaaagcaaagaacagaaaaaacaattaagcaaaaaatagcatcagcacagatgcgtctgaatcgcttgaagagtaaagaaaaatctttatccaagagtgctgagacacgcctgaaaattattttaggtgcagaagtagctaaagctgtggggtgtaaagtggaagaggtggataaagagttaatattaggactgatattacaattaccaaatattagcattgaagataaagcaaaagtaaaattacgaggaaaaagatttcttgaggatatggttggcagacaggaatag

SEQ ID NO: 152431 - DNA, 258 bp, Enterobacter cloacae
atgatgacggggatgcctaaatcagcccctaactattatctgctctttaaaacaaccgataccagctactgcggcgggatggtctggctggattactactctggtattgatgatgcagttcttacctataagaaaggccagaaagtcagcgtcaccggaactgtaaacaatttcgaagtccgtggattcgctaccgtcaacaacgccgatatgccagttcgtctggttgttctgagaaacggcacaatcaaccattaa

SEQ ID NO: 152432 - DNA, 498 bp, Enterobacter cloacae
atgagcattgattacaatacaataatgacctccagcagtgaagatgtggaagaatatataagcagaaatcatttcacggacaaacaaaaactggagatttacagtttttataacagaaacagaaaagataaaataaccgtaaatgtaagaaaagaacgaagttccgatattcgaccgggaatagcctatgttcatgcttttcttgataatctggaaaagatcgggaaaaatatgtctggtgcagaatacacaataatgatccgcttatgtaaactcatgcagcatggaaacctcattgccagtatatctcagtcggcactcgcagaagagcttaatatgagcaaatctaacgtatgtaaatgctggaataagctaataaataaaggcattctggtcaaagaagggaagcataccatgataaacgcgaatctctttctgaaaggccagtacagaacgattcaggaaatgagttctaaaagttgccccgcaaggggctaa

SEQ ID NO: 152433 - DNA, 216 bp, Enterobacter cloacae
atgctgagagatatattgtgcggcctcggtattagcatagaacgcagttccgataaaaccaacggtaaacaccctcgactgtgtggcttcagaaccatacaacaccgcatcggcaatttgttcatcaacaatgcagacgggtacgcaaaagtctgcttttcttttgtaaagacgaaggagacgatccgagtccgcctcatgcagcgtaatcaataa

SEQ ID NO: 152434 - DNA, 240 bp, Enterobacter cloacae
atgattgaacgagataaccagctgctccagctcaatgggaacgcgtgtcggttccagtcgcgcatcaagattctcggaggtgatgtttttaatggcattgctgacattacgaaggggcaggtgcccctgacggacagcgattcgaatgatcagaacaatcaacaggcttatcacgacggcaatcgcaatcaggttctttttcagcgcatcgaggtaatggagatggaaattaatggatag

SEQ ID NO: 152435 - DNA, 213 bp, Enterobacter cloacae
atgaaggccgctctcgagggcgtgccggagcagccgctaacgcctccgccgggcattgtcacgatcaatattgaccgcagcactggacagctcgcgaatggcggtaatagccgtgccgagtatttcatcgagggtacgcagccaaccacgcaggcggtgcatgaggtgggtacagagatcattgataacggcgagacgcacgaactgttctga

SEQ ID NO: 152436 - DNA, 219 bp, Enterobacter cloacae
atgtgggagtctataaaagattttttgatgaaatatttaaagtttttattacaagatattatggatgatttcttttggtatggcactggaatagtcgctatcattccaggtgctgtcgtagcgagttttataaaagatgaagaaattgcactattgatttttgggattattgtattagttgtttacttcattgcatttcgctacaaaaacaaaggatga

SEQ ID NO: 152437 - DNA, 1491 bp, Enterobacter cloacae
atggcacaggtcattaataccaacgcgctgagcctgatggctcagaataacctgaacaaatcccagactcagctgggtacggcaattcagcgtctctcttctggtatgcgtattaacagcgccaaagacgatgcggcaggtctggcaatttctaaccgcttcacctcttctatccgcggtatgacccaggcggcacgtaacgccaacgacggtatctccctggcacagaccaccgaaggcgcgctggaagaagtgaccgaaaacatgcagcgtatccgcgagctgaccgtacaggcgaaaaacggcaccaactccgccagcgacctggactctatcaagaaagagatcaccacccgtctggaagagattggccgcgtagcggaaaccaccaacttcaacggcgtgaaggtctttgacggttctaaagagaaaatcactattcagatcggcgataaagacgaagacaccatcgatatcaagctgagcaagctagatatggaaacgctgggtctggataaatttatggatgatttcgcggatatcgggattactctgaatggtgcaggtacgctggaaagccagtttgaaggcatagcaaatgaactcactaacggtgatattgatgttgggcaagctgaagcctgggtacttgacgctggacaaagggatcaactgaaaaccgcactgggggcaaatgatacaggtgacgttaaggtattaagctatgatgataatggtaccacacgccttttcgcatatgatgacaagacagagaaaatgcttgagattaccgaccccaaatgggaggcaattggtggtggcaatgacaagttaaaactgggagcgaatccagatacttctgaaatcaccgacgcagccgataaagacatgctgctgaatggaccgagccaactgacttcgccgacactggtgaaggaaggtgacacggttagtgctggtggcggcaatccagcgatgactaacgaaaagctgaaagctatctcgcaggctgcattcggtagtgacgatttagatactaccaagatgaagttattctctgctggtggtgctgctacagataccttctatgctattaacgcagcgggtgaagttaaaagtgtcgtattggatgatcaaggcgacgtggtaggcactccggctgaagctcgtttccatgacgcagaagtcattcagaaggctgcaggtggtgctatcgctgacggcttactggccaagctggatgaagctctgaccacggttgccgacttccgtgccgacctgggtgccgttcagaaccgcttcagctccatcattgcgaacctgaacaccaacatcatcaacaccaccgaagcgcgctcccgtatccaggacgctgacttctccgtggaagtgtctgccatgagccgtgcgaacatcctgcagcaggcaggtgtttccgtactggcccaggccaaccaggttccgcagaacgtgctgtccctgctgcgttaa

SEQ ID NO: 152438 - DNA, 2406 bp, Enterobacter cloacae
gtgaatccccctttactgcattcctataatgccgttatcgaacatacgttataccaagcaaaaaaatccagaacaacgaaacacatcgctggtttttgtcagttacaggggcccacggggagtgggaaaactagtgctctctatcgttctggcttcgccgataacgtacctccggcgttggagacaataaaaaaatcaggctctcaggccattctggttacccatcgctggaatatactccacgacatttacgaaaaaacagtttcgcacgaagacagcaatggaaaaccatttaacgttagtgtgctttatgcgcaggatgaacaaattgtttctgcaatcgaggctacgccgctacctcatgagaaagatatttccgtagattcactcccggatccctttaactccatcaacgaacttgagggaaaaaacttgtttgtcaacccagatattgcagacaaactgcgtaagaattgcaggaatatcctttatatcaataaatcattgaaagcatacccggcacatttacatgcatctattgccagtgaaaaagaggcgttaataaagtcatgtgcggcagttgagatatcgttaattcaaaatatcaaactgctggaaaaagaagccatgaaccacaaagaaaaatatggtgaagaacatgaactcatgcaggccgccaagcaacgagttgatgacttccgccgtgatgcctgggtcagacgcattctgcccgccatcgcctggcgtgacgaaaaacaacacctactgattatgacaacccaaaagctggtttcatcattttacgacgggcggcgcagagtacgaatgtccagcaaagagctgcgcaattatgtcatttttattgatgaattcgattatcaggctgaggtgctacaggaatatctggcgcaagctcaatgggttcaggagccgcctgaatgcttgggacagttactagaggggggacgcagattactgcaacgtatgcaatatgttgaaacagcacctgcaccgatgctccgcgaacgtcttgggacatttcttaacgaactagataacgccttaaaaggaaaaaaaattgatttaacacatgccagatcgctagtaattcctctgcaacaatatctggataataaacccttcggtgaacattatttatttcgctccgatcaactggtaaccagcgagcgccttatcatgcgacaggccgaacatggctacgaaattatcaccccagattcctcatttaaggataacgatcaggttatcgacattagtgattttttgcgcctgatggaaaagtttattcgaaagttcagtctgatgttaacggacctgacagccagcgaagatgaaacgtatgaatacatcaaaaagttaacccgacttcttttcgacccagttaacgactacagaccgtcatattatggttcaaccctgccaaatatgtctcgatttttgttaccacgtaccgatctgcctgaactgcgtgaactaagaaaaagtaatattttgcccaatacacatgccagtatttttgggttaactaactggttgctgaaacaaaatgtagtggataccgatattgatccattacgaatacagattaagcgtgcgttcttaccaacaacagcagaaggtttactattgtcgctagccagccgtaatctcgtttttgcactgtcggctacatcttatattgaaagagcctgtaaccactttgatgttcggtggttaaactcagccttacgctatattgcagaagcacgtaaccctaaagttaaggaaagctttctaggaactactttcaaaaaccgacctgattcctggtttaaagaaccgattccttacgttcagactgatgatgaccttcagttacaaaataccgcgattgaagtgatcaatagcagcaaggaaagcatcagaaagacacaactgaatattgagatccatgattttaataaaacaaagaacagcccgcattcagccgatcttctcgcctctctgccccccgattttttccagaatgatgatgaaccttccacagatttcgaatcagagtatcggcagagtattctatttaaacttctggatgtgctggagcttgcaggagaaaggcctcagcaccgagggcatctggcttttgttaattccatatcttatttaagaaaatggctaaccactgcaatagcgacacaaagcagagaatgcctcacatggttaaagcttgatccgactttatccgacaatcttctgctaaggaattttacggatgtatttatcccgttgactatacataacgagcccgcgctaatctgtctgttaaccgcagaatgtcagaaaaaaaagggcttcagtgatgcctatcaggcgcatttgcttcccgacgtattgttattgtgctga

SEQ ID NO: 152439 - DNA, 1428 bp, Enterobacter cloacae
atggatttgacctgtttatacttattggaatcacgtcatttttacttttccgctttccagaccagtgctggtagcaatgataatatggcacatgcaggcttccagttacgcaatctggaaaaactactacgtgcaggtgaaatttcacgtaaacagcatcagcgcttcatcctgccattgatgttgaacagaaagagcgatatctcccgattaaacggagagtataaaagaaccagcgattatataaaaaatacggcagccaatgttcaacagcaggttggtcgtattgagcgagcttggtgcgaagtacccaacgctgagattcaccttgatcctgaactagcaaaagacctgtcccgctttgcttcattgcctatctatacattaaatcgtcgacagctttcggcactcaatcgtcaattactggatacgcttcgagaacgtgatgaactgacacagaataatttcttcagccagctcatgacgccgacacagactggaaaactagcattgaattatatcgatcaacgactagttccggctattcggttgttacgggaacaatcaacaccaagagatgacatcctattactctggcggcaactcggtaaagcagtgcttcaacatgatttagcttggaaacctggaaaaaacgctattgacattgatcttgaattatataaatgggcttgctttgaaaaaccgaaattagctaatactgactgcaaaatctggtactccccacagacatggcagttttttgacaaagcagcagaaggacggcgccaatacaaccctcagaaactataccagtatatccaacgtcatcctgtcattactgactggttcaaccgtaagggttacagaacgtccattatgcccttcgcgaacgatttggaagagcgttacgcattccacccattagttatacaacgccttctgatgggacgtctgggagaagaagctattcgggcacttctttattcagagggcatcattaccagcagcaaagtgagcaatcaccggctttttgagcagtatgatttcagcataaaaaattctgattatcgtgtggatgctaagttttggagacaagatactctcgataaggcagatgaagaatatcaacaatggttggtgtctggcgcaaatcaagagcatacccctctgggtctgagtaaaaaactggcacaaattcgcgctatcgagggtaataaaaccaaattggttatcgccaactttgttgctccacatgctgacagtcaattactgggtttctctcaccagttgacccctgttcaaaatccttatgatgcagacattctggttctcggcggatgtgtgaccccggacaccatttcagtggaaacacccgggttcgggcaactcaaaaaaatcattaatcaaaatattatggaaagagtataa

SEQ ID NO: 152440 - DNA, 1011 bp, Enterobacter cloacae
atgaaggctgctgttgttacacaggatcatcaggtcaatgttaccgaaaaaaccttacgcccactgaagcacggcgaagccctgctcaaaatggagtgctgtggcgtttgtcatactgacctccacgtcaaaaatggcgatttcggtgataaaaccggtgtgatcctgggccacgaagggattgggatcgtgaaagaagttgggcctggcgtgacgtcactgaaagtcggcgaccgtgcaagcgtcgcgtggttctttgagggctgcggccactgtgaatactgtaataccggcaacgaaaccctgtgccgcgatgtgaaaaacgccggttattccgttgatggcggcatggctgaagagtgcattgtcaccgcggattacgcggtaaaagtgcctgacgggctggattccgctgcggccagcagcataacctgtgccggcgtcaccacttacaaagcggtaaaagtctcccatatcaagccgggccagtggattgcgatctacggtctgggcggactgggtaatctcgcgctgcagtatgcgaaaaacgtcttcaacgccaaagtcatcgcccttgacgttaacgacgaacagctgaagctggcagcgagcatgggagcagacttaaccatcaactcccgcagcgaagatgccgctaaaatcgtgcaggaaaaaaccggcggcgcgcatgcggctgtggtaacggcggtcgcgaaagcagcgtttaactcggcggtggacgcggtgcgtgccggtggccgcgtggtggccgttggcctgccgccggaagccatgagcctcgatatccctcgtctggtgctggacggtatccaggtggtcggctcgctggttggtacccgtcaggatctgcaggaagcgttccagtttgcagccgaaggcaaagtggtgccaaaagtgacgatgcgcccgctggaagatatcaacgccatcttcaaagagatggaacagggccagatacgcggccgcatggtgattgatttacgctcgtaa

SEQ ID NO: 152441 - DNA, 633 bp, Enterobacter cloacae
atgaccggaagagttgattaccagattgaaaaatttctctttaccgaagccgccgaaccagagcgtctgacgcgccagtgggcggaggtactggaagagtgtcgggagcaacaggccggtgcagaagaacgcctgcgtctggcgctgctgaatgtggattacgtcaccagctttgagcttcctttccggttactcctcacccgcgccccgcagttaattgacggcctcagaaaagagcttcaactcagccaaaaaaatgtgctttttaacggcaagcgcttcggctgtgtttatagcctgaaaatgaatctggacgggatccccgatgaatttaactaccacctgaaaacgcgtatccagcgcagtgatagcgaaggggggagcgaagtgccgtaccggcaaatcgcccagcaggtgaaagcgccccgtgagcgattaaagttagcgctggaaaacgggctcgcggtaaccgcactcgacgggcttttctggttcggcattcagcgcatcgcggctgatgtgcaacggttgcgcaaaacggggatgagaataaccacctccgggaccgatgtctttgataccctgaccaggacccgacggcagatcccggtttatcgtcaggagaaagcgtag

SEQ ID NO: 152442 - DNA, 1212 bp, Enterobacter cloacae
atgcccgttgatctaacctgtattccagcccgtgcaaaacgacaatctgcaccttcttttaagcgctgggtgatactcctggttgtacttattgtggccggagcggggagcacagcctatttctggcctaccagttcgcccactaatacggctatgttctggttttgttttcttggaatcccctcagccatcggcggggttgcatttgcgtttcgctggctgatttatcttgccggagaatggctggcagatggctgggatgtggccagggagtgggatcttgctcaggatattcggtgcggtcagcgtaatctcgatatgttaggttacgttgtccatctgccgcatgtcatttcgtctgcatccatttctcaacaaatgcagatacctgaaggcattatattgcctacaaaggtggacgagactggcgagttgcttatccaccacgccagttttagcgatatgggattacctgtactggtgagagtaaaagaacggataaactccttgctaagggagactgcgttacaaaatgcctttcaatgcatgccccaaaattccccccttgctgttttatttcagttcagcccggatatatctttttcacgcgaagagctcgccgcgatacaacagttggtacaaaacagcattggtttccctttcaatattacttttatcagcggggaaggattacagacaattgatgcgtggcttgatagaccagatgtgatgcagacgctgcttgttattactctgaatcttacggaaaaaataatagatggtaccggggaagcggcggcagcactattgatgagttcacctgaaagacccgaggtaagccggaacgttgtggctcaggtccatcgacctgaacagatgaagactacgcaggagatgagtagcgcgcttatgcaggcgttacactggggagattctgctccagaagagataaaacatatctggttaacgggtacaggtgtcagcaataaagcaacagccttgctctcaacctctggtgttcgatttcctcttgccggacaaccttgtgatattgatttaaaaacaggactaacgaggagtgtttcaccctggcttgcgatagctgttgccgctgaccaggctggacagtctgaatcatcacagcttgttgtgtacgttccagacgaaagtatatttccctggtttatgattgtttgtcctgtagcgaaataa

SEQ ID NO: 152443 - DNA, 978 bp, Enterobacter cloacae
atggattattacggtctttttcctaagtttaaagtaaaccgctctcttaatgatgaagagagagaacatcagctaaaacaacaccagacaactgaactggatgggcaatctttatttcctgatatgaaagtgataacactaaattcccgctatctggagttggttgacaaatattactcagcgaagggtttcggtgggttgatcgctgcaatatcttttttgggcttttcgctattttacctggttgtgcttattggaactattcctaatctcagatggaaattttcgggaaatgaaaaagaacttttgatttttactttaatgttggttccggcaattctgttttcattcaagcttcttaaaacagaatggtttgcatggacacattaccccgtttgctttgacagaaaaaacagactggtgcacgtattccggttaaatggttcaacctacagcgttccctgggataacgtttttttcaccacaggactgagccacagaaaagatgcgaacaaagactactacatcagcggtcatgtgctggcggatgataataaaaccgtgattgacaccttctgtctgccggccacgcattcggacaggaagcagcttgaaaggcactgggagtttgtccgacgttacatggaagaagggcctgagtccgttattggggttgttgacttttgcctgcccatcgcaaaaaaacgcgaaggctatcgctttggtctgctctatcttttatccggctttaacggcgcaccgttatttctgtttccgctcctttttgtgctggcctttattttcagcgttccgcgctacctggcgatggtgacaagcagagtgcccgtctggccggtgagtattgagtcactgtgcgggtttgataaagatgatccttatcgggtcgatgcttctggtaatcctgagcatccatggcggagtcttttcaggaaatcatcagcaaataacagggaataa

SEQ ID NO: 152444 - DNA, 861 bp, Enterobacter cloacae
atgattaattacctggagtatcctttacaactggcggaccatcaatatgcagtgattgaccgcatgcgggtgccggaactgccagaaaactggccgcatatggaactggtttcgccgatgctagcaccacaggcccatctttacccgtggctgataccgttgcatgagcttccacctggtgagtggagaacatttatggcagacctttcacaatgtgcagaccctactttacccccgacgagcgtccttttattgtcctgtcagcgcccgattaagatcgtacacaatctgctggttaatgccctgttttttaaggatgcacaccaaaagggacatatcctgcgttattacgatccgcgagtgttgtttcatctgcactggatgctgaaaccatggcagttgtttaaccacctacccgcccaggaaataccgtactggacattctggcttgaggggggatggcacacactggcgttcccggccagggtttcttgccagcctggagtccatacagaaattccgctggcgcaattgcagcgttgtgggcagataaaccttgccctggaaaaactgccacgcaatgtcaatatggcgcagcgccagcaaagtagtcgaaaaatagatgcattgcttgtgcaggcaatgacatgtggactgcccacccaggaagatcgtattgcatttgcgctgcatggattggtgcagccagaaggtttctggatggctccgaagatgatggcatttctggctcagtgccggcaggtccctgactattatcgtgatgtaaccagtaactgggatgaagatctctggcagcagatgatccaaatgcagccccataatactggatggaacaaataa

SEQ ID NO: 152445 - DNA, 588 bp, Enterobacter cloacae
atggttgattctattgaggagttcgaagcgttaagggaattggccactagtactttaccaaaatcatacaaatctgtttttatgagtaagctggcttcagctttagcaaattcgttcaataagacaaatgctgaatcagctaaaaactgcttcaaggaggcaagaaagtttatccaattaaaagcggagtcatttttaaagcttaaacttttctttattggtactatttttagtcttcttaccttaatggttgttattacatgttgctattacctaatagagtttagggtttattttatggggatcggcgccggagttataggagcaatggtatccagccttcaaagaaataattctatttcactagatagttatcccggtgagtatggtttgtactgtgaaagtttatcccggttaataattggagcagtatttggttgttttattgtttttggaacgaaatcagagatgtttttagccccgtttaaagaaaatattcaggcaattatttgtttttgtttcatatcaggttttgtcgaaagattcgttcctgaacttatcaatggcgtagttaaaaagaatgaataa

SEQ ID NO: 152446 - DNA, 492 bp, Enterobacter cloacae
atgtcttggttagataatctcagagtgtttttgttcgagaataaagatgtaaaaataagagatgaagcagaaaaaaaacacataaaggaattgcaagacttacccctggattttgatccgaaattaaaaacaagacagattgttcttcataagagtgagaatatattcatctatttaaacccatttaatgaattgggttgggagctgaagaatatcccaaaacatgctcgtaacgcattgcaggaatttattcttattaatagtttaatgaacttgtatcttaatagatctcaaaaaaaagatttatcaaaactattagctagtaggctgtattattgcctaacagcaactgagccctacaatactgatatgattttcaaggaagctagggagttggttgagtctagaaagaggtctattaaaaggcgagtaattgaaacgccccagtttgctgtttatctaaatgataaaaataatgttgactggtggtga

SEQ ID NO: 152447 - DNA, 744 bp, Enterobacter cloacae
atgaaaaccttcgttataaaccttaaaactgaaataaaaaaaagaaacaatattgatgcacaatgcaaagccaatggattcgactatgaaatcattgaagctgttaacggccgtgaattgcaggacgaagcaacacaccttctggctcataacctttcacaggccagactaacaaaaggtgtgattgggtgtacattgagccatctgtatatatattccagaatggtagcagataacatcccttacgctctggtgcttgaggatgacattacaatcactgagtctgcaaaagaagttatcagcactgtagagaatgcccttcagccgcgctgtcgtgaaatttatctgctcaatacgcctgaggctatcactccgttaatcaagaagaacctgactgaaaatatcacgttctacagaatggcgcgggcaagtcagtcgcctgcttatattctcagtcttgcaacagcaaaagcattactcgaattcaactatcctataaaatatgaagttgaccgctgggtgtttttccgtgactactgtaacattaaaatttggagtctccctgcaggagttattgatagttacgatcaggacaagcaagaatcaacgcttgaggcagaccgtagcaaagttgaacatgaacgattgagatatctgtcaatcctcaaaaaaaaagagaagggatatcaaaagaaaagattagtgaacatgattttaaaaaaaatcagtcatcaggtcatttga

SEQ ID NO: 152448 - DNA, 990 bp, Enterobacter cloacae
atgcaacgtatgaatgatatgagtatccttctttcagggatatatgggaatcgcaataaagataagtcattcgaatatatgtactcatatttgactaggaaaacagcttatcttacgagagagtttattagagatggtaaccgagataaagagttacttaaaaatactttcttagaagctttgtcatggctgttcgcgatatgtgaaaagctcaatgtgcaacctcaagattcattctataaaaaatttccagggtgttgtccgtattgtcttggtaatccatgtagttgtacgcagactcacagaaaacccgaaaaaataaaaagtgcaactgcgatcaaggaagagttgtttcaacagtataacgctatcacacgtagtagttatcctccctatgcgcccgtaatgattaatgagatttacccttcaaatagaaatatatggtctatttttggtgggttctatcactcatcaagattatttgaagagttgggtgagttgcaggaggcatatgcaaaatctatagaggatgaaaactacaataaagaaaatcttcatgaggaatgtgcagatatttttgcttggttattttctttgtgggggattactttcaaagatcttgatctcgggcaggcgcttcaagattattatataaatggttgtccggtttgtaataaaaaagaatgttcatgtacagattactcaggtaaagttagtaagacggaagagaaaagagagtttctagttaaactcaaagaagaacttactcttctatcgaaaaaagaagaagctggggaatttaaagataatttagattcagctattcttgcaattgatgatgctgttaagtctggtaaggatgctgatagcagaaggactttatcagaagttgagggtgtcctggattcaatggaaaaaaactcttctaagctatctaagcttgcaagcaatgcttgggcaatatatgcaacaataataaaatttttctga

SEQ ID NO: 152449 - DNA, 1143 bp, Enterobacter cloacae
atgccctgggatgcgagagataccatgtcattacgtactgagtttgttttgttcgcctcgcaggacggggcgaacatccgttccctctgccgtcgctttggcatttcacctgccaccggctacaagtggcttcaccgctgggcggaggaaggggccgccggccttcaggaccacccgcgcataccgcaccattccccgaaccgctcgtctgacgacatcactgccctgctgcgtatggcccatgaccgccatgaacgctggggcgcacgcaagataaagcgctggctggaagaccaggggcaccgtatgcccgccttcagcaccgttcataacctgatggcccgtcacggcctgctgccgggcacttctccgggcattcccgccacggggcggttcgaacatgacgcgccgaaccggctctggcagatggattttaagggccactttccctttggcggtggccgctgccatccgctcaccctgctggatgaccactcccgtttttccctgtgcctggcgcactgtaccgatgaacggcgtgagaccgtgcagcagcggctggtcagcgtgtttgaacgctacggcctgccggaccggatgacaatggacaacggcgccccgtggggagacaccaccggcacctggacggcactggagctgtggctgatgcgccacggtatccgggtggggcactcccggccgtatcatccgcagacgcagggcaagctggagcgttttcatcgcagcctgaaggcagaggtgctgcagggtaagtggttcgcgaacgagggcgaactgcagcgcgccttcgaccactggaggacggtctataaccttgaacgcccgcatgaggcgctggacatggcggtaccgggctcgcggtatcagccgtctgcacggcagtacagcggcaacacaacgcccccggaatacgacgagggcgtgatggtcaggaaagtggatatcagcggaaagctgagcgtgaaaggggtaagtctgagcgcaggcaaggcattcagggaagaacgggtcgggctgaaggagatgcaggaagacggccgctacgaggtgtggtggtacagcacaaaagtgggggtgatcgacctgaagaaaaagtcgatcaccattggtaaaggatgttaa

SEQ ID NO: 152450 - DNA, 252 bp, Enterobacter cloacae
atgagcaaagaagcaatgaaaatggcattggcaaagcagttgacgattgctctgcaaaacctcggcgctcctgtcgaattactctgcattgtgggtagctacggtgatacacagattgattctgacgtgctggaaatgcttgagcaatacaatgctaacggaacaagcattcacagcctgatcctttctgttgaagatacaccaaaaacgcgtagagaaagaatatcgttagttgaaggcggtgcagcatga

SEQ ID NO: 152451 - DNA, 339 bp, Enterobacter cloacae
atgaaaccgagttatgaagaacttgaagccagatgcgcgtcgctggctgcggagaatgcggggcttaagaaatactgcaaagacgctgccttcgatgctgattacgaagctgaattaggcatggagcgcggaggattcactgatgcgcttaacgatattaacacctctgccaccgacgctttcctggctgaagtgcgtgccagtgcggttgatgaagcttgcctgaaaattagcaatgcaattgttaattgcagtcaggacgaacaaatcggtcttgatgaagcggcaactatctgcggtgacttcgcatcagggcttcgcaaaggagtgcagtcatga

SEQ ID NO: 152452 - DNA, 522 bp, Enterobacter cloacae
atgagcgaagaactgaaagttatcgcagtggttcagattaataacagagaggcgctggtgttgaatcggccgctaaattttgtctatgacgagattggaagagatttaatcggcagtgacggtccatttaaacgcccacttctgtattcaccagcaagcgcagccttcaaagcttttgccgggagtgagatgacgctaaatatgcgggatggaggccagcggaaagttaaagaccactggtggtctggttgccttcctgggcatcaagacgtaaccgcctgcgatttggaatcactgaagcgctgttacgtattttttggcggcatggctatcactcctgaagattaccagaccttgcgtgattcctacactggatgcgtttacccgtactgggattacgaaaagctgatcaagtacgacgatatgcgcaaggacctttaccgcagactttttcacgaacaaaagcgtgtgagatctcttgtccgcgaagtgaagaagttagctcgggaggccgcccaatga

SEQ ID NO: 152453 - DNA, 267 bp, Enterobacter cloacae
atggtgagcaaactcaaacatcggcgcacgcgccgccttaaagcggatgtggcctggtggcgtgaagaggcagagtattgccgctcccgcatgcttgagctggccggtgagatcgacaggctcaaaaagctggttatccgcgtgccgatgccggtggtggtcccgtcgcaatctgctgcattcatcggaattgatcttgctggcggaaaagaccaaacagcggtaatcgaaatagaaaacggggaggtgctgaaatggtcacggtaa

SEQ ID NO: 152454 - DNA, 180 bp, Enterobacter cloacae
atggtcacggtaaatcaggaatcactggccgaaaatattaagcgcctcgagtcgcgaggaaacgctgagtacgcattaggtttaaccctgaacgaggaatatcaactcgcagcgtatcgcatgctgctcaagtatctggcaggtcatgctgacgcgaacagggagaatggcaatggctaa

SEQ ID NO: 152455 - DNA, 339 bp, Enterobacter cloacae
atggctaaaaccgcagcagaacgcaaagcagctcagcgtgcccgccaggctgaagccggtgaacggaagctggaactggtgctcgacgagcaggaaatggagatgctggcgcggaactgcgcatggcgtcgcccgggccgtgagccatacgaactgagcgagtacatcgcactgctgatccgccaggatgatgcgcgggtgcgcggacgtatcaaagccatcagcgcaaaccggtgcggcaggtgtggggataaattacctgttgccgactgctgccttaaggaagaggagtcctgctgggcaagactgggctggcacgaaacgaaactttccgtgtga

SEQ ID NO: 152456 - DNA, 249 bp, Enterobacter cloacae
atgacaaactttcaactctatgttggtggcactaacaacatcacctatcgttacgaagtagtgaaggcgggtaatgtttttagtgttcggatattcgatgcactgagaaaagggcataagcagattggggttaagttccttagcaatgtttcagctcatgacgtgatagacgagtgcacatcgcattacaggcgaaatgctgaagggttcagaaattttattaaatcccttgtgaagcgagccagataa

SEQ ID NO: 152457 - DNA, 372 bp, Enterobacter cloacae
atgagtgacaaagatattgaatctgaaattcaggccaaaggcttaaccgcaccgcgcgttacgccagaccatatcgaaagcgttattgttcaggaggcatatttcacagcagaagatggttcctttggtgtagcaatcaaagcgaaacacaccggcggagaggtcaactatcagccacatgaatcactttctctgctaacattttgcgttctggtgctgcgaaatggcttcaccgtcaccggcgaaagcgcttgcgccagcccggagaacttcgatcctgagaccgggcgtaagattgcccgcgaaaacgcggtgaataaaatctggatgctggaaggttatctgctgaagcagaaactgagcgagaaatga

SEQ ID NO: 152458 - DNA, 297 bp, Enterobacter cloacae
atgacgtatatcgacgatgaagaacgcaaaacggaactggaagccaggcagcaaattctagcccagcgcgatatcgacgacatcaagttcgtcatggatagcgagcagggccgccgcgtcgtgtgggggctgctggagaaaggtcaggtgttcggtacctgcttcaacgttgacccgaacatcacagcattcaacgaagggcagcgcaacctggcgctggttctgtttcagcgcgtaatgacgcactgccccgatcagtatctgaagatggccgcagaggccagtgaacaggagtaa

SEQ ID NO: 152459 - DNA, 357 bp, Enterobacter cloacae
atggaaaaagcaaaataccgcgtcctgcgcttatcacatattcataacaacctctggccggaaggttcagagattgagtatgacggtgagccaggatcggcgctggagccgattaatacagcggcggagagagccaaagcagctgcacttaaaaagcgtggtcttgaatttgttaagccagagtcagaagtaaaaaatggtgatggcaataacaacgacaataccggcggtgatgacgatctggataagctccgcgaagagtatgaactgctcttcaacgataagcctcatccaaatactggcgtcaaaacactccgcgagaagatcgcagagaagcgtgcagaactgggcgtctaa

SEQ ID NO: 152460 - DNA, 663 bp, Enterobacter cloacae
atggaagttttttggattgttgttggcgtggttgccattattatttttatcattagccaaaacaggacaaagacttctgaccggattgtcattaggcaagagaagacgatcaaaactgaagatggcgaaataaaaatacagcgtactcagattgttgatagcgcaaccacacaataccaccgagcggataacgcccctaatatatctgccaatccaaagtacgatcaatctgtaattgaagcctacaacagaaaaccgattgaagcggtaaagggaatctcaccatcccagccaaaaaattttacggctgatcttccaaatggtgtatcacagcgccctgcttaccatggaaatttcccaggtgacaataagccagcaccagcactacagagtgatttagcacctaatggcaaaaaacaatgcacaagatgtagggtaaatctgacgcatgacaaattcaggaaatcttctaagcacccggacggacttacaatctggtgcgcgagctgtcttgatggtccaaagaatacccgtcacacgaaatggtgtccgatctgcaatgtcagaagaaagagaactagcttttactccaatgctcagaatgctgatggcctaatggcatggtgcaaaacatgctgggataagcataaaggtaaaaaatag

SEQ ID NO: 152461 - DNA, 321 bp, Enterobacter cloacae
atggtggaaatcaccatcagcgttccattccacggcacagatctgtttgtcgttaatcataatggcgagccatacacccctatgaagccgattgttgaaggcatgggaatggactgggcttcacagtttacgaagatgaagaagcgttttaaatcaaccattgtggaaatcacaatggttgccagtgatggtaagtctcgctcgatgatctgccttgcacttcgcaagttggccggctggctcaataccatcagcccaaacaaggttaaaccagaaatccgtgaccgcgtgatccagtatcaggaagagtgtgacgtgtaa

SEQ ID NO: 152462 - DNA, 942 bp, Enterobacter cloacae
atgaaaatttctctggtcgttccggtatttaatgaagaggaagcaattccaatcttctataaaaccgtgcgggagtttgaagggcttctgcagcatgaagttgaaatagtcttcattaacgacggcagtaaagatgcgacagaatcaatcataaatgcgctcgcggtggccgatccgcttgtggtcccactgtcattcactcgcaactttgggaaagaaccagctctgttcgccgggcttgaccatgtaaccggtgaagcgattatcccaattgacgttgacctacaagaccctatcgaagtcattccgcacctgatagagaaatggcaggccggggcggatatggttctggctaaacgttctgaccgctctactgatggacgactcaaacgcaagaccgctgagtggttctacaagctgcacaacaaaatcagcaacccgaagattgaagaaaacgttggcgacttccgcctaatgtctcgcgaggtagttgaaaacattaagctcatgccagaacgcaatctgtttatgaagggtgtgctgagctgggttggtggtcgtatcgatgttgtagaatatgcccgcgcagaacgcgttgccgggagtacaaaatttaacgggtggaaactgtggaaccttgcccttgaggggataacaagcttctcaaccgtaccattacgcatatggacttatgtagggatattcttctcagttttgtctgttatttatggaatatggatctgcatagatactttcgtttggggcaatcaggttagaggttggacttctaccgcggcactgatcgtgttttttggtggaatgaacctgattggacaggggatacagggtgagtacatcggcaggatttatgttgaagttaagggaagacctagatacatcatcaaaaacgatcttatggacaatcggaaggaagagaaatga

SEQ ID NO: 152463 - DNA, 204 bp, Enterobacter cloacae
atgctctcagtcattctgagagcagcgttatcgcttatggttaaaaaattactggggatccctcagcccacagggagaggggaaaaaaacaaccgcaaaaaattcactatcctttcccgctttttttctaaaaacgaatcgttattagcgattcgttttaattcctttatcaaaattcccgcgccggaaatactgccctcataa

SEQ ID NO: 152464 - DNA, 126 bp, Enterobacter cloacae
atggacagggactatgttgttgagcgttatcggacccgtgacggcaaagtgccgtttgaggagtggataaccaggatgcgtagaaaggatccggagaccgtttttacggatccttatgcgtattaa

SEQ ID NO: 152465 - DNA, 765 bp, Enterobacter cloacae
atgaccaaagtagcgattgttaccgcatcggattccgggattggtaaaaccacggccctgatgctggctgaacgtgggtttgatattggcgtcacctggcactctgatgaacaaggggcgcgggatacctgccgcgaagtggaggcgcagggacggcgggctgaagctatccaccttgatctaagcacccttccacagggcgcgcaggcgatagaaacgttaattgcccgttttggtcgcctggacgtgctggttaacaatgcgggtgcgatgaccaaagcgcccttcctggatatgccgtttgacgagtggcgaaacattttcaccgtcgacgtggacggtgcgtttctctgttcgcagattgccgcacgtaaaatggtggagcagggggaaggagggcgaatcgtcaatatcacctcggtgcacgaacatacgccgctgccggaagccagcgcctataccgccgcaaaacatgcgctgggaggtttaaccaaatcgatggcgctggaactggtgcagcacaacattctggtcaacgccgttgcgccgggggcgattgccacaccgatgaatgatatggacgagagtgaagtgaaggaagggtcgatgccagcgatcccgctcgcaagaccgggatataccaaagagatcgccagtctggtggcgtggttatgcgacagcgacgccagctacaccacagggcagtcgtttatcgtcgatggcgggtttatgctggcgaatccgcagtttaagccggcggggtag

SEQ ID NO: 152466 - DNA, 141 bp, Enterobacter cloacae
atgagcccgccgtgcaaggcaagtaacgccgggtgggatagcgacgaagacctgcaggcggacactcagacgactgagtgtgtgcgtgagctgcggacaaacatctatcgctggcaggcgtggtacagggctacggaataa

SEQ ID NO: 152467 - DNA, 420 bp, Enterobacter cloacae
atgggccgaccaaagaaacctatcgaagtaccggggcaggaacctgaaacgggcgcagagcagcagacgggcacgtctggcgaagcggtaacgctggaccagcaacgcgctgagcctgaggtaatccagcagcgcgttgccagtctgctcgacgatgccgcactcactgagcgcaatactctgctgggtaccatcaacgagcagggcgcggccatcatcgcccgctttgaagcgctggcctttaccgaccttgctgaccagcagctgaccgacaatctcgaattcctccagctcgtcaaaaaagccacgacggcggcacctgccgcgccgctgggctacgtgactaacgacgagggcaagccgcagcctgttacggacaagcccgttctgactgagcacggctggcacgttccgggctaa

SEQ ID NO: 152468 - DNA, 192 bp, Enterobacter cloacae; identical to SEQ ID NO: 80480

SEQ ID NO: 152469 - DNA, 1416 bp, Enterobacter cloacae
atgcttattagtcgtccgttccctgtacaagtactgccattgattatcagaaatgcggtttatgaggtaactcaaaatacacaggcaccattagcgctagttgccgcatctgcccttggtgctatttcccttgccagtcaaaacgggattgatgtttgccggtttaatcatttgcgtagtcccgtatctttatttttgctgacactggctgattctggagaaaggaaaagcagtgtggataaagcattaatgaagccgctgtacgatttggaggaacaaaagtttatacaatacatgagggattatgaaacctgggaaaataacatgcaagtgtttaatacccaacaaaaggcgttaacatcaaagctgaaatcggagatcaggcgaaataaagattcttccgcgactgaagcacaattaaaagctcttatggaaaaccgcccggaagagccagtaaggtacaagttgatgtttaatgatgccactccggcggcgattaaacagtttctctgtggtcaatggcgggctattggcataacttccgatgaagcaggcaccatatttaaaggtcatacactaaatgatctgcctttcatcaacaaaatgtgggatggctcaacattttcagtggaaaggaaatgtagcccggaacaatttattaaggatgccagagttactctgtctgcaatgctacaacctgttatttttagagcatatcaggagtctaatggagagatggctaaagggataggtttttttgcccgcgccttgctctgtcagccagactcaacccagggttacaggaaaattaccagcccagtgacttcaaccgaacatttgccagtattccaccaacgattgatggagatcatcactgaaaatatgatacgacatgatgaaaataaaagggaatgcctctttttttgtcctgaggcggaacaacgaatgattgagttttataataaagttgaatctgagatggggatgcttggttttctttctgacttcaaagactatgcttctaaggtcacagagaatatggcgagagtagctgctttactgcactacttcgaggggagtggcggagatatttcactcattgctgttgaagcagccatacagataatttcatggtacgtggacgagtatgtaaggcttttctcaaaacagcaagaatcgacacttgtaggctcagaggctcacgatctttactgttggataaaagaatattgcgtgagaaatacgatcccttatctcagaaaaaacacgatattgcagtatggccccaatcggttcagaaacagagcgacagtgagcgaattactaagcactctttactcacagcgtaagataatggctgcgaagcgaggtaaaactatatttatccagcctgtggagaccactgatttggtttga

SEQ ID NO: 152470 - DNA, 414 bp, Enterobacter cloacae
atgaattctaattttttttcgttgtcaaaaataactgatcagcatatcgttcagaaaatactggatgcatggttttctaaacgtatacaactttttttgtattttggcggaaatggcaaaaaatatagattgtcacgctgtatttcgccttcgctacatataggcggagagcagcttattagtaatggggatgaatttcacctgtcagaagacagtaaggcacattcaattttaaaattcatccctgacctgccgctaaaatcgcacttgaagataactaaaggttttaaaatatcaagatcaattcaaggtgagtatttcaactatgaatacgcagggactgcattgggatattgggttgttgtcccgactaaactagcagcctttaataatgataattatattcatcactga

SEQ ID NO: 152471 - DNA, 528 bp, Enterobacter cloacae
atgcttattttaaaaaatttaacttcctatgttcctgatgagagttgcgaggttacggaactattatcattgggtatttcattcttgaaagatgagggtggtcatgattggtatgatttacaaaaggagtttgataaggagaaactaaaaattgtttattcctcggacggagttattcgctctgcagattatgacatttcggcactctggcctgttaatatgtcaatagctgaaattgaaaaggaagcaattccggaaaggttcagtattaatggcgaatggctttttgatggtgagaaaattactcctgtaaaggtagatcattttgcagttgcgaagctggaaagacaaaatcgactaaacgaagcatcagatgcaattgcaccattgcaggatgctaaagagctcgatattgccaccgaagatgaaatggccgcgctctcgctctggaagcgttaccgcgtaacgttaaacagactggatctcagcaaagccccagatattcaatggccagaacgcccggcctga

SEQ ID NO: 152472 - DNA, 387 bp, Enterobacter cloacae
atgattaccttccgtaaattgattggaaacatcaatgtgacgaaagaaccagatcaacaatcaccacttgaactctggttcgaacgtattattgatgtgcctattgaagagctcacagtggaagacctctgccgagctatccgacagaaattatgtattgatcaactgatgcccagggtattggaagttctgactgaagaaccattggcaggtgagtattacgatggtgaactaattactgccttatcaacaataaaagcagaagatctaagaggtcagaaaaatacttttacccaaataaggcaactgattaaccagttgtctccttcatatattaacgatgatctaagagaagatatattaaaaatcaatcaaataatcgtataa

SEQ ID NO: 152473 - DNA, 237 bp, Enterobacter cloacae
atgaggaatggatttgaagtggattttttcagcgattctcgttacgaagaactgacagcagaaatatcttataaagggcaaatcctttgtcagttgaataaagataagggtattgattctattgaaatagaatttttctcagatagccgaatcttgtccgaagctgtagaaatgaaattcccaattgacgatttcttaaagatattaatgcaaacaaaagctgatttgattgggtaa

SEQ ID NO: 152474 - DNA, 486 bp, Enterobacter cloacae
atggataattctttcccggttactttagaagaatggaatgcggaactagtaaagatcgtctttcttaagtcttcgcatacgggctcgactttaagcagaattgatactacgggacgtatttttgagcaacttgcaggttcacggagcaaagaggatgctaagcgaagttttctggattcgtttggaaaaaaggcgtctaaaatacaggatgctctcagggatgagtcgcgtttagatattttagcgcaactaaaaggatatcctacttattttgctattttatatttaacattacttgctgccagtgctgatgatgagacacatgacgaaggggattttcgggttcgattttctgtactgcttggttttgataaaaataaaaaattcgtttttactgaactaccccatttatgggaaagattggagaaatggagtaatagaaagcagaactgtgcgcgtttgatcctaccaaggccaccaacgtag

SEQ ID NO: 152475 - DNA, 1086 bp, Enterobacter cloacae
atgaacagtgttttcgagagagagaacgataatatccgggtactttcactattctccggttgtggtggtatggattttggaattacctcagctggtggagacatcgtctttgccaacgatgtcatagagcatgcctgcaaaacattagggaactatttccccgatactgatatcaggcatagcgatatatctcaaattcagtcttttccagatgttgatattgttgttggtggctacccctgtcagtcattttcaatggcaggtaacagaaaaccaaacaatgacgatagaacaaacctttataaacactttctgcgggtattagagacggttcgaccgaaatattttgttgctgaaaatgtttcaggtttgaaacatttgggggcaggtagttttctggagcagcagcttacagcatacaaagctgccggttaccaagtcagccatcatatggtaaacgcaagggcttacggcgtgcctcagtcgcgcaagcgtttgtttatcatcggtgctagaaacgatctggggcaatactttgagtttcctgctgaaacacatggcaaagcgacaaaaaagaatcctcatttaaaaccctatgtctcacatggtgaaactattagggatttaccactatggcctgaaggtgagttttacgaacgaccacatgatcctgaagggcatttttcatggtatttcatgtcccgaaaccgtaaagctctgtgggatagtcctgcttacaccgtcgtcgctaactggcgccatgtgacattacatcctgccagcccggtaatgaagttaacgtggtcaaatctagaggatggctggaagcagcgctgggatttttctgatgaatatgaacatctaactgcggatacttctcgtcccaaactggagcaggcaagacggttatcatggcgagaatgtgcacgaatacaaactttcccacagggttttgaacctgtaggagacgtcgagtcaaaatttacccaaattggtaatgctgttcctccacttttggctgaggtactttttcggcatttattttctggtgctggtttgaaaaagatgacggcgaaaggtaattag

SEQ ID NO: 152476 - DNA, 759 bp, Enterobacter cloacae
atgggattcacataccccgccgttgctggtgcaatgcagaatgatcagagagccttttctgctgctctagcttcgctgcaaggaacggcgtcaaactttgctgcacattgtatacaggactcgcgtgtcagagagcaatatttgcgcgatattcagaaaatgtctgctgagtttgtgcaagcagtggagagtggaaaaatgtctccccgagaagcagcaactttagcctcccaaacgcgtaacgaaatactcgacctttcgcggctaagaaacagccctgtaggtaaagcctatgctaaaaagctaaaaccatcgggacgcacgatggctgaccttaccgaacattatgcgactaaaatgtttcagcaatcttttgagtctttatcggaaaggcagcaggccactgtattcaaggaaatgatccagtcggccggacgtgacaggggcgtggtatcaggtattgctaaaacattgggtaaggctggtaaacgggttatcttcgtttctttagcggtcgccgcgtatgaaatttatcaggcagaatataaaagcaccgaaacaatgcaccagggcgctatagttactgcgggtattgcaggcggatggggagcgggtgcagcggtggtagccacgggtgtgtgcgcagcaactgcgcccgtttgtattggtgttgcggcattagtgggcggaattcttgcgtcgattggaacagacctcctgttcggaaccgtgtatgtttcaccgcaagggagaaattaa

SEQ ID NO: 152477 - DNA, 150 bp, Enterobacter cloacae
atgtttcaggtggtgaagcgtcgggagcggttactcttcagtcagctgaaacgctttcaggaaagaaatccggggagaaggttgaaaggacaggagaaagtcgctcatactcttccattgtgccacacactcatgcagagattgtgttaa

SEQ ID NO: 152478 - DNA, 1158 bp, Enterobacter cloacae
gtgatttctatttctgagttggtagaaagagtagaaaagatcaatccaaataataaggatggctcttggaaatatatagatattgcctctgtagataggttccagaaaaaaatagtattagagagtgtctcagacattacatctgactctgcacccagtagagcaaggcaacttgtttttgcgggggatatcattatttcaactgttaggccaaatctcaatactgttgctattgtccctaaggaattggatggggctattgcatcgacaggtttttgcgtactacgtcctaataagttaaaggtggaagccaaataccttttctattatgtaaaatcagaagcttttgttaatagcctagttaagctagccaccggggctaattaccccgcagtttcagataaaataattaaagaacaacaatttaagaaaatatcattatgcgaacaaaaaaaaatcgcaacaattcttgataaagctgatggcatacgccaaaagcgcgagcaagcaatcaaactagctgatgattttttacatactatgtttcaaaaaacatttaacagtcaaagttttttattaaatggttgggaacagaaagagttaaaagacatagcacttatccaaacgggaccatttggaactcagcttcataaggaagattatattgaaaatgggataccactaattaaccccacaaatattaagaatggcattattattcccaattttaaactgtgcgtagaacgtcataaatatgacaaactaaaagaatatcatttaaaaaaaggtgacattataatgggccgaagaggggaaatggggcgttgcgcactgattaatgataaagaggatggatggttctgtggcacaggcagcctttttattagattaaatacgcccaatgaaatactttctttttatttgaacgaatatttatctagcgaggcgattaagaattttttaaagaaagagtctcgtggagttacaatggccaatctgaataaagatatagttggaaagattaaaataaacattccctcagcaaatgcactaacttcttttatgaaggtaaaattaaaagtcgatagcattaagaaaaaaataaaccatagtgatttggagacattattgtcatcattaagtaaaaaatacttttaa

SEQ ID NO: 152479 - DNA, 2643 bp, Enterobacter cloacae
atgggctgcctaccggaatttggtatcactcctctatggaattcgtatccccgagtcgctgtaattcgccaaggcataaaagaaaatgaatgtgatgagcttttaaaaaattgtgatgtaattctcgcgacaccaaatatactaaatgctagtagcaaaatcgcaatagataaactctgtaatgccagtagtgctttgtttatagatgaggctcaccatattagtgcaaaaagctggggaaatgtcagagaaaaattctctggtaaaccagtagtgcaatttacggcaactccatttaggaacgatggtaaaaatcttggtgggcgggttatatttaattatacaatgggatctgcacagcgggatggttattttaaaaacataaaccttcatgcaatcgaggaataccttgaaagcgataaggatgaacgaatagcttatgaagctattcaaattctacgtcgcgatttaaagtcaggaaatgaccacttaatgatggcgagaactaattctcaagcgagagcgattgaattatattctatttattataacttagcaaaagatcttaaccccgtggtcattcactcgaagatgggacgtcccgagattcgaaaaaatttagcttccctagagaatagagagtcccgtctcgttatttgtgttgatatgttaggcgaaggttttgatttaccaaacctgaaaattgctgcaatacacgatcatcacaagtctctagcgataacattgcaatttataggcagatttactcgttcagatagaaagaatcggtgtggcgatgctacagttattgtaaacatcgcagatccaggagttgaaaagggattaattaatttatattcacagggagccgattgggattctgtacttcggcggctatctgaagaccgtattagtaaagaaatacatcttcaggagttagtcgacaaacttaagaccaaaggtaatcttcataaagaaatatctctttggaatctgaggccatcattttcagcaatgctatataaaacaaatgaaaacaaatggtatcctgaaaagatattatcatctttaccaaaatttgagcacatatggcattctctttcagaagataattcaatattagttatactaggggtccgagccacttcagttaaatggggtgactttaaagatctcaatgatcttaatcatttattgctaatagctcattttaatcctgaaagaaaagctatcacttttttctcaaatgactatggatgttttagagttgaaaaactaattgaaaacctcacagatgataacccttacctagtctctggctctaaagtttttcaagtacttaatggagtagaatacccgttagttctgaatcttggctcggctaccacaggtgctattagctttactcaattcttcggaccaaatgtaactgaaggcctaagttcagtagaaaaatccaattcgacattaagcaatattgcaattttaggttatgagaatggcaataaaattctgtggggttgttcacaacgtaaagggaaaatttggtcgccaagagctggtagtatcctggactggttagaatgggtagataatgcttgggaaaagatcaaccaagaagatgttgatgaagtgaatattacgaaggacttccttcgcccaatacttagaacagaaatttacaacgagcaccctgtatcagttcagtggggcgagtatttacaatctatctatgaagataatgtaatagtttcctttggtcagaaagaatatgctctatacgaagttgatcttaaagtcactaaagaagagggcaatattcttattcatttaataacgatgaataaacagagcacttatcgcttacttattggtaaagattatcagggaggatatgaatatgaactaatttcaggcgaggaaataaaatttatttatggtgcttctaaagagttatggctaaaagagatgatggtgaatgacccattagtcattcattatattgatggttccttctcttataattgttacttagtaaaagtcaccgaaaaccaaaactattttgatgccgacgaaatgaaagctttgaattggaacatcaatatacgtaaggaatcaatgggtaggacacgagatcctcaaacaatacaatataaaacctggcaggagataagtaataattatgacatcatcataaatgatgatgaaaatggagaggcagccgatttagtatgtttgaaagagtttgatgactttatactgttgagtttgtaccattgtaaatactcttcggagaatatccccggggcgagaataaaagatatgtatgaagtttgcggtcaagcccagcgttcaatccgatggaaacataccgggttcccttacctttttcgtcacataaaaaaaagagaagaactatggaggaagacaggaaacagccgattcttatcgggtaatctttccagattacaatattttcgtgatatttcaagaaccaagcaagttaaatttaaagtaacaatcgttcaaccaggaataagtaaaaaacaggtcagtgaagaaatgttgagattattgggatgtacaagtacgtttatcaaaaaaacgactctagctgatttgaatgtatgggtatcgcattga

SEQ ID NO: 152480 - DNA, 528 bp, Enterobacter cloacae
atgcaacaatcaataaacgttgtccttcctgaggttcgattaaaaaaaatacagattggcggaaatggcgtctatcagatccactttcctcaaacaacagcagtacttacactcatttcaaatgaaagtggggtaaatacttttaaaagcaatcttccgttccctttagatactctcatcctcaccacagataaaagaccacctaaccttaaagacaaataccatctattattcgattcatctcaacaaccatccgaactaaatgaatattcaatacttaaatgggctaatttcatctcgccagtgcaaatggagggtggcataaaaagctggaaagggaacttcaggtttattgaagaagatgttgaaagtaatgttaaaggattaaggaaaccacaatctggagcaattcatgctgtaagcgcctatctatatggtgaacagccgtatgaaccggtcactgtcgtgctgccgacaggcactggtaaaaccgaaacaatgttatcacttttttctgtcacagattag

SEQ ID NO: 152481 - DNA, 702 bp, Enterobacter cloacae
atgagtaccagaagagagataaaggatggggcactctttgacgttctcgacagagggatcgtctacactgaggcgttgggctggcttgatatgggacatgcccgtggcaatgacgtggcggcgctcaaacgtcaattcgttgagggagagcgtagcggtaagccatcttattccgtcatgtatcggcaagatatgggcgtcttaaaattcaaatcacggctaggcgtcgggaagttctctcactgggaaattaagcgtggccggagcaccgaagacattaacaaaatcatgcttgcgatgatgatgaacaccgcatccagatttgaaggcctgcaaagtctgcgatcattctcctggtatacggacagcggctttagcggtgaggatttggtgtctgacttgttcgggttctatcgcgcaattattcctggccggtacggctatcgtctcaagcccgtgagctatgaatctgccattcgccgctgggattattacggcgctatcggttcccataaaaaccgtggcttccgcccgattctctttcctgatcctcaggatccgtgtgtacggcatcaaccgtatacggtcaatcttccgcattttatgacatggcttcggccgtgggatgatattgcatccggagtggtgaaggtcattacaaacgatgggacatcgctctcgttcatgggggctaagctatga

SEQ ID NO: 152482 - DNA, 435 bp, Enterobacter cloacae
atgacaatccttttaaaagtcctgaagtggtgtgcactctcggtcgccacagtctttatcctcggatggctgtttgtctggctcgtggcatcgggttcggatgaaacaacggtttacacagaaaatgactttttccactaccacacgctgacagataaggatattgaaaacgccccgcgtataacgggcaactactatttcgagacgcaccccggcgatggctatgctccttcaaatagcatcttctttaaagatgctacaggtgcagcgccgttacgcgcgtatctcgaaacgctgggatacatgaaggaaaagcgtcgcctgggggataaggagatctggtcaaaacccgatcaggtaaacggggatcttttctatttgtacttcaataccgctacgggtgaagttgagctgaccaaagtgatgagtgactga

SEQ ID NO: 152483 - DNA, 180 bp, Enterobacter cloacae
atgattttcaggccaaagcgttgtcgtttctcgaatttaaaatacctaacgttatttcctgaatccccctcgcaaattccaaatttaccccacaccaaaccgctgtatttatattcagccctgtataatgagcaccagaaattacgccgaacggcaaaggaagtatcaaagaatatttaa

SEQ ID NO: 152484 - DNA, 372 bp, Enterobacter cloacae
atgaaacctactctcgcacaagttattgaggtcgtacgtgagtcctctgggatatatcgtaaaactattgatagcaatacctggattgaggccgatttacatatttgcggtattgatggcgaagaactactggaagactgcgaagaagcttttggcgttcaactagccacggaagaagatggctatatgaaaacgttcgctcttgctgagaacgagtatctgtttacgggtgaaggcatagatttttttggcatctgtcgatttatccgctggttacgtggcatacccgaacctgttatacgcgatttaaccgtcggcgaacttcatgctgtgctggttaaagctgtgaaagagcaggttaagcacgagtga

SEQ ID NO: 152485 - DNA, 174 bp, Enterobacter cloacae
atgctgccggagtacgccgattactgctacggcgagggcaacatgcacgacacggtgatgctgctgggtatgctcggctgggacaaatacgacggcaaggttgaattcctcaccgagctgttcgccagctccggtaccggccaggttaacgccgttttcccgctgcccgcgtaa

SEQ ID NO: 152486 - DNA, 243 bp, Enterobacter cloacae
ttgtttggcggcttcctgcgggtcgatttccagagcggaaagtccatgaactgctgccacagggcgaatggtgttaccgatagcctgttcgaatacctggccgacattggaggctggatcggtactgaccagcaaaacccgcttaccctgttcagcaaggcggattgccgtcgcgcaggaaatagaagtttttcctacgcctcccttaccggtaaaaaacaggtaaggcgggatattctgtaa

SEQ ID NO: 152487 - DNA, 507 bp, Enterobacter cloacae
atgattctaaacggcgcagattacgcacctttcaatctgtttggagtgggcgtgttcatggcgcattccgggttgggggccagcagaaacaatgccagttgcgggcatgtcgcaaacactggttctatccccccaggaaaatactggattgtagatcgcagggaaggcaattggttttcgcaaaaaaaagaagagattcacgatatagctaatagatttgttggccgaaatgcttttggtaaatctgactggtttgctttgtggcgtgaagactggggcattgatgattacacatggatagaaagcgtaaaacgtggaaattttcgactgcatcccggtacggtttcaaaaggatgcataactatcgccaatatgtctgattttgcgatgattcgtaacgccctaatgagtacatcacttattcaggttccatgcatgcggtcactaatggcgcggggatgggtggaggtggtagcgggtggctacgttaaaaaaccttgtatgtag

SEQ ID NO: 152488 - DNA, 405 bp, Enterobacter cloacae
gtgagacgttatgtgattgaggattatacagcgcggactagaggctattgcaaaatcaaaaacgacgcagggatgattgttaagaccataacagaaaacggagaatcggttaagaaatcaaaattattagctcatcttctccacggtgcagaatcactgatacttcagtacatgattagctttcttggtgataatgttgtcttgcttcagcatgatggtgtcacatgccccaatcctgtagatacagatgaactcagtgactatatcgcagagaaaacaggctatcgtgttcaatttgatattgagctgctgaaaccagacttcaatgttgatgccactgatagatttcaacaacaagacatggaagacatttttgaaatctttaaatatgaaatggctgcgtga

SEQ ID NO: 152489 - DNA, 1764 bp, Enterobacter cloacae
atgcctcaactttacagctatatccgttggtcctcggaacggcagcaaaaagggacgaccagacaacgccaggtcatcggtgcgaaggagtttgctatagctaatgggttagaacttgttgaaattgaagatcctggtgttagtgcctttcgtggtaagaacaccacccacggtaaactgggggatttcattgatgctgtgaggcagggagctataccaccggattcgtggctatatgttgaaaacttagatcgactcactagacaagaagttaccacagctcagaagctgtttattgaattgctggatttggggttaacgttggttacagggatggataaacgggtttatacccttgagtctgtgaacaaaaatccaaccgatttgatgatttcgcttttactgtttagtcgagcaaatgaagagagtaaaaccaagcaagctcgcacgataggtaatgttgaatcgttgatcgaacgtcatcgccaaggattgccggtgaacattaaatcatgtggtaaacacccattttggatagatgattctggttcacagtatgaatccgttaagcgtcatgcaatttattgggagatagcacgagaagcgattgaattgtttttatcaggatatggtatttacaaagtgaagcgctttcttgatgaaaagtatcctaacggcttgaatggtaaagaatggggctatcaagtactcaaaaagatgcgtgagagtagagccctcattggagaaaggcaaattaacataggctcacatacatatacattacgtgattactatccctgtctatgtaaaaacgaggttgaattcctgcatttacaagagttaaagggacaaaacagctacaaatcgaagaaaaaccccttaaaggaacaaatcaagttattatccggtctggcaatccttagatgtagtaagtgtggtgggactatgtctagtttcatgaataaaggtaaaccaagatatatctgtcttaatggtcgacatttacaaaaaggttgtgttggttggtcgcttactgctcccttagttgatcattgtgtcattattgccttacttatgggctatatggatgcaaaccgtaaggaaaggcaagatacatcagatatttccgcattgattgaagcgaaaaatacgagcgttggagaattgaatgtaagtattacaaaccttgttgcggttattgaagctggtgtgaatgtatctgagctagcaagtaggttaaaggttctatcaacagagcgtgagacatttctgaaagaaattgagcgattaaaggaacgaaaagcattaattgatagcaaaggatcgtttgaagtatcaatgatggatttcattaatctgatacattggaatgtattctcagactatgcacatgaatcacgtgataagattcgctcgacaatcaataaaattattgaacatgtaattattgataaaactgatggctgtataacaatcaagattaaatgtcgtggttcagatgaacaattgattttttgtggtattgggcgcaaacctcactggaagtttgatattgcgttatatgttgaacaagacactgatggagatacaaccttcgaagaaaaatctattttgccaatggcaaaccagttgatggaagaggctacaaagcagtttgcattgataagagaaggctacattagctactttgacaaaatatgtaaaattttagctgcaattggttatccagatattgatggttcagccttctggcctaatagatag

SEQ ID NO: 152490 - DNA, 738 bp, Enterobacter cloacae
atgaaatttgaaaaatcacttaaaatcatggcgatactagcgttttcagtttcagtaagcgcaacagcgtctaacgccaccgtatacgcacttcctgatgcaaaatcatttggcgtcgccagcgaagaccaaaaaggtttgatgtttctaggaatggacaggaatgcggacctaaagggtgtttgtttcgccatgctgaaacaggctgagtcaaacatcccttatgctgatgtcatcgcaaccacaaataataaagacttccgcatgcatggcctgcgtcccaacattcgtgacaataccaaagaggtcgtatgctcctttggttccgatgcattcgactaccttgataacctgtcaaaatccagtatgagtttggtcagtattcgctttaatggtgaacagcgtaatttcagttttaacaccagctctttcagtaagttactgacgcccagtggagccaaaatcgcagaacaagccgctgatgattataagcgaggtatccgcgctcctgtcttttacaacaaggctccatcttcagtcacagaaaatgaggacaggtatgcactaagtgaccagaaacttaatgaaatctggaacaaactcccctcagaaacccgtagaaaattactgccatcgcagcgggagtggattaagcaaaaagatacctgccgtagggacacagaatgccttaccgacatgaccaacaaacgcatcaagatactcgaggtggcaagataa

SEQ ID NO: 152491 - DNA, 342 bp, Enterobacter cloacae
atggcttcagcaactcttatcaggctaaacaaagacgaatggcaaaaacttccagcaggccatttttataacggaaagtatcaggttggtccctttaccctcacctatgaatttatcgtcaaatacatggccctaatccacaaaacggaaataccggaatcctggcttaccgataacggtaccagtcttgatgaacgcagagttttgtacatggaagctagcgatattctgacaaaagatatcgtaagagaaattcgaaaaacggtgaaatcccctcaggaccaattacaggtttatcgcataaatgatcagatcataaccctcgaaatgatggaaaagtag

SEQ ID NO: 152492 - DNA, 618 bp, Enterobacter cloacae
atgcaaaaaactcacaaacatttgaccaaaatagttacaatttctctgtcattagcgtttgcagtgcttgttgttcatggtgtccttacatcacctccgatccatgacacagaagctccagatgttaaagcaacggtaactcaagtacctctaaaaccagcagaaccggaaatggtcaacgttgttaatcggatacatactcctgaagaggtttacaggcgtttccaggacaacgaattcagggctaccaatcacttcagaacttgccgattaatggtcacaggtagggtaaagaacattggaacagccacctttaccaaagatccattggtcactatagctatccctggctcagacgaagggatgaagtttatatttgagaacacctcaagtaactggaatgaagttgcggcattggaaattgatgacattttgaccatatcgggaatggatacccggaaaggccagtttggaggcttgtttctttcaaatgcagaaataatgaacactttgcattctagaaacagtagagagatgatggttgaacgtaatggtttctacgaccgtattttatgtgagaagagagcaatccaagcagatataagtgactataattaa

SEQ ID NO: 152493 - DNA, 663 bp, Enterobacter cloacae
atgcacacaacccacagcacgttcgttctcgccagcctcaccattcaccgcatcaccttcgcccccaccaccttcaccgacgccgatctcctctggctcccccatcacgcacagctggctgacgccggacgcaaacgcaaagccgagcatctggcgggccgcatcgccgccgcgcatgccttacctggccacgccgttcccggcatcggccccagcggcgaaccgctctggccgcacggggtttcgggtagcatcactcacagcggcacgagggccatggccgtcgtcgcgctacacccggcccttatcggcatcgattgtgaaatgatcctccccgacaacgaagccagggagataaaagacggcatcattgatgcgcaggaagaattagtgctggcccgttcgggatacccgtttgccctggccctgacgctggcgttcagcaccaaagagagcctgttcaaggccctctttccccgggtgcagacctgtctgggttttgacagcgcccgcgtcaccatgctcggcgataagacgcttacgctggtgttaacccgtcagctggcgggctttaacgaaggcgccgccttcacccttcactggcaacagcacggcgaacaggcgatcaccctgctgtcgcgcgttcctgccgacgagccttaa

SEQ ID NO: 152494 - DNA, 717 bp, Enterobacter cloacae
atggaagagttaacttgcaaatggtcaccacaattgattgtcgaattaattaaaagtgtggcatggcctgttgtggttattttaatcggcattgggtttcgttctaaaatttcacaagtaatacacacatttttctcaaaaaattcggtatcggaaatctctgcttcagtttcaggggtatctgctaaatttaccgcagcaaagcaatcagaaacgttagaaactgctaattcgactgccacaaaccttcctaacaatatcagtttaaaagcattacaagcaagacatgaattggaaagaaccgagtttagtgaggaattataccagagcataaaaactcatttatcagtattaaatgttacacatgaggaaagtatagagttactggctcaggaattatcactaagccaaagttttttacgttactttgaaataactaaagtgctttttcgttcgcagtttgatttttttcaatttattgcaaataaagatggctgtatttcagagaaagaggcgcttctctattttgaaaaagtaaaagagtgttttagtgatgcattttctgattgggacttagtgaaatatatagcataccctgttagtaacggcgtgctggttatagaaggtgataattttatcataactacaatgggtaggtcgtatattaatttcatgtcgcgaaatcctcagttaattgatgggcttgtaaagctttga

SEQ ID NO: 152495 - DNA, 156 bp, Enterobacter cloacae
atggggatctttgaaaaactcaaatcttctctcgaagaggctgtcgaaatccaagtcggtaagaaatcgcctgctcgagtaaagcgttacgaagttgcggacgttctaaaaattagaggaaaaaagaaaggtaaggaatcaaaatggaagagttaa

SEQ ID NO: 152496 - DNA, 222 bp, Enterobacter cloacae
atggatagagtagacttgcaaaatgagttaaataaattaaacatacccagtgatagctactctattgatggtgttgaggatgaggcattatgtttgatcctcgatggagggctatggtgtgttttttacagtgaatatggaaaacgcacagaggttgaattttttgcaactgaaaacgatgcttgtcaatccttccttgccagaatcacaaaatggtactag

SEQ ID NO: 152497 - DNA, 282 bp, Enterobacter cloacae
atgacaaacataacagtagtgaaatttgatggaaataaagtagagttcacctcacctttaggcaatggagtggctgtatggtgtggtgaaccaccggaagtaaatagatgttataatgtcgaatttgatgtggacgacatgtttaaatggggctggaatattaatgatgtttgtcagcagacacctgaaattaagatgggtggtgatggggtgttatttgtttctcaggttatatcttatgagagtgacggggttttaactgtctcattagggggcgtatga

SEQ ID NO: 152498 - DNA, 174 bp, Enterobacter cloacae
atgagacttatgcttctaagccagttaaaccagaggatggccttaatcgttgggatgatttccttagccccggcccccatacaaatatccctccaagaactggattaccagactcagaccgaatcgtatcggctgacggtaagagaagtatccgttatggtaaccatgagatga

SEQ ID NO: 152499 - DNA, 585 bp, Enterobacter cloacae
atggatgcgtctgagaccattgtgaatgagattgaaaaagcattaaaacaacttattgttatttgcaataaatactcgctgtcagggagtttcagcaccgtcaatgatctggacaatgccttcccgcccaacttacctcgttcgacagaggtggaatttttatatgaaaactataatcctgaaaagttaaagattgaaacaggcttcacgccaattaaacttcactcagtaagtgagctcttgaaggctcaaagtggttatgaatacttaccagataattattttgttattggcgatgatttaggcggaggtaaacctataattgcggttatcgatgaaaggagttcctctgtttatgcgggttatgatgtagttgaaccgtttcagatagctagtagtctgtctgggttcatattttctctagctgagcttattgatttggtatatggtcaatacaatatctttgatatagcagatgataatgacgaagtaaaagataatttcattgatgagttgcgggaaaggcttgtgccacttatcggcaatgaaaatttcaatgcgttttataattatttttatgggtga

SEQ ID NO: 152500 - DNA, 258 bp, Enterobacter cloacae
gtgtatacaaaagaatatgaagcatttgctaaagaagagcttgtttgttatttagataactatcctgtcattagtgatgacgttgaggaactatatactgatttggttgtcgaaaattcgctagagctctttttctatggagagcaatttatagatgtattacataacatctctatccaaagagaaaagccatctgtagaggatttcatatcaggtttgaatttttacctcgagaacgataacttcatagagctttga

SEQ ID NO: 152501 - DNA, 1770 bp, Enterobacter cloacae
atgacaatcacttatgatcttacacagctggactctcactcttttgaacatatggtaaatttccttgccatgaaaaaattaggcagcggcataaccgggtttgtctcaggacccgatggtgggagagatggttatttaaaaggaaaagcaccgtatcctacgactgaagattgctgggaaggtatatggtatatacagtcaaagtttcacaaaccgaacctgagcacgaatgctcaaaaatggttaataagagaggttataaaagaaattaagtcatattcaaatagtaaccatagagtaccacctgatatttggatcatagtcactaacatagaacccagcgggcaaccccaaactggggcttatgacaagatcatatctttagtcaaaaaatactcacctaaaattaaagtagatgtgtggggtggtaggaagattttagattttcttttggaatatcccttagtcgctcaagcctatggacattttttaacaccgggtcatgttatcagtgcactttataaatctttagagaaatcaaatgctaaggataaggcgttgatagagcattttatggttagtcaatttaaggatttaagttataccaaacttgagcaagctggttcaaataatgaccacaaaccaaaaatacatgagctttttcgcgatcttcctattgttgctaatggatatgaaagcgaacattttattttgcaatcattagtatcatcatcaagcaacgttcacaaaatatccacatggcttaattatggagcagagtggaaagactggactaaaaaccccaaacgtacacgtgtaatacttcttaagggagggccggggcaaggtaaatctacagttggacaatatttctctcaaatacaacgagctgcatatattttgtctgatgcacaacctactataactccttttgtaagggatattgctagggagttaagaaagtttgctgaagaagatggattttggccaagtatccctagaataccaatttttattgaattaaaggattatgctaattggtacataagtaaagataaattcactccgcgtaatttaattgaatatatttgtgataaggtcaatttaaaaatatctttcgtaatagattcttttgatctcagatcggtatttggcgaatcttcatggtttataaactttgatggccttgatgaggttccaaatgatttaaaagatgatattgctaatgaagtcatttctttttcaaatgaatttttaccaagcttagattcagatgcattaattctttgcactacgagacctcaaggatattctggacagtttgatgaattagatgcctctgtgtgccatttaacacctctcccgaaagagattgcattatcatgtgctgagcctgtagttagatttggtcgtagcgaagaggatggtgataactctctcggtatacttgagacagcaatgatgtcacctcaagttaaagaaataatgactacgccattacaagctcatattatggcagttgttgttcgcgatggagggaaaccaccagagaaaagatgggagctatttaataatttttataccgtaatgaaaaaaagagaagtcctcaagaattttgcagatgcaaatattgcttctttgttacaggaaaaagaccttctgttaaaggcaattcacgataggttgggaatctgtttacatgttagagctgaatatagtcaaggtgcagatggaggccagtttgataagctcaacattattataaattaa

SEQ ID NO: 152502 - DNA, 198 bp, Enterobacter cloacae
atgaacatccaaagatgttatccaaggttcttgatcctgccaggagaaacccttctggtcaatgcgcacaagctcgaatcgttccacaaggaaattaacagcatcagtaagattcactccagcctctatatgttcctgaatcgtcgtatcgttactgaacggtgtgtcgttgatcgtgaggccgtaatgatgctctaa

SEQ ID NO: 152503 - DNA, 306 bp, Enterobacter cloacae
atgcacaccccatcaccgttatcggccctgcgtcagtggctacaggaaaataagctcgacgggatgatcgtcccgcgcgcagatgcctggcagagcgaatactgcgcgccgtatgatgaaaaactggcctggctgactggcttcgatggctcggcggggctggctctggtgctaaaagacaaagccctgctttttgtcgatggccgttatcaggttcaggcccgcgtacaggtcaacatggatgaagtagagatccaccatctgcacaatgagccgctggcacaatggctgacggccaacgtttag

SEQ ID NO: 152504 - DNA, 543 bp, Enterobacter cloacae
atgaaaaaattaatgatgttagctgtggtaataagtgcctcttctcttcttgctggatgttcaactcctgctcaaatggcacaacaaagaatgaatgagtgtgaaaacaaaggtattagtaaagatacatgctacctggtagagcaaaaccgccaacaatcctataatgaggcggctcaaaatgcagcctgggctaatgctcgtgatgctgccgcgggtactggtatttgggctaagaaagacgttaagcaacatgcacaaatgacacataagcacagaaaagagcttgctcattcaggatgtacgcaggttgaggaagctaacggcgaatgcactgcaaattcagataaaagtcaatcgcgtgatttaaaacagctctcccgcgaggccgaagcggtaatgaacggtaccatcgatgacggtgcggcattcctgctggggcaaggatggaaaccaaacaacggtaaatggcataaacagggatataccttaacgctggtggttgaaaagggaattgttgtgaacagccagctgtcaaaataa

SEQ ID NO: 152505 - DNA, 144 bp, Enterobacter cloacae
atgagcaaacaagaactaatcagcctcctgatgaaccgctacaacgtatcctggcgtgttgctgaagatgccttaagagataacgactgggatctgatgatggccgccggcgatatccgcgacgagctggccgccgaggtttaa

SEQ ID NO: 152506 - DNA, 183 bp, Enterobacter cloacae
atgattgctgactttatgactgaaaaagaagtttctgagttactacataaaaagcgaaccgcactatacaacttacgcaaaaaacacggattccccgagccagtgctcactcacccggcgcggtacagccgtcaggcggttgagaaatggattaacgcaggaggtgttaaccgagctgtttaa

SEQ ID NO: 152507 - DNA, 1170 bp, Enterobacter cloacae
ttggcactgagcgacactaaactgcgcggccttcacggtaagccatattccggcccggcggagatcaccgacggcgacgggctgagcgcgagggttacccctacaggcaccatctctttccaatatcgttaccgctggaatagtaagccggtgcgccttaccgtcgggcgttacccgtcaacgtccctcaaggaagcccgcgtgatcgtcggcgagatgcgcgcattgtacatgaagggggttaaccccaaaaactattttgcccgtagcgacggtgaactgacattaaaagaatgcctggatcagtggtggaataagtatgtcgctgacctgaaacccaacacgcagacgctgtataaatcggttgtgtacaacactatgtacacagagttcgaggacgcgccagtagccaatattccggtttcggcctgggtacgcttttttgataaacaagaaagtctcaacaagaaaagggcgcgcgtgcttctcctgcagctgcgctccgtcgttaactggtgtatcagtcgccagctaattccatcatgcgaattgctcaaactcagtgttaagaatatcggtaaaaaaccggatgagggtagccgtgtgcttacctatacggaactggcaaaggtatgggttgcgctggagaactcgaagatagtttcatccaacaaggtgctgcatcagctgctgttgctatggggcgcccggctttcagagctacgactcgcgacggccagtgaattcaatatggaagacctgatatggacgacgccaaaagagcattcaaagatggggaatattattcgccgcccgatctttgaccaggcgaagccgtatatcgaaaggttgcttaacgtggggcatgatgtgttattccccgggcaggagttggataaagcgattgatcgttcatcggcgaatttgtacatgaaaaaacttaggggaaagattgatataccggagtggcgaacgcacgacttccgacgctcactggtaacgaatttatctggggaaggggttatgccccacgtcaccgaaaagatgctggggcatgaactggggggagtgatggcggtgtataataaacacgactggctgccagagcagaaagaggcgtatgaactgtatgctgataaaattttctggcatgttaaacagctcggttaa

SEQ ID NO: 152508 - DNA, 792 bp, Enterobacter cloacae
atgaaaattaaccttagtgaagatgatttaaatgcaatagacatttatgaacagtggaatggtatacgcaactctgaagctaattctatttatgaggaactatacccatcaatttttatgactcatgtacatgaaagaaattatcaactgttaaccactacacttagtcaatttgaatctgttgatgtcattcaaaaatacttaacgggtgagaaaattaataaagaccaatttatactaatcaccgggctttttataaactacatagcatcagccatagctttacgcgatagcacacgtaacatgcaaaaaaatgacaaactattccctaccgcactaaaaaaacaagccgaatctaaattacagaatgaaatcacttctgccagtagcatcaaacttgtagaggatataaggaacattatcactcaccagtcactaattgtacctgcattatccttcattgctaacgacgaaggatttttctcaggctatgcctataaaacaaaagatttactcaacaataaaagacttacagaaaaatcaagggagtatttattaaaaattaatcatggctatttatctttgcgtccgcttattgatatttatcatcacacaacggcaagctaccaacactggctcataaatgttgccttaaaaaaacataaaaatgatcaccccatatactggcaagctcgggagaatgtatcttttgaatggggtggagatttagaaccttcactccctttgccaccatctgtaaatagacccgttttagttccaggcattttttga

SEQ ID NO: 152509 - DNA, 633 bp, Enterobacter cloacae
atggctaacgatgacgagcgcaggccactaccgacaacagcttttgtcgaagaatttgcgccatacattcgcctgactccagcttctggtgtgtgggagtgggtgcaatcgcaaatcattgctgaatccggacatctgcataaccctgaccactttcacctggcagatgccgatatcggcttcctgtgggctgcacacacttttaacaaaaaaggccgcactgttcttggtcaggctgaagaagtaatgttccgtgctggaggatggcagaaggcccgcatggaacagcagatgcatgaatggttcgggcataagccggattacatcatcactcttgctgctgacttctgccttcagtgctccgatcttgagttctgcgcgctgattgaacatgagctttaccatatagcgcaggaggtagatgaattcggtgcgccgaaattctatcgtgacagtggcttaccaaaactgtgcatgcgaggccacgacgttgaagaattcactggcgtcgtacgtagatacggcgccagcaaagaagtacaggagctcgttgatgcggccaatgcgccagcggaagttgctcacatcgatatagccaggtcatgcgggacgtgcatgttgaagctggcctaa

SEQ ID NO: 152510 - DNA, 162 bp, Enterobacter cloacae; identical to SEQ ID NO: 109707

SEQ ID NO: 152511 - DNA, 339 bp, Enterobacter cloacae
atgaccattggagcagcggttttttcttacgacatgagcaatcaccatgttagtattcatatggttgaacatttcaaaagaattgcttacgaagacccactgattaaacgcatggggttcttggcgctcaatgttgcttacatattcgccaaaacggtacaggcgactcatatccgtgtaatcaatccactcaaggacgctattccttactacaagtatctgaatttcaaacctattgaagaagagtgtcttgaagcatccatggatgctatcagaaataagctcgctcagttgcgagatttaggtggtcagcacgattacgaatgggaagaagtttag

SEQ ID NO: 152512 - DNA, 222 bp, Enterobacter cloacae
atgaagcacaaccttttgtctgctcataaagaccatttaacgcagacggcgaagggatttgagctaagactggagcaaaaatacgagattcttccacagccttcgcagcattgcggcgtagttctgggctcatggaatcaaggatttcttgaacagttctcatatcgacctcctattgacgacattgtcagtctacttgctcttgcaaaaatattccactaa

SEQ ID NO: 152513 - DNA, 309 bp, Enterobacter cloacae
atgccacgcacagcagacatgcacgccgcctttgttgcggtcactgaaccattcattcctccttctgcctgcatcgttgaaacgcagcaaggctatgatgtgattgagaactcaacgctgtttaagcgcggagacacattgctcatctggttttgcggccgccagcagcacgcatattgggccggagatgcactgatcactgacgatggcgaggcaattgaaggcgaggcgcttgatgacgttcgccttgtaggcgtggttacacataccattcacccggtttattcagatgaaaatcccttcatgtag

SEQ ID NO: 152514 - DNA, 306 bp, Enterobacter cloacae; identical to SEQ ID NO: 101521

SEQ ID NO: 152515 - DNA, 360 bp, Enterobacter cloacae; identical to SEQ ID NO: 101522

SEQ ID NO: 152516 - DNA, 936 bp, Enterobacter cloacae; identical to SEQ ID NO: 101523

SEQ ID NO: 152517 - DNA, 318 bp, Enterobacter cloacae
atgagtgacgtactttcctgcagacaacttacggctaatcttaagatgattgccggggcgattggctgcctcaacaggaacgatgttgcacaaattatcagcctgggcggtgttccatgttcaaaaagccgggccgactcgataatccgcagtgccggggcggaaaaaaatgcatccggtaattctcatcttcgcggagccagaataaaccgatccgcagatgtcacaccggaagaattcaatgcgttttgtgcagggctgaaaacatttcttgtctcgtttgaaacgaataatgtgagtgaaaacaatgataagtaa

SEQ ID NO: 152518 - DNA, 1818 bp, Enterobacter cloacae
atgtatggttctcagagccaattttctcaagctaggttggttttaaactgtgtagcagaattgcggcgtgcaaaagatacagctgagtttttcgaaggactaccagcattggaacaacagctttgggtggatgatgcactgcgacgtctccaggttccttcacccgaagacaatgtaccttatatctgtttgttggattcaggcattaatcgcgggcacgctatgcttgcacctgttttgcaccagcaggacatgcatacagtcaatgacgcgtggggagtcaatgacaccgcaaaccatggtacggggttggctggagttgcaatctatggcgatatgattgacgctttgtcttctactgatgcaatagaagtaggacaccgactcgagtcagttaagcttactccaaattatggggccaacgttggtgacgcaaaacagcatgcatatctgttcagctcagccgttacacgtcctgaaattctcaatggtcagcgcaaacgtatttttagttcagcagtaacagcaactgcttatcgtgactttggtcgcccttcagcttggtcatcaatggtcgattcactggcagtagatgcgctagcagaaaccccttttccccggttgtttgttctttccgctgggaacatagttgatcgcgaccattggggaaactatcccgccagtctttcagttaatcaaatccatgatccgggccagtcatggaacgcattaactgtaggtgcatttactgacaaggttgagttaaatgagcctgaatttattccggttgctgatcaaggagcattaagtcctttcaccactacctcaatgggatgggaacctgtctggccgtttaagccagatgtagtttttgagggggggaatgcagctgctaacacagaatttgtcgataactttgcgagtttagaattactaacaacaagtgcttcatcccaccgccaattttggacaactaatgcaactagtgcagcttctgcgctgtgtgccagaatggctgcaaggttaatggcacaatatcctgagtatcgcccagaaacgatccgtgctctgatcacacactctgcgcaatggacacctgctatgttgcgtatgtatcctgctcgcaataaaagtggcttcgcacagcttatacgccattgcggctggggctcaccagatgttgaacgtgcgctctggagtgtgaaaaatagtctgacactggtagctgaagacagcttgtacccctatcgtaagactcgcgacggtattaaaactcgtgacttgaatttacatgcgctaccttggccactggaacagctccaggagttacaggatacgcaggtagagctcagggttacattgtcttatttcatcgaacctaacccttcagcacgggggagttcatcaagatatcattacccatcccaccgtctacgctttgcgatgaaaagacaaacagaatctttagacgaatttaaaactcgcatcaatgcagcagctgagtctgaagagagtgagcatgggactaccggtaacgatgataactggtcattaggtgctactcaacgacataaagggtcgttgcatcaggatatatggcggggggcagcagcagagcttgctagttgtggttatttggctgtttatcctgcacaaggttggtggagaaccagaggcgctttgcaacgatttgattctgaagctaaatacagtctggttgtatcgattcatgcacccgaagcagacgtagacctttatgccgcagtggaaaccttggtcgaaaatatggttgaaaatcctgttgaaataatgggttag

SEQ ID NO: 152519 - DNA, 1110 bp, Enterobacter cloacae
atggtgttagaggatacggcagtgctccccccactgaaacgcgaagaaataacaccattgagtagtgctcagatgttatggcaatatgaaaattgccttcctgtaacatgtcaatataccgaattacataatatacccgcagcatttgactggatcgctgaggcgctggccttgcgttttcaacgccgtagcacattgccttttggtgaattaaaacaacatattgaacccgtatcacaggtaacgaggatacccgaatggcaattgcgtcgcatgctctttgccgctggctggctttgtgtagtacaacgacgtcatgcgccatattcgttagtctcattggctgaaagaaccatttccatcgatgttaatgaacagggaattattgcccgaattatgggaatgtttacaagaagtgaacgtaatcttctactagaagcacttaatgacggtgagcgaatagggcgtcggttagttgaggataacggctgttcaatggggtgtattgaattgcatctgtcagccagagatcgtgttcatgcttttattgagcagtttgggttacgtttggttaatcacgatgatttacccgtcaatgctttgagtggattattgctaccgtcgtctcaaatgcagtttatcccgactttacccccggatctccatgtgtcgctttggcaagctgaaaaataccaatggtcagaagaacagcggctaactcaaacggttgataacctattgataagatgtcaggaaaaacagcgttatcgttattttattcggcagaacgccggatactggcaaaccgatagcttctcttgggccttaatggctcagatgatatgttcaggagtcacgttcggtgtacaaaaaggcgatagtgactggtgctggtcaacgaaaatcattgcgttaccgccctccgttatacagtggtggatccacgttgctcatgggtgtttgtcgataacagataatggtagctacctatttgcaggcggcaaagtaccactctggaataatgttatgaccttcccctcctgccaacgagcgttgtcacgacggaacagagcgctgacaatacgcaagctgcgcagaaccttacaataa

SEQ ID NO: 152520 - DNA, 2781 bp, Enterobacter cloacae
atggctaaaaagaaaagtattatcagcgaccggctgggccaaatgtactacttcggtacagaatctcatgaattgagcagatgcttgcaagagtgcaaacaaaggctcaccagaaacggcgctaaagcggataatttaccgaaagggccagaaaaaaggctacattttctccgtacgttaccacctaaagccaaacctattgtttctgattggcttcgtgaaaatttgacgttttctgaacaaaatgacccacaaaccgttcttagggatctgttagaagcagaaagtaaagcggaaaatattgaactctgtaaaccgctatggcgtacaattctgggattctatatttcttctgactgccctgatattataacgaaattcctaaacggcgaacaaattgatttatctcaacatggtgtttctgactccctgacaattaatgtcactgatgaagacattgaacaatgtgccttgatttgtcagggtaaagaaattcctatgcccgagcgcactattccactatttgttgggggattagttgatgcactccagggaacgcgcacagccgataatcaatggcgaacaaagctatcagaacattctttaccgctggcgcggcaattgggtgaacttatcgaacaatttgaagccagtaacgaccttaaaacaatagatggtaccagtgtaatacacgctcctcccgttgtgtccaaagaaatcgacggtgcgatagacgaagttatgttcattggaaaagtgttagcgttaaccacgtccggcgctttttttgttacgccggttagtctgttaattaatggcaacctacgagatctcccggaggaactggtaaaagaaattttcccccatggcggtgaagccattggttttgaaagctatttcagcaaaaaaattactcggggtgaaatagcaatatggaaagcccgttatcagccatctgataaacctgcgcagtatgtcattactgactacctgtcgcgcgtttatcctgtagtcgcgctaccccatgcctccgatgagcctgatgctgtcagggagtggctactaaccaactaccagccgcaaaacgatacgccggtcatttttcagctaagtgatggcgtatccctaagattaccgggtgacttgccggatcctaaaaaatatgactttgatatgccgctggagagttatcgtcagattcctcagacactgcttgactctcatgccctcacggtgatcactgaactccctcaggtaagtgaaaaatatgattgcgcggaagccagcacgtggatcaaacggctgcttaaaagaactgattcagcaaaatatttccctcaattcagtaaagggcagctacaaaatttaacttattttattgctgaacatgagtctgataacgaggcgtcctatcttcgcgcagtatctcatctggaacagatagcagatatgagatcctttctcaatgatatgatgcaacagttactggctttacctgaggttgagacgcaaattaatattaagaaacaggagatattggctcgttacgaagacgagcagcaccagattaaacaatcgataacggtattatctgaaaaaaaaatacagcttgaaaatgaaatagccgatcagaagacaaagttgaaaaaagaaactgatcgcattaataaagcgctacgtcagcaagaaaatgaactggaacaacggataaaaaagacctttgaagccgcatcacaagcgggagtggaaacgctggcccagacagcgttactgcgggcaataatcaaaaatgaaacagcacaggagcaaccagcccaacaacgaataacctcagaacctgtagccgaatcagcaaattctaatttcccattagcagtgacgaatgctctgactcgcaagcatcaactgatatcggctatcgaaaaagaggcactggcgactggactaagtgaatctttattatctagtctgattgccactgcgagtattacacctgtggtcggattgatgggaaaacagacaaaacaggcgatcgcctcattagcgaaccttttagctggtaatgtttggggggaagtgtcggtacatagcgatcattttagcttcagtgatttaatgaattcccccacactgatccgcttatctggcaatactcttaccatgacgctgggtgattttttgacccaacaacaagaggcagggctggcgagcatcgttgaattgcgtggttttaaccgcactccgccagaaactttgctccctgaactccacgggtgtttattcagaactccccatcctgccgcatgcagttggacggatcggcagcaggctctacgacatttacccattcggcacccgatactttttttactcacattcaccaccgggaaaagcacgtttccattacaggctcctcttgcttaccagttacccctgtttctggcagagaatatatggtcggatgaacggccatttgagcaaaatactgacatcacgccttctcgtattaccccagaattatggcaggcaatctttgtagacaaccaccggtcagagtaccaggcttgtgcgccatgggaagtactaaaagcagcgctactctctttacttcctgatgaacaagcgcaagccgttgcccgtctggcttacggtctcggccgtagtacaacactagatattgcggccacgattgacgttcttgccccagaattagggccatatgttcaggaaatgactagcggcgaatcggcaagcgtacttgagcaccttttcctgttataa

SEQ ID NO: 152521 - DNA, 5943 bp, Enterobacter cloacae
atgaataaccctcttgaaacatttgaatcaataagagatttttatatttcgtatcttgaaacggccttccgtattgattcatcagacatacagtctggacggcgagcgttactggaacagcaggggacattatgcgctgatctatttcttgaaccgatgccccgatatcagcactatggcctaacaatcagtgaattaagaaatgatgctcatggtcagacatggttgcctggatttaatgcgcaacaaaggacggcattcatcgacctctgtttaggtgggcttctgccccgcaataaaacagatccgactaagggacgttttaatctctatacccatcaactggacatgctgaaaagaggggtacagccagggaagccgggcatcgtcacctccggaaccggctccggtaaaacagaatcatttttgctgccggttctggcgcagatcgcaaaagaagccactggctggccgaaaagtccggcgttgaagcattggcaaccgtggtggcataaggtagcggataaacagcctagcttcatgcgcgagcatgaggccgctgcacgtccgaaagcggtacgcgcgctgatcctctacccgatgaatgccctggtagaagatcaactggtacgtatgcgacgggcactggattctagcgaagctcatgatgtcatggatgcgcattttggcggaaaccgaatcttttttggccgttataccagcgcaactaaagtaactggctggctcaaacatccccgactcagtgaagaaaaaaatgagaaaaagcgcgtggctaaaaaaatcactgagctacgtgagtatatgcaattaacggaagagacccatcaggaggctgtacgacaagcacagcagggcaaggataacgaattgtcgtttaatttccccagaactgctggtggagaggttctcagccgctgggaaatgcaaaagacaccgcccgatattttgatcaccaacaccagcatgctctcaacaatgctggttcgtgaggtggacgatcctatttttgaacaaacccgacagtggattgagcgtgaccctgatgcctatttttatcttatccttgacgaacttcatctacagcgaggaaccgccggtaccgaagtcagctacttgcttaagcatttgatcagtcggctggggctggatcaggaaaaacaccgacacaaattgcgtattctggcctccagcgcctctttacccgttgaaggtcctgaaggcgaacaaagcgtcgaatatttatggggaatgtttggtcagaggggactaccttcaggtgccacctccagtgactggagggaatgtattatcaaaggcgacacccttcccccgggcaatatgtctcttttccagggggacttggatgcgttttatcacgcagtgcttcagttacagcaagcaccacttacatcattacaacactggcaaaatgtcgcccgcagcatgggaatgacaaccagtgaagcttctacagagcaattggcgcaacgtgtcgtcttacaggctgccaacctgcttgaaagtggctgctatacggacgatcattctccgagagccacgtcaattaaaatgctcagttcacgcctgtttaatgcccaaccccatagtgaaaaagcgttccgggcattaatctggttgcgctcgactgagggagactggccgcaatggttttcacatgattttcctgatgatatcggcgcaccgcgtttccgcgcgcatgcttttttgcgcgcactggaagggttatatgccgcgccattgcctgcctccagcgttgcatctgcgcaagaaatcaatcaccactattttggagatcttaccgtagagtccggcttacgttacggcgaagataaaaaatcgcggcgtgtcgagttactctattgtgaatgttgcggcaatctctttttgggcggtaaaccttcagtcttttctggttcagaaagtcgaattgaacttttacccaacgacccggatactgaacaactaccggaacacgcaaaatcagtcatggtagaacgccgatctgctgaagaatacgcgctatttatgccggtcgtcgaacgtttctggccgaaaggcaacgaaatgttaaatgacgacgatgctttcggtacatggggcgaagccagctacgatccatttaccgccactattcaacacccagtatcgctcttaaagccgctaccggaaaaccatatcgcgggctggttctattacgtcaaacccggtgaatttgcctctccggaaagaggccagtcatccagccagtcaccgggaacggcgctaccttttcagtgtccggcatgtggtacatcctacaaatacggcaaaggtaagctctccccaatccgtagctttcgcgtcggtttttcgaaaacgacacagctactggccagctcgctaatggcggaactacagcgatcgggtaaccgtgagcaactggtaacgttttcagacagtcgtcaagatgccgcaagggcggcgctcgatctggaatcgggtcatcatgacgacgtcagaagagaaattgttgtccattcgctgcagtccattgcggctgataaaccgtcccataaccaactaaaagtacgccaggcagagatagagaaccggaacaaaacactgattaacctcaacgtaaggacggatgaggaagaggatgaactggataaacttgctgatgaacgaaagaaaatcagagggttattatcaaagcctgaagctgacagcatacctctgcgtgaaatcctcgaacctgaatcgccggatgcaggtcaaccacttggcttgctgttaagggcgcaggtagatgcaggcattcacccttccgatcgtactggtattgccccggttcctgatcctgaaaaatatggagaaggcacgctgacctttgcatggcaacaactctttgaaaagaacgcgcagggggcgtggtgctggaaggcgcttccatcctatgaagacaacctgcttgtggcacgacaggagatttcacgcgatctaaaacggctggtgggggaaagcgtattcagtaaaacctacttcgcgctggaagagtccggttggggttatccctgccttcccattaccggaaacgactcacgggaacatctcgcgatttatgatgcaatgtttcgtgtgttggcggacgcgtaccgggttactccttcacaatatacaaagccagaaaccccatggagttcagcgcgcgatgtcaatcgtagaaaccgcctgtaccgctttacgcaggagatatgccagcgttcaggaggcgagcctttatctttaattgatagttttctccggcgactagagctggcgggtcatcagggcggtattattgatattggtaaaatgcactttcgtctggcagaacctaccgatcgcgtctggcgctgctcccgttgtgggcgtatacacatgcacaccggcgcggaaatctgtactcgctgctactctcctttaccagaaacgccgtgcagtgatgcaaaaacgctccagatgcaacattatctcggcaaacgcctctcacattcttctggtattcaccggatgcgctcagaggagctgactggaatgaccgaaaatccggcagcaaggctacgccggtttaaaggtattctgattgccgatgatgatgatattttgccggaaggaatgaaagattttgcgcccgatcgagatcttgaccgggcagctcgcgtagtagatgtgctttccgtaaccacaaccatggaagtgggtgtggatatcggtgatttacgtgcggtctttcaggccaacatgccgccacagcgctttaattatcaacaacgtgtcggacgtgccggacgacgtggacaagcgttttcattcgtattaaccgcgtgtcgcagcaagagtcacgatctgttttacttccggcatccggaaaaaattaccggcgatctccctcctccaccatttttgaccacaaagctggaaatgatctgccagagactggtacgaaaaatctggctggtgtcagcattcaaatggttaaggcagcaaacggaaaaagcagatcacccatggccagttgacgactatgcacatgtccctgataaccacggtgagtttttcccggtgcactggctgaaagaaaaccaaacggactggctgccaaaaatccggcaggctatcgaagcaaccatcctggcgcgcgatgaatttgcacggacttgcacgcagcaagatcaccatttgttccagaaaattattcagcctttgacgccggaacaactgtttcaggatattaacgccgtactgaacgacagtgcaatggaggcgaaaggactggcagaagcgctggcggaacacggtaaattcccaatgtatggcatgccgacccgaacacgtcttttgctgacaaggcctgtcagctcaggtgaaaaagaaatcgaatttgctagcatggatcgcgatctggatattgcgatacaggaatttgcccccggaaaaattctggttcaggataaacgacgctactttacagcaggttacagtggaatgcttaaacaaagcagaaaaaatccacgatcattttattcaaatgctagcgaaccgggtgaactcagaacaatgaccgtatgtccggtgtgcaacatctgggctccggcaaactctttgaccaccgaatgtacgatctgcggcgccgttatggataaggcggaacgctatcaatgctatgttccttatggatttatcacaacactggaaccaaaatcggcaaaagaggattttgatcaaatcctgaccacggccagtcgtgtatcaatagcagaagcctacactttttctgcaatgccagagcctgacgttaatgtggcgatacagcttcagccgcaaacatgcctgcaccgtttgaatcggggaatttacaccgataaaacatggcgtggtttcagcgcaacacaggggagcttatcagttcctttcagaaaacaggggagttaccagccgctttgggcgaaccggatttggatggatagtcaaattattgaggccgatctgttagttaaaaaacgctttaccgatcggggagaaactcgaaacacattttatcttgccgcgcctaaagtaactgatctacttgcgctgatggttgcccaaaccccgccgggactccggctacagtattctactctaactcctgcattcagagctgctgcgctctctgcgtcttttatcattgttaactatgcatcaaaagagctactggatattgatcctgaagaaatcgaaattctggaaccccgcgttcaaatgctgaaaaacggcaagtcggtaccggttctgcaaatggccgatcgtctggtaaatggttcagggttatgtgaacggctacagcagaaggacgcatccggttctctcattatccttgaggtcatgaagaagattttaaataacaaaacggcctacccactggctgagttcctgcaatccgatcatcgcgaacgctgttttcaggggtgttatcactgcctgcaccgatacggaaaccagccgtatcacggattgctggactggcgtctgggactggatgttattcaacttcttctggatcaaacctataacgctgggctgaacggtgattttacctctccgggcgtagctgactggccggaaaatgccctgcgattagccaaagaggccgcttcgctatacagcgacagtgacgtaaaagtgatggggaatatacccgtgattcgcaccggggacgggcgctgggcagccgtactacatccattctgggatcccgatgctgcatttgctgcaaaccctgaacttgaggcattttcatatgaggtggacatagacgctacgaatacttttgctttgtcccgccgcatggggaatgaaatggcgaaattacggactcaggcgtcctcatctcaggagtga

SEQ ID NO: 152522 - DNA, 1149 bp, Enterobacter cloacae
atgaatgaaatgacgctatcgcgtactcgtccggtgcttccttccctgttggggtgtttcgccgtttgcccggcgaaatacctactggaaagtgaagctcattcttacgctcgtttaccgctgcatccgggagtgattctgggccaggtaatacatcatcgcgtcaattcagtgatgcacatgaaggccgctttcgggaattatacccttaggcaactggaaaatgattttacgatcgcgctgacagccaatcgacgcgccgggccggtagcaaactggatatatgaccgtcacggtgttgccgggctggtgtcgcgccaaatgcttgttaaccagatccgctacgtcagatcgcttctgccgcctgttttcgtaaaaggggttcctgtacaggaaaaaacattacccgttggccgggaggttatgctgaccagcaatgatttcgatatgcatgggcgtgccgacctcatatacctggagcgacctgatcggttaaaggtagttgatttgaaaaccggaaaggtaacagacgaacaaaatcagccgaaagaagctaacctgttacagattgcggcctatggcataatggtaaaagagcgagcacctgatatgaatattggattagttctgacggggagccgtgatagctgggaagggacactgaatactgacctgattgaacgggtcactacgattatcaaaaatattaatcgacttttgccacggaataccccactttcagtatgtgagctggcttgtcctggcacgtactgctcccattgttcctgccgttgctcatgcccggcctggacagaaaagctacgcaagcagatgcaaccgtctctatctgatcatcagtatggtggaatcgatatcagtggaaaattacttgaggcggaaagtgacgatcaacttcttacgctgaagatcctactacccgataattcagttgttaaggtctttcgtgtgccttccagcaccattccagaaccaacggaaataacagggaaaagaattgcattgtacggattaaataccttcagtgagatatcaacagagtatgctccccgcaacttctacgttatcaatatgcaggatacaagaagatcggcgtttcagtttcactggcagagtgaaggaacgaattga

SEQ ID NO: 152523 - DNA, 123 bp, Enterobacter cloacae
atgagaaagattaataccattagcctgacaacccaggcaattaaaggtgccaagagtgggcatacttttaatcagttgcaacgtgacaaaaaacgttgtgagacacctaccggcctttcatga

SEQ ID NO: 152524 - DNA, 1677 bp, Enterobacter cloacae
atggatgatcaaaagagacaattaattaatattaaagataatctattggtcagcgcttgccctggggctggtaaaacaaaactattgattggtatgttagaggataatttatatcgaaacgaaggttttcgttggcatattgtgttaactcacactaacgcagcagctgatgagatctctagcaggatagataatctaagtatagaggtagatagagtttggtgcgggactattcattcttttcttttagagtgggttgttaaaaagtatgctggagctatatcaaggttaaaagatggattttctttactttcagaatataaacaaagaaaaataatccagagcatagaaactgataaaaagctaggagtaagaatacgttataattgtgatgagcaaggtaacgcatttgtggaaccttattgccattcgttagataataagaacaaagagttacttgtaattcaggagtataatgcctttaaggaaaataatagactgattgattttgatgatattattaagcttggcgtggaatttcttgaaaacaatcaaaacatatgtgagcacctctccaagttaattggtaatatttatttagatgaatcacaagatacaagcctgattcagcttaaagcattgtcatatataactaggtataatcgcgtctcagtatttattgtcggtgataatgaccaagccatttatcaagatcttggcgtttctataaaggataaagatataattaaatctgagttgcaactatctgaattaaagcatgaaactttgtctggatgctatcgatcttctgaattactggttaaatattacaaaaaatattctgcttcgcgaaatgatgttacttctctgcgtgaatttgaggggaaatctccaataatcaaagatatttctcaagatgaattgccacaaagagtgtttaatttaataaatcaataccaggcaaaatataatagcgtttccggtattgctattatagggcctgataagtactatcttatggcgctaattaatgctttatatgacctttcagaaaacttcgtttatgattttcaatcaacaaaccccctatattgtgctaggaatactgtattttacgagttgataagtttggttgttttggatgtaaatgttattaactaccaaagaagaagttctcttgcaaggaaaattgttgattctgttcctgaattgagtcatatgacgccattacaacttaagcgtgatttaaaggagtttcagtcagtaaaaaataatttcatattgtggttgagggagttatatgattttttagaaatgaagtatcaaaaatccattaaacttgagacagattacaaaatatgtaatgcagcggcttctgtggcaaaaatcagggctggtatgggcgcaattagtaagatgattaacaaagacaaaaatgttgtctctgtatctactatacatggttcgaagggtgaggaatatgattatgtaatctctattgggtatcatgatcaggtggtgcctcatcaatcatcttttgaaaaaggaaatgaatatgctcgcgatattgctaatagattaatgtacgtggctttttctagagctaaggattatatgaatatatttatagatgatcgaagaaaagttagtcctttctttattagagaacctgactaa

SEQ ID NO: 152525 - DNA, 258 bp, Enterobacter cloacae
atgttacccacacggttatcccccgttactgtggataatcaatatattgtgtctcagacagctgctttttctaccatatgttgtgtccctgatatcccctcggacggcgtgacaaacgacatcacactggagacgctgatgacgggaccatgttcatccagggtcgtaagaacggccgggactggtaaccggccggacgaaggaccggccaacgcgcagcggcggcagctggttttaaaaatgctggcggaaatttaa

SEQ ID NO: 152526 - DNA, 147 bp, Enterobacter cloacae; identical to SEQ ID NO: 92401

SEQ ID NO: 152527 - DNA, 531 bp, Enterobacter cloacae
atgatgattacgaacaaaatacttattgaggaagtggaggaactgaaaagtctactttcacaagggaaggctgaaattccatctttttgggagtgcctttggccaggcgtagtgttagttgcatggaatatactttgcgctgtaattagtgtggatactgtgtatttgtcaggaaagtatatgtttcatgttttggtttttcctgttggggtcagtaccattatgctcctgggcattgccagttcacgttctctgtttttgtcagttccgaaaaattttagagaaaaatcggatgtatatcgtttttttgctaagaaagtttttatttatgctgttgtttacatgacggtgattatgttattggctatttgtaatagagtgttttatgactcaccattctcttttgcatttatggttattttaacgtccgttttttttggttttgtcatgaatctggattttggacgatatcagctatcattactcacctctgcaataaattcttttcgagtagaaaagttgggggggtaa

SEQ ID NO: 152528 - DNA, 753 bp, Enterobacter cloacae
atgcgaacaatacatgccgccatgctggcggggtgcctttgctgcgccctgatgccggctttcgccaaagacgcgggctggcagtggtacaacgagaaactgaagccccgtgatgaggacaggaaagccgtaccagcggcaccaccgccgcaaatggatattctggagaaactcgccacactccaggcggccaccaaacggtcgttgtacgaagccattctgtatccatcgtctgaaaacttcgtgaagtatttccggctgcagaactactggacgcagcaggcaggtttgttctcgatgagtgcgaagaaagccatgctggaaaaccccgaactcgattacaacctgcagtacagccactacaacggcacggtaaaaaaccagctcgctgccgactatgccgaacagcgacaggctatctccaccctcgcacagcactacggcgtgatgttcttctaccggggccgggaagcgatcgatggccagctggtccaggtgattaaaaattttcgcgaaacctatggcctgagcgtgataccggtgtcggttgacggagtgattaaccccatgctgcccgacagccggacggaccagggccaggcagagcagcttggcgtgaagttcttccccgcgatgatgctggttaacccgaaaagtggccaggtgaagcctctcagttacggctttatcagtcaggacgacctggcgaaacagttcctctatgtctccagcgactttaaaccgaatttctaa

SEQ ID NO: 152529 - DNA, 327 bp, Enterobacter cloacae; identical to SEQ ID NO: 92393

SEQ ID NO: 152530 - DNA, 390 bp, Enterobacter cloacae
atgactattactgagattactctcgcagcattaattgttgttcagtggcttacggtggttcgacaaaataaagaaattaaccaccgacgtgaatgtgaaaggcttctgaaagaaaaaattgacgattatgaattacagaatagtcggtattgtcggtatgttgaaggcaaagcaagtcatctcatcagcggtatggaaaaggatttggatgagctttttcttttaaaaccacatgatgaggactcgttctggcggaaggtttacagactggagtttatttccaacgtgctgaagcatttcgctaagggacaggatttaaaaaagcagaaagaaataatcgatggtgtaaacaacatctgggaaaaatacaggggaagggataatcaatga

SEQ ID NO: 152531 - DNA, 726 bp, Enterobacter cloacae
atgagagcacaacacacatttccagacgcgacagacagctggcttcagcgcctgctgacctggacaccgggacaaacggatatgattaaaacggtcgcactggtactgatggtgactgaccacaccggcttactgctggccggaaacaatgaagtgatgcgcctgctgggacgtggttgttttccgctgttcggtctggcatggggaatgaatctggcacggcacgcggaaatacgccagtctcaactgaacaacctgtggggctgggcgctggtcgcccaggtgtcgtttatgctcatcgggtacccgtggtataccgggaatattctgtttgcctttgccgttacgggccaggtcctgcggtgggtcagccagccgtcctggtattacaccctcccggcggctggactgctggtcacctggatacccctgtcaaccggcagctacggcatggctggagtgggcatgctcaccgccagctggctgctttgtcgcgcacagcatgcaccggaacggctgggatacggggtgttgtgggccctcatggtgttgctgatgaatatgcatgacgtgagtgaatcagtggccgggctggcgattgcgctgctgacgctgatggtgtgctcatctgccggagaacgtgtgaaacgcttctggccgcggcagttcttcgtgatgttctatgccgtgcacctggcggtactgggtattgtcgtctcaatgtga

SEQ ID NO: 152532 - DNA, 2313 bp, Enterobacter cloacae
atgagtttcaatgccaaagatatgacgcagggcggtcagatcgccaatatgcgctttcgcatgtttggtcagattgccaatattattttctacgtgctgtttattttattctgggtgctgtgcgggctgatgctgatgtaccggctcagctggcaaacctttgtgaacggctgcgtatactggtggtgtacgacgctgggtccgatgcgcgatattattcgttcccagccggtatacaccattcagtattacggccagtcgctggaatatacctcagaacaaatcctggctgataaatatactatctggtgcggagagcagctgtggaccagtttcgtctttgcagccgtggtttctcttgttatctgtatcgtgacgttcttcatcgccagctgggtgctgggccgccaggggaaacagcagagtgaggatgagaataccggcgggcgccagctttccgataagcccaaagaagtggcccgccagatgaagcgtgatggtatggcctccgatattaaaattggcgatctgcctattcttaaaaactccgaaatccagaacttctgcctccacggtaccgtaggctccggtaaatcagaagtgatccgccggctactgaactacgtgcgtgcacgtggcgatatggccatcatttatgatcgctcctgtgagttcgtcaaaagctattatgacccgtcactggataaaatcctcaacccgctggattcgcgctgcgcggcctgggatttgtggaaagagtgcctgacgctgccggacttcgacaacatctccaacacccttatcccgatgggtaccaaagaagacccgttctggcagggctccggtcgcactatctttgccgaaggcgcgtacctgatgcgtgaagacaaggatcgcagctacgagaagctggtcgataccatgctgtccattaaaatcgacaagctgcgcgcctatctgcagaacacgccggcagcgaacctggttgaagagaaaattgagaaaacggccatctccattcgtgccgtgctgaccaactacgtcaaggctattcgctacctgcagggcattgagaagaacggcgagccgttcactatccgggactggatgcgcggtgtccgtgaggaccgacccaatggctggctgtttatctcctccaacgctgacacccatgcttccctgaagccggttatctcgatgtggctgtcaattgctatccgcggcctgctggcgatgggggagaaccgtaaccggcgcgtgtggattttcgccgacgagctccccacgctgcacaagctgccggacctggtcgaaatcctcccggaggcgcgtaaatttggtggttgttatgtgttcggtattcagtcctatgcccagctggaagatatctatggcgtcaagcctgccgccacgctctttgacgtgatgaacacccgggccttcttccgctccccgagtaaggagattgcggagtttgctgccggtgaaattggtgagaaggaaatcctcaaggccagcgagcagtattcttacggtgctgacccggtgcgtgatggtgtatcgaccgggaaagaaaaagagcgggaaacgctggtcagttactccgatattcagacgctgcctgacctgtcctgctatgtcacgctgcccgggccgtatccggccgtgaaactcgccctcaaatacaaaccgcgtccgaaaattgccgagggatttattcctcgcactctcgatgcgcgggtggatgcgcggctcagtgcgttgcttgaagcgcgggaagctgaaggcagccttgccagggcgcttttcactccggatgcgccggcatccgggcccgctgatacaaacagtcacgccggtgaacaacctgagccggtcagtcagcctgcgccagcagacatgacagtatctccggaaccggtaaaagcgccgccgacaataaagcgtccggcagcggaaccttccgtcagaacaacggagccttccgtcctgcgggtcacgaccgtaccgttgatcaaaccaaaagcagccgcagcggccgctgctgcctcaacagcatcctcttccggtgcccctgcaacagctgcaggcgggacacaacaggaactggcgcagcagtcagcggaacagggacaggacatgctgccggccggcatgaacgaggacggcgtcatcgaggacatgcaggcgtatgacgcctggctggcagatgagcagacacagcgggatatgcagcggcgtgaggaagtcaatatcaaccacagccaccgtcacgatgagcaggatgatgtcgagattggagggaatttctga

SEQ ID NO: 152533 - DNA, 903 bp, Enterobacter cloacae
atgaacttcggaaatttcgctctgctacgattttttattgatgtgattgatgaaggttcgatttccggagcagcacgcactcacaatatttcgataccagcggcaagccgaaaaatgcggcagcttgaacatctctttggagtcaggttgttacagcggacaacgagacggcaatcactgacggaggaaggtgtaatactttatgaacaggctgttcgtatcctgggggatcttgaaacactggaagatatgctcagacaaaatagcagggaagtggccggtgttttacgtgtaaccgcacctgtgtcgctggggcgtcgaagaatagccccgttgctggcgcagtttggggcaatgtatccaaggttatcagttcatttaaaacttaccgatacggtgcttgatcttgtggcctcgggtatggatgttgctatccgctacggagcgactgaggattcatcttatatttccagaccgctggccaacaattatcgtatcctttgcgcttcaccagactatgtgcaaattcatggcgttcccgaaacacctcaagaccttatcaggcatcgatgtctccattctggcacagagtcatccgttgactggtcactgggagacctctcagtgcggattaactcccccttcacttcaaatgacggggaggttattcgacaactggctctagatggttacggtattgcattaaaatcaatctgggacgtggcggatgatattgaaagcggaaggctatgccagatcctcaagcaatatcagtcacaagctgcccccttgcatgccatttatcctcacaggcaacatgtggcccccagggtaaaggttttcattgaatttttgataaaaaacatccgggagccagatatttacgcaaaatcaccttcctga

SEQ ID NO: 152534 - DNA, 720 bp, Enterobacter cloacae
atgaaaaatcacttcactgataaaaaaattctggtcattggaggaagttccggaattggagaggcaacggcccgggcctttgctgacgtcggtggacgagtgaccattgcgtcacgtaatatgccgaagcttcaggctgcagctacacggattggattggatatcgaagtggcagaactgaatactaccaatgatgaatcagtacagcgttttttcgagggagccagtggattcgaccacgttgttgtcagcgctgcccagacgacttccgggcccgtgcgggagatggcgcttgaggatgcgcggcaggctatgaacagtaaattctggggtgcctataacgtcgcaagacacgcacgcataaataaaggtggctccctgacttttgtctccggatttctcagcgttcgtccttccaagccagtgttacagggagccattaatgcagcaattgaatcactgagccgcggtcttgccttagaacttgcctcatctaacgtcagggttaataccgtatcacccgggctgattgccactcccctgtgggacactctggagagttcagcacgtcagtctatgtatgaaaaagccgcctcaacacttccagccagaacaatggggctgcctgaacacgtggcagatgccatcctctatgttgcaggaaacccttatgccacaggttccactgttctcatcgatggtggtggggcgattgcataa

SEQ ID NO: 152535 - DNA, 1323 bp, Enterobacter cloacae
atgagcaagcagatctttcctgacgaagcagccagtttgtatcagcgtgacacccggtccgtagctggaattgagaagttacgcttcttcccgttagccgttaccgctggcaagggatgctggttaactgaagcaggtggccggaaattgctcgatctgtcagccacctggaccgcggcaggactgggtcatggtcacccggaaatcgccgcggccatcaccagggctgcacagaatccagccggggccggtggcctttcagcggtacacccggattcggtcggacttgcagaggagctgctggccattaccccgggcaacggggatcgctgcgtctatctcggacatgccggtagcgatgccaatgacgtggcgcttcgcgcctgccggctcgccagcggaaaacgtaaggtggtggcttttgcgcatgggtatcatggaggtatcgggctggcgatggaagtatccggagtacatatatcggcaggtaacgcagctgatccagacctctacctggcaacttatccaaatccattcagaaccaatgatgaaggcgctgcggcagtcagcgcaagccttcacgaagttaaagaacagctcgatcaaggtgatgtggcttgtgtgattgttgaacccatcctgtcggatggtggaatggtcgtgccaccaaaaggttttttaggtgggttacatcgattatgcgtaaaggcgggtgtgccgctgatatgcgatgaagtcaaaatgggtctggggcgccccgggctgatgcacgccttccagcatgagaacatcgttccggaaatcgtcacttttggcaaagtgttaggtggaggtttgccgctttctgccactgtgggccccaaagagatccttggtggtcccgcagcgcatgcattgcttaccaccgcaggaaatcctatttgtacagccgtaggccgttctgtgttgcgtgtgctgcagcacgaagaactgcctgaacgagcggctcaggctgggctttacttcattcaacttctgcgtgagctggcgaaggacttacccgagatcggcgatgttcgtgggcatggtctggctattggcatcgagttagtcgttcctgacggcagcaaaaatccggaccgggcgctcgcgcaaaaagtcgtatatcaggcatggaaagagggcctggtggtgtactacgtcggggggaatgtgctggaaataacgccaccgttaattattacccgggatgagataacctgcgcggtagaaaaactatcgctcgcaatacggaatgccccgaaggtcacacgtgaagaaatacagccttatgctggctggtga

SEQ ID NO: 152536 - DNA, 1467 bp, Enterobacter cloacae
atgagtcatgcatcaaataaaaagcgaagtttaaaactctgggaggctctggcgctctctttgggaatggttggaccaacactggctatgtcaagtaatgcgcaggggttgatcgactcagttggcaaggcattgccgattgtgtttgtattaggtctgatcggggtagcattaattgcctatggttttatccgtttgacccgattttataatcacgctggtagtgcctacggtttggtcggaaaaactgtcggtcctcgcgccgggttcttttccggttttgccattatgggaacgtatcttttcttttcgattggcacacttgcggcactgggtgcatttaccaatgcttttctggccgcattattcccctcctctggttttcagatcccatggattatcactgcgacagttggagtgatatttagctggatcctgaattctcgtgatggaaagacggtcgctcgcgtactgatggtgattgaggggctcggcattgtattgatgctggtactggctgcagtgattgtcgtacatcaaccggcgacaggggcagaacatgcttcattgttcagtttgaatggcgtcagttttcaggcggtaatggctggcgtcgtcgccgctttcctctcctgggctggctttgaagcctgtgccaccctcggggaagagacagaaaaccccaagcgcaatattccgctggcactgctgggttccattctgctaaccggtgtgctgtttgtggggatgatgtatgtgcaaacccttggttttggccttagtgagtcgggcctgaatgccttcaaaaattcagcgaactccctgggtacattatcacaaacatacgttggcaccgcatttaccttagcgatgttgtttaccgccatgatgtctgctttcgcggcaaatttatctgccgccgccacctccagccgtctgttatttgcgctcgctcgcgatgggtttggtccagcgtgttttgcgaaaatgtcagataaaaatcatcaacctcgtaacgccctaactctgatacttattctcagtctgctggttgatgttgtggcctggctgagtggtaaaccggcaatgggaacgggtaacagcgcgatagatgcatacttttattttgcgatcatcggctccgtttgcctgatggttgcctatctgatgatcgagattggagtgattaattttatcgcccgcatgggtcagaacatccctaaatgggagctgatcatgccagcgctgggcatcgtcattatggtgatgtcgttatatttcaatgtggcaggccaggaagagctctttagtccggcactggtggcgttttactggtgcatcgccggcctgatcaccatcatttcggcacccaagctcgtacgaaatatcggattgtccctggcgtcagagtttgcaaccccaggtgataaagtggcaaccaggacagtacaaaaggagtggatatga

SEQ ID NO: 152537 - DNA, 1371 bp, Enterobacter cloacae
atgggcaagcaatctgtaggtgtcgatgatgaagtcattgatttacaaagcataagtgagaacctcagagctctggggatcacgaccctttttacctcgctggtcgactctgcgggcgtaatccgaggcaaatctgtcccggtaaaccggctcaaaaccctttgtcagtcaggggtgggagcatcgccttcctgggctctgttctgtgccgataacgcgattgcctggatcccggcattcacggctgttggtgatcatcgcctgcgcgccgatatcagttcactggtgacattccaggatggtttttgctgggctccggtggatgtttttgaacaggaaggacagcacgccgcctggtgcagccgtcattttctacgccagcaggtcgcagcgctgcaaaaacagggtatcgaaactctggcagccggtgagcttgaattctatttgttaccagagcaggacgtaccggggcatagcggatggcacgcttacggtataggggggctactgactcatgagtcgatgatcaatgatctcgtcagaacgcttgaagaagcgaatgtcggcctggaacaatttcatgctgaatatggctcctgtcagtttgagctttcactggcaccggccgatcccgtgacgatggtggatcgcctggtgctgacacgtattttactgggccgcattgcacgcaaacaccatttacgtgtcagtttctccccaaggccatttgcgaatgaagcaggtaacggtgctcatctgcattactcctttacacgtgaggggcaacctctgctggccggcggtaccggtatctacggtattaccgctgagggcgggagcctgatagcggggatcgtacgatatctgccggaattggtggcattacttgccccgtcagtattgtctgccgaacgcctgcaacccggccactggtcgggcgcgtatgcctgctggggactggaaaacagggaagccgcagtacgttactgtgcggcaaatcggggcaacccttatggcgcacatcttgaagttaagtgtatagatcctgctgccaacccctacattgcctgtggggcagtgcttgggatggcgctggctggtctgaaagacgaacttcccctaccgcagcctacacaatctgctccagccgatctctcagaagctgaacgcaatgagcagaatatccagcgacttataacaaaccacagcgaggccttaacccgtctcgcacaaagctcactggcgcagtcaatgttacctccggagctactgggcgcgctgatcgccgtacgccagcatgaacaggatacctggggacatctaccgctggaaaccatcacggagacattccgcttcgcatggtcggtttaa

SEQ ID NO: 152538 - DNA, 852 bp, Enterobacter cloacae
gtgctggcacaacagataaaagacaacatggcggagctaagtcctgcagagcgtaaaattgccagggccatgctggctgactatcccggtgctggtttaggttcggtgcaaatgctggccgatcgagctggcgtcagtctgccttccgtggtgcgttttgcacgtcgaatgggatatggtggtttcgttgattttcagcaggcgctgagggatgaaatatcggaacaggctaaaggccctttacagcgcctggataactgggtaacgacagaaagcgcatcgtcgttgatagaggccgccataacatcctcgacactggcgatacagtgttccttatgtgacatagcggaatatgagatcgctgaagccacccgtctcatcggtgctaaagaacatcatataatcctcggtggcggtcgtatcagccagtctctggcaatgtattttggccgcaacctgcaacaggtgagacgcggtgttgaagtgctcgccgaaaaccatcacgatcgtattcagcagatcatcgacgttaataaaaatgacgtattcgtgttgttcgattttcgtcgttaccagcaggatatgtatcagctggcacaggagattgtggcacgcggtgccacactcatagccgtaacggatacccaactttcccctatagcttctctcgctaaagtcgttctggctatccatgtcgaaacgccatggctttttgatgggtacgcagccggtattgtcctcattgatgccattatcgccagcattatggaaagccagggtgataaaaccgtgcagcgcctgcagcagtgggaagcacttggccccctatctttaaatgcaaaatccaaatga

SEQ ID NO: 152539 - DNA, 792 bp, Enterobacter cloacae
gtgagcgccccccttcttttttcagatgaacctgctccggtaatgatggaaaaccaatcgggcatttctccttttttgatcctttgtgaccatggtggaaaacgtatcccccgccagcttggcgatttaggtttaccgcagcatgaaatagatcgacatatcggctgggatttaggcgtgctggccgtttcccgacatcttagccgtttactgaacgctccactggtgcatcagatatattcccgacttgtgattgactgtaaccggcaaccaggtatccccagctccatcccggaggtgtctgaagcaacttccattccgggaaatatcggcttgacccagcaggagcgtgaccagaggcgtgacgaaattttcacaccttatcatgatgctatacgcgcgatactgactgaaaggaagaaacacggtattcctacctgtatcctcgcgatgcacagctttacaccggtatatcatggtgaatcgcggccatgggagatcggtgttctgtaccagcatcaagctgaatatgctcttacggtgctggagcaattaaaacaaacccggcgatggtgtgttggagataatcagccttactccgtttcagatgtgactgactatgctgttcctcagcacgccattaaaaatgaactcccctatgttgaaatcgaaattcgtcaggatttgattacagaaccagaaggacaacgaacctgggctgaagatctggctcaaatatttacagatagctgggacattctcaccagtcaacaatataaaaaagaggcataa

SEQ ID NO: 152540 - DNA, 648 bp, Enterobacter cloacae
atgtttaaaccgtccagccgtgagatcccaattgagaagcaagccgcaacgctgttatttattgatgtacaaaattacaatgctcgccgtgatggtggggaatatgtcgggatgtcgacaaccgaactgaatgagaggttcggctacttctttgatataattgaacgcgaaacaatttctaatatgcaaaaaatccagactgcatgtcgtgcaggtcagattgaagtgatgtataccgttatagaaagtctgaccaaagatggtcgtgaccgcagcctggactacaaaattaccggctttaacgtgccgcgtgactcctgggacgcgcaggttctggaagctattgctcctgctgatgatgaaattgttctgtcgaaaacctcttccagcgtatttatctcgaccaacattgattatgtactacgtaaccttggtacccgttatcttgtggttgcgggttttcttaccgaccagtgtattgaaagcgcagtacgtgacgcctgtgatctgggatacctggtaaccttagtgactgatgcttgcgcgacactgtcggctgaacgccatcaaaactctctcaacgctataaaaggttattgcaggcaaatcactacacaggagtttctcaatgaactctccgctggataa

SEQ ID NO: 152541 - DNA, 858 bp, Enterobacter cloacae
gtgactgatctccttcaaaatcactattcacaggttaaaaacccgaatccggtattcacgccgcgtgaagggaaaaagaccctgccgttctgccgtaagctgatggcgaaagccgaaggcttcacgtcccgttttgatttttccatccatgtggcgtttttgcgttcgctgggtaagcgtcaccggatgccaccactgttgcgccggcgtgcaattgacgctcttctgcaggcaatgtgtttccactacgatccgctggccaatcgcgtgcagcgctcgattaccaatatggccatcgaatgtggactggccaccgagtccaggagcggcaacctgtcgatcacccgagccacccgggcgctgaagttcctggccgagctggggctgatcacctatcagacggaatatgacccacagatcggctgtaatatcccgaccgatatcaccttcaccccggctctgttttccgcgcttgacgtttcagaaatggctgtggtggccgcgcgccgcagccgtgtggaatgggaaaacctgcagcgcaaaaaacagcaactgaaaccgctggagatggacgaactgatcgcaaaagcgtggcggtttgtgcgtgagcgttttcgcagctaccaggctgaacgaaaatctcacggccggaagcgggatactgcacggcgggatgcatcacggcagcgtcatgacatcgagacgcgcgtgcgtcagcaactgacccgcgaatacgccaccggccgcttcaggggcgataaagaagcgctgaagcgtgaggttgagcgccgtgtgcaggagcgcatgctgctgtcgcgcggaaacaactacacgcggctggccactgcccccctataa

SEQ ID NO: 152542 - DNA, 279 bp, Enterobacter cloacae; identical to SEQ ID NO: 98260

SEQ ID NO: 152543 - DNA, 1212 bp, Enterobacter cloacae; identical to SEQ ID NO: 102386

SEQ ID NO: 152544 - DNA, 954 bp, Enterobacter cloacae
atgatgcaacgaaaaccaggtttgccgtctctcgacggtttacgctactttgatgccgcagcgcgcaatctcagttttacccgtgccgcgcaggatctttttcttactcagagtgcagtaagccaaaaaattcaatcgcttgagcagcaacttggctatctggtctttcaccgcactcccgcgggactacgcttaaccccgcagggtgaacaactttttatcggagtgcgccaggcctttgccatcctcgaaactacgttgcaccaaaccggtgaagaaacccttgagggcaccataaagattcgggttatgccgtcctttgccaccaaatggctgcttccccgattgcatcagttttatgagcagtaccctatcagcctggaaattgatgccgatatgacgcccgccaattttaaatctgacgcggtcgatatcgccatcactcctttttgggttgatgataaaaatctaattcaacggcatctgttcaacgatgtgatctatcccgtgatcagcccggatttgttgaaaacacggcatctgcgcagttacagcgaactctgtggtttgcgcttactgcatgattccatgccgcaaaatgcctatagcacccattggcgctcctattttgcccgcctcgggctctatgacctgaatgtcgaggcgggaaccggattttcccgcgctgacctcgtactccaggccgcctgcgccggccaaggaatcgccttaagccgtcactctttgtgtgcgatggaagtgagcaatggcgcactgattcgcccttttaccgatatcgtcgaagacggacaggtgtggttaacctgcccgcgtaataatgagaaacggccacgcgttcaggcgttgattaactggctgacacaagaaaccgcacgtcatattgcagaacgaacgcaaattctcggtgaatatacgctgcataaggccggctaa

SEQ ID NO: 152545 - DNA, 849 bp, Enterobacter cloacae
atgaaaaataaactgtggctattactttctatgtctgccttacaactttcaccattattgatatctacggcccaggctgatttactggatgatattaagcaaaaaaaagaaatagtgattgccaccgaagcgcgctatgccccttttgaaatgcttgaagatggcaaaatagtcggtctgggaaaagatattctcacggaagtgatgaaaggattacccggggtgaaagtggttcagctggatattccatttcaggggattttgcccggcctggaaagcaaacgatttgactttgtggcaacttctttaaccatcactcgcgatcgtgaagcaaaatttgcttttaccgctcccttttctgacgccagcgtggccattctgaaacgcaaaggggatagccgcattaatagcgccaaagatctccagggcatgattgtcgccagccaggccggggcgccgcaaattgcggtgctaaaagaatatgaagcatcggtacttaaacccaccaccggtcacggcgttaaagaaataaaagcctttattgattataacgaagcctatgcggcattagcggcgcaccgtgttgatgcggttgtgcaatcgctgccgaacctcgcgccgttggtaaagacccgtggtgatacgtttgaaattgtacgcccaccgtttggcccggccacttggtacgcatgggccggaagaaaggatgcggatagcgcctcactggtcaaatttatcagcgacggcattgtgcagttgaataaatcgggaaaactggcgcagctacaaacgaagtggctgggtttttctatggccgttcctgagcaagttccgaccccggcaaactaa

SEQ ID NO: 152546 - DNA, 672 bp, Enterobacter cloacae; identical to SEQ ID NO: 102389

SEQ ID NO: 152547 - DNA, 663 bp, Enterobacter cloacae; identical to SEQ ID NO: 102390

SEQ ID NO: 152548 - DNA, 819 bp, Enterobacter cloacae
atgcgtgattatgctattgagattaacaacctcaataaacattatggcgaaaaccatgttctacgtggcatcgatgtcagcatttctcccggagaagtcatctgcgtgattggtggctcagggtcgggtaaatccacgctgttacgctgtattaactttttggaagattatagctccggcagcattctggtgaatggcgagaacgtcggctatgaacctctcggcggggaaaaacgccggcgtttaagcgacaaggaaaaccgtcaggctttacgcgacgtctgtatggtctttcagcagtttaatctgtggccgcatatgacggtactcgataacgtagccacgccgttgcggcgggttaaaaaggtctcccgtgaagcagcctactccgaagcgaaaacgcaactggcacgggttggtctggcagacaaagccgatagctggcccgcgatgttatccggtggtcagcagcagcgcgttgccatcgcccgggcattgaccatgaaacccgccattatgctgttcgatgaaccgacttcagcgcttgatccggagctggtcggggaggtgctaaaggtcatccgcaatcttgccgatgatggtatgaccatgatgattgtgacccatgagatggggtttgccgctaaagtctccgatcgggtgctgtttcttgccgatggctgcattgaagagcagggagcaccggcgcaactgttccatcagccgaaaagcccgcggctgcagtattttttgtcgtcgtggagtgagcgccagtcgggggctagattacctgaaagggcattgaaggagtcagcatga

SEQ ID NO: 152549 - DNA, 966 bp, Enterobacter cloacae
atgaagcaagggattacatttggcgtactcgctggcgcatgctggggattcatcttcctgccaccggtactgctacccgagatctcaccactgctgttaacctgcggtcgctttgctacctatgggatactggcggcaatattacttatacctcaatggcgcaacattgcccgtgtatggcatcatcgcgatctgctgacgctaatccgtctttcgctgatgagcaatgttttctattttctgctcgtcgcggtggccgtacagcaggtcggtattgccgcgacatcgttagtgataggtttaattccggtgatggttccggtgcttggtcgcagggaccagcatgctccgcccttcaggcaattattgctgccgatgacggctatcattgctggtgtggtgctgattaatctgcatgcgatacaaacatcatcgcaccaagttacagaaggaaaacggcagatgctggggatcctttgtgccttcgctgcattactgtgctggagccgttacgctgtcgagaactcccgctgtctgaaaaaactcccttacaccagtaaccagtggtctctcctgataggcctgtgtacgggatgtatttcggtactgctatggctcatcgccagtatattcaggttttctgcagttgacttgtcgttaccggaacacacccaaacgctcttttggataacgaacatgatgttagccgtggtctcctcatggctgggatatctggcgtggaatctctgttcccggcgtcttccggtatcactgacagggcagatggtggtttttgaaacccttttcgcgctgctatatggttttatctattcacagcgcattccggatctccaggaaagtgccgctattacgctgttaattggtggggttatgtttacgttacattaccatcagcacaatcatggcggcgacgtgagtaatacttcagaagtcaatcggagttaa

SEQ ID NO: 152550 - DNA, 297 bp, Enterobacter cloacae; identical to SEQ ID NO: 102391

SEQ ID NO: 152551 - DNA, 1227 bp, Enterobacter cloacae
atggctgcagaaaataaactgagtgataggcaactaaaagcgctacagggtaaatcgcagactaagcagcggttgatttcagacggtcgcggaatgtcggcgcgagttagcaagaatggggctgtgagctttgtcatgttctaccgtttgggcggtagggatacttccccaatatggctgactctgggcaagtatccggatatgtcattgaaaatggcacgagataaacgtgatgaatgcagggcttggctcgctgaaggtatcgacccacgtcaccgtatcggcttaatcactgatgtatcggaaaggccagtcaccgtaaaagatgcgcttgattattggttagagtattacgccaagcctaagcgcagaacttgggaggtctgtgaacaacggtttgcccgatacatttatggtcgcctgggggatgtacctctaaccctgtgtaatgctgcaatgtgggtaaagtgttttgatgaagtgagaaaaacagctccggtagctgctggccatacattccgagacgtaaaacaggcactcaagttttgtcgggtacgccgttatgctatctccaacgaactggaagattttaccgttatggatatgggggaaagggctcaaaaaagggatcgtgtactcacagctgatgaagtgagggacgtttggtattgggcgaatactgaggaaaacaattccaaattatcaccagttaacagggtgacacttgtcataatgatggtattcggttgccgtggtcgtgaattgcgggagtcgctctggaatgaatgggactttaaagagtggatttggacggtgcccaaagaacacagtaagaatggacgcgaaattattcgcccaatccccccgcaaatccgtcaatggcttgtaaaccttcgtgcaattgcagaggaggagggcaccgagcgcctacttaatggtgaatttgcaaaacagacagttatgagcacggttggtagccgtttctggcgtaagttcaggcatgaaaaatcatggtgcctgcatgaccttcgtcgagttctagcaaccaatctaaatgacatgggggttgatccccatgttgtcgaacagctcttggggcatacgctaccaggggttatgggaatttacaatcgtagccaatatctggcggcaaaacttgatgcactgacgagatgggtagactacctgaattcgttgatccgttcagatgctaaggggctttgttga

SEQ ID NO: 152552 - DNA, 294 bp, Enterobacter cloacae
atgagtcaatcatttctttatcaatggtttctttggtttgaaccaaaatggtgttacctatcacaaggtagcacatttgaatcaattaatagtgatgatataaagacattaaaattatcagtgcccaattttgaagaacaacaaaaaattgccgccgttctgtccgcagccgacgttgaaatctccacgctggagaaaaaactcgcctgcctgaaagacgagaaaaaagccctgatgcagcagttactgaccggcaaacgtcgtgttaaggtcgatgaggcggttgccgcatga

SEQ ID NO: 152553 - DNA, 609 bp, Enterobacter cloacae
atgattaagcttattggcatgttggattcaccttatgtacgccgcgtggcggtctccctggaactttatggcgttgagtttgaaagccagccgctgtcggtattcagcacatttgaagaattttcccggttcaaccctgcggtaaaagcgccaacgctggttctggataatggaacgcgtctgatggactcatcgctgatacttaattattttgaggcccaggccgcccccgagcgaagactcctgcccgtcgcgccggatgcactggcaaacgatcttcagacgctgggctttatcctcgccgccgctgagaaagccgtgcaaaatgtgtatgaataccaccagcggccgctggagaaacagcacgcttcatggatcgaacgcattacaatccagcttctggcagcctgcagggaatggaataccttgctggagaagcgcccgaccactacagttcccgatcaggttgccgtcaccagtacggtggtctggacgtttattcagtcgatgatcccacacgttgtcaacgcagcagatttcaggaacattcaggcgattgccgacacctttgaatcgcagtcggtctttaaaaaatatcatttcaactaa

SEQ ID NO: 152554 - DNA, 1512 bp, Enterobacter cloacae
atgtgtataagagacagcattcagtcgctgctgaatgaaaaatatcctgatgcacgcatgtcattactacctgatatagaaccagatcagattgtcaacatggaaattgatggatcacagtgtctacttgttttgctggatcagactccgggtatcattgacgatcgctatccattgacacagacattaagaacaaaagctgcctgccagcatattaatgttaatccatttgatcttacaggcgacccaatccaagataacttactaatagaacagtctacccctgacggtgacacaaggcttattcctgtcacagattctcgttactatgattataatatcagtgattttgagaaaaaatcttttcaagaatctttggcacgtaatgttgaaattttatataaagagttagccttgaagcatttgctgctatgcaatgagacaaaaattagtgtgacacttccgcaacagaaggatctactcactaacaatctcgctgtaatcactaatggttgtttgttcactgttaaacaagaccgccccataatattaccttttcatccagcaatgccagatgctatttcagcctgtgatgatatactccgttcatttgatacctcagtaacagcattactcactttgcttaacgaaaaatggccttaccattatcgcccccaagatattacacaagggatttggaatgaagcagagaagttgacccgatttattaatcggttgacggtgataattcacaaaacggaagaagtgactattgtccttcaggatccacaatatggatcacctcatatgcttccggagaaattaaacgatttaatgactattctggattctcaacggcaacaactccctcttaatcaatggttattaccagaaatcgatgaattgacgtttcatatagatcaacttactgaagaaggtgaactatccgatacaaataaaaatacgttacttcgcgaattagagtttttgagtgacctatggcaatgtgctttaaggaaatattattcagataatgaacttaatgttacttatgatactttaaaaaaatatgttttttcccaatggtctgagaagaagaatacgcttatggttggagttgttcaaaaaccagtaaaaagagcaagcacatcgttaatagcatcatggaataaattattatcacgcgtctttgatttaccattaggtgatcctcgaaactggctcaagaacgtaccgggtattacacgactttggcatgacccagagcaaaattacgtcattgttggtagcctttcctcccctcaacctattattcagcgtcagcctagtattcgccaatggcatgcattacagggcgaacttaattacgaacttcttgccggactggttgatgttgattgggtcagaatgaatcaactagcgggcaatccttgtgtagctacgcttgtgcgtcggtggaaggaatgtcaggttcagatggatgatgtgcgtgatgtgtcgctgacagagtaa

SEQ ID NO: 152555 - DNA, 354 bp, Enterobacter cloacae
atgaaggaattaatgctgttaattcctctgggcggcgctttgctcttaaccgggtgcgcgggcacagagactgaatttcaatgtaatgccacgacgtcggatacctgtatgacgatggagcaggcaaatgaaaaagcgaagctgaaagaggaacgcagtgatgcaaagccggctgcggccgggttgccacaactggctgagggtaatttcagaaccacgtcagtgaattcgtacccgttgccgccacagtccaacctgacccaggccagagtggccgcggagaaagatcgagcacgtgcagtgtacctaaggaaggtgcgaataagtccgagatgtgagatcatcgtgttgtaa

SEQ ID NO: 152556 - DNA, 1425 bp, Enterobacter cloacae
atggccaacttcaacacgctgatcaaacgtaagcaatatatctggctgggactcattctggcgggcggcgcggcagcagtcggaggcgggctgtatctgtcagatctgaacatgagctctgatgaggaagccccggctcagggcgaacccgcaccggatatgaccggggtggtcgacagcagcttcaacagtaaggtggagcagcacgcgacaacagaaatgcaggcgactgccgctgatctcaacaagcgttttgactccctgcagggggaagtggacctactgagtaaggcgcgaaccgctgaccagatacgtatcgacaagctcagcagtgacaatgaagccatgcagactcagctgaaggcgctgggcgtgaaaccggctatctctggtggcgagcccgcgccgactcctccgtcaccgccacccggtccggaaggggagccgcagccagccagttatccgccgcaaaccggcgccgcggtaccgcctccgacggcattctatccggggaatggtatgacaccgccgccgcaggtcagctaccagtctgtaccggtaccaaaccagatacagcgtaaaacgttcagttacgacaaaggaaaaaaaacgaagtcattgccgtacattccgtcggggagcttcgcaaaaagtatgcttatcgagggggcagatgccaacgcgtctgttaccgggaatgaatcaactgtaccgatgcagttgcgtatcactggtcgcgtggaaatgccaaacagcaaaacctacgacctgacagggtgttttgtgggccttgaagcctggggcgatgtctccagcgaacgcgccattgtccgtacccgcaatatcagctgtatcaaaggtgataaaaccatcgatcagcccattaacggccacgtttcctttatggggaaaaacggggttaagggagaggtggtgatgcgtaacggaaaaatcctcggctgggcatggggggccggttttgttgacgggattggtcagggcatggaacgggcttcacagccggctgttggcctgggggcaaccgcatctgttggcgccggtgacgttctgaaaatgggggtcggcggtggtgcatctaaagctgcgcagacgctgagcgagtactacatcaaaagggccgagcagtatcacccggtcattccgattggtgccggcaacgaagtgaccgtcgtgttccaggatggattccagctgaaaacgattgaagaactggaagcggaaaagaacgggcaacagcaggctcagaatcaggaggcggagccggcaccgcaggctgatgcacatcatcagtcaggcggcggtatgaacggattcaatactgacgagatgctgaagaagctgggcaaacttgatccgcgtgagttctctccgggcgcagcgccgcagggggaaaataatggctaa

SEQ ID NO: 152557 - DNA, 567 bp, Enterobacter cloacae
atggaacatggtgccagacaaaataccacccgcgttatcgctgtgggatttatcagtctggggacactcctgaccctcagtcttgcgaccaatattatccagggcataaataattaccgtctgcagacggaacagaaagtggcggtgacaccgatgttattccgtgcaccctttgcggtgtctcagaaccaggctgacgcctcttatattgagcagctgggcctgtcctttgttgccctgcgtctgaatgtcacgccggaaacggttgatgcccagcatcagcagctactccggtatgtattacccgcctcgcagaacagcctcaaggtccagctggctgaagatgcgaaacgcattaaagacaataacgttaattccaccttttatatgacgtcgatgcgtgcctggccggcagagaaccgcgtggatatccggggtgagctgaaaacgtggattggggattccaaaccctacagtgaaattaaaagctatgtcattcagttcagtcgtgtcgatggtgtcagctggctggcgcgttttggagaaataaataatgaaaaaaattaa

SEQ ID NO: 152558 - DNA, 696 bp, Enterobacter cloacae
atgtgttcgatggatcgtattgaaaacactaactgtagtcaattggatttctttcgtgaaatgcaattaactgtcaacctttctagccatcctgcttgtataaggctccgtgatggatccttttcccatttcaatcattctttcgctacaacttttctgcacaatattaacgttaacatatggtttaaccgtttggaaatctcctcttctttacgtctgtcagctcttgacgccgaagtttactcaggcgatcgaaaaatgctcgttgaggaaaatttgcccattaatggtaaccgatgggatttcataatagaacggatgtcatttgatggaacggagttcactctgtggaagttctgtcatcttcaacgaggcggttttttactgtctcctgttcgttcaggttttataaaaaaactcaacgaatttaagaatgcactcggttttttaactgatgttcaggttgagactctggctctatattcttttggtgcctcccacaatcagatctcagaagttttaaatatagcaattggaacatcgaaaaacagggtgaatcgtattcttgctgctttaccaatccgcacgagagaagaagtgttttattttttattcgccagtggaatggccttttcattctttaaggttgttacagaattaattgggagtcgtgttaataaattgttaaataaatag

SEQ ID NO: 152559 - DNA, 393 bp, Enterobacter cloacae
atggcaaagatacaggcatatgttagcgatgaagttgctgaaaaaattaatgccattgtggagaaacgaaaagctgagggcgccagggagaaagatgttagtttttccagtgtgtctacgatgcttgtcgagttaggcttgagagtttatgaagcgcaaatggaaaggaaagaaagcggctttaatcagatggccttcaataaggttttgcttgaaacagttttgaagacacaatttgcaaccaacaaaattttgggaatttcttgtttgagtccacatatctcaggtaaccaaaaatttgagtggcgatttatgattgataacattctggaagacactaaagaagtgatcgatacattctttccagaatcagaagatggtgacgaagagtaa

SEQ ID NO: 152560 - DNA, 198 bp, Enterobacter cloacae
atgcatctgattggttgtttttaccttatcctgaaccagggattcacggacacgatgcagcgcacgcattgcctgctgagattcagttctgggctgtacaaaacgcatagacggacgcgatgcagcttcacaaatagcttcggcgtcgacaaagtcgtttttgttacttttaacgaatggacggacaaattgtggtga

SEQ ID NO: 152561 - DNA, 198 bp, Enterobacter cloacae; identical to SEQ ID NO: 152560

SEQ ID NO: 152562 - DNA, 408 bp, Enterobacter cloacae
atgccagtcatgggcgtggacgatttcaggccgccagaacggatccagaccgccagcaagctcagccgcgacccaactcaacagcgcgaaacgcaggacgttatcgggataatcctgcatctgcgggtcatgataaggattacccggtcggtcatagagatgcggggcatcaatcagatagatgcccacgccgttaaagtcgccaaacaacagcgtcatcggcccggcgaaggtctccctgctggccaccacctgcggttcccctactccgtcgcggatcgcgggaaaccccggcagcagcacgcgggtatccacgccctcggctatttgcgccgccgggagagcaccggtcacatcagccagcccccccgttttcaacagagggaacatctccgctcctacatgtaa

SEQ ID NO: 152563 - DNA, 177 bp, Enterobacter cloacae; identical to SEQ ID NO: 139670

SEQ ID NO: 152564 - DNA, 186 bp, Enterobacter cloacae
atgtcaactatcggatatgttcgtgtaagtacagatgagcagacgacagagaatcaacaacagcagatagccgaacgctaccatattgacaaatggtttatcgatgaagccaccagtggcacgacaaaagccatagggcgtgatggatggtcatcactgatgaatgaatcgccacggataatctag

SEQ ID NO: 152565 - DNA, 1281 bp, Enterobacter cloacae
atgagcaattcagtatcagttctagctttgagtacagagcaaaagcagtatgtaggtgatttcctggattgcatagtaggaagcctagacttatcagaaacacagtacagcttaatcaagagggcctatgaatcggtgggggcttatcttgctgggggagacgatcctatcctcgttggagcggagatttattctcaagggagtgttagattaaacactactgttaagcctaaaggaagcgaacagtatgacgtagatctgctttgttatctgccaaacgcaagtgttgcatccggttgggctgaagttcttgaagccgtgcgtgcacgacttgcaagtcatggtacctatagcgaaatgcttacccctttgccaagagggcaccgcattatgtacgctggcgaataccatctggacatcacacctggaattgacttgggttataactcttcagagcacaaccatcctctcttggttcctgattctcgtctccaggattggaaggaatctaaccctgcaggttatgcgacatggtttgataacattacagagaaattaccgatatttgtaaggcttgaggttgcgtctgaaagcttcatcaaatcagcggcagtcaggccattacccgatcatacccgtaagaaacttctgaaccgaatcgtgcaaattttcaaacggcatcgggatgtatgggctgctgaaggtgggaaagagcggattgatttaaaacccatctccgccatcattactacgctcgcggggcatgcctatagcaaaatttgtgatgaaggcaggagctattccactgactttgatgtactgctggatgtccttgagctgatgcctgactacatcagatacagttacggtctgtattttgtgcctaatccgagcatgccagaagagaactttgctgaaaaatggaacgttgaagagtccagaaaaggagaaaaactcagaaaaaattttgagttatggcataaaacgatcactgataacattatagaaattgcatcatctgttggagaagatcaacttcttgataatcttagtaaatacttcggagaaagacctgtcaaagcagttcgtgaagctatggttggaggtgttaacgcggcacgtgatagcaatgatttgcgtgttttagcccttacaggagcgcttagcgcgggtgcagcaaatgtgcctgcaatggcacggacagtcccagagaatacattttacggtgggaatgctctttcttctgcccctgtgaaaaagaatacattttttggggactaa

SEQ ID NO: 152566 - DNA, 486 bp, Enterobacter cloacae
atgaatgtctttttgcctaatcggcgccttacgcttgctgaacagtatcacgggcttcgcgcccgtttccctaactcacgttgctacttaactggaaataataaaaaactggtctgggagggaaaactttcgccaggaccgtacagtcggtcgtatcttgtccggattgaatacgctcctccagaaactcccgattgctatgttatttccccaaatcttaaagaactggccaagagcaagaggatcccccacacatacgcgactgactcggaatcaaataaaacacaactatgtctttttttgccaaaacagaggcatccagaaaagtatgctgaatggcgtcctcagctccagttatccgacaccatcctcccgtgggcatcactatggctgttttattttgaacagtggctattttccggaaaatgggaaggtggcggggcgcatccgaatgaagatgatgcaggtatctactatgaggattaa

SEQ ID NO: 152567 - DNA, 1104 bp, Enterobacter cloacae
atgcatatgagcagttactggaagcatcaattttctaagatattggattatctgacacgccaaaaaaagccagctgttgtattgatgactgttgggggaactatcctcggagggcagaaagtactcaactttgttgttaccggcaagtttagttggggttcactcacagtaggtacaaacgacgggaatttcatcagtgattacatcgtacccattgttgcgattatacttattgtcatgggtggcatactgatggtcttaaatgagtacttagcatttaaacagaactcacataagcgtattatcctggtggcagggaatggtctacgaacgacatctgaaacagggttggataagaaggttacttccatactgaaaggtaccatctatccagttgatattgatataactcagcaattcagagatgggtatgtctttgagcccgaactgactttcataagaaaaatattgccctctaaggataatctggcccaactccttgccaagggcagcgctgaaagtatacaggttggctacggtggttttttacccgtaccttttaccttttttataggtaatgtgcttgatgataaaagtaatgtgagtgtgtttgattgggatcgtgagaacgaacgctgggagcatatctcagagaagcacatcgacgacggcgagagtttcattagtgaaacaattcgtaccggagaattggacgaaatcgtacttgttgtttcatgttcatacagggtaaaaatgctacaagttggagagtgttttaaaggacttggcattgaacatttgacactggaaactattgcatttgataatcattggtcattggtaaaacaacggcgtctttcaattcagtttgcagagaagattaaatcgctttcagatatggggatcaggacgattcacttgatactggcagcacagagcagtgtagtattgaatttggggcgacgatatgatagtagaaacatgtcagagcttattgtttatcagtatgagcaaaccaataagaacccttatccatggggaatttatgcactttctcatgggcatgaaaatggtggtttcattacacgtagcgaagaacagtag

SEQ ID NO: 152568 - DNA, 171 bp, Enterobacter cloacae
atgacgggaaatcttgggctgggactcatccaacgccgtgcagaaatcgcagacgcacagttctcccatctccctgagcagcaggacaatacccagacgggtttcatcggacaggtttttgaaaagcttaagggctgtaagggtcattattcctcctgttcggttgcgtaa

SEQ ID NO: 152569 - DNA, 1209 bp, Enterobacter cloacae
atgcgggaaaaatcccgacgtccgtcgccgctgcagcggcgggtgctgattgtgctggccgccctcgatgcgaaacgtcctggaccggtggccacgcgggatattgagcgggtgctggagcagggcggggacgccccggtatacgggccgaacctgcgtgcctcctgccggcgcatggaagccgcgggctggctgcgcaccctgcgcgcgccgaacctgcagctggccgtcgagctgacggatgccggccgtgcgctggccgccccgtttctcgctgacgaacaggcgcgcgtcctggcggagcagcgcgcgacggcgatccgggttctgcctctggtcccgcctgtccaggcagatgaggctgacgaccggccggtggagctggatggtcgatggcacctggcgttgcggggtgactacgtgatccgtcttgacggcaccacctgcctgcagctgtggaatgcggccgggcaggtgacacgcctggaaggcgatcccctgcaggtcgccacctggctgcagtcctgtcacgatgcggggattgcggtccgggtacagattaatgagagcgccacgccggaggcgggcacggtggacgttaccgcgccggcggaccagaccggcacctggtgccgtcagctggacgccgcgctgcaggcggaggggatcaccgggctgactgaggatattcaactggccgtggtcagtcctgaagcgtccctgcggatgctgccggcaccggcgcgcctgctgcacgttctgcgcgacgcggacccgctcactgctgccacatacgaggaagacacggtggccgcgctggctgacctgctggcccgcgcggggttcacggacgaccaggcgcaggagctgcagtggcaccgcatccgctggccgctgatgagtcaggaagaagctgaccggcgcgagctgaacagcctgctggatgaactggaacagcgacagctgtactgcaaccgcgggcagctgacggagattgtgttttcgccagttcgcaaacccggagagcgctggactgaacgtctgcagtggctcctgatgacggatggattcgggttccgcagtccgctgtcgcgtgaagcggcctcacgggcgctggctatcctggccggttacacgggacgggaggtggcggagcatctggccacggtgatggtgtggaacgacgccgaagcaggagagaggccctga

SEQ ID NO: 152570 - DNA, 279 bp, Enterobacter cloacae; identical to SEQ ID NO: 101140

SEQ ID NO: 152571 - DNA, 567 bp, Enterobacter cloacae; identical to SEQ ID NO: 101141

SEQ ID NO: 152572 - DNA, 1629 bp, Enterobacter cloacae
atgatctcacatctcggacttattcgcaccttccttaacgtcgctcagctgaccgcgcagtactacgtactgaggccggaagcgggcaacgcggagcatgcggtgaagtttggtacctctggccatcgtggcagtgcagggcgccataacttcaatgagcagcatattctggcgatcgcgcaggcgattgcggaagaccgcgccaggaacgggattaccggtccctgctacgtgggtaaagatacccacgcgctctccgaaccggcctttatttccgtactggaagtgctggcggccaacggcgttgatgttatcgtgcaggaacacaacggtttcaccccgacgccggccatttccaatgccatcctggtgcacaacaaaaaaggtggtccgctggcagacggcatcgtgatcacgccgtctcataacccgccggaagatggcggtattaagtacaacccgccgaacggcggcccggcggataccaacgtcaccaaagtggtagagaatcgcgctaacgaactgctggcctcgggtctgcagggcgtcaggcgcatctccctcgatgcggcactggcatccggtcatgttaaaaagcaggatctggtacagccgtttatcgaagggctggcggatatcgtcgacatggcggcaattcagaaagccggcctcaagctcgggatcgatccgctgggcgggtccggtatcgaatactggaaacgtattgccgggcactacaagctcgacctgactatcgtcaacgatcacgtcgatcaaaccttccgctttatgcatctggataaagacggcgccattcgcatggactgctcatctgagtgcgcaatggcgggcctgctggcgctgcgcgataagtttgacctggcttttgctaacgatccagattatgaccgtcacggcatcgtcacgccggcagggctgatgaacccgaaccactatctggcggtggcgattaactacctgttccagcatcgcccgcagtggggccaggatgtggcggtgggcaagacgctggtctcttccgcgatgatcgaccgtgtggtgaacgacctcggccgcaggctggttgaagtgccggtgggctttaaatggtttgttgacggcctgttcgacggcagcttcggcttcggcggagaagagagcgcgggcgcctcgttcctgcgttttgacggaacgccgtggtcgaccgacaaagacgggatcatcatgtgcctgctggcggcggaaatcaccgccgtcaccggtaaaaacccgcaggagcactacgacgaactggccgcccgcttcggcgcgccgagctataaccggctgcaggcttcggccacttccgcacagaaagcggtgctgtcgaagctgtcgccggaaatggtcagggccagtcagctggcgggtgacccgatcactgcgcgtctgaccgccgcgccgggcaacggcgcatcgattggtggcctgaaagtgatgaccgacaacggctggttcgccgcccgaccgtcaggtacggaagacgcttacaagatctactgcgagagcttcctcggggaagcacatcgcaagcagatcgagaaagaagcggtggaaatcgtgaatagcgtgctagcggcgcaccagtag

SEQ ID NO: 152573 - DNA, 621 bp, Enterobacter cloacae
gtgaaatctagtgcacttgacgcacctggtgcaaacggaccactgacgctaagcgggccggtaccactaccggagcgtattctgcataccggtgatcagatttcggcgccacaggctacagataaaaccgtgacgccggtagcggatgacctcgattttgacgatattattctggtgtttcctccggaatccggcctaaaaccgctgtatgtgatgtaccgtagccctcgtaacatgcccggtacagtgagcggcaaagggcagaacgttggcaataactggatggggggggccagtaccggggatggtgctcctgttccttcccagattgcggataaattacgcgggaagactttcggtagttttgattctttccgtcgggcgttctggaaagcggttgctgacgattctgcactgagcaagcaatttagtgaagctgatattaatcagatgaaagctggaagggcacctactgcggactttttagaatcagtagggaaacgtgttaaaattgaattacaccacgaaaaagaaatatctcaaggaggggctgttatggatgtcgataacattaaggcgctaacacctaaaaatcatattgagacacataaaggaaaataa

SEQ ID NO: 152574 - DNA, 318 bp, Enterobacter cloacae
atggcgcttaatcaggaaaaatacctcgatgactttacatggaaagaactgaacgacgttatcaacttcatacgcaaagcagaaggtagtgcatctgaccacagctatgcactccagttactggagattaatttcaaggcaaacccactggatctcatctatcaccctgactgctggttcaatgatgaagcattgtttcatgcccggctgactaccgaagaaattggtggctacttaatgaaaaaatcaggtcgatggctcaacgatgcaccggatatccaactggtgtatgccatcccccaggatgtttatgattaa

SEQ ID NO: 152575 - DNA, 1149 bp, Enterobacter cloacae
gtgaaagattttactttctacaacccaacccgaatcgaattcggttccggaaaagaggatactattggtgcatacattgcaagcgctggcgctcgtaaagttctgctgtgctacggaagcgaacgtattaaacgtgaaggcctgttcgatacggtcagcggaaatcttgccgatcacggcatcgagtatatagaacttggcggtatcgtaagtaatccggtgatatccaaagtccgtgaaggggtggaactggcgaaacaccataacgtagatgctatcctgagcgttggcggcggttccgtgttggacagcgctaaggctatcgcggccggcgcacattataatggggacgtctgggatttattcgctggtaaaggcgagctttcctctgctttacctctattcgccatcctgactctggctgcaacgggaagcgaaatgaacccgtacgctgttgtcaccaatgaaaaaacccatgaaaaattatctatcggtaacgactatacgcgtcctgtggtatccgtactgagtccggcgctgatggcgggcgtctcccgtgattacctggtctattctgccgctgatattatttcacaccttatcgaagtgtacttcaccgcaaccgttcagcctgccattcagtcaaggctggttgaagcactgctaaatacggtaattgaaaccacacaaacgctcattgccaatccggaggatgaggctgcccgtggggaatttgcctgggcagcaacccttgctcaaaacggtttgatcctgtcaggctgtgccggattcagttatccgaatcatgcaattgagcacgctttatccgcacttttcaacgttccgcacggggcagggttgtccgttgttatgcccgcctggatgaaatggtacaaaaaccgaaatacactgcagtttgagcgtttcgcaaaatatgtgttcggactcagttcggcagacgacggcatcgcagcgcttgagaagtggttcgaagaaattggtacgccaacacgtcttgaacagctgaacatcagggaagcagatctgcccgctatcgttgagaacgtccagatcaatgtcaaagcgtttggtatcgccagtgattacccgccggaagttgtaactgaaatactcatgcatgctgtctga

SEQ ID NO: 152576 - DNA, 225 bp, Enterobacter cloacae
atggaacacgtgaaaagacaaatccagcagggggcagggaacgcctattatgcggggatgcagtggcgcggtattacactcggacacgccgatgctgcagcgcttaatcagtttgatatcgatatcagcaaagctcaggcacccgaagcacgcacctggttgcttcagaacaaagcggaattcatcgctcttatgctgggtattgagattgtaaagatcgggtag

SEQ ID NO: 152577 - DNA, 216 bp, Enterobacter cloacae
atgcgggcggcgcgtcagcgcggcccggttttcccggcgccgcaggcgcgcggtctttcgaggcgcggccagacggggaccgatgcccccttcgcctgctctgttcccgaatcagtcaacaaacatcgagaccgggatttgaaatcgatttgccagcgcccgcatgtgatcgagggtcagactgcgttcaccactgaggatccggctgacgagtga

SEQ ID NO: 152578 - DNA, 978 bp, Enterobacter cloacae
atgctgatggcgattcgctttactcttggcgtggtcgaggcggtggtgatgcccgcgatgctgatttacatcagcaactggtttaccaaaaccgagcgttcgcgcgccaataccttcttggtcctcggaaacccggtgaccgtgctgtggatgtctatcgtatccggctacctgattcactcctggggctggcgtgaaatgttcatcatcgaaggtattcctgcggtgttgtgggcaatatgctggtggatcctggtccgcgataaaccctctgaggtctcctggctgaatgagcaggaaaaagagaccctgcagaaggcgatggatagcgaacagagcaatatcaagccggtacgtaactatggcgaagcgctgcgctcgcgcaatgtgattatgctgtgcgccgtgcatgcgttgtggagcattggcgtatacggtttcatgatgtggatgccatcgattctgaaaagcgccgcgcatatggatattgtggcggtaggttggctggcggcggtgccgtatctggcggcgatctgtctgatgctgacggtctcctggctgtcagataagttccagaatcgtaagctgtttatttggccgttgctgctgattgccgctatcgccttctttggttcctggatggtgggtgaccacgcgttctggttctcctatgcgctgctggtgatcgctgccgcctgtatgtatgcgccttacggtcctttcttcgcgctgatcccggaactgctgccgcgtaacgtctccggcgtgtcgatgggcttgattaacagcttcggcgcgctcggtgctttcctcggcgcgtggctggtaggttatttaaatgggattacgggcgggccaggtgtttcttacacctttatggcgatcgcgctgttggcttcggtggtgctgatgtacaacgtgcgtgccaataacgaaccttcctcgtcatcggtcaaggcaaaaaaggtcgcgggttaa

SEQ ID NO: 152579 - DNA, 993 bp, Enterobacter cloacae
atgaaaaacaaccggatgacattacaggatatcgccaacctggcagggctgaataagatgacggtgagccgttatttacgcgaccccagccaggtttctcagcgcagccgtgagctgatttcaaaggtcatggaagagaacaactatatccctaatcgggcgccggaaattctgctcaatgcgcgcagcaaaacgataggcgtgctgatcccttcttttcgcaatcagattttcgccgatgtgttggctggtattgaatcggtaacctccgcgcaccagtaccagaccctgatcgccaactacgaatatgacccgcagcgcgaagagcgcgaagtgctcaatttgctctcctataatattgatggcctgatcctgaccggcaagcagcatagcgatcgcatgattcaatatgtacgcgccagcggtattccggttgcggaactgatggacttcggcggccagcagcttgatattcaggtggggttcgataacgaaaaggcggcgtgggatatgactaacgcctttctcgaaagcggcaaacggtcaattgccttttttggttcaatggacgaccctcgcgacctcagtcgttttcgcggcaccgagctggcgctggaggttcatggcctgaaggcgtatcacatggctccgcgcaccatctcctcggtcgcccttggccggcagatgttcctgcaaacgcagcagtcgcgcccggatatcgacgccattttttgtaccaatgacgatctggctgtgggggtattcctggaatgtcagtcacagggcaaagcggtaccaaaagagatcgccatagccggttttcatgggctagaaattggtcgcgcacgtttacagaaaatagccagcgtcattaccccacgttatgacatcggtaaaacagcaagcgaaatactgatcgcccgattggcaggtaaagacgcgccggacagcgttaatctggcctaccagatatattatggtgatacgttatag

SEQ ID NO: 152580 - DNA, 405 bp, Enterobacter cloacae
gtgaaagcgtactatatacttggacataacgttgcatggcttaacggtatatgcctgattctttttgttattggtgtggtcggtgcgctggcaatggttgccatccctgaaaaattcaatcttcgagttaacagaggcgatacattcatatactgtgcgcttatagcggtggttgggttttccgggatgttcgttatctccattcactcattttcgatggatgaacttgaagcaggtagacactggaaagatgactgccggacacttgaggtaaacatgccgacaggcgcttttaccagccctgttaataaactggactgtgatggcatcatcattaatgtgcctggtgggcagtattattcctatatccatcagtgggaattatataaagctaactcaaaatga

SEQ ID NO: 152581 - DNA, 312 bp, Enterobacter cloacae
atggctgaataccagttaagttttgatggttttgttcggcttttttttgcaatggtaatcattatctgcggttacggctatgtaattattggtgtttttataagagattcgctttcctgtattttaatgttgtttggacttacaggtctcagtgctttattttctttcatggaattcatggataaaaacatgtgggccggttctcctgatttgacgctgtcagtaataacgggattttttacagccacagtgatcttttatatgttttatgtcttgatttattactttgaacggatgggggcaggtgaatag

SEQ ID NO: 152582 - DNA, 219 bp, Enterobacter cloacae
atgcatgcatttatttttctggtgctgatgacaccgagtagtggcggtggtatttgggatgttactcccatgcctaatactgatgtctgcataaaaatgctacgggtactcgaagaacgtggaggcagaggttacggaattaatacaggagagtgcattgaaattaaaacccgcgagcctttgagcagcgtgatagaaacattgagtgagggtgggtaa

SEQ ID NO: 152583 - DNA, 411 bp, Enterobacter cloacae
gtgactgagtcaattaaatatctctggatgcttttgtgcgaggaatcgtcatatatttttatgttgatgctgattgttggcactgccgcagttatgtctttctttttacagcggttgtttgtgtcctggtggggtaaggcaatcattctgataatgtgtattgtcgtcgcgataacagaagtgtttgtctttattgagcctgagtcaacatacaaacagattcaaaccaataaacaggatgtcatctataccctgaaaaactgcagagtctccgcatttgaagcacagcaggcagggtttctggctaaagcaaaagatgcctggtcttgcccggatggcgtaacacggtatatggatgtgaaatacagggataagacagcggttaataaacttcgcacggaaggtaagtaa

SEQ ID NO: 152584 - DNA, 429 bp, Enterobacter cloacae
atgcacattatcaatgctgaagagcagcacattcccgccatacgccgtatttacgcccatcatgtcctgcacggcacaggcagcttcgagacggcccccccgaacacgcaggaaatgcttgcccgggtgaaaaacgttcagtcacgtggatttccctggtatatcgccctgcaggggggcggaaaagccttactcgatcatgccttaacatgggcccggtctcagggataccgccagatgatagcggttgtgggggactgtgcgaacgtcgcgtctgtagcgctgcatcttcgctccggatttactgaaatcggcacgctgaaggacatcggtttcaagcatggccgctggctggacacggtgttgctgcagtgtcagctgggaaaagggagctgtacgctgccggacagtccggtacccggacgctga

SEQ ID NO: 152585 - DNA, 126 bp, Enterobacter cloacae
atgttattcaatagtaatgcttttaccttacttacagagaatgtcattatttcctggcagttaccgatttggcgcgtaaaaatacaaaacccgaaattaatcgggtttgaattatttaacgattaa

SEQ ID NO: 152586 - DNA, 630 bp, Enterobacter cloacae
atgaaaacaaggtctttttctatttttttgcttaaagcaggctacaacgcacagaactccctcaagccagatcatcaacttctcgatgactttcaggctcaaaacctcccacagggtgcaagtttatttatttctgacagatttaaaacaactccttggtgggtgaattacttctcaattggcgggaatttagaacaagaaagtaagggagcgttaatttttcttccagtaagagatcgatgtttcgcactaacttttgggcacatttatcacaatctacgcgatgtttcctatgagtatgactttggtcttaaagtaacattaaacagccttgaacctaaagagttaaaaagtgctgacatagtggatcctggtgcatcaagaagaaaaagaatgcaagttcctgtcatgtctgacttaacctatttggattttgacagtaatagcgagattttaaaaagcttaacaggaaaagttaagccacagtatatagaactatttaaaaatgccactggctctacaaatttaaaagtaggtctaaaattagaaccggatgagcttatagttttatgtgaacagctactggatttatactgtctcttatacacatctgacgctgccgacgaatag

SEQ ID NO: 152587 - DNA, 333 bp, Enterobacter cloacae
ttgagaaccgtcgaaatactgcaatacaccttacgcaaaggcagcggtgccgctttgcatgccatcatgcaggaaatcagcgttcccctacaccgacgccacgggatcgacgttgtttcgtttggcaactcgcttcatgacccggattgctactacctgattcgcgcctttgacagtgctgaaagcatgactacgattcttgaaactttttacgcaagcgatgactggcgcagcggcccacgcgaagagattattcgcagcatcgaaaccagcattaaaacagtgatgaatctaccatcagaaagcgtggaaggtctgcggttgcaatcatag

SEQ ID NO: 152588 - DNA, 285 bp, Enterobacter cloacae
atgcaaatgctcgcgaaattaccagcacgtcgctggtggtatttaatgccgattatttttattacctatagtctggcgtaccttgaccgcgcgaattatggctttgccgctgcggcgggaattgaaagtgatttaggcattactaaaggcacctcgtcgctgattggcgcactcttttttctcggctatttctttttccaggtacccggtgcgatatatgcggtaaaacgcagcgtgcgcaaaatgattttctttagggaaggtgcgaataagtccgagatgtga

SEQ ID NO: 152589 - DNA, 183 bp, Enterobacter cloacae
atgacgaccgcgctggtgaacgacgaggcgttttccgcctggctatatcagcggaccccggcagcgcgctggggaaaaccggaagagttgattggcgcggctgtgtatctggcttcgccagcggcaaacttcgttaacggccatttgttgtttgtggatggcgggatgcttgctgccgtttaa

SEQ ID NO: 152590 - DNA, 501 bp, Enterobacter cloacae
atgcggctgacctgcaggtttttgaggctgccgttcagcgttgtactcaggtgcgcagcaggatcagaggtcgtgagatgcacgtcaaatcccatgtctgccagcctgacggcgatggcagcagccatcgtggttttccctacaccacctttgcccatcagcataatcaggccgtgttcactgcgagcgatatcattgaccaggccagagagcgataagttttcaggcgtgtattggatgttcgttaccgggatcggtaatgcctcagaaccggtatccagcagtcccttcaatgctgaaacaccaaccatattgactggctggagtaacagggtatctgtcggtagctcagataaaccggcaggaagatttgccagtgcctcctgctcacgttgccatatcgcagctgccagggcgtcatgttcagcttcggctttaggcagcacaccattaatgaccagatattggtttttcaggccaattgcggcgagttcttcatga

SEQ ID NO: 152591 - DNA, 339 bp, Enterobacter cloacae
atggggaataaaggtcattttactacccccatgatgcagcttcaggatccggatagaaccaaagttctgcttgttacgcttcctgaaaccacaccggttctggaagcggcaaacctgcaggctgaccttgaaagagcggggattcatccgtggggctggattatcaataacagcctttccattgcggatacgcgttctccgttgctttgtcagcgtgctcatcaggaattgcctcagattgaggctgttaaggatcagcatgctgaccgtatagcgcttgttccggtgctggcgtcagagcccgccggtattgaaaagctcagagagttgatgagctaa

SEQ ID NO: 152592 - DNA, 552 bp, Enterobacter cloacae
atgttaaccaggttggacacgataagcggcaggctggatgtatcggcaataaaccctgcagccatgacgaatgccagtgtcgtgcctttgctgaaccctaatgccagcagcatggcgatgactatcggcgtcagaataagtgccgcaccatcgttggcaaacagtgccgccaccgctgcaccaagcagaacgatatacgtaaagagcaaacggccacgaccgttaccccagcgcgaaacatgcaatgccgcccattcgaaaaagccggactcatcaagcagcaggctgataataattacggcaataaaggtcgccgtcgcgttccagacgatattccacaccaccggaatatcgcccacatgcacaacgccagatatcagagccagtcccgcgcccagcattgcactccagccgatccctaatccctttggttgccagataaccaaaacaatggtcaggacaaaaatagcgcctgccagtaacataaaacctcctgacagggcgactttgtcgccctgtatatgtcaaaaaattagctcatcaactctctga

SEQ ID NO: 152593 - DNA, 345 bp, Enterobacter cloacae
atgtgttttactgtcaacggcgagatgcagcttacgccagatacggcggcgttcctggccatgctttttgactttccactcgccttcaccgaagaccttcagcccggtggaatcaattaccaggtgtgcgatttcaccccgggtgggcgttttgaaactgacattaaccgactttgcgcgcctgctgacactggtgtaatccgggcagcgcaacggaacattcatcagtgtaaaaatggaatcaataaagccctgcgcagcgcgcagggtcagcctgaatacgcgtttaatgaccagcacagtcgtgatggcaaggtcagaatagcgctgaggtctgcctcgtga

SEQ ID NO: 152594 - DNA, 192 bp, Enterobacter cloacae; identical to SEQ ID NO: 151591

SEQ ID NO: 152595 - DNA, 345 bp, Enterobacter cloacae
atgtgtgttgctgtcaacggccagatgcagcttacgccagatacggcggcgttcctggccatgctttttgactttccattcgccttcaccaaagaccttcagcccggtggaatcaatcaccagatgcgcgatttcaccccgggtgaacgttttgaaactgacattaaccgactttgcgcgcttgctgacactggtgtaatccgggcagcgcaacggaacattcatcagtgtaaaaatggaatcaataaagccctgcgcagcgcgcagggtcagcctgaatacgcgtttaatgaccagcacagtcgtgatggcaaggtcagaatagcgctgaggtctgcctcgtga

SEQ ID NO: 152596 - DNA, 201 bp, Enterobacter cloacae
atggaaaacagatacatttaccactactgcgccgtagaaggaaacgcacagttagcaggaatcgcgcagcttactttccgtatcaaatcccagtcagatttgaataagctaaaggagttagtaactggcgaagactttaaaccaaaagcaattatctccctttcatatctcggaagagagtttgatgaagatggccagtaa

SEQ ID NO: 152597 - DNA, 294 bp, Enterobacter cloacae
atgagcaacatcgacaagatcgctaaacgcgcattaagagaagcggctgagagagcgaaagacaacttcatcccgtgctttagggcccccactcgcgatgttctggcgctgctggatgagctggaagccaaaaacaagcggattgctgagctggaggcgcgggatatcaacatcaaacagcaagcacaggctttattcgaggcaatcgcaaacccggctgaacattatgtacctgcatacgctcgttgtttaagagaagtgttgaatggcaccagcaccgctaaaggagagtga

SEQ ID NO: 152598 - DNA, 432 bp, Enterobacter cloacae
atgaaactgaattatgaagaacttgaagccaagtgcgcggcgctggctgcggagttgcgtgcagtcgaagcaatccacaacgaggcagtgttcatcacagacgatcgctatgagcagtgccctccggaagtgcagaagataattaggtcgctggccgtgatgcagattcctgcgtaccacgctttcctggctgaagtgcgggcgcaggccattgaatctttgcttaccgagtcgttcagggctgatattgcaggtgcgctggcagacttcgacggtatggatgagcaatcgctgcaaactttaatctggagcggtcagccaccagaacctgatggtgacgtttggtgcgtcgagtacatgtcacgtgcagcagcagttctaagaaaggttcgcgagttcgctgcccaacttcgcaaaggagtgcggtcatga

SEQ ID NO: 152599 - DNA, 333 bp, Enterobacter cloacae
atgcagcagattaaaaaccataaaatacctcttgatggcacaaaccccacagatttgaatgccttaaaagatattatcgaatctaattcgtatatgttcgaagagtatcttcttactgattttggtggagatgcgagatactcggttgttgatggttcttttgaaatcacggcgatagccgaaggatttttcgaatacacagccgagataaatttctacgcgggatgcgcaaacatgaacgacaccagttctgttaacgggactatggagttcgaaatcgaagatggaaatatcatcatcgagttggatgaaactgtttgggatgtcagataa

SEQ ID NO: 152600 - DNA, 327 bp, Enterobacter cloacae; identical to SEQ ID NO: 84280

SEQ ID NO: 152601 - DNA, 606 bp, Enterobacter cloacae
atgatttttaacggagagatggtgcgcgccatcctcgacggccggaaaacgcaaacgcggcgaattatgaaggtccagccagacactccagagtttggcctgcgacgcattattgagtcgtccatagccaatgagatcggaatgtatttttggtctcaagaagacgcccgtggaattaaagcgcgctcaaagcagttttcttgcccgttcggcgacgttggcgatcgcatctgggtgcgcgaaacgttctgcgcggttcctgatcatgaagagcctgctggttgttcggctctgctttatgcggcagacggcaacggcccgtatggtaaatggacgccttcgattcacatgccgcgctgggccagtcgtctaaccttggagattaccggcatgcgagtggagcgcttagccagcgtcagcgatgaagacgcggggaaagaaggttatcccgcaaatcctgcgccttacggcgggaccatggataaatggctgtggttccgcgggttatgggacagcatctatccggatcaaagcttcaagcacaacccttgggtctgggtaatcgaatttaaggtggtacccaatgttcaggataatccagtctaa

SEQ ID NO: 152602 - DNA, 339 bp, Enterobacter cloacae
atgaaaagtaattttgcatggggaaccttcaaattccctcaggttgggcaagaagttaatttctggattgatgaggactctcgctatgcgcagggagttgttgtgtattcaggtgataagggcgccacggttgatattggctatctggcttcatctggagagcctggtgacttctcgccaattactgaagaagaccgtaagaaatacgccttcatcaacgctctgcattacgatccatgcgtgattggtgagcatcgcttgtttaagagcactgctgaagcgctgtatgacgcaataaaggcgggaaaggtccctggtgtaaagctggaggcatcatga

SEQ ID NO: 152603 - DNA, 588 bp, Enterobacter cloacae
atgagcaacatcgacaaacatgccgtccaagcagttgccgatttgaaagctggttacaccctcggtcacgctgatgtggcaatcctgaacgagctggcgcgtatagcactggcatcgctcgaagtggagcctgtggcgtacatgtacaaagacaatcttcacgctgatgctcggtttagcctacatacaagatttggcaactggtctcaggaagatatcaacgagtacgaaattacagagattccactctacaccgccccgccagcgccggtatctgattcgcttctgtcggagcttttaggcattgcgaagagggccgcatatgaagcagacgagtgcgcacacgcggagtttagtgacgactccatggagcattcagccgcaatagctgactgggagcgccgcgcagccatgcttcagggtgccgaacttgtaacgacggctaacaagttgcctgaaccaatcaaagacaatcgcctcaattccggggaggaggctgatgattactattctggctatcaggccgggtggaatgaatgccttgaaactgtgcaagtgatttatgagggcaatccagatgcaaaatga

SEQ ID NO: 152604 - DNA, 228 bp, Enterobacter cloacae
atgcaaaatgaaagaattttttacatggataaagctgttgatttgttcaactcgctgcgagaagagaaggtttcagagcgcattgataacgctcatcttggagccatgggggcggttaacgttcaagtgtggacatctgtcttgggcgggacgttgcaatacgaaacttcaaacggcggatgcaccttgcgcgttattccagcagcaccgcaacaggaggataaatga

SEQ ID NO: 152605 - DNA, 297 bp, Enterobacter cloacae
atgactccactactctgcccattttgcgaatcgacagcgcttagcattggatattcattcagttttcttggaaagaaacgctacgtctcatgcagatgtggcgctcaagggccagagaaacgcaccaaatctgaagcaatttctgcatggaatagccgaatgaaggtgtggttttacagccccgaaacgctgacatgtgctggcgagcgcaggagaactgcggcttacattgatagccttaagcaagatggatttatgcctgagctaattgcagcaccgcagcaggaggtgaagtga

SEQ ID NO: 152606 - DNA, 243 bp, Enterobacter cloacae
atgagttttgattgcctattattcggagctggacacaagggcacaccgatcactattgatggtgattttgttgaaagaattatgggtcctgttgctgaaactactaaaaaagtaccatttgaagttaaaaaatacatggtggaaggctttacctacgctgtagctgagcatccgcctgtaagcttaacgcctgaaattgttgacgcggctattaccgcatctggaattcagccgctcgattga

SEQ ID NO: 152607 - DNA, 276 bp, Enterobacter cloacae
atggctaagttttacccgcgcatctccactttcctttctggttgctgggcgtttatcgcgtccctttcgctaaccagcgacatcatcagtcgcacagcattatcactgcgtcgggtggtggagcgagtcatttccgcagtcgctgtgaaaaccgcgcctgaaaaagctgattggcgaatcgtagagcgaatgtgcagcgaaagcgttagagagaagattaacgtctttggccgccaccctcgcaataccggcgcgctatgcagtccactgctgtag

SEQ ID NO: 152608 - DNA, 201 bp, Enterobacter cloacae
atgcgcctggtaaaagatatttcatttttttatgcgtgtatttcctttaatgggagtatggtgaaaagcgagtggtatttaaaatacatgtcagtatttaatcacttcttgtttaattcattttgctgcgcttacatcagtcaccctcatttcatgatcgggtttaactgggctatgcgccttcacataatcaataattga

SEQ ID NO: 152609 - DNA, 498 bp, Enterobacter cloacae
atgaatgataagttacaaatttatgctgataatattaaaagtactggatttattttagaaagtaaagtttctgattttttaaataatcatggttggggggttattaataataaatattatatagatgatgttcaaagtgttgcgcgagaaatagatattattgcttacaaagcgacaaaagttagagatgtattagtttatacaactctcataattagttgtaagaaaaatgaagaaaatgtttgggcgttattagtgaaaaacattaagcccaatgatcctaatattgattatgagccattgaaaaactggagtaatcacccaatactaaactatgaattgaattttaataacaaagagaaaatcggcgtgccggatggtattgtttatgaaaaaattttcaacgtaacaaaaaatgtttttgcttttcaagaaatgagtaagaaaagtggaagatcaaataatgataaaaatatattcaattcgatacgtcattga

SEQ ID NO: 152610 - DNA, 1008 bp, Enterobacter cloacae
atgaaaagcatagtattctttaacaacaaaggtggtgttggtaaaaccaccttattatgcaacattggtgcttatttatcacttgaaatgggtaagaaagtgcttgttgttgatgcggatcctcaatgtaactctactagttattgtttaggcgataccaaactcgaaaaactgtactcgttagataaacgtaatactgtagaaaattttatgagtccagtccgtaaaggtaagggttatttgcttgaacgcgtagagccaatcaaaacagatcgttttggttttgatctgcttcctggtgaccctaaattagcattaagtgaagatttattggctagcgattgggatcctgcaacaggaggaaagccacggggtttgcaaacaacatttgttttcgctcaattagcgagtatgtattctgagtatgattatgtcctttttgatgtaggtccatcactcggtgcactcaacaggtcagtacttatctcatgtgattatttcttaataccaatgtcagttgatatgttcagcttattagccttaaataacattcatcaatctttagaaaattggaaaaaaggtattgaaaccggtctcgctgcatataaatatgatgaaggcgaggattactgtgtcttaaaaaataaagcaacctggaagttagaattcattggttacgcaatgcaacaatacaaaggtaaaactgtccgaggagaaaaagtaaaggtcaatgcatatgaaaaaattgcgaaaagagtgcctaagataatgaaaaatgagatcattgatatctttgcgaataaaaaaatatctacatttgatctcggtcagattgaaaatatgaatagcttaatacctctttctcaactggcaaactcccctatattctctttaaaaggtaaagatggtgtagttggctctcattttacaaaggtgagcgatgctagggcgctttatggcgaaatatgccgtaaacttcttaaaaacatagggttgttaaatgattaa

SEQ ID NO: 152611 - DNA, 867 bp, Enterobacter cloacae
atgattaaatggcacaactctttagtcgatgatttagcccgccgccgttgtattctttttctcggtgctggcgtatcaatgaatagtgtaggtaatgacggaaaaattcctccaagttggaaagaatttttgacgcactgtcttgatagtattgataagccccaacaaatcaggaaactaattaataacgaagattttctcacagcttgcgagattataagatcaaaattacagcgaggtcaatttgactcattattaaaagaagagtttttagcacctaagtatatcaaggctgagattcatgaactcctttttaaacttgactgcagaattgttgttacacccaattttgataaaatttatgaaacgtatgtttcaaaagcaactgaaggaaccgcaattgttaaaacctattatgatgacgatatagcttctgtaataagagagaatggccgtgtaattttaaagatccacggaacaatagacaacactaagaacttaatattttcacgaaaagactatgcaaaagcacgttcttcccatagagatttttatgagattttaaatgcgcttagcctaactcatacttttctttttataggatgcgggattaatgatcctgatataagactattactcgaggattctttctttaaacataactccacaaaacctcattacttggtttcatctgataagagcattaactctgagctagtacctatcatagaggaaacattaaatgtaaatattcttacttataaagaaattcgtaaaagtcatggagagttgattaaaagtattaatgagttgcttaaactagttgagcaaaaaagattagaaatcaaacaaacaatgaactggtaa

SEQ ID NO: 152612 - DNA, 1338 bp, Enterobacter cloacae
atgagtgcacatgatatatttctcaagcattttcaatcatctaatttaaaaagaatttacaaagaagtggttttgttatctgcggcaacaggtatcgataatatgtctcatgaagtcttttggcgctttcatgatcacgaaatagaaacaattagaagaaagtgtttagctggtacttatcgctttaataaatataaactaaagcttataagtaaaggtaaaggtaaggcgccaagggaaatttcaataccaacaatcagggaccgaatcgccttaagagctatttgtgatttcttgcaagaggtttatgcatttgatttaaattttgagttaccacagaatatggtggtaaaagttaataatattattttgagtaagcagtatgattattttatgaagtttgatgtggcgaatttttatccgtcaatacggcataacaagttaatatcgagacttagagcaaaaattagagatgaaaatatattatctctaataggtaaagcaattagctcaccaacggtttctaagcctaatgcaagtgataaagctaatgaatgtggcgtacctcaaggattatcaatttcgaatatattggctgcaatatacttgatgaatattgataaacactttgcatcaagggatgatgtatcatacttccgatatgttgatgacttaatgatcctttgtcgttcagataaggcagaatctttgatagaaagtgttcttgtaaagttcagaaggctaggacttaaaatttatgatccaattaagaatcctgagaaatctagtatgggtttgttaaccgaaagtaagtttggttacttaggatattattttagcgagggaggtaaggtttcagcacgtgatggatctgttgataacttacgacaatctcttttatcgatttttacagggtttaaacactccagtattaaaagtcaagagtttttaacgtggcgtataaatctgaggattactggttgtgtattccaatcaaaatcaaagggatggttatactttttttcggaaattaacgatataacgttgcttcattctctagatgatttcattgctaggctctgtaaacgatataatgttaacttgcaattaaaatcatttgtaagggcgcactatcaaattaaacataaaagacgcgaaaccaaatatgttcctaattttgataaatataatctagaacaaaaggcatatgtattaaatcattattttaataaaagtactgaaaacttaacagatgaagaaattgagtataattttaataaaagaatagctaaacaggttaaggatattgaaacagatgttaaagatgcaggctactaa

SEQ ID NO: 152613 - DNA, 732 bp, Enterobacter cloacae
atgaaaagtagtacatttcctgtgaggcgtatcgtaggtgattcacctgcgatcatccataccaaatgggtgcaactaattttgggaggctttgcctctagtctgactagtctgtttacaggcgttacttattactaccttcggcgcctcacattaattagggattatatgatgagcgatttatctgataaaatatggtggacaagaaaagcgaaaattaaagctgagcgacgcctacttaattttgattactattctcaacttcttttgctttggtattcaacttttctagtatgttattctatttataccttagtaaaacccgctcaaaagatagaagaagcagcgataatggtttctttgtcagtgctaattttagtgttgactctttttatcaataatatgaattttaaaggccgtgcattattaattaaacaatgttacgagcgactgagtgtaatacataccgcatcactttccccaacaaatccttccgaattagataaagaatatcaagcagtgttaggttcgtcagaaaaccatttagaaaaagattttgcaaaagccatagtcgacgaatattttaatacgaatgataaaagccttttaacgaaaaaacctacttttatccatttcttcatgatagccatactttttcttcgaaatgtagcatcatttttgtttttgtttctttttccttttattatcttgttttcattgagagcagtctaa

SEQ ID NO: 152614 - DNA, 297 bp, Enterobacter cloacae
atggtcaccattaacgggacggtcagtcattttcacctccgtttttactgcgtaagctgtaagtgtagacaacccttcagtcttaaccaaacttctcctgtggagctcatttgtaaatcgtgctggcattcggcgctgcaatccgtaccatacacgacacactttcgcatgctggtttttaccggtagccgcaaacccgtcttttatcgcaaccagatggggcacgtacatgcgcagatggtgtatgaaatctatgctacatggatagaagagatgaacacgaagctgacgctttga

SEQ ID NO: 152615 - DNA, 2286 bp, Enterobacter cloacae
atgaaaacagctattctgaagataaaagaagatgtaaatcccagcgaaagtattgaatctttgcttctacagttacatacaaaaggtccaatagacaacaaattattagaaaaattaacctattataaattattccatcaaaaagatttttctttctatgaagataggatagttttggagttagggttgttttataaaaatactaaaccagatgatttgttttcatttattttgtcagggattggaagaacaaaccatagactttttaaggaatacttaacgcctgtccaagctagtataaggttagcgattcaagaagaaaaatatgtttctatttccgcgccaacaagtgcaggaaagtcattctctgtaaaagactacattgaagaattaaaaggggatgttgttataattgtcccttcgagggctttaattgctgaatatataaataatctcagagataaatttggaaaatcaaaaaatataatgatatcctcttttgctgacataatattcaacaacagaataggtttgcgacacatttttattttaacacctgaaagagcaagagatttattcccaatccgtgataagttaaaaatagacttatttttctttgatgaagcacaagtctgtgaagaaaaggaaagaggagttacatttgatgctctggtaagaagaataaagtcaaattttgaaaatgcgaaattggtttttgcccatccatttgttgaaaatcctaatgcacaaatgcaaaaacatggattggatatcagcaagtcttactcacacgcttatccgcataatactgttgggaaagtttttgtttttaaacattcgaatgagaaagattattacttctctccatatataaaaaaaggacatttacttactaaagctgttcctttcgatggttcattcgaagattttgcctttgatggttcaaaatcagtattagtatatgtttcgaaagcttcattatacaatggtcatttcaaaaaagattttgaaaaatttataaatcgctttaatgtcatctctaataaaaaagctctaaatattatttctaaagttgaagagttattgggcgctaataaccacggtcataaatcaactttagtagatctgcttaagattggtgtcgtgattcatcatggttcagttccattggaagtaagatttcttattgaggattttatcaggagcggttatgcaaaaatctgttttgctacaagcacattggctcaaggtataaatatgccgtttgatattatttggctagtgaacatgcgaatccaggcagataatgataaagagcgaggattagcatttaaaaatctaataggacgaagcggcaggctaacaaaagaaaacatatttgactatggttatgtgtatacaaaaagcccagagttgcttgctcagagaataacttcaacatacaaaatgagtgagaattcaattttgggaaatgttttagatgatcccaatcatgacatgaatgagtttgtttcttcaatttttgatggttcatttgatgaaaattataatcttccagtttcaaggataaatagaatatctggaatggacgttattttctgcattaaagaggcattagatatcatatttgaaaatgctgatggtagttctctcaaaggtgagcgcaataaaataaaaagagatacagttcgttcaaatctaaagtttgtttttgagtcttatatcggcagagatttattgaaaggagagagtaacgtctttgataatgcaataacaatactcttttaccttatccaaggtaaatcttttaaggaaatcgttgggatgagatatagctatgcttctaatcgtgatgaaaatagaaatggtgatgctccatttatacaaccagcgagtaaaatacccgatattaatttagaaaatgcatattcaatgttcaacaatattaaagctaagaatgtaagttatgatagaattgtattcgacacgtatgactatttagatactgtaatctctttttcactcacggatgcgtttatgggagcattccgtgtttattatgaaaggactaaagataataacgccatgaaaatgatggggttgcttaaatatggaacattaaatcctattcatactttattgcttagatatggattttctcctgaagatattgatttagttcaagaacatattaaatatatcagtgaggatgatattatttttaacaaattagaaaatatccctattgacatacaagataagatttcgtggtatctacctgaataa

SEQ ID NO: 152616 - DNA, 741 bp, Enterobacter cloacae
atgaataataaaaatattattagaacacaagatgatgttgattgggggtgctaccatgatgaattaaccagcgctgaagtaatggtgaaaatatgtgtaataagaataaaaactataaataaaattgcagaagaattaacaaaaatagttttggataaatcatggatgatggatttagatgctcgtacacaaagatgttataggtatactgtagaggaaacttcgaaattattagctgatatattcaacaaaataaaagctcaatcttcatctgaaaaggatattggcgttgaatttggtgagataatggtttcaatgggagcatcaagggcattaaataaacttttcaatcatgtttctcttccaattgcagagctttggaaacctcaaaaaaaacagaatgaaggatttgattttcatacagtttgtcctaaaaaaatggtcaattttggtgaggcaaagtattcaggtatttctaatcctcatggtgatgctttaacacaaattattgattttataaatgtagaaaagcatctaagagatgcacttcatttggaaaatttagctggggaagaagcttgtgacaacctagataacgagtctttcggtgtggttgctgcattttcaataaactctgaaaactatgatcttattattaaaaatgctttagaaagtgtgaagcaaaaaaatctcttaagtaagtgcagtatagtatatcttgtgggggtgatttgtaaatga

SEQ ID NO: 152617 - DNA, 789 bp, Enterobacter cloacae
atgccctggactgagacccgacctatgcaacgccttgattttatccgtgcctgccgtgcaggtacggattctttttcagccctctgccgtctcttcggcatcagccgaaaaaccggttacaaatggcttcagcgttttgacccctctgacctgtcatctctctctgaccggtcgcgtgctccgcactcccactcccggacagttcctgatgatatcgccgggcagcttacggccctgaggcaaaaacaccctgactggggccccaaaaaactgcggatgtggctgctcaatcatcacgtcgattttaccgtccccgctgccagcactatcggcgatatcctcaagcgtgaaggcctggttccggataaaaagcgaaaacgcagaaccccgggcaatcgccagcccctgaccatcatcagtgagaacaatcaggtctggagcgctgattttaaaggcaagttcaggctgctgagccgggaatactgtcatcccttcaccctgaccgacaatcacagccggtatcttctgagctgccggggaacggaccgggagagcgagcccttcgtcaggcagtgcctgacggatgcgttcctggagtacggtctgccggaagttctgagaacggataatggtcagcctttcgcaggaacaggtatcgccgggttaagtcgccttgcagtctggctgataaagctgggcatcagaccggaacgtatcagaaaggggcatccggaagaaaacggccgtcatgagcgaatgcaccgttcgctgaaaagtgcagtaaaatag

SEQ ID NO: 152618 - DNA, 357 bp, Enterobacter cloacae
atgacgatggaagaacaacagcggtggttcagtgtctaccgggaagaatttaactacgaaaggccgcatgaagccctggcgggtgcaacgcccggaacggtatggcagccctcaggccggcactgggatggcagggttcctgaatatgcttatccggaaggaggtacggtctacagggtgaaatcaagggggacactctatatggggaaaaaggggacggtgttcctgagtgaagcgctgactgatgagtacatcatgctggaagaacaggatgatggcctggaggccatcatctttaacggaataacgcttgcgtactacgaccgaaaaacccagagtgtgctccggatagactga

SEQ ID NO: 152619 - DNA, 1206 bp, Enterobacter cloacae
atgggatataaagtaaagaaattcatcatgagtaatggggagcgaggatgcctgatccttgataaaaatagtaatttaccagcttactatcaaaatctatttcttactacagacataagaaatagaggcgcaaccgcctcaactatggaaatagttgcaactaacttactaatttttagtaatttcttagatagtaggaaaattaatatagttgagagaattgagcttaaaaagtatctcagtgttgcagaaatagatgatctggtaagatatgcgaaacaaagattcgatagacaaaaaattataaatataaaatcagcaagtaataagtttattgcgaaaagaacctttagttatagagtacacgttttttcacgctaccttaagtggttatgtggattagttcattcgtcaaaggggattcatgcaaagtatgaagtagaagtatttattgaaagtatcagagcacatattccaagaaacagttcattgaatatgaatgaaatatctgaaaaatcgttaaacgaagaagagatcaatgtgcttttccgtctattggaaattggcgggattgaaaaccctttccataaggaagtacaggtcaggaacagactaatatttaccttgctcttaaatttaggtttaagggctggagagttgctcaatcttaaaatagatgattttgatctcagagacaacactttaagtgtagtcagaagacatgattcaaaagaagatggaagatcttatcaaccattagtaaagactggagaaagggttattccgttatctgatgagttagccagtgaaatttttgattacataagcaatagcagggaaaaaatgacaaaaaggaaaaaacataatttcttattggtggctcattgcaccggaaaaaacgcaggagaacccttaagcatttcagcttatgagaaggtgatatcaacactgaaacgagcaagtccaaagctatataatctttcaggtcataggttaaggcactcttggaattatatgtattctaaaggaatagaaggcgctgaattagaatatagtagaaggaaagatttaaggaattatctaatgggttggtcaaaggagtcaatcatgtgtgatagatacaattttaaatatatatcccaacaagagaaggatgtcgtcctaaaggtctataaatcagtaagtaaaataattagtggggtttaa

SEQ ID NO: 152620 - DNA, 432 bp, Enterobacter cloacae
atggcgacaccagacgcgccatgcgtctttttttacgtcgttgctcaggcacacccatttttcgggctgtggtgcttataccttagcccctgtcagataatggtgatccgggcggggcagccttcgggctggccggtattcattgaggccggtattcctacccccgtccgggtcaccacccatgagcgtaggaactccggtggtggcaataaccgctactcaatggaggttgccatcatggctactaccctcaccccgtcgtacccgcagtttgtctttgtgtttgccgccgttcgtcgtgcagaccgtaaaccccgtatctttatgctccgcaccgttgccggtgatgaacacgccgcacgcatgtccctcgttcgcgactacgttctgtcgttcgctggccgcctgccggttgcggaggtgcgtgcatga

SEQ ID NO: 152621 - DNA, 267 bp, Enterobacter cloacae
atgcacaccgctttttcttccccgtcttctgcccctgccgcactactaatgccggcttctgatgccgttcaggaacgctttctccgcctgcccgaagtgatgcatctgtgcggcctgtcccggtcaaccatttacgacctcatcagccgcgaggccttcccgaaacaaatcagcctgggcggcaaaaacgtggcgtgggcgcagtctgaaatcaccgcatggatggcagatcgtattgccgaacgcaaccggggctatgacgcatga

SEQ ID NO: 152622 - DNA, 177 bp, Enterobacter cloacae
atgaaactacgtgattcgctggcagagaataactccatccttttacaggccgaagccagcacctggcaggaagcggtgaagctgggcgtggacctgctggttaaggcggacgttgtcgagccgcattattaccaggccattctggatggcgtggcgcagtttggaccctatttgtga

SEQ ID NO: 152623 - DNA, 882 bp, Enterobacter cloacae
atgaagacgttgttttctggtcgttcagatatgcctttcgccatgctgctgttggcccccagcctgattttgctggggggcctggtggcctggccaatgatttccaacattgaaatcagttttttacgtttaccgctgaacccgcgtattgatgcggtgttcgtcggcctggataactacattcgcattctgggcgatgctgcgttctggcactccctgtggatgacgttctggtatacggcgctggtcgtgctcggcagcaccgggctgggactggccgtagcgatcttctttaaccgtgaattccgcatgcggaaaacggcacgttcactggtgattttgtcctacgtgacgccgtctatttcactggtatttgcctggaaatacatgttcaacaacggctacgggattgtgaactatctgggcgttgatctgctgcatctctacgatcaggcgccgctatggttcgataatcctggcagcagttttgtgctggttgtcctgttcgccatctggcgttacttcccgtacgcctttatctcgttcctcgcgattttgcagaccattgataaatcattgtacgaagcggcagagatggacggagcaaatgcctggcagcgttttcgtatcgtgacgttgcccgccatcatgccggtgctggccacggtggtcacgctgcgaaccatctggatgttctacatgtttgcggatgtttatctgctcaccaccaaggtcgacattctgggcgtatatctctacaaaaccgcctttgcgttcaatgacctgggtaaagcagccgccatttccgttgtgctgtttgtgatcatcttcgctgtcattctgctgaccagaaaaagggtaaacctcaatggcaacaaataa

SEQ ID NO: 152624 - DNA, 1257 bp, Enterobacter cloacae
atggcgcgtcagacaaagccccttaacaacaccgaagtcaaaaattccaaagcgactgaacgtgccactatcctgtatgacggggacggcttagaactactggtgaagcccggtggctcaaaactctggcgattccgctattacaaaccttttactcgcaaacgcgccatgattagctttggtgcttaccctgctgtatctctctctgaggcacgtcaacttcgtgaagatgcccgtcttctattaagcaaagatattgatccgcaggaacataaaaaaactgaacagttgcggcaaaaaaatgccactgagaacacttttcaaaaggtcgctgccgaatggttcaaaaccaaagaatcagcggggctggcaactcatacgttaaacgatatctggcgttctatgagtaaatatgtattcccacatattggctctatgcccattgctaacatcacggctcagcagttcatcggagcgttagagccaacacacgcagccggaagactcgaaacggttaaacgtctaagccagcgtataaatgaagttatggattacgccctcaattgtgggctggtatctgtaaaccccgcagcacgaatcgggcgaacatttcataaacctaaggtaaagcaccgccctgcccttcctccagagcaactcccccttttaatgaaaactctggcatttgccagtatcggacgacaaacccgatgtcttatcgaatggcaattacttacgatgatccgacctgccgaagcgtcaacgactcgctgggatgagatcgactttgacgcaaaagaatggcgtatccctgctggccgcatgaagatgaagcgtgagcatatcgttccgctttctgagcaagctttggctattctggaagtaatgaagcccatcagtaagcatagagattatgtttttcctggctaccgtaatccacttgaaccaatgaatagtcagacagcaaacatggcgcttaaacggatgggcttcaaagatcttcttgtcgctcatgggatgagagcgattgcctcaacagtccttaacgagaaaggatttcctcctgatgtgatcgaagctgcattagcacatatcgatactaacgaagttaggagagcctacaatcgcgctcaataccttgaacagcgtagagagatgatgagctggtggggtgagtatgtagaagcagcatcctttggaaactcatcaatcagtgttattggcaagttaacctcaacagaaggatataccgattaa

SEQ ID NO: 152625 - DNA, 207 bp, Enterobacter cloacae
atgatgtgcaaaggggatagccgttgcaagcagatcgccgaaaccggtttcattttcgtgaacagagtcaagtttgttgccctggacagcccgcacagaaaaaagatcctcgcgccgagaataggctcgcaaacgtttgcctggactgttagaattgcgccgatttttcttactagctatgcaatcgcgtggggatttaagccgtga

SEQ ID NO: 152626 - DNA, 600 bp, Enterobacter cloacae
atgatgcgacctgttcagcaaaaagcccctttttctggcttgcatcctttgtatgtttcctggtacagtttcgctgttgccgcaaaatcggcaaccgggcgtgagaacccgagcaactcgaaggcgacaccagacgcgccatgcgtctttttttgtgtcgcaatcaacgccacagagcgccagattgtggtgtggtgtgcggacattcgtgcaggtgtgactctccgtcacctgtccgtttctgtacattatgccatcatgtcaatggtagctcaggcggggcagccctcgggctggccggtattcttcgaggccggtattctcacccccgtctgggctatcgccactgagcgtgagaactccggcgatagcaataatttgctactcgaaggaggttgccttatggctacgaccctcaccccgtctcaccctgaatttatctttgtgtttgcggccgttcgccgcactgagtgtaaaccgcatatttgcatgctccgcaccgttgccagtgacgaacacaccgcacgtcgttcccttgtccgcgactatgtcctttctcttgccgcccgtttgccggttgtggaggtgtcacatgcctaa

SEQ ID NO: 152627 - DNA, 753 bp, Enterobacter cloacae
ttgcttgttaataaatctaaggccttgagtttagaggcgaattctagatattttgattggtataatagacgcacgcgagagcgagaattggataaattaaaagatatgtttgatgaaggtaatgagtttttatcagatgaggaatattatgaaaagcttgatttttcgccatttgaattaagggataatgtcttagtatacatacgcaatgctattgaggtgcgtaaagaggaaaataaaaaaagacagacaggttattacggggtaatgaacacttttagaacacctttaaatatcttagaaaatgatgtgcaggaagagtttgaacttattgatgctctcaaagtaaagattctagcaaatataaatgacattatttatgtccatgatgagattgtaaaagaaaagtatggtaaaaatctgataacaatctcgattttagcatcatcccttttgtttgtattgggcgttatttatccacttagttttattcctaaagttattggtgaagatattaacattacttttatggcatttttcgatgttttgttttcgattaaaggtttttttctttctttgctttctattgtttttttgagcttgatgatggcatttttatatattaatgtaactctgcgatttgagagtgaggtaatatcggagcttgaaggctatatgaatataagcgcctattctgaatactttgaaaacgagtgtaaaaacagcaggtccttgcaagacaaggccgtgtga

SEQ ID NO: 152628 - DNA, 1359 bp, Enterobacter cloacae
atgccaaataactaccaccaatacatcgaagacgttagtgacgatatcaaaacatgccttgaagggatgggatgccagccaatactttttgttggttcaggtttaactaagagatatatttctgggccaaactgggaagaacttctgcaacaacttgctaatgaatgccctaacatcgataaaaaatttgcttactacaaacagaaataccctgagctaattgatattggaagtgtcttttccgattcttataatgagtgggcatggggggatggagaaaaggattttccacaagagctatttgaagcagggaacgaaccaagcatttattttaaacacaaaatatctagcgtctttaacgcattactacaagaaaaagaaattgcagataatggggagattgatcttttaagaaaaatccatcctcattcaatcatcacaacaaattacgacaaactacttgagtcaatttaccctgaattcacccctattgttggccaaaaaatcctatatgctaaccatggtagcattggtgaaatacttaaaatacacggttgctgctccatgcctaaaagcataattataaatcgcaatgactacgatgattttataaagaaaaagaaatatttaagtgcgaaattgcttactttttttgcagagcaccctctcctatttataggttatagtgccgaagactcaaatattaaaaacatactatcggatattgatgaattactgtcagaaaatggggatgtcattcctaatatatacattttagaatggacggataaacaaaatgagaatgaataccctcgccgcgaacgattgattcaggtatcagcgaacaaaagcattcgaattaaaagtatagttgcaaatgatttttcttgggtgttttcggcgtttggcgcgaatagagcacttgataacataaatcccaagctattacgagcacttctagcccgcacttacgatcttgtcagaactgatatacctcgcaatcctgttcaggttgattaccgcgttttatcaagcatcagcgaatcagaaggcgaactagctaaattatatggcatagccacatcatcagatggtatggcatttaatgccagttatcctttcactctaaccacgctagggcagtcacttggcttcaaaggttggcatgatgctaacaagctattagaagtagtcaaaaacattactggcgtagatattaagacattcgataacaaataccactatgcaataatgaatggtgatgagattcagtcccataggtattcaaactatctacgagaactactggaaaaagtcagagacggcgaacaatttgaacttggaataaaaacaccttaa

SEQ ID NO: 152629 - DNA, 591 bp, Enterobacter cloacae
atgtcagataaattattcagacctacaacgaatttttttaaaactgatatcgttgattctgattatataaaagggtattttaatgtttttaaaagacatggttatataaatgaagatggtagcccatatttgctaagaacacatcaactgaggcatcttctcaacacatttgctcaaataaatggtatggatgaatttagtattgctcgctggtctggacgtaagcttatttctcaaaatgtttcttatgaccacagatcgcatcttcaaatgtctaaagcaataagagaacaaaagttatcagtatgtgttaatgagcacagaataaaggatattccagtggtggatcttaatgagtttgactcacttagtagtggtgcagtacttgtatcaaaacatggctactgcaagcactcatatgcgtttaagccgtgtgaacattatccgattgagaattctggtttagataacgaaacgatttcaaacattcacgataaaattttaaaaagaacactgtatgataaacatgatgggaacataaatgctgatagatggtatgaattccataagagaataaaaaaaggagagtaa

SEQ ID NO: 152630 - DNA, 666 bp, Enterobacter cloacae
atgagcatctccaccacgaaacgccgcaatgaagaagtcaatgttggtctttctgatcgccggaaagcagagattacagccccaaagtttgatctgtttggtgaaacttacacgtttgttaagactttctctggcactgtcattaattccaacccaagcaataatcagatctgggtaaaaaccgacgctggggatgagaagcagatttccgactatggtatccccttcagaagttcacacactatttataaatacgagcttcgccagtatagtgaggatggttcgtataatgtgtataaagatgcacttatcgttaataagaacacgggagaacatgaagtaaacttaaacaggaaaaaagttgtcatacccgcttttctgacaatgctgttccataatgcttctacagcatcgtattacagagcaatgcctgtttcgaaactattctctattgttttcattttactttgtactgctgcacttatttcatttctcacattgccttggggctttaaagatggatatgtgtgggatgagcacaagtatatgtggctcacatatttcctatcaaggatcggaagcttcgtttgtatcaaatggattaaaagaagaagcgctagatttgatcatgaaatcagaaatcttatcgatttagtaaaaaaataa

SEQ ID NO: 152631 - DNA, 1305 bp, Enterobacter cloacae
atgaagggaatgcaaaaaatccgcaggggtaagagcttcgcaggggtcgtgctttacgcattaaaaccagcttctcatcataaaaaagatccgatagtaattggcgggaacatggatggaagcgatgtcggagagttgattgcagaattcaatgcgactaaaacgcttcgcacggatgttgctaaaccagtctggcacaatgcgcttcgcttgccgaaaaacgaagcgctgacagatgctcagtggtcagggattgctgatgattacatgtcccgaatgggcttctctgaaacgcacctcagatgctatgtccttcatgatgatgcggccggccagcacatccacattattgccagtcgtatagatctatccaatagaagtctttacttgggcaaaaatgaaaacctcatcagcacccgtatcatccaacagttagaaatagatcaccatctgaccaaaaccaaagggccagaatcggtagcatcaccatccccagcttcgctatccagaaaatccccgccccaaaaaccgataatcgcaataccgaagcctaaaaagctatcgcgtaacgaagcgatgatggagaagtataaaggagagctatcacccaaatcggttattcaggaagccctggaagcattacttgtcgataaaccatccaccactgattttgtgatgcagcttaccgtcaacaatatcaaagcgcttccgaatattgcctcaacagggaaaatgaatgggttttcattcgaatatcaggggattgctttcaaagcttcgcagttaggtaaaggttattcctggtctgccttacaaaacaggctagattaccagccggaacgcgacaatgctttcctgtttgcattgaaaatcccatcagtcagtaaggcatcggttagcgaagcgcctgatagtgccatagcaacacatccccatgaaatcacaacagaagacgttaacagtcctgtcgaatcgcttatcctcgacaaacgagctgctggtcaggacgaatacactaacgcttctataaagcagtttcacttagaagatggtgctggtgctaaagaatcgttaaaagaagcccccgaccgaagctatgcagtttcagccttcaggtggttggaatacatcccctacctcgatgtaatttatcgtgtgttgaaaaacctcaaagtccccacgctgaaacgtcctcgaaaacacaaaaccatcacttgtgtgaagacgatagatataacacctctccccaaaaaaaatcccattgaatcaatatctcaatctaaaagagcttcgctttcaatgtga

SEQ ID NO: 152632 - DNA, 438 bp, Enterobacter cloacae
atggtcgaaagtaatacttttaataagatcgttgtaagtaagtattcccgtaatggaagcgttagcgaagcgaagctctcacacaaccatcttcgttctcattgcatcagtgtcagattaaatgatgaagagctaacgcttctcaatgagaaacgaggccgtcatcgtaaaggcgagtggcttcgcttatctttacttaataaacttcctgctgtcgttccagccattaattttgaagcctggaaaacccttggtgagatttcgcagaagctaaacaagcttgtggctcatcttgatagcaaaagctatgaaagctctctgacgcaaactgaactcttcgccgtaaagcgtcaggtctcagagcttcgcttgcatttaattaccgctgacctgtggagaacttcccatgaagggaatgcaaaaaatccgcaggggtaa

SEQ ID NO: 152633 - DNA, 417 bp, Enterobacter cloacae
atgaaaattaatgtaaccatatctaacggtctaacgatagaagctgaaaaaaatgatgggtttattccttcgagcgttgtggggataaacacattagaattgttttttattgaggaaaactataagggagttgtatataaatcaatgatcagggttccattacttagcgagtatttaaatgatcaagatgttctattagttaaaaaaattgatgaaaataaattttcttttgagaaggttgaaggcttttctctcgaaaataaaatggtaatcataatgccaagcagactctatggctatctccatgatgataacctacactttactcctgctctttttacagctccaattgttaatgaaaaatatgataatcttacagataaattatttttgatttccattcaattcgatttttaa

SEQ ID NO: 152634 - DNA, 519 bp, Enterobacter cloacae
atggataaagccttaacaaatgctaaaaataaaattaccatattaaaggaacaactaactatactaaacagagattattctaaaaaaactatcgctgatatagagttaacgttccatatttatagcggtagacttatccaaaactaccaacgtggcttaggactatttatagatgaagggaatggagatagactgaggttctgcacagcagaaaaatcagaacatgacgcaaccatgtcaatgagttctggacaactatcggcattaagtttggcctttttcctatcacttaataaagtgtatgcgaagtccccccttgttctgatagatgatccagctcaatctcttgacgagataaatattgcttctttaagcgacttactacgctgtgagttaagtaataggcagttgatactctcatcacatgaagataatatttcttcatatctcaggtttagatttatgcgtgcaggcttatcgcaaaaaccatttaacatgcaatcacatactaacaaatag

SEQ ID NO: 152635 - DNA, 1239 bp, Enterobacter cloacae
atgtctaacatagaggaaacactgccaggaagtgcgatcagttcttgggggggctttgtttaccaagggaaagtggctctttatcactgcctgaaattattaacagagaaatcatttcaacagagaataattgatgattttgagttgcaattagatagcactgatgactttgctatttattgtgatggcaaggtgatttcaactcatcaagtgaaagcaaagttatcgcaatatcgttctgaatatgtcaaagctatttataaagcagcatgtatagctactgactgtgatgaagatacaatcagatattttcatgtagctaaaaaacttgataattttgaaaattacataagcaatgatggaaaaatagttgagttttacagttatggcgatattaaatactgtttactatcaaaaataaatgaattgattgatgagcaaattgaattatttttagataccaataatttgattaaaacaaaaaatttaattattgaaaaatctactttactctctgaatttataaccaacaaagtaattttgattcacaacttagttcataagggacaaactcaagactatgctgcctaccataatagaatagcaagtagcatttttttggcgctactaacctcccctccccttaatcgtacagacgaagtataccatgcattattaaccaaagaaaaaataacaaatattattgaaactgagttctacaatgacttagacgcttttagcgagaggcaaattgaatcgatatcaaacgttttcagatttatttatagcttaaattataactctgccatacagatgcatacctctttgcagcctcatagacaaaacaatgttataaatgaagatgatgtccgggattatcttgatgtagtatcagcaatatctcacataccaaatctgataggcttgcctcattattcaaaaaaaataaacaaataccttccaacagctttgacaattagagatggaagaagacgaaatacttcattccaagaagagttgaaaaaacacataagggataatgccacgcttgcatcattgctttatgaatataataacataatagcctataaagtatccgatgaaacgatagtatcagcaacctcagaaaaaattacaacagttaacgacactaaagagaacaataaccatattgtaagggaatttgatttaagggttatatctactgataaagcagaggcggaactaaatgctaaatga

SEQ ID NO: 152636 - DNA, 2328 bp, Enterobacter cloacae
atgactctacgattgcagacggaatcacccgctgaccaggatatgtttagaggcagcagtcatgaaaaagttgcagagaatgtggctcagatcatcaggacacctgatgtcaatattattggtctggaaggtgagctgggttcaggtaagtcaacaatattgaagttcctgcagaaaaagcttaaagatgattttacgttcattaactttgatgcagaacgttaccatcatggctcaactaaaaaagcgcttatcgatgtcatccaccacggggtcagcctacaatgtccgggctcccgggatgtgttggataagtataaaaatctggctctgggtaacatcgttgaatacgacaagagggtcagcagcaggctaagctggttgaccgtcgtttttattttactgtcattgctttccgtgcagatgcttcgttatgtgctaacagaccttaatcaatattttactaacaaggagtcattattagggtggcttttttatgttgaggtggccgcgtttctttctcctgccattatggtcgcaggactggcatgcctgcagaacatggaatggtacagaaagaaagggtattcgagtattggtgatttgttcaaacgcaacagtactgacaggattgaagagacttggctagttaataaggaggtcggagctattgagctggctgaagctctgcagggatttacctccaaagaggtcatttcccatggagatcgcttcatccttatcattgataatctggaccgaatcagtgcagacaaagtgaaagagctctggagtgatatggagcttattgccggagccactcatgaacacttcaggatagtggtgccctattcggcaagacaggtttcagcctcactttctgtggcgggtttcagcgggcgtgagtttattgcaaagcggattcctgtaagttttcaggttcctcctcttatttcggcaggatggcaggaagcgttaaggcagtactggaaagaaacagtaaatgaggatgcagggatagcgtgccgggaagcaacggtgttgcttgagcgctggaaaccctctgagtatcctcgtatcacaccgcgattaatgaagaagtttgttaatgatattcatattctgaaccttaccgttcctgcaacagaagatcatcgccatattcttattgctctctacttactggtggtcagatacggggagcgagatattaaagtattacttcgcgatcccaaagctagtcagaccgaacccggtattgctccggatgattttgacgagatgctctcgctaacttatcaacaaatatcccgaatttttaataacgatacagaaagatggagcgaatttctgatgagcatccactatcagtccacggtggagcttgccaggagcgagttgcttgatacgcctcttaaagacgcgattggtgctataaatatcccacggcttgaagaactgacggccttgtggggtttcgctgaagcatggcagcgagtggcaccacatattcagatgcgagactggctggtttcttatagccggatggatgagaagtgtcaggctctcgccgaaccgcaactcaaagtcgcagtgcaaatgctgaatcagagttatgctgtttcactcagagaaaagaatgatgaaggtttcgtattgagtctgcagaaactgatggctgacgggcggataagcctagagcctttcgtcgaaaggcaaatatcgtttattgtgagtaaacttgatgaaattcaggattcagaaaaattggaggctgaatccacgaagacgttgctgcaggaagctgattcatactctgttctggccggtgaatcactactgaataaaatggagaattttgtagatggcgtattttatgtggaataccttgtcaataatgaagagaccttgtcaaacctgaaaattggcacactagatatcggaaatcacggtcgggaggagatgttacgctatggagctgagcaacctcagttagacctttttaatccgggaattatccggcatatcaatattgcatcgaaggcggtacagaacgtaattggaaagaatgatggtacaggtggggctcaggttagctctgcaataatgacgcttaaaaatcgtcaggttgttgaggacgttatccatttcagaaaaattgttctgagcccggactggaataataatgttttaaatcaatattatcttaataatacggcgacgaggaatctcttccctgcggaatttgctgcacaggctgttgctcacatggtgctccatggtaactatgccggtatcgagtcgtacagtgaacatattggtgagtag

SEQ ID NO: 152637 - DNA, 207 bp, Enterobacter cloacae; identical to SEQ ID NO: 26487

SEQ ID NO: 152638 - DNA, 729 bp, Enterobacter cloacae
atggcacacgcttcggcccctcaggcggtattcagtccggagcaggaggctcgtatcggagaaatcgctgccgactatctgatctcccacccggagattctcgtgacggtcagtcaaaagctgcaggaacagcaggaggtacgtaagcagaaaatgtttgcactcagcgtgatggagaatcaggcgaaccttctgcatgatccggacacaccggcttacgggcctgaaaatgcaaaagtcgcggtgattgaattctttgattaccagtgcgtgttctgcagccgctttgcgccggagctggagaaggttatgaaagcgcagccggacgtccgctaccactttaaggagtggccaatttttggtggtcgctgggaagcttcatttcaggcagcacagcaggggctgacggtctggcaaaagaaagggccgcaggcctatgtcacctatcacaatgccatctacgccaccggtcataatgaaggcaaactgacggcggaggatattcacggagcagcgtcaaaggcgggactgaccaccccagctcctggcgaccataccgcatccctggagaaaaacagtaacctggctgaggcgctgggactcaccggaacgccggggatcatcgtcatgcccgttagcggagcgactcctgataccatcacggttttcccggaagccgtaaccgctgaaagactccaggcagcaatcctgaaagccacggccagatag

SEQ ID NO: 152639 - DNA, 567 bp, Enterobacter cloacae
atgcgactttttggttacgcacgggtctcaaccagtcagcagtccctagatattcaaattagagcacttaagaacgcgggggtaaaagccaaccgtatttttacggacaaggcatcgggaagttcagctgccagggaaggacttgagctgttgcgcatgaaggtggaagatggagatgtcattctggtgaagaagctagaccgtcttggtcgtgacactgccgatatgattcaactaataaaagaattcgatgccttgggtgtggcagtccgattcattgatgatgggatcagtaccgatggagaaatggggaagatgatcgtcacaattctatcagcagtggcacaagcagaacgtactcgcatctttgaacgaacaaatgaaggaagaattgaggccaagtctaaaggaattaaatttggcagaaaacggaaaatagacaggaataaaataaaatttatgcatgataaaggaactggagcaactgaaatagctaagcatatgggtattgcgcgttcaaccgtatataaaattatcaattcagaacgttcaccaatcaatgattga

SEQ ID NO: 152640 - DNA, 201 bp, Enterobacter cloacae
atgagcatcccctctcactatcgacaaaaaaacgtgaataaaaaccgccgatcaaagcttaaagaaagattgaagagtctgatagataaatcagatgcaagcaacggcaataaggttttcctgaaacaaaacatagcttcattaatgcaagagtatgcagagctatgggaatgcagaaacggcaatggagagagctcatga

SEQ ID NO: 152641 - DNA, 387 bp, Enterobacter cloacae
atggattacagcaagctgagtgactttgagattaataaggctgttgcagaaattgctatcaatggcgactggttgcatgaaccaaccgatgaaagtccatcatggttttttaatcacggggtgcaaggtaaaaataccgtcaaactgcccgattactgcaacagcccggcggacgcatggccgataatttctgcaaaccgaatcagtgttgaatacgattccgaggatcaatgtgatatccctgctgagtgggtaaccgcctacggaatttgcgggttaaaggtacacattgtgtctcatcagccctgcgataaagccctgcgcgcggcgatgatcgtgtttttgatgatgcaggagtcagctaatgttcaggataatccagcctaa

SEQ ID NO: 152642 - DNA, 1173 bp, Enterobacter cloacae
atgaaaacagtctcccgcttcgatgtaggcgaattgcgtgcgtccgtaaacgaggatggctatctggaggacgtaccggtagtaggtcgcgttggcatccagttgtaccgaaacccagatggctcagtgcgtcgtgaattacgcccacctgaagaagtattcaacgctgactcactggctagcttcaaaggaaagccaatcacgctaggccatcccggcgcggtgaattcacgaaactccagaaagcatcaggtcgggacgatgctggatgttggcagaaaggacggcagtaacgttgctgttcccatcatcatccatgctgacgaagcaatatctcaagctaaatcaggccgcgcaaggcagctttctcttggttatcgacttgaccttgaagagcgtcgcggctggttcaaccgaaaaactcaggaagtcgttttcagagacgacgaatccgagaaattccctgatgggtacataagcgctgactgggaagagttcgacgccgttcagcgaaacattcgcatcaatcatctagccctcgtatctaaagcccgggccggtgatgtagcaacactgaatctcgacggtgatgaggaaatcaccttagacgatgacgacaaccaaccaaaaggtaaaacaatgcagaaattgcgactcgacaacgggcttgagtacgatgcttctcctgaagtcgtcgtggcgttcaacgcccttaaacaggatgcagaggacgctaataccaagctgtccgaagcgcaaacaaccatctccaccatcacagcagagcgcgacactctaaaagctgacgcagcagagtttgaaaacaagctgaagcaggctcgcgaagatgcagagaaaaccatcaaagctcgcaccgaactcgaagcaaaagcagagaagcatggcatcaagtgtgatggactggatgatattgccgtcaagaaagcagttgtagccaagctgaagccatcaatcaagctcgacggtaaagacgacacctatatcaacgtcgctttcgacatggcgattgagtcagcacctatggagcagcagcgcaaaatcgtcaatcaggacaaagcagaaactcgcgatgactcagctgaaccaaaaggctctgccgctgctcgccaaaaatacctcgaccgcctgcacggcaaaaaggagacagcataa

SEQ ID NO: 152643 - DNA, 324 bp, Enterobacter cloacae
atgaagattaccaacgcatcagcacgactgtattacatcgacggacaacaacttgccccgggccagactgccgaagttgatgataagtggaaaaataacaaatccgtccaagcctccatcacaaaaggtgagctgaaagtagccagcaaaggcgaaaccgtaacggccactcaaatccaaaaaaatgaagtcgcagaaaatgcgaagtctggaaagggcaaaggtggaaaagggaaagcgcctgctgaacaagaacaacaggaagctggttctgatgaagtaaacgctgaagtccagcagcaagaagataaggtagacgagtaa

SEQ ID NO: 152644 - DNA, 246 bp, Enterobacter cloacae; identical to SEQ ID NO: 81405

SEQ ID NO: 152645 - DNA, 1311 bp, Enterobacter cloacae; identical to SEQ ID NO: 128648

SEQ ID NO: 152646 - DNA, 147 bp, Enterobacter cloacae
atggggggatttatggggctcgacctgctcacaatgtctatctcagcgctagctgtggctatttctgtgtacgccgctgtaccggttcatgaacagaagtccaagcagattaagcgcacgcctcgcgatcagctccacccgagatga

SEQ ID NO: 152647 - DNA, 189 bp, Enterobacter cloacae
atggaaacgtggtttatctcgtataaatattttcgtgaaaatggagctataggtgagggtgactggttttatgatgcgccatcagcacttaagccggaagatattgctaagcagtttaaggttatggttggtgcacttaaaaaagtgagtgctgattccatcatcctgctggctttcaataaagtttaa

SEQ ID NO: 152648 - DNA, 219 bp, Enterobacter cloacae
atgacgccagcaaatgaaaacgccatccgcgcagcctgccgccgctgcaccgaagaaatccagcaggcaatgcgcaagaagtcaaagccaaactggaacggtacggtgcctcccatcatcaacaagcatcacaagaaaatagaagctctgggagttagcctcctggagttcgtcgtatacacagggcggcttaatcgccgcttcggagtggaatcgtga

SEQ ID NO: 152649 - DNA, 2334 bp, Enterobacter cloacae
atgatgtttgcagaaaggaaagaaaaagttgcagagtcaggtgataagctccttaaggaaatggaagcgatagcatgtgagatgcgaactctcattgcaagtatgccacctgaagatttaatcggatatatttatgctcaattcatgatgcacgcggcttctgatagtcaggataaagatactgtagataccaaagatttagtgaacgacaatcaattccttcttgaatatgtgcacgccgtgctcgcgacagacattgctcctaaagaaattagttttgatgaaaataaatgtagttatttatttagcctaagcagagatttacgtcagaaggctatgctatacgcaatagcatcttcacttgaagcaaaagatagcatttttgggcctgatacatcgtctatagagttccattcaaaaacagcatgggtaatgcttagaggaaaccgatatcaagttttagaagaagaattttataggtacgtactttcgccacatgatgatattttaaaagaggtctacggagcaagtggatatgagatagctcacggtattcaatccatggccaatgctattcgtacaggtcatacaaatgcttttgaagaaatgatgatgcagtttttagaagtgcaagaaattgcttcgcaacagaaaaaaaacatagaagaggttatggaatcatggatggaagaaaatggagaaaaattaaaatctgctagtcaagcagctagtgatatgttgcgggggggcattaccaacgttagtcttcatactgggttaccagacaaattattagcggatttagcctatcaacgcggggaagatacggatttctttgctattggagatttttctggtactccttatagaactctgcctgcaaggaaaaaacctcttataaaactcgatgccggttattatgctgtagacccttgtttcatgcgtgatgcaggatatcgggcacttctacataatcttttgcagcgaaagcctgaatacaaaaaagaattcgaagaacgtcagaaaactatgagtgaaggtgcattctatgacattttgagagcacaatttcctaccgctaatgtttaccaagaaatttattataaggatccagaaacaaatcaatggtctgaaaatgacacgctaatattaatggatgatgtgctatttcttatagaggctaaggctggtgctgcagcaacgattgcttcacctgctacagatttcaaaagacacgcccaatctgtacaggatttggtaatcaaagcatacaaacaatgtgaacgcttttttaactatttgaactcagcagatgaagtcgttatttatcatttagtaagtggtaagcacagagagtgtggtagaattaaagcttcgaattatagagtaatgttgcctatcggattaactgttgaatcattttctccattttcatctttctgtaagcagttaccacaaatcacacctctattaggtaaatatggatttgtatccatgtcgattgacgatttgtttgttctgaagcgttttctaccttctcctggggagtttttacattacatggaggtgaggcagtcatttgcaaatgtgaaaaatgcgtttctttatgatgaatttgaccacttgggatcatatataactcagaatcgttttgacttggttagcattgaaaagttggcaaaagaaaaaggcagtatgcttctgtgggacggtatgagtagtgtcattgataagagttttgaaggtcttgattgggacactaaaccattacctactcaggattttccaaaggaagtgagagatttgctggaagcgcttgattccacacgtgcaccgggttggctagcaatagacagccatatcagaaactacgatgcacaaacgcgatctactcttggaaatatgcttaagaggctaggtgatagtttagataaacatcctgcacgctattttttgattggaaatgatgaagaatctttgtttgtttggatgcaaaattacgagaatgaaatagactggctgaaagttaatgataaagcaagttcaatggctcttaacattaaagatgctgccagacataattttgttattgtagaagtggattctgaagggaaatacatcaaggctttgggcattaatgttattgtgcctcaagtgaaaaccgatgaaaatgctcacatcttcgaagatgctgaacgattgatgaactctagcggtactgattcaaattttataatgtcttcaataaaaccggaagactacggtaaagttggccggaacgaaacctgcccttgtggaagcggtataaagtataaaaagtgtcatggccgctga

SEQ ID NO: 152650 - DNA, 783 bp, Enterobacter cloacae
atgatagttatatgtacggagtctggtgccgagtttaatagttcttacagaccaaaggctgttttagatgataatttagtctttgagattgttgttagacaccacgctagagcctgtcagatttcacaagagatattatgtcttttaaaacatgggttcgcagatgcagcacatgctagatggagagccctacatgaagtcaatgtcactgctatgtttatttcaaaacacggccaaaaatgtgcagagcgtttttatctccatgatgtagtagattcttatcatggaatggttgaacataaaaaatatgaacatagacttcaagcgaaagggccaaaaaatgaggatgttgataaatgtaaagagtatttcaatcttctaattaaaaaatatggcaagaagtttgctgataattatgggtgggcctcttatatttttcctaaccataataaacttggtttcggtgcaatagaaaaagatgttcaattagaacatatgcgtccatattacaagtgggcaagtcagaatatacacgctggcgctaaaggaatgagaaacagacttggtctctctcattcttcagatgatatattattggttggatctagcgatgctgggatgactgaccctgctcatgcaactgcaattagtttaatgcaaataaccaccacattattatctcttgagcctactcttgaccatattgtagtgaccaagataattcaagaatatacagatgatattggggccgcatttgtgaaagttgataaaagttttgaatga

SEQ ID NO: 152651 - DNA, 249 bp, Enterobacter cloacae
atggaaacgtttcataatatttttttgaaaaatcttgatggttttttagaggcgcagtcagaattaacagatgacttcgatttagaagggaaaataaataatataatacccaaaatagtagaacttatgagatcttctttaattcgctcaacagaagagatgttgagtgaaaatcgcgcacgttcaaaagagttttttcaccaaaatcacttaaaatgggggggggatttgatttacttgaagcaatga

SEQ ID NO: 152652 - DNA, 393 bp, Enterobacter cloacae
atggaattcgtccaaggcaaaggcagctttaacgagatggcaaccggaatcctggtgaaactgtttgcggactatccggcttactcttctttcgaattttcagacttcggctggaagcccagaggagacagaactcagattgacctgctgtgcaacacactccaggctctcagcgatatgggttatatcgaaataatctcttcaaccgatatggacagcgccgccaagttaacacctcgtggtttgaatttacttcaacagcaggctccaggcgcaggcgatacagtgattaacattctcaaagctggggctgaaaaaacaggtggtgcagtagttggttcgacagtaagcgccctgattgactggatttttaaaggcaataaaagccgttaa

SEQ ID NO: 152653 - DNA, 873 bp, Enterobacter cloacae
atgattccactggtgattgatatggctgatgaagagtccacaaatagcaaagttgcagatgttgcgaatgcagttgcagcagtggcaaaggaagttccaatttatcaggatgcgcttcagccagcggcacaagagattggtaaagcccttggaaccgtagccaaacttgttaatgtcgctttagcgccagtgagtggtttagtgtggggatatgaacagattcgcgagtttactgccaccaaagttgctgaaaaactcaaggatgttccccgagagaaaattgtaactccttccccgcacgttgcaggtcctgcaatagaggccttaaggtatacaggtcatgaagagtccttaagtgaaatgtatgcttcattgctagccactgctatgaacaaggatacaatacaaaaagcccatcctgcattcgtcgatattattaagcagatgactccggatgaagcaaaaattgttcgtgggtttgctgctagtgaaagtataaatccgctcatatcagtacaagcgtcgattccaaataaaaccctcatggatggacacacaactgaactgagaaacttttctcaaatcgggcatagggccggatgcgagtttatgcacttggtgccagcatatcttgataatttggtcaggttggggttgtgcgagataccagaaggcacatcttacacaaatgatgagtggtatcgccctttagttgaaaaccctattgtcactgagctgatagctaaaatcgaaaaaagcaattgtagtgctgatattgttaaaggggcggtgttggtaacggattttggacgccaatttgccctggcgtgttgtccccctatagttgtcagcatgcagagtgcttcgtcttaa

SEQ ID NO: 152654 - DNA, 207 bp, Enterobacter cloacae
atgcctgcacaggcggcccccctctcccttgagggagagggctggggtgagggggaacatacggctctggtggtcattaaacggcaactcgcgttgccgttttgcttttacctaagcgacctgctgattttcctcttctccattacgctgtgcttcttccgcttcctgctgaagcaactgtttctcgtacaccttgaagaacggtaa

SEQ ID NO: 152655 - DNA, 435 bp, Enterobacter cloacae
gtggttgagactcctgatgcccagttgctgaaaccgttgcgcttttcattcaccgtcgcgctggccgacaacgccgaccacctcacgctgcgccagctggaaaatcaggcggctggacagcccttcacctaccaacggcaaacgctacacacgctcgatcaccgtcttgagcgcttttcgttgcgtctgcccgagcgcaggcttccggcagagttctcgctactgaccgtgccggagccgctcatcctttccgctctgccccatgcgcagctgctgcatggcaccgtcttacgcgtatttaacgccgggacacaaccggctcccgtcccggaaagtctggcagtgttacggcagatcaactatctggaagagccgatgcaaccggtaacggcgatcctcccctccgcaacctgcgattttttgattgaggcttaa

SEQ ID NO: 152656 - DNA, 573 bp, Enterobacter cloacae
atgaacttgctggcattgacgcatcccgatctggtgtttatcaacccgccccaacgtacgccggaagcagtgatccgttggctcaccgagccgctcgccaggcggaaggtcatcaacgatcgagaggcatttatcgaaagcgttttacaacgtgaaagtgaaggccctaccgcgctgggtgaagcgctcgccgtcccgcacggtaaaaccgaggcggtgcaacaggcggcattttgtctggcgctctttgacgatccgatatgctggccggggctggagggtgatgaagaggtgaggatggttttcctgctcgccattccgccagcggaagcaggcagtacgcatatgcacctgctgacgacgctgaccagcagactcacggatgagcgggtgcgtgagcaattgctggcggcgcgtacgcgggaagaggcgatgtctgcgctgagtaatgaaggttctcaaaaacaggacgatgcccccgaaagctctcttctcatcccgttggtactgggctgcatcgttaccgtagcctttttgcaggcagggttgagctgggcctgcggggtgagttaa

SEQ ID NO: 152657 - DNA, 1197 bp, Enterobacter cloacae
atggcgcgcatcacacgccctctaactaataacgaaattcttaaagctaaaccccgcgaaaaagactttacccttcacgatggggacggcctgttcttactcgtcaaaacatctggtaagaaactttggcgttttcgctaccagcgacctaacagtgccagtcgcacaaatttgagccttggcgcatatcctgcccttacgcttgcagcagcacgtcagatacgcgatcagcatttgtctcttttagcacagggcatcgatcctcagcagcaacaagaaattgtctcagagcagcgccaaattgagctggacagcgttttctctatagttgctgccaattggtttcaactaaagagcaaaagcgtcacaccggactatgcaaaagacatttggcgctctcttgttaaagatgtgtttcctgcaatcggcgagattccagttcagaagctcaaagctagaatgatcattgaagcattggagccgatcaaagcacgtggagcccttgagacggttcgtcgcttagtacaacgtgttaacgaaatcatgatttactcagtaaacaccggtttgatcgattcaaacccaactactggcgttggtatggctttcgaaaaaccaaagaagcaaaacatgccaacactaagacctgaggagctgccaagcctaatgcgtgcgctagctaaatctaatctttcgatttctactcgctacttaatcgaatggcagctattgacgctagtccgtccttcagaagcctcagcctccaaatgggaagagatcgatttagcaggtaaattgtggactattccagccaacagaatgaaagctaaacgaccacatacagtaccaatatcacagcagatgattgagatactggaaatgatgaaaccaataagtaatcatcgcgaacatatctttccaagtaggattaatccaggtcatccaatgaacagtcaaacagctaatgccgctttaaagcgtataggattcgagggcactttggttgcacatggcttgcgttcaatagctagcacctatcttaacgaagctggctttgatgctgatgttattgaagcggcgttggctcacagagatagcaatcaggttcgaagcgcttacaatagatcaacctatttagaacagcgcatttctctcatggagacgtgggggaaatatgtggatgaatgcagaaaataa

SEQ ID NO: 152658 - DNA, 2085 bp, Enterobacter cloacae
gtgaaactcaatgctgatagagagaaagtcttagccaaccccgaggcgggtcggctttattcattattaaatgaattagaggccgaaggaagacttattttaagtgattctgagctgtattttgacttcccattatataaagacgatgatgaccaacttgtaatctctccattgatgcttgtctcacgtttgtacgggattataattttctatttatcaacaagtaatgatagagacgttcaacaaaaaattcttgttgaggaagataatcttgataatatttatggccaaatattttctagattagtcaaacaaaaaaatctccgtcaaacaaaaaagacattgaaaattagtgttgaatcatgcatttatgcccctcacctaacacaagcaccaacagtcgaagttgaaagtgaagttattacatcaaaagcagctcttgagaaattcatcacggaccttgaggaggtcgttgatgagttagtttatagcgaggccgcatctacaattgaaggtggtaaaggtttaatacgccagaaaacgagagatgttgatggatttccggctaagtcaaaagttgctattgttagtcaattagaatctgcaatttctcgcttcgatgcagatcagctaagcagttgcgtgaatgaagttgatgggatcgaaaggattcgtggtcttgctggctcaggcaaaactgttgttctagctatgaaagtagctattacacatttacgcaacccagagaaaaaaatactttacacattcagtacaaaggctttatatcaacatgtaaaacgtttaattacacgtttctatcgtcaatttgatgatgtagatcctgattttgataactcaataaaaataatgcacgcttggggaggaacaactactcctggtgtatatcataatgcttgtgttaataatagcgcaccgtttctcgactttggtaaggctcaacgtcttagtccaaaaaatccgtttagttatgcctgcaaaacattaatcgatggatataatgtacaaccagaatatgattatgtttttgttgatgaagctcaagactttgatagcaacttcttacagctatgcttaaaacttgcacaaaatgaaaacatggtatttggattagatgtttttcaaaacattttccaaactactgcaccttcgattaatgaaattttaggcagagatcgtcaattaggtttagataagtttttaaataaatgttatcgcacaccttgtgcaactttagtatgtgctcatgccatcgggcttggtatttacagagaccaagttcaagttattcgaaccccagaagactggataaacctaggttactctattgacgaatcaaaatataaaaaccaatttgaggcagacgaagatataattgtttatcgaactgagcaagcatcaccctcattatatcacgaagataaagaaaatttagtcatcactcaagagcacgaagatatttttaaagaatgcgaatgggttgcaaacaaaatcaatgctgacatccaagagcagggattaaatgcatctgacattctgatcatctgtgctgatgacagaaactataaaagttattactctgttatttctgaatatttatcaagctttgggattgatataaataatgttaacgcagatcgttataacatcagtgacttctcggtagacaataaagttacttattcgactgttcataaagcaaaaggcaacgaaagttatagcgtttatgttgtaggaagcgaatcactgtattacaacccaaatgttaaaaaccgaaatttactctttacggccatgacccggaccaaaggatggcttgtaatgacaggaataggcactgctgcgcttgaattatttgatgagatttccgatgcgttagaaaaagcaccctcccttgaatttaagtatccgccagataccaaaatcagacaaattgaaattgatttaaagcgtgttgagaccgaaagccgaaatgatgagttagagaaactaattcaggaatatggagcagatggcttaaaagccatgattcgtgaggttgaggctaagaaggtgaaaaagaaatga

SEQ ID NO: 152659 - DNA, 672 bp, Enterobacter cloacae
atgatttcacttggcgtgcttaacgactcaaaaaggaatgctataaaactagtcagggaggtagaccttcttggcaacttcaataatagagtaatatatccaaacacaatgccaggtgaattgcgtccactaagttatgaaaatgcttggaaaaaatgtaaggaaaactcttggttcgatatcgaactagatgactcttcattattaatttttaaacaagatggtttttcttacgtccgggtgcccttttttacattatccttctctgagtttgcagaagagttttatgaaagcgatcccgaatggcaagatgaaagtaataaacattttatcacagaggagtatgagaagtatctcggaagtcaattaaaatcgcaacctcccatgcctgtaagattcgacattgattcaaattattattgcgaacatacacatccgctttatcatttccactttgggatagaaaatgagagcagaattccctcaatcagagagttaactccattatcttttactggatttatattgagaaccttctatccgaaggaatggaaattatttgctgaatctaaagagatggagaaatacttaacccaactaaaaagcaatttgaactttgcgccgaaaaaattctggaactcttatgaagctgatttattttatttaggttaa

SEQ ID NO: 152660 - DNA, 225 bp, Enterobacter cloacae
atgcattgcccgttctgtcagtgcccggcgcacacccgtaccagccgctatctgtccgggacgatcaagcagatttattaccagtgcaccaacgtcctgtgctccgccacgttcagaacggtggagtcagtcgacaaagtgattcagccgccctcggccacgacagaaacagatgaccatttaatctgcactcaggccggtaaaacccgaaaacaacgcctgtaa

SEQ ID NO: 152661 - DNA, 735 bp, Enterobacter cloacae
atgaccaccaccgctatccctgaatacctgacacccgcatttcaagaactggacgcggccagagccgcccaccttgagagcgcccgtcagatggatgacaccaccacggccattgcccgtaccgccgaacaaaaagctgagattgaaaaggaaaacggcagcgatgccagcgtatggcgcagggcattccgtgccggtggggcagtgctgacggatgagctgaaacaacagcatctggcacgcgtggcatcccgcgagctggtgcaggaatgcgacaggctggctgaggtgctggcctatgacagcgaccggctgaaagcctcctgtgacatcacggccagaaagtaccgtcaggcgcatcacactgtgctgagcgagtacgcaggaaaagagctggataacgcactgcgtgatacgtgcggggcccttgtccgggcgatgaaactgaaaatgctggcgctggggaacccgctcgcaaacaccgtcgggattcagggttatgtcgaaccggataaagcggtcatgcaggaggtgcaggcgtggctcaagcgtgcagtgaatgactgtcatatccgtctggcggatgagccggtgctgtttaaaaccgggctatcggctgagacgctgccccatatggattacggcgtggcagtgaccaacggccagcgtcaggccttctttaacaaactgcgtgagcgtgaagctgacctgaaagcgcggggactgctggagtga

SEQ ID NO: 152662 - DNA, 228 bp, Enterobacter cloacae
atgaaacacaccaccctaagcattaaagaactcgaatgccttgagcacctgcgtaacgtcggccactttgtcagcgcgatgatgcaggagcaggactgcaccaccctccgccgcgaccccgcgcagcagtcgcagcttaactccgtgatttacctgatgaccgcccagctcgacggcgttgtcgaacgctgcaatcagcgctggctgaccggggagggtaacgtatga

SEQ ID NO: 152663 - DNA, 720 bp, Enterobacter cloacae
atgcgtcagaaaacaattgatgcgattatggcgcatgctgctgctgaatatcctcgtgagtgctgtggtgtggtggcgcaaaaaagccgtgttgaacgttattttccatgccggaattttgccgcggcgccggaggaaaattttgtcctctgcccggaagattacgcagttgctgaggactggggtacggtgatcgccatcgttcacagccaccctgacgccactacgcagccgagcgaactggataaagcgcaatgtgacttaacgcttttaccctggcatatcgtgagctggccagagggggatttacgcaccattcagccgcgcggagagctgccgctgctggagcgtccttttgtgcttggtcacttcgactgctgggggctggtaatgagctatttccggcaaacgcatggtatcgaactccacgattaccgggttggttatccctggtgggaaaacgactatccggacaacttctatcaggattgctggtacgagtgcggattccgtgaattcgacgggccgccgaaacctggcgatatggtaatcatgcaggttcaggctgataagtggaatcatgcggggattctgctggaaggtaacatgctactgcatcacctttatgggcatctgagccagcgcgttccttatggcggctactggatggaaagaaccatgaagatactcagacataaaatcttattagagtgtggttga

SEQ ID NO: 152664 - DNA, 180 bp, Enterobacter cloacae
atgttcgtgaataatgtcgttcactactgcggccgtcagacgctcataggcccacagttcttcttcgatgtcaaaggcttctccggttttggcatcgatgagccgaaagagatttttagcgaccgcgacactggaaattggaagaggctgttcatagaggacgttatctccagtatgtga

SEQ ID NO: 152665 - DNA, 279 bp, Enterobacter cloacae
atggctaataatttatttattacttatgaccttataaaaactaaagattacgcggctgttcatgcagccattaaaacgctgggtaactgggcaaaggcgacagaatctaattggtatgtcaatagtgtctattctgttgaaaatgcagcgaagattgtcaaagccgcaatggataatgatgatagattaattgttgtggatgcaacaaataataatgcttattggtataaccttcctgatgaagttgctgctcgtattcgagctgaatggccacgataa

SEQ ID NO: 152666 - DNA, 129 bp, Enterobacter cloacae
atggcacagaacaacattgatttgcttcttcagcaggtggcaattgagaaggtcaaacaggcgcagcaaaaagccgccaaggcagcggcccagatccgcgccaacggggaggtcaagaatggaaaataa

SEQ ID NO: 152667 - DNA, 609 bp, Enterobacter cloacae
atgccagcaacagcaagtaagccatttaccgccgtttgtcacgaactggcagacattgagagaatcaacggcaaagtattcaccatgaacatggtttacacctatgcactgatcgagggttaccagaccaatgggcaaaccgcctatttctcacaagacatgctgaagcgtcgcctgggggttacccgtcaaacagttgtaaaactcctggcggatatggtggctattgggctgatcaacaagacggcgcagatcggcggcaagacttgccattacactgtaaacccgatcaccccggctatgttgggcacaggggaagcaggagcgccacaggaacagccacaacagtccgctaaggccccggaagaggtgcaggaacccaaccacgcggcggaagctgtagaagcgcctgaagtggcggacattgtgcctataacggcagcggcaggagaacagccaacggacttaatcaggctgtatacatccaaggtggaaacggcggaccagacagacccgcaacccggggagacggctcctatggtggtgccattcccaaggggagagatcaaggagccatccagggattgggatttagacccagccttttga

SEQ ID NO: 152668 - DNA, 171 bp, Enterobacter cloacae
gtgaaaattgacttcccgaaagaacaggccgatcagctttatgccctggtaagggcgggcggtggtgcgcctcatacaatcgttaaggaggcgttagccgcctacctgaaaaaccatcctcttttagtcgcttccgcagaaggaaaacagaatgccagcaacagcaagtaa

SEQ ID NO: 152669 - DNA, 261 bp, Enterobacter cloacae
atgatgcacagcttcacagacttgtcagagagtcgcctggttaacgcttacgcttcccaggtggttaacgcgatccgggatgacgccagcgcccccgggctgtatgacgacatttacacgacgttacagcagcttccgccgtccagaatggtgacgttgggtaatccgggcctgaaggcctcagcctcttggtggggcgcatttttcgggctgagtctttcagccgatgacatcgacgaactcaaggagatcgcactgtga

SEQ ID NO: 152670 - DNA, 384 bp, Enterobacter cloacae
atgaatgctactcctcgttaccctgtgacccagggcgacatcatcgtgagctatgctagctcactttttgaccgcaccgaagtaaccgccccggatggtctccccgatcacgtcgattgtggcgacatcctggacagcaaaacttttgccctgtatgactcatccgccgctgacgctggcaagccgatcattaacctgtccaacatggacgccgacggcaagcccaaaacgctggtcattgtggatcgccacgtagtgatcacggatttcaatctgaaagccaaagatgaggcatccaagaaagccgcattagaagcgctgaccgcatcgggtgagattcgcctggctgttaattctgatttccgtaaatctcaaggagagtaa

SEQ ID NO: 152671 - DNA, 1020 bp, Enterobacter cloacae
atggctgtggatttcaaaagttttgaacgtctcgacacggtagcggctatcaagtccgttcccgctggtaatcacctgatctctgatctgggtatcttcactggtgttaactccactaccccacgcgctcaggttgtggatattgtggaaagcgctgttgcagagcttgagcaggtctcccgctacggcaccgaagtaaacagcatcaagatggataaaaccatcctccgtgatcaggagatcccacactacgcaacagaatccgatgtgaaaaccgaagattggcaatccttggtaagcccggctaacccggatcaggctcaggcggttgcgtccgtcattgccgctaaatccgtgcgtatgcgtgatcaccacctggagactgtggaagcgactttagcccgcgccctgttccaacagaaagcgaaagcggcaaagaccaatgacggcgacgtcgatttcaacgtggtgtttgataccgccccgctagattttgagcttgacgcctcagccggggctaatgtgtatgcccagctttcgaagattcgccgccaactggtgaaagagtacggcgcatcccgtgcctatctggagcgattcttctgtttcgcatccccggatctgtatgacgctttagcgggtcaccctgaagtaaccagcctgatcactaacaaggtggcagaggcggcacgtggtgcgctgatcccggttaacactgcgggctatgacagcttcagcattggcaacattactttcattctggcggacgatgaccgctacgagattgaagagggttccggcctgttcgttcctaagttctccagtgctgatcgtaacccgttcaaactggtgcgcggcccggcttcccgtaatcaggatattgccgctaaaggcgtgatcagcccgtactaccagaaagtgatggttgaccgttacaacatggtaaccatccatcaggaatcaagtcatattcctctggtactgcgtccgtcctacctgctcaacgttaagttgaagtaa

SEQ ID NO: 152672 - DNA, 201 bp, Enterobacter cloacae
gtgaagattagccttaacattccagccttgggagaggtgtacacctcaaccaatgccgacgtgatcaaccgttcagccctggcgcgtaagttggggatcgatcaggtgtctctatgccgctatgaaaaacagtacggctttgagcgagcgttaaaaattatgttggagaaaaagaaactccggcagattattgggaagtaa

SEQ ID NO: 152673 - DNA, 789 bp, Enterobacter cloacae
atggatggtgtttgtaagttatgtcttgaagcaaaagaacttcaggaatcacacagtatccctagaagtttctttaacaaagcaaaaggaaacggcggtcaagttatctctatgcaaaaaggaagggaaccaagaagagaaaatttagatcctaaagaaccaatgctatgttttgaatgcgaacaatttcttagtggtcaatacgagtcttatgggatcagattgctaagaaaccctcacaacattagaaagaactctgatcacattattattagcaacttcgattacaagcgcttttatctatttctattatccatactatggagagcctctaatgctatggacctgcattattcttcggtggtagggaatcctgattttggagagatgatgaggcactgcattaaaaataacattgttaggtttaataataagagtcaggttaaaattgataattttatcaagattagagtgctacggattgttgatagcactggcaatattcctgatcatgtcatcaaatcggtcctcacgaactttgcttttggtgagattgaaagtatcaatgggattggatggtattttatagctgaaggttttatctttcactatgtattttatcctggtgaaaattactatgatgcccgcactacaagattgaactcacagcttacatctggaagtcatcagaaaatacaaaaagtagaggtatctaaagatagaatgttgtcagaaatgtttaattatatgatcgaatgttcgaaaggctatcatcaacaaagacaataa

SEQ ID NO: 152674 - DNA, 615 bp, Enterobacter cloacae
atggttaaaaattacgaggaagaatcatttaaagttatcagtcgattcattgcattacacttaaccccagaaagattaatgaagatcggggcttttgttgtttgttatggtcagtttgaaacaactttggagcgtgccttatggactctgagagagattgatgtaaaaggagttaggccctttaccgaaaaattgccatctgataaatggttcgagtatttgggaaatggtaatgataaacttagcaatgaatgtaatacagtcttaaatcttgcttctctcgctgctattgatttggctgattataggaatagtttggttcatggatatttattaccgctgggtgataagccttcattcatgagaaatccaagatggcatggtgaacttaggaataaaagaacaggcgatgcctatatcgaagagccactcctagatcttgctattatttctggatggacattatttagggttgttagtctaacagaaaaaatttttgaggatgaatcggcagaaccctcaatagttatgttagaaaacgaagtaagagaggcacgaagctgtacaaatgagttacgccatctcagaagtttaatgaatgaagagaaatattag

SEQ ID NO: 152675 - DNA, 834 bp, Enterobacter cloacae
atgaaattaaagaaactattagaattagatttcatggttaaattcaaatccacattggaaacagaatttgaaaaagagctatttatagcaagccttcgaaattatgcctctcatggtaaccctctgagatttcacaactttgcatatactatgagagagttaattttacatgttatagctcgaaaagctcctgaagaaaaagttatcggtgcaccatggtatgtacgtatagatcctaatagaaaagtaacaaggaaacagcagttaaaatattgtgcccaaaaaaacataccagacagttttctaggcgttatcaatactacatttattgatgattccatatcagatttcttagctgagtttgttaaccttaataaatacacacatataacagaaaaatattttaaaccatcccccaagcagttttttgaaaacgcacgggatgtagtttccatcgctcagcactgtttagatttgatggccgatactgctaaggaagtaatctgtatcctagaaaatgaaatcgatagctcagttagggatttggcgaacgagagtttgccagatgaagtgactattttggctcctcgagtttacactgagtatgtacaaattgaagatgtgtatgcctctgatattgatgatgaattcatatacataggcgttgacggttcagtatttgttacacaagaatatggtcccaaagatgacctatgcgaaattaacactgattatccatttagcctttccatgcagtgcagtttgcgcaatccagctcaactaactataacttcgaaggaaatagaagtagatacttcttcttggtacgagtaa

SEQ ID NO: 152676 - DNA, 594 bp, Enterobacter cloacae
atgactttattcactgaagaagatcccacccaaagccgctatgttgatttgattacagaggtgacggctttcgaagctaagaaagaaccaatgaagatcatttccgcatccgacatgctgggcatttgcgatgcttttcttgctgacactcaatgccacatagcagaccggctacctctttcaatagctggtcggcgtgagctaggtcggaaaattgagtggaattgtccacatagctggaaaccacgcgaagaatggtcaacacatgttcggcacgccttacaaattttaaatcgacgttatttggataccccagtatctccacaggatgactggcagacctgggaagaactatcgacagatattcatgtgtcggctcgctgtgttcggcagactgttgagttttatcgctctggaaatccccagcatttaccgatgtcgactgagctttttgctgttcccgaagttttttcaaaatttgtagcttcgattctttcgggtgacattcatcctgtttggatgtggcatgctgacgcagccaaaacgccgaaatgctttgatgggctttatcccaaatacacgccgctttcttaa

SEQ ID NO: 152677 - DNA, 1050 bp, Enterobacter cloacae
ttgattaaggttgttgatttgttttgtggagcgggcggcctcactcatggccttcagaagtctggattgaatgtagttgcaggctatgatatagacgcggcttgtcgattcgcctatgaaaaaaataataactctctttttgtccagaaaagtgtgacggacattgagtatggtgagttacaaaaatatttcgatggagcgaaggttaaggtcttggctggctgtgctccatgtcaacctttttcaagttatacaaatagcgctaaactaggcgtggtacgttctaaagataaaagatggtctttactttatagtttcgctaaacagattgagatggtaaaaccagatattataacgatggagaatgttccacgagtggtaaatcataaagtctttaaagattttataaaatcactcaagaaagatggatattttgtctggtatgatgttgttttctgtcctgactatggaatggctcaaagtcgttcaagattagtattgttagcctcaaagttcggtgaaataaaattaattccaccaacccatgataagagtaattataaaactgttaaagacattataggaagtttgcctgaaatcgaggctggttctggtcatattgaagataaattgcatcgttctgcatcgttatctgaaataaatttgaaacggataatggcttcaaagcctggtggcacatggcatgattggcccgaagatcttagagcgaaatgccatactaaggaaagcggctccacatatactgcggtatatggacggatgagctgggacaagcttgggccaacgatcactactcaatgcattggttttggaaatggccgttttggtcatccagtacagaacagagcattaagcttgagagaggctgctcttttacaatcatttccagaaaaatatgatttctggccagaagatgtaaaaatggaaatgagaacagttgctcgtctaataggtaatgcagtgcctgttagattaggagaggttgttggtgacacaattttaaaacatatctctgaggttgagatataa

SEQ ID NO: 152678 - DNA, 1959 bp, Enterobacter cloacae
atgtcagaatttgagataaagattgatttaaatgtactcaatcatcttggcatgagtctttattcgaacactccagcggtattgactgagattatctctaacgcttgggatgctgatgctaaaaatgttgatattaccttagatgtagagaaaggggaggtaatcatcaaggatgatggtcacggtatgtctaaagacgaaataattaatagatttctcaaagtaggttatgcccgtagagaacatggtcgtgctaaaagtgataatttgaaccgtcaggtgatgggtagaaaaggaattgggaaattagcgatgttctcactcgctaacaaaatccaagtctactcttataagaagggagaggagccacaggcatttgaagttgatgttaaagaacttcaagaatgtattaaaggcacaagaaattatattgcgaactccatcccaatccccgaaaacttaccctatggcacaacaataaagttattcgaattaaaaaaagcaatagataggacacaaagttatttaagaaagaggattgctcgtcggttcagcatcattggcccaaatcataacttcactgttaagatcaatggcacagatataaacccttccgatagagattttctatcagacttggaatttttatgggaatttgggccatcagatccagaacgagttaaatcttgtgttaacttaactcaaaaaaacacactttccaatattatagtttttgaaggtaatgaggttcaagtaagtggttacatcggtagtgtcggacgaccatctcaactcaaaaaagatcctgagatctctaataatacaataactgtaatatctaatggccgtgtttttgaagaagatattcttcttgaattcggtagtgcaaaagtatttacaaattatctagtaggagaaattgttgctgatttcttagatgataatgaaaagcctgatatggccacatcttcccggcaaaaactacagcaaaatgatcctagatatccagttcttaaatcttttttggagcgttcacttcaacaaattgataaggattgggataaatggagacgagaaaagggtattgacgaagtaaaacaaaacactcctgctgtaagtgattggttgaactcactaaaaaaacatgaaagagacagtgcagaaaagttattagggaaagttaatacattccgtttctcgggtgatgaagaagaacaaaaaaacgcaagaaaaacagttctgaaaaatactgtactagcgtttgaaagattaagaatacaagataaccttgatgctctagataaaataagtaatctacaatctgaaaacttcaaggatgtctttgcttcagttaatgatattgaagcaagtatgttttatgaaattacatctcagagattaaaagttattgagaaattccagaaaattaccgatgacaatgaactggaaagagcagttcaaatgtatctttatgaccatctttggttgttggacccctcgtgggaacgagtaaccggctcatcagtcatggagcaaactttaaccaaagaattgaagcaagttaatcctgacgcaacaagtggcgcgcgaatcgatattgcattcaaaacagtatccggaaaacacattataatcgagatgaaacgacctaaagttcaacctgatataatggctcttgtggctcaaggaaataaatatgtacaagcaacaactcagtggtttaataacaatccaaaaagctgtccgggaggaaatatccctcatattgaggtaatattcttattaggcactggatatcacgcagcaaatcaacacttcgtaaacatgcagttattgtcaattaacggtaaagtattaacatacagcgatttaattactcaatcaaagcaggcatatgccgaatatcaagataagaaaaatgacgcagccagaataatgaaaattgtggaagggatctaa

SEQ ID NO: 152679 - DNA, 648 bp, Enterobacter cloacae
atggcgagctccagtagatttattacattgcaggagaggctcgaagaattaaggagacacttgcttcctgcggaattttctcccataggtgagtacgacccagtccagttagatatggcaaagggatatcggcttttgactcatgcagagtttgaatcttatttggaagatgtatctgctgagactgtgaattatgctttaaagcaatggggggagaataaaactccttccatgacgattgtttcttttcttgctgcatatcatagttgctggtctgtcggtgatgaagaaaataatcaggagataatcaatctatctcaaggaagaagccatcccaaagaatccctccgtgaagtcatgaacatagccagtaagcaattcatgaagaaagtaaggtccaatcatggaattaaagctaaaaacttcaaattacttatgttgcccactggtatagatatcgaagaattagagcctgaaatgttacctaaattggatagttttggttccaagcgaggtgagatcgcgcacacgtcaggaagagttaatcaacaaatcaatccccaagacgagcttgaagatgttaattttttactcaattgttttcgtgaactagatttaaagctagctgcaataaaagaaacaatatag

SEQ ID NO: 152680 - DNA, 1197 bp, Enterobacter cloacae
atgtcagattatttttttgagtatgaagaacaggctgaaaacgaagatgatgttgagttggttgaaggaacagatttctcggctgccgtagttagcggtactgactggactacagaaactattatcaatcagattaataaaaacaatattcaactcaatcctgattttcaacgtcgcgatgcatgggacaaatctaggaaaagtaattttattgaatcattgatattggggctaccaatccctcagcttgttttggcagaaagaaaggatcagcgaggcgcatatatagttctcgacggaaagcaacgactattaagcattcgtcaatttgccgctgaaaaagatgatttggtttatgagtccttaaagttaagcggtctagaaatcagggctgatctcaaaggtaaaaaccttcacgatcttagagagaatgctgatttttataacgatattgctgctttcgaaaaccagccaataagaaccgttgtaattaagaattggccaagtgaagagttcctttatcatgtatttttacggctcaacactggcagcgtacaactcgcacctcaagaacttaggcaagctcttcatccgggaagtttcgtttcctatattgatagtgtcgcgccagaaaacgaagcgatcaaaagcatattaaaacttaaaaaacccgattttcgaatgcgtgataatgaactacttttgagatattatgcactcaagaacttccttccagactatgctggtgatcttaaaaagttcttggataacacctgccttattttcaatagagattgggataaagttgagaatatgattgaggatcaataccaaaatctcaatctggctcatgaaactattgtaaaaatatttgatggtaatagctatagaaaatggttcgcagtcgattatgaaaagaaatttaacagagctatttttgacatcatgactcttgcattctcatatcctgatgtccgtgcggcagtgattggcagagaaaaggaggttgaggagctgttcagaaggctttgcaatgaaaactttgcattccttacatcaattgaaactactacaaaaagcctcaaatcaacccatactaggatatcagtatggttcgatgaattaaatttattgttagggactaagttacctactctggttattgatgatactactaatagaattaaagtggtgtaa

SEQ ID NO: 152681 - DNA, 354 bp, Enterobacter cloacae; identical to SEQ ID NO: 12405

SEQ ID NO: 152682 - DNA, 216 bp, Enterobacter cloacae; identical to SEQ ID NO: 12404

SEQ ID NO: 152683 - DNA, 282 bp, Enterobacter cloacae; identical to SEQ ID NO: 12403

SEQ ID NO: 152684 - DNA, 285 bp, Enterobacter cloacae; identical to SEQ ID NO: 12402

SEQ ID NO: 152685 - DNA, 303 bp, Enterobacter cloacae; identical to SEQ ID NO: 12401

SEQ ID NO: 152686 - DNA, 660 bp, Enterobacter cloacae; identical to SEQ ID NO: 12400

SEQ ID NO: 152687 - DNA, 816 bp, Enterobacter cloacae
ttgagtcatttacccgccagcattttccagatttcacgtagcgacgcctggaatttaaccctctctcccgatgcagcccgtaatatgcgggatctggcggcgcagattggcgcaggaatgccaaaatatctgatagcaccggaagtctcactgcttctctcctacattgatgatctgagcatccgcatgtactttgagacactctggaataccggagcacgactgaatgaagctctggcactgaaacctgctgattttatgctgactccgacgcgccagtacccacaacccgtggtgatcctgaaaacactcaagcaacgtataaaagaagcagaaagaagaccaggacgcccgaccaccaggcacccaccattacaccctgatccgcgatacagaaaaccaccggagcctgctgtaaggctggttcctgttctggatgccggatacgcattgcgtatgcgggaatacctggcgacctggaaaaagcggatcaaacatcagccagtgtgggacataacatcgagacagacaccgctgaactggataaacaccgcagtggcacgggcagggcgtgacggcgtaacattttcggttccggtcacgcctcacacatttcgccacagttacgccatgcacctgacaatgagtggcgttcctccgcgcgtcctgcaatccctgctgggacaccgttatgcaagaagcaccgagatttacacccgcgttttttcgctggacgtccttacaggaagtggtctgtcctttacctgcgatccacagcttgcaaaacagcttcttggataccctgatgcgccttaa

SEQ ID NO: 152688 - DNA, 654 bp, Enterobacter cloacae; identical to SEQ ID NO: 12398

SEQ ID NO: 152689 - DNA, 465 bp, Enterobacter cloacae; identical to SEQ ID NO: 12397

SEQ ID NO: 152690 - DNA, 2154 bp, Enterobacter cloacae; identical to SEQ ID NO: 12396

SEQ ID NO: 152691 - DNA, 588 bp, Enterobacter cloacae; identical to SEQ ID NO: 12395

SEQ ID NO: 152692 - DNA, 321 bp, Enterobacter cloacae; identical to SEQ ID NO: 12394

SEQ ID NO: 152693 - DNA, 405 bp, Enterobacter cloacae; identical to SEQ ID NO: 12393

SEQ ID NO: 152694 - DNA, 516 bp, Enterobacter cloacae; identical to SEQ ID NO: 12392

SEQ ID NO: 152695 - DNA, 258 bp, Enterobacter cloacae; identical to SEQ ID NO: 12390

SEQ ID NO: 152696 - DNA, 303 bp, Enterobacter cloacae; identical to SEQ ID NO: 12389

SEQ ID NO: 152697 - DNA, 1836 bp, Enterobacter cloacae
atgtctttaaaacttccagataaaggccagtgggtttttatcggtctggttatgtgtctcgtgacctattatgctggttctgttgctgtttatttcctgaacggaaaaacaccactgtatatatggaaaaattttgattccatgttgctctggaaaataataacagagagtaatatacgtacagatatcagactgactgccataccttctcttttgtcaggtatggtttcgtctctcattgtgcctgtttttgttatctggcaactgaataaaatggatgttgctctttatggtgatgcgaagtttgccagtgacaatgatttaaaaaaatcaaaactgcttaagtgggagacagaaaatgatacggatattctggtcggcgcgtataaaggaaaatatctgtggtataccgccccggattttgtatctcttggtgcaggaacccgcgccggtaaaggtgccgccattggtatccctaatcttctggtcagaaaacactctctgattgcgttagatccaaaacaggaattgtggaaaatcaccagtaaggtgcgtgaaatactgctgggtaataaagtttaccttctcgacccattcaacagtaagacacaccagtttaacccccttttctatattgatttaaaagcggagagtggggctaaggatctgcttaaactgattgaaattctgtttccatcttatggcatgacaggggcagaagcgcactttaataatcttgcgggtcaatactggacaggactggctaagttgcttcatttctttattaactatgagccgtcctggcttaatgagttcgggcttaaacccgttttctcaatcggttctgtcgtcgacctgtacagcaatattgaccgggaactgatactcagtaagcgggaagaactggagggaacaaacggacttgatgaaaacgcgttgtatcatttgcgcgatgccctgaccaaaatcagggaatatcacgaaacggaagatgaacagcgttcaagcattgatggttctttccgtaagaaaatgagcctgttttatctcccaaccgttcgtaaatgtactgatggtaatgatttcgatctccgtcagttgcgacgggaagatatcactgtttatgtcggtgttaatgcggaagatatatctctggcttacgattttctgaacctgtttttcaacttcgttgttgaagtgacattgcgtgaaaatcctgattttgatcccaccctgaaacatgactgcctgatgtttcttgatgagttcccttcgattggttatatgccaattattaaaaaggggtcagggtatattgcaggttttaaacttaaactgctgacgatttatcagaatatcagtcagctaaatgaaatctatggtattgagggagccaaaacgctgatgagtgctcatccatgccgtattatctatgctgtcagcgaagaggatgatgccgcgaagatatcagaaaaacttgggtatattacaaccacatcaaagagcacaagcaagagccggggacgatcagcttcacagggcgaatcagaaagtgaagcccgaagagcactggtgcttccacaggagctgggaacgctggactttaaagaagaatttatcatcctgaagggggagaaccctgttaaagcagaaaaggcactttattaccttgatccgtattttatggacaggttaatgaaggtcagtcctaaactggcatcattgacgatggaactaaataagacgaaaaaaatatttggtgtgaaagggcttaaatatccgtcaaaagaaaaaatgctctccgtaggggagctggagtctgaggttttgctatga

SEQ ID NO: 152698 - DNA, 1032 bp, Enterobacter cloacae
gtgaataacgaaaacagacatctgatttatgatgtggttaacgactatttttatcactggctgaatgagattgatggtgtcacggaaatcgctgttaaccgaccaggagaaatatttataaaggtcaggggaaagtggcaatggtatgaacaaaagatgagttacagtgattgtctttcttttgcatccacactggccgattttcatgacggcggttctgtgactcctgaatatcccctgcgttctgccacgcttccgggtggagaacgtgttcaggttgtgatcccaccggcaactgaaaaagatactgtttctataacaatccgtaagccgtcaggtatttttatcagtcatgacaaatttataaaacagggattttattcacgcgtcagtggtttaagtggtgactctgttatggaagataatatttctgctttaatcacttccggatattttgaaagggttatacctgaatcactgagtcaggggaaaacgatagttttctgtggaggaacagggtcaggtaaaaccacctttgcaaatgcctgtctggaatatataccgcatcatctgcggtgtatttctattgaagatactgatgaggcaaaattcagatttcacaaaaaccatgtaaaactttactatccggcagagggggagagtaagattattacctcagcgagtcttctgcgttcctgttttcgtatgaatccggacaggattctgatgacagaaatcaggggagctgaggcatgggattttctgaaagcatcgagttcaggccatgcaggaaacattaccaccgttcacgaaagtagtcctgaatatgccgtgcttgggattgtccagcgatgttatatgaatcctgaatgtcagaatctaccattcaatgtcattttaagacgtgtactgagtaatattgatattatcatgagtattaaataccttgatgatgaagattttcggttcgcttccggcatttactacagacaacttcattttgatgattatttcagaaaactgaaggagtga

SEQ ID NO: 152699 - DNA, 1206 bp, Enterobacter cloacae
gtgactgaacaggaaaataaaatcccgactgcaaccgaaattgaacagcagttacgggaacgcagacagaaagaactggaacaggccgggaagagcccggaagaagagcctggcaagccagcattgcagcttggtattgaaaaacttaaaaaatcacgtaaagggatgattatcctcgtcgtgggttttcttctgcttgctgccggtgtttctgtttattatatcccgtccattatccgttctgtgtcgtcaggggatgagaaacccgcaagtcagccgcttgcaaccggagcggctaaacgtcagaccggactgagcgaagatatcgatccttttaataccgcacagaaaaaaacagagaaaccagaggaagaaaaagtcatttcttctgaaaagactgaaccgccggaaaataaacagcagagcttcagccgtgcacttgacgtttctcttgatggcagccaggcaggaaacagcagcagttcagcgggaacgtcagtttcacatactgcggccagtgagccagaaagcgataaaaaggatgaagcaaaagcaaccgcacaggctacagaatctgcgccactggcgaaaataacgaaacttccatatgacccaaatttgtttatcccggaagggacatcaattccctgttcactggacaggcgttttgtttctgacctggcggggaaactggaatgtacggtcaacagtgatatatacagcgccagtggcaatgtaaaacttatcgaaagaggaaccgccgcaaaactgatgtataaggccgggtctttaaatcatggacaagggcgtgtgtttgttatggcttataagctacgtacccgcagtaagccttttattgatattcccctggttgactcacaggcggctggcgcgttaggcgaagccggtgcttctggctggattgacactcatttcagtgaacgttttcttggtgcaatgatggtcgggatgataccggatttaagtcaggcggccagtggtattgctcagaataacagggacagtcagacggactatacagctaacagccgccaggcttttgctgatatagcacgcgaagcattttctaatagtgtgaatatcccgccaacgctttataaaaatcagggagaaattattactctgattgtcggtcaggatctggatttttcaggtatttataaactgaaaatgaaagggggttaa

SEQ ID NO: 152700 - DNA, 903 bp, Enterobacter cloacae
atggcgcttctgatggcggcgcacgtctgtcatgctgctgttcttccttcaggcagtcgctttgacccacgcaatcagatagtcagttataaccctaataataccaccataattaacagtgccgttggatacaccaccacactggtatttgatgaagatgaaacagttatcagtgccagaactggttttccgcagggatgggcggttaataaagaagataacctggtatatctggaagttcgtcctgttaaacagactgttcagaaaaataatacggatgaaaacggtaatacctcttctgaatccgtcagtgttgctcttgacccggaaaatgagcttgaacgctggcgaacgaatctgtttgttcgtaccacgaaacgtaattacagcatggagctgaacgcccggacgttccggcagccggagaaaattgcgtttgtggtgaattaccagtatccgcaggaacgccggaaggaacaggccgaaattgagaagaaacgcacagagactcttgccagacgcctggaggaacaggcaatcaaccgttccctggaaaatgcgaaatcgccccgtaactggcagtactggaagcgggttgctgaaggcagccaggatatcagccctgattatgcatatgacgatggtcgttatacctggttcggcttcagtccgttaaagaaaattcccagcgtctttgtgatgaacggtatgcaggagactcttaccaatcctgtgattaaacagagcgggagttttacggctgttggcgtaccggttgataagcgttttgttttacgtcttggtgagcaggtggtggggattgagaaccagggcttcggaaaagtacgtttaccagcaggagatacggtatccccggatgttaagaaagaggtgatccagtga

SEQ ID NO: 152701 - DNA, 714 bp, Enterobacter cloacae; identical to SEQ ID NO: 106316

SEQ ID NO: 152702 - DNA, 1134 bp, Enterobacter cloacae; identical to SEQ ID NO: 12388

SEQ ID NO: 152703 - DNA, 759 bp, Enterobacter cloacae
atgaaaaagcaaattatggcggcattcgtcgcttcactgattgttatttccggcgctcaggcagggatacctgttgccattgacgccaaccctgaatgggcgattgaagccggacgatggacagaacgccttaagcaatgggcggaaacggtgaaacattacgaaagtcagataaacgcatacaagcaggagctgttgtcaaaaacggggatccgtgatgtgcagggactggtgcagtccgcacagtcagtgagtaaggagctgatgcagatttatgatcaggggaatgcttttattgacgattacattaagaatcctgaaggagcgttatcggaacaggccaaatcgttattgtcggattacaaagtaacggatacctgccagaacctgggatattccggcgacctggtacggggatgtgaagcgacgttcctttctcaactggcaagcgtggaatacggtaacaagctggagagcaagcttcgtcaggacaaccagacgatgaaagaccttattgatcaagtcaaaaatgcgaaggatacgaaggccacgcaggatgcaacaaacgctgttgcacttgaacaactgaagttcgagaagctcaaatttcagtatcaaatgtatcgcgataagcagcgagatcttgcagaatataaagagaagatggctcaggcttctttcagaaaacagcaacgtgaagccgtgcctccttcttacagaaaagcttatatggcaatgaaatcatatgaggatgattaa

SEQ ID NO: 152704 - DNA, 2754 bp, Enterobacter cloacae
atgagtactctttttaaagggctgacacgccccgctttaatcaggggattgggtgtaccactctttccctttcttggaatgtgcattatttgtgttctgcttggtgtctggattcatgaggctatgtatgcccttattcttcctggctggtatgccatcaggcgtgtaacacagtttgatgagcgcttttttgaccttctgtatctgagaactcttgtcaaagggcatcctttatcaaacaagcgattcagcgcagtccattatgcggggagccagtacgacgaagttgatatttcaaaagtggataactttatgaagctgaaagaccagtcttctgttgaagagttaattccgtactcttcacatatcactgataatattatcgttacaaaaaaccgggatttgctggcaacctggcagatagacggtgcttactttgagtgtgttgattctgaagatttgtcaattctgacagatcagcttaatacgcttatacgtagctttgaagggaaatctgttacgctttatcctcatcgtatcaggtgtaaaaagggcgtcagaccagtatttaacagtaaaattccttttgtgaacagagtaatgaatgattattacgagtcattccctcagtctgaatttttcgagaataaattatttctgacgatttgttttaaaccttttactacggaagataaagtaacacatttcttttcacgcagtaaaaaacaaaaagatatctttaaagagcctgttaatgaaatgaatgaaatttgtgacaggttgaatacctatctgtcccgttttcattcccgacgtcttgggctttatgaagatcatggggttgtttattcagatcagttatctctgttccagtatctgctttctggtcgatggcaaaaggtcagggttagcagtagtccgttttatacatatctgggaggaaaagacctgttctttggtaatgatgccggacaaattaccgcgtcagaccatgcccggtattttcgttgcatagagattaaggattattttcaggagacggatgccggtattctggatgctctgatgtatctccccgttgagtatgtcgtgacatcgtcctttactgcgatggataagcagtcagcgattaaggcgctggatgatcagatcgataagctggaaatgacagatgatgctgccaaatctttgctggcagatctgaaagtcggactggatatggtttccagtggatatatttctttcgggaaatcgcatcagaccctggttgtctttgcggattcaccggagcgtctggtgaaagacaccaatatcgtgacttccactctggaagatttggggctgattgtcacttattcaacactgagtcttggcgcagcttattttgctcagctaccaggaaattatacgcttcgccctcgtctgagtaccctcagtagtcttaattttgccgaaatggaaagttttcataatttcttttcaggaaaagaaaaaggaaatacctggggggaaaaactgattactcttcgggggtcaggtaatgatatctaccatctgaattaccatatgacgactgaacatcagaatttcttcggtaagaacccgacgctggggcataccgaaattctcggtacgtctaacgtgggtaaaaccgtattactgatgacaaaagcatttgccgcccagcagttcggtacgccggaatcattccctgcaaacagaaaactgaaaaaactgaccacggtttttttcgataaagaccgggcaggtgaagtcggtatacgggcaatggggggatcttattaccgggtgaaggagggagagccgacaggatggaatcccgccgcactgccgccaacaaaacgtaatatcgcttttatgaaggacctggtgaggctgctttgtactctcaacagtgagccgctcgatgattaccagaacagcctgatttcagatgcggttgaacgtcttatgcaacggtcagatcgctcttatcctgttagtaaactacggcctcttatccaggagccggatgatactgaaaccaaacgtcatggacttaaagcccgtcttaagccgtggacgcagggggaagagtttggctgggtgttcgacaatcgggaagacacgtttgatgtcgataacctggatgttttcggtattgatggaacggagttcctggataataaggtgctggccagtgctgcttcattctatctcatctatcgggtcaccatgctggccgatggtcgcaggcttcttatctacatggatgagttctggcaatggatcaataacgaagcgttcagggactttgtttacaacaagctgaaaaccggacgtaaactcgatatggtgcttgtcgtagccacacagtcaccggatgaactgattaaatcacccattgcggcagcggttcgtgaacaatgcgccactcatatctatctggcaaacccgaaagccaaacgtagtgaatatgttgatggtttgcaggtcagggagctttattttgacaaaattaaagctattgatccgctgtcccgccagttcctggttgttaagaacccacagaggaaaggtgaaagtgatgattttgctgcttttgccagactggagctgggaaaagcagcgtattacttaccggttctcagtgcatcaaaaccccagttagaactgttcgatgaaatatggaaagaaggaatgaagccggaagagtggcttgatacctatctggaacaggcgaacctgatttga

SEQ ID NO: 152705 - DNA, 297 bp, Enterobacter cloacae
atgtcgaaattaaatctgaataaacgttatttaacgctttctctatttatggctgcgttgatgctttgtgttgcagaacctgcttttgcggatgatgtgtctacgaagacaactggttttttacagaaaataattgattttttaacggatgttcgtaaaccggcaattacaattatggctcttgttattggatatattgcattattttcgcgtcaacataccgcatggatagtcccactcgttatcggaattatcatctttattgttgctccttacgtaccgaactggttgtcataa

SEQ ID NO: 152706 - DNA, 648 bp, Enterobacter cloacae
atgttatctacttctacttttcttgcgcttgccatgcaatgcgctgccagcgttcatcctgacacaacgcacgaagtcgccagggttgaatcaggttttaacccatatgcgattgcggaaataataccaaaggttaaacgcaaacctggtgataaaggcgtagtatcttactttcctgaatcaaaggaggcagcacttaagatcgttaaaaacattgaattacggaatcatcgttactctgtaggacttatgcaaataacgagtaccaattttgcaaagtttggtacaacagcagagaaaatgtttgatccatgcgaaaatcttaaggtatcagaaaaaatactggttgactgttataaacgaggtggcgacttagtgcgtgggctgagttgctattattccggcaatccagaaacaggagtaaagccagaacctgaatttaataatacaagttatgtacaacgtataggatttagccctcctgataataaaaaaagttttattgttccctctgtaaaggaaatgattaaaaaggagaataagacgactatcacacctgaagaaatcattatatatcctcaatacgccatacgtggcactgtatcgaatgaaaaggaaacaaaagatgtcgaaattaaatctgaataa

SEQ ID NO: 152707 - DNA, 222 bp, Enterobacter cloacae; identical to SEQ ID NO: 12386

SEQ ID NO: 152708 - DNA, 507 bp, Enterobacter cloacae; identical to SEQ ID NO: 12385

SEQ ID NO: 152709 - DNA, 1167 bp, Enterobacter cloacae
atgggcgtttacgttgataaagaatatcgtgttaaacggaagtcatcagaaaatggtcgtaagtcagctttcgctcataaagtcaaaaatggtggaaagaactatagccgcaatgttcaggaacgtatcaatcgcaagggagccagtaaggaggtcgttgtcaaaatatcaggaggtgcgattacccggcagggagttcgaaacagtattgactatatgagccgtgagtcagagctaccagtgatgagtgaaagcggtcaggtatggacaggtgacgaaattcaggaggctaaagagcacatgatagatcgtgctaatgatcctcagcatgtgataaatgataaaggtaaagaaaataaaaagatcacacagaatattgttttctcacctccggtttcagcgaaagtaaaacctgaagacttgctggagtctgtcaggaaaacgatgcagaaaaaatatcctaatcaccgttttgttcttggataccactgtgacaagaaagaacatcctcacgttcatgttgtttttcgtatccgtgataatgacggtaaacgcgctgacatcaggaaaaaagatttacgggaaatccgtacaggtttttgtgaagagttgaagttaaaaggttatgacgttaaagcgacccataagcaacagcatggacttaatcagtctgttaaagatgcacataatacagcaccaaaaagacagaaaggtgtttatgaggttgttgatattggctatgaccattatcagaacgataaaacaaagtctaagcaacattttataaagctaaagactcttaacaagggggttgagaaaacatactggggggctgattttggggacttatgttcgcgggaaagcgttaaagcaggtgatcttgtcagactgaagaaacttggtcagaaagaagtaaaaatcccggcgctcgataaaaacggtgttcagcatggctggaaaacggttcacagaaatgagtggcagttagaaaatctgggggttaagggtatagacagaacaccttcagccagcaaagagctggtactgaacagccctgatatgctgctgaagcaacaacagcgaatggcgcagtttacgcagcagaaagcatccacgttacagtcagaacagaagctgaaaacagggattaagtttttgggcttataa

SEQ ID NO: 152710 - DNA, 210 bp, Enterobacter cloacae; identical to SEQ ID NO: 79281

SEQ ID NO: 152711 - DNA, 273 bp, Enterobacter cloacae
atgacaaaacatgaatttgtgtcctttgtcagtggagaattgcggcagggcgctgtacgcttttctcttgcttttaacagcaaaggagaaattgttctgtactggactaataaggcaggaatacgagtatggaggatattaagtggtaatcgtggcaaaaaaccaagcaaagctaacctcgaaagaatgagtaacttccggcgctggctttttgatgcccgtcagggcatggaaggctacactcagcaacctgaacagagcaaccttagctga

SEQ ID NO: 152712 - DNA, 246 bp, Enterobacter cloacae
atgacaatcaacatcaccactcacggtttcaacatccccagcattcccatgaatactgacatcagcattttcggttactattttatttacatttccatgtatttctaccttaatactcctgcctttaaaaaccactgttttattaccaattttaatacaatcatcagtgacaacaatgttttcactattttctaccgagacatgctcttttccatcgatggtaattttattaccggcaacgattaa

SEQ ID NO: 152713 - DNA, 300 bp, Enterobacter cloacae; identical to SEQ ID NO: 12413

SEQ ID NO: 152714 - DNA, 228 bp, Enterobacter cloacae; identical to SEQ ID NO: 12412

SEQ ID NO: 152715 - DNA, 252 bp, Enterobacter cloacae; identical to SEQ ID NO: 12411

SEQ ID NO: 152716 - DNA, 543 bp, Enterobacter cloacae; identical to SEQ ID NO: 12410

SEQ ID NO: 152717 - DNA, 768 bp, Enterobacter cloacae
atggcctgtgcaccctggtacgttcgtcagcggctgcgccgcgcttcggggcgatgtggctcctgtgctgcccaggtattttcgttcgccccttccatccgcttacgcggattaaaaaacgtgataacaatcacttatcgagtaaaaaaacggaagaaaacttgcaaatacgactttaaagtcgtattgttatttcatcgaaaggggaatggcccctctcacaatagcccaacagggcaggagattaaaaaaatgaatatccaggaagcattaaacgtttttggattatccggcgaattaactgaaaaagatatcaaagcagcatacagaaaagccgctttaaaatatcatccagatcgtaacccgttaggggctgaactgatgaaagcggtaaatgcagcttttgatgtattgatggcaaatattgataaaataaatcagttccagagcactgatgaacatgcacgatataattacggtgatgacctggaaaaagtattaaacgttctttctggtttatctggtctggtatttgaagtgataggtaactgggtctggattagtggagaaaccattacacataaggaaactttaaaagaaatcgggtgtaaatgggcggcaaagaaaaaacaatggttttatcgtccagacgaacataaaagttactggaatcgtgaagaacacacgatagaagaaatccgcgcaaaatacggtacaaccggacagcgcagggcgacagggtggcaacgcgtggaaaccagagcgtaa

SEQ ID NO: 152718 - DNA, 351 bp, Enterobacter cloacae; identical to SEQ ID NO: 12408

SEQ ID NO: 152719 - DNA, 336 bp, Enterobacter cloacae; identical to SEQ ID NO: 12407

SEQ ID NO: 152720 - DNA, 897 bp, Enterobacter cloacae; identical to SEQ ID NO: 12406

SEQ ID NO: 152721 - DNA, 444 bp, Enterobacter cloacae
atggctaaaatctatcaattcccccagggggaggaacgcggtaaattcaggaaagaaatcgccagagaacgtaagaaacgttttgcggtgaacacagggagcatttttgttaagtggcttggctggggatggttttatcttcgtcttctggccgccagtgttttacattttgtctctgtttttgtgttagccattcttggtgcgtttaaatgggctgtgttctggctgggggggattttgtgtgtcatcacctggtatcatctcgatcaccagttatggacgccacaaaatctgaccataccggtgattacggcaacctggattttgggactgctggctgagcctctgatggagctgctcaacaaaactatgccctggcacaagttacttgttcccgaacctgcggacgaaagcaccgagaacagtagcgagataagccagtaa

SEQ ID NO: 152722 - DNA, 639 bp, Enterobacter cloacae
atgaacaagactatttattccaaaaagattgccgaaagcctttcatctggcaatcatcctaaagagttcgcaacgctctttgtcgcgctgctccgacagctagcgatggggggacctgtatcacgcgaaaagctcgccggcgcactcggatggtctggagcgagagttgcaacggtacttgagcaggcacctggtacggaatatgacgacgaggccaatatcattggactggggctgacactacgtgaaacctctcacgtttttgaggtggatggccgtcatttgtacacatggtgtgcgctggacaccttgatgtttcccgccttgaccggcaagattgcccgtgtcacttcccgctgcgccgccaccggtaggccgatcactctcaccgttgcaccagaagcagtgcttcatgtcgaaccggcagaagcaatggtttcactgcgaactccggatacttcgcccgacattcgttgttcgttttgctgtcatgtgcatttctttgcgtctccgtctattgcaaattcgtgggcttcgacccaccaagggattgaggtcgtgcctgtcgagagtgcgttcgaccttggtcatgatgtcgcgcttaagctgctagaggactgcgaggaaagcccagtatga

SEQ ID NO: 152723 - DNA, 351 bp, Enterobacter cloacae; identical to SEQ ID NO: 10325

SEQ ID NO: 152724 - DNA, 558 bp, Enterobacter cloacae
ttgcagctcagagtttttctgtgcaaacgaatagccaggcatcagcagttttaccccggccatggtgccagccgtggcaattccgacaccggcagcaccagccgccgccgcactacccgcaagggatttaccggtctgataccgctctttaacccggctcagctttgcctgttgctgactgacccgcgccagcgcctcacgttgccggttaagctgcgcagtagtctcactgatgctggttttaaggcgacgctcgtcagccgacagcgtgcgggtgtttatcccggcctgtgcaagctcggtgcgctggcgctgtaccgactgcctgagcccgttatatttgagttgcaggtcagcggcggatttttttgccgcctccatcgcgcgcgcctgcgctttggtggggttttccgtgtttttaaactggacggcaagctctgcggcctcctgtttcgctttattaagcgactgaccggtcacggcaagctgtgcgctcgctttcctgaatccgtcgattcgggacgcctgcgcgttaaggtcgcgcagggtcgtctgtga

SEQ ID NO: 152725 - DNA, 273 bp, Enterobacter cloacae
gtgccggtggccgcgtggctcagggaaaaccagccggatatctgcacgctcgatgaggggcataaaaagggctaccgcttccagatggatttaaacgacgaggatacggttgatatcagcattagcctccagctcaccgagcgcaccatcatcagggaggaaaacggcgcgctgcatgtgagctatgccccggagccgccgccgcctgaacccgtcacgcgtccaaaagagctctatatcaacggtgaactggtgagcaagtgggatgagtga

SEQ ID NO: 152726 - DNA, 207 bp, Enterobacter cloacae
atgaaagccagtggccgtgaaaacggtgctgtggtggaatttaccggaaatgtgcagcgtatcgcgcgtgtccatcagtacggcctcaaagaccggccaaacgtgcacgctcaggatgtgcagtacgcagagcgccagttactcggatttagccaggcggataaacagctcgtcgaaacgctgactatcaaacatcttagccgctga

SEQ ID NO: 152727 - DNA, 222 bp, Enterobacter cloacae
atgaccgcagagattattgaccaagcgaatgaactggctcagcaacgtatcgatatggcgatcgccgctcaccgtctaaatcgcaacgccgtatcagatgagcgttgtgaagaatgcggcgaaccaattcccgagccgcggcgcgctgccgttcccggctgccagacgtgcgccagttaccagggtgatttggaacttatccgtaagcaaaggggctcctga

SEQ ID NO: 152728 - DNA, 654 bp, Enterobacter cloacae
  misc_feature (640)..(649): n is a, c, g, or t
ttgaacaacaatccagtgaatgcttcacctgcaaaaaagttttttgtggatatgctaactcgcgatattgaacttacagatgcaatccttgatcttgtggataactgcctcgacggagcaatgcggtcaatatcaagcaatccttctaccaaagataaaaaatatagcggtttctacacaaatttgataatggacaaggataaatttatcatcgaagataattgcggcggaatatctgcggaacgggccgaaaaagaagcatttcgattagggaacactaacttcggtaaagaaagaaaagttccaaccataggtgtttatggcatcgggatgaaaagggcaatgtttaaaatgggctctcattctgttgtttcgacaaaaacagacgaagatgagtatgaagtcgagattcgtcctgattggctaacaaatgataacgactggtacctaccattaacacataaagccaccggattaaatcataatggtactaggattgaaataactcaaataagagatgggatatctaaattattaggagacaagtacgttttccaatcagacctaatgaacgtaatatcaaatcactttgcaatagtaataaaaaaaggttttaaaattagtttaaatggccaagagnnnnnnnnnnattaa

SEQ ID NO: 152729 - DNA, 795 bp, Enterobacter cloacae
  misc_feature (12)..(21): n is a, c, g, or t
atggccaagagnnnnnnnnnnattaaacctaatctcacaactctcctttataatgaaaatgcttttaaagatggagatggaataacaccttacgtttacacaaatgatataaatggtgtgaatatagagttatcagtcggtttttatcgagatctaacaacagatgatgaagatgaagaatatctggaatctaaaacatcaagcgaaaaagctgggtggactgtcatctgtaatgaccgagttgttatctattccgataaaacaagattaacaggctggggtgaagcaggtgtgcctgcatatcacacacaatttattggtattgcaggcgttgttaaattcacttcgaatgatgccagtttattaccagtgaccactacgaaacgcggtattgatggtaattcagatctttacttagccgttaaagattatatgcgcgaaggacttaaaacctttataaatttcacaaataaatggaaatcctacggtaacagtaataacactataaaatcgatgagtaataaatcgcttcctgcaacatccagtgaactcattaatctgattcccaaaaaacaactcaaagcaaaccctaaaccatttggaggaaaaatatacaaacccgctctcccattgccaaaggttattaataaaactaaactcattaaatatagcgttgaaatcgatgagttcaaccaagtagcagagtatttattcgatgatgtgaatgtaccagctgttgacgtagggcgtaaaacatttgataaaatgttaaaagaggctttagaaaatgagtaa

SEQ ID NO: 152730 - DNA, 1005 bp, Enterobacter cloacae
atgagtaatggaaacagcataccttaccatcttagacataataaggctgttgaccgcaatttgttcattgatctattaggaaagatcaataactgtaaaaacatttcagattatgtttatgctggttttggagggccattcctcgaagattttaaagtaatgcatagcgtacttaaaataaaaaaaatgatttctcttgagatcgttgaaaacacacataagcggcagaaattcaatatgccgaactcttgtatagatattggtaaagaaccacaaacgagccaaaattttcttactaattataactttaaaaaaagaactcggcatgtcgtatggctcgactatacgttaccctctatgttaaacgaccaattaggggagatagaactactctgcaacaaacttaatgctcacgatatattaaaagttactgttaacgctcatgcagaaacgcttggccgcgatcccaacgcaccctattctgcaactccgcatgaatttcgtgcgtcaaatttaagcgccatattggatagatatgcaccctacccaataatgcctgagcatgtgacttcaaaaaattatccaataacattactacacgcaatacgtaaagcagtaaacatgggtctgtccacaaggtctgatatatttatgcaaccattatcatcttttatttatgctgatggccaaacgatgctcacagccactggaattttgctcgaaaacgaagaaccaagaataaatcgtttcttcaaaaagtctcgcttggagcattggccatttattgataaaacgtgggataagccccgaaatattactattcctactatgtccttgaaggaaaggttcgaaattgaatctaaactcccaaatagtacacctgaagaaatcattgattctatggggttctatctctctgaaacagaacccaagacaataaatcaattaaaaacctttattgaatatcaaagagcaataccctggttttctaaagtgcaattctga

SEQ ID NO: 152731 - DNA, 1230 bp, Enterobacter cloacae
atgatcaaaacattaactcaaaaagagcggaaaaaagcatgttatactaacataaagataaaagtgggtatgtttaactatatgaaagctatagatttatttgcgggtgttggtgggcttagtctaggtgctgcaagagcaggatttgaaatagccgccgctgttgaaattgattcgcacgctattgaaacacatcatgttaacttcccaaattcacgacactttatggatgatgtttcttccattgatggaatggaattattaaaaagtattaatttggaatcactagattgtttaattggtggtccaccttgccaaggattcagtagcattggaaaaggaaatgttgatgacgtaaggaatgaattatattttcatttcttcaggattattaatgaaatacaaccattatgctttttggctgaaaatgtaccgggcattatgaatgaaaaatatgatccgattagaaataaagcactgtcgttaatcaaagatgattattatattttgccaccattgaaagtcaaagcttctgattatggtgcacctacaacaagaacacgtatatttttcataggttataaaaagactctaggaaaaaacctgctggatataaaacaatttctcccaaaggaagatgaacgcttgattactgtaggtgatgcgttagccgggatcaattttaatgtagaaccaacttggcagactgatgctgaggcttggcataaagtaaaacgtcatttccatggctctttttacaataaattgtggggtgagataccttctggtgttggagataaagaaacgcttaacaaattgaaaatgaataaagtttctggatttctgggtacgcttcacagcgaagaagttcagaagcgttataacaatttgcaatttggtgaaattgatcttatatctaaatctaaacgactggatcctaatggattttgccccacattaagggctggcacagggaaggaaaaaggcagttttcaagcagttaggcctattcatccataccaacctcgtgttattagcccacgggaagctgctcggcttcaaggtttccctgattggttcaaatttcacccaacaaaatggcatagtttcaggcaaattggtaacagcgtttgccctatagttgctgaagcaatgctgttaccattagctgagttatgtaaaatgtttactcagaattgcactttagaaaaccagggtattgctctttga

SEQ ID NO: 152732 - DNA, 468 bp, Enterobacter cloacae
atgtcccgttttattctgggtgactgcgtgcaggtgatgtcccgttttccggcgcgtgccgtcgattttattcttaccgacccaccgtacctggttggctataaggaccgtaccggccgcaccctggccggggacaactcttccgaatggctccagcccgcctgtcatgaaatgtaccgcgtgctgaaaaatgacagcctcatggtgagtttctatgcctggaaccgcgcggatctgtttctgaatgcgtggaaaacggccggtttcagggtggttggccatatcgtctttgccaagagctacgcctcaaaatcgacgttcgtgggttacacccatgagagtgcctacctgctggcaaagggaaggccgcaaaccccggaccgtcccatcccggacgtgatcccctggaaatacacgggcaccggaaaccgtctgcacctggtatacccggtggagcgacgagtttga

SEQ ID NO: 152733 - DNA, 306 bp, Enterobacter cloacae
atggtagcgggtctgcccttccggcgtggtgcgggcgaccagctggccgctcgcgctccaggcgaaggcatgggtaatggcctccggatgtccagcggcaaaggtgcgcgctatcgtacgcccgcaggcgtcgtagcgatactgcgaggccacgccatccagccccacctcttccagcagcagcgagtccgcaccccagcggaactggtacgcttcgccgttttcgttttccagggcaatcagacgcccgcggctgtcccagcggcgacgcacctcttcaccctgcgtattacgggtggcggttaa

SEQ ID NO: 152734 - DNA, 1050 bp, Enterobacter cloacae
atgagtaaaatcagggtattgtctgtcgatgattcggcgctgatgcgtcagatcatgaccgaaatcatcaatagccacagcgatatggagatggtggcaacagcgcccgatccgctggtcgcgcgggatttaatcaaaaaatataaccccgacgtgctgacgctggatgtcgaaatgccacgcatggatggcatcggtttcctggaaaaattaatgcgcctgcgcccgatgccggtggtgatggtgtcatctctgacaggtaaaggttcagaaatcaccctgcgcgcgctggagctgggggcggtggattttgtcaccaagccgcagctcggcattcgcgaggggatgctggcgtacagcgagatgatcgccgagaaaatccgtaccgcgtcgcgcgcaaaactggcggcccacaagccgatggccgcgccggcaaccctgaaggccggaccattactcagctcggaaaaactgctggtcattggggcctcaaccggaggaacagaggcaattcgccatgtactccagccattgccgctctcaagcccgggtatcctgattacgcaacatatgccgccgggctttacccgctcattcgcggagcgcctgaataagctgtgccagatcagcgtgaaagaggcggaagacggcgagcgcgtgctgccaggtcacgcgtatatcgccccgggtgacaaacatatggagctggcgcgcagcggggcgaactatcaaatcaaaattcatgacgggccgccggttaaccggcaccgtccgtcggtggatgtgctgtttcattcggtggcgaaacatgcggggcgcaacgccgtgggggtgatcctgacggggatgggcaacgacggcgccgccggaatgctcgcgatgcaccaggctggcgcctggacgattgcgcagaatgaagcaagttgtgtggtgttcggcatgccgcgcgaggccatcaatatgggtggcgtaagcgaagtggtcgatcttagccaggtaagccagcagatgctggcgaaaatcagtgccggacaggcaatacgtatttga

SEQ ID NO: 152735 - DNA, 963 bp, Enterobacter cloacae
gtgaaacgcctgttgatagccatactgttgctgttctcgggcagcggctgggcggtctgcaccgtcagtacggtgaacgcctcgtttggcagcgtcacctcattcgccctgagcagtacgggggaggtgcaaaccaccggcacgctggtggtgtcctgcgatactgttctcaacctgctaaccaacgactcggtgacgctgacctacacctcggcgtcgatagccgccaacagccgcgccaccatgaaacgtaccgataatgcggccatcgcggacgttatccccacgcgcctgtgcggtgccactggctgcggcggaaacagtgaagtacaaatcagcaaaacctatacctggaatggcaacaccctgctcgggctgctggggtcaaggcgctacaacattccgctttatttccgtactgtgccggggcagaacgtcacggccgggccgtaccaggtgttgttaacgttcagcatcaactacaacgtgtgcgccgttggcgcgggcgggctatgcctgaccccgcaaaccggcacggcaactacctccattctcctcaacatgaccgtcaccaacgattgcagcacgatgaccacgccggacgtgaattttaacagcgcgccgctggtgcaaaattttcccaccgtttcgcagtcgatcgccgtcacctgcaccaagggcagcacctacaccataggcattaataatggagcaaacgccctgaacaacgttcgtcgtatggttagcggcagcaattttatgagttacgacatctataaagaggcgaccagcaaccgctggggcggcagtggcagcgagcgctgggccagcgccagctcatcccaggtcagtaccgacgggcttttacgcacctataactacagcgctaaggtcctgaccagccaggccacgccgcctgctggaacctacaccgacacgctgatcgttgacgtcgcgttctga

SEQ ID NO: 152736 - DNA, 642 bp, Enterobacter cloacae
atgaaagagtttttagagagcttaagtaaatcagcatgggaaacgtcatgcgcaagatacaattcatctcgaagattaaaaataagggaaatattttctacgataagcatagctttaataggattatcaggaatagccctttcgctaatacagttttccttcggtgaagctttcggaaaaaaccttaacaatcttgtggccgctttttcaattgtattaagcatgttacttataataataagtttgattgaatgggggtttgctgcgggtgctaaatcagaggcattatttcgcaatgcggaattacttaatgagcatgaaagaaaaataattctctttaaagcaaagttaactgataaattatctcaagaagactacaataaaattgacactcttcgtgaagagtatgagaagataaagtcaacttgtgtttttaatcatagcccattggattatgaatatcataaaataataagaaaaaggttttatatcactaaaactactgagcattttagtctcctcagagaactgaagggaagattatcatattatctatgtagtatttgggggtatttgttaatatggggtctagtagtatatttcttttatgcggtgattaataaagttattgcattgccttaa

SEQ ID NO: 152737 - DNA, 1410 bp, Enterobacter cloacae
atgagcgtaattgaacaagatgagttatttgatgaacttttttcttcagaaagtctattcaaaacatttaatgagaaatttgttaattcgggggcgaaggggattgatcgtttaaatggaatgcaatactccctcagagctcagagagatttgataaagacgtctgagaagtgtttaaatggaagctttcgcttcagtccatatcttgaaatgttaaaaagcaaagggaggggaaaaaatccaagagttatttcaattccaaccgtccgtgatcgtgtggttttgcggcagctaaatatattcctttgcaaagttttccctgaatatgtgccaaagagcgtggcatcaacatatataagagccttgtcttcagatttcctttcagctaatccagacgatgtatatatttgtagttgtgatattgaaggcttttacgacaacattattaaaacccgattaattaaaaaactttcatcgcgtataaactctaaaaaagcattaaatctaatcgtccgttctttattaacaccaacctcccacggctctgctaagaaaagtcaaaggaaagagtttttcaataaggagaaaggagttccacaagggctttcaatttcaaatgtgcttgcctcaatatacatgtctgatattgatacttcaatggatgcatttaatgtaaaatattaccggtatgttgatgacgtccttatatatggtgataaggaatgtgtatcaaaagcttatttgtcaataagaagaaagctaaagctaagaggtttaaatacgcaccccccatcatctccaaagacacatttaggatatcttaatcaacctttcggttttcttggttatgtttttaagggcaatgatataactgttagagattcaactcttgaggcgttcttacaatctattgccgcacgatttagcgatttcactcataacaaaaaccgcagaatcaaaaagtactctcacttatccattgatgatttaaaagaaatatttgtggaggaactcaatgaaaaaattacaggcgcaatcagtggtaataaacgttatggttgggttgcctactattccaacataaatgatctttctctcctccacaagatagatttcatagcaaaagaaatgttttcgcgattaagtgatttcgatcatcagccgccgacagaacttaaaaaaatttccaggtcttattatgagataaaattcaacccacaaggcggatatattagaaactatgacaaaatagagacgcttaaacaaaaaacagattttttagttagcagaggtagaattgctccagatgaaaggcttaccagagatcaaatcgaagagcgttttgaacgttataaagcgacaattttgtcccggatgcaggcagatgaaggtgaaatgtatcctaagtaa

SEQ ID NO: 152738 - DNA, 1212 bp, Enterobacter cloacae
gtgctgacaactctcatttatcgaagccagctgagcttaacctgcacctccgcagcgttaagcgcgctggttgaacaggccaggatccgtaatacggagcagggcatctcaggcattcttctctcccgtggacgtgacgttctgcaaattctcgaaggcacggaacagagcgtcgtcgcgctttttaacaccatccgtgcggatgaccggcataccggcgtggtggagctgatgcgcgattacggcccgcgcagacgtttcgaagacgtgggaatgctgctgtttgacctggatgttcagaccccgaaagcggttctggcgtcggttctgcattacagcaagctggaaagctatctgacttctgaggatcgggtcttcaaatttattcagacctttatcaccggcaaaaccgctatcccacccgcttcggactatgagcctgataaatggacgctttcacgagagcgcgcgccgtttggtaaagggttaggtctgctggcgggacagccctgccagtttgcgctgcaacccattgtcgagccgtccgaaggcaaaatcagttctctcgaagcgcttatacgcggaaacgacggcggcagcccggagcatttcttccatagtctcgatcgtgaacagatttacgaagtcgacctgcaaaccaaagcctggacctttgcgctggcgcaaaagctcggcatcggcagccacaaactggcggtgaacctgctgccaatgtcgctggttaacgtgccgggcgcggtagagttcctggtaacgcagatcaaaaagcacaatctacagccagatcaggtgatcattgaagtcactgagaacgagatgatctctggcttcaaccagtttaacagcgccattaaacagctgcgcgcggaaggggttgggctggcgatagatgattttggttccggctatgctggtctttcactgctcacgcggttccagccggataagctcaaaatcgacagagagatcgtcagcgatatccacctcagcgggcccaagcaggcgattgtgaagtcgataatcagctgctgcaccgatctggagattacgctggtcgcagaaggcattgagaagatagaagagtggtgctggcttgaatccgccggtattcgccgcttccagggctttttgttcgcccgcccgcagctcaatggcgtgggtgatattcactggccccatcgggtgggttaa

SEQ ID NO: 152739 - DNA, 375 bp, Enterobacter cloacae
atgacaaacgtaagcgcagtggaaaaaatggctgaattaatgcagcagatggaggagaactcgccgcgagtagctgctctccagtattgcctgacccaactggaagccaagtgcgcggcgctggctgcggagaatgcggggctgaataacttcattaaggctgattgctgggtctgggatgacaaagccgaagaatatatcgacgcagttgattgtatgccagaaatcccggcaacagacgctttcctggctgaagtgcgggccagcggtgtggagatgcttgccagagaaacagaaaaactcggatggcatgaatcaacagtaagatttgtgctgaagttcgctgccaaaattcgtaaaggagcgcagtcatga

SEQ ID NO: 152740 - DNA, 477 bp, Enterobacter cloacae
atgagcaacatcgacaaacgcgcattacgtgaagcggcggagaaggcgactcctgacgattggaagtattccacttttgactgtgccattactgatgacacctcatcgttggccattgtgaggatggatagtggtcatctcaacgatgaacaatctgcgctaaatggtgctttcatcgccgcagccaaccctgccaccgtgctggcgctgctggatgagctggaagccgcagagaagcgcatagcagaacaacgtgagtattacgaaggcgttattgctgatggaagtcgtcggatagcagagctggaggcgaagattgaaacatctgacaaattgcaggatagcgcgtttcgccatggccttcagcatggttttagctacggacagacaaacgaccaggctagatatgagcaatgcatagcagcatatagccagaaaaaaatcgccgctggcatcatcactaaggtgggggagtag

SEQ ID NO: 152741 - DNA, 369 bp, Enterobacter cloacae
atgggcatcaaagtgcgcggcgttaagcagtctaaagccgggctcaaccgcatcataaacgacgtgcagggccgcaaggttgtccgggccatccagtcagcgctaatcatcggtagctctcaggccgcgctgtatacgccaatcgacacttcaacgctgctgaatagccagttccgcgacataaccgtgaacggcaaccgtgtgactggccgtgtgggctactccgctaattacgcgatgtatgttcacgatccgaatgtgccgcagaccttccgccgggccactgcgcggaaagagttcctgactaaaggttttgaggatatgcgcagtcagatcgatgcggtgatgcgcaaggagctttcgctatga

SEQ ID NO: 152742 - DNA, 2391 bp, Enterobacter cloacae
atggcaggagaggaaatagcaggcagcatcgtctacgaagtgggcgcagaaattgagccatttctccagagtggaaggcaggtaaataaggccctcagtgaaattgagagtgctctcgatgcaaatatctctcaatttaaaaaaatggatactcaggtatcagcgacagcgcaggccgtcaaccagtcggtgcgcagttttagtggcttccagaacgccctccgccagggtggttaccaggttcaagacttcatagttcaggttcaaggcgggcaatcagctcttgtggctctaagccagcaaggatcccaattgttgggggtgttcggcactggcggcgcagtcgcgggtgcattgttaacgctgggtacggttatcgttggctccctaatcgctggaatggataacgcaaccatttcgaccaaggcactcacggaagcacaaaagaggctttcggacattttccaggtgtccgcgaatggtgtcgtcgttctctctgataagtttgctaaattagctgagacaagcgaaaacgcagcccgtgcgcaattaaccatggctcttattgatgctaacaacattattaaagcctctgtgcaaagtgtgaatcaacttggtgatgcacttggcacatggaaagccccgttgtcggcggcaataagccaaatggatgctttgaaagcaaggggtatggatgtaaaccgcgcgttaaaggaacttggtgggacctatgagggaaatataattggtctaaaccaactcaatcaggccgtaaataatatttctgattcattcggaataagcgcggacgatgcaattaagttagttcaggcgcttggtgcggttcgtcagaatgcaaatccagaaaccattgcggcattgcgtgatgttacagtagatctcagccaaaaatatgggtatgcaaataagtctctgtctgaattcacatggaaaatcggcgaatattcattgaagtcagatcaggctaaagaatcaactaggttagccactgaaatgctgcaggggcacaaagttgcttccgaagctgatgcggaagctatagcgcaaaacacccagaggctccaaacctatatccagatgataaaggatgagggggcaactatcgcgatgactgctcgccagaaggctctttacagagctgagcagttaggcgcaagcgatgaagacaaaaaggcgataaacacttcgtttgacaaaattgaagcgtttaagagtgagcaggcactacagaaagaatcagcaaaggaagcgcggaaaacagcagcggcagcatcttctcaggctaaaaaagatataagccagcaagaatccattgctcagaaactggctaatctccgcgctcaatcagacctgaccacagagtcgattgaaaagcgccgtattcaagaggcgggtcttcgtgcggagcagtctcttggtagcgccgcgactcagcagcaactagcggaagcgagggctcttggtgaggcaaacgaaaaggcagcaatctccattcagaagcgcaaagaggctgagcagggacagaagtatgccaaacaggagatagctgccggaaatacctcggtcaaccctatcactggggcatcagtggatccgctggcgcaaatcaatctccaggaaacacaaaagcttgaggccctggctaaatatcaggaactggataagaaaaatacccagctttacgaagacgccaaaactgcaatccagctgcaggcatcaaatgcgcgcatgcaaatagctcaaacggaggcagatcagcaaagagaatccgttctttctattctgggctctgcgtcccagggttttgatagtctggcgtcgataattgctgactctgctggcaagagtaacgcggcgtaccaggtcatgttcgcagccagtaaagcgtttgcgattgcccagtctaccctcagcctgaataccgcaatcatgcaggccatggctgatccgacagcgctgactccagcgcaaaaacttgcgaactatgcagtcatcgcctctgctggagcgtcattgctgtcgaacgttgcgagcatctcatatggcggcgggcgcgagcacggcggacccgtcagcgccaactcaatgtaccgagtgggtgaaggcgggaagccagaaatctaccaggcaagcaacggcagtcagtacatgataccgggtgacaatgggcgggtgattagcaaccgggatatgcgcagtggtgggggcggtggagatgtgacaatccaccaggagaatcactatcacttcgatggaagtcccaacagccaggaaacggtcaaacagtttgacaaggtggcgtacaacgccgcattacgcgccatcagaaatgagcagcgtccaaatgggatgcttgaaaaaagccgttaa

SEQ ID NO: 152743 - DNA, 213 bp, Enterobacter cloacae
atggattaccatatcgaagatattacagcatttgataatgacaatggttccgggattatcgcaagggtcgtttttcattatgaaacgcatctgaaaagtatttcagttaatgttcatattcctctggataagaatgcttctcttgcagttattgaaagtcgtgtattcgaagaagctaaaaagcaacttaaagagcttgctggggaattctga

SEQ ID NO: 152744 - DNA, 219 bp, Enterobacter cloacae
atgactaaaaatactcgtttttcccccgaagtccgtcagagggcgattcgtatgcttctggaaagtcagggcgaatatgactcacagtgggcggcaatttgttccattgcccaaagattggctatacaccggagactctgcgtgtctgggtacgccagcatgagcgagataccggaggcggtgatggcgggctcaccaccgctgaacgtcagcgtctga

SEQ ID NO: 152745 - DNA, 246 bp, Enterobacter cloacae
atgaattacgattcatataatgaagtactcgattatctcaggttttttttcaacgaaagagtggattcatcaatttatttagaaaaactaatgactttgattgaaggatctcgcactgaaaaaacggtgataataagagcaatttatgaaacgtacatgcagtatgtaaaacaaagtagagatggcataaaaattaacgctgaggaaaaagaaatgtggattgacttattgcaccactggaaataa

SEQ ID NO: 152746 - DNA, 1182 bp, Enterobacter cloacae
atgaaactgacagagctaactatcaatggtgtcgggggagtaaaatccctgtacgtaaaatttagacctgacatgaatattatatgtggacctaacggaattggaaaatctaccctcttgcttgctgcttcctttccttttctttatggatacactaataaaataaaacgcaatgtcacttctgaaacaggaagtgttagtctaaaaatagaagataattctaccatcttcaatccagtgttagatgttaacgtccatttgcctacagaaacaatccactattttagtaataacggattcgataaaagaaaactaataaaatttgaaacattacgtaactttgattataagcatcttgaagcgttgaatgcagataaatcactatccgatgatgctgtttcacaacaaattaatttaggtgtcaatttacatgatatcaaggattggtttgctaagagggatttgtttgaaaaagtagataatggttacggtcctaatacaataaaaaatatacatctcgcaagggagtgtatatcaattttaaatccacagttttcttacaatcgcgtcgatcctaaatcttacgatatttttgtaaataccccaaccggggtaatatggtatgaatatctgtcctcggggttcaaatcatgtatgagtctccttctcgggattattaaagagatcgagcttcgttatccggagcaagatctttacgcccaagaattcgatggagtgattcttattgatgaaattgagctccatttgcatcctgagtggcaggcaagaatcactgaagccctaacgacaacatttccatcagcacaatttatcgtcacaactcacagcccacatgtagtacagaatgcaaaatcacatcagatcattgcgttagtaccagataatgatggcgcagtgagagtaaaagaacttcctgaaaatggcttgggttattcggcttggacagttgaagaggttttgttagatgtaatggggatggaaagcactctcagtagaaaacttcaggaactgcttgataattttgaacgttttgttgatgaagaagatttcgacaaagctaaagaaatttatgattatttggatatggcgttgcatcaaaatagtgttcttcgtaaatctcttaaaataagcctgatgtcaattcgagagagagaagagtaa

SEQ ID NO: 152747 - DNA, 747 bp, Enterobacter cloacae
atgattaagcttgagcggaattttattcctgatttttttactcgtatggatcttctatctttaactcaggagtttaaagataatggaacatctgtctggcatcatccggaagtaaaatcggcatgtctaaaattaggtaatggtaaatgtgcattttgtgaggtcaagctcgaagaggctagcacctataatgaaattgagcattttaaggataaaaaaactttccctgatgatgtcattaaatgggagaatctccttccttcatgccgtcactgtaatggttctaaacaacgccataatgttgtactcaatcctataataaatccatgcaacgatttaccgtcagaacacctttatatgagaggttatcgtattaaaggtaaaactgatttaggtgaaacaacagtggatgttttaaattttaatcacagggagcacaagtttataccgcgttgtaaagcaggggagcttatagatagcagtattgatgacgcaatagaaaagcttaattggtttaatgaaagtccaagtactagacgtaaaaacattcttatgaatctagtcgaggcaatattaggtgagtgtcagaaaacatctcccttttctgctgtgtcagcaacaatgcttcatcgttcagtcgaatattcttatctgaaagagaccatgcaaacgcaagggttatggtcagattatatgcaggaacttcatgatgaatctttgtgcctgacgttaccgtcaattcgctag

SEQ ID NO: 152748 - DNA, 321 bp, Enterobacter cloacae
atgctggatgacgccgactgcggtatgacaatcatgaactggaaagaactaagcgagaaggggctggttttcagaattaatcacgaaattttatacccgccagggctggctgttggatatgaaatgactaacggtgtttcggctggggcttcgtggctgataacggagcctggcaatattcagacgagcttgttgatgatgctaaaaaaatgggtggttaaaatgagccatacgcgaataatgccagcaccgccggtgctgaaatttgctttcagcgccggtggtgttgaacaacgagcgcggcgaggcgttagcctctaa

SEQ ID NO: 152749 - DNA, 837 bp, Enterobacter cloacae
atgtccggcggccagacggagaagcaggcgcagctgatccgcgatttccagccggatatgatcatggtgacgccctcttactgcctgaacctgatcgaagagctggagcgtcagatgggcggtgatgccagcgcctgttccctgcgcgtcggcgtgtttggcgccgagccgtggacgcaggcgatgcgccgcgaaatcgagaaacggctgggcattaccgcgctggatatctatggtctctctgaggtgatggggccgggcgtggcgatggagtgtcttgaaaccgctgacggtccgaccatctgggaagatcacttctacccggagatcgtcaacccgaatgacggcacgccgctggccgacggcgagcagggcgaactgctgttcaccacgctgaccaaagaggcgctgccggtgatccgctaccgcacccgcgacctgacgcgcctgctgccgggcaccgcacgcaccatgcgccggatggatcgcatcagtgggcgcagcgacgacatgctcatcattcgcggcgttaacgtcttcccgtcacagctggaagaggagatcgtcaagttcgaacatctttcgccgcactatcagctggaggtgaaccgccgcgggcatcttgattcactttcggtgaaggtcgagctgaaacagagtagcttaacgctgacgcatgaacagcgttgtcaggtctgccatcagctgcgtcatcggattaaatcgatggtggggatttcaaccgatgtgatgatcgttaactgcggaagcataccgcgatccgagggtaaagcctgccgggtgtttgatttgcgtaaagtggcagccaacggttga

SEQ ID NO: 152750 - DNA, 828 bp, Enterobacter cloacae
atgcttggttccctttctaagcggcttgaggacttgagtttggtccagcgcgagaggttggcctacatcgattttcggctctatttcttcggtgagatcggacgccctgatctgattgagcgcttcggtgtggctccggcaggggcgacacgcgatttggctttgtaccgggaaattgcgccgcataacatcaccttcgatggtagcaacaagatttatcgcatcgggcaggagttctcaccgttgttcgagcacgcatcgctgcgcgttctgtcggcgctgtctctcggttttggcgatggcgtgaacggctcaatgcaggcgctgctaccatgcgaatcccccgcagccctaagcattcccaagatggatgtgttagccacgatttgccgaggcatccacgctaagcgacccgtcgccatccgctactactcgatgagcagcggcgagtccgagcgggtaattgtgccctttgctttggttgataccggcatgcgctggcacgtccgggcctttgatcgcaagagtagagagtttcgggatttcgtcgtcacccgcatcgaagcaccaacattgctctacgaggagccacaagccaacgaacgacaggataacgacatccagtggacgcgcatcgtcgagctggatttcgtgccgcacccgagcgttgagcggcccgatattatcaagatggactatcgtcgatgccacgctgatccacgcgcccagttcaaccaagaaccaggacggcaagcgcgacccggaaatgcaccagaccaagaaggggaaccagtattactttggcatgaaggcgcacatcggcgttga

SEQ ID NO: 152751 - DNA, 891 bp, Enterobacter cloacae
atggatgtgcgaggcccctttgatccggaaagcaacgaattgctggtctgggagatcgaaaagcttcaggagctccggtttagccatcgaggtgatatttttttccgtcaccctgctctcaagttacccgtcaggggagagaacacaggctgtgtatccgtgccatcgggagcgaaagagttggagttggaggtggatgctgacgaagagccgactgctgccaaggagcagaggttgattcatctgcccgttgagggagtcacgtttgatgctcagctgcgcaccaagatcgcctacaacggggatcgtgccaacggtcatggcaagaaggtcgacgacgagcaatgcccgagcagagaaatccaactctccggcgtggctgatcctgtgagcgagggcagcatagcgtcaggagaattccaacaattgggtgagggagagggtgatggggacgagcatgaacggcttgcagatcgcttctcgctgctccgagagattcttgaacaaatcacccaagagtctggagttgcgctggtagcactggaagtgaggcctctgccgcccgttccacgttgcagctaccacatgattgatcacaaaaaatcacgctgttatctgctgacaaggttcaagctgcaaaacggcgatcaacgctaccttctagaaatagatacctcagacaaccggaagaccatgtcaacgcggatcatgggcttcaaagtaggtgttgaggcaggaaaatgcatagacaggatcttgagggagacagtgaaaggctcgttgcgttggccaggcgccatggcgaagtactgtgagcctttgcactctgtgcatcacccgaaagaaagctcatctggggccaaccatgcccgggtgttcgaccggaagtag

SEQ ID NO: 152752 - DNA, 645 bp, Enterobacter cloacae
atgactgagcgcgggatgatttttaacagcgagatggtgcgcgccatcctcgacggccggaaaacgcagacgcgcaggattattaaggactgcacggtcggaaaagacccaatttcaaaattcattcagatcgggaagaagtttatcggctgttacccggaagatgtgcctgaactaatcagggaatgctgcccgtacggagtaccaggcgaccgcatctgggtgcgggagacgtgggcagaggctggagccagcgcgccggatctgaaactttatcgcgcgaattaccctgcgcatgttccaactcattacgagaacgtgccgccggctgaggatgtccgctggacacccagcatccacatgccgcgctgggcgtcccgcatcacgctggagattaccggcgttcgggtcgagcagttaaagagcatcagcgaagaggaggcccgatcagaaggtgttgcccgattgcgtgaaggtttttggaaacattaccagccgggctggacgcagcaccagctaagcgccaggggatcattcgctacgctctgggattccatttacggctctggtgaatgggatagaaacccatgggtctgggtaatcgagtttaagcgtatcgaaggagatggccatgcgactgattaa

SEQ ID NO: 152753 - DNA, 1251 bp, Enterobacter cloacae
gtgcgcgaagagcgggacgataacccgttcagctggtaccgctggcagtacgacagcgccgggcgcatgctcgttcaggacggcacgctgcctggccaggagcagtggcgctgggatgctgccggtaacccgcttgaaggctctgctgagaaggtcacgcacaaccgcctgacgcaactgaacggcattcgctggtgctatgacatccatggccgcaccgtggagaaggataacggccagacccgctggcactaccgctacgacggcgaacatcgcctgacggaagtcatcagccagcctcgggatcgcaacaagccgcagacgcaggtcagcttccgctacgatccactgggccgccgcatcagcaatacgcaccgccagatgcctgacggcctgccaaccggtaagctggtcgccacgcggtttgtccgggaacggttacggctgttacaggaaatgtgcggggatgtgctgctgacctacgtctacagcgatcaggacagctacgacccgctggcgcgtgttgacggcgttgatgccccggaaatcttctggttccactgtcagcccaacggcacgccggagcggatgacggatagcgaagggcaggtgcgctgggaaggggtgaacagcgcctggggcaaactgctgcgggaaagcgagacgcaggtatctgggtattcccagaatctgcggatgcaggggcaatacctgaaccgtgagacagggctgcactacaatctgttccggtattacgacccggattgcagaaggtttacgcagcaggacccgatagggctggcgggggggattaacctttaccagtatgcgccgaacgcgctggggtgggtggatccgtgggggttaaaatgtggtttttctcaaaaggatcgtataacacaaagatgggtggatagattaacagggaaaaaacccgctgatgttcataatattttgacatccaaaggttggacgagaacatatccacaagccaataaaccaggagctatccaacatattcaatatgtcaaaacaacaaaatcaggtactacgtacaaattagattatcatcccggagggactccaactcaacctaatattcatggtaatgattactggaaagtttatcgcgaagttgatggtgctgatgtagtatatgggagaattggtcatggagagtttaaaaattatgatttaataaccgattcacctgtttatgttgacggagttttacttaatgggggggtataa

SEQ ID NO: 152754 - DNA, 321 bp, Enterobacter cloacae
atgccaaatgaagcgattattgttattgatatagctgggaaccttataaaaacccgggcttttggtcagcattttattaaaaaaatgcaggtattaggtttttcattattagatgagtttatggttaggcctgtaagcgatgatctggataagcagagaattattagaattctaattagcgagggtgctctttttttatatgggaatggttggtatccatcagaagtgatggaatattacaaagatcaaggcataaatttcggcatttataagattatatattggagtgataaagatacgtaccatatagaggaaaggtaa

SEQ ID NO: 152755 - DNA, 525 bp, Enterobacter cloacae; identical to SEQ ID NO: 130254

SEQ ID NO: 152756 - DNA, 942 bp, Enterobacter cloacae
atggatgcaggcagcaattcggaaactaatgatatgaagttcaggatagtatacgacggtccagcactggagacgcacgaaatgaatgtgcgtgaccttgctcctgcactcctatccctatcagatgcattagaggaagccggtaaaacagtttatggaaacaagaccgttgtttcagtaaaggtgaatgcttcattcaaagctggctcatttggaatagatctgattgcctcatcgacatcttggttcaaacaggcagttgatttcttttcgggcgattcagtaacagccgcagctaatcttattgctttaattggtttttgccctggtcccagagaaaaaatttgcaagggtctgatccaattagttaaatggatcggcccaagagaaattaaaaagttacacaatctgcctgatagcaacattgaagtctttgttgatgacgaaagtgaaattttcgatagcaaagtaattgaactgtatagaaacattaaacttcgttcttcattgcaagaagttatatgcaagccattagagcaagaaggtatcgacagttttgcttccactgtcgatgatggactgacgttcatgactatcgacaaacaagaggcgcattatttcaaagttgagctgcctgctgaatcaataatctctgagtccacggtagagaaagcccttcagattaaaaacatctcttttaatgaaggcagtcgatggagattttctgatggatccagtagctttttggctgagattaaggaccagaagtttatcagtgatattgataacaacaccttaaacttttctaaaggcgatatgttgcttgttgacctaaaggtaacccaatacatgattggtgataccataaaaaccacattcgaaattgagcatgtaaaaaaacagctgaatccacaaagacaaatagacctccccttcgaataa

SEQ ID NO: 152757 - DNA, 174 bp, Enterobacter cloacae
gtggtggtggcaacaatcaagcgtcgtgaagatacccgtaccatgagtcaaaacggcaaacaaaaacagcactattccttatggattgagctatttgccggacctgagttgcaacggtttctggctgatttattgaacttgaatttaagtaatacgtcgcgtcaggaagtttga

SEQ ID NO: 152758 - DNA, 159 bp, Enterobacter cloacae
atgtggttaaaagacaggcataacaacaaaggagacagcatgattgattacgcacgcaaaccagcacgcattcaggccgttcgcgggaatgcattcactgccccactgcgttttctgtggcgggtgctggcaaacgacatgacctgcccccaggattag

SEQ ID NO: 152759 - DNA, 690 bp, Enterobacter cloacae
atgagtgagcgtaaacgcggcgctgccgcggccattgatattgatgccctgctgcaggatacctggctgcaggtgatcagcctgcgtcacggtccgaaatttcaggatggagaagggcgcacgctgtgggagcgttgcattgctgatgtcgaacgtgtgcagcgtgagctgaaagcgggcgaacttgatgaagccagctgccggcatattctcaccgcacaatgtgcgctgctggatgaggcggttaagagtcgcggtgtggaggatgatgcctgcgtgcagtggtatgacattcccctgcaggggcacttccttggcaccatggacgccggtgacacgctgtgcgatcggatgcgcgatgtgctgcgtgaaccggctcctgaccacgctgtcgtgacctgcttccagcgggtcatgatgctcggattcctcggcaacttccgctccctgaacgatcctgagcggcagaaactcatgaatgcacttaatgaacatgttgcgccgttcagctattcacaaccccatcccgttctggcggaaagccatgccggacgggggatagggggttggcttgcttcatggcccatgcgcattggcctgagtgtggtggtggtcaccgcattatggtggggactggattgctggctggatcagacactgcttaccctgctgccgggagccgtgaaatga

SEQ ID NO: 152760 - DNA, 1251 bp, Enterobacter cloacae; identical to SEQ ID NO: 142939

SEQ ID NO: 152761 - DNA, 216 bp, Enterobacter cloacae
atgttcttaataaacaatcgcgaccgaatcctaaaatacaaatccgaagtgattcaagttaatcctgagttaatagctaaagtggctgaaatggcaggatgtaccgttgaagaaatagaaaaagctgtagaacagtatttcccttctgaggacacacctcaacttagtatgcaggaacggatcgcaatcaaatccaaggaaatcaaacaacaatga

SEQ ID NO: 152762 - DNA, 261 bp, Enterobacter cloacae
atggtcaggagagtgaagttactcatagccgttcaggcattaatgctggcggagaaaaagtacgtggcgatgctatgcaggagtcatatagagaaaatcaggctaagttgcatgaacattcctcgcagggttttggtcctcagaatgagttacagcgccgagtggcggaacaaagatctgaaaatgagcataaaatcaacgaaactgctggagaaattggcaaaaaacaatccactgttcaggcatccagtgatatcctga

SEQ ID NO: 152763 - DNA, 162 bp, Enterobacter cloacae
atgtctggtgtaactggaaaatcgcgacagcacccaagttgcaagttgcagcttgaggaagacaggaaaaacaaaggcacttatagttacaagtcgtatcgttttgaggttctgttcagggagactaactggacaatcatgtattttcagtacatgccgtga

SEQ ID NO: 152764 - DNA, 867 bp, Enterobacter cloacae
atgagtaacaaaccaactgttttcattgcgtcttcatcggaagcatctttacacgctgaagctgttaacctacaacttgctgaagaaatgcagtccgagttatggacgaatgcttttgatttatcgtcaatcactataactcaaattataaaaaaaactaaagagtctgattatgctgtttttatatttcaccctgacgatcaggtttttattaggagtgttgagtataattcagtaagggataatgtagttttagagttggggttgtttattggtagtcttgggcttgataagtgttttatattaattccaaaatcaacggatcgttcttttagattgccttcagatctactaggggtaactgtatctcattacgatgttcaagatgaaaacatattacgtgcaataacaccaagctgtacaaaaattaaatttgcaattaagaatttggaaaacataaagattgatactgatgctcttggtccagagtccgcgttaaaatcacagctaaatgatgctaagtatcaaataatgactatgaattttgacatgcagcgtctgacagagagtgcgaatattgcaaatgatattatcaaaagaatgttcttttcaatggttatgcctgctacgcctttagaaataaaacaatgggaagacggcgctaaagcaacccagcttagagagattgttatcccaaggcataaagtttttgtaatagataaggatgtggcaatccctcctttatttggagctgactcaatctcattgattgttaaggagggtgttactatttatggtctggatagatgcggacatagttcggtgtatttcatggatggattcagggtaaatagagagatagtctga

SEQ ID NO: 152765 - DNA, 1095 bp, Enterobacter cloacae
atgaaaaataatatactatcgatacattatattagaggtatatctgccctaatggtcgttctatttcattttcgaagtgttttaaatgatgtttacgtacagaaggatttaggaaatattcttttcagatggggggagatcggggttgatgcgttttttattataagtggatttataatctgtctctctacgaaaaataaaacttccacaaaagaatttattctaaaaagattttttagaatttacccggcttatattttctttgtctccataagcttatatgttgcatataaaatatcgtccacttcaatggatgatataatcaatgcagttctaatattgccacttgactattcaaagggtggaccattttttggttactcatatttaacagtggcctggagtctgttttatgaaatatcattttatcttatatatttgctttctatgattatatcgcatagatatagagggctaatatgctcagggataattgcagcatttgtattcattccacaactgctagaaaatggcactttatctctaaaccccatatctcattctaaatttgaaacgttacaatacctcaacattctaacatcaccgatgatgttaactttcatcgtaggcatagtgatttatgaagcacttcctatcttgcgctttatatcattaaattcaacggaatggtttattagaatccttttttacagctcatgctttttctttatatattgtttcttgaccggctttaattcatggcatggaattacaaatgctgtaattttcatcattcctgctgtaatattctcaatcgtatatgaaatgagatttgggatccctaaaattagagcacttacatttcttggtgatatctcatattctttgtatttgagtcacatgatcatatttcgcatcttaaataactatggtggcgagttttactctttatcgcatgggttcagtaggatgtttatcctactttcactatccctaatcatatcctatttggcttataatctaatcgaaaaaccgtcagcaaagctttgcagaacattactttcatatcgacctcgtttgaatgttttaacatga

SEQ ID NO: 152766 - DNA, 132 bp, Enterobacter cloacae
atgcgctacatccccttgtacatagctcttttaccggtgttgtattggatgctgaaaatcggttacgcgttttttgttgtgaagtttcataagctacaagctagttctgcatactttaagcaggaagactaa

SEQ ID NO: 152767 - DNA, 423 bp, Enterobacter cloacae
atgcctaacaataacctcaaaaacacagctaaaaatggccttccgctcgttatagcaagcgtattatgtggatacgcaactaatgcaattccggtctttttccccgaaggtgaaactagggaatgggcgtatcgttcaatacctttcttgtcgatcatgattttatttattatcaagacattgaaagattttggcagtatgtcctttagcaagcttgcttttacaatatgcgccagttctgagaagaagcggctattgacgatgataaatgattctaatctgagccaagccaccaaagatgacgccagaaagcgttatgatgaaatcggtcgtcaagaacttgagcttggctctcgagttttgaagtatatttcacaatggcctgttatgaacaaatcgccaactccaccgtctgcagattaa

SEQ ID NO: 152768 - DNA, 312 bp, Enterobacter cloacae
atggcaaatagattggtgaaaatagcatctggcatgagcgttatagtacggctctccagtaggctgaagtatcgatactattctctttgtaaaacactgtgggcaaagatgcacttctacctgctcctcacccacaagttcttttttggaatatacaaaagaaccgaaatcaagttgattaagaacgtaaccttctgtctgggaactaaagtcttcgtactctgcaatttttgctttgagaagtattgcctcttcctcacgctgacgaatcaaatcgcaaagagagaagcactccgcctgaagtgtaattaa

SEQ ID NO: 152769 - DNA, 1458 bp, Enterobacter cloacae
atggaatttttctatgtagtgaaggctacgcagaaatctggcaaagaagacgcagtgatttggttcactgctaaatcagaagcccgtgccaacctgcagctcgatgttgagctggaagatgcttgtattgaaaccggacgcgggaaggattacgccaaaccggttcgcaccgatttcccggtgtataacgacctcccggaagaaagcaccgtggattacacctggtgcaaacgctacgaactgcagaacgatggacgcacctggctgccaaaggctggtgctgagtcgactggacccgtggacaacactgccgcaccggaaccgaccgttaaagtcgaaactaccgtcgagtgtgtcccgcttgaaaaccgcactccagcggtccgttttgccgtccatctgaccagcgacaaatacctgtcccatatcactaaagagcagcagttggctgccagcgaaatgtcactggatgaaggcaacacctatctccagaacctgctgctggcgaaaaacggcattccagaagctgccgaactcagtctgaacgctgagtggaaactagtccaggcgattaaacaggtattcacgccagatgaagcgcacaacaaagaaattattgctgcattcatggctgactgggcgagagctgatgccggcgaccgcaatcagttagttgaagagtggagaagcggaaagcttgctcttctcaaatcagaaagcaccagcgacgccgacgctacaactggtcatgacctcaaacctgataacggtaccccagttgaacaaccgcaggttgaaaatctcggcagtggtgtgttctccatcgatggcctgatgggtggaaatatcgaaccggtcgtcgatacctcctcaaatgaagtagaaaaaacggaaaacgcagtggagacaaccaacgatgtgcagatggaaacggctaagccagagaaagacgaagatgttggttcggtaccaccgcgcgaaagcactgatgcagctaattcgcagacagattccatagcgccagaagagcagcagtcagagccagtaatcgaatacccggcttacgcggtactcgcctttgtctcctttacggatatggaattttccaacgaccttttcccatggcccgtaccactcatattcaaaacggctggccagcacgccgctgcgcgagatgacggcattaaccagctgcgcttcatacccgagcacaccgttaatcaggtgcgttttctgcgccacggcaaagggattcatctgccactgtgccgcttgcatcgctacagccatgcagtcggcctgattgccctgcaggtgcttaggaacagtagcggtgccctgggccataatctgcgcgaacgtgctgatggcattcagatactgggaatcgaacagagccacgttggagttaataacggtgttctggtcagcaacggtaacgttagtgttatgcattaa

SEQ ID NO: 152770 - DNA, 1563 bp, Enterobacter cloacae
gtgctgcgccggtgctgggtttacctctcgttcttcacggcgatcatccagttcatccggggtataaactcccagaattacatccgggcagaacagtctcgcccagcgtttgactgccaggtacgccagctgctggcgagggtcgtcagcccaaagggtagagtttcgggtgcgggcctgagccagcagcaaatcgagttctcttggctgatcttcgcctttaagtgttgcgcgaataatgatgccgatcccggcttcgtcagccagggtccagcccgggacttcgagcctggccgctacgaaggtctgccgaatgatgtttatcacgcagcaaacggtattagctcaacccaggtaaaagatgcccgcgtcagcctgatgtacttcaacgcgcgccatgtggctaaaacaataccgcgcacagcatccaaagtgctagacatggggaacctggtgcatgcccttgcattgcagccggaaaacctcgaagcagagttcagcgtagaacctgagatcccggagggtgctttcaccaccaccgcaactttgcgcgagttcatcgatgcgttcaacgccagcctgccggcgctgcttagcgctgacgagattaaagcgttgcttgaagaacataacgcatcccttcccgctcaagtgccgcttggcgccagcctggaagaaacggctcaaagctatatggctctccctgctgagtatcagcgtattgaagaaggccagaagcagacagcaacggcaatgaaggcatgcattaaagagtacaacgccaccctgcccgtgccggttaaaaccagcggcagccgtgatgcgctactcgagcaattagcgatcatcaatccagacctggtggcgcaagaagcgcagaaacctacaccgctgaaagtgtctggtactaaagcagacatgatccaggcagttaaatcagttaagcccgatgccatgttcgccgacgaactgctggatgcctggcgcgacaaccctggcgaaaagattttggttacccgccagcagttggccacagcgcgagcaattcagtctgcactcctggcgcacccgaccgccggcatgctgctgacacatccaagccgcgccgttgaagtgagctacttcggctttgacgacgaaacaggtttagaagtgcgtgtacgtccggaccttgaaattgaactggacggcgtgcgcatcggtgcggacctgaaaaccatcagcatgtggaacgtgaagcaagaaagcctacgcgccaggctgcaccgggaaatcattgaccgggactaccacctcagtgcgtctatgtattgcgagaccgcggcgctggaccagttcttctggattttcgtcaacaaagacgagaattaccactggatcgccatcattgaggcgtcaaccgaactgctggaactgggcatgcttgagtaccgcaaaacaatgcgcgccatcgccacaggtttcgacacgggcgactggccagcgccgatcactaccgattacaccgatgaactgaacgactttgacctgcgccgcctcgaagcgctgcgcactcaggcttaa

SEQ ID NO: 152771 - DNA, 219 bp, Enterobacter cloacae
atgtggcaaggaattgatggctgcttcgactttgttccgtgcatcaaccaggtaataacgcttaacggccttgtttttcagctcagtgaacagggcagaacccagcgttgctttcacggtttcaatatctgcacgcagagctttagcgctatccacatcctgagccgcctcgatgcggtcacgaaaatcatcagcaagtacatcgatgttttgagctga

SEQ ID NO: 152772 - DNA, 495 bp, Enterobacter cloacae
gtgaagccactttatgcgcagttaaaaacccaccattattcctcaaacgaatcacgtccaggttatgtaccgcgtgacgatctttttaacgaaataggttacgacgccagtgtgttaatcaaatccaatccgggttatatgaacacctgcgcggtccgtatgagccttgccctgttaaaatgtgatgtcaattttgaaggtcgactgactattaaaagtggcccctataaggggagaaaaattgagccgggggcaaagctcttggccgatcaactctataaagccagtgtgtttggcaaggcagagatttataccgatattcgtcaggcgggtgaaaaactccgtaatcgaaaaggtgtgatcttctttaaccgaatcactaattataatggtggtcacatcgacctgctggagcccgttggggataacatgatgcaatgtaactcagactgttataccgactgcaaagaaatatggttctgggagctgaaataa

SEQ ID NO: 152773 - DNA, 405 bp, Enterobacter cloacae
atgaagttacttacccgatatacgttgttagttgctggtctacttggcgcaacttacctctgggctgacagtggccaggacgattcatcaaatctgctgcgtaaccctaatacactgtcccgcaatgacgtgcgaatgagtggtgagaaatttattacagcgtggctagcaaaagataacgaacaagaacagcttaaagccaatatgtatcttcttggcgtaatggatgcgacagaaaataaggcatggtgtggttatagcgtcgcgctacctggttcattacgagagagtatctacaactacttcaaaaaattgcctcaggatcgtaaaaaagaggccgcttcggcattaattacagaagccctttcacaggatctaccgtgcaagaaaggagcacaatcgtga

SEQ ID NO: 152774 - DNA, 234 bp, Enterobacter cloacae
atgaatttagcgagcaaaatgatgacgaggaaattcattagttattttgtagcatatttactgttgtcgatttcgtttatgctgttttttagcatatccggttactatctctttatctttgactggtcaaagggcgccctgatagttacggtgcatggtttcttactattcggactgattgcactctcgatagctatctatgctgtcgcggaaaaaatgaaagagcgcagctaa

SEQ ID NO: 152775 - DNA, 1509 bp, Enterobacter cloacae
atggcacaggttattaataccaatgcattgagcctgatggctcagaacaacctgaacaaatcccagtcttccctgggcaccgctattcagcgcctctcttccggtatgcgtatcaacagcgcaaaagacgatgctgcgggtctggcgatttccaaccgcttcacctcttctatccgcggtatgactcaggcggcgcgtaacgctaacgacggtatctccctggcgcagaccaccgaaggcgcgctggaagaagtgaccgaaaacatgcagcgtatccgcgaactgaccgtgcaggcgaaaaacggcaccaactccgccagcgacctggactccatcaagaaagagatcggtacccgtctggaagagatcagccgtgtggcagacgtgaccaacttcaacggcgtgaaagtgtttgacggttctaaagaaaaaatcaccatccagatcggtgataaagatgctgataccatcgacattaaactgaacaaactggacatggaaactctgggcctggatgagttcctggacgactttgcgggtattggtattaccgtgaatggtgctggtacgctaagtagccagtttaaagaaaaaggtgccccagctccggtagacaagacatttaaagccgccgatttgggtcttgatccagcagctccagattataaactggtcgcagccgatcgcgatgccattatcgcagcagcagatcaggttggtgataaagctgcagcaacagtattgacgtaccaggaagacggtaacacgcgtttcttcgtgaaaggcgctgacgggatacaagaaattacgaccagcttcaaggtcactacagggacgcctgatgtagttgaattcgatgccgctcctgcagctggggataagctcagcgctgcagacgccgacatgctggagttcggcccaacagcactgaaagacactgacaccaaacgcattaaagcgggtgattctgtcaacgtaggcggaaatcctgttaccctcgatgctgctgcactggatgcaatttctgttgccgcgtttggtgacgatgccaaaacttcgggaatgcgtatgtattccgtggctggagcaccgccagatacattctatgctatcaatagcgcaggcgaagttaaacagtttgctcttgatgcgacaggtgttgtaactggcgctgttacggacgcccgtcctgctgatgccgagttcatcaccaaagaatctagccgtctggctgctgaagacctgctggaacgcctcgatgattctctgactcaggttgccgacttccgcgccgacctgggtgccgttcagaaccgcttcagctccatcatcgcaaacctgaacaccaacatcattaacaccaccgaagcgcgttctcgtattcaggacgctgacttctccgtggaagtgtccgccatgagccgtgcaaacatcctgcagcaggcaggcgtgtccgtactggcccaggccaaccaggttccgcagaacgtactgtccctgctgcgttaa

SEQ ID NO: 152776 - DNA, 174 bp, Enterobacter cloacae
atgattaccggatgggatgcacagacctgccgcgatgtcatacagcacagctttaatgcttgggtccgcgagttcggtaccggaaacaagggataccagcaggtcattgaacagtgcgaagcctttctcaacgcgtacggtatgagccgctttgcgccgctggattatgtatga

SEQ ID NO: 152777 - DNA, 210 bp, Enterobacter cloacae
atgtatgacccgcgtgatttgccgattcacgaactgtacggctacagggataaaggggctgactttgacgagccggttctgctttatgtcctgcctgatccattcaagaatgaagtggccaagggcttcaataaggacatagtcgcaagaattctcagtgagtcgggggatgctgaaaaaacctgcccacgggaaatggtggcaggttaa

SEQ ID NO: 152778 - DNA, 582 bp, Enterobacter cloacae
atggaatttttgaaactctatggcaaagagattttttcagtagcagcagcattactcacctggaccttaaatacatacttcaaagctcgcgtgaggcttgcatatggcgagttacataattttactttcctcgttcctgagccactcagaaatccggaaggtgaagttattcgccctcagcaactggtacacacgcgttcggtcacgctgttgaatgaaggtcgggaagtggcaaacaagattgaagttatattcaactatcaaccgagatatctgaatatatggccggttcggaagtttacagaattcaaagagactgacggacgatacataattgaatttgaaagtctcgctccaaaagactctgtcatgtttgaagcactgtctatcaacggagatttgccggatatccttgccataagatcgaaagaatcaatagcacgagaaataaacctcgttcattaccgcgacttcagtcctttggtcaaacgactcctggcttttctcctcctccttggcttcacctcagcagtctacctggcacttctgctcttgcagtggttacttgttaccgctggataa

SEQ ID NO: 152779 - DNA, 1143 bp, Enterobacter cloacae
atgaagaaaactttgattgcaatattagtgggcataacgatgttaaccgggtgtgggccacaagagttaaccccggaacaaaaacaggaagttgcggctcttaaggctgagctatcacagactgagggcgaaatctcagcagcaaaagaagttgatcaacaattttctggtggactgatcaagaatttaaccaccgcaagactggaagttttgggaacgaataaggctcttttagaacagcgtataaatgctattgagtccggtgccaaaattgatgtagtagtctctggtaccaagccagaccctgaacttgcggcctctattaaaacagagatcgataatctgactgcaaaaatcaacgaagctaaagcagatgccagccagtacactggcggtttgatacaggtacttaaactatcagccgttgccactgaagaacaaagcatggctatgctgcagcaaaaatatctaaccgctaagtatggtctcgctgaagttaagcttgcaccaattcaggataatgcagcaaccgccagtggcaagaaggaagcaacggctaaaactacacaagaacaacccccactgctgccgcccgctgaaggcccgttcgggcttgaggctggtctaacccagaaaaatatcgaagatatgatcggggcaaagctaaagccactacctgacagcgtgaatctgtatacttccgataaactaccgaagcaaaacgcagattttgaaatgtatggtttgttgatctcgcctaaagctggcttatgtcaaattagggctgtcggtaaaaacattgataccgatagctatgggcttgctttgaaatcaaggtttgaagatttgagtagctcgttaagctcactttatggaaaggccgaaaccacagaccttttactggctggttcaatctggaaagagcctcaggactggatgatggggctaaataaaaaagagcgcttcctatccgccacttggaagggaacaaaagaaacgccgctaaaaaataatattgctgctatttctatcgaagccagagcgaacagttctgcacagggatatgtttacctacagtatacatttacaaatgatgatgtttgtcaggcggagattgagggagcgaaaaagagctctctataa

SEQ ID NO: 152780 - DNA, 540 bp, Enterobacter cloacae
atggacctttcagcaaagccagagcagcttaagatatctgattttcaaaacatcgaagtaaaaaaatccgaaagccagctattaacgtcacaaacaattgaaaccatgagtactttccctgtttgggacgttaataaaagtagtaacatttttatttttagcatttcatgtggtgattctgttgatagatttataaaggatgtatttcctagggtgcaaaggaaagagcccttcattctggcaaacattctaagacatgaccatgatctcaatgtttggacgcgaatatttaaacttaagcataattacagaatggtattgataaataaaatattccaagattcatttaagaggggagctgggttttccatgaaaagcattcataaagtaattgatgaatatttgtcgtccgtgccacttgtacaggtatattctggatacgacacgaagacggctgccttgtcaggtatactgaccagtgttgcattaaaggaaatttatagtgtaaccaccacccctgttgtgacagtacttaagtga

SEQ ID NO: 152781 - DNA, 351 bp, Enterobacter cloacae
atgcttcccgagggagtgaacacactcgggcaagtattaatgtgtattatttttcagttggacaaagcgcaaagtcatgtaggttatctatggtacaaaccagactcaactaagcgcactgcttttatctacgattttcacattttcaactccaaccaggggttgggacttggcaaacaatctctacgtgcttttgacgagtatttgcaggacaaaggttttaaagagatcagattgcgcgtggcaggtgataatgctcgtgcccgacatgtttatgaaaccagcggtttcggggttacgggtgtcaatatgagtaaatcgattacggtcagagatattggtactcgataa

SEQ ID NO: 152782 - DNA, 492 bp, Enterobacter cloacae
atgggtactgaaacgataattacgcttttaagatacaagcgctggatagatattgaaacgctgcaagcgattaaaaaaattgatgcgtctgttaatgcagaaaagcgccatctgacgctcagattgatgaaccacatacatgtggttgatatgatcttcagagctaacattatcggccagaaacattcctacactgcactgaatacgccagagactccctctgccgatgaacttctggtaacgatgactgaatgtacagactggtatatccaacatgtcgattctatgtcacccattcaacttactgaaacaataaaattccagttcgtcgatggcgggtatggcgaaatgaaggcggtcgatatgctcaatcatgtgttgtttcacgggacatatcatcgcggcgctgtaggttggctactttcagaaagtggtgtaaccccgcctaaggacgtagtgaccgtttttctaagagatcataaccccgactaa

SEQ ID NO: 152783 - DNA, 411 bp, Enterobacter cloacae
atggctgctgttgaggaattgaaagtgaagtatccaggtgcaaatgcctggcaaatgggtgacagcccggaactggccagtgagcttgcggatctgattaaaaaagggatcaaaacagcctcttgcggatcatttgcctcttatcagcaggaagagcctgcgccgaaaattgggagctataacattatccttgatggccagagcatcccggtctgcgtaatcaggctggtttcaatgcgactggttcgtttttgtgatgttactgaggagtttgcccgcaaagaaggtgaaggcgatttaagccttgaatactggcagaaggaacatcagcggtttttcacccgcgaagggtatttctctgaagaaatggagctaattacagaagaatttgaagtggttgaactactgtaa

SEQ ID NO: 152784 - DNA, 399 bp, Enterobacter cloacae
atgaaagaactggatatcagagaagtcgccaaccttacgggagttacaccatcggcgttgcgatattacgaaaagaaagggcttattaaacctattggtcgtaatggccttaggaggcagtacaacgagattgtggtcaataaattgcaattaatcgctctgggacaggcagcaggtttttgtcttgatgagattgccgacatgttcagtgaagacaacaaactcatactcaacaatgttctgcttcttcaacgagcaaaggagatcgacagtaccatccgccggctccagttgttaagccagggactgaagcatgttgcttgctgttcgaaaagcgtgcattccgaatgcgaggagttcaaaaagattgtctcaaaaggacttcggctcgtcatataa

SEQ ID NO: 152785 - DNA, 483 bp, Enterobacter cloacae
ttggatattattttcaaaacgattatcacgggaattggcgcaacgctggttatggatttgtggtcactttttcagaagtacattctgaaaataccaccattgaattatgctttggttgggcgctgggttttactcctccctaaggggaaattcaggcatcacaccattctttcatcgccgcagatacatggagagatgcttactggctggatattccattacctcaccggtatattttttgcgtttatcccgttttcgcttgacggaaagttctggctccatgaaccctcactgttaattggcgtgttgacaggcttaataacgttaactgccccgtttttgatgttgcaacccgcgtttggctttggtatcgcggcctcacgtacacctcatccatggctttcgcgtctgttaagcctgcttacacacattgtatttggtattggcttatatggcgttgccgctgttttggcgtcattctaa

SEQ ID NO: 152786 - DNA, 381 bp, Enterobacter cloacae
atggccgcgataaaaccatttaaacctctggacgagaaatttccgtttgaccgccaactaggcgttgcggctgcacctctcgtgctaatcaacctcttcgcggtcttggatcccgccgacgaagcaggcttcctggacgctttcaaggcagctgccgaggtcataacgaagcaaccgggcttcatttccatgcaattacatcgggcgatcggcgatagtccgacttacctgaactatgtagtgtgggaatccaccgaggcgattcgcgcggccttcactgatcccgagttcctcgcgaaacttccagcatacccttcatccgtcgtagccagccctcatctgttccagaaggtcgccgtccccggcttctgcacagcctga

SEQ ID NO: 152787 - DNA, 894 bp, Enterobacter cloacae
atgaatgacgtcatcatcatcggaggcagctttgccggtcttgccgccgccctgcagcttggccgtgcccgtcgcaaggttacggtcctcgacactggccggcaacgtaatcgctttgctgcccgttcacatggtgtgctcggccacgatcacaagccgccacaggacatcctggccgaggcgcggcagcaactggcacgctacccaacgatcaagctcgtcaacgcgcgggccgaaagcgtatctggcaccatcgacgatttctgcgtcgtcacggacgataacgaaagcctgcgggcgcgccgcttaattctgagctatggcgtcgctgaccagatgcctgatattcccggctttgccgaaagctggggtacatccatcataccatgcccctattgcgacggctttgaagtcgccgaccagcactggggcctcatctggtctggcgtacagtcgcacaatcaggtcaggctcttccacgactggacaaacagattgactgtctttggcaacggtcacgacatcagtctcgacatacgggccgatctggccacccgccaggtacctctcattgatggcaggatcactgaaatcgaacctcacggaagccatagtgccaccatcaggatcgaatccggccccgatgtttcagtcgatattctgttcgcgcatccgcggaccaggccgtccgcaagccttcatgatgcactgggcctcgccacggtcaatacgccaaccggcatcgccctcaagaccgacgagcgccgcgaaaccagcatgcctggcatctacgccgccggtgaccttgccaaccccggtatcccctcggtcactacggcagcatggcaaggcacgatggcgggtatcttcgctcagcagtcgatgctcagttga

SEQ ID NO: 152788 - DNA, 660 bp, Enterobacter cloacae
gtgaccaataaaaacaacccgacccggcggggccggcctgtcaacgaggcgcttggccagacaatcgtcgaggccgcctccgagctattcgtagaattgggatttcaggcgacgaccctggacaaagtcgcccagcgagcgaagatatccaaactcagcatctatcggcacttcgagaacaaggaggcactcttcagtgcggccattgtggccggttgtcatcagttgtttgcaccacagtcccttcttgaaggcgttgacggttcggttgaagatcaactgatggcggtgggatcattactgctgcgcacgttgctgaggcccgacgtgagtagcgtcgaagccatggtcatggctgacaagacgaatcaaaagtcgttaagcaagctccattatgaagctggccccgctcatgtcatcgcccaaatcgaagctcttttacgtcaattgcaccagaaagcgcttctgaacgttcccgatcctcttcaatccgctcgcttgtttgccgcgcttttcaaaggctctgaccttctgattatcgcgcgcttcgatgcggccagagcagaggacgacaacgaaatcgaatcatattgtcggtcggccgtcgccatgtttatcgccgcgcacggtggcacccaggatgcgatatcgcagctgtga

SEQ ID NO: 152789 - DNA, 129 bp, Enterobacter cloacae
atgtatgttgctgtaggacagtttgcggttacgcctgactggcaagagaatgcagataaatgtgtctctctgatgaggcaggcccgcctgaaagaagcatccttgctggtgctgcctggcaagagatga

SEQ ID NO: 152790 - DNA, 1242 bp, Enterobacter cloacae
atgcataaatttattagagatatccctgtaaaatctattttacacctttttttagtaagaggaagtatttacctctttccctttattacacttccggttataacaagaagtctgggtgttacacagttcggtatcttatctatattccttgcagcccaacaatatcttgttatgcttgttgaatatgggtttacattaaccggcgctagagatatatcaagatcgttagaaaaaaaagaagataacattattctttgtgaaattctggtttgcaggcttttaatattcattttctgttcggtacttgtggttgcgacttattttatattaatagattatggattcgctggctgctatataattctactatgtactgtattaagctcagtttgtaatcagacacatttctttattgggaaagaaaagactggttttatagttatatctacttcgatcacacgcgttgtttcaatattaatagttgttctctttgtaagaaataaggatgatatatatattgcaatgcttgcctattctataaatgtggcattgccaaatataatatcgactttttacctgcattattatcttaaatatcaaaccgttagtaaagtattagttagaaacatactattaagatttcgaagcggatttgatatttttatatccaatgtgtttaccaatatatatagttctttaacgttaatatatcttggctcggtgaaaggtcctactgaaacaggttattattccagcgctgataagttaaaatccgctgctcaagggatcttatctccaatagcacaagcatttttcccaaggatttcaaaaaaagaagggaaggaattttatgatctatggaggaaatcaacatttattcttgtaattttttcggttgtgattgttatagggctaatgttatttagcaaagtagtgtatgcaattttcttgggtaaacagtttattgcgggactgcctatatattatattttatcctttagtattatatcaatatcttttggaattgcgtatgcccaaaatttgtatttaacgcaagggaaaaccaaacttcttagaagtatatatttcgttgtttccattcttcatttattacatatgccattgcttgttcacttttatggggccattggtgcggctctttctgtcttaataaccgaatcattagcctcactatttatgtttagtttcaggaaaaaatgtttctcagggagtcaaaattga

SEQ ID NO: 152791 - DNA, 414 bp, Enterobacter cloacae
atgaatggtttttatggtggctttaatttcggcggcaatccgtcatgcggcttcgatgctggagcattcaataatggcctcaatcagtaccttgaatcagtgaaagcgcagctgatgcagcaatacgcaccaccaccacagcaacaaaatccttatgcggcaattgacgcacgcgtagaaaactatatgacgcagaacggctacccgccgcgccagcaggtacagcaacaagaggcggcattatctgcaacgcaggagcagcagcaaaaccccatgcagctggtgactatggcgatctctgagtcagtaagcgctgcagatatggcgctgatagcggcaaattttgctcaggtgccggactggttacgaaccgctgagggaaaaaagttgtgcagcagacaacgaacggaataa

SEQ ID NO: 152792 - DNA, 129 bp, Enterobacter cloacae
atgcccttgttcgatctctggcgcagctgggatcagaacatccgagcgacaaaccaggcgatcaatattggtgcgggcacgcttactgcgaacccgaccaacaccaatacaaacaacaaaattaactaa

SEQ ID NO: 152793 - DNA, 387 bp, Enterobacter cloacae
atggctaggcaagactgggaagcgttgcaagcccggtttctggctgatcatgcggagatagggatcaccctgcaggcgtggtgtgatcgtgaagggctgaattatgcgagtgccaaacggcatataaaaatagcaagttataaaagtgcgaattcgcaaaaaaacgccaataaatctgcgaattcgcaaaacaaaatcagacgaaagccaccgacggccagcaggctggcaccgcacgaaaaaccgctaccccccaaaccatctaacgccactgtatgccccgaaatttacgggctgacagaacagcaggcgatttttgcggatcatgtcgcgcagggaaaatcccgcgtcgatgcgtaccacctggccggctacaccggcacctga

SEQ ID NO: 152794 - DNA, 537 bp, Enterobacter cloacae
atggctttagaaccgaaagatttaactgcattgggtaattcacttattggtttaattggcgttctggcaggcggggcgctaacgcactacttcaatgaacgaaggacagccaatcaagctgcgcgtgatgaaataaaagaaaatagaaagttgatacttcagaagggtgaggagttacatcagttattaaatgaatggaagaaatatgtttctatagtaaatatattttatcataaaatcctaatgggtactgctcatattgatgagttgaacgcctatactgatgaaaataaaagtgtcgcacgtacacatgaccggttggatactttgctgtctatgtatttccctgatcttttaagtaaaatgcacagcatttctgccaaattagaaatttgcaatagtacatttcattcaaatgttcgttcacctagtcaatcggctgtagaaaaattattttataacggtggcttagttgaaaaagaattggatgcgttgcaatcggcgctcagagataagatgaaattaccagtttcttaa

SEQ ID NO: 152795 - DNA, 555 bp, Enterobacter cloacae
atgaaatccgccgtgcagattgattatgtggaatacataaaattactgatgccactcatcagtgctttactgggtatagtaggggcactggcgggtgttatcataacaaacaggtataatgacaagcgcgcgcgatcccaggccgcagaagcggataagaaagaaaataaaaatctgtttctttctaaaggtgaagaatgctatcacctgctgacacagtataaaaaattggttttcggcattcaggatctacagatagctgttgcagctggcgaatcaaatgacgaaaaatacatggaatactgttcaaccgtagaagagagtaaagtacatgaacggttgcacacgctgataagcgtctacttcccaacagcgaaggctgactgggacagtaccttggcagcgatgaacacatgcaacatttgttttctttataaacgaccattcaatatggacattgtaataaaaatgaaagaagcccaaagacagacatccttttgcatggatatcacttcgttaagtttgataaaaaaaattaatgaaacaataggttaa

SEQ ID NO: 152796 - DNA, 213 bp, Enterobacter cloacae
atgacccgcgacggcgacggccatgttggctttgttgtgggtaaggcccctaacggcgatctaatgctgctgggcggcaaccaggacgatgatgtctgcatccgggcgtttgcgccgtcgcgcatctcgggctaccgctggccggcgggcatgccggatatcccacaggggctttccgaggtaagcggcgaaagctcaatgagtgaagcgtaa

SEQ ID NO: 152797 - DNA, 222 bp, Enterobacter cloacae
atggctgaacctaagtggctggtggaggcccgaaggtatatcgggctgaatgaaattaagggctcgctgcatgcggccgaaatcctgcaatcctggaaagacattaagcgcggcggcattaaggacgacgaaaccccgtggtgtgctgcgttcgtcggcgcaatactggagcgtaccggcattaattccacgcgctacgagtccgcaaaatcgtacctgtag

SEQ ID NO: 152798 - DNA, 351 bp, Enterobacter cloacae
atgccttacaaacactcattaccggaagtgttggcgctgctattcactaacccaccagaggccgcgcgcatcattggcattatggggttaggtggaattgcccgcgcgtgccttaactcttcctggggaatccttaagtgcatcggtgacatcagttgttgcgtactgatgttctactgcatcaaaccctttatcctcgtgatgccctcaatattcggcgtgcagatcccgcgcggcacgattgcgatcgctatttcgctgctgggcagccacatcatttacgcgctgattaaaattttcgttaaacgccgaactggcactgacctgaaggagatcgaaaagaatggctga

SEQ ID NO: 152799 - DNA, 507 bp, Enterobacter cloacae
atgaaacagatttttttatcagtcgtcattttgctggttggatgtagttcggctaccaatcaagagcggcgggcgcaagaccttaccgaatcattctataaatcctatctttttgcattcggtagcgatgaagccaagccttaccctcttgaggaactacgtaaatacgtttccgatgatactctttctcgcattaatagcattgaggatattccagagcaggaattaattgagtctgactatttcacgtatacgcaagattactctcgtgaatggttatctgcgttacgagtagaaaacgctaggccatttttaagtggtgaagtggtccaggtcatggagggggtggataacggaaagagcattcatctggaggtattccttcgtcgtgaaggtgattcttggaaaatttaccgcgttcgtgatgtaaccaataacttcgaacatccgatatttaacaccggagcgctcatccgagcgaagaacgcagcagaaggcggcctataa

SEQ ID NO: 152800 - DNA, 1512 bp, Enterobacter cloacae
atgaaaaagatcattgccgttgctatcatttcaacgttgctggtcgccctctctctctacgcggttaatgcggttatcgtggcccagcaaaagagcaaacagctcgaggtttcccattcccttttgcaatattcagaagtcctctctcaaagtgtggcgcaggcgctcaaaagcattactacacagggttgtgataaaaacagtctcgatagttacaggcagataaagttagatagcctctatttcggggatatcggttttattgaaaaggggaaaatagcctgtactgctttttggggtaaactcgccactcccgttgcccttcctgcagagctgcataaaacgccacggggttttcttctggcacagttttccagaaaagatttttttacaggcaatgcggcaatttataataacgtgattatattcacctcccgctatgcttacgataagttcacgccgattacggcgaactattcactgagtacgacgaccaaagatttcggcagaacatttttctcagcctccccggtgataaaagaacagagctggctgcattcgaatctgtttaccttaaccctgacgcagtgcagcgccgtatgggatttgtgtgtgatcgtgaagcatcacaacgcagggctggcttcgttgtcgctggtggtgtttacccttctcacggcaatttcggctttcatctggatagcgatcacgctgtttttcttccgcatctatgaagatcggttctcactggagcgcacgctggttaacgcggtaaaagccaataccatcagcgttaactaccaacccattattcgaatccaggataaaaaaatggtgggcgttgaagttctgtcgagatggcgcgataacaatcatggagaggtctcgcctgagctctttattcccttaattaagaaaattggcctgtatcaaaagtattatatcaatatcatcgaaaaatccctggcagaaatcgcctcgctggcgattaaacatcagctggtgatttcattaaacattggtcgaaccgagattgaagacgggcaattcattaagattctgtgtcgtgagtgtttagtgaatagcattccactctccttgataaaagtcgaactctctgaaaaggcggtctccactgcggatgttctcgaagggttttgtcaggcgttaaaatcactgggtgtgagaatatcaattgacgattttggagtgcaaaactctaacctcgcccgcatatcgcttctggaatacgatgagatcaaaatagataaatcgctggtagatggtattaatgagcattataaacagaatatattcgtcatctttagtgacgccctagccagactgaataaaacgctcgtctttgaaggtgtggaaagcgaaacgcaatatcgctttatcgcagatcggtatcctgatgccctgattcagggatggtatttctctaaatcactgaccattggtgaactgacgcagcaacttaacaacgataagcaaaaaccagcgcgttaa

SEQ ID NO: 152801 - DNA, 240 bp, Enterobacter cloacae
atgttcgttgagttggtttacgataagcgaaatgtccaaggtttggatggtgccagagaaattattttggctgaactgacgaagagagttcatcacatattccctgatgctgaagtgaaggtaaaacctatgcaggctaacggcttgaatagtgatgcaagcaaaagtgatcgtgaaaagttgaaccgtatgctggaggatatgtttgaagagtctgatatgtggcttacaaatgaatga

SEQ ID NO: 152802 - DNA, 615 bp, Enterobacter cloacae
atgaaaatactactactaattgtattgagcggattaatttttcttgctggttatttttttggtagcgttagccttacttggactagcccgaaatatgcttcgacagtagcattttgggcgatgataggagggtggctttcaagcatcctaacattcattgctgtagttgtttcattatttatggcgtatcaagcaactcagaatgataaagaaaaaatcttactgaagactaaaatgataggtaagagtttgtttggtgatagttggaatgtttctatagaaatcattaatttaagagcgatccatacaaaggtggaagatgtttttttagtgattgactctgaaaaacctatacatattggccatttacttgaaggaagggcggtgccatttcagctaactttcaaaggggaaatggtccgactaaaactaacaatagacgcaggcaatcactggtggccaatctttaggcagcttaacgaatcaaatgatttgaaatttagaaaaggattctatgtaattcatacacctcttcaaacttataaagttcccctttcagatgaggtgttaaaaataataaaagaaagatatgaacggtttaaggcaatgccttaa

SEQ ID NO: 152803 - DNA, 723 bp, Enterobacter cloacae
ttgggagcggaggcgccaacgattcctgctaatgatgcgaaccagattgttggttataacggctttgtttccggtgccggggctcctggaacgaactgggtaaacgtgtacggtcccatgctcgttatgaggagaatcagcgcggttgctcaggtccaggtaaacgctgtcggtggattggcatcccgatacggtctggttacggatatgaccgttaacaatggtggggcgtggtgcgttcactggcatgacagaaacacaacggttgactcaagtgggttcataaaacgggcttcgcctatcgttaagttattttctgatggaggttacgaaacaaacgatgaatctgaggggtgtacagttcgccgtatcgaaacaggccaatatcttatagaaggatgtcatggcctgaatgcagaggctatttggggcggggttgatggcggttttgagataccgtcagaccgtaataaacagccgctggtatggctggattacgaagtaaatgctgacggttcggtgttggtgaaaacttatcatcgtgcacaccccgaagcgccgacgttcgccaggaatgaactgcagggtatcagcgacggcgacccaatcgacattccccgcgatcagtttgtgtccgtgcgtgtcgaaatgcctggcgattctgtatacaaccagaaactcagagccgtagagctgatccttgctgctgatgaaggtgaataa

SEQ ID NO: 152804 - DNA, 1158 bp, Enterobacter cloacae
atggatgagtttatgattcgaaaagatgaatatataagagctagtttactctcttataaaaactgtaagctatttcaagctaagagtgatgtgtttggaatatctgaattcataattttttccgatagtagattcactgatgaagctaaaggggatttggtctattccttcctaaacatgatccctttggaaaatgctggtgtaaaaccaaccttaacggtgagagccttgtctgctttaaacccagcaaggttggcttttatggatgaaaagccacatactgatgactttcatggcggttggtttaacgatgaaatcgcagctttagttagcttgaaattaggcgtaagagcacacgcaggctcaaatgtcagagaatatagtagttacacacctgactatggtagcccaagagcagagcaaaaccctccgccacctttaatgtcaaaaggaacatttgtagttccttcagcaaaaaaacaaattgaaatttcacagttgaaattattaaacgatatttacaagctttcagaaaaagattttaactcactaattaagtcagctcgaaatttccaagatagcctttggatctgcgaatcttcaccaaatctagcctggttattaatggtttcagcgttagaagtggctgctgggaactgggactctaacaagggcgataaggttgaaagattcaaagcatccaaaccagagttgtttgatagattattagaccataatgttgacgggctgattgaagatatcgctacacaatttgaaggaacatttggagcaactaagaaattttgtgacttttgcgtcaatttccttcctgatgccccgcctataagaccggagagcggaaaaatagaatgggaagaaaaaaatttactgaaaatatttaaatccatatatggattacgctctctagcgcttcatgctgggaaacctttcccccaacctatgtgttctccaccggacaaccattttggattagctgaacaagcagtatgcccccctacctctgattttactccattgaaatcaaccttgggagcgtcatggtctcacaaggaagcccctatcaatctcaatgtgtttttccacatgactcattcgattctaaataaatggtgggagagtctttacttaaaggaatga

SEQ ID NO: 152805 - DNA, 177 bp, Enterobacter cloacae
atgaaatatatcgttacattcagtgtagcgacgccagccgaaagtatgaatttttgtcttcctgcgtatgagaaccctgacccggaccggcaccggcggttattgaatccctccgcccagcgactgccacagcgtaatacggttttcaaagtcggtctgctgcagggcaatcaatga

SEQ ID NO: 152806 - DNA, 201 bp, Enterobacter cloacae
atgacgttgtttaccatgctgctggttatcatcgctgaacgcctgttcaaactcggtgagcactggcatctggatcaccggctggaggtgcttttccgccggattaaacattttttccatactgcgcacgctgctgatgaccgctggcgtgatggttataacgtttttactgctgcgttcgctttacggcctcttttttaa

SEQ ID NO: 152807 - DNA, 510 bp, Enterobacter cloacae
atggacgacgtgcgcggtctgaatacgtacttactggccgacagccagcttaactaccagtttgatgtgcgcctgccctacagcgagccgtcgggtctgtttgacggtgcggcagagtcggtctgggatgtacgaacctggcacacccttgccaccggcacggtcgccacgcgggattacaactaccggacagccttcacgccgatggatgcgacggtcagtgtgcgtaacgatgcggtcaccaccggaaagcattaccgctacgcagcgccttatcgtgaagcaggtgatgacaccagcccggagccggagaccgaatccattacatttctagcaacatctataaaaccaaagcactcttcagtaatctttggcctggttattatctttatgctttattcttggtatggaacaaatccacttcgagtaatgttgatgttttgttcctcattatccgcttgttcaataattatttttgcaaaaaaaatccttaaaagaaacataaggtaa

SEQ ID NO: 152808 - DNA, 327 bp, Enterobacter cloacae
atgccaaaagaacattttaaagcgcaggctcagtatgacgattggaaaggcactgctgcggctgatagagccgatcaggataacttcagcgatttccttagagcccaagggataatgaacgaaggtgagatagtgaaaggtatatccttttactcagcagaacatttctttgatattgaggcatacattactgatggtgattacggattgagacgagaaaaagttaagatgacttttgaggagtttttcaaaactttcaaacgcttttcaatcaagctttctcgtaatggggaacttgatgaccaggaaatcgagtttaaagaataa

SEQ ID NO: 152809 - DNA, 420 bp, Enterobacter cloacae
atggctgatccggcttctattgctgctatctcaggcactcttgaacttgttaacaagtccgttgacttagtgcgtaatcttcgtaagaaaggggatgacgaacttaatgccgcagaaatgcgtaatacgttaattgatttgcttgatgatttggtagaagtaaaaagtgagttcgtcagcctcaaggctgttttattgactaaagaacaagaaatacaagagcttaaagctaaacttgatagcaaacaggagtttagttttgatgggcgtctttactggagagagggggatggcactccgttctgtcctgtatgtatagagaaagatactaaatctatacatatggattactatgcaggaaatactgggtataaaccgagctggtattgtaaagtatgccgcaatgaatttgacgcatag

SEQ ID NO: 152810 - DNA, 291 bp, Enterobacter cloacae
gtggttgattacaagaacgtacatgttcgttataccttgaaagggaagccggtagaactggtttaccaatgtgatggatttgacgtggtcaatagtatcttagctcaccttgttagcttgcacgtcgaacctaatctgattcctgctcaagaacgcaagggaaatggcggtacaaggaatatacagaaggatattaatctcattgagcatggcattgatgatgtattctactttgatgaagaaagtcaggaatggctcgaaatcccttcaaaatggttagtgaaagcatga

SEQ ID NO: 152811 - DNA, 207 bp, Enterobacter cloacae
atgaaatatcttgtgctgacgctggcgctcatgagcttacaggcttacgccggacagataactatggtcaacccgcaggaggaacagacggagaacggaaaaacgctatgcacgtatcagaacagcatttacttgttcacctacgttacgagtactcaaagttgcccgtatgctaagacattcgacactgatgattcggagaaataa

SEQ ID NO: 152812 - DNA, 201 bp, Enterobacter cloacae
atgttcaaacacatgtttataaatgccaacattatgattttattaagatatttcaaaatcatgcagatttcgatctgggtgtgcctgatcttcgcgttaagcactggacgcaatcgcgccatttaccacacacaatactgtttgatttttgatcatttatattgcaacttactgaaattgataatattgtttatttcataa

SEQ ID NO: 152813 - DNA, 282 bp, Enterobacter cloacae
ttgaacaagctatacctactgaacgaatctacacatcatcaaatcgaatgtaacaccatttgccaacatctttatcaacaccttgcatctctaatacgtgaacacggaaagatccgttccacggtgaaacatattgctgatggtgtaggaataagtgagagcggggcgcggtattggttattaataatgaaagatgcagcggttattacaatggaacgccacggcaagtattacgacattaccgtaaacgaagcggtgagcttcattacgacaaccaactaa

SEQ ID NO: 152814 - DNA, 288 bp, Enterobacter cloacae
atggctcttactgatatcaacgtcagaacggttaagcctgcagacaaacctttcaaacttatcgatggtgaggggatgcacctgctggttaatcccaatggctcaaaatactggcgtcttcaataccgtttcagtggcaaacagaagatgctggcgctagggtttattcaatggtttcgttggcagaggctcgtaagaggcgcgatacagcaaagaaactggtatctgatggttatcgatccctctcaaaagaaaaaagaggacagattaaagaaagcggatcactaa

SEQ ID NO: 152815 - DNA, 213 bp, Enterobacter cloacae
atgagccatcaggatcgtaacaacattctcgctgcttacatccatcttgatgagcgcaggctgacgctaccggaggggctgattatcttgatgccaatcgagaaagaacagtcaggccgtttgagtttgcccacaactgatcgtttcgagtttaaaatcaatgctaaccacttgataaaccatcacataacagcatgtaaccctttgttttga

SEQ ID NO: 152816 - DNA, 285 bp, Enterobacter cloacae
atgatatcaggtcttaatgctggaaatttcattctcagctcaatggccaaggaaagagtcaaatctggcatactcgatagagcgacaatagaaggttctaagggcgattataccgtgatttttgatggtgcgaagtgggaagataaaccattagtcttgtgcagctcaagacagccttacgaagcacgcatctttaaaagcatcgatggtgcagtagctgaattactacgcataggtttaagtgaagcttcaatcaaaaacaccaccaaatcgaacaataaataa

SEQ ID NO: 152817 - DNA, 627 bp, Enterobacter cloacae
atgaaagattcttttgaactttttataaaatcatttccagcaataaccgctatactacttaatgtgatgattgttgtggtcacactttatattgtctatcgtagtggaagcatggctatagtcgctaataaaatatggggtatattcattggtgaaaagcaatatttcaatgaaaaattagctaaaatagagcaagctgaacatgacatagcaaaatttaacttcaaaacgaatttaaaattcacaaccatcaaacaaattgagaatttttattctcaattggagaaattcaacttagaactgaaaatgtataaaggattacgagatgcttacaatccaaagaatggtaaaatcaagaaaagttcaaaaggtgatattcttagtgttgctgttgttagcttattgattggatgctttttacttccgctatttgttggggttttcatatttaaacctttttgggactttgaaagcggaaagttaattaatcttttcgtgtacacttttctcatagcgattagcacaatattcagtttcagtgaattacttagaaagataaaagcaaatagaatgcgtaaagttgtatataaaatcaaaaaagaatatatgagaaatagaaagccctag

SEQ ID NO: 152818 - DNA, 192 bp, Enterobacter cloacae
atggcatctttttcaaataatgtgaaggtaacaaactttcagattaaaagtactggactgatttattcaaatcaaacttggacaggtcagcgtattatgcgatctacaggtattcagtactacaatattcaattcgcacttaatttcaatccttcagtattaactgaagttaatagctttttagctcagtaa

SEQ ID NO: 152819 - DNA, 837 bp, Enterobacter cloacae
atgtctatatctaaaaagcatcattttatacctgcatgttatttaaagggtttcactaatggcggcaaacgcacgtcattgttttgggcgttcccgatcaataaacctggtaaaaaacatggagccagtcctaatgactcttgcgtaaaaaataattactacaaagttgaaaatattaacgactctcttttaatagagaattggtacggcagtgtagtcgaacctaaaattggtgattttttaaaacaagtagatgaactcaatgaaatcgattctcagaatgaagggcttgcatggttgttagcttcactattattaagaaacccacaacatagggaaatgatagaatcaccactaattcatgcagagcgagtagttaaatcaatgcaagaagattataaagaaaaaggaataaatttacatattgaatggataagctatagcaaagatgacattatcgaatatgaaattcaacaaacaaaagcactatctaaatacctgcctttatacaactactgtatattgaaagcacccgatggaattaatgtaataaccagcgatgccccaatgattttagccaatagccttaataaaaaaatattcggctttgaatctaaaggtacaatgataattgcccccctcaacaaatcaacttatattattgggagtaaagaaattaaactcccggctttacgcaaaggaaccatttgggaaattgcaaatttgaacacaatgataatggcttccgctaatgaaaaaatatattcgaataatgaccatatctatattcttgataatgaagatgatgtcataaaatatccgaaccacaccgagtaa

SEQ ID NO: 152820 - DNA, 135 bp, Enterobacter cloacae
atgccccataggacgcgaaagtactcgcaggttcaatcaccttgtattcgaattctgaggctgtataacgccctgtatacgcttctgatgtgttgggggattgccataagcaacgtcatagaagcggtctggtaa

SEQ ID NO: 152821 - DNA, 828 bp, Enterobacter cloacae
atggttcagttcatgtttacagcaataataagtgttgtgatcgtttccattttatacattctcctcattctgcagatacctcaaatttttgaaaatttagatttcagtcaaagcggaactttcggagattcttggggggcgctaacttcgattttctcagctttaggtttttgtggtgttctctggacgctcaaaactcaggctgattcaataagaagagttgaagaagataacaaccgaaaggaaataaatgaagctagaagggattttgaaaactctttttttaacatgctaaatctgctccaggttataattaaagatatgagagtggtgaacaaaatcacgaaagaggtgcatgctgagggacgtgggatattcatttatttctttaagccgttcagaagtcaaatattgcaaggaaataactttagagtgtctaaaaagaataatcaacgagagttggacggaatggccaaagcaatcggccaacaatatatgcaacattttcatagccgctcacagaatttatctcattattatcgatttttgtttaatacatttaagtttattgatgagtctgaagttagtgatgctgataaaaaaagatatgctaatattctgagggcgcaaatttcaaattatgaacttttaatgctattctataattgcttgtcagaagatggtcgaaaattccaatattactttgaaaaatatgagattctcgataatttgcctgtcataaaaatggcctataaaaatcatgtacttttagtaaataaaaaatgttggggggataataaacaagcgctcgaattaattaacggctaa

SEQ ID NO: 152822 - DNA, 1392 bp, Enterobacter cloacae
atgagtattctttttaaactaagaaatacaagttccttactaaatggatttaatgaacttgagaatcaggagctttttttcgcatcaccagatgagctaaacgaccctcaggaaggatttttaaatttattttggcagggagataaaatagtctggagaaatctgttaagatattacatatttaacttgacaaactgtttattaaaagcaagctactcaagaaatgaaagtttactgtcctctgatttattcttatttaattttgatataaacaatgggatagatcgttatttcaggaatacttacaacgcattagaaagcactgtgttcagaataaatgccattaatgatttaattacatgtctttcagaaaaaaataaaaaaatccatcaggatgagctttttttcatcctcaacagcttacaccttttaattattaaagagatctgtattgagttaaacaaattacagcacaacaaattatttgaaataatcagtgaaatggattgctatactctagatcctaactttatcgatgctatctctagtgattttttacccacaattgcagcaatgcataaaaactcagcattagaatctaatctaacaatttttgaaaaccaaaccaatattgtatttaagaaaaactatcattatcttttgcgattttttgctcaggagtttgttaatcagttgggccaattaacctataatgatgtgtatataacttgctttacaaaaaattatcccaactccgatatgtggggttattatggagataatcataaaggctgctgcttgatatttgaaactactactcccgaatatcttgattcctatacacggaaccctgaagataacgtaataaagattacacgaacaggtggaacgaaaccaatagacatgaaaattgaacctgttaattattcaggcaattacccagagataaatttcttcaattctgtaggaaatatccagcgtggcatttatcaaaactgctggttaagtgatggtgaagaacgaagcctttattatgatcgtcgctatgttaatcatcataggtggctcgacgaatacaatcacaacatgcattcattttttttctgcaagacagagcattggagtaaagaaaatgaagccagggcaattataacaactttccctggcgaaaatgatatcgctaatagaaaagtacgatatgaattccagttccttaagggtatagtttttggcattaagacgtcgtactcagacaaatgtgagattgttaatatattagtaaataaatgcgataaataccatatttccgactttaaattctaccaggcattttataatcacaaggagaataaaatggataaagttgagattgacattaaacatcgccgataa

SEQ ID NO: 152823 - DNA, 198 bp, Enterobacter cloacae
atgccaaaacaaaaagtaaaactgcgcggtaagttaggtacattcacaacggtgatgttttcacttgtaagtatgctacctactttggttggaaatgggcctcttattgagattcatgacacacagcctctggtgaatgtcactgtccaagtggttcaaaacacggcaacagtgattaatcagacttccgtcaagtaa

SEQ ID NO: 152824 - DNA, 570 bp, Enterobacter cloacae
atgtcagtgccgtttagtatgcatcgcatgatatgctttaagaaaattctgggggggattatgaaaatcattaaagtgattctttgtgctgttctgcttatggctacgggaagtgtacttgcggagcgtatgaacggttatggtaagacgagttgggggatgacaccttccgaagtagtacaggcagaacagggacgagcacatttagtcagccctccaacgaagtacaaaaattcattggggatggtcgcggtagataaaattgatataggcagcagtttatttaaggtcgtttatcagtttgagaataacaagctttcgcaggttcttgttcaagggctggaagacaaaaacgccggaattaacagaaatacatttgcaacactcgattcgttattgactcaaaaatacgggcaacctagttttagggaagatggacgtcgcgttgtctggaaacaggatgggacatctatcgagttaagtcatttaatgatagaaggcgtcgtatctctggttactgtcgcctatatgcctgagtatcaaacaaagaaacaaacagaaaatctttga

SEQ ID NO: 152825 - DNA, 612 bp, Enterobacter cloacae
ttgattccaccgttttcagtctcaggcgtacttccaccatttgtaggtgaagagcccgctattcgaagtgcacaagcgccttatcgaatcaccatggttgacctggtgcagagatttgcaagcagcttggaaagaatcgcgatattggaaggcctctttgcctaccgtactaagatgcgttccttaaatgtcatgggttatcaatggctagatggcagttttgttgaggactgtgaaagaactcgcggaagagcaccagcagatattgatcttatcactttcgcttatcgaccaagagacgaagaagggcagtggattgccccagatgcttttcttgagcttatggacttgaaccctgatttgttcgaccccgaaacagctaaggaagtttacaagtgcgatgcctactacgttgatttcaaccaggcaccacataccttagcagcagctgtcacgtattggtgcaatttgttttcccattctagaatacaaaatctttggaagggtattttacaagtagaactaaacgtggatgattcggatgcaaaagctatactgggcagtatgaagaacgaactgatagctgctcaaaggggagggaataatgattaa

SEQ ID NO: 152826 - DNA, 924 bp, Enterobacter cloacae
atgattaaaaaacttgaattagacacccttaaagcggaagtggcatcgcttgattatctcattgctgagcgttcagtagaggaccctattggcgctaggcagtttattaaacgtagagaaaaattacttgagaaaatagctgctgttaacaacgcttattcttcatgtgcaagcgtgggtttattttttggcggggcgccagtatttggctcaaaaggaatcgattcgcattttgcgagtaatatcattgataaatttcagtctattgtaaataaacgatatgcgtttcttgaatccggcgcgttgtcctcacggggaccagtaagaaatagtagtaatgctaaactaatgattactgatgtggctcggggctcatttgggtttgtcttagaagaggcgccaaaggatagtcttttagaagttgatactgagttgaagcacgttgttgaagacgtgaatgatattctgaataaaatatcttctccagaagacgctgtctttgaagaggtgattgaggatttagatgacagaacgttaaatgatgttcgctctttttatgaagagttgtattcatctcaagcgacactaaaagtcattgatgatcgttctgaatatattcttagtttagaaaagattttctatgcaaaaaatagaatggatcgagtcagattgtctgatgaaacattaacaactatatttggcaggttgtatgttgtgccttatgaaaaaagatttgaactgcgagtagaaggaagggatgctcctattcgtggtaaaattactaaacagttccttgagtcccactcaaacgatcttgacagtattatagggcgtgattggaatgcaaggcttttagtaacagatatctacaggaatgatgtgctgataagtacccgatatactctagatagtatcaattcataa

SEQ ID NO: 152827 - DNA, 225 bp, Enterobacter cloacae
atgtggcttatgaaggcattactaacatcgcggtgtgttaatcaacggggatcaggtcaccacctccctaggaggtggtttaaggatgacaatgaaagggccgaaaggccctttgccatttataaaatattatcatccaacttttttaatcagttcagctatgctgtctgcagcaaattgtgttctaaactcgactttgacagatttacttatttgattgaatag

SEQ ID NO: 152828 - DNA, 282 bp, Enterobacter cloacae
atggcaattgggacagacagggcgaagatcatttacaggatcgagtttgtagcgttctccaatctcagagagaggggtgatatggtggacgtgaatatagtccttgccggtttcaccatacgttttctcaaagtccatattgcatacactacattgacagccgtaatggtctatacatttgtctcttgctgttttgctacgttcgtatttgttaactttgatctgttttacggccccttcataaaaggtttctgggacatcatctggataatcgatatctaa

SEQ ID NO: 152829 - DNA, 813 bp, Enterobacter cloacae
ttgctaaagccaaatcttaaaagtattaataagcacgatattgtttatgcttgtgctcaagcgattgcaaaagattatttagaaacgaaggacactaataattcaatcttgataatactagaatactgttggagattggctgaggttgatctaaaaaatgttaatagatttctgaaatctaaaagaagcgatttgttaaatataaacttgttagacgaaattaaaatcccccctaatcactcgcttcaaacatcttctcgcgatttcgtcagagagatccaagcaacaataaatgaaaagcttacatcaatgtatggttggttcaaaagaccacttagtgtttcaccaaaagcctctctttctttattgtacaaagccgttgtggcagaggttaaagaaacatttattaactttgatgctgacacggcatttgatgaagaagatgatatagaattagttggtgggccatatcatgttctatatgatgcattttatgtagtgatttataatgctgccaagcatggtaaaccgtctacaaatcttgaaaagagttttaaaataagtagagctgaaaggaaagttatagtcatgatatcttctgatattaaagatgaggataatgaagatgaaataaatgataggcttaaaataactgcagactcagatatagacaacgcacaatcctcagaagaacgaagcggaattcgaaagttatatcatcttcaacgaaatgatcctaagttccagattgaaaccattatatgtgcaaatagaaaagtaactatatctgtttcttattcattggagcattga

SEQ ID NO: 152830 - DNA, 441 bp, Enterobacter cloacae
atgaatatactacttattgaagatgatggttttaagtcagagagtattgtaaatttcattgataatatttatcctaaagctgttcttcatctatgcactagcctttcagaaggaattgaatatgtaaacaataatgtatatgactatgtcttagtggatatggcaatccctagccacccgatagaacctggtggtggatcccctttatctcttttgacgggcggcttagaagttattcttgagctaaaatttctacatagaaatgactcttgtgtaataatcactcaataccctgatctagaattatgtgggcaattatattcattggatgaagccgttgaacagcttagagttcagttagaatgtaatgttttagcttgcatagaatacaatgaaggctcagagcagtggaaacaagaattacaaatggtgcttaaatga

SEQ ID NO: 152831 - DNA, 1161 bp, Enterobacter cloacae
atgaatattttaatattagaggatgtccctaataaactcgaagaaataaaggcttgtattcatgatacatgttctgaagcatcaattatagaggctgttgattgggaaagctatttgagggttataaactctagaaaatttgatcttataatagctgatttagtagttcccagagcaagaggcgaggttaaaactatagaaattgctcagatgctggttgatgatgcaatggatgttgctagtccaaacttatatacaccagtagttgcacttactcaatatggcgacatagatattttcaagagtcttaataataacaaaataatcgttctttcatattctaacacttcaaactggagagatgcattgaaagatattgtacttaaaaacaaacctagccaaatttatgactttgttgtaatttgcgcgctttctaaagaagtaaatggttttaaagatgctggctataatgtgggtaacacagaaataatatttggacttgtatgccataaattgacgattgattctcaaatcggacttttagttacctgtcctagaatggggctagtaaatgcagctataatatcaacaaaagtaattgaatgctttaaaccaaaattattatgcatggcaggaatatgtgcgggcatcgaaaaaaaggtaaatatttatgatgttgtaatacctgaaatttgtcatcaacatgactttggcaaatggggaaaggatggatttgaaccagagccgtacagtgttcaactccataatagcacaagaacaaaaatagctcatttaatagaacaacctgaatttataaaaaaaattactgaagatctctcccccaaacgttctgaaatacctgataactgtgaggaaatatgtccaaccgtaatgctcgctccagcttcaagtggtagtgcagtcattgctgatgaaaacatgaatgaaatagttaaaaaacaacaccggaaaatgactgctttcgaaatggagtcattctcagtttatgaatctgcaaggctttcagaaacaaatgtcgacttcttcagcgcaaaatgcgttgttgatgatggtggtataaacaaaagcgataactttcatcgtttggcttgtattatttctgccaaagcagtttgtgaaataattagaggttgttattag

SEQ ID NO: 152832 - DNA, 609 bp, Enterobacter cloacae
atgaaaaagaaacaaacgtcagagccggggttactggcaagcgacagcgactggcacaacaacgcatgtttgaattacatgcgtgatcacggcacagcttacactgaaggttacaggcgggctgctgacattctgattaaacacattgatgaatccgggcgggaccaggattttctggtttatccggtgttgtttctctacaggcatcacatcgaactccttatcaaacagattatcggactggctctggcgctggcagaagagccagataaacaccagtacaaaaaagatgaccataacctgaataccttatggccgctggcacaaaagctgatcctggaggttgatgacagctaccgatcttccgattttaaaatcgtcaaagaggtggttaaagctcttcaccaggctgatgaacgggcgacagatttccgatatgccaggagaaatgacggcacccggagccttgaaggaattcattacgtcaacacccgccgctttggggaaaaaatgggagaggcttccgatttacttgacggggtcgacaacggcctccggtacctgctggactgtaaggccgaatggaatcaaattctggacagcttctga

SEQ ID NO: 152833 - DNA, 900 bp, Enterobacter cloacae
atgtttatcaatgttggtgagattgacaattttctctctactcttaatacagcaatcaaagaacattatctttggtctgagaaatttctatgcctgaatctgtttggtggggaacccgactacgatatcattcacagtaattcacacctgtattgtcatttcagtgagtggttaatgctccgtactcaggggtataccctggagcgagatatggtgctggccattaaccatcatcatcagggcatgcacgatattgccagatctttagctgaagcagtgatttccgggaccgcaacaaggtcactggtaagtcagtaccacgaacaacagcaggcttttattgacagtattgaaacgtataagtcttatctttttgcgtaccgtaatcagcatgatacgttaacgggattgccgttacgccagcttttatatcaggaatttcctggcttccttaggcgctgccagaggaacaatagcacaccatatctacttatcatggatattgatcggtttaaatccatcaatgataacttgggacataatgccggcgattatgtgctgcaacaggtagcgcagcacctgcaatcaggttcacgtgatgatgaccgtctgtaccgttttggaggagaggagtttattattcttctggaggctaaaaactgccaggctgcacaatctgtagctgagcgtataaggtgtcatcttgctgacagtagcatcttggttgcagggcaaccggtgaacatcacagtcaccggcggactgactgaagtgagggaacaggaaggtttgcatgaagttataggtcgggctgacaatgccatgtactacggcaagaacaatggccggaactgttgcgtgttgagtcaggcagataaaaacacatatcaaaaattatag

SEQ ID NO: 152834 - DNA, 261 bp, Enterobacter cloacae
atgaatatccttactgaggatattgctatctggagactaaatttaatcttccagagtaggggctggtatgttggcatctacaagagaggtagtctgaaatcgacaaaacttggaaggtattatattattaatcattttacgaatgaaatgattgatttttctgaccagcttacacagtggatggcacgggagtttattatttcaccatgggaacaggtcgccggagaagagcaatttactggcaaagggaagttgaaataa

SEQ ID NO: 152835 - DNA, 492 bp, Enterobacter cloacae
atgaagacaaaactcactctggcctacatttttttacaatgcatgctgattgcttttttaatgtatttttttatcaaaagcaatgaacgctcttttgattttgcatgtaatggcgaaagtatttacataatgaacaggaatggttcaagtacaatcattacatcaaatatatcactatttttttttacaaataaagatattcaagcaattatccatggttttgtaagagatcccgatggtacaagaacgataagcagagaatacaattataaatacaaagttgtaaacgaaaaggaaggtcgatatgtaggctcgctttataaggtcacaataaccgataatgataatgacgaccgtaacacagttagtggctttatgttaggaggaaaaacatcggatatacactttagaatttcccgtctcagtaaccatgttttgatttttgaaaatgtttttacacccatttttagttgtacaataacttccccgtaa

SEQ ID NO: 152836 - DNA, 777 bp, Enterobacter cloacae
atgaccattatcctgttgaataatattatcgagtttgacaatgacaatagccgcttgttaaataaaagcactggtgatgtaattaatctttcactaacttcatcaggtgttttaaatttactaatcgaacataaaggggatgtggtatcaagaaatgaaatattcgataaaatatttgtctttaatggaaataacataacaaacaataacctcaatcagtacatatcgtcattgcgcagaaatataaaatccttaggtattgaagaagagtttattattacggtgccaagggtaggatttatgatttcgagagatataataacaagcgacattcagtatgaacacatggaagcagataccaccttaattaattataaaaagaaaagagctattaaattgatcagtatttatggggcgttgatgtgtgttattatatcgggatacctatgctattttttttataagaactgggaaatggtaataaaccagtcaaacattccccatctttcaccaacacgaatcgacaatattaaagattgtaacttcaacattattaatagcaatgaaaaattttcagtcgaacaattttcgagtgtaatcaaaaaaaacttccccaatgaaattttaaagtgctcaaaagaagatgcgtattatctgtctaccagtggaattattaacaatagaactcaacagtttttgctgaaatgcaaaggaagtatttatgacactccgagttgtttcagtgtatatattcattcatcaggtgaaataaaatga

SEQ ID NO: 152837 - DNA, 1158 bp, Enterobacter cloacae
atgtatattacccgactcaaattaaagaattggagaaattttagagatttcgatgccccgttgcacgagtgtacgtatctgattggcccgaatgcttctggtaaatcgaatctttttgatgtttttcgtttccttagggacgtctgtaagcctcaggggggagggttgcaaaaagcaatttctgatagaggtggtatccctaaactacgttgtttacacgctcgtcgcccccctgaagtacgtatagaggtacatctttcagataatgcggatgatcaagaaccaaaatggaaatatattctttcattcatgcctgaaggtaaaggggcacaaagaacgctgattaaatctgaagaaatttggctacgaggaaaagtaataaagcagcggccgacaaaagaagatgagaaagataaaatcaggcttactcaaacacttttggagcaaattcaattaaatgcagattttcgcgagattccagagttttttagtgaaacaacttatctgcatcttgtaccccagttgttaaaatatggtgatatcattggtggacgtttactggatgatgatccatttggtcagggttttctggaacggttagctaaaactccaattagagttcgtgattcgcgtttgagaaagatagaaatggcgcttactttagccgttccccaattcaaacagttacgtttcgttaaagatgagataacagggagaccacacttagaggctctgtatactcatcatcgcccaaatgcaggttggcaacgcgaggaacatttttctgatggaacgttaaggctgttaggccttttttggtcattacttgatggcaattctttattgcttttagaagaacctgagctatcgttaaatgatgccattgttaaagaaattccagttattttgcagaaaatccagaaagataaaaaaagaaaacgtcaattaattattagcactcatagtgaagttctgctgagcaatttgggtatcgatgcccgtggaattttagttctcgaaccaggtgtagaaggtacgaaagttagacaaattaatagtgaagagaagaatgcaatagaatgcgggctatcaatcgctgaggtagtgttgcctaaaacccgccctgaaaaggctgaacagttggggttatgggaatga

SEQ ID NO: 152838 - DNA, 588 bp, Enterobacter cloacae
atgagaaatattgtattagccacggaggatgagttaagtgaatttttgggagaaaagttaatcaaagacgctaatacatctttaaatgttaccttaaggttaaggaagggagggtttgggtatttgaaaagtaaattgccaaacctttgcggactttctaaaacccaaccagtgattattttcactgatttggatagttgtgagtgccctaaaatattaattgattcttggtttaaaaatatagaaagacctcaagggcttttatttcgtgtcgttgtaagagaaatagaatcatgggtattagccgatcacaaagcattttctgaatattttggcataagccaggctaaattaccaccagaccctgattctcttcttgatccaaaagctgctttactgaaattggttagtggttcccggagagaaatcaaagatgccatgattgcaaaaaaaggggcgttagctattcaaggtgtaggatataatacaatactaggggattttatcagaacttcatggagttctcttcgagctcaagaacgttctagaagtttgaaaaaagcattttcaagaattaacgagttttaa

SEQ ID NO: 152839 - DNA, 978 bp, Enterobacter cloacae
atgactcacattcacgaaagcgccataaacagcacgacacccgacactcgtctgacgctgcccgccgcgagcagcagcgctgtatcatggggcgcaatcttcgccggcgcagcagctgcggcctctctctctttgattttacttatgctgggcgccgggttaggtcttacgtctgtttcgccatgggaaagtcgcgggcttgacgcaggtaaggtgggtattgccgctatagcgtggttaacctttactcaaattgttgcgtcaggaatgggcggctatttatccgggcgactgcgcaccaaatgggtcgatacgcgcggcgatgaagtctatttccgggatactgcacatggatttttagcctgggccgtagcggcgctcatatccgctgcgctgttcacgagcgccgtaagctccgtcgtcggagggggagctaaaatcgtggggaatgttgccggcggagcagcgctaactacggcggcgggtgccgcaagcatggctaacgggtcccaggacgaacagggttcgtcgatgcagtatttcgtcaattcgatgttcaggtcgaatgccccaggcacctcctcaggcaacgccgacgctcccgcatcgccagccgctccggcaacgccttcagcatctcaacagcccgtctctcctgcacagctgagcgaggtgtcggggatatttgtaaacagcattaccagcgggaccttgccccaggaagatcgtcagtatgtcgctcggttgatcgcacaaaatacgggtatcagccagcaggaggctgaacagcgggtgcagagtacctatgacaaagcccaggctaaattaaaagaaacgaaggagaaagctcagcaggctgcggatgccgcacgcaaagccacgagctatctgatgctgtggacgttcatttctctgctggcaggtgccttcgtcgccagcctgtgcgcgacctttggtggtcgtcaacgtgatttataa

SEQ ID NO: 152840 - DNA, 678 bp, Enterobacter cloacae
atgaaaaaaacagccccagaatatacacctgttgacctatcccgctgggcaagaaaggaacatttcgaggtctttcagacttttgcgcaatgcacgttcagccagaccgttcagttagacattaccgggctgctaaaaaatacaaaaaagtttggctggaaattttaccctacaataatttttctcctttcacaggctgtgaaccggcatgctgaattccgtatggccatgaaggatgatgaacttatagtctggaatgaagtccaccccagctataccattttccataatgagacggaaacgttctcatcattatggagcccttacgatggcaatattctccacttcctggacgcctattcagcagacgttgcccgctatggcaacaacgttgcttactggccgaagggcgagtctctggaaaatatatttttcgtatcggcgatcccctgggtaagttttaccagttttgataccaacgtcgcgaagatgcagaattttttcacccccatgtttacgcttgggaaatacgttgagcaggaggggaaaatactgttgccactcgccgttcttgtccatcactccgtgtgcgacggtttccatgtggcaataatgatcaacgagttacaagagacatgccatgacctgctgaagcatttagacgaactcaatgcctga

SEQ ID NO: 152841 - DNA, 588 bp, Enterobacter cloacae
gtggtgaaaacatccattgcgaataaaaacgaaaaaattagcgtcagagagaaaatagtactaaccgcgcatgagctgttttattccacggggtttaaagcaacgggtgtagataccatcatcaggcaggctcacgtgacgaaagtaactttttatcgtcatttccccagtaaaaacttgctcattcttgcctatttgcattatcggcacgaaatatggatagactggtttgagaccgcgctgcgcctgaatgttgacgaagggagaactgcgtcggatgccctggcagcaacgcttcacgcgtggtttgtgatgccttcattccacggttgcgcatttattaacgccagcgcagaagcgaaatccgaagaggttgaaaacgaaataaaagaaatttgccgcagccataaattagagacgaaagaaaaaattgcggccctgacggctatttccgatgaacaacggcttaatgaaattatgatattgatcgacggagccatcattcatgcccagatgggaatggatgtcgacgcggttattcacgggctgaagagtgggctggagaaaataaccgggcaggaggcgtag

SEQ ID NO: 152842 - DNA, 198 bp, Enterobacter cloacae
atgtttgaacacgccgtacagctggccagaaataacggcaagcgctctttatggctggaagtgctcgagcaaaacgaaggcgcttacaggttctatcagagacagggcatgctttgcgtcaatgaagtggtgtttgagacggcatcacagcagagcgtactcaaaataatgagaatgcctcttcaggcgtctatctaa

SEQ ID NO: 152843 - DNA, 228 bp, Enterobacter cloacae
atgcttgaacttcgccctaactgtgaacgttgcgatagagatctcccgcccgatacatccgaagcctacatttgctcgttcgaatgcaccttttgcaacgagtgcgtcactcaggcgctgagcgggcgctgtccaaactgcggcggtgagcttgtccgccgtccggtacgtcctgaggcggcgctgctgaagcacccggcatccacgctgcgccgctatacaaagtag

SEQ ID NO: 152844 - DNA, 435 bp, Enterobacter cloacae
atgagcatgttgccctccgtcgtcagtcggttttttgattactacgccgcgctggatgcccagccaccatcggcgctggcagggctttaccaccctgacgccacgcttatcgatcccctcggtgagcatcacgggctgtttgcgctccagcgctactttacccatctgctggctaacgtggacaactgccgcttttccatcgacccgccgctgagtggcgacagtcgttttgtcgtcacctggacaatgcactggtcgcatccgcgcattgccgggggagatccgcttgagctgccgggctgttccgtggtggacacggaaaataacttgattgtgcgccagcgggactattacgacgccggagagatgatcaatgaacatcttcccgttcccggctgggcggtacgcggcgtgaagcgcagggtgaaatcatga

SEQ ID NO: 152845 - DNA, 438 bp, Enterobacter cloacae
atgaaaaccgtactgattaccggcgcgagttccggcattggcgccgggctggcgaggtcctttgcggatgacggctatcacatcattgcctgcgggcgtgacccggcgcgccttgaagccctgcatcagcacagccccaacgtcacggttcgcctgttcgacatgacggacagggacgcctgtcgccaggccctgacggggtgctacgccgacgtcgttatcctctgcgccggaacctgcgaatacctcaactttgatatggggccagactacgcccgcacgctggcccacctcatcggtgaacggcttggcgcgattgagtttctggagccgacctttatcgtcgtcagctggatgccgactggctcggctggcgcaaggtgggaagcgccacgctcacctgggggccttttaccgtttacacctcgcagctactga

SEQ ID NO: 152846 - DNA, 345 bp, Enterobacter cloacae
gtgggaagcgccacgctcacctgggggccttttaccgtttacacctcgcagctactgacgccggacgggcgctatgacggcaaaaacggagatatcatcgcggcttttgccctgacgatgctgctggcgggctgcagcacggaggtaacggagtaccgtcagcagcagccgaagctggacattttcacctatttccaggggaaaaccgaggcgtggggcatggtgcaggatcgcagcgggaagcagatccgccgcgtggcggcagaccgctatgaagggacggctggcgatatcgaaggcgtcaccgtcgccacggtgacgctcttctttacccgtaaagcgtga

SEQ ID NO: 152847 - DNA, 459 bp, Enterobacter cloacae
atgaccgtcattatgattatgttagccgttatcggcggcgcaacgctgagcgtccaggccgccattaacggacagttgggcagccgcgtgggcgtatttaaaagcgcgtttctcaccttttccgtcggcgcgctggtgaccgccctgctcattttcttctttgagccaaaacaggcggtcagcctgatggacgtaccgaaatggcagctgctgggcgcgctgtgcggcgtgccgtacatcgtcgtgatggtgctcgccgtgcagcgtatcggcacggccgtcgcgacggtggcggttatcctgggccagctggctatgagcatgctgattgataactttggctggctcaacaatgaagccattccgttttcaacgagccgcctggctgccgtcatctgcctgggtattgccctgtattttatttactccagcaataaatcccgccccgccagcgactga

SEQ ID NO: 152848 - DNA, 933 bp, Enterobacter cloacae
atgattgatgccggaaacattagcattcgcgcgctgctgatcttcattgaggtttatgaagcgcagaatttctccgttgtcgcgcgccgggaaggggtctccgcttcgcaggtttcacgcgtgatccaccagcttgaggacgcgctcggccagcagcttttttaccgcaacacgcgtgccgttattccgaccgaaagcgggcatctatttattcgctatgcccgggcgatggcgggaaaccttgaggaggcgcggcgggagctggacgagcggtccctggagcccacgggcctgatccgaattaactgcccggtcttttttggacaacggcacgtggctcccgggctggccggcctttcagcgcgctatccgcggctcaacattgagctgacgctcaccgacgactttatcgatccgcaccgggatgctgccgacgtgctgtttcgcatcggcacgctgacggattcctcgtttcacgcgcgggtgctcgggcagcagttttatcatctggcggcgtcgccggtctatttgcaaaagcacggcgtgcctgaggtgccggaggattttgcgcatcaccgctgcctcgtctaccgcggatcgtccgggcctaaccgctggctgatgcgtcggccgggcgaggcgtgggttcactatcccgttgcgccgctgatgacctccaacaacgccgaaacgctgctgattgccgcgctgggcggaatggggatcgtgctgttccccgactggctggtgagtgaaaggctgaaaagcggcgagctggtgtcgctcctgccggagcatgaatgcggaatcaacaccgagccgcagaccattgcggcgatctacccgaacgcgcgtcatccgccccttaacgtcagggcggtgattgactattacgtagagcgcttcggcacgccgctttactggcaaagatga

SEQ ID NO: 152849 - DNA, 153 bp, Enterobacter cloacae
atgcatttgttgcatcgggattattcgcgtaacgcaatgacgaaggggaacggggcgggtttttataaaggcatgacgggtttaaacgtgaagcactatgtcgcaaataattttaaaaacgggctcatccggaaggctgaaagtacgacttaa

SEQ ID NO: 152850 - DNA, 975 bp, Enterobacter cloacae
atgagtaaagcttttacatttacgcttaagcgcagttgcttcgatgagaactataacccttccgagaatacgcgtaccaccaccaactttgccaacctggcgcgtggggaaaagcgtcaggaaaatctgcgcaacacgctcgtgatgattaacaaccgctttaacgccctggcgcgttgggataatccaaaagccgatcgttatgcggttgagcttgaaattatttccgttgatatgaacatcgatggagaaaatagcttcccggccattgaaatactgcagacgtttattgtcgataaaaaaaccaatgagcgcatcgaaggtatcgtcgggaataacttctcatcctacgtgcgcgactatgatttcagcgtattgctgctcgatcacaataaggatcgttccacctttagtattcctgagaactttggtgaactgcacggcaatattttcaagcacttcacccactctgccgaataccgggaacactttaagaagccgccggtgatctgcctgagcgtctccagcaaagatacctaccatcgtacgggcaacacgcaccctgtattgggcatcgagtaccagccggacggtacatccctgactgaacaatactttggcaaaatgggcctgaaggtccgctatttcatgcctgagaacagcgcggcgcctttcgccttttactattccggagatctgctggctgattatacaaatcttgaactgattgggaccatcagcaccatggaaacattccagaagatttatcgtcctgaaatttataacgctaactcgacagcgggacagtgctatcagccggatctgaaccagcaggatcattcattaacgaaaattgtttatgaccgtgaagagcgcagccagctagcgattcaacagggcaaatatacggaagagcaatttattaagcccttccagcaacgtcttgagcagtggtcccgtaacttcacgctttaa

SEQ ID NO: 152851 - DNA, 2649 bp, Enterobacter cloacae
atggcagcagttatacctaaacagagttttcccgttccttcagatgctaaaggccaaccgttcacttctgcagaagaactgttatcgaagcttgagcgggaaagttcaggtctgtatctggtaggaagccagggaatgtggcatggcggtattcatattaccgatgccaccatcccctggtgtgcccttgggacggagagtgcggaagaaaaagcctaccgtaacggggagccttataaaggggagcaatttatccgttgcatggctgatggtgagatagtcgcatggcgcgtgtgtaaggactatgaaaatgccgctatagagtggcgaggtgaaaacctgttttactcaacctcgtttgtactggtaaagcattacatccagccgggtgagacaaaagacagcgaactgacatttttcaccctatatatgaacctggccccttttgctgcatataaacagttggatgatcttcatggcagaatagtgtcgagccgccagcgctattataaaagcaaggatgatctgcagggggggcgggcagctggaaatctgagagcaggcacaattgtcatgctaagcaacaatattgtaacccgcagcagcgacagacgtcagttcacggaagtttctatttctactgagacgaaaaatgcagccggagaaatactcgtcgcgggcactaaggtctggacggtttctgaccaaggttctctgaaagcatctgtgtcggcccccgttccgtcatggtggacaaaatgtacgccaccttacactaatcagccggaaggtgcgattaactgcacttcgcgtaccgtcctgaattactatctgagtagtgaagatgtattgcaatacaccagtgcaggcacattgccggcagatattccgctctcttatgaatccggtaataccacgcaacaacttacccgccccggcaaaaacgctgaagacgcatccagaacattcagtctggtcactcttggacgcgatctgggtaagatgaaaaagggcgatcgggtatgggtggtatccgacgatgacaaccttgcgccagttactccggcagcatcaggcagtgcgcctgtctttaatgatgtgcatgttccggccacgccagtgcctgtcagtgccggagacagtctcgggcatatgggcttttgtcagctaccggaagaaaacggtaagcactcacgttaccaggtacatattgagtgcctgagtatggatgatatggagaaattcattaccaatcccggtaatgtggggaacgattcaccggtttacctggcctggcagaaagatgcagctttatctgacaagggggataccggaatgacagcaagtaatcgtaaaacaaagatatcaggaattctgacacttgcaaaagtccctggtgttgacgctgccgggaatgctctgtctagtaacaaggatgcggcctggtttcagatacgccctgaaggcggctggctggctgccggtagtgtgcagaaactgtcacagtatgcgttaggtgaactgggctttgtcacattgaataaggcaccggaaagctttgacctgcttgacggcataaaacagccgaataatgtggtgaagggaatacttgaacaattgtataaagtggcccaggaagaaacccggcctgcccatgcgctgaataaatataattacgagcgcctgctgaaactgatagacagtaaccaggatgggcactactcagagcaggagtatcttcaggcggtgcataatgtgtcctaccgggaacgtctgtaccgtattattgcgaagcacggaagtgaatggtattacggcaaggatgatccgctgtggaaaacctacctggatacgctgaccaaggatgcgccagcctggaaaacgtatctggaaaccttcattgataagatgacgtggatgaaaacggtgactgagaagggagtgtcactggggccggaattgtggcatatgcatccggtggtgtttttgagtgcaatggtggatgaagatgagatggcccttaaatggttacaagtaccgaaagggcagcttactttcgatgctgagggaaatgatattgatactagtccatggtttagtcgtaaaattcattggcctggtggtgtatcgggtgtgacgattggtcgtgggtatgatcttggtcaacaagcttcggcaaatgctgatcttgttcagattggtgtcactgacccctttaagtcttggcttgttggttctcagggattatctggggcaggcgctcaatctaggtttaattcggcttcagaggatatacggaattctacaataacacgaaaacaacaatatgatatatttatgattagttatcaaaggttagaggacgatgttaaaagaatatgtcaaaagccagatacaattcgtgtctaccactcaaatccccaagcaactcctgaacaagcatggagtgatatcccagagaagataaaagagattctcgttgaccttcgatatagaggtgattatacaccccgtgccagatctcttatacagcggtatgcatattcgggagatttaaactcatttggtaatgttttatctacccgaagtaattggcaaaatgtcccagaagaaagatttaatcagagagtgtctttttatgagaactaa

SEQ ID NO: 152852 - DNA, 321 bp, Enterobacter cloacae
atgggctttccttcaccagccatggattacgtggagccccaactttcaccatccgttctgtgcaacataggggttgaaagcagggtgcttgaaacagatgttgggtttgcagtcattgagcctgccacgaaaaaaaggtcgggagatgtattgttaattctgtgcgacggtcatacgcagtttactaagttaatgagacggtctcttataacagacgatggcgaggcaattgagggaacagctctggaagaggtagaagtgttgggcagagtgacgttcttcatcaatcgtgctttagacgatgattgccctgcaatatag

SEQ ID NO: 152853 - DNA, 1980 bp, Enterobacter cloacae
atgaaacacaaaataaattacagacctgaattagatgggctgagaaccattgcagtacttgctgttctaatatatcatgcaaaattaagttttaatggcgcgttccttttacctggagggtttttaggggttgatgttttttttgtgctttctggttacttaatttcttcaattattcttaattcagaagcatcaaataatttcagtttttggggtttttataacagcagagcaaaaaggatttttccagcattgtttgctatgctgattgtagcttcttatgctgcatacggaatattacttccagatgcctttttaatttatggtaaaactctaatagcttcggctctatttgtatcaaacgtttacttttttggcgaggatgcctatgtctccgagtcaagtgatttaaaaccactcttgcatacatggagtttgtctgtagaatggcaattttatttaatatttcctgcgattctttttttaatgttaaaattattcaaaaaaagagtcgtttggattgtatttttaatgtggtttatttcttttgctgtttctgtttatcaagctaaatataacataaatgctgcattttatttgctgccttcaagatcttgggaattgctttctggttgtttggtagcaattataggtagaagaaataataaatacttatcatttctaggaatggctatggtaattttttcactgaccttcatgagtgataaaatagaccatccttcatttttaaccctgattcctgtgattggtacgtgtctttttataatatttgcacatcacagcaaagacatttgtgggaaaacactttcgatcaagcctgttgtatttatagggacgatttcatactctttgtatttatggcatcaaccaatctttgccttctatagaataagattttatgaaataaacactttcactggcttggcgttgattattgtctccatattagttgcagtgatatcatattattttatagaaaaacctttcaggaagggtgattataatttatacaagaaagtactggcagctacatcgtttatcgtgataatgactttttcctattatattcatgcaactaatggggatatatcaaggttgtccatacaagcccaaaatatatatatgaacttttcagagcctgagtttcgtaggcttaagggcagccctggagcgaacttgaggactggaataataagcgagtcatgtttcttgagagatccctatgatgcctgttctaacggtgatagttcgtgggttacaattggcgatagttacgcaggtactttagatttttatttgagtaaggttcttttagaaaaaggacatgggcttatgtcattaacttatgagcaatgccctttcgtaaatgatttttggtttggtaatgtaccagaatgcgttgaagttaataagcgtagatggaatattataaaaagtttcaaagaaagaaagaatatcattatctcagcaaattattatttcttccgggagggtaagcttgcaacaaacaatcctctggaagacggtaggaataatttgagctacggcattagagccaatgaggatgaggtatggcagtctttttctaagaatattgaaactcttcaggcattgggtcacaatgtaatcgttatttaccctatcccatctgttactgaagatgcaaagaaaatgtatttatcattaataaccgatcttaaaccccagtttgacggtattatatacgagaaaaatatcaaagggaaagccgatgctatagaatttgctaagaaattagattctgtaatcgttaataaagaaaacctaactataattaggcctgttgattttatttgtgataataaaggatgcaaaataatcactaccgaaggatctctatataacagtgggagtcatctgtcaaatattggtgttaaattattatttagcaaaaccgatttcaatggggctaatcgttga

SEQ ID NO: 152854 - DNA, 333 bp, Enterobacter cloacae
atgaagagaagcgaatgggaatggtgtctaaataatgatgactctctttattatttcccaatcaaccacaccgtagagggaaactacagaattcattttgtactgagtggctctcacaacctcagaatttctgacgctgctctcgcagggaagcccgtacttctgttcgaatactttgataaggatgatgaccatctagccattattggattcattgaagcaaattccactatcgagtccatgattggtcatcttaacagcattgacagcatttaccatgagccgatatacaaatccgtgtatgaatgggcgctacaacttttctatcgatag

SEQ ID NO: 152855 - DNA, 456 bp, Enterobacter cloacae
atgaccgaaagttacattgcttatcaatctcttgttgtcagcagagatgcgctattctggactaaaatttcaactattgtgagtattgttggggttttggttactttactcgctggagtagtagcttttttagccttaggacagtggaagcagcagtataatgaagataagaaaataaaattgatggatgctattattgaatataataacgttcttatttctatagataaaaatcttgacaatgatgaacgtcatgttaacaggaagttaattacaaaagcttttaatgagctacattccagatgtaatatttatctttcatcaaatacagatgagagtctttctaaaaccatgggtgctttacgtgagcatcaaatggctttcttggccggtaaagtttttaagtctgagctggctttatttgcagggaaaatgttatatgttgatttaaagtaa

SEQ ID NO: 152856 - DNA, 498 bp, Enterobacter cloacae; identical to SEQ ID NO: 106171

SEQ ID NO: 152857 - DNA, 678 bp, Enterobacter cloacae
atgaaaagcgaaccacaaatcatctcaacacaacttgctatttttctcgattcttttattaagagaccggatctattctttaataaattaaattctgacttagggggcctaatagatgccatgccacaggttctgcctcttccaccagaagcaccagcagaaatccctcgggttatggctgcatcttcatataataaaaacactataaacatttctctcaatcgtgtggacttcattaggcaatacaatcctgttgaggacgtagagcaatcaatcaaagagttcaaggcattatgtaaaaactttatattgtctatcataagtgagtataaaatatccagatttggtaatgttggttcattttatgttaaatccaacaatccagagaaagaaataagcgatctatttattaataaagacgcaggttcttttgatgagatctcgctgagattaaataaaacaaccatcgataaaggtattactttcaataatgtcattagtataaaccaagggcatattgaagctcctaattacaacggcaatggaattgtaattcaattagataacaacagcattgcaagagctgaggcattaaaagaagaagaactactatcattatttgaaattaaaagtaatgcatttaacccaacctatgcaaaagaggtgggcaaaaaatga

SEQ ID NO: 152858 - DNA, 378 bp, Enterobacter cloacae; identical to SEQ ID NO: 106169

SEQ ID NO: 152859 - DNA, 642 bp, Enterobacter cloacae
atgaacagcaaccgcatctacgcctatcttcgcgcctccaccaaagaccaaaacgctgagcgtgcgcgtcaggatttgcaggagttcgccaccagcaatggcgttgctatctctgcgtggttcattgagaacgagtctggtgcatcactggctcgtcctgagttgatgaagttgcttgatatagcgcaaagcggtgatgttctgctagttgaacaagtagatcgcctatcacgccttaatgcggaagattgggaaaagctgactgggatgattaaggggaaaggagtgcgtgttgtcgctctcgatctgccaacgtctcacatgatggtgaactccggtgacgagttcaccacccgcatgatgcaggcgctaaacagtatgatgctcgatatgttggctgctattgcccgaaaggatcaccaagaccgcaaacgccgtcaggcacagggtattaaacttgcgaaggccgaaggaaaatttaaaggccgtcagattgataccggcttgcatgagcgcgtgctgaagttacgtgatgctggctggtcatacacagaaatccagaaagcaacaaatgtagcgagaacaactattagccgaattataaaaacaaacctcaaaaacattcatgataatatcatttaa

SEQ ID NO: 152860 - DNA, 483 bp, Enterobacter cloacae; identical to SEQ ID NO: 106167

SEQ ID NO: 152861 - DNA, 330 bp, Enterobacter cloacae
atgaaagttaaaaccctttcagcaagtgagacggcttactttttgagagctaagctgggcgacttcagggcatgggatgatttattagcggatatgcggcgcgggagggctagctatcacggtgagttcttacttcctgtcggaaggtattcctccactcgccaccctcgcccggtttatctatttagtgaagtatgtgagttcgtcgaaaaagtctcacgcctttgccctcccccctccaagccgcacatgctgtctatgcttgaggttgacattgacctcaccgataagcggcattggagcgttcgccctccaatagcgacgagctga

SEQ ID NO: 152862 - DNA, 246 bp, Enterobacter cloacae
gtgcccctacaccaacgccacgggatcgatgtagtatcgtttggtaactcactgcatgacacggattgctattacctgatccgcgcctttgacagcgctgaaagcatggctgcggttctcgatgctttttacgcaaacgcagactggcacaacggcccgcgccaagacgtcattggcagaatagagaccagcattaaaacagttattagcctcccttcagaaagcgtggaagggctgcgggggtaa

SEQ ID NO: 152863 - DNA, 1953 bp, Enterobacter cloacae
atggcgcagcgtgataatctctatcgacgtccaagcggtatctatgttctgcggatcaccgttccggttcgttatcgcgccctgatagggcagcgtgaaattcatgcatctacccgcacaacccaccttgcaaatgccagagctattgccgcgcgtttgttggagaagtggtatgcgtctctggaagagttcaggcaagtggataaagagaagatcaggggcaatgccccattgttgattggagcaggcaaaatcagcctggcgttgttttgcgattcatttggggttggggctgagactgtcgtccagcatcttctggcagccaatgtgccgctgtatgcccttgtatctaaccagcgtggctttctgattgatgatttcagcacgcttgagcgtgatcctgatacgcatgggttcgttttgaataacattgcgtatgacggtgctgaggctgcggtaaacggctatatgcagctttaccagccgcagtttgcccttgttgaattgctgaacgggcgagaggttgaggttacggcattcagggctaacaacggcaatcctctttccctctggttgttggatttacccggggtgacgctgaatgcaagttctttgttcatcaacaacgtgcaagctgaaaaactgcgtagcgcttgggataaggcgcttgcgaaatcggagccaacattaagtgctatgccatgcgctccggtaggtgtaacaccagcgattcctgtggccgctaccatcaacccgtattgcaacccgacatatgcgagcatgacggtttcagcattgctgaaagcgtttttggtctataaaaatacgggcgatattaagctagccagcgaggggaaaattcgttccagaattgaacacttcgtggagataatgggcgatttaactctaggcgaactgaatcgtgacgttgtgaaagattacgtcaccaaaatgcagaatatgcccggtaatctgtatttgatgcggcgaaaatacaagatttcagatacgcaaaagctaattgaaatagcgctagctgatggtcagccagttatgagccgagatgctattggcaggcatattgagtcactgggttctatgctcaagtgggctaagagtgaacgttacctttttgataaccctgctgagaatgtgttggctcagcgtcgtgtgatggtgcgtgagcaggatcgccgcgacctcttcaccgacgatgaactagagcaaattttctcggctgactggtttaagaaaggcgcgggaaggcccaatcaatacggacgttatacgagcttccgcccgtttcactactggttgcctctgttggcattatatgtgggcgggcgtatcaatgagctttgccagctttatctgacggatattcgcgaagataaaaacggggttgcctatattgattttaaccttgatgcgccggataaggtgatggatgaagaagcgcaggctggtggcgttaaatcattaaagacggtgaatgcgatccgtcaggttccaattcatccgcgacttatcgaactagggctgctggagtatgtagatgcattgaaagctgccgggtatgatcgtcttttccctgagttgaagcacaacaaaatcaaaggatatcgtgccgccgcctcaaaatggtttaacgaaaactactttggcaaagtcctcggttttacccgtgacggtaagaaaacgttccattcgttgcggcacactttcatcaacgccgtagacaagtttgagatcaacgaacgcacgattgcgcagcttgttggacatgttcggggcagcaccaccgcgatgacaacctatcgtaaggatgctgatgtgggagagcaattgggcgtgatttcgcagcttcactacagtttacctgatattgcgcagtttgattcgcaagcgggtatcaaggcggtcatcgacgcgcggcgcagacataaatcgtaa

SEQ ID NO: 152864 - DNA, 216 bp, Enterobacter cloacae
atgaaaaagaagcttaaaacccaccaagctacacgaaataagactgcatgttgttgtaaagatgtaaatgaaaatttgttgctacgtgccgcacgctacgttccggctatgtactatttgtacaaattttccaacgatttacatcctcaattctggtcagcgattggcagcgctgattggcatgcaatcaaggaggtcattagcgcgatactttaa

SEQ ID NO: 152865 - DNA, 315 bp, Enterobacter cloacae
atgccattgaaactaaatagcaatattgatcagttgaaaaagaatttggaagaaatcagtaaaactaaccaactccgttttgatgagctttttaacgctgaatttctttctgagcatacatcattcacgtccctagatgatatgttcgaaaaatcaggctttaaagtcgaatcagcagatgattttaaggcgattcccgatcaggaatgggaggattttattattgctaatacttcctttgaaagctgggaagatatgcaaaaagcagcggccgtggcagtgttgagtaaacggatgcatcaaggattaaagtga

SEQ ID NO: 152866 - DNA, 1509 bp, Enterobacter cloacae
atgacactcgctttcagttacgcccgcttcagtaccaagtcacaggccatagggacatcgttggaacgccagttgaacgcttctagactgttctgctcagagcgtggtcttacgctcagtcctaaaggatatcatgaccttggcgtttcggggtttaaacaagtcaaaagacctgaacttgaacagatgcttcatgccattcaatctggtgatatcccatctggtagttatatcctcattgaagctatcgaccgtttatctcgtaaagggataagccacacccaagatgttctcaaacagatccttcaatacaaagtaaaagtggcattcgttggtgaagacgctaagacattgaatggtcaagttctcgatgaacattcattaaacgatttaagttcagttatcttagtggcgttggctgctgatttggctcacaaagaatccgttcgaaaatccaagctagttaaagctgctaaattaattattcgtaagaaagctactgaaggccataaagtacgtggtcatactatgttttggattgattggtctgataagaaacaagactttgttttgaatgaccgagtgaaagatgtacagacgattattcaattgagacgggaaggacaaggaccacgcaagatagcgaaaacaatgaatgagcttggtatcaaaggcccgcgaggaaatctttggaatcacatgtcagtgacaatcgttttaaaaagtcccgttctttatggggcataccagacacaccaaattattgagggtcaaaaagtcccggatgttcttcttgaaaatcattatcctgcattattaactaaagaagaatatattaaaatacaagcagattcttcaaaggcaaataaaggacgcccatctaaagccaatccattcagtggcgttcttcgttgtgagtgtggacaagctatgttgttctctaaaagaactaatctagataaaaatggcgatccattagaatacgaatatcatttttgtattggttcaacagaaggacgttgtaagaacaagaaaagaataagagaccttgtaccattgctggcttcaataatggataaattagttattaaccaaacaccaacgaaaaatttaaatgctgaacttatcaaagctaccgagcagaaaattgaaaaactaaacaatatgcttgtagagctagataatccaccaatgagtgtcttaaaaacaattcaaaaattagaacaagaacttgatattcttttgaatacacatattgaagaaccagttcaagctgatgttaaaacattgagttctatttcagatgcacaagaatataatcaacatcttaaacgactggttaaacaaattgttgtatatcagataaatggacctaggaacctcagaataaaagtccacaaaaccgatggacattaccagaactttttggtaaaagataataaaattttattcaaatcagacactaaagcactgaaggagttaatagatgaattcaataaagcacggtga

SEQ ID NO: 152867 - DNA, 297 bp, Enterobacter cloacae
atgaattcaataaagcacggtgagattgatgaagccgatgagttggatttggtattggaacgtatgatggccccgtgttttccagtatacattaaagaaaatgatattgtcgtttttccaattgaaccaaatgtatatcggttttcatcggttgaagatgccgaagaacaagggtatcgcgtaaaagatatggagcattatgatacgttgagtatcaaagaaaagaaaaactataatctttttcatgtttcatctggtgagctgaaaccaagaatatacgacatcaagaaagattaa

SEQ ID NO: 152868 - DNA, 273 bp, Enterobacter cloacae
  misc_feature (239)..(248): n is a, c, g, or t
atgcttataaaacggttgaaagaagcgcgtcttagagcagggctttcacaagaaaaacttggtgtacttgctggtattgacgaggcttcagccagtgcacggatgaaccaatatgagagaggaaaacatactccagattttgatatggtttgcaaacttgcaaaaatattgaaagtgcctgaaagttatttttacactattgatgataatatggcagaaataatgctaaaaataaatannnnnnnnnnaattatgatagtaaaaaagaattaa

SEQ ID NO: 152869 - DNA, 642 bp, Enterobacter cloacae
atgacagtctatgcatatacgcgagtatctaaatctgacacagaaaatggcaccactgataatcaggtcaatttaatacaatcacaagcaaaagtttctaaagtgttttctgatgtgaatgtttctggttcaatgatgttctttcagagaccagaagcacaaaaactaattcgtgaattaaaagctggtgatacgattatcatcgctaaactagatcgtggattccgtgatacggctgattgcctcaatacggttaagtggcttcagaaacgaaacgtcacgttaagaatcctcgatatagcgcttgatgtttcaaccccgattggtgaaatgattttgaccattatggcatcagttgccacttttgaacgcaagagaattgctgaacgtatcaaagatggttttgcaaatggtcgtaaacagggtaagagttatggatacaagcttgaagctgtgcgtcgctcagtcgctataagatcctctaagcggcgccaggaatctttaaaacgttatgacatgattcgtaccaacttgagtgagttaatcgctcagaacgctactgaggctcaaatgcttaatcatctgaagaccataggccagcccgtatctcgcacaactttgcgtaacgcactagggaggtag

SEQ ID NO: 152870 - DNA, 1317 bp, Enterobacter cloacae
atggctactggtattaataaatctgagcaattatcaattgattcattattggcagactcagctaaaagcgagccatttcctttgccaacaaatgcacaggatgtttgttttgtttatccgaataaagtttccgaaacagaattattaaagcctgtatcacaaaaatacataacattcgatatgaataagaagaaagatatcgacgtaatacctgttgatagcttagtgttagccgataattactttggattaaaaaaacttcttgaaaactacgcctcaaaaatcaagttgatttaccttgacccaccttatggtactggcatggattttcagtcaagagatttgaaacatgcttatcgagatgtgatggggatagcgccttggttagagttcatgcgcagaagattaatattcatgcgtgaattactttcgaatgatggaagcatttatatacatattggtcatcaaatgcttttccacttaaaagtcattatggatgaagtatttggcgaagaaaatttcagaaacttgattgttcgtaaaaaatgtagttcgaagaattacacgaaaaatcagtatcctaatataaatgactatattttattttatagcaagtctaaaaatatggcatttgcgaatccgggcatgcctgctgagttagattggatctcaaaagaatataataaaaaagatgaaaaaggtcttttcaaattagtacctattcatgctccaggcatacgtaatggtgaaacaggaaaaccttggagaggaatgacccctcccccaggaaagcattggcaaatgtccccagaaaagcttgaggaattagctaataaaggcgaaattcattggtctaaaactggaaaccctagacgcaaagtttatctttcccaagataagaaactccctcttacagattattgggataaattcagagatgcccatcatcaaagcatcaagattacaggttatccaactgaaaaaaatcttgacatgcttaagaagatcattgaagcaagtactgaggctggtgatcttgtcttggatccattctgtggttccggtacaacattgcatgcagctcaagagttagatagaaaatggttaggaatagaccaatctttccaagcaataataacttctatcagaagattcaattacggtttaaagcctatgggagactatgtaaatgcaaacacctcagaggaatacgaacaatctaaattatctgataaagaatttaacttcatcgttgataatgatgtttattgcaaacatacggaagaagtagatttattgctcaatgagttaaattaa

SEQ ID NO: 152871 - DNA, 900 bp, Enterobacter cloacae
atgacatttaatatacacagctactttgcaactattcaaaatcgtttggaagttgtaactgccatcccacattcaagaacgtttccagagttccttccgcagagaataaacaattacgctccaatgattgagttatttagagaaatagtgatgacttctcagagtagctacgatattttgtttaaaatacgcaatcctggtgctttcacagcttctgtacgtatgtctttattaaaaatatttagaaggtgtgtttgtaccatattagatactgaagccacaaagaaaatcacaaaaatcacaaccagtgatttgtataatgcatatggcaatctatttaaagatatagttacattgcaatcccaatttgcaaatatcactgctgaagaaatatcatcgttagcatctttgttaggggaatatgatgatcgaggtcaacaaggatatgttctaactgatttgttttttgactggtttgatgagaaattaggttcgtgtttctcgataactggtcctcgcggcgcaggaagagatattgaactaagtacagttttccctcagtttgttggttcttgtccttgtgatttcataattaatgatttattttccaatcaagtaaaagcgattggctttgctcgttatgatagtacacgaggaggttcacagtctgatgatcgtactggaggaaataatgataaggtaaataaagcaatgcaatttagtctccagtctggtgaagactttaaaataatatttctttcagatggaccggggttgactcacaatgatacttggtttgaaacctgttatctagatggtcagtgggatggtaatgttagagtaacaacactaaaaacagcagatgatagagtaactatagactggttgttaaatcggtaa

SEQ ID NO: 152872 - DNA, 180 bp, Enterobacter cloacae
atgaaaggcgctgaacaaactcgttttgaaaacatccttttcgaccttcagaatcagatcgttcaaaagaacgaattcagcaagttcgaagccgttacaaaattgtacaagaatggtgagtcagttgccactaagagaacaacaatcagtggttcacggtttaaattctacgaagcataa

SEQ ID NO: 152873 - DNA, 267 bp, Enterobacter cloacae
atgatcgaaaagtgttatgtcaataatgtaaaaaattcccgcgatttctttgccggcattcgggatatcgtcgggggtcgctccggcgcgtacgagaaagagctgcgtaaagcgcgcgagattgcgtttaaggagctgggcgagcaggccaaagcgctgggcgcggatgcggtggtgggcattgatatcgattacgaaacggtcggaaaagatgccagcatgctgatggtgagcgtaagcggcacggcggtgaagacccgtcgatga

SEQ ID NO: 152874 - DNA, 639 bp, Enterobacter cloacae
atgtcgaccatctgtcttgcggcccagcacagctatacaaccggggaagcggtctggttttcgtaccgtctccccagcctgaaaaacgtattcggcaaaacagcgttatggctggtcgggctttgcgtcatgctggttgtcggcctgtatatgcacgtctactggaacctgcaccacccggcgcctgaaccggtcaacgccagcgttgcgaaaccggaaacgcagctttcggatatgcattacgtgtacgtgagtaaaccgttcccgcatccgcagcctaaagctgcgccagtgccagttgatgttccatcgatgcaggatctgccgatcaacagtgatgatggcgactggcagcaggcgcccgacggcgcggtgccacacgacgcctcgcgggataccttacccgggaccgaagcgcatgagcacgataacgctcccgccagcacgggcagtggagagtcatcattaacagaattatttcagcaggcgctaaaagagcaggagcaggattattctcaaggaaaaattcccgcgccgccggttgacgaaacgcaggataattcacaagccagtgtaaaaaacagtggaaatagccgttctcctttcagtaaaaaaggagacggcgggagcaggtattaa

SEQ ID NO: 152875 - DNA, 300 bp, Enterobacter cloacae
atgaacatccagcagattaacaacctgaaaaaaatcatgaccagcatcggcagcgactatcaactgagccagctgcactacgagcgccaggtagagcttatcgacgctatcagccatctcaaactgcaatcgccattctacgaactggagcgcaaaggtgtacgccgtgaggttcttgaagaactgatgatgagccctgagtttgaagagcttctcgccgcataccagcgcgagctgactggcgttattgccaagtgggatctggcagatcaactggacacggcgaggaacgcggcatga

SEQ ID NO: 152876 - DNA, 801 bp, Enterobacter cloacae
atgtcacacctgacgacctgcgaggattcacgcagtgccacttcttcgccggaattggcgtctggtctcattccctgcgcctcgcaggatggcctgacgataaaccagtctggactggttcctgcccgtgccagcctttcagcgcggcaggcaaaggcgatgggtttgctgacgagcggcacctttggccacacttcttccacctcatcagcgagcgcagacctcagcatgtttttggcgaacaggttgcaagcggtaacgcaaacacatggttcgaccttgtacaagctgacctggaaggaatgggatacgccttcgggcttgtgccgtttacgtcagcgggcatcggtgcaccgcacatcagagagagagcttactgggtggccgagtccgctggcgagcaatgtcaaaaactgctaccaggactggctcaaggtgttggcgcggaaggaagccggtcgtcagccaaatctacaggactttgcagtgttggcagcctggacagcgccgacaagccgggactggaaagacacttccggaatgactgcgcagcgggacgggaaggaacgactggaccagttgccgcgtcaggcgtacacatgcggccccttgaggttaacggtttttggcgagatgcggactggctattttgtcgagatggcaaatggcgtccagttgaacccggcacattcccgctggttgatggggctgccgcgcgcctgggacgagtcgagtccggggtggcaagagtggcaagcagcaaccgcgtcggtcgactcaaaggctacggtaacgccataa

SEQ ID NO: 152877 - DNA, 405 bp, Enterobacter cloacae
atggaatgcaaagtgagtgagttggtgaagattgggcatgaacgtgctgccgacctgagagcagcatgtggcacgattgctgtggcgaagttgattagcgatctggctacgcagttggatgtgcaactggctcgcagtaatgagctggctgcggagaatgctgggcttaaggcggcgattgacgcaactatcggatggcagcaatcaaccgatccggagaatgtcgaaagcgttcgaatgttagtcgatgttaaaaccccggcgacagacgctttcctggctgaagtgcgggcgcagggtgtggagatgcttgccaaagaaacagaaaaactcgaatggcatgaatcaacagtaagatttgtgctgaggttcgctgcccaaattcgcaaaggagcgcagtcatga

SEQ ID NO: 152878 - DNA, 264 bp, Enterobacter cloacae
atgagcaaattaacatgcaaggttggttacgttaatccgcgttatgtgcgttttgcagattttcttcgccagggtcgcgttgacgtgctggcaaagcaacttgctgagcgtcttgagattgaagctggcagccagagtgaagccgttgatttcgtgaagcaggttcttatcgatatcgccgctgacgacatgggagtgaaaaatatcgacgagccacgggaaagctggcgtacacaattcgacgtaaaaggagccgcccaatga

SEQ ID NO: 152879 - DNA, 189 bp, Enterobacter cloacae
atgtcactgacagtgaggcagttaatcagcaagctcaggaaaatgcctcctgaggctgtcgtggtttggcaggaccatgaccaagctgaaggtgagtataacgattatgtgggccatgtagccgatgttaccgatgagttcgcatcttcctttgacccggaagtgcgcactgtggcgctgagaggataa

SEQ ID NO: 152880 - DNA, 708 bp, Enterobacter cloacae
atgaatttatttgaacgtttgctgcatcgccgtctttgcaatgagcagcctgctgatggtggcgctgcgccggcaccgtctgagccatccgcacctgctgctgatgctcctgcacctgctgctgacccggcaaaaccagaaggtgataagccacagcccggcactgaaggtgacaatcctcaggaaaacaaacccgctgatggtgataagccagcagataagcctgatgacaaagagaagaaaccagaaggtgcgccggagaaatacgaatttaccgctggtgaaggcgtagagctggataccgaagcgctgaaggacttcgaacccgttgcccgtgatctgaacctgaccaacgagcaggcgcaaaagctggtggacgcatatccaaaaattctggccggtgttcagcagcgtcaggcagaagcctggcagaagcagaccgaaggctgggcagagaccgtgaaggcagacaaggagatcggcggcgacaaactgaccgcaaacctcagcgctgcgcagcgtgcactggaacaattcggcgatccagaactgaaagaatacctggactcaaccggtctgggtaatcacccggcgcttgttaaagcgtttatcaaagtcggcaaggcaatgtcagaagacaaggttgtcaccggcggtcatgaaagcggcggcagtgaccttatctccgccttctatcccaaaaagtga

SEQ ID NO: 152881 - DNA, 681 bp, Enterobacter cloacae
atgaataccaaaccttcaattttttctttcgaatcaagctgcaacatccgcgctgtcatggttgacggtaacccatggtttgttgctgctgacgtttgcagtgccgtcggcattaaacattccgccagtgctatgcgcgcactggacaatgatgaaaagggtgtgcattcaatgcatacccctggcggacaacaagatttcaccattatcaacgagtccggcctctacactctgatcctccgctgccgcgacgcggttacgcctggcactatcccctaccgtttccgcaaatgggtcaccggtgaagtgcttccgcagatccgccaggccgggcgctacgttcgagaagagctgtcgccagctgataaagcacagaaggttgtggccagctttatgccagcgatactggaagcgatgaagtcgggagagaagcaggaatacaacgttccgctgaagccaggctaccgcgagcacatccattcacctgaaggtgttctcggactggctgagcattccctgctgatgaacctgctcaaccgcatgcaggatgacgggcacgacgtttccggtgcggtggcggagttcacaaccatggtgagctatatcgtcggcgtcagcaaatgtctgaacgacatccgcacccacgcgcagtacatcaccaaaaacgcagccgggttctga

SEQ ID NO: 152882 - DNA, 543 bp, Enterobacter cloacae
gtgaatccatggggtgctattaccgcagcaatcatagctggcgcaatcgcttttgtaggaatggtagttactaaagaaagtaaaatatctgatttcaggcaggagtggattaacgacttgagaactaaaattgccgagttaatatcaatttttgatgtcattagcaaggaaagtgattttagtgccgatgagaaaaacgaggccaaaaaaaacgtgaaccgagtcatagctgaagttaggcttcgattaaatcactctaatcctacagcagcagagagagaactcggagaagttataacagatataaatcttgaaataatgactcgtggcggtgaggtatcgaaacactatgaaagacttacgaaactcacgcatttagttcttaaagaggaatggacaagggttaaaaaaggtgaaaatagttatatgatgataaaaaacttcctttcagtaattgcagttatactcgcagcaatgaccatcacatggttcgcaattttcattgtgacgcattcaggtttgtttaaaacacctttattctaa

SEQ ID NO: 152883 - DNA, 486 bp, Enterobacter cloacae
atggtcatcacaaaaagcttccaaggacgtagagggtatcgtatttggaggaaaaaaatgatcaatattactactaaggacggcactcaagtcagtggtgaagtaagagaccttgttatcctccttgaaactgatgggaaaacggtttctgattatttacaacccataccacccaaaagagacacccactggagcatgatccttattccggtcgtagcctatatactacttaatcttggttatattattgctcaaccacttttacctgcacaatatttaaaaacatccacatctatatttctgttcatttccttcttattgagtgccacagtatcatattttgtttttcataagcataaatctgcctctctatctatatgctgcttagttttcttagtgttgattgtgggtgccaatgtagggtttattagttatagcgaccttacacagaaagcaacacaaaaattagatagtttatcaaaataa

SEQ ID NO: 152884 - DNA, 378 bp, Enterobacter cloacae
atgactaacaaagaaaacaaaaatacctacattaaaaaattcaagaaggaactttccaaatatatacaaccaaccgctggtgtagacattcaactttttgactctaaagatggaggcggtgtaattaaagccacgctgaatagaagtggaaatagaagaacgtctattgcaggtaattttactaaattaggtgaagcaattagctctagtgggcagagagcattcggtggtgatctatcaaatatgaatttttatggtacaaatacgatcttcgatggggatacaatatttttaattaaatctcctgattcagaggaatggtcatcacaaaaagcttccaaggacgtagagggtatcgtatttggaggaaaaaaatga

SEQ ID NO: 152885 - DNA, 189 bp, Enterobacter cloacae
atggaagaaggttactactggattcagcactgcggcacggtacaggttgcctactacaccaatgatgttgttgatgacctggaaacgggcaagtccattaccggggtctggcatctaaccaggggtgatgacatttgcaacaatggagaagcagagctcatcagcgggccgttatcaccacccctgtga

SEQ ID NO: 152886 - DNA, 384 bp, Enterobacter cloacae
atgaatttcactattggcaccaacaatcaaagctgggatggaaatggtatgcctccagtcgggacggtatgcgagatagcagcaagcacgccacagttgcatatcaagcacccagaaggatcggtcgtgaaaatttacgcgcacttcactgacgatcgaggcattgagctggctgcattcgttgatgaaatcggtaaagtcggaggggtttgcacctccaagtgttttctacctctgaaaacgcaagaggataaaaagcgcgaattattgatcgaaacagtaaacggactaattgatggatttatgaaatcgtccggtggcgattattccaaacttggcgcagtggttgtcgattatctctcgctgccgaagaaactcgaatga

SEQ ID NO: 152887 - DNA, 540 bp, Enterobacter cloacae
atgagtattaaaaatttggtcgaaatgataaagcacaacggtcttctggcttcaatggctcagcttgaaaagctgtatcaggttgcaatcgagaacgagaagaagctcgccgaacttgaatccaatctcgcggcgctggctgcggagaatgcgaacgctcgcaatgcggtgcagaccttctgcgatgttgttggcgcaaatacagacgctatctgcgaagaagtcgggcaggacggtgtaagggccatccttgcagcaatgaacgcaacggggaacatgccagccacagacgctttcctggctgaagtgcgggcgcaagcccacaaggaaggcgctcactttgttgccaaccggatgctggctgcatgggaggcagggtttatcgatgacacggcaaagaacgcagctgatattgcgaggatgatccttacctccacagagtttatggctgatgctcccgaaggcgatttcgatcgctcgttcgctgatggcgtactcgaagacatcgccgcccagcttcgtaaaggagtgcagtcatga

SEQ ID NO: 152888 - DNA, 231 bp, Enterobacter cloacae
gtgaataaggtcgaattgcttcagaagatatcggtgctcgctactgaatgccacgcgctagcatgtgagcttgagattggtgacgagcgaaccgaaatgttcgaaatctacggcgtactgctcaatctcggccgccgcggttacgctgatgaggtagggcagagaatgaatcctctgctcgcatcctgcgattacgacgacgatgatgattgggacgaggatgacgactga

SEQ ID NO: 152889 - DNA, 300 bp, Enterobacter cloacae
atggaaattgattttttgcttataggtaaaggcctaaccggtcaaataaaacggtatgattatccaagagataaattacgggttactgagttagctgttgagtctgccaatgagccagccaccgttagaccagccctagtttttgacgtcgttcagcataagtatgacgggaaaacatatgcaattgctatcgggatatcaacagattcagtacagattaatgctctaattgacaggttaaaacctcaaccaataccagagagtttgcttatcaaaggcgccccttcagaacaaaaataa

SEQ ID NO: 152890 - DNA, 501 bp, Enterobacter cloacae
atgaattgggaatttactagtgccgactggaacatggctattgcagcgattacggctcttggtggattggcatcagcatatgcagcattcttaagtagacagacagcaacgaaatctcttcaactgcaaagcaggatgaatgcttatgagtcgttaaagaattgcgcggagagggctaacggatatgccaaagggaagcaaggttctgattggacattccatgatggagcaaacattgtcagaagtctgcgacaggcgatgaaaataatacaagattatagtgagtacagtgatgacaaggaaagtgaagaattaaaagaatactttataaatcagattaatatggaactattcgaagagctgaattataacgatgcccccggagctttatttaaggggaatggagattggagcgctggagttaagctttatgaacaatggaatgatgccattaagtttttcaacttaatgatagcgactgatgctgatctggaagattaa

SEQ ID NO: 152891 - DNA, 273 bp, Enterobacter cloacae
gtgagtgatttttatagtcaggttgatgataaagatttcatccatgtcatagctgagcagttttatttatatatgcagactagggatgatgatgttgtctcaagtgattttcaggtcatcaccggacagagtgcgatagaagtagcggagcgcatgatagaggttattaccaaccaagaatttccacaacccagacaaattagtcatgacgcgaccgctggcagaatgcatgatggatacccagtcttcacactttttgccgcgaaaaaataa

SEQ ID NO: 152892 - DNA, 666 bp, Enterobacter cloacae
atgagcatctatcaacgcatcaacggcgctgactggcgcaatatctgggtagtcggcgatctgcatggctgctacaccaacctcatgacccagcttggcaaggtggacttcgacccggcgcaggatctgcttatctccgttggcgacctcatcgaccgcggtgccgaaaacgtggagtgcctcgagctgatcaccatgccgtggtttcgtgccgttcggggcaatcacgagcagatgatgctggatggagtggaggattacacactggaacgtcactggcgagctaacggcggctcctggtatttctttctcgatgatgatgccgggcgctatgtcaggaacaacctgctacaacgcgtggctgatttgccgctgatcatcgaactggtgaccggagaccggaaggtggtcatctgtcacgctgactacccgcacaacgaatacgcattcgacaagcctgttccagaggagatggtcatctggaatcgcgatcgcatcagcgactctcacgatggcgtagtgcgggaaatcaaaggcgccgatctgtttatcttcgggcacaccccggcgcgtatgccgctgcgattcgctaatcagtattacatcgacaccggagccgtattttgcggcaacctgaccattcgccagttgcagggaggcaaataa

SEQ ID NO: 152893 - DNA, 462 bp, Enterobacter cloacae
atggcccttaaacgtgataagcacgactccattttttctgagctggttcgcgagcgtgccaactggtgctgcgaaagttgcgggcgtgatttcagcactaaccgcgcatcactccattgctcacacatcaacggacgccgccatacctctactcgctggcatcccctcaatgcgctggcccactgcgttggctgtcatcgtcgcttaggtgaagagccgatccagttcactcgccacgctgagtacgaatacggcgtgatgactgtcgagcaggtagctcgcgcagcgctgcacccgatgaagattaagccgtggcagaaagaggagatgtatcaacactacaagcaggagctggcaaggattaaagctctccgcatcaccggaatgcttggccgcatcgagttcactgcgcctgactggtaccagcagggcatcactttgcgcatgggtgaagcagcatga

SEQ ID NO: 152894 - DNA, 690 bp, Enterobacter cloacae
atgaacgttcaatatttgcagtatgtgcgtgagcagctgatcgttgcgactgccgatctgagtggtgccactaaaggccaactggtcgcctttgctgagaacgcgatgtttgaagccactgcgcgcagtcgtggacggaagaaagtagccgacccggtgaccggccgcatggttaaacctgatggacctgcaatgaacggcagccagtcgcgcgccaaaggctcacacatcccgctggtgaatcacgtcgaatattgcacctcatcatggcgtcgtgctgtgctgtctctggaggagcaccagaaggcgtggctgctatggaactacagcgagaacgtgcgctgggagaaccaggtggcgattactcagtgggcatggggtgagttcagggcgcagctgggaacccggaaggtggccggcaaaacgatggataggctgaaggcattaatctggctggcggcgcaggacgtgaaagctgaactggccgggcgtgacgtttacgaatatcaggcactggcgtcgctggttggcgtaacaccaaagaactggtcagagacgtttacggaccgctgggtggagatgcgccgcatcttcctgcgactggacagtggtgctttgttgcaggttacgcgatcacgttcacaacaaaaggcgacaaatttagactcaagtcttgcaaaactggattga

SEQ ID NO: 152895 - DNA, 195 bp, Enterobacter cloacae
atggatgaaaaaatttttgatgcgtcagttattactggtgagcagcttctggtcttaagttctcaaattctcgttgtcttgaaaagtgagcttttatccagaggacttaagcccactccaagtaacttacgtgtagtgatggagattattgataagtctctgcctaactcactcagcgagttttttgtcgagtag

SEQ ID NO: 152896 - DNA, 240 bp, Enterobacter cloacae
atgccacgcacagcagacatacacgccgccttcgttgcggtaattaagctcaaccctaagggctatcgatatctgagcacagacagcttcatcgagaagctgcgggaattcaactggcactttacccgaacagacgccaatgcatggatagagcgctatcagccagacttcacggataagacgactgacggtaccgacaatcactactggatcctgcgcaacatggggagggttcactga

SEQ ID NO: 152897 - DNA, 2259 bp, Enterobacter cloacae
atggctacgcaacctaccaatttgtctgtcccaagtgaatcaccgcgcgatctgaaatttaacgccggtaagattgacgagttcgttacatcgctggtcaatacttacgttgaccgcttcggtaatgagcattacaccatcgaaggtttgaagcagttggtgcttaagcagatttactccctgggatggaaccttaaaggatctttccaaggtggcggggtggttgagaatcctggcgatctgcttcaggacacatctacgaacgtttggtatcgatgggatgaccttacctcactccctaaaacagtaccaccagaatccactccggcttctgctggaggcaccggagctggtaagtggcaaccagtggatattgctgacgtgctacgaaaggatttagcgaatccaacaggtgcggagatgattggtgcaactaatgcggatggaagcactagaaacgttcaggaatttcttttagcgaatgactcttccgaattcaggtctaaaaacatcgctaaattggctgcggtgaattacaaaatcaaaacacgacaatcaattaaagttttatttcaaggagattcaataaccgctggatatgatatgacaaccactgatagcgttccagcagataatggggactgggctagacatgcaactatgacatatcccaagagatacgtagattttatgtctgaacagtgcggagtggcggtggttccgacctatagagccatttcaggctatacggcaaaacaagcctatgagaatccaaactggcaaagtaacccatcctgcgacttggcttttattatgtatggcatcaacgattctaacggagttgatggcgcaacgcatgaatcctatatggagtatatggagaaattaattcgaaggttaatcaactggaatataggggtggttgtattaacatgtgcggctggaggtcaaggcgcagggagcccgctttatcagatttgggcgcagcaagttaaaaatatggcgaagatttatggttgcgttcattttgatgcgcatgaggttcagtataatagattgtttggtactgttcagtctgacaatactcatttcaatagtgttggttacgctaaacttggtgagtcgcttacttcaatgtgtggcgctggtgggctgttagaaacatatgaacccgtcagaagtgaagtgcagatgtggccaggctctcaaagcaatcacattggttattgcaatcctgagaataatgttgccacttcctatagcgctgcggcatataccaatgttggaattgttggagtccttcctgccgggcagcgctgtgtgatgtcttatcatttttatcaagactgtgaggcgctagagatagatgtgattggtgcatggtcagatggagggttgacttgtattgcaaataactggtattccccagcctcattagaatactattcattttcacaaaatattaataatgagcgatctcagggaatgaagtcatcttttatctcgtcttctttaaacaataaagatggcaatagagatggtcagcctaaattcattggaactatttatgggaaaggttggaaaacagtttctatattcaataaattggatggaacatctacggcagatcaatatatccaaatgataacactgaggcctgttaatttaagaaaagcaaccccattccgacgtggtgctcaatttggttcggcatccgtagtgaggcagatgtaccctgaatctcttgggactgatgcagcacctccgaatgctattaatttcccatccgtcaccctacccctccctgacgggctaaagggcgtgaccaaggacaacaaagtccaatactttgattgcgctattgctaaggtaattataaaagcagttggaggaacattcggtagtcagtatctggagggggttttatataaaaccacctccgggtcggatacattcacaatgaccactttgacacaaaccggtgggcctacaatctggccttccttgacttttaccaagactcagaagtccatagcaaacacatacacggcaaatcagtttggaccaggaatgccagtaaggaatattccctttactacccctgatgtaagttatggttctgggagaaaggatctcggtgattggttaactatcacagctaactggtctggtgttactggaggggaaaagaacgcctattggagcatagagctttggagtatagattttgacggtgctccaatggcatcagctttttaa

SEQ ID NO: 152898 - DNA, 186 bp, Enterobacter cloacae
atgtgtctgaaaaatggtgacctggtatttgaatcggaattggaccggttcgacctgaaaaataatgaggttactcatacaccttcatcagtaattgctcatgcagaaaagccgatagggatttacaggattatttttaagaacggcattccaatagattcctggattcagctaattcaaaactga

SEQ ID NO: 152899 - DNA, 732 bp, Enterobacter cloacae
atgcgtcagaaaactataaacgccatcatggcgcacgccgcagcggaatatccgcgcgagtgctgcggtgtagtggcgcagaaaagccgggtagagcgctatttcccctgccgaaacctctcagcagagccgactgagcattttcacctctcacctgaagattacgccgccgcagaagactggggaacggtggtggccattgtgcacagccatcctgatgcgacaacgcacgccagtgagctggataaggcgcagtgtgatgcaacgcttctgccctggcatatcgtgagctggccagagggggatttacgcactattcagccgcgcggggagttgccgttgctggagcgaccgtttgtgctgggccatttcgattgctggggcctggtaatgagctacttccggcagacccacggtatcgagctccacgattaccgcgtcgactatccctggtgggagaacggctaccctgaaaacttctaccaggactgctggtacgaatgcggattcagggagtttgaaggaccacctcaggaaggtgatctggtcatcatgcaggtacaggccgacaagtggaatcacgcggggattttactggagggtaatatgcttctgcaccatctgtacggtcatctgagccagcgtgtgccgtatggcggatactggcaggagcgcacaatgaaaatagtccgttataaagatgtcggaggcggtgaaacatgcaggaagtaa

SEQ ID NO: 152900 - DNA, 756 bp, Enterobacter cloacae
atgagtcttaatgctgattatcagaaacttgagccgggcaatgaagtccggcttttttctgtcgatggaacggcgtttggcatgccagatgtgctccgtttccacgcccatactctcgcgcacaccccggaagaaattgaagccgctggcggggatgagaataaacttccggctaagtccatctggtggcagggggaggagtataaagcctggccgtgtcaggttgagggtattgaggcgaccacggacggtaccagccctcagccgaaactgacggtggcgaatctggacagctccatctcagcgctctgtctggcgtatgacgatttgctacaggcgaaagtcagtatccatgacactatggcgcagtatctggatgcccgaaactttccgcagggcaatcccacagctgacccctcacaggaaaagctgaaggtcttttatatcgatgccagaagcaccgagacggatgaggaagtggaatttatcctttccagcccgatggccttgcagggccagatgataccgacacggcagctgcattctttatgcacctggtgcatccgaaacaagtaccgaaccggcgatggctgtgattatgccggaacgcgctatttcgataagcacaataatccggttgacgatccttcgctggacgaatgcaacggcacgctgacggcctgcgagctccggaacggagacggcaacgaactgccgttcggtggcttccccggtacatccctcatcaggagctga

SEQ ID NO: 152901 - DNA, 348 bp, Enterobacter cloacae
atgacgatagagactttttcctggagcgttaaggtctccagccagcccactgagggaagtaaagacacgatcagaaaggtccagttcggggacgggtacgcccaggtgagcggatcaggactgaatgatgagattcgcacctatgagtattccttttcgggagatccaaataccgcgaatgaaattcatgcctttcttcgccgacacaaggtgaagtcgtttattttcactccgcctttcggcgatatggcgctgtggagagttgaagccaatagcctcaaaaaggtggttaaaaacgtaaaagtgataaccgtaactgcaacgtttgaacaggcattcgcaccatga

SEQ ID NO: 152902 - DNA, 2517 bp, Enterobacter cloacae
atggcccagacgtcagtcggtgatctggtcgttaaccttgacgttaactcgacgaagttcagcgaacagctcaactacgtcaaaaaagaattaaaacagacaggaaacacggcgaacgacgaagcgttacgtatccagcagtccttcagccgtcaggagatcgccgcacgtaaggcgggtatttcagtcggccagtataccgcagcgatgcgtatgcttccggcgcagtttaccgatgtggccacgcagctggcaggtgggcagaatccctggctgattctgcttcagcagggtggtcaggttaaggactcctttggcgggatcataccgacattccgtgcgctactggggactatttccccggtgatggtgggtatcggtgctttgtctattgcaacaggggctctgttctatacctggtaccagggttcttccacactgtctgatttcaacaaaacgctggtactgtcgggtaacacagccggactgactgccgaccgcatgctcgtgctgtcgcgaaacggtcaggctgcggggctgacgttcaaccagacaagtgaagctctgacggagcttattaatgctggcgtacgtaccggctcgcgctttgatgaaatgagccaggctgtggcgcgttttactgatgcctccggcgtgccggtggataaggttgctgccgcctacggtaagctcgtaacagaccctacatcgggcctgatcgcgatggcccagcagtttcacaacgttaccgcagaacagattgcgcatgtggcgcagttacagcgtgccggtgatgaggctggcgcactgcaagcggctaacgaggccgcgactgccggattcaacgatcagaccaaagccatccgtgacaatatgggattgattgaatcttcagcggactccctgaagcgcgccttcaagtcgatgtgggatgcagcacttgatataggccgtcctgacactgcgcaggagatggtggcaaaagctgaagcagctttcaaaaaggccgatgaaatctggaacctgcggaagggtgaccgttatgtgaacgacgaggcacgtgccaggttctggaatgatcgcgaaacggcaagactggcgctggatatggcgcagcagcaggcgggtattgctaaagcgaacgaggagaatgcctctcgtgaagcagctgcggaatcagaccgtcagaaatatgccgcgcaggcgcaggcaaactatgccaaaactcagacagccctggaaaaatacacggcgcgtcagaatgagcttaacaaggcgctgaaagagggcaggattcttcaggctgactacaacatcaacatggctgtagcgaaaaaagagtatgaagatacccttaaaaagccgaagaaaacttctgctgtcagaaccccttccggtacccgcgcgaccgacaacgccagtgctcagactatggcgctggaagcacaactgcgcacccttcaggagcacaagggtataaatgacaccatcagtcagcagcgccaggagctctggcgtcagcagtcgcgttttgccgttctggaagaggctgccaaaacaaggactctttcagcagaagagaaatccctgctggccagcaagagtgaagtgctttcccgggcagaactgaatgcgaagctcggtgatcagattgtggcgcaggagcggcttaaccggctacaggacacatcacagaagtacgtgacccaaatcggggagaaaactcgcgccctggcggaaagtgctggcatgagtagtcgtgcagcacagcgacgcaatgaagaggcccagcttcttcagggatggaaaaatggtggtggatctgaaaaagatgccggttatcagaaagagctacaggcactgcatgcgtattacgcagagcaggataagcagcgagacgactggcagtccggggcaaaatccgcatgggcagattatgttgattctgcttctgatgcttatggccagatgaagtcgtttgccagcagtacgtttgatggcatcgggcagaatatggctgacatgctgacacgcggaaaggctgactgggctgactttacccgctccacactctctatgctgacgcagattctgatgaagcaggcgatggtcggcctggtggattcagccacgacggcactggggtttgcaggtggaggttataccggttcaggcgggaaatatgagccagctggcgttgttcaccgtggggaatttgttttcaccaaagaggcaaccagccggatcggtgtcggcaatctctacaaaatgatgaagggttatgccagtggcggctatgtgggtggaggttcatctgctggcgtcggtgcgccgttcggtgtcagtgtttatgctccggtgacggtcgagaatgcctccggtgacgcacagcagcaaaacgacggtaacagactgggtaaggcataccagcaggtgattaacaaatctgttaacgagggcattgctaaggctatccagcccggtgggcttatctggaatgcgaacaatcgcaggtaa

SEQ ID NO: 152903 - DNA, 321 bp, Enterobacter cloacae
atgaaactggcgcgtgagttcggtcgcccggactggcgtgccatgcttgctggcatgtcctcaacggagtacggcgactggaaaatcttctaccaggacaattattttcatgatgcgcaactggatgctcatttctccggtttgctctacaccatctcaaccctgttttttgccgatccggaattatccccggacagtttcagtatcctttcccctgcattggaagccatcgacatcgatgatccggatgacgatacgctgatggcgaaggctgaaggtatttcaggaggcgtgcgctatggcccagacgtcagtcggtga

SEQ ID NO: 152904 - DNA, 738 bp, Enterobacter cloacae
atggccacaccaaatccgctggcaccaacaaaaggtgctggtactactctctgggtttacaccggcaccggagacccctacgccaatccgctttcagacgttggctggttgcggctggcaaaaattaaagaccttcagcccggagaactgaccgcagagtcagaagatgacacttacatcgatgatgagaatgccgactggacatcaacgatgcaggggcagaaatcagcaggtgaaaccaacctgacgctcgcgtggatgccgggagattccggccagcaagacctggtgaactggtttgatgagggcaccgtgaggggatataaaattaaatacccaaatggtgttgtcgacgtctttaagggctgggtgagcagcctcggtaaaaccattacttccaaagaggtcatgacccgcacggccaaaatcaccaacaacggcaaaccatcactggcagaggacagtggtaccgcgccgattgctgtcacggggatcagcctggataaatccactgcgactgtagcggtcgcggccacgacgcaactggcggtttctgtccttccggccagtgcgtcagataaatccttccgtgtagccagctcagatccgacaaaagcaacggtcaccgtcagcggcaataccctgaccgtcaccggcgtggcggcaggcaccgttgaaatcatcgtcatgagcaatgacggtaactttgtggcgatctgcaaagtcactgtttcctga

SEQ ID NO: 152905 - DNA, 792 bp, Enterobacter cloacae
atgtcaggacctgtaagcatcagtcatgtagcaacgatgtctaaaccgtttggtgtaaacgtcgaatggaaatggccaaatggcagcagctggttttccaagctggaactgcaatgcctccgcgaagacgggcggctagtgaaagagtgcatatattatccgaatactagccatcttatttccggtcttaaaagtggtgagcgcgtgcaggtacgggtgcgcatcgtcgcagcgaacggttctacccgagactggcaggttagtgactggattcaaggcgaatcatctgttgatgctggcgatatcgcccagtggttgggagacgaaatccggaacagtgagacgtttaaagtatttcgtggccagcgctttattaacgaagcaaagataggcaatggcatcgtttctactaactataacgtgaagttgaacgtcgtcgacaaaggcaaactgcacgaagctggcatggtcctcggtgttgaaggtgaccagagcaaagtagtgtttaaagctgatcgctttcatgtgcatgaagccgctcaatcaattatcgaaaacgctgtagcaacaaacgcgaagacgaagattaggcttggcgatgaaatgaagcaggccgtcattgatgccgtgcgtgaaagcgatttgttcgcaaccctccgggaaaatgttgatgctcaaacagcttcaatcgttggcctgcaacaggcggtgcacgatgcggtaaatgatgctctccgcaacgcgctcaggccaggcggtgcggtatgggctcggatgaaacatgggttttga

SEQ ID NO: 152906 - DNA, 219 bp, Enterobacter cloacae
atgcgcgtaataacccagctgattatctgcgccgctttggccgggtgcgcgaactcaacaccgatggcaccgatactgaatccggctccgtgcgcagcggaaaaaccgacgattgatgtggttcacatcgatgggcatttcgttatttctgatgacgatatgggaaagctaactggctacatcgccgcgcttgaagagggctgtggcgcacctaaatag

SEQ ID NO: 152907 - DNA, 489 bp, Enterobacter cloacae
atgaacagtttaaaacgtatggctaaagcctggttgctgatgaatggtgcctttgtcctgcttgtgctggcgacgcagccagcgatggcaaacgagggtttggatctggattctatcttgagcgccctacctcctggctgggccggtggcgtcactggcgttttcattgtgctgtatgcggtggcgcagctgcgtgccgtcctccctccggcactgaccaataaaattcccacggtgattatgaaaatcctcgactttgttgctgcgaactatgcgcatgcacggaacgcagatgcgatcagcaaagtggcgcgggaagccggaaaagcagaaggcccatcagatgatgattatcgtgtgatggtggaaacagccaagaataagggagaactgcgtggaagccgcattgagagcgctggcgattatcctggagatgatcggccaggcagtaaaagcccgaaaagaaacagagcgacaggcgcggattga

SEQ ID NO: 152908 - DNA, 492 bp, Enterobacter cloacae
atgaattatggactggtgagtaagcgagacgctcgtctatatgccgaagccgtttgcgatgttattggacatggtaaagccaatgcagcggttctgctatgtgtcgaaacggcagcagccgagacattactcggtgattacaaagacccaacgccgaccagcgctggaaccggattaactcaggttgatctcggtaccttcgaatggcttcgcgataagtacaaaaacagccgctacgccgccgttctgctgaatcagtttggtattgacctgagccgaactgtttacgaagagctcagaacatcaccgctgatggcaatgcttttttgccgactgcgatacctgacggttccggagtcgattccgatgacgcgcgaagctcgcgcggcctactggaagaagtattacaacacctcggcaggcaaaggcacgccgcaggactacatcgacaaatgccagcgagctggcgttgatgcgctattcacgcagtga

SEQ ID NO: 152909 - DNA, 1071 bp, Enterobacter cloacae
atgcaaaagaagacacaaatcaaagatgcgcagctcgtttgcgcagattctctgcaattcatcaagaccatccccgataattcagtcaacctgatcgctgttgacccgccatattttggtgtgaagtcgaacgactgggacaaccagtgggaaaccgatgcagaatttttgggttggcttgatgaatttctggcggagttctggcgaatattggccccaaatggaagcctgtatatgttttccggttcgcgccttgcggcaaaaattgaactgcttacccgcgaccgtttcaacgttctgaaccatatcacctgggcgaaaccgagcgggatgtggaaaaggcaaaataaagagagccttcgggcattcttccctgctacagaacgcatcatatttgccgagcattatggtgcatcaggttatgcgaagggccagtctggttatgcaagcaaatgtgcagacctccagaaagagatttttgcgccgctgattgaattgttcgcaagtgcgcgtcgccagttgggaatttcagccgctgacattaactccgccacagagaaaaaaatgtgttcgcactggttctcatcttcgcaatggcgtttgccatctttggttgatttccaaaagttgcaggctttattccagagcagagctgaggaaatgggtgttgcttgcccgcctccgttcaacgttggatatgctcagcatgagcaatattatgctgagctaaagcagaactatgagtcagtaaaagggaagtatgacgatcttaaagcgcaatatgaaaacttgcgccgaccgttctcagtgaccgcagatgtgccttatacggatgtttggcagttcccacccgtacagtactacccaggcaagcatccatgcgaaaagccagctgcgttgatggagcacatcatcaggagcagcacccgccctggagatgttgttgctgatttcttcatgggttcagggagcacaattaaggccgctttgaagctcggtagaaaagccataggtgtagagctagaagatgagcgatatttacaaacggtctccgagatagaaaaacaataa

SEQ ID NO: 152910 - DNA, 228 bp, Enterobacter cloacae
atggtatacgattcaatgacagatgcagccgtgtcatgttgtgaaaaacttgattcccagctaagcgatctcgatgctgtcctggatatggtgagcaccgttatggcctcaccagaggccagccttcatatgaatgaggcggcacgtcttctgcgcatgtctcgtaatatggtccacagatgcaaggatgttgtcgcgggtgagctcatcaggcaggctggcgaataa

SEQ ID NO: 152911 - DNA, 222 bp, Enterobacter cloacae
gtggataaaaaagcattgttattcgaacgccttcgccagaggagtgaaagcagtctggccagcggcggtgatggttttatttttgcctcaatgctggcgttcgacatcggtctcaacacgagaacgatccgggggatgctggactcagccgtgaaaaatgggaccctggaaaaaatggaacgtggagctggccgtgcacataagtaccggacaattcagtag

SEQ ID NO: 152912 - DNA, 183 bp, Enterobacter cloacae
atgattgatcgcgccaaacttcagcacatcctcgaatacgccaagcaacaaagacacatcggtctgcactgcaaggttccgccagaagacatggtcgaaattgtggagatggccatgcgtcatgatagcgaagatcaccaccagaaaatttatgccgacagcggcaataccacaggagtctaa

SEQ ID NO: 152913 - DNA, 501 bp, Enterobacter cloacae
atgaaccgactcaatcaaatagcactggtgacagcaatcaccaaagaactgaaccgacagattcccgatttacccgcagatggacggatgaatgttgtcatcaaagctgccaacgacatctgtgcggagtattcccgcgaactcgttacagcttctgcaggtatgggattggaagcatggctgaatagcgacgacaccggaagcagcagcctctacatggcatggtgcttgagtcacggccagttcggctactggcagggacgcaagcaaccagaggcggcttatcctcatgatccagatgaccttgggcgctgcattcgtctgatagaggcagtgcctgagtttggcggcaagataccagagatgtctcaccgtgggggtgagtggctggcggtaacaaccaattgggaacggtgggttgaattgcatgccagaggtaagggtcgtgaactttatagagaaatgaaggcggcttattcaaggggtagcagcgatgagtaa

SEQ ID NO: 152914 - DNA, 918 bp, Enterobacter cloacae
atggtaaatatccaaaaaacgattttagcgatgattatacataaatggctgaagagcgattttgtagtcatcgatacggaaactacagggcttgacgaatatgctgagattatcgaaattgcgatcatcaatatgcgcggagaagtgttgctggacactctggttaagccgaccaaaccaatccctccggaagtaacagaaatcaaccacatcaccaacgagatggtcgccaatgcaccatcgtggcgtgatgtattcccgaaagtactggatatcatcaatcaacacaaatggctggcctggaactctggttttgatgctcgaatgctggagcagaccggcttatgcacaggggtttacctccatgaaaaccctcgtttcgaggctcgtgtagtatcacgcattcacacgagccatattgacgctaaagccgtttatgaccagtggtacggggagtttgacgagaagcgtcaggcattcaatcgtcaaagtctgactaccgcagctgcgcgacacggcgtgtcggtagagggagcacaccgcgctctggccgactgccaaatggttctggccgtactgcaaaaagtctgctctcccgttcctcagattgaaagctctgtcgagaaagacctgccaccctgcccgttctgctatgggccaccatcgttgttcacccattacctgaatgacaaaggctattcccctttatatcagcccgtgaattatggcgatgatggcctgtacgtaggttcgtatgtcttttgccatgaatgcggcgcacagggtgaagaagtaggaggccacgcctacgaagattcagatgtcgcccagctcgaagctgcagccaggaatgcctggtcagatcgtaacgagcgtcacctcgacctgtatacagcctctcaaaacctcgaagagtaa

SEQ ID NO: 152915 - DNA, 747 bp, Enterobacter cloacae
gtggaactaaatagcattcgggcctgtgtatccacggctctgtcagatattcattatctccagcgtggcatccttgaggtccagctggagcagctgcgtctcgcaagctctgaccgtttcactgacaaaccaaccagaacgatctgcatcggcgatacggagtcttatgaagtatctgtccctgcagagcccgttcgttatcacgttggtaaatccttcaaacggtcttcaatgctactgacagaattagatttcatgaccgccagctggcgacgtgccattgagcagttaaacagcgaagaaactgcatggttgcattattgctacggatgcaaaccgaattataagaatgatgtgaccatttgccagtggctgtggcttgattttttaatcgctcattccagagcaggctttaagaaaatgaaagcctcaacaaaaaaaatcatgcagagattaacttactacggaatacagcaagttaaatgtgaaatatttcacgaagtgcatgattcagattttgataggacagagcgagacgaacacataagttctttagtgggtgtatccgtcgaaagctggcgtaaggattataaaaaacgctggttattactgaaatcacgatgcatgcatcttaacgataccgcgttattaaatgcggcggagaagcgctgtgaaatcattgaaagccatcgtgcaagaagtgccgacctgcctgtgtcagcaggttatgttcaggaaaccagataa

SEQ ID NO: 152916 - DNA, 3975 bp, Enterobacter cloacae
atgaccttacaagaattctacgcggagcgctttggcagcgatccgttttcactgcttgacgcggcacgtgatgagctgactgagctggcgaagatggccggtatcaactggcctgcgtgtgctgataagattcagctcaatccgcgcggtggtgtagagcgctataccacctacaataattcctccccggaagctctgcagaagagccttaaaggccgtgtggaaatctattcacgccttgagcagagcaaggatggcatcagttatcctttcgttaacttcgttgaaaaagcgcatgacgctggttcctggagtggcttttcgttcctgttttcggagtatcgtcgtgaacagcaacgaaatggtgcgaccgtggtcgctcagccggaagaagaacgtgcacgcatggagcgccaggctgaagcacgccgcctccgagctgaacaacaacgcgttaatgatttaaaaaacaatcagatggagcaggagcgcctgcttggatggctggctttccatcgcgcctgggaacattcgccagctgaggacggttcatggccgtatgctgtaaaaaaagggattcgtgacgtatttagcgcttgtgatatacgtcgcgtgaccagtcacgacagtgcgaaatggagccgtggaccaacaacttacatggcgatacctctgtcccacctggacggaagaaaagacgggcggattgttggctggcaacgtatcgatctgaatggtggcaagttccagaccagcgccatcactaacggtgatttcgtcggtgcatgctttgttattggcgacctgcagggggcgcaaaaaattgcgactgcagagggtttcgccaccggggcatccatctggctggcgaccagaaacgacccgaaaaaacgctttgacgcggtagtcattgcggtttccgctaacaacatgattcacgttgtcgagcagctggtgaacatgtacccggctgcgcaaatcacttgcgctctcgataacgaccgcaaatcctcagctgaaggaaaaggcaacacaggcctccgcaccggatacgacatcatggagaagttttccggcgtcaaatgtgtttacccaacttttgaggatgatcctgagctggaatgcagcgattttaacgacctgcacagcctgagagggctgaaggaagtcgctcgccagttaacgaaaaatcatctgagccgtgcaaccgacctgttgtcgatcacgctgaataagctgcgtactctcccgcgtctgaacagacgtacttttgccaaagaactgcttcgcgccgttgatattggcatgctgacatgcccggtaccaaacagcccgaaagaacttatgcgcctgttcagcagcacgctgcgcgatatgggtattgctgaaatttataacggtaccgttaaagatcacattacgcgccggttgaatcgcaaatgccgtgccgcgcagacttcacgttcgttcagtgaacgcatcaccaacccgaaccttcgcccgtcacacatcacttacaagcggtttgaaacctccaggatgaccgatgaggttatgacatacgccgcacagctgcagggcatcgttattgtccgcgccgggatgggctctggtaaatcgacaggcctcctgcgtccactgatgctgcagtccacgcgtggcgtctccgtcgcgcaccgcgtatccctgataggcggcctgcatgaaatgatgaccgaagggaaaggcgcgaaagccgacattctgcattatcaggatcctggctatcaggaaatggcgccatatgccaacaagctgactatttgcatcaactccatacttaaaggctgctggcaaccgctgatgcgccagcatgacttcttcggcttcgatgaagcaacacagggcctgcgtgccattctggccgggcgtgcgatggaaaacccagttggcgtattcaacacacttatcgacgcgctggcgcgtactgaagagcatgccattatggtggatgccgacgccaacgatctgcttgtcgaccttgctgaactggcgatgaagcgtcgcgaggagctgggcctgccagcctggctgcaaattcacgtgattgaactcccggtcgacgttcgcaaccgcgaaaccaacaagcctatccgcgtattttataccgagaaaaatcggatcatgaccgaggttatcgctgcagtgcaacgcggcgaacgaatcatgctggccaccgacagttcgacgttcgccgaagacgttaccatgcagctgagactccagttccctgacaaaaagtttctctgtgttaaccagaaaaacaaacaggagaaggaagtcgacgatttcaccaaccagcctaaagtgatggtgaaaaaatatgacggcctcatctacagcccgtcgatatcttcaggtgtatcaattgaggagaaacacttccaccgccatttcggcatgttctgcggggaagtggtccccagcgacgccatccagatgctgcgccgcgaccgtacagctcaggaatacatcatcggtttcgataagctacgcggtaaacgtgaaaccgatccggaaaaaatcaaacgcgcctacgcgcaggccttgctcgaaacggctggccactccgggctgctgacagacgttgtctttgacggtgaccgaatttcactcggcgtggctaactcttcattcatgcagctcaaaataaaagccgccgcgctcgaggcgtcggccagaaatgattatgccagcaacatgatttgcatcatgcatgatgatggctatcaggtcgcgcctatggccaccgacgcgcttgcaaacagcatcggtaaggatttacgtaaagaagcccgtgaactggtctttgagcagcttatggagcgccacctgagtgtcgatacccctgaccagggcgaacacgatgagttgataaaaaaacgcaccctgtctctggatgagcaggcccagctggtccgctgggacatcgaaaaggagctgcagctggatgtcgacgaggtggctttaaaattctatttcgacggcggcctgaaaaaagtgcgcctgtttgaaaccatgcagctggatgagataaccgcccgtcgccttgaccgtgaagaagcgttgattcactttacctacgcttatcgcgttgccggaagatggcagcagttcgtcactacggccatgacgcgggaacaggccgacgcagagttccaggctaaattcccggccataaccgattaccgagtgaaatcgacccctgctgttgagataggcatgcgtggtttctacaccctcaaatcagcgacgctgcagcagtacttccgcgactgcggtatcgatccaaaaaccctggaaggtgaagcagacatggacgccctcaaacgcgccagagataacctgctcaccccggaacggcgcgatctgctaaacaacgttttacgcatcggcggcttcaacacagagaaaggcaagaagaaagcgcctgcagacctctgcataggcatcctggagtcgatggggctatccagtaagaccagacgcgccagagacggcgatgcacgccccacgatgcgttctattgacccggactcggtcgagttcctcatgaatatcgtggagaagcgtcgcgaggccggtttatcaattcacgcacgtaaggtggaaaaaaccaccatcgaagtggatcgcgatttggatctaaatatagatatacatggtaaccctcgatccaaaacagagcacgttccggacgccccacaatcagtaattagccaggcactggaggctatcccggtggcggtaccggaggcgtgggcggagagcgcgttgccagcaaccgaaatggaggcggtacgcctgtggccagtggccagcatcgcgagaacgttcgcctcgctgtacatgactgaatttatggacctgctatcagtacgcgagataaggctgctgaaagcgtttctgagccagcggcaagccgtggcgatataa

SEQ ID NO: 152917 - DNA, 249 bp, Enterobacter cloacae
atgggaaaacaacgggaatgccttgtcctcgtggagggatacgacccttatgtggtcaaggtcggccacgacgcgacaagctatagcgattacaaaactggccgggaacttccattcacgataattcggatgaacgggttctcagatagtgagggcgtttattgctgcattgccagcgataagagcatggaagaccacacagacgaagctaggacgcttctcaaggcttttaaggtaaaaccgctatga

SEQ ID NO: 152918 - DNA, 357 bp, Enterobacter cloacae
atgacatcgacacctgaatatttggaaaagctttcgacaactgaatttttggacaggcttaattatgagcagctgaagttctgccgcgagctatgtaacgaacgtatacgcgctatccaggaaggtgagaagaaagtcgcgtgggtcgtcaccgatggcggtgttaacttcggctggttccgcacagaagattatccgaaagctgtagatttattggctcttaaggcagctgaacgctgggcggaagcagataaagaaaaccctgagacgaagtacgagctgaatctcagaattgagggtgagcgcctgccggtttccgagtacgaggcgttatttgctgatggtcagtgggggtga

SEQ ID NO: 152919 - DNA, 813 bp, Enterobacter cloacae
atgcgtaagaaactctttttggcaggagtgacggttactttattgtctggatgtgtccctcagtatcaatataaaaagtttgacaatgttacatatccgatagtgataaatgaaaggcgtgtcccaattaatgctgaaggtgatttcagtggtaaaccacttaccggagcgcagtttaaccgcatcctttcgaagaaaattgaggatggtagttggaaaggttatgtagtccattcgttaacagctggcccatggaataatacttggtctgttagaggcttaactgtgccaagcaacattgtctatgcaggaacgtataagcgcgataatttttttgagggtaatgggaatgatggtggtgttagcagccgagatatggccgggtggtatggcttccatgtaaacatggctgagaccactaaacatggccattatactggagttaacgctttcggagtttctgctaaggtagaacagctgaatacaagtggtgcggagatagtgtttggtagcacacaaatcaacgatggcagtccagaagcagtttgggctgatatcgatgttatcggtgcagtacctgaagatgtgaatcttaatgatcttaaaatcgagtatttggcacgcattacagggttacagcgcacggttatagatagaaacacccctacgctgagcaacccatctgataccgctcatagaactaaaattgttacaggcgacttgcttgccgcacgcttgattaatgcaaaaacaggcaaggtttaccctgttaagcttgaatgggtattccgtacgcgtaatgcatttaagtaa

SEQ ID NO: 152920 - DNA, 165 bp, Enterobacter cloacae
atgttcaaatacaggttcgcggcgatctgccgtactgataaaaaatcccatatccaccgcctttccactgttgcttcgtccgagcgagaagctcgtcgccagttcgccagccgttttgtcctcgttctgtcagcccgcatcccggtcagcgaggtgatcgcatga

SEQ ID NO: 152921 - DNA, 801 bp, Enterobacter cloacae
atgaaagcgctctccgtcttttcatttcaggaaagccacccggttcgggtggttcttgtcggtggtgatccgtggtttgtggctgttgatgtatgtaatgcattagggctaaaaaacccgaccaaggctgtatcttcgcttgatgaagacgaaaagcggctgtttggtggtgactctaacttaaagttagggtcggcaggtaagggagcgcaggcagtacttattttgaatgagtccggcctttacactctcatcctccgctgccgcgacgcggtgaaacaggggaccaccgcctggcggttccgcaaatgggtgacgaacgaggttctgccagctatccggaaaacgggtggctatgactacgttgaaccagcaccaaaatgcgctgcagagccgttggattggcgggttgagcatgaactccgtgcaattgttaacgatattgctcagtgcttttggtacaaacaaaaatggatgaatggggtgcggcacgccttacgcaatgcatgccgcaccccagcacctctccccctaactgttgatgatctcccagctattgttgccgagctgcgtcgaattttagccgccgtcgaaacagcacagggaaatatgcgcgcttacgagagagattttttgcgtgatgtagttcgacgtggccgcaggaattcttcaggaggggatctgttgccagttgatttggatatggatcaggaaaaagttttgcctgcgcactttgagctggcaattgagaagctggaagctttgtccgcaaaaattagtctccccagctgtcgccgataa

SEQ ID NO: 152922 - DNA, 801 bp, Enterobacter cloacae; identical to SEQ ID NO: 152921

SEQ ID NO: 152923 - DNA, 231 bp, Enterobacter cloacae
atgaaccagattcagttaaacgcccaaggcctgctggagacgattgaggagcgcctgctgcaggtagaagcgcttgtgtcctctgctcaccgcacgatctccagttatgaggccacgctgtatttgcaggaagctacggaattactgcaggtcgcgcgcgaactcacgcaggaagctcgcggctgctccctgtccctttctgagcacttgaaatccggggaggcaaaatga

SEQ ID NO: 152924 - DNA, 165 bp, Enterobacter cloacae; identical to SEQ ID NO: 152920

SEQ ID NO: 152925 - DNA, 813 bp, Enterobacter cloacae; identical to SEQ ID NO: 152919

SEQ ID NO: 152926 - DNA, 351 bp, Enterobacter cloacae
atgatttatcgcagaggttgggtccccgtcttatggcggcacgagctggagaagcggctcaaagagcaggggttcgataactggaaagagatctgtaattttctttgcggtgaaggggattattacgctgagtcgtcaaaagtacctgagcagtacgattacgtggtagtcgataatactaaatggatgggacggcgtgatgcaacgttctggcagcgcctgaaccgtttgtggttcgttccgctgtacctgctgacgattccgttccagtggctcattcgtggccgtatggggtttgaatcaacgtcgaaggtgggcgaagtaattagcaggttaaccgggttgaagtag

SEQ ID NO: 152927 - DNA, 357 bp, Enterobacter cloacae; identical to SEQ ID NO: 152918

SEQ ID NO: 152928 - DNA, 249 bp, Enterobacter cloacae; identical to SEQ ID NO: 152917

SEQ ID NO: 152929 - DNA, 3975 bp, Enterobacter cloacae; identical to SEQ ID NO: 152916

SEQ ID NO: 152930 - DNA, 609 bp, Enterobacter cloacae
atgattaagggtatgaaaacacgaggcgaacgactgaaagcacgccgtttagagctgaaactgacgctgaagcaagtggcagaagctgtaggaatctctcttccgggcgtccaaaacttagaacgtggcgacgtaatgccgtcgctggagatcgggctgtcgctggcaaaatgcctgcgtaagcccgtgcaatggatactgtatggcactgaatctgatccagaccgcgttcctgttattggtacgacagagaccggaccggatagagactggcagcctggagaacctgccaatacagagcgattcctgccgttcgtgagtcaacggaacaccgtttacgcactgacggtcgggaatcagattcagcatcactaccagccaggagacgttatcctggtcgattcctcgcttacgcttgtgcctggggaggatgtgctggtttgtgataataacggcgagatcacaattcaacgattagcccgttatgacgagcagcattactaccttgatagtgctaactctcaacgggttatccatgataaaagtgatcttcaatttgtgcaccaagtagtcggtacgatcaaatcgttcatggttgagggtagatga

SEQ ID NO: 152931 - DNA, 747 bp, Enterobacter cloacae; identical to SEQ ID NO: 152915

SEQ ID NO: 152932 - DNA, 918 bp, Enterobacter cloacae; identical to SEQ ID NO: 152914

SEQ ID NO: 152933 - DNA, 501 bp, Enterobacter cloacae; identical to SEQ ID NO: 152913

SEQ ID NO: 152934 - DNA, 618 bp, Enterobacter cloacae
atgagtaaatcccctaaagaaatgtatgccgttccagagtggatgcgtcagttcctgccgttgtttcaaaacacagggggtaatgacgtcgaggagctgctacacgatgaaaacaccaacatgtttgccaacagcgttcgctacatgctgatcgtatcagcgcgttctcagtttgcattgctgatggatatgtatagcaaaggcatcatcactggcagaactggcgaagatgaaagctccgacgcactaaccgatggtcaattactttttcgcttgcaggacttctatggcgcaggacaagacgccattgagattaacgatcacgaatatgcccaggaatgtactgacgttgtaagcatcatccgcgaggtcattgaatcccggaaaaaactgaaagctgcagagaaacagattgctgagcttgagcgtgacgaaacacagttatctgtgcctgatgacgtaatggccgcaatacagaaagttgcccgtattcgtcttgacctgaatgacttcgatggcgacaagcgcggcattgctgagagcctgggcgaagcggaagaagcactgattgaggtagttaaccgccgcgccgccatgcttcagagaggtaaatcatga

SEQ ID NO: 152935 - DNA, 183 bp, Enterobacter cloacae; identical to SEQ ID NO: 152912

SEQ ID NO: 152936 - DNA, 327 bp, Enterobacter cloacae
atggcactgacacctgcagaacggcaaagaatccgccgtcagaagctgaaagagcaaggaacgacaaggcgtgactgggttctggaaccggaggagctgcgtatgctcagtgaaatttgcacgcagcgtcggccagggcgagagccgtattccgaaaatgaggttataggcctcctgatccgcaagaactacaaagagcttcaaaagacgctgtctggtacatgcaaacggtgtggccagcaacttccggtatccgattgcctgttcgatggcgagagtaaatgccagctgacgactcttaggctgaagctggccattaaagcgtga

SEQ ID NO: 152937 - DNA, 222 bp, Enterobacter cloacae; identical to SEQ ID NO: 152911

SEQ ID NO: 152938 - DNA, 228 bp, Enterobacter cloacae; identical to SEQ ID NO: 152910

SEQ ID NO: 152939 - DNA, 288 bp, Enterobacter cloacae
atgaaagtaaaaggcatcccgtttaaccaggttaaagagaagctgctcgacaccccggaggccatccggggatatgaggaagccgataaggagctggcgatggtagaaatgctatacgaaatgagggagaaagctggcctgacgaaatcagcgcttgcagaacgaatggggttacaaccgtcagctattagccgtctggaaagtaaccctctcggtgcaagtatgaagacgttaactcgatacgctaaggcttgcggcgcaagcattgatattcacgctgtgtattga

SEQ ID NO: 152940 - DNA, 312 bp, Enterobacter cloacae
atgtttaacgtgataacccacccggcagcgctggatgagctacaagaactacctgatgagcttcgcggtcgtatgacccggcttatcgagagactggaaagcgaaggaaacaagctgaaaatgccccacagccgtgttattggcggagggctattcgaattaagggtaggggataagaacatcgcgagaacgttgtacgcttacgctgttggcaacgaaatctatctattacacgcatttgtgaagaagacgcaaaaaacgcccgcgaaagcgattgatatagccagaacgcgtctgaaggagatgaactga

SEQ ID NO: 152941 - DNA, 1071 bp, Enterobacter cloacae; identical to SEQ ID NO: 152909

SEQ ID NO: 152942 - DNA, 492 bp, Enterobacter cloacae; identical to SEQ ID NO: 152908

SEQ ID NO: 152943 - DNA, 489 bp, Enterobacter cloacae; identical to SEQ ID NO: 152907

SEQ ID NO: 152944 - DNA, 219 bp, Enterobacter cloacae; identical to SEQ ID NO: 152906

SEQ ID NO: 152945 - DNA, 312 bp, Enterobacter cloacae
atgaaagtatatattgctggcccaatgaccgggcgtaagaactttaaccgtgaggcattcaacaaagaagccgaccgtctgacgcgtcatggccataccgttcttaacccggccagtctgccggatgggctggagcagcgcgagtacatggatatctgtttcgcgatgctccgctgtgctgacgcaatcctgatgttgccaggctggcagacatcatccggcgccactgcggaatatcattacgcatacaagatggagctgccggtttactcgacgcttcattacccaccagtggccgaagctgcaagctaa

SEQ ID NO: 152946 - DNA, 792 bp, Enterobacter cloacae; identical to SEQ ID NO: 152905

SEQ ID NO: 152947 - DNA, 507 bp, Enterobacter cloacae
atggccgtgctattgaataaatctgatatggcttcctcgctgggaatatctgtccaggcctttgataaatggggcgtccagcctgtagagaagaaagggagagaagtcttctttgacgttcgctcagtcgttgataaccgcatcgaacaccagagccgaaaactacaaccatcgccaggcgaggacgatgatagcgtcaatattgattatgaacgttggcgtttaactcgtgcgaatgcggatgcggcggaactggcaaatgagaaaaagcgtcgcgaggtcgtagagacagcgttttgtaccttcgtgttatccagaatagccgctgaaatatccagtattctggatggcatcccactctcgatgcagcgccgtttccctgaactggaaaatcggcatatcgagttcctgaaaggggacgtaataaaggcgatgaataaggctgcggcgctggatgaacggattccggggttgttgaatgattatatcgaccagtcaggtagctaa

SEQ ID NO: 152948 - DNA, 1842 bp, Enterobacter cloacae
atgacagctgtcgaatgggccgatgcgcattattaccttccgaaggaatccgcttatcaggaagggcgctgggaaacactgccatttcagcgcgcgatcatgaatgcgatgggcagcgactatattcgcattgttaacgtaattaagtcggcgcgagtgggctattcgaaaatgctcctcggcgtcattgcttatttcatcgagcataaacaacgtaatgagttgctgtggctgccgaccgacggcgacgcagataatttcatgaagtcacacgttgaaccgacgattcgtgatgttccctcattgctgtcgctcgccccctggtacgggaaaaaacacagggacaacaccctgtccatgaagcgttttacgaacggacgcggtttctggtgcctgggtggtaaatctgcaaagaactatcgcgaaaaatctgtcgatgttgttggttacgatgagctggctgcgtttgatgcagacattgagaaagaagggtctccgaccttcctgggggataagcgtattgagggttctgtttggcccaaatccatacgcggctcaacaccaaaattgcgtggaacgtgccagatagagcgagcagcaaaagagtccgggcattttatgcgttttcatgttgcatgcccgcattgtggtgaggagcagtacctcaaatttggcgatcgggatacgcctttcggcttcaaatgggagccagagcaggctgagacggtttactacctctgtgaacataatgcctgtgtcattaagcagcatgaactggacttttccaacgctcgttacatctgcgaactgacaggaatatggactcgtgacggacttcgttggttctcatcttccaatgcagaaatcgacccacctgaaagcgtaaccttccacatctggacagcttatagcccgttcaccacctgggtacagattgtgaaagactggttcaaaacgcaaggtgatacgggtaaacgtaagacattcgttaacaccaccttgggtgagacgtgggaagcgaaaatcggtgatcgccccgatgcggatgttttagctgagcgcatagagcactttgatgcagccgtacctgagcgagtggcatatctgacggcgggtatagattcccagctcgaccgttacgaaatgcgtgtatgggggtggggaccaggcgaggaaagttggcttatcgacaggcaaatcatcatgggacgtcacgatgatgagtcaactcttgcgcgtgtggatgaggcgattaacaagacatatacacgccgaaacggtgtagaaatgcctatttcccgtatttgctgggatatcggtggtattgatcccactatcgtctacaaccgctcaaaaaaacacggtttgtttcgcgtgatcccgataaagggtgcttcggtttatggaaaaccagtggcgaacatgccacgtaagcgcaacaaaaacggtgtttatctgactgaagtgggtactgataccgctaaagagcagatttataaccgcttcacgctgattgttgaaggtgacgagcctctggccggtgccgttcacttccctaataaccccgatatttacgatctttcagaggcgcagcagctgaccgctgaagaactggtcgagaagtgggtcgatggtaaaagaaaaatcatatgggacagcaaaaaaaggcgaaatgaggctctggattgcttcgtttacgcactggcggcgcttcgtatcagcatatcacgctggcagcttaaccttgattcgcttctggccagcctgctggaagaagaaggctcccgtaacaataacaagaccctggcggattacgcgcgggctttatctggagaggaataa

SEQ ID NO: 152949 - DNA, 1590 bp, Enterobacter cloacae
atgacaataccttctttagttggtccggacggaaaaacgtctctgcgagaatatgctgggtaccatgccggaggcggcggtttcggtgggcaattgaacgcctggaatcctcagagtgaaagtgctgatgctgcacttctgcctaatttctcccgtggaaatgcccgtgctgacgatctggttagaaataatggctatgcggctaacgccgtgcagcttcaccaggatcacatcgtcggttcatttttcagactgagttactgccctagctggcgttatctcggcattaaagaagaggaaagccgcgcgtttgccagggaggtggaggccgcctggtatgaatatgcggaggatgatttttgcggagtcgatgccgagcgcaagcggacgtttacgatgatgatccgcgaaggagttgcaacgcatgcatttaacggtgagctgtgcgtgcagcctacttgggatagtgattcaacgcgtcttttccgcacgcagtttaaaatggtcagtccgaaacgtatcagtaatcccaataatactggtgattccaggaactgtcgggcaggtgtaaaaattaatgatagcggcgcagcgctgggatattacgtcagtgatgacggttatcctggctggatggcgcaaaactggacctatatcccacgtgaattgccgggaggaaggccttcatttatccatgtgttcgaacccctggaagatgggcaaactcgcggggctaatgcgttttacagcgtgatggagcagatgaaaatgctcgacaccctacaaaatacgcagctccagagcgcgatagtaaaggcgatgtatgcagccaccatcgaaagtgagttggataccgatacggcaatggactttatcctcggagccgatagtaagcagcaaaataagctgactggctggcttggcgaaatggcatcttattactctgctgcgccggttcgcctcggtggagcgagagttcctcatctcttgccgggcgattccctgaaccttcagtcagcacaggataccgataacggctattcaacgttcgaacaatccctgctgcgttatattgcagcagggctgggtgtgtcgtatgagcagctttcacgaaactactcccagatgagctactcgaccgcacgcgccagcgcgaacgagtcctgggccttctttatggggcgtcgtaagttcgtagcggctcgtatggcctgtcagatgttcgtgtgctggctggaagaagcaattgcccgcagggttgttacgctcccttctaatgcgagatttagcttccaggaagcgagaacagcctggggtaacgccaactggattggttcggggcgcatggctattgatgggctgaaggaggtgcaggaggccgtcatgctgattgaagctggtctcagcacttatgagaaggagtgtgccaaacgcggagacgactatcaggaaatattctctcagcaggtacgtgagactatggagcgccgtcaagcggggctcaaacctcctgcatgggcggcagctgcatttgatgcagggctgaaaaaaacaaatgaggaggataaagatgacgcccgagctgcgtaa

SEQ ID NO: 152950 - DNA, 333 bp, Enterobacter cloacae; identical to SEQ ID NO: 151067

SEQ ID NO: 152951 - DNA, 1026 bp, Enterobacter cloacae
atgtccgtttacactactgcccagctgctggcggtcaacgagaagaaattcaaatttgatccgctcttcctgcgcatctttttccgcgaaacttatcccttcagtacagagaaggtctacctgtcgcaaattcctggtctggtcaatatggcgctgtacgtctcgccgattgtctccggcaaagtgatccgctcccgtggtggcagcacatctgaatttacgccgggttatgtgaagccaaaacacgaagttaacccactgatgactcttcgccgcctgccggatgaagacccgcaaaatctcgctgaccccgtctatcgccgtcgccgcatcattctccagaacatgaaggatgaagagctcgcgattgcccaggtcgaagagaaacaggcagtagcggcggtgctcagcggaaaatacaccatgaccggggaagcgtttgatcctgttgaagtggatatgggacgcagcgctggtaacaacattgtccaggccggtgcggctgcgtggtcctcccgcgacaaagaaacgtatgacccgaccgatgacattgaaacctacgcgctcaacgccagcggtgtggtcaacatcattgtgttcgatccgaagggctgggcgctgttccgttccttcaaggcagtgaaggagaagctggatacgcgtcgtggctctaattctgagctggaaaccgccgtgaaagaccttggtacggctgtttcatacaagggtatgtatggcgatgtggccatcgtggtgtactccggccagtacgtcgaaaacgatgtcaaaaagaactatatgccggacctgacgatggtgctggggaatacccaagcccgcggcctgcgtacctatggttgcattcttgatgctgatgcccagcgcgaaggtatcaatgcctcggcacgctacccgaaaaactgggtgcagtcgggcgatccggcgcgtgaattcaccatgattcagtcagccccgctgatgctgctgccggaccctgacgcattcgtgtccgtcaagctggcataa

SEQ ID NO: 152952 - DNA, 408 bp, Enterobacter cloacae
atgacagagaaagaaaagctgatcgctcggctgagtgaacttggtactcagcttaaccgtgacgtaagcaccagcggcacgattcaggaacttacgatgcgtattgctgaactcgaagaggagctggatggcgacactgattcggttgacggtgaaaacggagaacaaaattcttccgacagcgccgacaacaccggcagtgattttgctgatacggagaaaacaaaatcggtagtgaccacaaccgatgaccgggtatcagttgaaacgttggccacactgcatgttgacgcgctgcatgccacgcggaacgaaacgatatccatcgttgagcccggtgtgattatccgcgtatctgaacaggatgccgacgagctgatcgagaaggggctggctcgcgaagtctga

SEQ ID NO: 152953 - DNA, 354 bp, Enterobacter cloacae
atgtctgatttcgataacctctttgatgaggccatgtcgcgtgcggacggcgctattctcggggtgatgggtacagaggcaaaggttatatcaggtgctttatcaggaactaccctggtcggcgttttcgatgatccagaaaacattggttatgccggtgcgggagtacgtgtcgaaggtaccagcccgacgctgtttgtgaatacggctgcggttagccagttgaagcgtatggacgccctgacaattaacggacggtcattctgggttgatcgtattggtccggatgattgcggctcctgtcacatctggctgggtaatggttcaccgcctgcttcctcgcgtcgccgctaa

SEQ ID NO: 152954 - DNA, 555 bp, Enterobacter cloacae
atgtcaataaaagggcttgagcaggccatcgaaaaccttaacagcatcagccaaacggctgtcccgcgtgcgtcggcgcaggccgttaaccgcgtagcaaaccgggccgtcagtcgcagcgtggcagtcgtatcaaaagacacccgtgtaccgagaaaactggtgaagcagcgcgccagggtgaagcgcgcgacggttaataaaccacgtgcgcttatccgtgtaaaccgaggcaatttaccagccataaaactcggtaccgcaagtgtgcgcctttcacgcaggaaacgggacaagaagggggcaaacagcgttctgcgtatcgggccttttcgtttccctggcggttttatccagcaacttaaaaacggtcgctggcatgtcatgaggcgaacgtcaaaaccccgttatcccattgaagtggtcagtatcccgctggcagctccgttaaccacagcgtttaaagaagaactgccgaagctcatggaatcagatatgcccaaagagctccgagcctctctcaccaaccaactcaggttaattctgacacgatga

SEQ ID NO: 152955 - DNA, 423 bp, Enterobacter cloacae
atgtttctaaagagcgaactgctggaaagtaacggtagcagtgtcacattgttccagctgtcggcgttgcaacgtattgaacacctcgaatacctgaaacaactggaagcggtagaagagggcgattttcaggcggccattaccctcactgtgaagagtggagcgtacctcgtcgcaatgtcactctggcacggtcacccactgaaaggttcactgggagaaaacgcggcggcggaagtgatcaaaattcaggatgaagtcatgcagtcatggccgactgaactcatcgccgaagccgaatataaagtgaaaatcctgtccggcatgattgcgcctgtaactgatgagcaggaagggccgggagaagagcgtaaagagcacacagaacctgttactgcggaaaagccctcgccagtgagctga

SEQ ID NO: 152956 - DNA, 2517 bp, Enterobacter cloacae; identical to SEQ ID NO: 152902

SEQ ID NO: 152957 - DNA, 348 bp, Enterobacter cloacae; identical to SEQ ID NO: 152901

SEQ ID NO: 152958 - DNA, 756 bp, Enterobacter cloacae; identical to SEQ ID NO: 152900

SEQ ID NO: 152959 - DNA, 732 bp, Enterobacter cloacae; identical to SEQ ID NO: 152899

SEQ ID NO: 152960 - DNA, 591 bp, Enterobacter cloacae
atgcaggaagtaatgagccgtatcgagcttggtgcagagctgggaaaaacgtttggtaaagttcactaccgcctgatttctcgtgtgagtgaggcgggagttgcactggcaaagaccataccggggtttgagcagtttatgatttccagccagcgccgtgggctcacttattcagtgtttaaaggtaaaaaaaatatcggtgtggatgaccttggctttccggttaccggcgatgttatccgcattgttccggtgattatcgggagtaaaaaagccggtgtattacagaccattttaggtgcggttctggttgctgtaggggcagtgcttaatttcacaccctgggccgctgcatctccattcttctacaaatttggtgctgcggtcatgctgggcggcgttgtccagatgctttcccctcaaccagggggcctggccagcaaacaaagctcagataaccgggcctcatacgcgttcggtggcgtcacaaacaccgcagcgcagggctacccggtaccgcttctttacggtcgccgacgaattggcggcgcgattatttctgccggaatttacgtcgaagatcagcagtaa

SEQ ID NO: 152961 - DNA, 4197 bp, Enterobacter cloacae
atggctatctcaactccgattagaggccgcaagggcggcagttccagttcccggacccctaccgaacagcctgacgatctccagtccgtagcaaaggccaaaattcttgttgcgctgggcgagggcgagtttgccgggcagctaacagctaaagatatctaccttgatggcacgccacttgagaacgcagacggatcgcaaaacttcagtggcgtggcctgggagtttcgtccggggactcaggcgcaaaaatacattcagggtatccccggtaccgaaaatgaaatcagcgtgggtaccgaagtttcaagtaccaccgcctggacacacacttttaccaacactttactctcagccgttcgcctgcggctcaaatggccgtcgctttttaaacaggaagacgacggcgatctggtcgggaattcaatcaactacgctgttgatttgcagacggatggcggcacctggcagacggtgcttaataccagcgtaaccggcaagactacctccggctatgaacgcagccatcgtatcgacttaccgcaggccggaagcacctggacagtgcgcctgcgaaagcttactccagatgccaatagcgcgaaaattggcgatacgatgacgctggagagctatacagaggttattgacgccaaattgcgttatccaaatacagcactgctgtatatcgaatttgactccagccagtttaatggttctatcccgcagatagcctgcgaaccgcgagggcgtgttatccgtgtaccggatacgtatgacccggaaacccgcacctatagcggaacctggctgggagcgtttaaatgggcgtggacagacaatccggcctggattttttatgatctggtggtcagtgaccgctttgggcttggcaaccggctgtctgcggcaaatattgataaatggaccctttaccaggttgcccagtattgcgatcagccagtaccggacggtaaaggcggttccggaaccgaaccccgctatacgtgtaacgtttatgtgcaggagagaaatgacgcctataccgttttacgtgattttgcggccatattccgtggcatgacgtactggggtggcgatcaaatcgttgccctggccgatatgccccgtgatgtggactacagctacacgcgcgcaaacgttgttgacgggcgctttacctattctggtagcacaacgaataaccgctataccacagcactggtttcctggtccgatccgggaaatgcctacgcagacgcgatggagcctgtatttgaacaggagctcgtggctcgctttggaacaaaccagctcgaaatgacagccatcggctgcacccgccagtcagaggcaaaccgcaaggggcgctggggtattctgaccaataacaaggatcgtatcgtatcgttcagcgttggtctggatggcaggattccacagcctggccatatcatagcggttgccgatgagctgttatccggaaaggttatgggaggccgcatcagcgccgttaacggtcgcgttatcactctcgatcgtaattcggcagctgctcccggcagtcgccttatggttaacctgccgtcaggtgcatcgcagagtagaacgatacagagcgttaacggtcgggcagtcaccgtaaccacggcatacagcgaaaccccggcagtggaatcggtgtggatagtcgaatccgatgagctgtatgcacagcaatatcgtgttatcagcgtcacagataataatgacggaacgttttcgatttctggcgctatgcacgatccggataagtatgcacgtattgataccggcgccattatcgaccagcggccaataagtgttattcctccaggtaaccagtcccccccatctaacatcgtgatcagctcattctctgtggttcagcagaatgtgagtgttcagaccatgcgcgtcagctgggaccaggccaagaatgccatcgcctatgaagcacagtggcgccggaacgacgggaactgggttaatgtgccgcgcagctccaccacatcattcgacgttccggggatttacgcaggacgatacctggtgcgcgtgcgtgccatcaatgctgctgaaatatcatccgggtggggatattcggaggaaaaaacacttacgggcaaagatggaaatccacctaagccggtgggcttcactgcttctgaaaacgtggtattcggtatcgaactgaactggggattcccggcgaacaccgacgacacgctaaagacggaaattcagtacagtctgaccgggacggaagacgatgcgatgctgctggccgatgtgccttacccgcagcgcaaatatcagcagatgggccttaaggctgggcagattttctggtaccgcgcgcagctggtggaccgcagcggcaacgaatcaggttacacagaatgggtgcgaggacaggccagcatcgatgtatccgatatcaccgatgcaatcctggaggagattaaagagactgatacgttcaaagacctgatcgagaacgcggtggacagcagcggaaaactggcagaactggctgatgcaatcaaagagaacgcagacggccttgctgctgcggttggctcgaacaagcagaccgctgaagcaatcatcggaaacgcgctggctattgccgatgttgtcgtgcggcagacagcccaacagggcgctaactctgcgactttcgaacagctccgggaggtgatcgctactgaaacggaggcacgcgtaacggatgttacccgtcttgaggcaaaaacagcgcagaacgtagcgggaattaccgaggtaaggcaggctctgtcagatgaagctcaggcaagggctactgctgttgatcagctcactgcgagtactcaggtcatttctgataaagctgattcggcttcgagtaaagctgatgctgcatcaggtaaggcagatgcagctgaacaagccagctcacaaaacactgctgatatcaccacgttgcgacaggttgtcaccgacacgacttcatcaatggcatcccgtctggaggagctgggagcaagaaccgatactgccagcggcggcatccagaataacgctatcgcgctaataaagagtacgctggcgcaggttgatcagcaggtgagactcagcgcgcagtacggtgacagtaaggccagcatcgatcgtattgataatgttatggcaagcgacagggaggcaacggcgcgttcgctgctgagtgtgcaggcggaagtcaacggaaacaaggcatccatcaacaacctgaaccagacgttttccaattatcagcaggccacggccacgcagataaacggcatcacggcgaccatcaacgggcacacttcagcgatcagcactaacgctcaggcgatagcaaacgttagtggtgacctgaaggcgatgtacagcatcaaggttgccgtggacgcgaatggaaagcagtatgccgccggaatggggatcggtgtagaaaacactccatcgggcatgcagtcgcaggtgctgttcctggcggatcgcttcgccgtcatggcgcaggctggtggggcggtgtcgttgccgttcgtaatccagaacggacagaccttcataaacgatgcgtttttccgtgatgccagcattcagttcgggaaaatcaccgattcactgaagtcggataacttcgttagcggttcgtctggcgctggctggaatctgccgaaaagcggtaatgccgagctgaataacgtcacgatccggggaatggtatacgccagcggtggcagctttaaaggcacagtagaggcaacgtcatttgttggtgatgttgccaacgttggtgtcggttcggatgcttcattaagcggaactgctaatttagttaaaacgattacttatactgactcaggatcaagtagtcttgctaagaatgctcttgtagaagcaaccttttattcatcagcgaatgccgataccagtatgaatgttattattgatattaatgggacatccaaaacgttttcaaaccttccagtgcaatccggcgcgtatgctaataatttttacacattgagatttggagttaaaggaataaatacaaatacagttaaagcaacattgactatcgttaatgctaactcagtaagtaaaattatttattctccaagcttaattattaccagaggtacgggctcatttgttggctag

SEQ ID NO: 152962 - DNA, 1170 bp, Enterobacter cloacae
atgtccgcaggaacactgacactgaccaataactctgcagcagtcaccggcagtggcactgcctttaccaccgaagtggccgccggagattttattgttgtgaccgtcggcggtattccctacacgctggcgatcaaaacagtgaacagtaatacctcactgacgcttgtcagcagctataccggacctacgcaggcaggggcggcatggtatgccgtaccgcgcgtggcaatgaacctggtcactgcggcgctggtggcccagagcgcagaagccctgcgcgggctcaattacgacaaacaaaactggcagagcattttcagcggtacaggaaacgttacggtgaccctgccagacggcagcagctttaccggacctgcctggaacagcttcacccaggcactgaacggcaaggccgacaaggtaaacggagcagtaccagttaaccagggcggaacaggtgcaacgaatgctgctgacgctcgtgctaatctaggtgcggcaaaatctggagataacgaagatattactttgatacgtgggttgaaggggcgcgcccaattgtgggctgacaccgattattccacaggtacgctggtaagttacaccgggactacagtgggtgccatagtgcgagccaccacatccattgtggcaacatctacttatgcggccagtgcatcctttggttactggattgatgcgaacagcattggtagcagtgggccagcgctggcaagcacaggctcgcaacaaaacagatggattttcagaaattcttctggtgctatcagtacggctaatggggacataaccccatcagcttctgacgagcgcgtgaaaaatataataagagagattaccgaagaggaggcggttgaattcatatcaggactaaaacctattagatataccttcaaatgggctcctgaaaaggtaaaggtaggctatagcgcgcaaaatgttgaggctcttgattctgagctaatctcagtatcagcactgaccgttattgatcctgagagcagtgaaagcacaacatatgaagacggaaaaatcatcgatccaggagaggtcggtgctgcatatttagttcctgttgttcagcagcttttgcgccgagtaagtgagcttgaggaaaagcttaacctgaaaagtgctcaatcttaa

SEQ ID NO: 152963 - DNA, 159 bp, Enterobacter cloacae
atggattggttcgacgtgatgaatgcgcgggcggtgcgcgggaaattcgggtacaaaaaaacccgcaacgtggcgggctttttcgaggttaattatctacaggcgttatactccataatcagaagcatacaggacagttttatgcaaagtcaacactaa

SEQ ID NO: 152964 - DNA, 1191 bp, Enterobacter cloacae
atggacgatgataaatcaaaagagattcactataaccacatcatcaatagcatcttaagcatgcctttcattgctcctccacttatattagaaaaagacattgtcactgactttaaaaatcggcatgagcattacataaaggccctcaagaaatatgaagacgataatgatacaaacataaattttagcctaatgattaggagaataactcgaatcagcacaggaattctaaaatgtctagaagagttcctttctggagatataaaatctgcctatgatgctttcgatgaaaccttttcagcagatgtaataaatcgacatattcaacgtataactactcctttgaatgacatttgcaattttgaaaagcctttatttagagttcgaaaatcagatacgcctttaacagaaagggaagaaatatttcatataccattcacgaaacgccacaatgtaaatgcacaacgatattcagtagcgggattaccttgcttgtatctcggttcatctctttatgtctgctggcaggaaatgaataaaccagatttcgataaattatatttatcatccttcatatctgaagatgataaatctaagatacttaatttctcacctttaatgttaaacaatccaatatctgggattttagagggggatgaacttaaaaattcaaactggagcaaggcatcctatttgattttatggcccttaataatgtcttgcagttacataaaaaagaacgataatgcatctttcattcaagaatatattatcccaaaccttttaatgcaatggattagccgaagagccagttcgccaattgtaggaattgcttattattcaacccgaatgcctaacgcaaataagactcatcgttcaattaacgttgtactcccccccaaagcgacatacagacaaactgtaatgcaggagtattgtcctcgactaaaaggattatttgaattcacacctccggtttcatggcaagtccttaaaacattagactatcaatttgtgggtgaacgcaccccagagcaagtaaatgctgcaaagttcttaaaacgaaaggaacggctgtctggaatttcaaatttttacgaagatatcgtaaagctttacccattaactgatttttataaactcgaagtatgcatagatcaactcttcgactatgacagaatctttggctga

SEQ ID NO: 152965 - DNA, 1059 bp, Enterobacter cloacae
atggcaaaaaacattaccattatcatttattctttatcattcattttgttttgctttatatttttcagaaaacgcctttatcgacttgatcataagagccttttagaacaacctcttttttggatatccattgccattccttttacgttatgcttattattaggcacattggtttggatagaaaaactacattcatttagcctgacaagtcatggctaccaaagatttatcgagatatcaaaactaccattattggttcttgccgctgcagttcctcttgcttccatagtaaataaccttcatcgtaccattcaaactgagaagcagattactgagtcagaaataaaaaatagaactgatgtttactatgcacatgtgaaatttcagactgactatttcaaatcattgccagaaacagtattaacagaaaaagttaaagaaatacacaccagtacaaaagttgagcatactaaaaatattaaaatcacttatccattatctctttatcaaaaactttatcctcactccagcccaacacacggggttacgtatgaagcagacagagaacaaacaaaaaagatactacaaacatggataaaaataaataggatattgacagatatcgaaaaaggtaaaaatgctatccaccatgccaaactagatggtatggagaatttattaacatcatggtatctagccgaaattggaataatacaactttgcaatcacatagatgttacgtttcccacatatcctgtttcattccaatttgaatatttcgattccgtacttacaacgacaattgcaacttttgacgagatgtacaaaatattagaagctttagagaaaatttgtataggtatagttgacgccgctggtcagctaactatggtagaaacgcaagtctttgctaaatcgacaaaattattttcagcaggcagagcaccaacgggccttgacactatcatgagcaacagaagaacatctcaaccaattgagcctatggtcccgcttctgattttaaacggaaaaaaattcgagggacggtttaatgattga

SEQ ID NO: 152966 - DNA, 1368 bp, Enterobacter cloacae
atgtatatacacaaagcattaagttataaaaacgcttggaatatcgcaactaacaataatgcagatgaattatcagatattcaatccgctcttgatgatttcatgttcgagctacagagcgtttatgatttaaaaaaccatcacgaaagaatttccccaagagaaacttgggaaaaagcgatgtgtaaaagaggatggacgttaattgatagaacgtattattcaaacgaaggaacaagaataaatatcgggagaataggaccaactaagaatggcttaaatgcgagccttacatttggcgcctttgacggcatcagtagatggattttccaacaaagttcagttgctattaaatatggtctaattcaaatcccagtcatgttagttcccatgcgtgacttctcaatgaaaattgatagcccatggatgagaagagatacttttgaaaataatttaaatcaactccaaattctcacacctttaactcaccaatatccattcttagtaatcggttattcaaatgaaataccaaacaatccacctgatattattgagctagcttcagaaacttatataaaagaagaaacgcctattattgatagatgcattgaattccctccagaatatcaccaagctggtttgaacatccttaactattttggcacataccttagggagcaatacccagatgaaaatgcctcggtaaaaatcgaacaaacagggctaaatgttagattagtaattgaaacagcagatggcaaatctgaaacaattgaaaaagcattacacgagtatgaattaatcattactggagcagagccaccagaaaaattctccaaaaatgacaaagtcattctcgaattaaaaaatgaaatccgtatagccaaatacagaattgaatcacagcaagatattatcggagttcaaaacaatcgaattgatcaacttttaagtatcgttggcaatgggctatcacaaaagaaccatgtcatggttgatttcaaaccaacaataaccctttcaaacaatataatagttaatcagcacattgcagcagccttgagctgcgtcaatgaactaatgcaagaactacatgaatcaaatgaagcatattcagctttaaaagaacttgaagattcgttgataactattgaaacagataatgatccagagtctgtaagaagatcgcctgtaatgaataaatacaggaggctaatagacaaaataaccgacacaggaagcaacctgaactttgcaatacaaaaggctgagaagggatgggaaattttttccgacttagcatctcggtacaacaaaatagcagagtggtgtggactgcctgttgttccatctattttattgaaatag

SEQ ID NO: 152967 - DNA, 1434 bp, Enterobacter cloacae
atgatccagccaaaagtttttatatcttacagttggtccagtaaaacacatcagcaacatatcaaagatatagcagaacggttagcagctgatggagttgaaacggtcatagatatttatgatttgaaggagggagatgataaaaaccattacatggaaagaatggttcaagatgaaacggttacacatgtattggtcatttgtgataaaaaatactctgaaaaagccgacttaagaaaagatggtgtcggcgttgagtcaatgataatttcgcaagaaatatactcaaccgtatctcagtccaaatttatacctttgatatttgaatataaagataacggggggccgtatactccaatttttctgaagtcacgaatctatatcgatttttcgactcctgaaaaagaaaatgataactgggaacgtttaattagactgctttatggtaagcccgaatttactaaacctccattaggtaaacctccggtatatttagagcaggatacttcaaaaccgtcatttgaaattcatgcaaaatttcaaactttaaaaacagctgtattaaatcagaaacagaacttaaaggagtgcagaagacaatttttagaggtttgtcgaaactactgtgtctcgctgcaggtttcatcagaaccaactactaatgattttgcagcagaggttttacaaatacataaggagcttattgctgttagggacgccattacagactgggttctacttgagggcgatgcgcagggcgaggaattttcaaaagctcttttacaatttatggaagtaatgttagcgattagaagtcgtcccaaaaatattagatcatataatgaggtgtggtttttacctcaccagatttttgcttatgaaacgttcttatatgttttggcagctttaataaaaatagaagcttttcagcatgtacatacattactgcatacttcctatttgcttcctgatcatataaccagcccgggcatggagttcactagctatagtgagttttatttcaattctgattatctacaaagtaaattatctacggaaaactatcggttatattcccctgttgctgaattaataaaacaaagtgcaactagagaagatttgacttttgatgagttgaaacaagctgatcttgtagcccttatgatatcctttattaatccgggagtcttttggtacccgcaaatgttgctatatgctgggcactatgagaaataccctttatttacgagagcaatacagcatagaggtttcaaaaatgttgcagttattactgggatcaatgacagtaagcttttagctcaaaaacttatagaaggtgaggctcagcgaaataccaatagttggtatcagttcggttttaatagagattttcttactcaaatgaatgttactcgaatggatagcattgattga

SEQ ID NO: 152968 - DNA, 654 bp, Enterobacter cloacae
atgtttagagttaatagaacataccctgcgccagtttcattgtctcgtaaattacgttatgacggtcctgacgtacatgaagccttacaagaatgcttttttggcaaatgttatatttgcgaaaataaagatccgttagatataaacattgagcatttcgtctcaaggaaaaatgataacgaaaaatcttatgactgggataacctctatttatcctgcggcaggtgcaataatataaaactgacaaagcatgatgaactacttgattgctgcaacgaagttgtatggaatcgtataaagctgctacctggattttcagcaaaagctaaaaaagtaaccgtagaaccactatttaatgataaaaaaactataaccactgccgatttacttgaaaaagtgtacaacagcgatcatacaataaataaaaggctaacatcagccgccctacgctcacaaataacaaaaacaacgcaaaaacttatcaaaaacatcatcgaatattacgaggatgatactccaaacgatcgcaaattatatctcattgaaaaaattaaagttatgattagacgtgatgctaagttttctgcattttgcagatggattgtcctcgacgatgctgagctttgtgagatcttggaacccttcatggactaa

SEQ ID NO: 152969 - DNA, 1233 bp, Enterobacter cloacae
atgcttacagcaataaacgaaatttcagtccctatcccttataccgcaaaaaaggccgaacttatccttaatggaaaaaaccttataattacgggaggtaatgggagtggcaaaaccagctttataaattccatctacgaatttttaaaagatgggctagatcaaccaaacaataataataaacagcatcttgagcaacagcttagcaactatgaatacaatctaaaacaaggaggccgcgatggtagtaattactcatggtatgagcaagaaattatacaaattaaaaaaagactgcatgccttagataacttccatataacaacctctacaaaagatagtgcaaacactcgctccctccttcgtttccacaaagctcttagagaagcagcaattactgccccgcagtttgtgccaagactttctgctctagtcgaagagaatgctcatttttctaatgaaaaggatggggacaacatttttgagaactatttgattagtttgaaaacatcacaaagctacgcaatttctttcgataacgatgaagaaaaggcaacaaaaattcaaaattggtttaataaaatcgaaactgatctacaaggtctatttgaggacacacaacttaaactaagatttgacagtactgaaggaaaattttatcttcatcaagacatgaaagataaatttacgtttcagacgctttcgtccggttattcttcaattttaagaatatacgcggatttgattatgcgcatagaaatgtgggaactgacccctgagagtattgaaggtattgttttcattgatgagatagatgctcacctgcatgtttccttacaaaaacagatacttcgtttttttagcaattccttccccaaaattcaatttattgttacgactcattcaccctttgtggtttcttctgttacggatgcagttatctatgatttatccagcaatcaacaaattgttgatgtatcgtcttattcaaacaatgtcatcctgcaagagttatttggcgttaacccaatgtcaattgtattatccgataagttagaaaaaatcgaaaatatcataacacgcttagataataataatattgaaacagccataaaaataatacactcgctcgcttcgtcggaagaatcaatggatactgaagccagcgcctttgtggattttgcaaagcttcaaatcatcaaatttaaaaaagaaaacgctcaggagaaataa

SEQ ID NO: 152970 - DNA, 435 bp, Enterobacter cloacae
atgagcaactttatttttagcccatcggaaaatgctttctatccgtattctcttgaggaaagttatattgcggctggaagctggcccgttgatggggttgaggttgatgacgctgttttttatgagttcacaggcgaagcgccaacaggaaaaatacgcattaccggtagcgatggcttgcctgcctggggcgacactccgccaatttcaatagaggaagccatagccgcgggtgagacaaaaaaacaggggctgattgagcaggctaacgagtatatgaacagtaagcagtggccgggtaaagccgcgattggccgtcttaaaggtgatgatttggctcggtatagtgattggctggactatcttgatgccctggaggctgtgaacacttccagagcacctgatatcgactggcctattgctccgtcacagtaa

SEQ ID NO: 152971 - DNA, 747 bp, Enterobacter cloacae
atggatatcccacgtatttttactgttagcgaaagcgaacaccgcattcataacccctttacaccagagaagtacgcgacgctgggccgcgtgttacgcatgaagccaggcacacgcattctcgatctcggcagcggctcgggagagatgctttgtacctgggcacgtgattacggtattaccggtaccggcatcgacatgagcccgctcttcaccgcgcaggccacgcggcgcgcagaggaactcggcgtcagcgaacgcgtccatttcattcataacgacgcggccggctacgtcgcgaatgaaaaatgtgacgtggcggcctgcgttggcgcaacctggattgcggggggcgtagccgggacgatggatctgctggcaaaaagcctcaagcccgggggaataatgctcatcggcgaaccgtactggcgtcaggtacccgcgacggaggagacagcccaggcctgcggcgtctcgtcgatcgcagactttctcactctgcccggtctggttgcgtctttcgatcaacagggctatgacctggttgaaatggtgctggctgaccaggaaggctgggacaggtacgaagccgcaaaatggatgaccatgcgtcgctggctggaggaaaacccagatgatgacttcgcgcaggaggttcgggcggagctgacgatagcgcctgaacgtcatgtgacgtacacgcgggagtactttggctggggggtgtttgcgttaatggcgcgataa

SEQ ID NO: 152972 - DNA, 3606 bp, Enterobacter cloacae
atggcaatcgtaagggttagaggtggtaatgctggaatagctgaatatctgcgtgaagggcagaaacaaggccgtgcctttaatcgtgacgaactggatatgagagtttgtcttgaggggaatttggcacttacagaaaatattatcaacgccattcctgataagaaccagggcagatatttacatatcactattagctttcgtgaaaacgaagtgcctgtagaaactcttgagcaagttgtgaaagagtataaatcaatgttccttgcagcgtataaagatgatgaagtgaacttttacgccgaagctcacttacctaaaatcaagagcattacagacaggactacaggcgaggaaaaagaacgtaagccacacgtacatattgttattcctaaacaaaaccttcttactggcggtgcgttagatccggttggactttataaacatcatgaacggtatcatgatgccattcaggaaaaattgaaccagaaatttaaccttgaaagtccaaaagattttgtgcgtgtgactgatgataatcaggcacagattttatctagggtaaaagccgatacctttaaaggattcagaactgacattaaaaaagaggtttttgcaattattaatgacaaagagatcaggagctatgatgcgttcattaatgagttgcaaaataaatatagcgaagtaaggattcgcaataaaggaacgtctaatgagtatttggctatcaagaccagtgcagaatcaaattatattaacttaaaatctccgctctttcagcggcagtatattgaagaacgacggttagagaaacctaagctttcattgaaacaggtagataaactggttgatgaatggcaaaaccgtgtcagtaaagaaattaaatatatcaataaagcatcaaagaaagtccaacattcttaccgtgccgccagtgccgaagaaaagcgtgaaattatattaaatagagaaagggggttgtatgagcatactgaaagttctggacgacgagccaatagagaaaaaagcaataaagagccaggtaatcaaaaccgtggacataagcatattgccaacactacctttggcttgccagaagtgctaccacgcgaactggtttctgacctcgacggatatgaacactcaggacgagagcgggagtataacagcagccaagccaaacaaagcagcgtgcttttgcgagaagttcagatcaatagtgtggcagacgggcggcagcaagaatatgaacataacggattgcgatggagcgcacgagatccccgtagagtagaaagcgtaacaggttcaatagctacagcgcatattgaaaagaaaaccgttgctactgaaagcgaactggcggagttcaaaaatattcgccagttactttctggtcagcacttgcttaatcgcctgtcaaacactcacggtattgatacaaatcagtacaccgttaaaaaagctaaagatggttcggacaggattagcgcaggtaaattaaatctgaatgtttcagattttcttactaaagaaatgaaattcacatggaatgaggcaaaatcttatcttcgtcagtcgtatgacgagcaacttaacaatgaaatggctaaggccaagataaaacttcctaaagaagcatggcaagaatttaatcagaattatcgtcctgaatatttcggaaaaattaaagagttaagaaaggaactaaactataattgtaaggttatgcgttatgaaaccaaacaatcatacttcaaggaacgtgctgaaatattcagtaggaaaatgacttatgcagagagaaaagcggctctttcagtcgccgtttttaacaaattaaggcatgataaggaggttaggcagtatcagtatgttcaaaggaatctactatctcgtttcgaaaaagtagaaaccgagtttttaatctcaaattacattcagaatagagaagggggtaacaatatgggacgtttatcagacgtgattggtggtgctgctgaaaaaaatgctttcagcccgtttgaacctgaatatggcattaatcttaagcgtcattataacgagattaatcaaaatgaagaatttaatgagcggcagaaaaaacgcctcgcattaaatgatttaacaccatctaaacaggataatggtgatgttaaatataaaacttcattgttaggcactgcgtttatagataagggggataagatagagttcccgacgctgattagcgataaagataaaattgcgttaggtcttgaacttgccgcagaaaagtacaaagggaaaattcagcttacaggtatgccaggcttcaaggaaaaggctatcgaaatagcagccgagcgcgggcttgaggttgagttcagacctaaaaaatatcaggagcgctttgaagaactcaaacagcagttcgcccaggagcgagcagaacgtagcggcgcaactcaggaacaggccaacagcagcggcgcaacgtccagcaagccgcagcaggaacgagaggcgcagtcagagcttacgttaaccggctttaaggcaagggatctaccttacaatgagctttcaagagatagcgtaagagagcttgctgttacgctttcagaaagaaatatctctttcaaagagcttgcggagaatgccaaaacatcccccgataagagtgttggtgagcttatcgagcagatcgcaactaaacctgaattgtcgcgttcggctactggtcttgagcttcatgtaacaaccatgtatgaccaggaaagcaacaggactaaaattcttgttaatgaccttcctatggatatttacattcaaacggcctctgaaatcgcccagaccgatcctgacgttatcagaatgccattgcttgctaatgaggaacttagccagttcacaccgcagcagcttgaacaaggttatgcagaaggagaggttagtattccggctgtaaccattaacgaaaatgggcgtagcgtcaataaggatattcgtgttgagtttgaagcgatggaaaatgactcaaccgcctatcgcgtaatagtcaatggacaaccaatgaaagagatccacaaaccggagcagggcggcaacatcgagcagtatgaaaaagaaatggcggttgtatccagtataaaaaaagcactggaggaaaaaggcatatctaccatgagctatttcagcgatgctcacaactcgccaactgctcaggttgaccgcgatattcgtaaagctgaaatggaactttctaaggaattgatacgccatgatcagtacgtgaaatcaggtaactcagagacagccagagagcataaggccgaagtgctggactatcttaaggataaaatcgcaacggctaaagaagcgcgtgaaaatgtgcttgaggcgttcgctaagaacggcagcagtagtgaacaggcgaaagctaaagaaatggttatcgtggcttctaagctgcctaaagacttccttttaggcggggatggtaaagcgtataacgatgcgtttacgcctaaacctttccaggcatcaaccccgcaacgggaaaagcatacgcaagaccaagccaaaccatcacaacagcccaaaatatcctttgatcgttaa

SEQ ID NO: 152973 - DNA, 390 bp, Enterobacter cloacae
atgcaaaagaacgaaaccaaaaaaaacaaaagcaccgtagtattgagcctcagagttcctgaatctgaagctgctatgtatgatgcaatgtgtaaagatgcgaacctaagccgctctgaacttcttcgcgccattatcaaaacaaaaacaaatggcggcggcgttgttattaacgccccgcaaaagaaagtaaaaaaccctgattacagtaaactcattttttattataacaaagccagcaataatattaaccagatagctaaaaaaattaattccgcttttgcggctaaaataatcagtgaagaagctatgttatcaggtattaaagttttacaaggtattgaaaagttattagaaatggggcttgaaaatggcaatcgtaagggttag

SEQ ID NO: 152974 - DNA, 813 bp, Enterobacter cloacae
atggctaaagaagttgcaaaagaaactaatgctgatgctaaactgcatccagtagcggcatttatcacaaacagcattaacgttgtcatgacgggtaaaggtggtgtcggtaaatcttatgttgctcaaactctgagccagtatttccttcattataagcgcatcgctacaagcacaagtgattcagatccggttaatgcttctactttccgaatcaaagcgctcaatcctgagtttatcaaaatcatggaaaataatactattctccagtctaattttgatcaggttattgaaagcttcgtggcaaatgaagatattacctttgttctcgatacgggagcttcaacttacgttcctttgatgcaatatttctatgataacgatctggttgatttcttctcgtcgctgggtcgtcctgtattccttcatacaatcattatggcaggtcaggaactgcctgatacgcttaatggctttaaatccctttgtgaaatggttaagggtacaaatgttaaagttgtcgcctggattaatgagttaaaaggaactccgattgtagatgtaaaaggggttagcactccattaattgaaacgccgttctttgaaaattttgctgatagcctcggtggggttgtcgttatagaagatcgcaagagcgatgcttttaccgcagaccttaaggcgcttacatctaaaaatctgacgcttgaagaagcaaaacaaagcagtgagtttaatattatgcaaaaaacgcgcctcaacaaagtatataaggccgtttatgatcagttagatgaaatctatacagcttaa

SEQ ID NO: 152975 - DNA, 558 bp, Enterobacter cloacae
atgagtgaagatggaaaaagattaacaagtgttgagattcctgatggacttctcaaacaatcaaatcgcactgaaaaagatcaggagttgataactaagctcaaacatatgtatatcgaaaaagggataaaaattactgacgatgatccccttatcgctatattactcggtcaggatgttttgctaagcatctatgacacgcagttatcagaacgtattaacaatcgttttaacactcttgaaacggctttaaactcgtttcctgttcgtgtaagcgatcagcttaatgaacgtgcggaaaactttcttaacctggtcgataaagtagataatcaagttgagcaacatcttaaaagcgaacttaaaggttttcaggaaaatgtgcgtgattatgctcaatcaactgaaaaccgcttaagatcaattaaagtcgatggaagcgccagtaaaagtgaaagtatcagttacgccaaagtttttggtgtaagcttcatcgcctctgcgttcgctgtggcggtcgtactggcggccttttactatggattccttgttaggtaa

SEQ ID NO: 152976 - DNA, 354 bp, Enterobacter cloacae
atgagcaaacttactgataatttagacctagctgattttgggaatactccgcagcgtggcgctaaaacgctgcaagcagctactgagatcggagataagaacgagttaactgtaaaagaaatggatattcttattgaagccgactattacaaaaaaaatggggaatttaaaacatctagtgaaattatcaaaatcagactagatgaaatattttctgtaatgggattcgtagctgaatattcttcgcgctggaaatcaattatggaagatgaaaccgcaaaacaggattttattaaaacttacagaaagggtgttgtagggttaatacaaagagagtggtttgggaagaagtaa

SEQ ID NO: 152977 - DNA, 255 bp, Enterobacter cloacae
atgaaagagtattttgcttctaaaacagttgatgttacacaaagcctaagtgattttggcctgaaattaggggatgatggtaaactggttcgtcttgatggaagtcgcatcaaaacgaacgcagcatttaaagagtggatttataaacttaaagctggcgagcgtttaccaagagggcgctattttaaaaataaacgcccaggaaaaccgctaatgattcaggatgaatttcattcattattttcttctaaataa

SEQ ID NO: 152978 - DNA, 699 bp, Enterobacter cloacae
atgaataacaatgattatcttaaaaggttcagaggcatgattgacgttcagaacaggaagaacacaatcaccggcgctctcgttcttgttggtatcatggcggtgttgatgcctggggctatcttttggtttgtaaaaagtgactacgtaacttatccgttacttacttacttagggctttttaccgttggcgcagccgccgtaaagagatacagcaaatcacggttaagccggatgcacctggatagccgcgatctcagccttattattgatgccgatcacccgattgctcaagatgtaatcatgcgtaccagagaaacaggaaattttacctacgcagacctaaatcaaatactggcaggatacgaacgcctttctgcggcctcagagtatgcaataacgggcgtaaacaaaaagcttagggttaacactgcgaataatggaaaattgcttagaatcgctgctaggccgctaaagcacatatcattaaatatgctggtattcgttatcatactggctcagttaggcgttgcggctggcattttgccgacactgcacgaagtttttacaggccaaccgttaccaaagctttctttgaatttgagtatcagagaaatagtgacgcagatagctatacccagggggatcactatcggtgttttgtactttgtgcggctattaataactaagcgttactaa

SEQ ID NO: 152979 - DNA, 981 bp, Enterobacter cloacae
atggctactaccaatattgatagcttgagcaaattacgcagcgttgctgaaaaaggcgttatcaagcgcgcagatagttacaaagtgctttattccgaacttaacattaagcctggtcataacgtgcgcggcatttatctttcacaggatgaatactggaacagcgaggaagttaaggattacatcaaggggcttgcttacagctatgcgcacaacatcaaagtaccagctctctcagtaatcgtggaggacggaaaaatttgggtaaataacggtgaacaccgttaccgtgctatcgccctggctaaagagctttttggtgtggatattgagtatgttgatgttgttgaagatgatgatcagcttacctctaactccgcgcgtaaccataccccgattgaaatggccgtgctgtacgaacgctataacaccgataaagggctgtccgttcaggagatcgcggaacgtgctggtaaatctgtaccgcatgtttataagtacctcacagcagtaagaaaatggccttcggatctgcttgctaaagtacaaagtggtgagttgtctttcacggcagcacaaaccctttatgaagaaacgcgccgcaagaagcccgatgcgccagaaaatgtatcaggtacagatttaccaaatgatgataatggtgaatcaggtacagttttaccaaaggaaaacgaccaaaattcacccgataacaacgttcaggacgttacgaatgctgctccagcggctagcagtggtggtgaatcaggtacagatttaccaaaaggtggcactgataaaggggctaccaagtcaaagaaaagcatcacaaaatcaatctctgacagccttgtgaatctcatttttgggttcgaggccgttgaaactgatagtggttatcagcttaatctcaccaaagatcagtacgaggcaatcattgccctgcaaaaagagatagaagcggaaattaaaggtaagtaa

SEQ ID NO: 152980 - DNA, 327 bp, Enterobacter cloacae
atgaatagcaaaggtgattttatgaatatcgttactaaaacaactcagaattacgctaaagctcgccagttaattttagactctgatttttgcgatgaaaataaacaaccatttatttgggtatgcgttgatgatgacagcagcgaaccaatgtttagcctgtttgctaatgacgatggatctttttcttataaaggcaacatctggctcagtgatgcaacccgtgaggaaatccccgcctttatccgtgatgaaaaacatcttcgctcagttctggcgttcgtggctcaggacatgaaaccgcagatagctgaatgtttcagctaa

SEQ ID NO: 152981 - DNA, 156 bp, Enterobacter cloacae
atgaatcacttagagcagtatttgaatcgtattttttcttacagcaataagccattaacgccagcgcaattaaaagaaacagtagaggtagcagcaaggaaagataatctaacagcagaggatgtgcaaagaagtattaaaaacaacattaagtaa

SEQ ID NO: 152982 - DNA, 258 bp, Enterobacter cloacae
atgaataaggttactttagttgctctgctggtatctgcgtttatgctttctggttgtgatgataaacaagaaaaaattgatttctatatgaaagctgaaaatgcaggtgcttatcataaaggcttagcgctttgtaaaacaggttccagcgaagcaaaagattgtgatgcaatctatgaagttcagggtatgaaggaaaaagataaggccgctgataaaaaagagaacttcaaaaaagaattcagctttgatcattga

SEQ ID NO: 152983 - DNA, 582 bp, Enterobacter cloacae
atggctgattcaacgtatgatgcagataaagaagcctacacttataatcattttgatataaagattcagttagcaaaagttgttaaagttgttcaggatgttagagatacaggcgcggcattatttgaccgcgccttagattggtattcagaagaagatcaagtaaaggtattagatactgtcacgtcaaataccaaagctctatcaaaggttgatggtttatgtaattacctttgccaacatttagaaaatgaatctctgtatgctcatgatcccaaaatggacagattcaacagcatgagtaccaatgagattatcgactattataaaaaagttacgaacgatttagagaaacaagtgaaaactcttgagggtatgacgataatcacccatccatcacttgaaaaagaaaaacctttaatggcgttcgtaatggatgatgtaaaactttactcgtctgcaatttataattctcttgatgatatagaacgggcgcgagacttaaaccatgttcgaacagccatagcgagaggtgaggaagtacagccacggcatataggggctattatcccgcgaaagtag

SEQ ID NO: 152984 - DNA, 1053 bp, Enterobacter cloacae
atggaatttaaaaattatattaaatatatttttcctttaggattgctgatacccagcgttgccaacgcagccgctgattttgaattgcctgttaatatgctcactgatatgtataaggagttaacgcaatttatatcaagtaatctaagctcgtatatcggtgatattaatgaaatcttccttccaataatgggggctgcttttggcctttattttgtctggaagtgggggttagttcattataagggtgatcctaatgcgattcaggatatgcttatcaacggcttaaagttagtcgttatcatgtctggccttgtcggtagtgcatggtatataggtaaggttgttccgttcgtgatggacgcaggtgatgaaatagcatccaggctaatcggctcaacgggtactttttcagcgcttgaaaccgtcattcaacaaattaacgcgaacggtaagcgtattcttgaagcaacaaatgaattaagtttatgggattctgatatttcaacaatcctagctgcaactatggcattaattcttttttacgcagggggtacagcatttgttatctatgccgccgcaacaatgcttattgctaaatttatggtaggtctacttcttattgtcgggccactttatttaatgatggctatgtatgaacaaactgttactttcacaaaacaatggataggccaagcatttaactatatcctgcttaatgtttttgtaacgctgactattcatattcttattgaatttatgagcaaccaattccctgtaggcgctgaaataggtttaggcggtgctctttatgccctgatcgcgtttttaatgggcgtttttatcatcggtcagataccgtcgttcgtgagtaccatcactggcggtaatggtatcagtgggattactggcgctactaacgccgcagggggcatgatgtttaatactgcgtcaggtgttgggggtatggctggaaggtctttaggtaaaggcgttggcaaactagcacaagcaggtatgggtaaattgcgtggcggtgtgaaagctggctga

SEQ ID NO: 152985 - DNA, 1065 bp, Enterobacter cloacae
gtgaaacaaaaacaagatattcatgctgggcttgtcagcggtggcgctacagtagccgacaataaagtgataacacaaggcaatcagcttattgaaggtagttacgatattaacctggcggaaatcaggttgctctggctggccttgtccaaaatcgacagtaagaacccgcagccggagggcgcggagattgtgttaactgcgcctgagtacagcgctatgtatgatcttgaattagcaaatagcgcccatcagcttcaatctgtatcattaactttaggctcaaaacctatttatacttatgagtggaacgagcgtaaaaaaagagtggatgcagttgctagatattggttttcagctattacctatggggctaataaaggcgcagatataacactttctttctctccgaaaatcgccccttttctatacgatctgaaaaatgaatttacgcaaatgaatgtgtttgcaatggcaaaacttgatactccatttgcatttagactttattcctggctaagccgatatagaaaacttgataaatataaaaacccaaaatcgggcgttatcagcactgaaaaaattagcattgattggatgaaggatcgttctggtctgacgggtaaatatgcagactttaaaaatttcagggttagagttctcgatcctgctgttgatgctatcaaccgaacgactgacctgacagttcgctatgaaactgttactacaggaaggaaggttacgcatctggttttcaactacatcgttgaaggtgataaagcttacatcagggttaagccagaaccgcctaagctaccgcgtaggccgagagttaagaagggtagtcatggtgagggtgaatgggctaaaacatgccttgatttggtacgtgagtatgaaaagaagttaaaagaatacgataaaaaagaagagttgccagtggcttatctgcgtaaagaaattctttattatggaatcataggcaatactgaggcggttagctatatagagcggcttatttcagaacgtaaatcaaaacgagccgcaaaaaaagaggaaaagtga

SEQ ID NO: 152986 - DNA, 504 bp, Enterobacter cloacae
ttgtatacgattaacccgctttctaagaaaaatttattgctgcatattcataaaatcagcaatatttttcctgagctaaccagcactgaactggtaacgcttatgttgcattcatctgggttgaaacctcctagaatgggggagttaatgtcaatatcaaaaaaaacgataaactctcacattgaaaacatacgggtaaagtttcagttagataattatgaagaagttaaacaggtatttgagctacgaattacgctcaactctaaccctgaacgttataaatctcttttccctgagataagcgatgaactttaccagtgcatgatcctggtatgtatgggatttacaattgaagaaattgttaacagggaaaaagaaaaaaccgctgaactgatacgtaagcagatagaggacttgaaaagcacttatgcggttgattttttgtcagatctaagggtattcttcatgattcgattaaagcttgaccaggctaagcatggctga

SEQ ID NO: 152987 - DNA, 411 bp, Enterobacter cloacae
atgttgcattattatgaggacactaaaggggggaagtcttacaagtctgtagcggtacgcctcgatctggatggtaagttgaaccgaatcctaagtgctttaagtgaaggggtgaatgttggaaagaagaacataatcgaagcgatatttaatatatccatcggtaatgatgaatttttttctacgtttgatcctcataaagactggaagcctcaagtagtttatgagggttattgttcggttggtgtatcaattcagttagatgcttacctcaactttaagataacaaccttaagccgcaaggcggggataaataaaaagaaacttttgattctggtcttagatcagttcattgagagcttgccagtgttagcgctggtaaagaaaaaactagctctcaaagttaagtga

SEQ ID NO: 152988 - DNA, 678 bp, Enterobacter cloacae
atggttcttgctgctcctgtattggcaagtctgctaatgcaatgcggtgggaatgttgatccgactacactacaaacaattatttcagtggagtcagacggcaatccttacgttgtggcaaatgtcactaaaaacacttcgcactactttaaatccaaaaatgaagcagtccattttgttaatgagcttgctaaagtaggtgataaatattctgtcggacttggacagatttatgtaggtaactttaaaggttatgggttgactaatgaaacggcctttgacttttgcaagaacgttacggtggcctcaaagatattcgaggaatgttattaccgtgcgattgatagcggggaataccctgatgaacagcaagcattgagggctgcggcatcgtgctactattcaaataattttacgagggggttcaaaaaggagaagaacgggaaaagctatattgatctggctaataacgctgtgaataaaatctattctgttccggctatgaaaccagtgggggcaggggatagcctaacgccagttaacaataatctgcggcgcggcatagtttaccagcaacccgaaggggatcagcctgaaatggttgaaagtgcaattaatgtagaagggaacaaaccagcgcgggctgcttgggatgttttcaatgatttcgctaaataa

SEQ ID NO: 152989 - DNA, 318 bp, Enterobacter cloacae
atgcaaaaaactaaaaactttctgttaaaggtaaaggttctggctttttctttcttcgctagtgtcatggcatctgcacctatgagcgcgtttgctgcgggtggtatcagtggtgcggaaggtgggatctcaaccgcgcagaccgccatttactctctgcttggcgcaggtgcggcggtatatcttttgattaaaggctttatgcttaaaatcaataaaattggctggaatgatctgtttatggcaatggttacttgtgctgtcgttgcgggtctgccagcgcttgctgtttggttctgggatctcggcggcaactaa

SEQ ID NO: 152990 - DNA, 399 bp, Enterobacter cloacae
atggccgaagatgatgatgtagaacttgaagaagaagaaacgattaatacccaacatctaacgcttaatgtattgaacatgattcctaatatggggggcgttcctcttgtatggggtgtttctttacttggttcatcaatgctgcttgctgttataggttttatcgctacaaacagtcttttgggcgtgttatttgcacttccaacaattttagctttctttattattaagtttatttgtatcaatagcctcgatgctttaagagtttttcagcttaaagtagctgggaagttccgtaggattcttaatggcggtggactttataagttatccccgtctttaggtgatgaaaatggggggaatgatgtctacgaacaaatcaaacgcgcgaagcattaa

SEQ ID NO: 152991 - DNA, 2535 bp, Enterobacter cloacae
atggggggaatgatgtctacgaacaaatcaaacgcgcgaagcattaacaagaaagctcttgaaggaaaaatcccccactatcgttatcctgtgactgactcaatctcaatgattggggataacaagctaatggctacggttaaaatagcgggttatccatatgagctggctgatgattctgaactttatagtaactataatttgtttagaacatacctggtcagtattggtaaagatatggctggtcagcttggtttatggacatacatagacaagcgggaaatccttgttaatgatgtttataaatcgaacaatgtatttattcagaagtttgtcgataaatacatggagcggtttaatacaggtggcaggtactatgaatctgtatactacatcacgctaatttataattacggtcaatcttcaattgacgatgggataaaaaaacttgattccgtcctgaaaatgtcggaaaaaatttgtggcccatttgggttatcggtactgcaaaacgatgggtacatgaatgaatctgcgaatttcctttcatggctcattaaccatcatgatttcaaagtaccccttgtagaagatcctatctacaaagtagttgggaatagtgagcgcatttttggttacgatataagccttatccgtaatgctaatgatgctcaagataaatattgtgtttcttatacccttcgttcattccctgcaaagattaagcctggtgcgcttgattttattctatcaattccttgcgaattaacatttgcccaatcttatatttatactcgtcagttaacggctatatcgatcatcgacgggcaagcgaataaaatcaattccacaaatgccgcaattgatgaagaaggtacagcgcttaactcaattaaaaaccttgttcaaaacggtgaggtttttcttggtgattatcatggtgttgtttcggtttatggtaaaaccgctaaagaggcttatgataatgcaattctcgttgaatccggctttagcgctgcgggatatgtgctgcttcgcgccacggatgaacaagaggatgtttttataagttcacttcccgatgctaagaaaagaccgctcaataccgttcgttccacttctaccctggctgaccagttctctttacataacttctcggtaggtaagcgtactggcaaccctatgggggatggaacggcaatgatgcctgtggaaacattacagggcgggattcattacctttcaacaactgatagtgatcctgctaaagatgtagttggtgagccagaatcaggacacggtatcttcttaggtcaaacaggtacaggtaaaacgactttacaggcagctttaacatccttcgttgagcgctttaatccgatgttattcggcatagactttaagcagtcgatgcgattaccaatgatgatgttgggtgcgcaatacttcgttcttagggaaggtgagtttactggcctgaaccctttccagttagacgaaataaaaatggcaacggatgataacggtatagttgattatgcctttgccgaacaaattaaggaacgtatacgccagttctgttactcctgggtagaacgtataggcgcaaatagtgagggaacacttgatgatggtgacagcgctaaaatcgtcagggctgtagatgcggtaatggagttgccacgagaaggacggcgctttagcaatgtgcttgaaatgattgctgcatcgcctttacgtaatcgccttatggagttttccgcctacgcgaacggcggtaggatggggcgctatgcctgggcggttgatagtcctcaaaatcagtttgatccattgctgtttgatagggttgcgttcgacagtacagtaatcctgaaaaaacagcctaatggtaaacctcaccctgcggctgaaatccttttagcggttttattcttctataaggatttaatgaagataaaccctcgcaagaaaggccgttggacaatcttttcttgtgaagaattttggatgccagctaacttcccgcttacgcaagagcagttaaagcaatcgctcaaagcagggcgtatggattatgaaatgtgctggcttatctctcaacagcctgtagatgctatcaactgcgctatattcaatgagattaatgagcaaacgacaattcgcgtattgttacctaaccctaatgctaaatggcagcattacaaggaaatcggaataacaagaaaggaatttagaaagcttaaatctcttgctaagacgagccgcaccttcttaattaaaaaatccaatacgagcgtttttggtactatggatttgcatggatttgatgagttcctgcctgttttatctggcgataaatatggcgtacaagctgctgaggaaatcatcaagcggattggttccaatgatcctaatgactggataccaatctttattcaagaaaatgcacgtaaccataagttacgtaaggctgagcatgatgatgaagaagatattgaatatgaggatactgagtatgaggatgctgaataa

SEQ ID NO: 152992 - DNA, 681 bp, Enterobacter cloacae
atgaggatgctgaataaaaaatcctttatgctgttaagtgccttaacagtgaatagcatactggtttcaccgccaacatttgctacgggtattcctgtatttgatgcggcaagtgcgacaaatatgcttcaacagttacaggcagcgaaacagcagtatgatcagcttgtcgaacaatataagcaagctaaaagcctgcatgaccagacgatagcggaaggtaagcggttatatgaaggggtaactaactttgatgtaaacgacttactggacgatcctacattaagtagctatctaccaaataaacgaacggctgattctttattagatgctgcggataatattggtgagttgagggagaagtacaaacttacttcttctgattccgaagttcagaaagcatatgatagtatgttgactgaattaaataatatgcaaactgcatataatacggctgtaaaacgcagtgatcatatttccaatctatccaaaaagcttgagcaagccgcaacaccgcaagaaaaagcggattatcaaaacgcaattaacactgagtcaaataatcttctcaatgagaaaactaaacttgacttagcaaaagctaactttgatgcaaactttaaaattgctcaagcatctcgccgcgctgagtttaaagaagaatttagcgttgataaataa

SEQ ID NO: 152993 - DNA, 792 bp, Enterobacter cloacae
atgtttaaacgcaatccaaaaaagctcaacgatcaagaacgcgccgaaatttacgataaaaataaaaaaatggccgaattaaccgctccagaaagaaagcaactggacgctgataaaagcgtacatttaagtgctattgcagggtttcagcgcgatagagtttcagaacagcgccgtatgatgtggattgcttttggatttggtggaatcggtatcgttgcggcgggtgcaatggctgttgctttggcttttattgcacctttgaaagaggtgaagccatatatcgcagaagtagatcaggttacaggtcaggtaaatattgtttcagcagtaggtgacgataaaatcaagcttacttatcaaagccttattgatgcttctaacctcgctaactttgttgtagagcgtgagtcttatgactggaactcaattcaaaacagtcttgaccaggttaaactacgttctacacctagcgtatatgagtcaatgaggcgctttattgttgaaagccctaactcaccgcttgttttattggctaaagataaagtaatgaaagtcggcattacttctaagccgattgtagacagcaacaaaggcgttggaaccgtgcgcttttataaagcggttactgatggggctggtaagccgattcctggctatccgattactcactggcaagccacgattacttttgactatgagcataaattaagaaccgatgatgattatattaataacccacttggttttaatgtgactagttatcgtgtcgatcaagaatcacaaaaataa

SEQ ID NO: 152994 - DNA, 789 bp, Enterobacter cloacae
atgaaaaagattcttttagctgggtgcatagcggcaactttaccaggcgttgcaaacgccttgaatgtgccgcagccgacgagctatgacgctcgcattcaggaagctacttataatcctgatgatgctgttctcgttagggttaaagccggaacatcaacattaatcaagttacaggatggtgagtttataactgatgatcaggcagggatggggtttggtgatcctgatgcttgggatgtttctgttcgagggaataatatttttatcaggccaatcgctgaacaacctgatacgaacgttacgttagtatcaaataagcgaacctatgttttctttttacagtctgtaaagggtaatccttcatggatggttagatttaaatatcctaaaaaatacagtgctgcaaacgcgacagtatttaaaagaccgccttgtcaatctaatggcgcttacaatgcgaactggaattatcagttgcagggtaaagagtcttttgcaccatatgaagtatgggatgatgggcgctttacatgctttaaatttaatccttcaagcgatcttccaatgatttaccgtgttgctggcgatggtgaagaaatgctagtgaatgggaatcctgatagcgagaataataatattattgtcgtacaggaaactaaccctgagtttgtaattcgtcttggtaagaaagttgtcgcggttcggtcagatacgattaaggcaatgccgtctaatcgtagtggtactaccaatggcatgactagggagattaaatctgatgaatga

SEQ ID NO: 152995 - DNA, 1227 bp, Enterobacter cloacae
atgaatgataatcagaaagatgaaatcggtgctatcccttcaattgatgatgatcgcgcaacggtagacttacaaggccagcgcggtaagaaagcctcaaagggttatctgaaagacattctcatatttgggggggctattgttctaatcctcgcggtggcaggtgcctttgtctggagagctttccataagggtgatacagaagaagcgggtaagccggttgatccgacacttgaaaaaagtgtaggtagcgatactgggaacaggggcgtggataagctgatgaataccattgctgagcgtaaagcggcagaagaaaaagccgcagaagaagaacgtaaagcagcagaagcaaaacgcctggcagaagaaaaggccaaacaagatgcgctaatggcgcaattagaagcccagggtaaattaggtaacggcagcgcaaacaacaacgcttcacgagctggcggtaacggtggcaataacgatgccccgccaacaccgcaagagcgaaagctacagggtaagggcttggtttacgctggtagcgagggtaagggtactgctaatggtggggcggcctcacaaagcgcgggagggggcttaaataaggcgctggaaggtggtacttacgccaatggtcaagcttccattctgaaagaccgtagtttgcttttgggtatgggtacagtattaccatgtgtgctgaaaacaaagatcgttaccacttatcaggggttgccgatctgccagttaaccaaaaatatctactcaaacgatggaaatacattattgcttgaggcgggtactaagttctttggtgaacagcaaaacgcccttgttcaaggtcaggcgcgagtattcgtaaactggacaacagccgaaacacctaaaggtattcgcgttcgtattgatgctcttggcgttgatggtctgggggctgcgggtattccggcatgggttgatttgcatttctggcagcgttttggcaatgcgatcatgcttagcttcattgatgatgcgctggcaacggcagctaataaaatcagtgataataacaatgataacagcattaaagtagataataccgaagatgccgccagtaacatggcaagtatcgcgcttgaaaactcaattaatattccacctactgcatatattaatcagggtgaattgatttcaatcatcgtaccgcgtgatacttatttcaataatgtttatgaacttcattga

SEQ ID NO: 152996 - DNA, 1062 bp, Enterobacter cloacae
atgaatgaatcctatgggaatttcaatgtaatccgtaatcagttagcaaaaacaggaataaccgagattttaggttatgacggtttaacagaagtagctataaaccaacctggaagaatctggtttgaacgtggcaaaggttgggagtcgcaagttaatgaagattgtaattactccaatcttgaaatgcttgctcaatcattatctgtcaaaagtcatactggcggtattgatcaggattacaatgcttcgaaacctattcactctgtgaccttacctgacggggagagggggcaaataatcttacctcctgcggcagaggacggtacaatttcttttactattcgtaaaccttcaaaaagcagatttgatttaaacagctatatcaatagtggtcgcctttctgattttgaaatttgtggtagagcttacgtgaaagaaaaggctttgacaggcgaacaacttgaacttcttggctttcttaaagataaagatatggatcgcttttttaaaaaaagcgttcagatgcgtttaaatcacgttatggttggcgctacggggtctggtaaaactaccttcatgaaagctatagcagacctttttccagctaacaggcgctatataacgattgaagatacacatgaacttgatttgcctaaccatcctaatcatgttcatttgttctttaagcgtgagggaatcggcgctaccgccaaagatttaattgaagctggtatgcgtatgaagcctgatcacatcttccttactgaattaaggggggatgaagcctggaactatttaggcatgttgaatactggtcataatggaagcctgacttctactcacgctgacgataatcctgctgctgtttatagccgactttcatcacttatcaaagaatcgaaggtaggtacaacacttgattatggtttgattacaaatactgtcgccagcacaatagatataatttccttctggaaaggttcttatatgacaaagatctattacaatccagaagaaaaaaatgaagctgttatgcgtcttttaggcatggtggcttaa

SEQ ID NO: 152997 - DNA, 2022 bp, Enterobacter cloacae
atgcaattaaggcagaatcttaaaaagtccgatattatatcaactataatattctctatcttaatggtaggcataggcggcgcgatcggggtatatgggggcggttacgtttttctacttatatcgaaagtagatactaatcttctctcatacgataccttaatcaaggcgtggcctttatgggagtataaaaaattacatgccgcaatatcattaggtacaatcatatttgcagcggcaattatcgttcctctggctgctatcattattggtgctttctttgagtttcctgaaccggatgtacatggaaatgcaaaattgataactgatgaagaaatcaaagaaagtggtttgcttgataccgatgatgaatttcctgagatcctgattggtaaagttgcaaaaggcagatacaaaggtaaataccttaagtttgcagggcaacagttcttagggctaggcgctccaacacgaagcggtaaaggggtaggttttgttatacctaatcttctcaattatcgtgattctgtttgtgttcttgatattaaagctgagaactatatttttacggctgggtatcgtaaaaaaatggggcaggaagtttttgtatttgcccctgatgggtatcgtttctccgaagaagaatttgaagaatttaaatttagcgattactacctcaatctgtcaccagaggaacaacaagcttttaatgaaaagttccgaaatactgagcatgttttatcacaccgctggaacccgctggactacataagccgttctaaatcgcgtcgtgtcggtgaaataaaagatttggcaacaattcttttccctgatgaagggggtgataatgctatctggaacagcatggcagaagctgtatttgaatcctatattctgtacatgctggatatggaagaaacgataaataaaatcaatgctgagattgaagataacaggaagaacggtattgatgatgatagggagcttatgaagccctatccggtttctatggcgcaactgtattcccttacaggtgtaccagatatggccgagtggatgaatgatgaaatcctttattggaaagataaaggttatccacttagcaaaggttgtgttgaaggttttaaccgatttatcgctgtagacccaaaaacccgcggtaatatcatgcagaacttcaataagcctcttaagatatttgaagctgaatcttgccgactcgctacttccgcctctgattttgattttaatgacttacgccgtaaaaggatgtctgtatatattgtgctttcaccaacaggcatggaaaagtacaagcaactaatcaatctgttctttagtcagttggtaagggtcaacacacaaactctgcctgagcatgataaaactttaaaatatcaatgcctcttagtgcttgatgaatttacgtctatggggcgtgtgggtattatcgagaaatctatagcattcacggcaggttataatatccgttatatgattatctatcagaatgacgaacagttagaatctgatgatgcgtacggaaaatcaggggctttcacgctgagaaagaaccttgctgtagaagtcgtttatcctcctaaagatgttgattctaccgctgaacgcattagtaaaacatttggtaagaaaaccgttaaaataaaaactaactccagaactagtaacggcggcaaaatcagtaacggcacgaacgagcaatacgtaggccgtgacctttatatgccgcaagagattgtagagttagggtcacaaaaatatgtgatgcaaaaaatcaacaaagggaaaagaacaaaagtcgccgttaatgaagtcataattatggagcaggttaagccgtttgtagctcataagattgtgtactttgatgaaccggtattcatggaaaggcgcaaggttgctactgacaacgttccagacgttccaatcttgcaagatattgaacattacgaaattccacgcgataaacggcgtgatattccgtctatcgccagtgcctga

SEQ ID NO: 152998 - DNA, 387 bp, Enterobacter cloacae
atgaatcaatcatcggtttggatttttatactctttataatattttgtttagcctttgctctttataactcgcaaaagaaaaaaaagcgcaatatgaaatacagtacaggccagaaaactctaaacacgtccggcgtgattcttaagtacgagttagagcctaatatgagaagtgcgctaatgttgccagctagcgcagaaatcataaccataaagggtattggtgattctgtttatatttgggctattgttcccgaaaatcagataaacgttaaacgtgtttttaatgtcataccaacaggtggaagtgtaccagaaaatacaacttatattggtacagcataccctgaaagccatgtgttccacattttcgaggaaaaccagtag

SEQ ID NO: 152999 - DNA, 2181 bp, Enterobacter cloacae
atgattttaactattgcagaaaaaccggaattagccgaaattattgctaaagctttcggcggtgaagtaaagaaaaatggttattgggaatgtgcaaataataattttgttacttggtgttatggtcatatgctggtacttacacctcctgataaagttaatccttcttacaaaacatgggttatggcagatttgccaatggatctaaccgaagtttcccacgaaataaaaactacggaaaacggttatgtagagcggcaatacaaaatcattactgatttgctacgaaaatcatcatcggtgattaatgctggcgatcctgatgatgaaggtgagttgttggttagggaaattctttggaaagaaaattataataagcctgttcagcgattattgctaaatgacctgaacgttaatgcagcaaagaaagcgctttcaaaattacaggacggtaattctgaaaaattcatgcgtcttgcgctaaaagctttagccagggctaaaggcgatcagatttatggtcttaacatgacgcgctattatacgcttctaaatcgtcaacatggcggcaatggcaagcttacgtgtggtagggtacaaacgcctatgctcggcttgatagttaagcgctatgaagattttaaaaaccatgttaaatctaattactatgatgtttattccagtcatgacattttgaaatctgtttatttaaaacttattgctgatgataagtttgctacagatggaaaaatattatctccagaagtggcggaaaacattaaatcagcatgtgttatgaagccctcaactgtggttgttgcgaaagtggaggataagcatacgccaccaccgctaccttttgacctgttagggcttcaagcctatatgttaaaagataacattgatccaacggaaacaatggaaattactcaaaagctacgctctaaagagatagctgctatttcctataaccgctcggattgtcgttatcttacaagcgatcaatatgatgaagcacccgcaaccttagaggctttaaagaaatatattagcggcgggatacttgaatccgttattaataacaacggtttcgatattaaacgtaaaggtattgcgtttaacgatgataatgtaagcgcacatactggtatcattccttcggcagaaccgcgaaatcttgataagcttacttcaaaagagaaaaaggtttatgaagctatagtattacgctatctgcttcaattcctcgatgacaagaaataccaatcagcaaaagttattatcgagtgtgaaggttatcgctttggtgggagcgcaacaaaactcgttagccctggctggactgcccttgaagctgaggattccgatgatgacagtacagaggaaaacaccgattcggcttttgatgctatcagtgctgtgaacgtggatgatgtaggggtttgtaatgatgtgcgtgtagataagaaagaaaccaaaccgctacctgtctacactatgaaaaccttccttgaagatttgaagcgtgttagtcgttacgttaccgatcctcacatcaaacagcttttgttaagcaaagacaaaggtaagaaaggggaacgtggcggtatcggtacgccagctacgcgagcaacgattatcagtaatctcgaaagcacgggctatttcaccgtacagaacgggaaacttattccgacagagaaaggtataggttttattaaaaacctccctgtagcggttacagcgcctgatatgacagcattatggcatgagcaacaaatgatgataatggagggtgatcttgaattaggcgatttcattatcaatattaacaataccgttaaagagcttatgaaccctgagctttcacatggtatcgtttctgctgctcaaaatttcgctgataataaacctgtaggtaaatgcttctgctgttcttctgaaatgaagctaacacctaaagtctatgcttgtcagaatgaaggatgtggtttcaaaatttggcgtaaaatttctgaaaaagaactgacagacaatcaaatgcaattactaatgaatgctggcaggacgaaagtgattaaaggctttaaatctaaagctggcaaatcatttgaggcagcgcttgtaatcgacaaagaacaaaaacgggtaactttcgagttcgccgcccgtaaagcataa

SEQ ID NO: 153000 - DNA, 423 bp, Enterobacter cloacae
atgagtgaatctgaaaacgtccgtaaagttctttctaacattcgttcattgagagcgtttgcgcgtgaagttgattttgagttacttaaggatatggctcaaaagttcaacgcggtagttgaagaactgcgtgaagatgcggaacgtgaagctaaagagcgtgaacagcgtgatgcacgtaaacgcgaactccttgaaatgatcgccagtgagggattttcagttgaggaactaacaggcgcttctgatacgggtactacccgaaaaaaacgggtggtacagcaggttccagccaaatatcagtttgaagttaacggtgaaatgcaatactggacgggcagagggcgtaaacctaaagctattgaggaagctatagcagcaggaaagaaactggatgattttttgattcctgatgataaataa

SEQ ID NO: 153001 - DNA, 345 bp, Enterobacter cloacae
gtgcataagaacaaagataaatttgtgactgactggttttatgtgccttgcgcatcacaaaaaaagctacagcgaacaggatttttaggcctgggtgatcccaaaatcgttaaagactacgttaacaatgtgcctgatttagatgattatgccgcaaagcttgctgagagctataacaagcttgatagcgcggggtatgaggttatcaacatcgtgcctataaatattggctcaagtgatcagtgctttcaggaaaacaaaaattatgtgggtgatgttggttacagcattacgcgcggggcggttgttgtgggtaaacttaaatcggaagggaatgataaatga

SEQ ID NO: 153002 - DNA, 786 bp, Enterobacter cloacae
atgaagccagcaatcaaagcctatagcgaactccagcaagcatacgattttttcaatacaacgctttttaatggtgatctgccggatatgcttctgactctacagcgggggcgtaacaccttcggctattttgctccgtcacgttttgcgggggagtcggtgctgtccgaactggcgatgaatccagattattttggtggtcgctcgctcgctgatacgctctctacgctttgtcatgaaatggttcacgtatggcagcattacacgccaggcgtaaagcagtgcaggggcgggtatcatgatcgagtttggggcaagaagatggaagaagtaggtttgatgccgtctaatacgggaatgcctggcgggaaaaagacgggtcagcaaatgacgcattacattattcgcggtggacgttttcagaccgcagtttatgacctgcttaaaaatggcttttcgatctcctggtatgataagtggtctgagggcgctgtaatcccttctaaggccaatctcgatattcttgatgattggctcaaggtaacagacaaaaacgataaggagcttatcagcaagcttactgagacagtaagcaaaggcaaggctgcaattattgatggcaatgatgatgctgatgcagggataatgattaaacctcctgtaaagggcgctacaggccgtgctacgttctgctgccctgagtgcggtttgaaagcgtgggcgaaacctagcgctaacctgatgtgcggtgattgtgaagttgatttgattgttgaggggaattga

SEQ ID NO: 153003 - DNA, 570 bp, Enterobacter cloacae
atgaaaaataaattaaaatataaattgctgcatattagattattaggagttttattaggttgcgctgtgatactcgcaagctgctattactcaattgcttctttgtttggtatttttaatcctatcatgtggctttcggcctttcttattgattcgctgacaggaaagaaaggctctttccctcaatcaattcatgagtatagttcgtggtgggaaaggttagagttttcgtttcctgaaataatgcagttttttatggctggtttgttcctatgtgtaattgtatacgctacattccatgcaacggttattatagctggttatattgctgaactcttagagcgcaattatattaaatacatttttggcgctcgctttttacgcttgtatgagaaaatgcaaaagcgtaaaggtaaaattatagctcgccagaataaaaaaacatgcgaaaaggatgatctaaatgatgcaacttttgagcattatacaaagtggaaaaccttctataaaagtgacctgagctttgatgagtggaaaaacaaagtcctgaatatcaattcaaagagttga

SEQ ID NO: 153004 - DNA, 204 bp, Enterobacter cloacae
atgagcattcaagatctaaagggtgatgagagaaccattattgttgtagctttgcaagcattgcaccgtgagcggttaaattcatacaatgccgcctgtcttgcctgtgagctttctggtaaagaatggccgtcaatagagatcttcggccttgaagaagtagataaggcgctgcggctgattggtgcagcgccagccagatag

SEQ ID NO: 153005 - DNA, 342 bp, Enterobacter cloacae
atgaagcttaataaaaccagtctggtatctttaatgcttttcacttttgcgactcatgccgccccgctgccgctaacttattacttcaaagatagcgattcagctaacatttcgctggatgaaccagctacaggttgcgttatgacggggattcttgtccatcctgtaaataaaccagaaacaaaggttatttggtttaatcaaaaaacatgccgtaataaacagtatgaagtaagctttatcagtaatgaaattaaagcccctgataacatcattcataaaggtgaaacagtacaagttacccctgctaacgtacaaatagtaaatctacactcactttaa

SEQ ID NO: 153006 - DNA, 216 bp, Enterobacter cloacae
atggcggctaatacaggtatgcttacaattgattttaagagctttgcggattccattaaaataactgaaggtgaattagcttatcttcttgaacatgagcaggtctataaaggcattcccttacctaaaccaatctctgtaggctggaacaagaaacgaaaatttcttttcaaagatgtttctgcatttcttgagcaacttaataaggcgaaataa

SEQ ID NO: 153007 - DNA, 501 bp, Enterobacter cloacae
atgaaacggaagttagtttattgggtcattgttgtatgcttcctcccttccctctcgctggctgcaactgtgacacgcatcctcgatggcgatacgttagaggttacagaggatagtaaaactctacgtgttcgtctgatcgatattgatgcaccagaaaaaaagcagccatacggccaaaaagcaaaacagttcctaactgactttgtgaaggatgccgacgcggtagcagtcagaagcatgggaacagatcgttatggtagaacgctggcgcaagtgtacgttaagaagtgtgatagtgaatgcttgtcgtacctggtcaatgcggaaatggttaaaaatggctatgcgtgggcgtatcgttaccatgataaaccatccagtaaggctatggagcgcgaggaaaacgaagcgcgtaagaaccggctcggcctgtggcacgacaatgaagcaatcgagccgtggaaatggcgaaaattacataatcagcataaggagtaa

SEQ ID NO: 153008 - DNA, 309 bp, Enterobacter cloacae
atggaaaacctaagtattaatcaggagcggtttagagagcttgtaagcaagtaccctaccctgtacagcctttgggattgggaaagtcgggagatacgcttagaggcgtttaaacacgccctaactgtgttgagtagcggagaatacataatggctgttttctttgcgcgtgtatggttagggaaagatgaaaaatatagttacaacatacttaatgcttcttttgatttcgtacatgcggctaaggtgcttgataataaaagtttgctgcttatttccgacttttttaaagatccattttggccttaa

SEQ ID NO: 153009 - DNA, 288 bp, Enterobacter cloacae
atgaaactttctgatgttgcaaccattaagacgaatttccctgatgctgatttttggatagttcgtcgaggctctttaaaaaccgttggcgaaccctcctacactttcaaccctgaaagcataggagttaaggtaacaaggccggatctggtgctttcacgttacctttattactgcttccttcacctgcaccaatcaaaggtatgggaaccagtagcaacgggatcgcttagcctggttaacatcaaggtttctgacgttaaaaacatcgtcctggaaccgcgctaa

SEQ ID NO: 153010 - DNA, 294 bp, Enterobacter cloacae
atgaataaatcaaaagaaaatgagaacggctatttagtacgtaataattggctcttatacgtttttgctgcatttatggttgtaagtagtcaatggatgttagcaacgctagaagttggcttcaagcttcccgatattcttatttatgttgtcgcctgcgttctgcttgtttatggtggcttcttgaatatgttagctggtacaacaacagctattgttttccgaatcggttttatatcgattcttttattcgtcgctatcggatggttatttaaaatgcttggcttatattaa

SEQ ID NO: 153011 - DNA, 444 bp, Enterobacter cloacae
atgaaaaatgaaatcaaaattacacttccatcgttgaatatgcagcgtatggagatcttcaaaaaggggatcgagcaatcaatcctagctttgcaatcgaatgctgcggctgcgccctaccctaaagcaaaagcggttgattattcaactctggatgaacgttattttttgacagtagaacaaggctggatagtaccaccacacaaactggttaatgcgtggtttgaacagtttaaatctaccattcctgaatatggttctgatagtagccttgccgctttgttaggcattcattcaaacggtgcaagccgacgcatcagagagtacaggaacggtgagaaacctattccttacgggatctggcgtaagtttcttgtaattactggtcgagtaccgcaagaaatctatccggtgttaggcgtgtttgatacagagggcgaatga

SEQ ID NO: 153012 - DNA, 204 bp, Enterobacter cloacae
atggataagttaggatatttgcttaaatttcgccgttctaataatgatgaaacgcttgaaaaagtagttgaacacatggagccaaaagtaagcaaggaagattacaacgcttttcaggctgccgcagaccatagacgcgcagagttagcctgtcaccagatttttgataaagttcctaaatcggcttggaaatttgttaaataa

SEQ ID NO: 153013 - DNA, 411 bp, Enterobacter cloacae
atgaaagctataaacgcaaaagtagaaggctcaaagttgagtatgcttactttatttggggggcttgtatttttattttttttatctatgtcaacttatttagcctatttgtattttaactctccctctccttcatcagttaataaaaatgacactatcaatttatctatggttgccgaaccagttttagcctcaacaggcgatattattagtttacaggatgcaagatgtaaatattatggaaaattagtaaatgctaaagatgagtttggaggagcgagggggttatacattcagattaattataaggtttgcggggatctcaaagaggaaacggttttaagaagtcgaacctatgatttaaatacgcttatagctataggtgaaaaagtatcgctttatcagaaataa

SEQ ID NO: 153014 - DNA, 246 bp, Enterobacter cloacae
atgtcaaatgacaataaagtaacattaggtgatgtcaaaagaagttttttctatttcttgactgttttttgtgtctttattctttcattgccaggcattataaatatggcttatctatctacagcaatgatcatattaaagtgtgttttgggcattgtcttagtagtttgtgttgcggctaatggttcttcatttattgaaaaattattgctttatatcaaaaacaaaagtgcagatcaaaaataa

SEQ ID NO: 153015 - DNA, 162 bp, Enterobacter cloacae
atgcaagctaaatctcaacgtaaaattattcaggaaaccagccagcgatttaatagcttagtccaggcaggtgcgaaaaacgacattgcttataacttttatcttgcttctctgcgtcttgatttaaaagccgctaatcgtcaaccaaatcagaaggtgtaa

SEQ ID NO: 153016 - DNA, 213 bp, Enterobacter cloacae
atgccgcatgggaaggttatttttaacaaaaaagggcgttgggattggctagatagagcgtgtgatgttagcaaggaagaactgaaccaggaagaatggtttattgctgatatgtattacccgcctgatgaaaattacgatccatcgatgcacgaacaacaaattcaaggtttcctgtcaaaacctgatgaactggtgcgatacgatagatag

SEQ ID NO: 153017 - DNA, 711 bp, Enterobacter cloacae
atgtaccacggttacgtccctgatttgcacattcacagagacgatactctgcttccgttttacctcggtgaacgcgacaacgctgaatatgcaattaagccgacatgctggccaggcctcgacataattcctagctgccttgctcttcatcgcattgaaacggatctgatgcagcaccattcagaggggaagttgcctcatccccctcacctgatgcttcgtgctgctatcgagtctgtatgggataactacgacattattgtcatagacagcgctccaaacctgggcacgggaactattaacgttgtatgtgctgctgacgtcatcgttgtagcaaccccggcagagctgttcgactatgcatccgttcttcagtttttcacaatgctgctcgacctgcttgaaaccgtggatttgggcggtttcgaacctgtagtccgattgctcctaaccaagtacagcctgactaacggcaaccagtccagatggatggaggagcagattcgaaatacctggggagccatggtcttacggcaggttgtacgggtcactgatgaagttggtaaaggccaaatcaagatgcgcaccgtatttgaacaagcagcaaatcaacgctcaacgcttaatgcctggcgaaatgcagtagaaatctgggagccagtctgcaaagaaattttcgaagacctgatcaaacctcgttgggaggactaa

SEQ ID NO: 153018 - DNA, 1020 bp, Enterobacter cloacae
atgaagaatcgctctattttaaaaaatgcacccaacatcgaaacgttcatgagcagtactcataatgcgccgcaaaaagcgccttctgtttcgcctatggttggtgacttacagagcaaattaagctcgttgtccggaaacaatattacgctacctgtttgtggccgtaacgtaacctttaagctggaaacaattcctgctgataaagtcgaaatggcaacaatggtttggctcggtaatgaacgtgatcaggaattgctgaacgagtcagcgctggccgaccttatcccttcattcctcaattcaggacagcagaaccccgcgttcgccagaagaacgtcaggaattatagagattgccgatggctcacgccgtcgtaaaacggccatcatcacgggtagcgattatcgggttctcgtgggggagctggatgatgagcaaatgcagtggttgtcgcaggtaggtaacgactatcgacctaccagtgcctacgagcgtggaaaacggtatttgcgccgcctgaaagaatttgatgggaatgtgaaagccctagctgaagcggagggtatcgacagaaatatcgtgaaccgctgcatgaatactgccggattgccgaaggagatcctgtctatcttcaaacatccgggggaactatcagctcgcgccggggatgcattgtcaaaagtttatcagggaaacgagcaggccatgctcgacgctgcgcgacagttgctccgtatgaagaaagcaggtgaagattttgaacccgcgagaattatacaaatactacaagacgtggttctggttgaaaagaaaggcgaacctaaatccgaaaaagcatatggagatggcgttatcgcaaaatataagggtaatttcgtcaccttaaaaatagataaccgtaagataccttctaatttaatgaaaaaaatagaagcattacttgaatcagaacttggtgccgagaaggttaaccagaatctcgataaattagaaaacctcataaaaaataaaaaataa

SEQ ID NO: 153019 - DNA, 312 bp, Enterobacter cloacae
atggtgagccctggcgttaacccgtttagcctgatgttgacggcgaaagcggacgtaccggagcgatgtaataactgtatggcgaggcgtgtacaaaaaaatctttcgtcattttgttctgatatggaacagataaaaatgacatgcgttcctattggaacgcttaaccacaaaaataatgagatttgcgatctcgatccgttccgttaccgcgaaattaccgacaaacacgatgataaatttccccaattacgcgccatcctgggtaaagccccgcaaaaaagactgactgcgccgtgtggcctgctctga

SEQ ID NO: 153020 - DNA, 1230 bp, Enterobacter cloacae
ttgcaaccatcttatcatttccaacatggctctggtattgattactgtttttacgtactacccgatattattttaacagatcctactaaattagatgtaataaaatggatcattttactatcactttttaatacccaatcaattacaattacgggtggccatcatttttataatttcgctactaattttgttctacaactatggaaatcacatagagaacatgctgaatctgtactatttgcatatattagactcataaaaaaatataccgaattagttagagaaacacaccaaaaggcctttaataatgggatatatcatcctgacttcaatggacttccttctcgcttctacaatgaaaatgaagtagatatcagagattattttaataataacttaccccatccttcgctcgaagatgttaattatttagaactaccagctaaaaatatcgcactctttttaataccctgcgaatctaatagtaactataaggatttatttaaaaccattatcaaaccaacactttcgatcttatttaataaaaatagcaaagttaaccacacagtaaaagatgagttatttaacaactatgcaaaatttattttatctgtatccatcaatgagatagatgaaatcctccaaccatttattgaaaatcttactccatcggaaatagttgctgattttttagattccatcatattggttcaagacagacttgcagcacatgacaatttttggtatgtatggaaaaaacttttgccactattaacagatcttataaattataaatatcactatcatcactctgaaaaaataataaaatcctatctattcgtgcaacgttggaaagatagtacaaagtcatggcacacctttcggcctaacgataagcgattttttaaaattgcagctgaaaaactaggagaaaacccagcaacccttcttgccttttctaaattactcaatgacataggtagtgaatatcgaaatgacggaatatattggcttgcaagcattatcgaaaaaaacccgtctctacatgacaccaaaatagataacaatactattttttatttagagaaatacattaaaatatttatttatgagaataaagaaataataaaaaaaacaatagacttgaagaaatgtacatttgttattttagatttcttggttaataaaggcgaggtttccgcataccttttaagagagagcatcatataa

SEQ ID NO: 153021 - DNA, 345 bp, Enterobacter cloacae; identical to SEQ ID NO: 95526

SEQ ID NO: 153022 - DNA, 258 bp, Enterobacter cloacae
atgcttgtgatgaaaagcatagaaagcaatcacttgaagatttattctttagttatcaaattaaaaaaattggtaatatcacagagcaacaatattgcttacagcgggaagagttatggacaattttggataactattactcccaactgccaaatcaacaagaatcagaagaaaaaaatctatggcgcctttgtcttgcgcgaattgatactagaaaaatggaaatatctactcactgcattgataatggaacattaa

SEQ ID NO: 153023 - DNA, 600 bp, Enterobacter cloacae
ttggaattagccttcaatcgagcaaatgatggtcttttttttataaagaccaacaacgataacatagagaccataggagaattagtacatgatggtattctcggttgtgaacaaaataattacttcattgcccatgatttatacgaagaatgggcattagaaataatcataaatcaacagtacatcactaaaaagtcgtctttgagctttttcaaaaaaataggttcttctcttccaataagaagagcatttagaaattggatgtcaaataaaatctctcaaaatacaaatgatatagagatatttattgaagaaataattgatgatgaattaacagacatgttctggaaagatgaaatcattgtctcaatattactatccaaatattctaacgtctttttcaattactatgatgatgaacttctcagtaacaaattcgatttatttaaaagattatgtttcatgttaaggattgcatgtaaggaattcgataatcaagcatttataaatttaggcctaaatccaatggcgaaaagtattttcgccttatggatctttgttcacaaagcccaaaggggaaggatgggtatcattgattga

SEQ ID NO: 153024 - DNA, 399 bp, Enterobacter cloacae
ttgccgaccagttttattgatacggaatttgggagagaggcgtaccaaaccgccgggctgggtatgtacaatggtaagaaaattggtgcctactcattagggattcagcttacgaaaggcgctgtcacgaacgacgcaggcgatgaactgtatcctactgcatcgcgcgataacggaacaacgtgggcaacaacaggcggacagcgctatttaaaagtaaacacagacaaaagcgaattatattccttcagtgacacattgggcggcacgcctgtcgcacaaaccaaggttaactttaatgtgggtgtcgccgcgatgattaacccaaccgatgatttaaatatcacggatgaagccaccctggacggcttaaccaacgttgagctggtttatctgtaa

SEQ ID NO: 153025 - DNA, 507 bp, Enterobacter cloacae
atgttaaaagacccttccaaggaagagattgaaaaatacttcttttgcgacccagatgtcgggagcattgtcagaatagccaactcaagtacagcaaaggctggggaaaacccaatttatgttaacaattgtggttaccacatggtcagcgcgctgggtctgaggcttggtctccaccgaatagtctggatcgtagcgaaaggatctatccctgaaggtatggaaattgaccatatcaacggcgacaagagcgacaacagaattaccaatctgcgcctttgtacgccaacacagaataggcaaaacaagaccaaatataaaaacaacaaatctggctttaagggggtccatttcgaatcctctccacggattaaaagaccatggcgagcaaggattgttgttaataaaaaggctatcagcttgggaaactttatgaccaagcacgaggctcatgaggcctatcaagaagcagccaaaaaatactttggcgaattcaacaggccataa

SEQ ID NO: 153026 - DNA, 744 bp, Enterobacter cloacae
atgaaacccgaggcagtcattaccgccctgcaagacgttgccgccaagcagtacgcagagaacagccagcggatcaccgacaagctgagcgtatttactgcggccagagacacccacgcggccagcatgcaggtactgaaagagattgatacgtccattcaacgctgtaagcaggagcggcagaccgctctcgatgagagcactgaggcggagcaggactggcgcagccgctttcgcaccctgcgcggcagtcttacccctgaaatgaaagctgagcacagcaggcgtatcgccagccgcgagctggccgacgagttcaccagtctgattgccgagctggaggccgaccggacgcgcgccatgctgactgcctgctccaccggcaataaatacctttcagcgcatgaagatgcctttaccgcttatgccggtgcggaatgggctcaggctgtcaatgcggttcctgtcaccctcatccgcgctttcctgctgcgcattcgtgccctcgaaatgaagggagaaagcgccccgcagtccgtggccactggcgagctgcgcgatgcgctgagccgtcagggcagcctgtatcacttcgatatgacgcaggagccggtgttgtccgtgacgggcatgcaccggccgcagattactgacgttgatacggagctgttacgcagccctgcgaagagaatgatgcttgccagaaagctggctgaaaatggcgagacagaagcggaggggtaa

SEQ ID NO: 153027 - DNA, 594 bp, Enterobacter cloacae
  misc_feature (551)..(560): n is a, c, g, or t
atgaaacataaaattaataaaattaacaatgatttttataaaaatttttatctaagagaaacattctccgatgatattattatgactcacggagtccctgagatttccaatgacgattataaaagcatttcattaaagaatagattatgtttcactataagaaaaagctccccgcataaaaaaatacaagaaagacttataaaaaatttcctagtaaaagttcctcttagctcacctgcaattgcctatcgtaaaaaattaaactatttgaattttctagaacctcatatccatggtgagaacttttgtcgaattgacttatgtaatttttttcataacataaactataactttgcaagggagtgtttcaaatcctactttgaagatgaatatctggtaaataaaaaaatcaaagttattgatgcatttttaaatagtttatctattgagattgtagtcaacaataaaaagaaaaaaatatttccaatgggattcgccacatcacctttcatatccaatataattttcagaaagttagatattttaattannnnnnnnnnacaaaagaagcatcatttacactcgttatgctga

SEQ ID NO: 153028 - DNA, 273 bp, Enterobacter cloacae; identical to SEQ ID NO: 130239

SEQ ID NO: 153029 - DNA, 594 bp, Enterobacter cloacae
gtgcgattttggtctgcgaaagaattttttggccgtgctgtgacgcgccagcgccccgctgtgcgcacgatcttttttaatggtggctctgagtgtctggaaaggccgaacgcgccagagcgccgctggcagcgcgtagcgatagccgcttgtgaggaaagaaaagagatatccccgccaggggatgaagggcataaaaaaacccgctttcgcggtttatgttcagggctggtttacttgccaatcaccgggggagtatttgccgttcagcgtatccgctttcgttccggtgttccgaatggctcccgcgttggtcggtgcgcccgtattactgtgcgtgtggcttgccgtttgctctgccagctcttttaccacgtcgagtgtgtcgagcatcagctgtgccacgttgatagtgccagagccaatccacaccaccggggcaataatctgctgttggacggacgccacgcttttgcgtatctggccaatcttttcaatcaggtctttacccgttgtgactgtctggctcccggctatgtccgtttcatcatcgccgccgatactcgcacgcggttatttactgtctggctgtag

SEQ ID NO: 153030 - DNA, 327 bp, Enterobacter cloacae
atgcgacctgggtttttttgtttttgtcggttttcagtatgccattgccgtctggcttgtgtcggtggggctaagaatccatcggacggattagtaaccggcatctgttacatcttgctcctggtgttccaggataatgccagcgatgatgtcattggggttatccacccgttctggtcgtttaatgacgtgagtcgttcccttctgaaaatagttaatcgcaaatatctcatcttcataacgattgcaatgcctgttttcatcaatgagagcattcagtcgtctggttacattttcatggttatcggatgtagccacgcgatctaa

SEQ ID NO: 153031 - DNA, 801 bp, Enterobacter cloacae
atggatgccgcgctgaaggaaatagacaggcttaatcagcaactgcaacagctggaaatagccgccgaaaatgcacaggccctgaaagcggatgtcgacagccagatacagatatttgagcagcggctgaaaccgctcaatgaagctgtgcattttacagccccggaaggcatggccctgaccagtggtgaagatatgcaactggccgcagcacgaaacctggtcgtcaacgccgggggcgatatcagcgtcggaacaatgggcaatctgaccgcactggccggagagaaactggggctctttgcccggaccggacaactgagcatcaaatccggagaagggccaatagatatccaggcgcaaaacgccagtatgcggttgtttgctgagaagaagctgacgctgagctcagtgagtgacattttgttcgccgggaaaaaacgtatcacgctgatcggcggcggaagctatctgcgactcgaggccgggaaggtcgagtatggtacgacggcgtcgtacatacgcaaagtgaagcggactatggcagcaggaagcagtcctcagtctccagaacttccatttttaccagggccaggcgatgcttttcgcaggagctttattcttgttgatgatagaacacaagaaccaatatcaaatattggatatgaattaacatcgtctataggtaaggtagttaaagggttttcatgcgagaaaggcctcactggctttataagccatacagaagaagctgatatcgagttaaccatattaaagcaaaattcattatatataggatag

SEQ ID NO: 153032 - DNA, 756 bp, Enterobacter cloacae
atgaaaatttttatcgtaaatctaaaaaaatcagttgaacgtcgtaaaaaaatggaagcgcaactgaatgccttaggtctttcagctgagtttatcgaagcagtagatggcagactcatgtctgaagaagaaaggaagggagttactgccaacgttaattatgcattccttcctggtgagatcggctgtgcattaagtcatcaaaaaatttataaaaaaatgattgatgagaagatcggcgaagcccttattcttgaggatgacgttgttttaaatgatgattttaaaaacgttttggaacacattactgtcccagaggttcgtccttctgtcattttactaagccgtacaaataagtttttccaaaaaaaaataaaaaatatttccaccggctattctttgcataagaccttacatgccactaccacgcacagttatattatcaacaacaaggctgcgtgctctttacttaaagggcttaatcctgtttggattgtggctgataaatggggactattcgaagatatgtcattggttgaagtatattcggtagtgcctcatccagttcatctctctgaagaagcccaaaattctactatcaacattccggaagattcacaaaccatccatttaagaaaaaaggaattatggaatcttcttatgtcacgtagaacatttaaaacgaaaatcaaacacaaatacagaagagcgattcttccacttttccataaggtcataaatcaaggtaaaggttaa

SEQ ID NO: 153033 - DNA, 180 bp, Enterobacter cloacae
atggcaaatttagctggtcttgccggcagcaatcactggaggaaatatactggtggcgaaacgcccagaattatgggaatgcatatgctcttttttttggccgcacagttagcattgaatgataaagagttgaagaaagtactcgaaaaaatgcgtgagataggggcaagcatctcctga

SEQ ID NO: 153034 - DNA, 399 bp, Enterobacter cloacae
atggttcagcgaattacccttgccccccaggggccagaattctcccgctttgtgatgggctactggcgcctgatggactggaatatgtcccccctccagctggcaagctttattgaagagcatctcgacttagggatcaccacggtcgatcacgctgatatttacggtggctatcagtgtgaagccgcgttcggcgaggcactcaaactggttcctgcgttacgcgaacgcatggagatcgtcaccaaatgcgggattgccacgacggcaaaaccggaacatgctctcggccattacattaccgacagcgcgcacatcattaagagcgccgaacagtcgctggttaacctggcgaccgatcatatcgatctgttgctgatccaccgcccgatccgttga

SEQ ID NO: 153035 - DNA, 2226 bp, Enterobacter cloacae
atgaaaatactgaggcagctgtggaacccgaaggggcttgatgcggcagttgacaatgtacctgaggatcgatatggcttcagtaatatcgcggaaaatatatctcgctccattctttcccttccacaggaagcttcaaatgttgtcggaattgaaggggcatggggatcaggtaaaacaagcctcctgaatctgatcctgaaaaaccttgccgagtacaaggatggacacacacatgtgctgcatatttctccctggctgagcggcaacgacccggttgaagcgctttttcttccggttgccactgtcatccagcaggaaacggataaacggtatcccccaacaggtttaaaaaaaatctggcgtaaataccttctgtcagcggaagctcagaaagtgattgagtatgcacaggatacttcatcgcgtgttcttccgctggttcagtatattgggcagttttcccgaatcgttaactggatagctggcggaataaaggtattttcagatagtcgtctggctgttgatcagaaaaccacgacaaagcttcgtgcagatattgctgggcaactggttagactggatctgaagttcattgttgtcatggatgatctggaccgactggagccgtcccaggtggcggaagtgttcaggctggtccgtgcagtagccgatctaccgcgctttacacacattctttgctatgacaggcagattatcactcatgccgttgagcatgcactgaatatcggagatggcagccgttatcttcagaaaattattcagctcagttttaaaatacctcgccctgaggcctttgatctacgcaatgaatttcgccagcgggccgagacgctgtatctgcaaattaataatcaaccgacagacgcagaaatggcaaaagatctcgccgctgtgactgatacttatggtgccgcactttcgacgccacgcgagatccatcaggccattaattccctgatttttctctatccgggaatgagggattttgtgtatttccctgatttgtgcctgcttcagcttatacgagtaacaaacccagccctgtatgactggacggagcattacctgacagaacggtccgtgattgaaaacggccagggtatgctttctgacggagaaaaggcaggcttccgtgaggggcttatcaggtgtatgaagatgttgaaggcatcgaatgcagactcgtttctgacactcgcagactggatccccggtatcagcggacataatgatgaatatctgagtctttttgagcccgtcagtgaggattatcgccacatccatacaagcaacaagcgactcagcagcctgacgcactggcggtattactttgccttttcctcaccccagaatgttcttcctccggagtttttcaaccagctttttacgctggccgccgtaccggaaaagcagcagcagctctctgaagatctcctctcaaaaatcagcagtgtgggtattctgtccggaacctggttcgaacatatactgagcaggttgactccgggcctgataaaagaacgcaattttgaagagtgcgcagggctggttcagtttttcttcgatcatacggatgaggtcagcactcgtttcagaacccgtaacacatggttttctctgcgtgaaacgggcattaatcaggttgtaaggcatctgctgaagcatatgcaggatattgatgaggccagaacagtcacgcgaatggaaatgctggttgttgcgggcacgtcgccgttctggatagccgattttatgcgggatcttatctgggaacacggacttgcccacaatacggtatcttcgccatcagacgctcttttcagtcgtgatattacggaacggctgcgtgacagatttgctgaacgtatgaatcagccagaacttcagcaacaacttctcgtgcgccagtcaattcttggatatctctatgcatggagagacatgagttcagatgaaaccgtgaagcaatgggtcagagaggtggctgccaccgatgaaggccttgttaacctgttgatacggttacagaccagcgtcttcagttctgacaggggggcatatcgccggattgcacgtgaccaggtcagtctattttttgataactggcctgcagttgaagataagctgagggttatactttccggtaatgaactgatgccggagcaggaagaactcaaaagtgcgttggataatgacgagtga

SEQ ID NO: 153036 - DNA, 291 bp, Enterobacter cloacae
atgggcgtcaaaatttcaggtttagagacaatgcagaagcagctaaaagaggttgagaaagcaacagaggccttaagcggaagttatgatgtccactttgatgctaacgatcctgtcagcattgagaatgccattcaggaagcttattccatggtgcacgaacgcgcttctggttatgccactaatccgatggtcagcccattaatcgaaggcatgaaagaaaatctgcgtcagcagatcctggatagtgcagaacaacaaagacaggagcgcaagcaggatggcaattga

SEQ ID NO: 153037 - DNA, 225 bp, Enterobacter cloacae
atgcgatcggataatcggggcgattcgccccgatatcattattcccatcttttcgtgctgtccacccgtaatatcacggaccgttcacactggatgacctacccggccagcttttcacttaatcagatacacgatcccggccaggcctggaatgcactgacaatcggtgcatacacgactaaaacgactctggacgaacccgaataccagcccgtaacggcgtaa

SEQ ID NO: 153038 - DNA, 789 bp, Enterobacter cloacae
atgtctatttttggcttgaatgcgggggatgttcttttagttaataatcgaactcggggtaacattttaggacaaaagattttacgttcacaaagatttgtaaacacaacccacattgcattaagtttaggtgagggaggatttatacatgctgacaagtcttgcggcgttggcttaattttcttctctgaattgattaatgaatctgaaggtaactggagagtcattagacattgcgacgtgcaccaagagattgaagaaaaagtacaagaacttgcaatatttcacctaaaaaaggcatataacaaaggcatcatcctcagagagaatgaaaaatctcttttttgctcacagtttgttgatgtaatcttcagaaatattggtattgatatttttagacgcgaaaaaggtgaaaggttaataacttttagtaacgctcttcctgttgattttgaaagtcttctttttgaaaaagataagtggagcgatgtgtctgatatctatcgagaaaaattagatgacatttttgtaatgaaaaatctagagactattttttctacaaaaagagcacttgtaaacatagcaaaaaaacaatgcaatgacctctctgtatattcgaccattatacattttatgaaagactcacatgaccagctaccggttgagtttcagagtgaaagtttggacgaaatattatcagaaaatattaaagatctcgaggaatctgaaagtaacattctgtatgacttctgggactcaagattaacgcatcgaaaaaaaagaaattag

SEQ ID NO: 153039 - DNA, 465 bp, Enterobacter cloacae
gtgataaagacaattaccattcttttagttggcttgtttttttctgcatcaaacgcttttgcaaatacagaattagtttttcaatgcatgacaaaaagcaaaaaaataataaaaatagaacgtacagatgaaatcttaaagtacacatatggcaatgataaaaaaaatgatttaactctagagactcgacttttcagcgagagaattccaactattttttcatcagatgttcaacttggaaacaaatccggaccttatgtttttaacactgttacattccataatggagaatatacatattcagtctccgcattaagtgacatcaatgttccatcagacgaaacctttacaggggtttatgtcagcggaaacaacataaaaaccaataaaataaaatgtatagagggtacgatacaagataattttgagtcgctctttacttttaacagctcacgcaacaaataa

SEQ ID NO: 153040 - DNA, 183 bp, Enterobacter cloacae
atgcggcaacagcactccctggtctcttcagctattatcgaagacatcctgataaacagcaaattgatgggcgaacaggtgcacacagagcaaatcaggaagcgattgccaataaagcttatggcggacgtaatggtaatacagagcctggtgatggatggcgctataagggcagggggatga

SEQ ID NO: 153041 - DNA, 378 bp, Enterobacter cloacae
atgttttatgacagcctgatccacaacgctgaaaacagaagaccgcccgacccgtatcctgataaatcccaggacgaactgctgttcggcgcactgcatacaaaccagatgaacatcccggaatatgtgcggcggctgatagtgaaacacgacagcgactggcacagtacacgcgatgatacacgctggtcatcggtatttaaggacagggacgaaagtccggttgtgcagctggctaacgggggatttctggatgcgacgcgctggatggataaggttccaccgttcgccagtcagcggtatgtatggcattttcatccgcttgaattccttgagatgctcaaacccgcaggcgggaaaattacgctgccaatgtaa

SEQ ID NO: 153042 - DNA, 1185 bp, Enterobacter cloacae
atgaacatacgttacccggtacggaaggccgacgggcgggagtataagaactatgacgagctgctgaccgacatccgtaaaaacgcgcacggttggtggttacttggcatcagtcgttactggcacggggggatccacatcgggacgtcatcatctccggcctcggtgccggatgcggattcgccggaaaaatcggtgccgcttcagttcatgatggacggcgaggtggtggcatggcgggttaaccgcgattacgcgaatatcgagtgttatcaggaacgccccctgcgccagtccggcacctttgtactgatcaggtcagtttataagcccgacgagcaggatgaatcttcctggctgacgttgtaccagctttacatgcacatcgcgccactgtcagaattcccgaaacgcccactgtaccgggtcacgcagaaaggccacggcgtgcggatgcgtaaacactcccgccatgacgacagccgtgaaatcgtgccggacgtgctggcaaataaacacggccacgccagaagactgatgcagggtgaaacgctggtcgtactgcaacaaaaatcgtttctgctggaacaacagccggagccgttcgccctggtgcagcgttttctggacagtaagcccgcctgcgatttgttctgggtctcgatgcgcccggaatttctggagcctcatggcgagtgttacgtgtgcctgcctgactggatgcacagcgcactgaatcacggtgtgtttgatgatgtggtggtgccgtccgttccgctgaaagtcacggtgaaggcaggggatccggtcgggttcctcggcgctcaggacttggccgacgaagataattatccgcagattatcaccacggactataaagcccatatcgagctgctgagcctcgacgagcatgtgccggatgtggtggccaacgtgaagggcatcaaaacgggcaaacagttcattaagctgaagctgaaacggccgctgtacctgcgaaacggggagagcgaggaaagttcctttgagcagatgagtgccattacccgcgctgatgcagggaaaattattccacgcgatgccacgtccccgtttacggataaaaccggggttacatactttcagatccgcccgcatacgtggatgcaccaggacgatgtggaacagctagccagcacgatttag

SEQ ID NO: 153043 - DNA, 201 bp, Enterobacter cloacae
atgaccgccagcgcgccgcagaaaatggaggcgttcacctttggtgagccgtcgcccgttctggatcgccgcgacatcctcgactatgtcgagtgcatcaacaatggcaaatggtacgagccgccggttaacttctcgggactggcaaaaagcctgcgcgccgccgtacactacagctccccgatttacgtaaagcgttag

SEQ ID NO: 153044 - DNA, 963 bp, Enterobacter cloacae
atgagtttaacttgggataaagacggcacccctcggatagaaattaatggcagaccagaaacaacgggtggctcaggtggaaacggaggagatgggaaagaaacattaccgggaggtctgacagaatatcccaatactatgggttttcctggtattcacgaaacaacctggtttaacaaggtacccaaatgggatgttattagtctgggaagtggtaaaactcaaaagggcatagaagctaatatatacataacccgcgttgagaactacgtctataaggtatatatcgataaaactggcaaagctattcaagtcgattatgttaattgggaaatagatctggaaaatcgggctccagtccctcaacagcaaatcccttttaaaagcagagaagagaaagccataagcctcgcagtggacgttaacaacgtcattggaaaagtcgctgatttctataaagaagtcacatcaaaatatagtagttcattttcaaaacaggcacaaaatcttgctgaatccgtaaagggaaaaaaaataaaaaatgcacaagatgcattaagaaccttcgaaaagtataaaaatcaattaaattctaaagttagcgctgcggacagggcagccattggtcgggcattagatgcggtcaaccgtgccgagttatccaagacgttagcacaatatagtaaggcgtttgggatagtatcatattcggtcaatggcctaagtttgtatgatgcttacagcaaagcagttaaaacaggacaatggagtggtttttatgctgaggttgaaaaacaattgctaggaattgtcgcggcagagttaacagctttcgctttttccgttatagctacaacatcagtgggcattataggtttcggcttaataatgctactggtagctgctgctgttgataagctggattatgatgcatttaataaatcagtattgggcttaatgtaa

SEQ ID NO: 153045 - DNA, 162 bp, Enterobacter cloacae
atggttgcggtacttattggtaatctttatgatggctatatcggagaattggaatgggataatctgattatgacaataagtctatttgtggcattgttaataaatatagcctttatgtttttaacatatatccattacaaaaataaaacaacggtaagttaa

SEQ ID NO: 153046 - DNA, 657 bp, Enterobacter cloacae
atgggaaaaaaattgaatgttgctgaaggctcatgccgggaatctacaattactattattactcaggataagtacttctttttagcgctaaagtatttaatcaattctatgttgcccgaaattcttaatgaaaaaggtattctctataatgttgcccattgcgagagtgtatttcatatgaattatcaaaatgaattacaatgtccagaaagattgcttatcgcagattacgatgtgcgattgattgggaattctcatgtgcttaaattaattcagggaatgaaaatcttcagatcaataatgctggtcattcacaaggaacttcctctggctggtgttgatggttgcctgtctaaaggtttgtcagttgatgagattaaaaacactctccgggactttattttgcgaacgccagtatcaaaaaatatggatagcaaccatttgctgtcgcgttttacatctcgcgaacacgagatcattcgaatgatattaaaaggtaagcgtgttgatagtattgcaaaaacattgaaagtgagccccaaaacgatctatgcgcaccggacacgtatttatcagaaggttggagtgcgtaatcttcaggggctgtttcagcatgaagggttgctaacaccggagatcgattggccaaaggcctga

SEQ ID NO: 153047 - DNA, 558 bp, Enterobacter cloacae
atgaacatgaaaaaaacctttatcgctgccgcattagtatctgggttagttggcatgcaggctcaggcatccgatggcactatttattttcaaggtaagttgactaacaccacctgtgatatcaccgttgacggccaggcttcaccagcaacagttgtactgccagaggtaagtacctcgctgttgcagactccaggtgcgacgataggtgatactggttttagcattgagcttgccaactgtactggcgtaaccagcacctcaacagctgcggccttctttgaaaatggatctacggtagacaacacaacttataacctgctgaacactgacgaaggcattgcagacggtgcgaccaacgtacagttacaactggtagacaaagcaacagatctcccattacaggtgggcaacaccagtcagaccacaaacactacccgcaacgatatgagcagtggttccgcaagcctgccgtataccgtgcgttattatgccttaggggcaaccacgccaggtactgttaaaagccaggtcaatttcagcatcgattacgaataa

SEQ ID NO: 153048 - DNA, 702 bp, Enterobacter cloacae
atgaatatgaaactaccctctttcataatacttttatcctctgcctttttagctttctctgttcaaagtgcagtgattatttctggtacgaggatcatatatccagaaaaagacaaagaagtctccattaaaatgacaaacaatggtaaatcacctgtcttaattcagtcatggattgattctggtgatccaaagtcccgtcctgacaatgcgcaagccccctttacgctgaccccgcctatcaaccgtgttgaccccggtaaaggtcaatcgttacgtatacgttataccggcgaagcgttaccgcaagataaagagtcaattttctatcttaacgtgcttgaaattcctgccagggtgaataacacagaaggagaaaatgtgcttcagatggctttccgctctcgtctgaaactttttttccgcccatcaggcttattaactcacgccagcgatgcaccgcagcaaatgaaatgggcacgaaatggcaccacgataacggccaccaacccaacgccctactttatcaatattgcctacttctcagaagatcgagacggtaaagtcagtatcggcagcggtgggatgataaccccaggcgcaacaaaaacctttacgctcagccgcaacacacaaaattactatccattcattattaatgactatggcgctatgcgtctcattgaaaccgaaaagaaataa

SEQ ID NO: 153049 - DNA, 2550 bp, Enterobacter cloacae
atggaacggaaccttaattttaagatcaacagcacgcttaagctttgtccattagtgattgccattgctacggcgttttttcctgttgctcaagcagccaatacctcttttgttgaatttaataccaactttatcaatccaacaagcaaaaacagcattgatatcagtcgttttcaaaaaggcgttccgttgcccggtaaatacaacgttgaggtcattataaatagcaatccaatggggcaatacgatctccaggttgcagatggatcgggtgtgaatgctgagggctcaatatgtctggccaaaaaaaactatgttcagctagagtttaatactaccaaactcactcaagagtcacttaaattattcaacagcgcgagcgatgatgaatgcctgccggttgacaagattttgcccgaagcttcattcgagctggataccggcgaacagacacttaacatatcgattgccgaaatttatctcatcaaacgtccccggggttatgttaatccagaaatatgggatcaaggcattacagccggaatactaaactacaataccaacttttatcgtaatgtggctcatcataatcaaaatgatgcgctttatgcgggcatcaatggtggtattaatttatcaggatggcattttcgccataatggcagcctgaactggcagaatgatttcggtcgccactatcagtcacttgaaacctacgttcaacgctatctcccagattttgggagccgttttacgttgggagatacgcaaaccaccggcgaacaatttgatacgcttgcttttcgcggtatccaaattgcaaacgctgagcaaatgctaccaaattcccagcgcggatacgcgcctttaattaccggcattgccagaaccaatgccaaagtgaaagtgatgcagcaaaatcgtttgttgctggagacgaccgtagcgccgggtgcatttgaaattaacgatctctaccccaccggttacggtggcgaacttgaggtcattatcgaagaagcagacggctcggtacagcgccagagcgtgccctttgcctcaaccagtaaccttctgcgcccgggcatcacacattacagtgccaccgtgggttctctgcgtaaaggctgggtagaaaatgaaccgttactggcagagtttacatggcgtcgggggctttccaatcgttttacggcttataccggcattcagggtaacgaggattacaaagcggcacagctagggctcgctgttggcacgcctgtaggtgctttctcattcgatgtcacgcacgccagaactgagctgccacatcaatatcagcagtatggccgaatgatgtccggggaaagttatcaactgaaatacagccatatgattcagcagaccggcagtaatatcagcgtggcggcctatcgtttctctacagaaggctacatggatttcatttcggccatgcaactgcgtgaggctctggaacaaaatagtagccagatcgagctatacaggcccaagagccgtctggggctgacggctaaccagcgattacctgagggttggggaaacatctatgccagcctgttccaacaagactactggaatcaacatggtagcgatcatcaataccagtttggttataacaaccacattggcaaagtcaattacagtttgagtgcgagtcgcaaccgcaatggtgaaggtggaaatgaaactcgctatatgctgagtatgagcattccgttctcaagcgacaacgtatttagccagatgtcggttaacctgaatcgtgataatgaaggccgaatgcgtgagcaaatggggctgagcggtaccgcactggaaagcaatgcactcagctatagcgtgagtgccgcgaacgcgaataagggtggttccagcagcggtacctttaacagttcgctacgcacgtctttaactacgcttcaagctgcagctggggcaggtaaaaactatcacaattactcactgggcatgaacggcacggccgtacttcacagtggtggtatcaccttctcgccttataccgcgaacacagtggccctggttgaggctaaaggcgccaaaggcgctgccgtcagtagttatcccggagtcagcattgaccgtttcggctatgcgctggtgccctacctcaatgcatggcaaatgaatgaggtaagcctcgatccgaaaggtttgtcaaatgatattgagctgaatttgaccagtcaaaaagtggcaccgtacagcggtgccgtggttaagctcagctatggcacaacctacggtacacccgcattgattatgcttgacgaaaataccgacgtaccgttcggcgctgacgtctatgacagcaatcatagcgttgtgggtgtcgtcggccagggaagacgcatctttgctcgcctaccggagcaaagcggacagttgaacgttcgatggggcaaagcgcgtcatcagcaatgcctgcttaattaccaattaccgaaccacgataaagcaaacaacagtgacatcgtaacccttaatagccgatgcgtggcacattga

SEQ ID NO: 153050 - DNA, 1269 bp, Enterobacter cloacae
atgcagatacaacacggatttttacatctgattagcatgatgagcgcactgatagcgggtaccctactctgtagcttccctgcccgcgcgctggtaacgtgcaccagtgcccaagtgaataacgtcatcgtaccggtggcccctgaattcagaaatatcaatattccgatcctctccggcggtatcaccgtcagcgcacttcgcgacttacccgtgggcgaagagctttttgtccagcagatctcacgtaccaccatcaatcaggccatgcgttacatggactgcatttcttctgattcaaccgcaacgggcacattctccactctatctaaaatagaattcgaaggtggtccgccagcatcgactacgactatcaatggaagaacgatttacgaaacaggcatccagggcattggctattccttaacatatggtgataacggtagcactgctgagaaccttccggtaacaaaggaatttgctgtgaacacctctgttgcctttggcggaatatcactgacaggaatcagtcgcaacttatatttccgactggtgaaaaccggtgatatccctgcagggacatggactgtcccgataaatatcccagccatcattacttatgccgaaccgggtcagaacatggcggcaaattttaaccttaatagcgatcgtatccatatctctggaacggttaatgttgtggctggaagctgccagactccggatgtttatgtacatcttggtgagtatgaaataaccgatatgatgcagagacctaactggaactcaccgtggaaagaatttaatattcagcttatcaactgcccagtgatggctggtcggcatgagagtgttggctcgaactgggcaggggaaggcagcagcaatacctatgttaaagttccagactatcctaacctcatcgcctaccggttggattttatcaacgaaaaaggattcacctatatgggagaatcctgtttaaaaaccgaatctgcccctaatgcttctgaaggcgtttgtgttgaggttgacgatccatcgatttcaaatgggatttatacaaacgccctcgatagcgctttttatagctggcgagacaaagcttttttaaatcaatattatgcaggtagttccgccaccagttatacgatcccacttcgtgcccggtattcccgcgttcgcgcaaccgcagaaaatggcgccgtcgttccacttaaagccggcccagctaacgccgcagtagaattcactatcatttatgaatga

SEQ ID NO: 153051 - DNA, 1743 bp, Enterobacter cloacae
atgggatattctaatagtaaccttattgtaaaattgatacatcttctttcaaataaaagggatgggttaattttgcttgatgggaattggggggctggaaaaacttattttataaaaaacaggtttcctaattactttcacaaaaatgtcttctattatatttccttactcggtatgaaatctctatcagatttcaaagcaaaaattattgattgttactatctgcaagatatacatacacttcaatcggggcttgaaagtatttctgggatcggtagtattacctccggctcacctgaaagtgctaatgttattaacaacatgtttaattccattggggcaagtgttagagagaatattctctctaagctagaaggcattttcattttggatgacattgagcgaatatccgagacatcattagctaatgaaatcttaacatattgccatactctttatttggcaggaacaaactcaaatttagacttcattattgttggtaattcatcacctgagtctggattgaaaattgaacacaaagaaaaattaattgcagagactctccattatactccatatccacaagagatattaggaatggatataataaaagaaaaactttctcattttcctcaacaagataaaaaaatatttgaggagatagcaataaataatagcatagttaacattcgagttttaatacgtatgttaaataccatcacgccaatctatgaacatattgaatcgcatcctgaattgacttggagcataccctcttcagcacttttaaattcaatgtgttcgttcttcatactattatttttacataatcaacctctcgataaacttctaacaaagcaaaacgcaatcctttcgtcaaatactgataaatctaatgatttggagagaagattatggtcatcgttgaatagttatataataactcccgagattaaaaaatattttagcggtcataattcgttgcaggatgtattagatattttattccatgaggctaaaccacttactttgagatatattgcaacgtccactcgcccagaattacatgagataaatgaaaaagaattctccaaaactctcatatctttaatttgccgagatttagattgtgatttttatgagtggcttagagctttccagaattacgagtatttaactaaacacaaatatctatccaaatcaccaattataactttgaaatttgtcacttcaattctgaataatttcactgacagtgagatcttagaatctttccagcaataccagattgatggaagaagcagttttaacagtggatttgaagatagcaggttactgttctccatttcatttacgcgctatcaaaaaacaattaataaagataagcttgacataattaaaaggcaaatagaatttaatggttggacctcattcgatgtcgatttattaacaaccctagatccattcgggaattacaagccacttggggtgcttggcgctccatttatagctagatgcattttgaagcattggaaagttaaagacatagaacatttccgttctttcttgcgaagcaactaccaaatcagcaatataaaacagtttgctataaatgaaagaagcaagcttatttacctcagtcaaatacttgaaatattttgcctttcaaataaagaaggttttaaatacggggctatttatgatcttaataaagtagttaaaaatgccattgctacgctatga

SEQ ID NO: 153052 - DNA, 144 bp, Enterobacter cloacae
atggaacttacgcagcaagaggcagagcttataacaggttttataggtgagcactggcaagaatttgccgccagcgtagaaggagttatcagtgtttgcgccctacatcgactggccgaaaagtttgggctcgaatctgaataa

SEQ ID NO: 153053 - DNA, 528 bp, Enterobacter cloacae
atggatacgtttattaatccagttatttacaaatacgaacacattgaagtaagcgggataatgcgtaccggactttattttcatgatgagcatggccgggactggtacgaaaccttaaccagctggaaaggtgctgtttctctggatgatggcgggattgtcgttgcttacgagcaggatgtttcgtatatggggatggaagaaggccgcaatgtctatgaggtcgaccccctgagtgtgccggtagatgtgttagggaattacaaatatgtggatggtgttttttacgacatccgccctgacgcgacaacgcttgccgaacaaacccgaaaacagctcattgaggatgcgggtctcacaatttcaatccttcaggattccgttgacttagggatggcgtcagagaaagaggttgagcagttgcgcgtatggaaaacataccgaatcagactgagccgtgtatcaacagcaaacgcacctgatattgaatggccagtcgttcccgttgcaggtaacgtattagattga

SEQ ID NO: 153054 - DNA, 552 bp, Enterobacter cloacae
gtggataaatttcgctcccttctgccgccttccgccattcatccggagcgggcacaggagcaggcaggcacagagcagattgttgcgctggataccgacatggtgcgtaaggtgaaaaatcctgacacctgtccggctcatcttctgccctggctggcctgggaatttgctgtggactcctgggaagaggcctggacggaagaagaaaagcggcaggtgattaaggatgccgcctatgtccatcagcatcgcggtacggccggtgcggtccgccggtcgctcagtgccgtcagcctgccgactactgtcgtggagtggtgggaggatgagccccgcaaagcaccgtatacctttcgcgtggaggtctacagcatacaggccattgatgaggccctgtaccagcgtatacgccggcaggtagataaagcgaaaaaccttcgcagcctgctgaccaccatcgatgtgattgccgacctgggcgcgaagggaacctattacaccggcggtgccgttaccgcctggattgatgttgttatagaagcaggagtttaa

SEQ ID NO: 153055 - DNA, 477 bp, Enterobacter cloacae
atgtaccagatgagaggaaacagggtgtcgccgatgcaagaagaagaaatagcctacagagctatcaacttctgtaatgccattggcctaacaacctcaaagcgcagaagaaagcgatatgacatgtttttcgaaagcctgtcaatttatggggtaactctcgatgttatggaagataaagattgggaggccctgacgtacgatctaacaatcggacattgtgaccctgcctctctaaccattactgtgcccaacaagatttatgtaaatgcctgcctaggggaagagcacgctctcgctgttattttccatgaacttgggcatttgcttcttgggcacaaaccggttttacacttctcagctaaagaaccaacccgtgttgaggatgctgaatggcaagcagacacatttgcagatatcgcgctggaaactattggcgtgagaacacaacagatgtcattcgacttttacatgtaa

SEQ ID NO: 153056 - DNA, 360 bp, Enterobacter cloacae
atggcactcactgaattcggtaaggccgtcagaaaagcgaggatagatactggcagcacacttttaactatgtcccaggaactggatacaacacctgcgtttctcagtggtttagagactggtagcaaaaaaatacctcagaagtggattaagaagattgattcttacttcaaatctaaaggtatagaacttaaaggactgcaggaacttgctgcggttgcgaacgattctgttccggtaaatggattatctcagcagcagaaaatgctggtggcgggctttgctaagtcgcaattcacaccagaacagttaaagagctttgcagatttactgcaaaagattaataacaatgagggttga

SEQ ID NO: 153057 - DNA, 954 bp, Enterobacter cloacae
gtgagcgtgaaattatcttcctgggtgtgggacggttgtgccgcacaaggtgtcaagggcgtaaaactgctggttatggctcgcctggccgattttagctcggatgagggggtgtgctggccgtctgttgccaccattgcccgccagcttggggccgggcgcagcactgtgataactgcgataacccagcttgaggcagacggatggttaacccgtactgaacgtcgaaacggtcagcgcagcggcactaatttatacacgctgaatgctgaaaaattacgcacggcggcagcatattttcagagttcagattctgaacgttcaaaatctggacgcccattcaacaaggggttagccaaccctgatgattcagattctgaacattcaggttctgaacgttcaaatcccgaacgttccgaaaacgcgaataaacagggttctcagggttcagaatctggacacgatccgtcagtaactacagatccatcattaaaacagatctcttcgtccggaaattctggcgaatctccagacggcgaagattcagccaaaaaaataccggccacgaaaaaatggggcacaccagaagatcatcaatgcgcaagctggatattttccaggatccgaaccctgtatgaacaagcagccgaaaccgatggtgaagttgctcgcccaagagaaccaaactggaacgcatgggcaaacgagatccggctgatgcgcactatcgacgggcgcacacaccgccagatttgcgacatgttcaagcgagtccagagcgacccgttctggtgccgaaacgtgctaagccccgcgaagttgcgtgaaaaatgggatgacctggtactgaaactggcacctgtcgctcatagcggagtgatgcgcagttcttttgacgatgaatattacaaaaacgacattgaggccgcggcaaaagcgggcttcagggtctga

SEQ ID NO: 153058 - DNA, 237 bp, Enterobacter cloacae
atggataagaagttagaagctctgttcgaaaagattgcgcgtctggagctggcagccaaacgagggttgcagatcaacgaagagattaagcctcatttaacacaaggccaagttatctccgtcgaatactgcaacggaacgctgaaaagttgcgctctatttcgcaaatggatcaacgagtatttcggatcatctgaatcgactgctgctcagacatgccgtgattctgaacaatga

SEQ ID NO: 153059 - DNA, 273 bp, Enterobacter cloacae
atgaaaatagaagtaacaaccattgaaatgggtctggcaatcgtaaataaagaaattgcgacatttaatattaatggtgcaatttcgggcgtggttcatttgccagcttctggccctgtaaccgttgtgcttgatggcggctatgtgctcggcgaattttattgccccggttgcgctgttaagaacattagcttgctatctatggatttcactgcagcacagaacgcatgcggcatgtcctattacgaccacaagcgccagtatctgaactga

SEQ ID NO: 153060 - DNA, 1902 bp, Enterobacter cloacae
atgtctgttgagttaaaagtgtttggcggagcttatttcccaaaagataaagcattaaaaaaacatccgaatttaaaatctctcgccactgctgttaatgcttctacaaaagctatcgcagaagccgttattttcggtaagctggcggccgaacagcctgaacatatcgatgattactttaaggtcaaaatctgggagcaccgcgaagaacttccctgccctgaccttgatgttttctcacctgagtttttcgacagcgtggcagtatggaatgtgaatgccggtgaaccagctgcggcaccacagccagaaagtgatgaaaaagcaaactgggaggataacaaggcacaggaagaaattaaaactgttgcgcggctcgaccaggcatcccgagctgcttgcctggcactgttcggcccggtccctggcatcactacggcccaatacggccagatcgtcgatctgctgaatgatgatgaatcgagttatgcccgcgaactggcagaagctctggggaaagaaacccgcgcgctggccttggaaccaggacggcaggagcagttactcgcgtggctacgtgagaacacaaaagagtctgctcaatggccggacattaaaaagcagatcaccaaatggattgacaccccttcagacaagcgaccgcaggcggccacctccaccgaagaaaatcgcacagacaccggctctaccttaggaggcggcaacaaaacagaccgcagcccggacctggtacataacctgtccaccctccggattgaagtggctgtagccattctgagcatgtatgacgagatcgacatttactggatcccgaataaattcatgctcgcagccaaagccatggccgaagcagaacaggacacccgctttactgcgtggtggaaaaaactgcgctctacccctgggattctggactattcccgcgcggccatcatcgccctgattaaatccgcaccggaaggcctctggaccgatcctgttgcattgcgtgagtacatcaatcgcgagctggttgaatctgatcatgcacatcctgaccagaaaacgattgatatggcctgtcgccctaaagctcggtccaatttggagacaaaagaagatgatgaaaccaaaccgactgtaccgggcgaaacagagttaccagcagtttgccctggcaaagctgcgcaactcgacaaagaactcaacgatgcattcgctcataacccagcaccagaagagcaagccagtgatcaaccgcgggtggagaacctgggcggcggagtcttctctgtcgatgcgttgttaaatacccctccctcaaatgagggtgaaaaacaggaagtgccaccagcattaaatgatcgcgagattgaaatcgcccatgcactaaacgcgctggtgtccgggtgcacaaatatcgttgataaagacgatatcgaatatctcatcaccaccacgggtaaagacattgtgcatcttttcccgctactgattgcagacatcacaacaactgaattttgtctgtcacccgatttcagtgatgaagaagtgcaggacgttgccactacgattctcgaaaagtggtctgacgatatcagcgttcgtcagaaagtagcccttgattcgatcgtagagtaccgccgtcctgaaccaccaaaatctgtcgtgctcgatccgcccgccgttactgcaaagccgaaaaacgagcccgaaccagcacctggaaaaaacgctccgctttcgtctgtcacctacctacaacaactgaccattgctgcgctgcagggcttatgttccaacccggcatattgcaatcagtacgaggaattaccggctatggccaccgggcttgcgcgcagcgttatcaaccatcaggaaggctccggtgcgtctgattaa

SEQ ID NO: 153061 - DNA, 459 bp, Enterobacter cloacae
gtgaatatcagtaatcagccagttcgcgtcagcgccaccgctggcgggttcccgctggctgaaattggcgtcagtgcttcccagcttgctggtcagcgcggcagggtcggaggtcagcttctggattgcctggctgtcctgttcgcgggcgcggctcaggtcgttaaagctgtccagcaaatcggcatgggactgagcgacgtcctccacggcgtcacgcacctagctgaactgttcaccgtcagatttacggcctttgccgataatccccatgacgcgcccgaaccactgcttaccctcatcgctgcgctgctcagccagttcgataatttcagcctcaatggcatcggtgaacagcggggcttcaccctgctgattattgaaggacataacctgctgacgctgctgcgcggcaaacttcaggcgctcagtgcccaggtgacctgcccccagtattag

SEQ ID NO: 153062 - DNA, 195 bp, Enterobacter cloacae
atgaccgtacgtaaacttccttctggcaaatggccgttgcaatgcttcccgtacggacgtggtgggaaacgcatacgtaagcaatttgctaccaaaggcgaggcgctctcctatgagcgccgtttaatgaataacgcttcaaaccagcctgtaaatgacagtgctgtaactctttcggcatttgttgagcgctga

SEQ ID NO: 153063 - DNA, 1422 bp, Enterobacter cloacae
atgctttcatgtaaagaaattataaaaagtagtaatattgcgtttggaacaagtggagcgcgcggtttggtaagtgattttaatcacaatgtatgcgcagcatttgcacatgctttcataaatgaagtgagtaagagtcatttcttcaacactgttgctttagctattgataatcgtcctagcagttacgaaattgcacaagcatgtgctgatgctattatgcaacatggatttaatgttgaatttcatggagtgattccaactcctgccttagcttatcattctatgcagaaaaaaataccttgcatcatggtcacgggtagccacattccttttgatcgcaatggactaaaattttatcgtccagatggtgaaatctccaagaatgatgaacgagctattgtggatagtgattatcatttttcaccagttgaaaatcttcctgagctgtgtgtcatgcctgatggtgcaaacgcatatattgcacgttacgttgatttgtttagtagtgattctcttagtggtaaaactattggcatctatgaacattcgagtgcggggcgtgatttatataaaaaattgtttgaaaagctaggtgctgaagttgtttcactggggcgtagtgaggacttcatcccgattgatacagaagctgtaagtgcagaggatcgagttcttgcgttgaaatggtccgaaaaatataagttagacgcaattttttcaactgatggggatggtgatcgtccactgttggctgatgaaaaaggtaactggctacgcggtgatcttcttggtctactaacatctctcgagctaaatattgatgccttagccattccggtaagttgcaatactgctgtcgaattaacccagcgtttcaaatccgtagcaagaactaaaattggttccccttacgtaatagctgcttttgacgatctgttagtctctcataagagcgttgcgggtttcgaagcgaacggaggttatctgctagcgagcgatttgatcattaatggtaccacgctctcaaaattaccaacccgcgacgccgttttgccagctttaatgcttctcatcgcctctggtaaggccaatatttcatctctcgtcgacaaactccctcaacgttatacgtggtcagaccgtgttaaaaatttctcatctgaaaagagtcaacaaatcattgcttacgcacttgcatctccagatgaatttttagttcaactcggattcgcgcagcgaaaatgtattgatatagatcaaacggatggagtgcgctttactcttgataatggcgatatttttcatcttcgtccatcagggaatgcacctgaactccgttgctacattgaggcggcagatgagaaacaagcagaagcatatgttgaaatgatactgggtcgaatcatctacttacattga

SEQ ID NO: 153064 - DNA, 807 bp, Enterobacter cloacae
atgttcagagcttccatttttcttgatgaactaaagcgttatgctccagagatttatgattgttgcgaattgtctgttaaaaattctattcgcgacctggattttatcagaatagatcatcagagttttgaaaactgcatttctgaatctgttgattatgcaattatggaaaaaactgataaggcagttgtggtgcccttaaaggcacactggaacgatgtaggttcctgggctgcattgtgggaattatcagagaaagattcttctggtaacttcattagcggagatattattacccatgattgtactggaaactatatacggtctgattcttctttaattgcaactgttggtgtaaatgaccatattattgtaaacactaaagatgctcttttgatcgctcataaggatcacgttcaggatattaaggctattaccacatctttacaaaaaaataatagacttgagctttcatattttaaaaatgaatttagatcttggggggagattgagcggattgatacgcatgataaatatctcgtcaatcgaataactataaaacctggctccaaaatatctaatcaactgcattatcatagaaatgaacattggattgttgtatcaggtacagcaaaaataaaaatagatgacgaatacttttatcttactgaaaatgaatcaacttttataaaagttggacaacaacattccataatgaatccggggattttacctttaataattattgaggttcaggttggggatgtaatatccgaagaagatattcttagaatggaagataaataa

SEQ ID NO: 153065 - DNA, 411 bp, Enterobacter cloacae
atggctgatgttgaggaattgaaagtgaagtatccaggtgcaaatgcctggcaaatgggtgatagcccggaactggccagtgagcttgcggatctgattaaaaaagggatcaaaacagcctcttgtggatcttttacctcttatcagcaggaagagcctgcgccgaaaattgggagctataacattatccttgatggccagagcatcccggtctgcgtaatcaggctggtttcaatgcgactggttcgtttttgtgatgttactgaggagtttgcccgcaaagaaggtgaaggcgatttaagccttgaatactggcagaaggaacatcagcgttttttcacccgcgaagggtatttctctgaagaaatggagctaattacagaagaatttgaagtggttgaactactgtaa

SEQ ID NO: 153066 - DNA, 879 bp, Enterobacter cloacae
atggaaattaatctgaaacttgtttatcaacttatatcagcccagtttcctcagtggtctaaccttattattcgccctgtggagatgagtggttgggataaccggactttccatttaggggatgatatgctcgtgcgcttaccaagcgcgtcaaattatgccgatcaagtagagaaagagcaggagtggttgccaaaactcgccccatttttgccaaataaaattcccgtccctttaggtatgggaacaccagacgagaattatccctggaaatggtctgtttaccgctggattgaaggggaaactgttgcgtcatcccctgaggtcgatctctgtattctcgcaaaagatttggctaattttcttgttgcacttcagtctgtcgatcccaaaggcggacctattgcagggcctcaaaatttttatcgtggcggttctgttactgtatacgattcagaaaccaggcatgctataagagtattaaacgataaaatcaattcgagcctggtgacagaaatatgggaagctggctgcgttaaaacctggtcagaagagccagtgtgggttcatggtgatataagtgcaggtaacctgttaattaataataatagactgaatgcggttattgattttggtcaactatgcatcggtgatcctgcatgcgatctcgttattgcctggacattattcgatgctgaaagccgacgggaattccatgatactcttcagcctgacccatacacatgggcgcgagcacgttcttgggccttatggaaagcattaatcgtgatgctgaattctgcacagactaatgtcgttgaagctaaacaggcacataaaacatttgaaaatattctttctgaatatggccttgcttaa

SEQ ID NO: 153067 - DNA, 396 bp, Enterobacter cloacae
ttgagaaccaataaaaaatgcctggcctacgtatcaattgtcgttgatgattatgacaatgcaatcgattactatactaacaagcttagttttaccctcattgaggatgttgttcaaccggggaaacgctgggtagtcgtatctcctaacccaaatagtgactgtaatttgttactgtcaaaagccgctaacgaaaatcaggaaaagttcattggtaatcagtgtggtggacgtgtctttctgtttttgcaaactgatgatttttggcgtgattacaatgctatgaaactggcaggtgttaagttttgtgaatctccaagggaagaggagtacgggactgttgttgtctttgaagatatttacggcaatcgatgggatcttttacagaatgcttaa

SEQ ID NO: 153068 - DNA, 423 bp, Enterobacter cloacae
atgagttatgtttattgtcccattacccgggctttttataacgatactcttgaggcagactatcgttccgccggcacctggccagatgattatgtaaaagtgatcgatgaagattatgattcgcttatggccgggcaaaccgagggaaaagtgattgtctcagataagaacggctatcccgtgcttgcggaaccgccagcacccacgcatgaagatcgtgttgctctggcgaattctcaaaaaatatccttaatgcaagcggcaaatgacattatcactccgcttgaggatgcctccgagctaggcattgctaccgaggaagaagctgccgcgttgttacgctggaagcggtaccgggtaatgctaaatcgggttgatgttaccaccgccccggatattgaatggccagaacgccctgcctga

SEQ ID NO: 153069 - DNA, 222 bp, Enterobacter cloacae
gtgaggggggacagggcgctacaatatttaccgttcctcagttgttcggtttacccgaacaactaccatgaagggttagctggtttctttattctcaatgtctgttggggatttttgcttttcatgcactatctgctgaccagcctcctgaaccaacttccgggccatttccttgatacgctctcgactttcacaggttcgagagtttattacttcatttaa

SEQ ID NO: 153070 - DNA, 1800 bp, Enterobacter cloacae
atgaacgatattcaaaaggaacatctttcgccttttttctctgttttagttggttttaataaatcaaactacacgcctaaatttatacatgaatctataatgcaaattatagatactaaaatttataatgaaggagatatattaaaatatccattatcaactgaactaattaaggattccacactatttatttctccttactctataaaaaaaatcccaagctggaccagcagaaatgatattcatgatacagaaaatcatgttgctttgacttttaaccttggtagttatgtggcattttatttttcagaaaaaggaatgaaagactcgataagggagtattttaaaagcacatcactgccatacttacatcctgttgaaatatctaaattaaatcacttatttattaatgaagataatatcaagatgttatggttgttaggtatacatggaaagaatacttttaaggctgattcaaaagtattgggcggcaatagtgtagcagaatctttagatcctttagaggatcaatcttacatgatgtctgctgtgcgaaccgaaattggtatcaataataaaacaatagggctaaatccctttaagtcatctatttggaaaggtccatgtaaagattgggaaacttttgaaaaaaatgttatcgaaatattggacatgctaaactctaacgaccaaaacaacctttcgccaataggcattttagctagcccaataaatgagttaacaggcgtaaaagatgcttatgatttttccgtgcttgatcccgatttcgttccttacgaaatgagcattacaaaatctgaattactaagaaagatttccaagaaatataagactgaaatctcgcctaacataaactcatccttttcactgaaagttttttatgaaaatgttcattgcggcgatattagcgtaaagttaataataaaagaatatgaagtttcttttgagattagtagcctccatccaattccacaaaaaaaagatatactcaataattacgctaagattcttaaataccctgaattaattaagtgttggtatgagtccggtcatgcgatagtaaatacatggatttttaaaaccgattataaagatgttgaatataataggttcatttgggctgacttcgagaaatttgatatctgtaaagagaaacctttagtgtcagaaaaactcgatttaagcatgataggaatgcaggattctcttttttgctgggtaaggaatagatggaatagtcgttggaatacttacgaaaatttcaatactactgaaaaacctacaggttggttatattgcgacgatggcgcgggagaaaaagcagattttattcatatcgatgagtatcttgggacgactatagtatctctgattcatataaaagcagccaatagtattagcagtagtagaagaatatctgttggtgctcatgatattgttttgagtcaagcagtaaaaaaccttagatactcaaatcgtaaaaacctcattcaggatctaactgaaagggctgctaattctaaaaataaaatgtgttggcatgaaaataaattaatacaatcttctgattttttaaataaacttacaactttaaacgccaaccctaataaaataaaaacccgtgtgatagttatacagccccatacaactaagagctattatttgaaatcacataataataatatcaaaagacaattagacgtactgttagttagttccgacaatgcaataaaatcttcaggcgcagactttcacattataggttttaatgatgattga

SEQ ID NO: 153071 - DNA, 558 bp, Enterobacter cloacae
atgcgcaggctgatgcgatatgacctgcactggcgagaagacgatcctcaggggtcactaggcgtgataatgaccaggcgaagcactaaccaagccggagatcagcaccggccatccaatcccaaagcatttctcccgcataatcgggtaagggatgcaattggctctgatatcactgcaaagcctgccaattcctttaatgtgagcgccttgaacactacgatatcactcaacagggaaacggggtacgacactcaaaatactggtcgtctgcatatcgtatcgcgtggctggcatgttatagctttcaatataatcagtaatagttcatattcatcgccactgctcacaatcgcaggtatgagcttcctcagctatgagtctcagattttatggcatgttaataagtttgtaaggaagctttcacaaaatcctgttaataacgttgtgccgaggttcgtaggtgaggagtatctggacaccaagtctggtcagtttgagtggtataaagcaactggtactacaggtgcatcatggaagaaaattacaaatgcctag

SEQ ID NO: 153072 - DNA, 990 bp, Enterobacter cloacae
atgaatagaaatgcaggggtagacgttctcagagtagtaagttgcttaatggtggtttgtatacatacatgcctgaattactcatatgggcaagaaactcttaacaactacctcgccttatttggtcaatcgctattcaggataggattgccagtatttttcattcttagcggtttttttatacttaactcaaaagttgatttttcagcaaaatctcttttcacaaaaataaaaagagtcactataccattcattgtttatagccttatccactggtttgtaattaacaagggcatgactataagtttttctgggttgaaggaatattttaatgcgctgataataagaaactctatatcaatacatttttggtttgtttattctcttattggaatatatatactttctcagccgattaactacttattaaaagacctttcagttagtggttcattttttggattatgcataattgcattcctgatcttttataacggcgatttgccatctgtaagcaatgttttacctgtaccaagcatagacaagtggacagcatactttgtagcgggaggcttaattgcaaggataaaggacaaagtgaaatcaagtcagtctttattgttaataataatcgggtactctctcattgtttatctttctgtatacaatggtgaaaaacacctcccaatgccatacgactttagtataagtatgttcgccgcttgttgtggagtcgtcattcttttttcgaaattaaatattaataacaacagaattctaagtaaagtttcagcatcaacatacggagcttatctgatacatatttgtgttttaaagttattatctcctttttatttcgcgcactttcataaaccaggtgttataaactactttttgacgacctgcattttatctttttttgtctttgtggtttcgatgatggtatccataataatattacctatttttaatattcgatatctaaaataa

SEQ ID NO: 153073 - DNA, 1302 bp, Enterobacter cloacae
atgaggtacaaaactctgccatacacgtttcaacgaaacggtaattactatctacaaatccggctttcaaatggcaggatgtttaaaaaatcccttcttaccgatagttatcgcgaagcctctgctttgatggttcgcatcactccacatgttccttttgttaaatcattagcaactccgatctctatgcttgatgagtttgtgtcaaacctgattttgtcagaacgtagggctgtgaaagttccattgttacccagcctaccgattgttgttcccgctgaaatcgaggggccatcggcacaagtcgagccggaaaatgtgttaactctctctgatgcttgggttatgtacaaagccgaaaaggggcgtaattggactaaatcgatctcaatggcaaatgaacgttacattgaagtattgtttgtagtgttggggaaaaatacggatgtaacagcgatcactaaacaggacattagacaggtgatggaagttgttgagaatttacctaagcgtgttattcagccgtatcgctcgatgaatgttcagcagttgatagattgtgatgacgtgccacctgatgagcttgtgggcgtcgaggctatccataagcatctgaagctctacaaatccttgttcaaaacttttctcaccgatagcaaagatattttacctaagtcgccaactgatggcgtagtggccgcaccatcaaaagccaggttcggtgcatacagttcagcggagatgaagaagattgtagagtgggcacttaagcagccggatggctggctgaaatggattacattgttgttggcatacacaggtgccaggagagcagaaattgccaaactggaaaaatcacaaatcaaatatgatgaggatagccagcggtattacttcctgcttgcagaaggagggcaggggaaaaccgaaaacgccacccggcaagtggtaatacaccctaagcttatcgaatcggggtttatggattatgttgatcggcaatggaaagagcgggttttttcagaagttgcgggtacgaacatgactaaaattggcaaagaatttgctaatatgcgtgatcagcttggaattccatacttagatgattttggacagcgtagacttgtgcatagcattcgtcattctgtttgctctacagcgatggctggatgggttaagaacatcttgcatctgcaacaaacggtaggccatgagaaaagcggtgggattacaaaacgctatttgcacacgtttcctctttcctacataagttatgtgattgatggaatctgttgggcttaa

SEQ ID NO: 153074 - DNA, 234 bp, Enterobacter cloacae
atgggcggattttgttgtgccgcagcagtgcccattttaggcggaggcgtgatcaacattccgctggacgtgttacccgagctgctggatcctcccacggaactgacgggcgcaggtgcattattagaacttgtacagcctgccagccagagcgaaaccagtgataatgccgcaacacggctgatggtgaatttagggcttcccgcgctcatttatcccccaggaatgtgttaa

SEQ ID NO: 153075 - DNA, 339 bp, Enterobacter cloacae
atgaaaaaaaacaatctgattttagataaggttcatcatatagaaggaatactgaatatttatgatgaactttcaaacttagactttaccaaagcaatatttgagcaagtcactaagctagacgaggatcttttacaaataactttcaacaatggaaatattcttgatattggatggacccctgcatttgaggaagaaggaaaatttataatacaagttatctcaaatgaggattgggagatgccaatatatacatcatttgcaagttgggacgagaaagagttaagtgataaaatcgacgaagctttgaaaaattgttcctataaaaacccaatatga

SEQ ID NO: 153076 - DNA, 459 bp, Enterobacter cloacae
atgatttctcctttaaacagaattcctctgaaggcggctataagccttcattcaaaccgttgttccaatgcctcatcttccaatcgctcacgttctttttccttttcaatccagttagtcagtttttcatacacagctctagccgacttagaaatgtctgcacgctcgtgcgtgaccaaccggcctatcgcttcaaccctgggttgcatcacgttcgcacgactaccggaccatgatgaaggtgctacttgttcggcaaagatctcaaggacggctcttggctcgggtgaggcttctagaaatctcagtgcatcatcctgcaagcaaagaggactttgctcaccgtcttttgaccatagattaatacctgaagcgactgaagcccaaacctgcggatctttattggtaccgcaccattcaatcaaaagatctatattgattttcgcaataggagactga

SEQ ID NO: 153077 - DNA, 264 bp, Enterobacter cloacae
atgaagaagcgtttttccgacgaacagatcatctgtattctccgtgaggctgaagccggtgtttctgcccgggaactcttccgtaagcacgctatttcagacgccactttctacacctggcgcaagaagtttggtggcatggaagttcctgaggtaaagcggcctaagtcgcttgaagaggagaacgcccgactcaagaagttacttgccgaagctatgctagataaggaggcgcttgaggtggctcttgggcgaaagtactga

SEQ ID NO: 153078 - DNA, 1032 bp, Enterobacter cloacae
atgcgtattgataaaatagattttttaagatttctcgggctttctttaatcattttagcccatgtccagcctcctttatggctagctcaactgcgaaactttgatgttcctttaatgtttatggttatggggatgtccttttatgtaaccgaacatcgccatagcagcaaaataaaatatataatttctcgatttcgccgtttagttttaccaacctggattttctttttctttttctttgcaataaacgagtgtattgccttgatatttgccattaaaaatttcacttatcctcaagggcatataataacctcatttactttatctagtggattggggtttgtttgggtgataagactattctttataatttcgtcaattgctatattcttaccaaagagattgcttaacgcaaagttatcttttttacttattgttttcactgccgctgtagtcattaatagtcaattcaaagagttttataaaattcttgatgaaatgaataaaatgctcctcatcggctcttatgtttcaaacatcataccgtatttgctatgttttttaattggttataaaataatgtgcttgagtaaagaacaaaccttacaattaataattcttacaggatcagtatttattgcattggcactacattattatttagtcacaaattcttttactcccactcaattcgataaatacccagctggcatttactatttatactatgccttttttatgtgctcacttatatattttcattctgacattattacgatgcacttacaaaatacctttacgtggaagtatatcaagttcatttcggaaaactccatatggatttacttatggcacataccattcattttaatgtgccataaatttagcctaaacttcgtgattggtttctttacaacttacacaatggcgttgttttttgtatacttacaatcaagtcttgtaggcttaataaccaagcgcattaaaaataagcacacatctaaagtaatcactagtatttttacgggatga

SEQ ID NO: 153079 - DNA, 1239 bp, Enterobacter cloacae
atgtatttttcaggatattatattcttctttctgcaattataatatatgcatttttaaaatgttatatctattattctgatataccactcgccactaaaaatatcatctccgatataatatattatatattaatttattattctttaatggtattttgcgaactatacaaagctcatatagtcgctagtgaaaagcaaaaactaatgcccctaccaatggtttttgccaatgctatatttattttatctatgtatttggtttctggaaataaaaataattcagcactcgtgttatgcttcgttttctcagcagtaattcaatatcttttatatgtatgtctaacattcatatgcactaagaaaaatcaagttaaagaaaaggaagaacagaatacaatatttttaactagagcagaaagtagaaaactgtttgttaaaaacatcatcccggtagcttttaattcagccctgacacaatcatcgaaaataacagataaaataatcgcatcaggattacttataggtagtttgtcttcattatactttgctcaacagctctatgcgctttatataaatattattgtcgtgagtgtattgacttttgcttatcctaaaatttgtagtaaaagcaggaatgaagttgaaatggcaaattatgttaatgatgtgattctacttttaattgctttattaacattaccagttgtaatgggatggtattattcgaatacaatatttacactattattaaagaatacaagtcctgaaaaaatagcactggcatcagaaatgtttaactggctaagtattgctgtttattttgaggctgtcagcgcaactatgaaaagagcattttgggcagtcgataaaatgaaagtgactgtttacaatagcgctttttcagtattgctaaatgttttcttgagcattgtgttatcaaggtttttcggagtttctggattgatcgtctcgtattgcatatcaaattttgctgcgtctcttttattatcaaagttatactacaaaaaatttggtttgagctttgagactagaaaaataaagatattaattttcattgtattaactgcgtttttactgttctttattcttaattgtttttcattgaatgttaatgaacccaaagggtttataattcctattatcataagttttcttgggtttgggttctattcaacaattattttcaaaaataaccttcttaaggtacttacagcatga

SEQ ID NO: 153080 - DNA, 276 bp, Enterobacter cloacae
atgaagataaacggaatacgtaccaatagaaagacgctgaataaatcagttcgtaaaaaaagaattgcatcaggaatatcactaacttttgatcaatatgaaaacattctatgtagcgatatgacctcagcacgaatatgtaacatattaaaagtgcgattacctaaaggatacatagagaagctaaggaataacaaacttacgaaatacaaaaactggtatcaaaaagtaaaatttaagcatttacacaacaccccagttaaacaaataatctaa

SEQ ID NO: 153081 - DNA, 486 bp, Enterobacter cloacae
atgtatggctttcagcaacagataagatttaacagtgctcatgattttaataatccgtgcggtatgcggtggtttaatgacagggttttagaaaaatttatctctttttcaagagttgtcaaggagaaaaatatttcttttcataatgttagctttgagaagttaatcgaaaagcctatgtcgaactgttttttttatatggatcctccatatagatttactgttgggagctataatgatggtaagagaggttttaaaggctgggatttatctatagaatcaagtttaattgaattttgcgatctcctagataagaaaaattgcaatttcatgttgtcctatgttctcgagcacggggagcattttaacaaagaaatttataatgaaataaccagtaaaggttactcggtagttgaacttccaatgattcctggaaaaaaaagaaaagaggttatcatatacaattatgaaaactccgatatttga

SEQ ID NO: 153082 - DNA, 1074 bp, Enterobacter cloacae
ttgactggagagacagattttgaaataaattttatttctgaacgttacaataaaggcaggttggcgaaattatattataaagattatgttcactatataactatatcacctattacagctgatggtagaaattcatcttttcaaagcgtaccgactgctttaggtgaatttatacgagataaaaatccgaataaaactataagttattttataatcgaatcggaaaaaggtattaatactaagtatcatcagtttatgtacaggttaatggctacgtgcaaattccattttataaatggagatgaaattggtatacatccaacagcatttaactctgtacaagatttaatccttgctaaagaagccattaggtctaaaaataagtctaataactcatcatttgtaactatagatgagcataatgttactcaagtttttgccaaaacctatggtgcaaataaaaaggaatctgttcttttatgtttagctatagcctatattacttcatcccctctagagctcattcaaatttcggaaggtaaccttaaaactttaccacgcaaagacttggaaataatttctagtattacgaaaataaaaacaataataaataacaatgccttagagaaagaagagtttacgaaaaatgatagtttgcgttctaaggtatatatatataatttattagataaatttggccctaagaaatgtgctatgtgtgattgtgatattccgcaaattatacagggtgcccatatttggcctgtttctgaaataaaaaaatcagaccttagtgatgaggataaaatatatcatgcaacacacgttgataatgggttatggttgtgcgaaaatcatcatagattatttgatagcaatattttaataattaatgataaaggttgggtcctccggaataaaacatgtgaagaaaatcacataaaatatttaagcaaaacaacattgcttagagaaatgaatggtgagtatcttaatgatggttttctaaagtatcttgcagaaaggaatagtctgttaaattttaatgattatttgaagatagaaaccgcatga

SEQ ID NO: 153083 - DNA, 1161 bp, Enterobacter cloacae
atgaacattttaattatagaagataatgtacttaaacgctcggagatcgagcaggttattaatgaagaattacataacaataacaataatccaacgtacagctatgctgacaatctggtcttcgctaggaggcaacttcagacacaagtctatgatttaataattttcgatatgtacttgccgttagcaaacaatcattttgatgaagtggattgttctgaggagcttatttctgagttctctgtaagtaaaaattatcaagcggaagctattgcattaactcaatttgaaattagcgaaattgaaaactttcagtcctttaatagcgctggcattacagttgtgcattttaatgaaaataaaaattgggtggcggcgcttcgccaaaaaataacgcgtgcatcacaaaaaataaagtctgactttttgattttttgtgctttaactaaagaaaggaatgcctattctgaggcgggatgtattttaggtaaacaaaagaacatctcagggatgaattgtcttgaaattactatagatggtaagcatggcttcattataaaaccccacaatatgggattagttaatatggccattattgcatctaaagccatcgaattatttcagcccaagatagtatcaatgagcggtatatgcgctggggtaaaaggagaaactaattatttagacatcattgttggtaaaacgtgctgggagtatcaaaccggaaaatggaaagacggttcatttaaacaagagccttattactccaccctatcccgcagtcttgaaactgatttggagcaatcttcagaggatccagatattctcgaaagcattagaaagggaatatataaagatgaattatcaactatgcgtattcttttagcacccatttcttcgggctctgctgtaatcgcggatgctgaaatgatggaggcgattggcatgcaacacagaaaaatggcagcgcttgagatggagatgtattcactgtatgaagccgcggcgcaatccctgtgtcaaccactttgctttggagcaaaagcagttgttgatctgggcgatagtaataaaggtgatggtttccatgaacctgcatgtaaaattacagcacgatatgtaactctaatgatagagcgtcagtttaaaaaacaggcatag

SEQ ID NO: 153084 - DNA, 453 bp, Enterobacter cloacae
atgatcttgatagttgaagatgatgagcataaatcgtcacaaatattagagatttgtgatcaagtacatattgctaaagatcggcttaaaacggttgataacgttcgtgatgctgttaggtttttaatcgactcgatacctgaactgattgtgctggatatgtctctacctagtcacaaagctttgccaggccaaggtacccctgttcctatgcctactggtggtatcgaaatcctgtttgaacttaaaaaaagaaaattgacggatttaccggtattaattcttacacagtatcatgagattgagattgaaggtgaatcaattcctgttaataaatctgcagatgctttaaaagacacttatggatttacggctgtgcaagcatgttattatgaacatttccatggtgctacatggatgattgtaactaaaaggtttttggaaaaaaaatga

SEQ ID NO: 153085 - DNA, 2952 bp, Enterobacter cloacae
atgtcaaaaggtatagatgtctcatttctacaggcactaatttcaagaagtaaaagcgcacaatacgcacatattaaggatattgaatccaaacaggcaagaaattatctgcgtggtgttgattcaacaaattataataaagtaaataaagcgttaaaaaaaataaaattgaactgttcctattcggactttaagcgtgcagtagacttcgtaagaactagccctgactatgaagaaaataatacaggccaattatttaacagaaccgtacctaaaggtattattgatagcgcagattttacgtttggagaaattctaaggaaagtagatgcttattcaaatgagttatgtactcttttagaatgttgcatacagatctataaatgtttaagtataaacgatcttaatgccgccttagacgcatgtgatgaacttgttgaaaataaaggggcttcaatttttttagtcagaatgatctcattcattactaatagatatcaaatgtttaacatggacgataaagtcatcttaagcaaaattgacgccctcaaaagtcgtattctaatttcaaataacccatcattagaaggcgcagtaatccaattgagtaatcttagaacttctcacttggctatttgtaaaagaattaacgagttaaaagattcatcttataaaagtattattgcaaagtctttcataaatcctgtacctaaaaataatgatgattttgttaaaacccttaatgcttattactcagtttctttactcgacgcattcctttattatcaactgattgttaacctagatttgccgtatgttaaaaaaactcatgtaaacagagatttaaagttaatacataaagagttttctgcaattgaattctcgcccaatataatatataacggattggatgaagatactggatattattatcttagggagtgttttttgttcgttgaacaatttaaagctcttaagtttttaattgtacatgggcattactacggtgacttcggaataaatagaacattgcctgaatattcatttgatttaataaatagatattttaaagggttagataacttaacgcagcttagatgtacaaaaatggaaaatgttcaaattaattgggagcattatgaccaagaaacttgcggtatgttggaaaactcatcagctttacttcatttacttactaagaaacaaggtcatcttgaagaagaggaacaacttctttttgttaagttaatgacttattctagagatgttggggaggcttgccctcctgactatctggaaaccattgcaaatgatgcaaaacactttgtgctaaaattagttgtccaatgtttaattacaattaataagaaatctcattatactgaatatgagttgcgttcaaccattcaagaatattgcttgtcagactttgatggcgatttaattaagttgcttgattatctttataatgtatctccagctgtgaccgagcatcttatattgacatgtaatgaaacgtttttaagtacattatttattttgatggacaggcctgttgatgcacttcaagctcgagcagatatgttgcattggttcggtgatattacaggtgaagaacgttacttagaccgtgctaaaacattgcgtattgatattgctattaataaagaacgaggaaccattgatgactcaaggatttatgtcgatccactaaagttttcacagtggtttgaagataatatggtcagtaaattgacaatgtctttagataatctattaattagtaacacatctactatgaaattggattggagtaataaaaatctaggtgctagcataggggacgatgtaattgaaaatcttctaacttgctataatgagttttgcgaaaacagagtttttggaattgcttcatatcttggtaggcgaattcgccatggtacttttaaaggcacggcaatgacagagttatatgatattcctaagaaagaggaatatcgtgctctttttgaggataaggaattcaagcgtaagtttgacgagtggatgtctcgctatgaggcaatgatcgaggatttagttaaaacttcgctacaaattaaaagcaaaaagaaacctttcgggttaataacaactgaaatagattctcaattaaaaattacaattgcaaaacaacttgttgtcaatatattggcaatttactctaaacgtagtggtgtgttgcgtttaccaagtttgattatcgattatctttggcgcctcgctgaaaccgatctgcataaaacaaagaaactattaagtgagaaaaagtccaccttcggtgtttttagttttaacgctaaacatcatagtgccagtatgaaaaaaaccatttcaaagtttacgcaagaaataaactcattaacagggcagaagtttggcttgatgtcttcatggttcaataaacctaattatgcttcaccaagcactgatatatacttactattcaatacagtcgtttccgaagtaaaagacagggtaagtcattttaaaccctatgttgatttaggggaaagtagtttttccataaatggcggcacctattacgttatttatgattcattatatgtattaattcataatgctgctatacatggtaaacctaatggacaaatacattttgatgtctccccatgcgctgataggaatgctttaaaaatcagattaaacacagaagtttcgagtatttacgaacttatgaaagccaaggaaaggattttatctttcttgcacgaaaatgatgatgatgctcacgttgttgaggggaatagtggtataaaaaaattgaagaagttagaacgtgaaggtagtataagtaatattcatttctctacaaataactctgatttaacgttatgttttgaatatctttttgagctcaatagcagaggtgactatgatcttgatagttga

SEQ ID NO: 153086 - DNA, 2805 bp, Enterobacter cloacae
gtgaagcgattcccgaatggctcagactggcgtaaatgggatctgcacgtgcatacccctcagtcatcacttgaaaatcagtatgggaatgactgggatgcttatctttctgcaattgaagcatttagtgacgagatcgctgtcatgggcgcgaccgattactgcaccattaccgggtatgagaggctgctctcatatcgtgcgcagggacggatagccaatattgaggccgtttttcctaatatagaatttcgcatcacgccagagacgcagaaagataaaggtgtgaatattcatctaattattaatccggaagatgttggtcacgttgacaaaataaaacatgccttgggccggctgttttttcgttacgacgggcagaattactcctgcagcgatcagcaattaactgagttggggattgcggtggcagggctgtcctctcccgaaagaaatctgcgcgacggcattaatcagttcaagccctcttttgacgcctttgaggactggattaggggtgaaacctggctgcgggacaatgctatcatcatcgcatctaacagctcaggggatggaatctctgggctacgtgacaacggtcttcttgctatccggcagaatatctaccgtctggtggatgcgattttttcaggtaacccacaggattgtgagtattttcagggccgtggcagcgacagcagggctgaggtcatccgtaaatacggcaagctactcccctgttttcacggctcggatgcacatgggctgacaaaaatcttccgtcccgaccaagaccgtttttgctggattaaagccgatcctacttttgcgggattaaaacaggtgctttacgatcacacacgtgtcaggatccagaaaacgtccccccatacaaaaacaccctatcagtatattaaacacgtccgctttactgaccgcagcggccaagcacttttttcagaccagcccgtccatttcagtcccgacctgaatgcgatcatcggcgggaagtcttcaggaaaatctctgctgctttaccacatggcgtgtgctatcaacgccagtgaggtaagcgagaaaatgaaaatttcaggacaggcagtctatggcgaccttaatagtctcgatgttgatgtcacgtggggaaacggggaagtaagttcactgcatgatgacgagacccggcctgtaacctatattccgcagttgtatattaatcatcttgccgaacgcagcgggcagatccagcttaatcaactagtcgaggagatcctgcaccagaataatactttcaaagttttcgccgtgggaaatgccgcgcaaagggaagcgtcgatacgggccataaaaaccagaattgattatcttaacgagttgcgcaaaaaatatagcgaatgcggtaaggaaatggagaaatatggcacggaaaaggctgtaagcgatgaaatccatcggcaggaagagaggatagcccagctaaggaagcaggcatcgtttacaccggaagaagaaaaacagtatttagcgctgagacagcgcacagacacccttcactcccgtcggcgcgcaatagatgatcttaccggtgcaagtagcagcctgaaagaaagccttaagcgatatgccggtagctcgatacaaagccttaccgatcaactcaggctggactctccgctgcctgataattcctcctttctggagaaaagcctccgtcaattggaggccagcctggcagcagccgtcagtgacttcatttgtctccacgaggcccgttttgacagcatccctgccaagctgaggcggatagacaccgaaaatgcggccaaacaggaaacgctgcttcctttgtcggtaaaaattaccgatcaggaaacgctcaaagcggccacagctgcgctggagaaggaaaacgaaaagcttagacagctacagcaattgtctgaacgacggaagtccattttacaggaaggcaatgacactaaaagtcagctccagacagaatatgcgcgcctgactagcctttaccaggcttacgtgaacgagctcagcaagcctgaatatcacccagcaggtgaaattagcgtgaccgctcgcatatccttcaatgctgagaagtttgatcgcttcactggctgctttgaccggcgaggaaacataaaccttctgctcggcgacctaaccaacccaaaaggcggctacgcattttccgccaacaggcatgcggacacgatagcaagcatctatgaacggtaccgaaacgggggcgttgcacccgctcttcgtaagggtattgaggattctgatattctgaattacctctatgatgactgctacttgattgatttttcagtgcgttaccggggagatgatattgtgcagatgtcgccgggcaagcgaggtcttgtactgctcaacctgatcctgcacctgagcaattcacgacaccctatccttattgatcagcctgaagacaatctcgataaccggacgatttattcccagctcaatgatttcgtgaggcagcgaaaggcagaccggcagatcatcatggtgacgcacaatgctaacctcgttgttggaacagatgccgaatgcgtgattgtttctaatcagagtggccaacgttcgggcattgagaacagtgagtttcggtttgaatattatactggctcactagaatgctcgttcacctcgcaggacgattctggccgtctgcacacccggggcatcagggagcacgtttgcgaaattctggaaggggggatccaggcctttaaggaaagagagcgcaagtatggcttgtag

SEQ ID NO: 153087 - DNA, 906 bp, Enterobacter cloacae
atgaagaggaaatggcctcatgtggaagacctggaagtttttctggcggtggtacgccataacagttttacagatgcagcagtggaactcggtttttcaaatgcctgggtgaccaagcggattgccgcacttgagcaaacattgaataccaagctgctgcaccgtaatacccgagaaatgcgcctgacagcagcgggggaagttgcgctcattcaggccgaagaaatcatcagaaaaaataatgtggcgatggatataatcgtcaatacaaaaaaagatattaaaggcaatcttcatatttgtagttcatttggttttggcaaaaatcatcttactacaccactgtccacgttttctaaattaaaccctgagttaaagataaaactcactttaacagatacaaaactggatttgattaaagaaaatattgatttagaaattatggtcggggaggaggttcacgaacgctactatgcaaaaaaaatcgccgataacaggcgcattctttgcgcatcgcctggttaccttaatcaacataatttacctgaatcactgccagatttaacccgccataaatgtctttttttacaggaaaaagggttaacctttggcctttggcatcttaccgatggtcaaaagcaagagacggtacgggtggaaggcaatctgtcatcgaataatggtgaagtgattctgcactgggcacttgacgatcatggtattgctctcagaagcgaatgggatgcaaagcgttatattgaatctggcgatctgattcaagttttacctgactattatgaaaaagcttcggtgtgggcgttgtacccgaacaaactggacgaatcgattaaaacccaaaagtgtattacttttctcgaaagctattttagtgacatctttttctga

SEQ ID NO: 153088 - DNA, 1344 bp, Enterobacter cloacae
atgaatcacgttgaaagtaatgccctacaacaaagtaaaaaactgcctgagacgcgttcgctaagcgctctgtcggggaaagaaatttgttcagtacctgtttggttttttttgatcatgtgtattgttatcggtgcagcagcatggtttggtacgctacccaaaaacatgattggcggactggcgataatcatgtctttagggtttattctatccactattggtaagaatatcccgatggttaaggatattggggggccagcgatattttgcctgatgatcccctcgattttagtcttttatcatgtgatcccccagaacgtactggactccgttcatgtattaatgaaggatgccaacttcctgtactttgttatcgcgacgctggttgtcggcagtatccttggcatgaaccgtattattctggttcaggggatgatcagaatgttcgttccgttattggtgggaaccatcacggcggtaggtgtcggtctgttggtcggaaaagcggtgggttacactttttatcatacatttttctttatcatcgttcctattattgggggcggcattggggagggaattttaccgctgtctctcgcttactcctctatccttggtaccaccccggatatctatgtcgcacagctggtccctgctgctgtcatcgggaacatttttgctatcgtatgcgcgggtttcctctctaagctgggaaagatgaaacacgaactcagtggcaacggcatgctgatccgaacagctgaagataacgcaatattcaataacatcactgaagatggtaatggtaaaaccgattattccctgatgggggccggtttattgatgatttgttgcttcttcatttttgggggcctgctggagcggattgtgcatattcctggtccggtactaatgattgtcatggcggttatttgtaaatacgcagatgttatccccggcaaaatggaggcgggctcgaagtcttgctacaagctgatttccacttcgctaatttggccgactatgattggtctcggtatgctgtatgtcccgcttgaaagcgtggtatcggtgttttctgttgcgtatgtggcggtttgtgcctcagtggtgctttcaatggccctcgtgagcttttgccttgcccgattcctgaacatgtatcctgtagaagcctctatagtgaccgtttgtcatagcggactcggtggcactggtgacgttgccattctctctgcctgcgaccgtatggagctcatgcctttcgcgcaaatatctacccgtattggtggcgcctctaccgttatccttgcaacaatgctgctggccattttttcctga

SEQ ID NO: 153089 - DNA, 846 bp, Enterobacter cloacae
atgaaaattgtcaactttaaaattaatggtaaaaataaattcggcatctttaatgataaaggaattattgatgccagtgcgatttatggtaatcgctattcatcattgaaagcttttctggagcatgaagatgttgctagtctggaagcgatcgcgagcttatctgctgattattcgattgaggagatcgagtttattccggtaattgataaccctaacaaaattatttgtgtagggatgaattacagtgaaaaacgcctcgaattcaatgagctgaatccggagcctacgctatttgtacgctttgccgactcccaaactggccatctaaacttcgtcaacaaaccggctgaatcccgggagttcgattacgagggagagctggcggtaattatcggtaaaaaatgctcacaggtcagcgaacatgacgcgctgaaatacgttgcaggctatagctgttatatggatggctcagcacgtgactggcaacacacctggtataccgccggtaaaaactggccacgcacaggcgcatttggcccgtacttaacctgcagtgacgaaattcctgatccacataatttacaaatccggacatttctgaactcacaggaggtgcagtgtgataataccaaaaatatgatacacaaaattccttatcttatttcttatatcagtacctttaccccattaagtgctggcgacgtaattattactggctctccaggcggagtgggcaaaaaaagaacgccaccactttttttgaaagagggtgattgtattgaagtggaaatagaaggcctgggacgcttaaaaaatcatatcaaagaatctgtcacagcataa

SEQ ID NO: 153090 - DNA, 627 bp, Enterobacter cloacae
atggaagcatttaattgtgtaactggtattgctgcccccatgatggcagcaaatattgatactgatgtgattatgccgaagcagtttcttaaaggcatcgaccgcagcggtcttgataaagggttgttctttgaccttcgttttaataaagacggcagccttaacagcgatttcattttaaatcagccagggtggcagggagcaacatttttggttgtcgggcctaatttcggatgtggttccagtcgggaacatgcagtatggggtttgaaacaattaggcattaaagccttaataggtacttcgtttgccgggattttcaatgacaactgtctacgaaatggaatattaaccatttgcctaaatgaaacggatttgcagaaaatcgccggatgtattcagcatcgtgatactaattcactgaaagtaaatcttgcgcagcagacacttactactgttgaacaggtttattcattccatgtagatcaaattaaaaaggacatgctattacaaggactggatgctattggttttactttgtcctttacccatgaaattaagcaattcgaaacgcaatactttgaccgtaatccatggcacagaaccggtcagaatcaacaggaataa

SEQ ID NO: 153091 - DNA, 1428 bp, Enterobacter cloacae
atgatgacgatgaaaatagcaaaaacactgtatgataaacatattgactcacatactgtaagaaaactcgatgacgaaggtaacgtgttgttgtatatcgaccgttccattctgaatgaatataccagccctcaggcattcagtggtttacgtgagcaaaagcgaaaagtctggaatccgcaatctattttgctcaacgttgatcatgtcaacccgacccggccgaaacgcgatccagaaatgaccgattccggtggtgcaattcaggtgaaatatttcaccgaaaacagccagcactttaatatcgaattgttcgatgtgatggataagcgtcagggtattgagcatgttgtggctcatgagcaggggttagcgatgccgggtatggtcatcgctgccggagatagccataccaccacctatggcgccctcggtgctttcggctttggtatcggcacatcggaaatcgagcattttctggccactcaaacgctggtttacaaaaaactacgcaatatgcgcgtcacactggaaggagagctctgcgcaggcgtgacctccaaagacgttattatggccctgatagcccgtatcggcgcagatggtgccacggggtatgctattgaattctgcggaggcgttattgatagccttagcgttgaggcgcgcatgactatctgcaacatggcggtagaagcgggtgcgcgcggcgcaattatggctccagatgaaaaggtttttgcttacctgaaagacacaccgcgggcaccgaaaggggagatgtgggaccgggcagtagagagctggcggacgctgaaaaccgataccgacgcgagattcgataaagaagtgtatatcgactgtggccagctcgaaccttttattacctgggggatcagccccgatcaggctggccctatcaatgaggtcattcccgacccgcaaagcatttctgacgtgcaaaaaagacacgattacctgacggcgctgaagtatatggaactgaaacccggtacaccgtttactgaaatccgtatctctcatgcctttatcggttcctgtaccaatagccgcatcgaggatttacgtgaagtggcgaaggtgctggcaggtaaaaaaatagccccacatgtaaggggaatgattgtgcctggctccacccaggtgcgtgagcgggcagaacaggaaggcctggcgaaaatctttatcgatgcgggttttgaatggcggcaatccggctgctcaatgtgtctggccatgaatgaagacgttctgtcgccaggcgatcgttgtgcctcaagtacgaatcgtaattttgcaggccgtcagggcgcgggttcgcgcacccatttaatgagcccggcgatggtggctgccgcagccgtcgcaggtcacctaaccgatgtcagatatttcaccgaggcttaa

SEQ ID NO: 153092 - DNA, 750 bp, Enterobacter cloacae
atgaataaccattcaatgttaatattatttttagagtgtttttgtataggcggtgggctgggttttttaggtgggttgttaggcataggtggtgggattattgccataccgatactagcctggttatttcaaatggatcagcaactcgcccaggggacagtattaattatgatcatcccgaatcttattatgagtgttatccattatcgccgaagaaacgacataagattaaagaaaatcattccagtgtgtattctgtccagcatattttctgctatttcatcgactctggcgatccatcttgacgcgaaaactttaaatttgtttttctgcgctttcattttgctgcttgcattatattatttgtacggtgttttgaagcggggggcatcccgcaactgtaccttgtctgagtcctggctccctatgacaggcgcggtgtgcggattgatgtctggcctttttaccgtgggcggggggatggttatcgttccgctgctggtcgcactcttttcttactctcaaaccagagcacagggtacggcgctggcgctggttctgcccggcgccttcaccgcactgatatcctactcttttgcagggcacgttgcctggtctgttggcttaccgatggccatgggggccattttcaccgttgcctcgggtgttgctctggcgcatcgtctaccgacaaggatgctgaagatgtgtttttgcatgatgcttttctttgttgctctcagtgcgtaa

SEQ ID NO: 153093 - DNA, 861 bp, Enterobacter cloacae
atgttttcaattgcagctgaggtcaggaatacgctgggagaatgccctctgtggtgtgaaagaacccgcaggctctactggactgacattgaagccagtgaacttctcgccatagaagaaggtattgatgctgtgatgcgctggtcgctgcctgaacgtcttggctcctttgccctaactgaacaggatcacattctgctgatgagattcacgacaaggctggctttctatgatctcaacagcggattaattaccccagtggctgcttcactgggagacaccggcacccgtataggtgatggacggtgcgaccgtgccggtaattttgtcttcgggacgatggatgacgattatcccgttaaagtcatcggtaagtttcatcgactcaatgcggcaacgctgactgttgagacgtttgcatcgcccgatgtcgctataccgaacagcatctgtttcagccccgatggtggcacgttctattactgtgactcgatgcagggtcggattatgtgctgcgattacccctcgctgcaaaaccagcgcgtgttcaccaaaatcgaagacggcggcgcgcctgatggttcctgcattgatgagcagggctatctgtggaacgcagaatggggcggcagtagggttgtccgatacagtccggtgggagaaatacacagcattctttctgctccagccctccagacaacctgcccggtgcttggtggttcgtcactccacacactttcatgtaccagtgcccgggtaggactcgcagagccaaccgcttatgacggtgcgcttttcagcattcggtcacctttttttgccggattaccagaaagccgttttgcagcgcacaaaatataa

SEQ ID NO: 153094 - DNA, 504 bp, Enterobacter cloacae
atgaacttatgtcaaaaacagatcgatgatttaattgatgttttttctcatgaaaaattcactttggtgaaaaaaggatttaagcgtatttaccgcctttcttggtctgttgtcgaaaaattccctaatggtgtttggttcacaacgaacatagaatacgcaaaaaaatataaggctatacattctgctgtggcttcatcaaaccaaaagaatgaaagaccatttttatatgaagctgaatctattaacgatttaaatttattaaactataatggggatggtttctttaatgatatgaaagatctttactcttcagtaggtctaagtatcacacaaggaagagtaattagagatttatcttcttttatagcacgaaataaattccatattgatggtttctatatgaaaaaagacggccttattgaagccatgccagtagatgaaattttaattcctaatgcggaaaattccctacgtctgataaaaacaacagatatgtcgtaa

SEQ ID NO: 153095 - DNA, 399 bp, Enterobacter cloacae
  misc_feature (317)..(326): n is a, c, g, or t
atgaaaagaattaaaaactattgtgaagatgatttttgttcgattattgttgactttaattcaaacggttcttctcatttcttggaaaaagtattcccaacctttactttggatgactacttggattttattttctacctttttaagacggataagagtcatcctttgctcaggattatttctcccaaaaaaataattctagatgatacggatgatcttcaatttgggtttactataaaagagttcaaggccaagcatgttagcttacatgaattatctttaatgttggcggagagaaatgctatttcttttgctcnnnnnnnnnnaataaagaattacaggcgtccagggaaattaaaagactctaaagatttgtactggatttcattaagttattga

SEQ ID NO: 153096 - DNA, 441 bp, Enterobacter cloacae
atggtcgcaagtaatacttttaataagatcgttgtgagtaagcattctcataatggaagcgttaacgaagcgaagttctcgcacaacaagattcgttctcattgcgtcagtgtcagattaaatgatgaagagctaacgcttctcaatgagagacgtggccgtcatcgtaaaggcgaatggcttcgtatggcgtttctgcataacctcccctttgttattccatcgattaatctcgaagcatggaaatcgctgagcgaaatttcacagaagctgaacaagcttgtcgctcatctggataataaaagccagggtagctctctgacgcacacagaactattcgcagtgaagcgccagatatctgagcttcgcatgaagctgatcacagccgacctatggagatcaccttctgatgaagggaatgcaaaaaatcagcaggggtaa

SEQ ID NO: 153097 - DNA, 666 bp, Enterobacter cloacae
atgaatatctccaccacgaaacgccgcaatgaagaagtcaacgttggtctctctgaacgtcggaaagcagagattacagcccccaagtttgatctgtttggtgaaacttacacgtttgttgagactttctctggcactgtcattgactccaacccaagcaataaccagatctgggtaaaaacagatgatggcgatgaaaagcagatttcagcctatggaatcgcgttcagaaactcacacaggattcgtctatatgagcttcgaaagtatagtaacgataacttgtgtgtcgtatatgccgatgcgctcattgttaatttaaacactggtgaatataaagtaaacttaaacaaaaaaaccgtcattattccagcctttctgacaatgctgttccataatgcttctacagcatcgtattacagagcaatgcctgtttcgaaactattctctattattttcattttactttgtgctgctgcacttacttcatttctcacactgccctggggatttaaagacggctacatgtggagcgaccacaaatacatttggtttacatatcttttttcaagaattggaagttttatttgtatcaagttgattaaaagaagaagtcagcgatttgaaaatgaacttagaaaccttattgagtcagtaaaacgctaa

SEQ ID NO: 153098 - DNA, 375 bp, Enterobacter cloacae
atgaaaaaaatcatcatcttaggattcgtttttctgaccttggtaggttgttcttcagtgggcaaccagtcattgaaaaatgagacacaggaaagtgtgaaaaccaaaattgttaaaggcaaaactacaaaacaggacgtgttagtatcgtttggtgaacctgacagccgttccttgatcgatggtgaagagcaatggtcatacactatgtataacagccagtccaaagcaacctctttcatccccgttgtgggactgcttgcaggcggcgcagactcacaaactaaatctctgacagtttctttcaaaggcgaaaaagtcagcacatacatctttaatgctggaacaagcaacgtgaagactggcattttttag

SEQ ID NO: 153099 - DNA, 1173 bp, Enterobacter cloacae
atgacgattgcgaaggatagttcgactgatgaaatcattcatggaaatgatctccgtggaatggatgatttttacattaagacaacgagttttgaatgcccatacgagccttgtaaaattaaagccacaccttgtagttttactatgaaacatgttaatcaatcatattttagatatggtgataaacataaggatggatgtggtattcatgacccaagatataaaaacaatcatacttcaaatgacgaaagaaaacataattcgccacctgctccggttatatcacttttaaaaattgatgtgaagccaagaggtggtgttaaaaatgccagaagtagtaaaaatgaaaatcacaaggatgaaaaaaaagctaatgaacatcctgtatcttcatcaagtattaagccagtcgttgactattacataaataatagcaatcataatgaacagctatcaatccctccatatggcacgcgatcttataaagatacgtttcaacttattttttacaaaaacaacatacgttattacaaacctgcaatttattatggtgtagtccagtctaatattcgtctgcatgaagattcagataaacattgtattactttcctcgcaagggataagaagacccaaaaaccatttacgcttgaaattgatgtttctgactggaataaaagtcagaaggatgtgttttggaaagaatatgaaaagcaaaggaaggaagctgataggtattataagggacttaaagataaaaggaatgctaaaaaatacctgacggttttcttttttgggatgccggatgaaaatgataattttctatttaagacaaaccactttaaattagtatatgtggctttcttgggtaaatttgaaagctcatataatgatagtaattattacattgaaaatgatctgtctgtatcatcattgaatgaacaacccatttcagtatctgatatagaccataaaaaccatgaatataatattgaaacttcattagattttagtactcctttgccagagccagagccagagccagagccagagccagagccagagccagagccagagccaataaaatcctctttaaaggaaaatactgagactgtagaaatgaagagcaaagtttgggggaggctgaaaaagataatcactttctttaaaaagtga

SEQ ID NO: 153100 - DNA, 291 bp, Enterobacter cloacae
atggcgttaaaacgtatgggcttcaaagatctgctggtagctcatggcatgagatctattgcctcaacggttctgaatgagaaaggctttccacctgacgtgattgaagctgcgttagcacatatcgatactaacgaagtcagaagagcctacaacagaccacagtatctggaacagcgtagggatatgatgagctggtggggtgaacatgtagaagcggcttcttttgggaggacgagtatgggagcaatttctgccaaggcacagcttaaatcagaaactacaagctaa

SEQ ID NO: 153101 - DNA, 201 bp, Enterobacter cloacae
atgactggctgggatgagatagataaagaggcaaaggaatggcgtctcccgacttgccgtatgaagatgaagcgtgagtacgtcgttctgctttctgaacaggctctggtgattctggaaagaatgaaccccatcactaagcacagagaatacgtttttcctcctggctatcgtaatccacttgaaccgattaacagttag

SEQ ID NO: 153102 - DNA, 357 bp, Enterobacter cloacae
atgaaaaaaacttctatcgcagccatgctattttgtgtttctgtctcttcaatagcggcagtaccagacggaaaaatagaaaaaccctttattgttggcaatgaagttatttgtttgaaagaaatccagaagcaaatcaccccttatctcaagtcatttgaagaagaaaacggggttaagtacaaatacaatgttaaatctggtttatcgtacaaggatactgtagggctacggcttcagatcaaccgtgttgattcaggtctgaatgttcgagttgccgatttggattactactggttacaggagcgtggcagcatgtgccaacccacatatatggtactggatcgttctcaatga

SEQ ID NO: 153103 - DNA, 303 bp, Enterobacter cloacae
atggatcttgcgataaccataaacgcaaccggactccagccaaaactgtttgatctgtcccgtcagtctcagatctacctggtggtgctgagaatacggttgcttaaaccaggcgtaaaagccactgggatgaacatccagcaccctgcagagcagacgaacaggccagcaacgggagttgtcacgaataaaggcgtacctcagtcggacagctttgcgaagtacgccgcggctttttttaatatgtcccgttcgtcagtaacccgcttcagttccttctggagtcggcggatctcggcctga

SEQ ID NO: 153104 - DNA, 285 bp, Enterobacter cloacae
atggctcatactttgcgcaccgctataatatttcacatgaataaaatcagttgcacctctaataatatcgcaaaattcaattttacttcgcccaccaccatgatatatgaacttttgatccatatgagtaaagctttgatcagcaagacaagtttctttattgtattgctcttctcttttataagaataaatcgggaatttgtcggcttcctcatacagcttaattcgtttaatttcattatcaatggtggaaacaaactttctatcagccacgtaccaaattga

SEQ ID NO: 153105 - DNA, 363 bp, Enterobacter cloacae
gtgacgataaaagcaaagctgttagcactggccgttctgctggggctatttgtcggtgcgtattgtgtcggttacctgagaggctggtatgcgcacagcgacaaggtaaacaatgagcatacagcaaagaacaaaaaagcagaaaaagccgtcgctactggcgagcagaaagcggcagcggccagcgcagaaggtaaggtgatttaccggaccatttaccgagacgtggtgaaatatgttaacgacacgaatcatattaagtgcgattttgatgatcacgctgtgcagttgcggcagcacgccctcgacgcggccaacaatctccccggatttgatgcaggaaccatgcaagggggcaagtaa

SEQ ID NO: 153106 - DNA, 468 bp, Enterobacter cloacae
atggaaacgcgcggctttgccatgtcctcgctctcgaaacataaaaaggaagtgatgatcctgctcgactttctggcaagcccggaagggcaaataatggaacagatgggcttcgagaacacgcactacgttcgtaagggcaacacgattaacgtgacgccaaaaattaatgcctggtatccgcggtttatccaggccgccaactggaagccaccggtggagtggcggacgcctgcgatgcagcgctatatcgacaattcacaacgttattttacggcggataacgcctttatcttcccggcgtcgtttgccgccgccatcgactcaaccagcagtatttataaccagtgggcgtaccagtttgtctctggcagagcgtcatttgatcagtgggatcagtatgtcagcgcctggaaagccgcaggtggaaacgccatgaccgaatatgcagaggaaaaattaaaatga

SEQ ID NO: 153107 - DNA, 888 bp, Enterobacter cloacae
atgagtaagttatttaagctcaaagaatggctaacgttatcggaagcctcagagaggctatcagtattcttaggtgaaaaggtttctgttgctgattgtttgcagctggcattggataagcacataactatttcagcaatttttaacgagagccagcacgctatccatgcaaaggtaatcacaacgactcaacgtaagcagttttctaacttcattatccgcacaacagcggatggtgcctatattggccttataggggaagatcgctttatctcaaaccgtgaattagattttgagtatgaagatattgaaaggtacggtgatgttttccagttgcgtcatgggatctatgacctacctatgctgggggcagaagaattagatgtcatgcataagcttgatttgaacgcaggaaggattccgcgcgaattttgcaatattgaggggccatttttgatcactccatatggcatggtgaatgtgttaaatcaattcaacccctggatgttaaaaaccaatgggaacggatcgccggagtatttcgataaggttaaaaacgagttcgtggattttagccatgaaggctaccatgggttcctctatccagccgacgctttgagggattttgagcttgtattcagaagagagaacatcgaaaagtttgagatggaaaactctgatgatactcagcaaccgctaaagcttgatgagagccttcaggtaatcggcgctctgcttaatgccttaaaaaaagccgagccagcatcgaagagatggacgcaagaggcgcttaaagcagagatgatggaccacggagttaatcttagctctcggcttctcgatgaatacttttccgcagcaaataaatcatttaaatcagcaagatag

SEQ ID NO: 153108 - DNA, 204 bp, Enterobacter cloacae
atggctacagacaacatccccaacacaggttacatccgccgctttcgtttagcgcaacaccttggcgtccacgtcacaacagtagatcgctgggtccgcgagaaacgcattccagcacccgtaaaattgggcgagaagattaccgcattcgacgcggtggaaattaataactggctggcagagcgccggggaaaggtggcctga

SEQ ID NO: 153109 - DNA, 651 bp, Enterobacter cloacae
atgcaaatgattaaacagtgctttttcttactgattctgggaaccgctgcgttattcatgccgcatgcgaaggcgacctgcaccacgccggatctccccaaaatgatcaacgtggcatccatttctgtcccgacgacgctggcagttggcgcaactatcccgggtacagagcagagcgttcatgttgccgggcattgcgatcagagtaccgacagcggcctggagattgtctcctgctactacggcaccggagcggaaatgccagggctcaggggggtatacgaatccggtgtgccggggattggcgtagcattgatgaatgatcacgggcagcgaattagcggcgctggcggcgtgcagtgcgattcacgtggaacgcctgtcggctacgtctctaccgatggaacacagacttttagctttgaaataacgcttgagctggttaaaacgagtgacaccgtgacatccggtacgctggtgcagtctcaaaccgaatttggcattggcgttttcggccatgaagggatcggcaaccctaaccacatcgcctatgcaggtaatgttattcttcatcaggcacctgctccgttttaccgaaaaatctcaccgttaatttgggcgattttcccgtcagtgatttcatcagcgtag

SEQ ID NO: 153110 - DNA, 777 bp, Enterobacter cloacae
gtgccggagggatggacagatatcagtaatgacgatgcgctgttaggaaagttcgggctgaacaaatccatgctctttgacgatgatacgtcccccaattttctggcgcgcgtctatcaaccgaagccggaagtgtttggtgcagatatgaaccccacgctggtattcaggggatcgcgcgagcctggtttcgcctctctgtctgagaatgtctcctctctactgaccaaaggggaactggcgccggtggtaaacggggctgactggtcgaataacttctcacagggcatgggtatggcttcagattattataaaaaggccgtgagtatcggtaaggagctggcaaggtcagggcagaatattgatattgccggtcattcccttggcggtggtctcgcctctgcaacctctatgggcagcgggaaagcggggtggacgtttaacgccgccggccttaatgccggaaccgtagaaaaatacggcggtaagatattaggcagtacggataatatccaggcgtatcgggttgaaggtgaactgctgacgaagattcaggaagttaacccctgggaagatctgaaaacgatgaaagggcatgtcccttcgtggatcctcaaagaggaaatctctgcgctgagccctaatgctgccggaataccccatgatcttcccggtggaaccggaagcgcgctggaccgccacggaattaatcaagcgattgattgcatagagcaacagaaggatgaggatatttcgataatcgggagtcgattgtga

SEQ ID NO: 153111 - DNA, 345 bp, Enterobacter cloacae
atgacaaacgaagagattgaagcaggtgttcggcaaatcattccaacgatttgggaattcttcgagtccagaggatacgagggaataacagaatcggtcgaaaaatatacaaaactcccgcagatcggaacgatagcaagcgattttgattaccaaatgtcgctaacgcccaaggaatatgttggcgatgatccattttatgaactgttgttcttaaagcggaatgaagatcatcaaaagctaatcacactattaccgcaagcgggacactggaaagcaaagtataaggatcaagagttttacttcacggagcaaatcttacaagcagtatatgaccaagaatag

SEQ ID NO: 153112 - DNA, 453 bp, Enterobacter cloacae
atgtcgaaactgctcgcactactcacacagcaaaaagcactggaagcgcagatcaaagaactcgaatcaaacgagcaagaagcgaaggttcttgaagcagtcaaagaaattgaagcgatacgcgaaaaattcaactacaacgaaagcgatttcgttgatgtgcttttgacttactacaacgtaaaccctacgcccgcgccgaagcccgtgaaagcagccggcacggcaaagcctgcggccaaaaaagcgcctaaatatgctgtaaaaatcaaaggtcaagaagtggtcttgaaagagagcacgcggggcttgatggatgagaagttgaagaaggtcgtaaacgcggcaggattttctaaatatagcgactatcttgatcgcttgatgctcgacaacaaggccgacaattttaagcagttgatcgagaaattgaagggcgttgaagtccaataa

SEQ ID NO: 153113 - DNA, 606 bp, Enterobacter cloacae; identical to SEQ ID NO: 147199

SEQ ID NO: 153114 - DNA, 636 bp, Enterobacter cloacae
gtgtttgcggagtttggtgtactgaatttctggacctatgttgtcggcgcattttttatcgtgctggttccaggaccgaacaccttgtttgtgctgaaaacagggattggccacggcgttaagaaaggctatctggcagccaccggtgtgtttattggtgatgccgtgctgatgtttctggcctgggcgggcgtcgccgcgttgatccagaccactccggtattatttaatattgtccgctatcttggggcgttttatctgctgtggctcggcggaaaaatgctctggtccgttatgacacgtcaaaaaaatgcgcacgaaagtagcgccgaaccggcaagcgcgatccttaagcgttcgctggtgctgagcctgacgaacccgaaagcgattctcttttacgtatcgttcttcgtgcagttcattgatgtcaatgcgaaggataccggcacgtcgttcctgatcctcgccacaacgcttgagctgatcagcttcatgtacatgagcttcctgattttctcaggcgcgtttgtcacgcgttatctgaaaaccaaaaagaaactggcgaagctggggaacgggttgataggcctgctgtttgttggatttgcggcgaggctggcgtcgctgcactga

SEQ ID NO: 153115 - DNA, 1239 bp, Enterobacter cloacae
atgtccgcaggaatactgactctgacaaataattcagccgcggtaaccggcagcggtaccgcctttaccaccgagcttgccgtcggcgattttattgttgtgacggttggcggcatcccttacacgctcgctatcaaaacggtgaacagcaatacctccctgacgctggtcagtaactataccggaccaacgcagggcggcgctgcatggtatgccgtgccgcgcgttgcgatgaaccttgttactgctgcgctggtggcacaaagcgcagaagccatgcgcggcctgaactatgacaagcagaactggcaaagcatattcagcgggactggcaacgttacagttaagcttccagacggtagtgagtggaacggaccagcatggaatagttttatcactgagttgaacaaaaaagccgacaagagcagtttaggaactgccgcaacaaaaaacataggaacagcgagcgacgaagtcatgcagcccggcatgtttgggcttggtcgtccggatggggcattaatattcaacacaacgagccaggatgatcttcttgctggattgacaggatatgggcttacagttcttcgaaataatgcacagataccagagccatggaatatatggaactattcaccgacaatatttgcccgtacaggtgatacgtatagccttttttcaatgccttttcagtcatctggcaaagttcgtatttttggtggtgcagcagcaactggatggaatcacagcaggatattatacgatgataaaaatactgttgtagatagcaatggcttcataaagcaggcatcccctgttgttaaaattttcagtgatggtaaatatgaaactaacgacgaatcagaaggtgtcacggtcactcgtctggatgtcgggcaatatcttattgaaggctgtaaagcactcaattcagacgctgcctggggcggtatcgacggaggatttgaaatcccaacagacaggaataagcaaccgctcatatggctggattatgaggttagcgcggatggttctgtgctggtgaaaacctaccaccgaactcaccctgatgcgccagcgttcgccaggaatgaactggaaggcgtgggtgatggtgatccggtcgacatcccccgtgaccagtttgtgtccgttcgtgtcgaaatgcctgccgattctttatacaaccaaaaaatcagtgcggcagagctggccatgactgctgatgcgggtgaataa

SEQ ID NO: 153116 - DNA, 312 bp, Enterobacter cloacae
atggatcgcctaattagagaaatgtcgtacctctttaccaaacagcgttttttggagcttcaggaaacggccaaagacatcgcaatcggtcatagtgactttcctgagtgcttcggtcttattgctgaggcaatcgctgaatttgttgaagacactccagatgatgagtggcgagagcatgaaaaaatccttatgcactacgttgctatgcgtgttctgactctgtggggtaacggcgagaaagttactgatgtccagtgggcgcacccaggctggtttggcactgctgagaaaggagaaaccattcaatga

SEQ ID NO: 153117 - DNA, 174 bp, Enterobacter cloacae
atgaagttggaagcatcactcaaacatttcagtcctcagggcatgcacatcagcgatgagatgaaaacactaatgcaaaacgtattaccaatgcggtgcaatggcgagaatccaatgctaatgccaacaagattgctctctatgttcgcgcgcgcgcgcgttttgggggcttag

SEQ ID NO: 153118 - DNA, 321 bp, Enterobacter cloacae
atgcgcaaactttcttttatgttaactgggtttattctggcctactcaactgtcgcgagtgctacggtatttggtggctcgaatctaggctttagtggttatcctgagttttcggattcggagccgacacctccttatgatcgcaatgaatattcaatgcaagcgtataaaagtgaggttgaaaggtatatccaaaatgcgaaggattataccgaaaacgctggtaacgatatgaaacgtattcaggaatcccaggacgatgcgattcaaaaagcaaaccgcgttgtagaggaatataaccaaacagcaagggggtattaa

SEQ ID NO: 153119 - DNA, 147 bp, Enterobacter cloacae
atggacgaaaaacagttgcaggctctggctaacgaactggccaaaaatctcaaaacccctgacgatctcaaccagttcgatcgcctgctgaagaaaatcagcgttgaggctgacctgcccccacgattagatacaacactcagttag

SEQ ID NO: 153120 - DNA, 1797 bp, Enterobacter cloacae
atgcctaaaatttggccttacatcaggttcagtagtgaagagcagaagaagggcgacagccttcgccgtcagcaagaactgatcgagcggttcgcggcacgtccggaaatcgtggccgaaggtgcggaaattgacacgagcctcgaccttaacgatctaggcgtttccggcttcactggtaaaaacgtcctacaaggccggtttaagacgtttctcgacgcagtggctagcggaatagtaaagccgggcgattatctcgctgttgaggctttaaaccgtgttacgcggctcgatccgatggaaagcctaccaatccttatgggattgatgaaaaagggcataaaaatcgcgattactgccgattcgcagatatacaggcacggcggcgacataacgcaactctatattgcattaggtgaattacaacgcggatacgcggaaagtgaggagaagggccgacgagtgcggcaagcgtgggataagaaaaaagaaagagcctttcaaaccggcgagatcgcaacgtctcgcttaccgctctggcttcgcgcagtgaaaaccgatcaaaaagggttgattgttcggaaagtcgaagaaattcccgaacgtgtggcgatagtgaaagaaattttcaggctatcggatagcaacatcggagcaatcgcaaccgctcgccttttgaccgagcgaggcgttccgacattcacacgcgaaaacccccgcaaaaaccccaattacggcgatttttggcaaccctcctacattaaaaagatcctcgatagtcgcgcagtccttggccattatcagccgatgacttgggagaaattgccagacaacaggcgtcgcagaatcaaccacggcccagagattgaaaattatttcccccaaattatcacgcctgaactattccgccgcgttcaagaaaaacgccgagggaggggaaaggaaggtcaaggaaataaaggtaaaaaattctccaatcttttcttgaaaatagcccactgcgcaaaatgtggcgcgaccgcttcgcacgtcaataaaggaccagatccgcgaaaaggcgggcggtatctcgtttgctaccgcgcgaggcacggcgattgctcttataaagcgtggcgctatgatgatttagaaacaatgattttaaaatttctcgcagaagcagatattaaaagcattatcagcgaagaaaacaaagcggacgaattgatcaataggaaatatgaaatcgacgcagagatcaacgacattcaagaaatgcttgacgcttataaagcagatttcaaaagattaaaaggaagagtgagcgacttagatcgagaaatggcaatcgaaaacgaacaaacgcttaaagaacttaaagaaaaagcgaaagatttagatcaagagattttcaaagcattagaacagaaaaaagcagacattgaaaaagacattcttgatcttcgtggtttgtcaaatacagaaaatgcgaacacagttttcgaagttagatcaaaaatcaacgagcggctaaaaataatcatcgaagatataaagatcgattttcaagatcgacatattgaaataatcttcaaaaatggaacaagaagacatttaaaaaatcatcttgctgttgaacttcgagaaagcacagaaacagatcaaaagcgtcaagatgactacgatgatttttatggctcattgacagacgaacagaaagccgaactcaatcaatattcaatctcggcggaaatcgcaaacgatccaaagcgcctaattgaatacctcactcaatttaatgttgtggaagaatga

SEQ ID NO: 153121 - DNA, 339 bp, Enterobacter cloacae
atgagtataaatagttatttaattaaagagatattaaagagcgtaaaagttgaagtagatgatttagatgaaagattcgattatgcttatagcaagaatttcaatgtaacacttaatcatcttttaaaagccgaagagttaccatatttcagatcagcgaataacttcaagaaagcaattcaagaattgaaagatattttccaagaattcaaatcgtatatgatattatgcgatgatgaatattgtgaagagtggataaagtatggccttttctctgctgatattataatagcgaagcttgactatatcgcctcactttatagcgaggtgaaattatga

SEQ ID NO: 153122 - DNA, 435 bp, Enterobacter cloacae
atgaaacagaacagaactaaaaaaaccagcttagtctggacgccagaagaacatagaaaaatcgtagcagcaaaagaagcagcaggcgaaaggtcaatcgctgatcttgtgttaaggctaattgatgatagtcaaacaatcgtaatcaaagaactaaaatcatacgatgatatttatgccaaggccggaaacttagcgaatcagatcgcgaaggctttgcacctcataaaagcagatccgcgaaaatactccgcactgattgcgtatcttgaaaaagataattccagagttttaaacgctcttgctgacttctctgagaaattagacgaagcggttgacgcttatttccagtatgaagaaaatatagagatcatcgcgcagcgcgaactgagcaaagcgaaaaaggagaagaacaaaaataaaggtgcgttatga

SEQ ID NO: 153123 - DNA, 1278 bp, Enterobacter cloacae
atgaaattcaaaatacgcacgaggcaccaaggcgcacgctttacagtcaaatatattcagaaatacgcaaagcccggatcaatgcgcagcacgatcccaaagtttgaaggctcaacgaattgggactatgcgaaccttgtcgataagaaattagagcagggcagagccaaaggccaacaacgcctttatttacaccagatcgttgctttccacccgtcagacgcacacaagacagacgaagaacttctcgacattgccgaggaatctctacaaatggcgatgggcgacaacaaacgccattacgttatggctgtggagcgcaacacaccacacccacacgtccacatcgttgtcggcctccgctcgctcgacacgaagcgagtgcatagggacttcgttgactacatcgaaattggcaaagagttagagatcaagcacggtctctacaacgccgaccgcacgcagaagccaagcccctatgccctagcgccgaacactgtccagatcgagcgtaggacgggccagaagagccttaaaaacgacttgaagggtaaggtagccaccgcactcgaaacggcgggagatacggccaccttcctcgacacgctcgaagcgttcggcgtgcagatccttccaggtcttaacgcttcgggtctctacggggccagttttgctatggacggggagatcttcaaaggctcgcaattgaacatttcagcgaagaaaattaaggataaattcgcagccgatccatttttcatattgctgatgcaagacgcagagaaaaaagcaaaagcatacgctgaaaaaaacacattagaagcgcacggctcaaagccaaacctagcgacaaatctcagaaatcgcacattagacaagcatttcgagagcgcagacgataagacgtatttctataaaaacacgaataaaaaggcgttcaactacgacgcagaaaaaaacgcggttgcgttcgatcattcgaactacaagaacattaaggccggaatgcagaaaatgctggaaaacggagcgacagaactgcaagcgtcaggctctgaacgcttcaagcgccaagcgtggatcgtagggatacagaacggctatgcaatggctgatttttaccagcctacgctagacgactacgaacaggctttaaagacttgtatgaacgaaaaacaaagggagaaaatcaaagaagaaatggagaaacagaaacaaaaagaaagagagaagcaagagcaagagaagccgaagaatcgtataaaattaaagatatga

SEQ ID NO: 153124 - DNA, 378 bp, Enterobacter cloacae
atgagcagcggaaacgctgcacaaaaaacttggaacgccgcccacgttcttttttttgggggattagttgcgttaattttaggttatgggcaatttgataaacaaagcaaaatagacacgcaaatcgctatcgagcagcgaaagcaagatattcagcgcaagaaagaagaacgcctaaaagcgtttatgctgaaagactgtcagaatagaaaagcgcaggcacaagccgaaattgcttggcgtatgaaatacagccaaaaaaataaagattatagcgtttttggacacgaagcagacgaagttagaaaatcagacattgaagagacgaatcgatatattcaagagcgtcaaacttctgcaaatatgcattgcagctaa

SEQ ID NO: 153125 - DNA, 486 bp, Enterobacter cloacae
atgaaaaagacaattttaacaatagcaattttaacagcgtcagcgtttgcgaatgctgaatatatgatgaagattccgcttgaagcgcacaacggcggggctttaccaaatggttcaattcaaatcgttaagaacgacgcagcgcagccagaagacggaaataaagaagaattgtatttcgagttagtcgatacaatgcttgttaattcttgcccagagaatagacaaatttctaacgcgaggaactgcaacgtttcaggatactacatacatcagtcaataccgctcaacggagcaacgcgctacgatttgtttttgtcttggtatgaaggcccagatcatacgcaaatcagcagaatagagctaagcaatggcaaatcttgcgtgccaagtttcaaggttgttaatagcgtaaaatgcgaatttacagagatgtttggagaagaagagtatggcaaagaaataggcataaaggtgtataaatga

SEQ ID NO: 153126 - DNA, 135 bp, Enterobacter cloacae
atgaacgatatagatttttacttgcaaatattttttaaagtggtgccttatgtgatttttagcgttgcgatctggcatctacacataaaagaccttatcaagaaattaacaaacaaaaaacaaaaggagatttaa

SEQ ID NO: 153127 - DNA, 711 bp, Enterobacter cloacae
  misc_feature (686)..(695): n is a, c, g, or t
atgagcaatgaatttattaataaagcaaactatacaagagtagcaagattagctgttctattgctcgtttcccttccaatttttgcgttcgctgactcgatagatagagaaatcgtagcgagcgaaacgcttcaatatagagccgatttaatcgcggccttcctcaatattttatggaaatttagcccatttatgggcgtgatgttgttcatcgtcgccggtcttaaaatgaagcaaatggttgacgaaaaaaacccttccaaaaagtttggcgtaataataactttcgtcgctgcgactttcttttttaatatctatctcgcgcaagaactcgtttcatcactttggaaaattgagggagacgaatcaatatgttttatggtcgatgatgcgggtgtaaacgatcaatgttatagcgatgaaatgagcgaaatcggcggcgaattggctgagcgtgtgggtaaattatcaggcgatggaatagcaacagaattaaagaacagtatgcgtctaatcgtgggaatttttcagtgtattggctttatatattttatggtgggtatttacgggcttcatcaagtcagcaacggaacaaaagacgaaggatatggaaagccgataattacaatgatttcctcggccttgatcattgatttaccgcatacggcgtcgatgtttctcgacannnnnnnnnnggatcaataccggtaa

SEQ ID NO: 153128 - DNA, 291 bp, Enterobacter cloacae
gtggggttaaaagccagtttaacgaatatgctcaatagattaagcgcagatcctgaaaaatatcgtttagatattattatcgcaatggcgaaagatattgaaagattagcagagatggttattgcgtcagaaaatcaagagaacatcgaaagagatgataaaaagcgttcaagctctgttgtgatgattaacgagattgattattcacaagcaagagcacagcttgaaaaagctatttctgaaatggaacaagaacagaaaagcaaattgaaaaacaaaaataaactttga

SEQ ID NO: 153129 - DNA, 1095 bp, Enterobacter cloacae; identical to SEQ ID NO: 125542

SEQ ID NO: 153130 - DNA, 705 bp, Enterobacter cloacae
atggagaaagcgaagaaagtccgtcagcgatgcggtgaagttttccggtatgccatcgtaacgggtagggcaatctacaatccagcaccggatcttgccagtgcgatgcaaggacatgaagcagtccactatccattcctcaaagccaatgagctgccggagttctttactgcccttaacgcttattcaggaagtccaattgtattgttgggagcacaattgcttatcctgacaggcctaagaactggagaactaagggcaggtgagtggcgtgaggtggactttgataatgcggtgtgggagatcccaaaggaacgtatgaaaatgcgtaggagccatattgtcccgttgccaaaacaagcattatcccatctcaaaagtttgaaagacctaactgggaactacccgctgatgttccctggacgcaacgatcctagcaaatctatgagtgaagcaagcattaatcaggtttttaaacgtattggatatgcagggcgtgttacggggcatggtttcaggcatacgatgagtacgattctacatgagaaaggatttaacagtgcttggattgaaacccagcttgctcatttggacaaaaattctattcgtggaatttataaccatgcccaatatctcgaagggcgaagagaaatgatgcaatggtatgctaattatttatctgagctaggtggtactcttaaatga

SEQ ID NO: 153131 - DNA, 1857 bp, Enterobacter cloacae
atgcttgatatttcggtcagtcagatccgcaatacggttacattcgtggtggataagcagagcattgctctggctaaagccgcagcggataaccttcaaaagcacttccagaaaatagccgatcccaagattcgcttccaggctcagaagcagcgcagacagaaagctcgtcaacaagccgatgatgcacgttttaatgataaacctcgtgatacgaaggaaatgaaagcccaacgtgcggcgcagaagcagaaagccagggatgaaaaggccaatctgaaagcgaagcagcagctacagaagcgccaagagacagccgagcttaaacttcaccatgcagggctacaagtgtcaggaattaaaggtaaatacggacttgatcctaaatctcaatatgaagcgttacgtttcatacgtcagcaaacagaggaatttgccaaaggcaatctgaccagtgaccgtatgaacgcatctattcgtgagcgtgtaaccctgttacgcagagaagccgcacagcaagccaaagtgacacaggcacagcgtacccagtatgccgcagcagccactaagctaaaggctcagaagggcgggaatgctcctatcgtcggtggtggggtattaggaagccttgcgttaacggctggctccctcggagtggggcagcgaattgttgacaaagggaatgaaaatcttgacctggtgcgacagtcggctcttgttaagacaaatcctaatgcaatcaagacaatggtagcctgggggcagcaacatggggttgactcagctaatacatctaaagccgttgataatatgaaagatgttcgtgaacgcctcgccatgactgttaacgatgctcaaatgaagaatggcgaatggaagggtggggatggtggcattacgtcgataatgaacaaatttggatggagtaaggatcagatttccaagttccaagattcaccactcgattttgttcaagctacagtgaatgaagggcaacgccgtggtatgtcacaggctcagattggtacgctgattgagagtttaggtgatgacctgatgcactacacagatatgttcatgaataacggagctgagtataacaagacgctgaaacagcttgtggaaagtggtcaaactcttaacgacgagcaaatcaaacaaacctacgcttacggcgatctgtctgtggcaatgggtaatctgatgaatggtgtggataattctttattcaccggattcatgaaaggcttcgctgatggtggtgatgaccttgtgaagaacaccaaagtgattactgaatcggctggaatgctcggagaggggttaggcaatctctcgaaagaaatcaccggatttgtgggtgagatttccagtgtggtgagtgatatcaatgctgggcttcgctctcgtttcccagagtggtttagcaatgctaacaaaccagcggcacagagtttgtatgatggtgctgttacaggaagtgccaacagtgctgccgattgggtgcaggacaagacagggtttaatacccgtagtgtcggtcatgctgttaaaggttggttaggaatagatgataagcctacagggacagcggtagaacagtacggcctgaatggtgattctctgcgagggggagcgcttcgtgattctgctatatcatccctaaccagcaccaatagtgcgccatcgtacaagagtctgtacataaatttgtgtaattgcctgattttgatatgttcaatccaacatcaaaagcaggttaatttatggacgaaaaacagttgcaggctctggctaacgaactggccaaaaatctcaaaacccctgacgatctcaaccagttcgatcgcctgctga

SEQ ID NO: 153132 - DNA, 1593 bp, Enterobacter cloacae; identical to SEQ ID NO: 125593

SEQ ID NO: 153133 - DNA, 180 bp, Enterobacter cloacae
gtggctgataaccaagaaaaaaaattgactttaagtcaaggtgaggtagtcaccttgaaaaaagtgattatgtatttaaaattttcctgtgaggaaaccgaatctgtaatgtacgcaggtagtcctctgattaactctattttctctaaactactagagattgatgatttagggcaataa

SEQ ID NO: 153134 - DNA, 204 bp, Enterobacter cloacae
atgctcagtaaagacagctctctagaaaccgcaaaaaacacagcagataacctgtatcaattaatggaattaattaactccaatattattgatatggatatcgagcaaataatttctctgtctggcctctgccttgacttgtcggctcaggtctcaatgtggatggattcggagtttgaacgtcgtgaaaaacaacgtaattga

SEQ ID NO: 153135 - DNA, 399 bp, Enterobacter cloacae
atgaactcatgggttgatttattaattgataaaagaagcatttcttctatcttcaccgatgaagaaccttcattacgtaatgttgaacttcatgatgtgattttccatagggatgggccaaaaatcacactaagattcaatattaaaaattatccttcgcaaccaccaaaaaaatggataatgcagaaatgtaatgtcgtacaaatgcaattgactgctattgatatagcggaagttagcttatttggttggaataaaactcacttttctttagatgttaacatatctaaagaagatggttttatcatcattttagctcaagatgatatattctctctctcaataaaagcaaaattcattgatatttcttcaataacagcttatccaatttcaaaataa

SEQ ID NO: 153136 - DNA, 309 bp, Enterobacter cloacae
ttgcgggttgcgtcccttgtgattggcgatgcgatccgccgtggcggcctggcgcttgacgggccagtaggagcggccatccttgcccatcgaccagacgctgctggcctggttttccagcaggggcagatgggcgctcagggcttcgggcgacgcgctggtcagcgccgtgcgctcacgggtgcgccagcgctgatgccagagcttcttgtcctcgcgctcgctgccgcaggtcgtgtgcccgacgatgggtgttttgcggcggctgcggctcataacgtagtggtctccaagaacattcaggactga

SEQ ID NO: 153137 - DNA, 384 bp, Enterobacter cloacae
atgggacgaaaagaacgaagtaacattgttagaatcgaaaaagccactcgcgccagcaaacgtaaatacacctcttctctacaagacctcgcaagagagtctattccaggagaatggatcaccgaaataatagaataccctgcaacggtgcccgtaggggcagagtttgaactattgcaggatgttttatcgtcaacggataacgtcttctataaaccacgccgccgccgtgaataccgtgttgattcatcgaatcttaagaagtggcagctatacgcagaaaactatattgactgggtgggatattcccaaactaacggcttatctcaccacatacaagattttgacattctctttgacgacaaggaaaacaacaatgaataa

SEQ ID NO: 153138 - DNA, 1470 bp, Enterobacter cloacae
atgattgaacagttcttcagcagatacaaaattgcgtacattgcaggattagtgtacatccttcctatcattattgcaggacgtatgtttaatgatgatataggaagggcaacggagggttatactaaatggggtgtaaacggaaggccactaagtgactggattatggagggtctaagctttggattccctataagtaacctttcccctttcaccataattattgcaatgctaattactgtgctctgcggcgctctacttgctgagcactttggtgttgaggataaagcaaaaagaaacatactggctttttcttttattatatctccgttttatttagagaatctttcttatcagttcgattctctgcctatggctttatcattattattcgcatctcttgcgttcacaatcccaggaaagttcagacctttagctggctgtgcagttggcaccgtcttgctgattggcaccatgtgtctttatcagccatctataaatgtgtacatcatactagtttgttttgctgcaatactagcaggaataaatagcgaaggtcgcattttacttaccgctttatacaaagccatatcattacttgtagctcaggtgatttactctttagcaattgtacctgcctttatcgagggtgattacaacacaaatcacagtattatgattactgaaaaaccagatccgataggtctgctttttagtaatgctcaagcattttacgatagagtattaaactcactagatacaacggcatacgtgatagcagttgctctggtagtattgctattagtgatatggataaagtctttatttacacacaataacaataaaaacaaattaaaccttgcgtttgataagttaactatactcattgcatttccagttatttttatatgcatagctggccccttactattactctataaaccagtgacaaacccccgcgtattgcttggcgttaatgccatagtattcattggggtattttgtgcgatatatttcttaagccgatactggaaattcctgatgattgtcccggtggtttacgctttctcactttccgcagcgtatgggaatgcttcaaccatgcaaaaaaggcttgatgaatatcgggcaatagtaattgccaaagatattaacaatttaaataaaccatttaagaatcttgtttttataggcatgcctgagctttccaaggtgtctaataaatatgcagacaacttccctgtcattcgtcaactgattaccccatccataagagagaactgggttttcgcaaactacttcatgcggcagtatgggatctatctcaactatattcatataagcaaaggaagagcaaccagagatgctttatgcaaacaaggtgtattaattgctaatgatgactattttgttatgcacaattcagacgcggtaataatagactttacaaaatgtaaagacgtgaactaa

SEQ ID NO: 153139 - DNA, 321 bp, Enterobacter cloacae
atgaaaaagccattaccccccgtattacgcgccgcgctgtatcgtcgcgccgtggcatgtgcatggctgacagtatgcgaacatcagcaccgctacccgcacctcaccctcgacgcgctggaaagcgccattgccgacgagctggagggcttttacctgcgccagcacggcgaggaaaaaggccgtctgattgcctgttcactgctggaagacttaatggaagccggaccgctcaaggccgcgccgtcgctgtccttcctcgggctcgcagtgatggatgaactctgcgcccgtcacatgcaatcgcctgttgtgcactga

SEQ ID NO: 153140 - DNA, 525 bp, Enterobacter cloacae; identical to SEQ ID NO: 130254

SEQ ID NO: 153141 - DNA, 3009 bp, Enterobacter cloacae; identical to SEQ ID NO: 128917

SEQ ID NO: 153142 - DNA, 591 bp, Enterobacter cloacae
atggtaaagaaaagcaatgtagaagttttacacaaagaaaaaaataatattgaaaacgatattgaaatagaacataaaaagaacccattcgtttttaatatgtctatcgacacaaaaaagaaaaaactaactgttgatcgtggttcagaagtagaaacagaagaaggggttttcacaacaacaatttcgcaaattcaagaagttgatagagaagaatttttaaaaattttcactggacaaatcaaattttattttgatttgtctcagacaggttttaaattgttttttattattatgggtttgtatcaaaaacagatcggaggtgacgaaatttatctaaatttcgaaacggctaaagaagaagctgaaaaatacgaatcagcaatctcaaaagccgtttattatcgaggtttaaaagaattattagagaagaaaatgatcgcaaagtctgttaagaaatacattttttatattaacccagcaattgtatttaatggcgatcgtgcaagatttgttaaagaaattaaaattaaagaagaagaaaaacaacaagaagaaaatttaaaaattcttcgctcaaaatatgcttaa

SEQ ID NO: 153143 - DNA, 744 bp, Enterobacter cloacae
atgggtaattcgaagcgaaatataaaaaaactaaatgataattttcgagagagtattttagattatgcgatttcgcacaatctaaaatgcgcccaggcacttgtggcattatatgccacgggttgcagacctgacgagatcgaaactgggataaaagttaattttgatagtaaaaacaataagttaagttttaaaatcataggttctaaactcaattatgcacaaaaaagaggtattagaattagagaagttaccgtaaaaatcacagacaaaaatcttcaatattacaaacccattattgatatttttgaaaaaaattccggtgcttatgatttaaaagtaaaaacggaaagtgcaaaagcattttcaggttatattacaaaaataagtaaaaaactatggcccaggaaaaaacatcatgtttctgcatatagttttagacatgcaaaagctacagaattaaaaaactctgaaaaatttgatactgaagaaattgctaaaataatgggccatgcctcagttagatcacaagaaagttacgggagaaagaacaaaaaaagcgcgggtggatttgacgacattacggatgttgaaacaagctccaagccccgtggtggcgatagattgctaaggttcaaaattgcaagcaaacagaaggcagccgccaagattgcggctgtttccacccctcaagacacagtaagtccacctccaacggctcccgttcgttcattaaaacgctga

SEQ ID NO: 153144 - DNA, 717 bp, Enterobacter cloacae
atggcaacgaaaattgataatgacgaagtaattccagatgaggaattaaataaaataatagaagaaataaacaatgaggaagataaaagaattaaagtaattgttgatgaatatcaacaacttacgcaaaacggttttttcgtacttgatacagaaacaacagatcttgttggtgaggttgttagtttttcattgattgacgacaaaaacaatatattaatcaatgaatattgcaaacctacaagaaataagatttcaaaaactgcacaggcaatacataatatttcaaacaaaatgatcaaagatagcagaaatataatttccatatatgaagattttttaaaaataattaataaagaagaaaataaaaataaaactatttttatttataatgaagattttgatctttcaacaatatatagatctttaaattatgcagaatataaatataaagaaattaacgatttcgacaatgtagagtttagatctcgttgcgtaatgaaagactttgcatattattacggagaacataatgagtactatgatacagataaatataaatggaaaaaactcgaattcgccgcaaattattttaatatcgaaacgaaaaacttagaattgcataattccgccgtcgattgttatttgactttaaaggtaattgaaaacattagagatcattttaaaaaagaaaacgattatttttctggtaggtaa

SEQ ID NO: 153145 - DNA, 591 bp, Enterobacter cloacae; identical to SEQ ID NO: 153142

SEQ ID NO: 153146 - DNA, 285 bp, Enterobacter cloacae
atgaatacatttttatacgtgcttttggcctggattgttgtgctttttatcgccaacaaactgctcgcaagacgtaagcccaagacggttaaaatcctggtacagcgcaacgggaaagccgcagaggttgatgctgtagtggttcagggttcaaagagcgctgacgacggtgatgatttagatgatgatcaggacgatggtcttttcgatctgaatccttatacacgtgaaaaccaaactaatggttgggctattctggccagaggtgatcaccagtcaaaatga

SEQ ID NO: 153147 - DNA, 1497 bp, Enterobacter cloacae
atgcagtggacagcacgggttttccatcatcaggtccatcttcctctggcctggtttgatgcacgcagtaaggggagtattaatgctcgttttgaggcggtagataccatccagcaggcgctgactacgcaagtgctggaaggtattctggatgtgttgctcgtggtgactgcgctttgcatgatgctgctgtacagtcctgaaatgacattgatcgccgtacttgcagccattttctatggtgtgttgagggcactgtggtatccgtcccttcgacagtcggcagaagatgcctgggatgcaggtgccaaggagtccgggcattttcttgaaacactcaacgggatcctcagcctgagaattaacggtgtgacggcacatcgtgaggccgcctggctgaatctcaacgttgcccgcagaaatacgcagttgcgtcagagccgtctgctgatgtgctatgacattgctcacactcttaccggcagcgtggtatcagcaatcattttgtggaaaggcgccggggaggtattgaatggaaccttcaccgtcggcatgctggttgcttatttatcctatcagacgcgtttttcttccagtatcagtagcctgactgataagtttttttcctggcgtatgctcgatgtttacaacgaacgactggctgatattgtactgaccccgacagaaggccttcagcaacagccttttcgtgagcataacaacgcttcgcacattccttctgtatcccgcagggagatggatgaatatgctcatgctcctctagtacttgagcacatcatcttcagccacaagggaggggaaaatccgataatcggcggggtgtcgctgacactcaatcccggagaagtcgttgccattacaggtaaatccggatgcgggaaaacgacactggtgaagcttatccttgggatccacatccctgatgagggcaggatcagggcatttggcatattgcatacgcatccggattattttcaggttcgtcagcgtatcggtaccgtactgcaggatgaccatcttttcaaaggttctgtagcagataacattatttttttcagtgatgaccgaaattatgaacgaatgatccagtgcgcaagactggcacttatcgacagcgatgttatggcaatgccgatggggtatcagacgctgattggtgaaaccggcggagggctttccggaggacaaaaacaacgcattctgctggcaagggcgttgtacaagaaaccgggattcctgttactggatgaagcgaccagccaccttgatgttgagagtgaaatccggataagccagaccttacgtcaactggggcttcctgttctgctgatagcccatcgcccggaaaccatagcctctgcagaccgggttttgtatctggcagacggctacttaacggagctgaatctccagcatacagtcaataatggcgagtctgtttgtgaatatactaatgacgtgatggcaaaaaattaa

SEQ ID NO: 153148 - DNA, 264 bp, Enterobacter cloacae
atgacgggccctgttcagtatcatcaggtcgcctttgagaagggtgactccggcactttcaattgccacatctgtacccgttcccatggctatacccacgtcagccgctgccagcgccggggcatcattcacaccgtctccggccatcgcaaccacatgaccagacgctttcagtcgggttatcactgcttttttgccatccggcagaatcccggcttcaacatcctctattcccagttttcgtgcgacggcttcagctgttag

SEQ ID NO: 153149 - DNA, 441 bp, Enterobacter cloacae; identical to SEQ ID NO: 97789

SEQ ID NO: 153150 - DNA, 195 bp, Enterobacter cloacae
atggaaattaatggagaggccagtcagcatgacatagttctgatgtttgccctgaaatatcgcctgaccagaggaggcgataattctgtatgtttccatcttcattccggacccggtatccatcggtctcgcaggatcctccaccgtccagagaaagacatcacgtgcacggctatgctcgctaaaatcggctga

SEQ ID NO: 153151 - DNA, 438 bp, Enterobacter cloacae
atgcacggtgagcgcggtcgcatagccctctgcaatccacaggcgttttccggcctgttttttcccttcgatggtatggcacgctccttttaccgccccgcctttcagggtgcgtttgagaccgtcagaactgataagctgaaggttaaccagtgcgccggtatcgtcatacagcgggacaaccacatcaccggcgcggaacgtcacgccgccggttttgtgtgtggccgtcagcatgacacattcataaccggggaagcccttgcgggtcaggtaggcattgccgctggccgtgcgggttttctccatgagcctgacggccagcgcggccgccgctttgcggtcagcctccgtttcagcctcggcggccgaaatcacttcgggggcaaccggcggcaggttgccggtcacggcgttcaccttcccggcagcctctga

SEQ ID NO: 153152 - DNA, 627 bp, Enterobacter cloacae
atgtcacttatattcttagccaaaaggctctcatctgttattgcggcaagcctttctcataattacatatatgaaatatcttcaatgattttcaatgatttaatattaaaagagatagctaagaaatttattatattaacacatagtctctttttctttcaagagttagtcataacagccagttctgagaaaaaaataataaaagactgggctttttatcggataattaaaggggcgcatagtcaatgcctcaagctcaagaaagatgagcttctcaatgaatatcaatcattgtggcaaactctaaaagatgcaaaaaatggcatagtcaatcctgtaattttaccgaatgtgatgagaaatattcttgaatattatttcagcttttcatgtaaaaaggatcgactaaaagaggtactaaggactctcgcagattcccatgcagaaccacgatacaactcattttatcgatttataaatagacattcacactctgatggtaaaaatattcaaacgatcggagcgatcgacgctcatgtttatttggaaatgtttgaaagaatatttaaagataccggcgatgatgcacattttaatgcgatgatgagtgatgaggcgatagcataa

SEQ ID NO: 153153 - DNA, 606 bp, Enterobacter cloacae
atgaataaggctttatggattgcggtttttttgttagctcttatagctttacttggagtgtttttttcttattattattggttcaagttagagcttggttttcatatttcaaaaagtcccgaggtttgggggcagtttggtgactttgctggagggttaataaacccaatactcggttttatcacggtcgtaatactaataataacttcattgtatcaacaaaagcaatatgaacgattagagcgacgtgagaaaaataaaatatttgatgaccgattctatggtatgatttcttatcaaagagattttgccaatgattcaatatttcctcttgttcgtggcttttacattttggtaaaaatgatcaatgaatctcataatgaggaaatagaaaaaaaggatgctgataaatattatgaatggctcgttaatctgactgactatagtttgatgagacttgttcttttatgtgtttattattacgatgggatatcatcctttaactatataaagtccaactcagcttttattgcaaagctgtctatgattgggtggggagattatatagatgaagttaaaaagcgaaaactgcatatcggtaattga

SEQ ID NO: 153154 - DNA, 831 bp, Enterobacter cloacae
atgtctgcctcagatgtagattttgagttaaagattgactcaggaaaaactttagttgatatggaatatggccttgaaactatgtctggattttcaggagctatcgccataacagcagattgcatcttgtctaacgaagtgccatctcaaatgaactactctgccaatgttagagctaaactcatgagcgcttgtcttggttcatatatacaagacttcaaacttgttgtgtcggatccagtaaaatctgccaaattagcgcaaataggaaactctgtattgtctgagttaatcacatatttcatatgtgaaactatgtatgttgagcccccagctttgactaaaaaagctgagcgattactatctaaacttgaaaaaatcgaaagcaaaattattgacagaatacatgagcgagttaaagatatgcataaagtatcgcgctcaagtaaataccctgtcattttgaaaagaaagactcaattaagaacctttaaactattggagataaatgaagcaacttcaagcaatctttttaatttaacaacagatcagcaacctgaagaaattaatgccattatcacaagatttaatttattcactggcaatggcagattacttgccgatggctttgctacaaccataccgttcagtttttcagggtcttatagtaaagtaaagtcatctattaaaagaatgatgtcagagaatttgcataataataatgcaatcgaagatgaagatatcgttagattaagaattactgcaaaagcaagaagaaacacatctggcgatgttgttaaatatcttattgatactgtggtaaagccatga

SEQ ID NO: 153155 - DNA, 294 bp, Enterobacter cloacae
atgtccaggacgatcggcaacaaaagttataagctctgcaaaattgacaataccgtttggttttttatctatgattttatcaagaattgcgcaaatagtttttacaacatcaatatttttacgttcgttatgaccaccaatgcaatatgtatcaccgatcttgccctctgtagccactttgtacagtgcgcgggcgtgatcatcaacatacagccaatcgcggatctgctcgccgttcccatagaccgggagtggttttcccgacaaagcattaagaataatgagcggaattaa

SEQ ID NO: 153156 - DNA, 207 bp, Enterobacter cloacae
atgtctactaataaaactttagaagcggccaacttctggcagattgaacgtgcgaagtttgaagagatgcatcccgatcagcgcatcatgctgaaccgcattgaagagcaactccacagcaacattatggctgctgtgatcctgctgaatgacttctctttctccattcgtgaagttgaacgcaaagcagaagcaaagaaggactaa

SEQ ID NO: 153157 - DNA, 216 bp, Enterobacter cloacae
atgaagaaagcaatattggtgacattgggactactgttttcaccgttggcggcagcagggcagatcacaatgaccgatccccagcaggaaacgacggagagtggaaagacgctctgcacataccagaacagcatttatctgttcacctacgtaacaaagggcaagtgcccgtatgcgaagacatttgatactgcggatgctgcggattcagagtga

SEQ ID NO: 153158 - DNA, 504 bp, Enterobacter cloacae
atgacagataaccagggactttccccaaccgaagttgaagcactcttcacagagacatttaccacccactccagccctattccaacgcaagtaacgaacaccatcgaacaaaggtttgatagtctcgtaccgtatttcaccgaagtaacgcatccacagaaacgcagcagacaccccaaggtgctgactttcaccaccgatcataaactgatgtgggcatacctcagaagccaacagagcgagataaccggatgtgtgatgttcgacctgagttgtgcggcccgtgatctcggtatgtcacagaagacggtaatgagcgtcatcgatcaaatagaaaaagctggttggattatctgtcggagcattggcactcccggtgctggaacctaccaggtcacgattcaggacattgaaactatcgtttcagtttgtagctccattagttacgcccagccaactaccctaacgatggatgcgttaagaggtactcacctactccactaa

SEQ ID NO: 153159 - DNA, 204 bp, Enterobacter cloacae
atgtaccaaacgaaaactgatgtgctcgaagctctgcgtagcggaaagctccttcccaagatttgccaacaatactcccacaacaaaaatctctccgacgaacgacgcaagatgttcagggtggccttgatcagctaccgcattgagcagcttcaggagattttacgtaacgaggaacaaccgaatgaacatccgattcactga

SEQ ID NO: 153160 - DNA, 1017 bp, Enterobacter cloacae
atgagcgttaacggcgtacagcttcgggtacgcggcaaggtgcagggggtaggatttcgtcctttcgtctggcagcttgcgcagcagctggggctggcaggcgacgtctgcaacgacggagagggtgtcctggtgcgtctcgcgggcagtgggggtgactttaccgcgagactgcgccaggactgcccaccgctggcgcgcatcgatcgcgttgaaacacagccgttcagctggacgacgctgccggacgagtttgtcatccgccacagcgagagcggggcgatggacacgcaaatcgtcccggatgccgccacctgtcccgcatgcctggcggagatgcgcgatccccgcgaacgtcgctaccgctacccctttatcaactgcacccactgcgggccgcggtttaccattatccgcgccatgccctatgaccgcccggccacgtcaatggcgccattcccgctctgtgtgccctgtgaaacggagtaccgcaacccggctgaccggcgttttcacgcccagccggtggcctgcccggactgtggaccgcagctggagtggcgagccggagacactattgccacccgcgaatcggcgttaagcgcggcggtggcgatgctgaaaggcggcgggattgtggcggtgaaagggctggggggttttcacctggtctgcgacgcgcttaacccgcaggcgattcggaaattacgggcacgcaagcagcgcccgaccaggccgctggcggtgatgatcccgcatgcggacgatctgccgggggccatccagacgctgttacgttcacccgctgcgccgattgtgctgacgccaaaagcctgccttcctgcgtttcctgaggagattgcgccggggctgaatacggttggcgtgatgctgcctgcgaacccgctccagcatttgctggctggactgccagcgcccgctggtgatgacctccggcaacctcagcggccatccacccgccataagcaaccagcaggcgctggaagaactcagtga

SEQ ID NO: 153161 - DNA, 915 bp, Enterobacter cloacae
atgaatgaacgcgaactatccctgataaaggtgctgggcgaggaatttggtcaggttctcgctgaaatgcgtgacagtttcagcaaaaaccttcaggcgcagcgagaagaatatgaagaaaagctatcgaggctcgcaaagcaggttgaagaaatcagcaatgcgcccgatcccgacattgagagcatggtaaaggcggccatcgctcatttacctgcaccgacagcaccaggattgccggatattgccgccatggtcagcgatgcggtagctgcaatcccggcaccgcgcgacggtaaaagcgtcacgcctgaagacgtccagccgatgattcaggagatggtcaggaatgccgtggcagaaattcctacgccgaaggatggtaaggattttgacccttccatgcttaagcagctcgttgagcaggccgtaagcgatgcggtatccgcaatgccagccgctgaaccgggtaaggatggcgcagatggccgggacgcgctgacgcttgaagttctcccctttatttatgaagagaaaagctatccgcgtggcagctatgcaacgcataacggcggcctgtggcgcgcttacgagaaaacccatggcatgcgaggatgggagtgtcttgttgatggcgtgtcgggcattgatatacagcattctgagcagcgtaccttcaccctgacggttaaccgcaccagtggcaccagtgaaactaaatcctttgacgtgcctgtaatgatttatcagggcgtattcaaatccggtcaggaatatctgcctggcgacacagttacatggggcggttcgctctggcactgcgacgagcagacccaggacaagccgggtgaggcaggttcgaaaggctggaccctggctgccaagcgtggccgcgacgggagggataaaacgtga

SEQ ID NO: 153162 - DNA, 579 bp, Enterobacter cloacae
atgaaattcgtagtttgcgctcatcacacccggatagatcatgcacaacgtcttgctgcgctactgcatgctcatctgctggttgatgacggtaaccacggcgcaaactggaatcatcgccgcgcgcttgaatgggcttcatggcaggattgccgggtagtgataatcgaagatgacgcattacctgttccagattttattgagcaggttagcgaatggcttaaccgcttcccggaatcgctggtgagtttttacctgggcactggccgaccacctcagtatcagatgcaggtagccgaacgtctgattgttgctgacaagacacggtctgacttcatcacgctgccgcgccttatacacggcgtgtgctacagcgtaccgcctcagcatattgaacgagtcctttctcgatgggacagcagtaagccagccgactatgcagtcggggatgcctatggcggcgcggtggtttatccgtgttactcgctggtggaccatgccgatggtgagccggttgagcgtcacccggactcagcaccacgtacagaacgccgccgggcgtggaggttgcatgtctaa

SEQ ID NO: 153163 - DNA, 204 bp, Enterobacter cloacae
atgaagtacagcttaaaaactgtgggtggtatcaactcctccttaacaaaccatgagttacatgtgttcctggaaggtgatgatagctcccagcacaatttcagaatcaatgtagaaggtcgggatatccatagccttaccttaaaagaaattgaagcattggcaattgagcatgcacgccaaagttttgctaattgcagttaa

SEQ ID NO: 153164 - DNA, 714 bp, Enterobacter cloacae
atgggtaataaaatcattacgttgtccggcgcggcgacggatgttctgtatgcgctgtttttccgtggcgcgcttcagtctggtgacctgccagctaaatctggtgctgctgagcttcgagagttgggattcgctgaaacacgccataccgcgacggagtatcaaaaggaaaattatttcaccttcctgactgctgaagggcaggagtttgccattaagcatctggtaaatacgcgctttggtgtgccaataggtcagcagtattgcagtgcaataaatattggcgttgagctcgacaccacagacgcacaaaaggctcttgatgaactggacgacaaaatccgtaatagcgatgcattcaaagtcctgaaagatggctggtctttcgaaaataacggggcgctggtgattaataacggccaggtgttcgtaactgatgcgaagattgacgatgccatgttgtctacgaactatagcgttaaaatgaacgtcgccggcaaaggcaagccgcacgaagctggcatgaccctcggtgttgaagatggtaaaagccgcgtgaagattttggctgaaaagcttgcggttgccgccaatcaccaaaacgcgttagagaccgccttacagcagtccatcaaaaaggttgtggacgaaactattcaaaaagctatgcagccaggcggtgcgatctggacttccttacggcgtggaatctga

SEQ ID NO: 153165 - DNA, 486 bp, Enterobacter cloacae
atgcctgaactcgtcaatccaacagactcgttgaatagttttcaacacgctttatccaatagcctgattagactctcaccgtgtgtagttcaccctgaaatgaaggtacttatggacgatgcggatggcacgccaaggattacttacgcttttgttcagggcgatattgttaaaggtgttgccatatacgtcccagcagatccatatgaagggaaaccctgttttggcgtaggttatgccgtagccgataaatttaaaaggcagggaattgccactaagcttctcaaagccagcattgaagaaatgcaatttggctttagaaactcctgcaacgaattttacgtagaggctatcgttggcgttgataatcaggcatctaacaaactagcttctgaagttctatctgatacgcccaagccggggaaagattctcactcaggtaagcctatcaatcagtacatgaagctattcagcaccacaaaataa

SEQ ID NO: 153166 - DNA, 807 bp, Enterobacter cloacae
atgttacgtgcacacttcaataacatggaaaaaatacttagcgctcagggagcttcagtagcaataactggacattcattgcataaaggaaccccaagagaagaatttatttccaaatttcttaaagatcatctgccgagcaacatatcgattggcactggggaaataatagatcatcaatccaagccgggcgatcaacggaatcaatacgatattgtcctgtaccgcaatgaatatcccaaaatcagtttcagtgaaactatttctgcttttttaattgaatctgtagtcgcgaccttagagataaaatcgactctaacatatgatgagttgaaaacatcaataaaatcagcccacaatgcaaaagttttagccccaagctatgaagaagttttttccatttcaaatttcagcaggggaataaggaattttctagtcgcatataatggtccccagaagatgcaaaccgtacaaggctgggtagataaagcacatcaagagcttggtatatcagtacctatgttgccgaataatcatacaagatttaacatcccaagtccgtcactagacgctattttcattcttgaaaagggattcgtgcactatgataattttattgctggaatcgacacaacacagattagacttcaacaaccatctatcaactgggttagcgctgactcacaggatggtaacctgttatatttatttcacatgcttcatcaattaatcaagtctgtccagggccgattcttaaatccagccccatacctgtcagggcaaagatttaatattagcgcaaaataa

SEQ ID NO: 153167 - DNA, 294 bp, Enterobacter cloacae
atgagttttgaagcccaaaacaaaacactacttagcaaacaacgtgaattaatcacggccgttgaaagaattgaacgagactcagttaaactgcataatgaggtaatccgttacctccaggaagtatcgaaaaagaatcatgctaatcttctaacctcaggagactcatctactttgataaatgatatcattgcgtttgatgaaagtgattgtattagcctggcaggagttgggaagaataacatacaaataggcgccatgctttttcaaaaagcaattaagcatggctgttaa

SEQ ID NO: 153168 - DNA, 123 bp, Enterobacter cloacae
atgctactgcttatcggtcactggtatgcaaaccgggaatccgtggtcatcgggcaaaccgttgcagaggtcccgcttgcagttgaagccctgcttcagccataccgaatttacggggtgtaa

SEQ ID NO: 153169 - DNA, 228 bp, Enterobacter cloacae
atgacaaagctatctaccgagcatgagaacgctgtgcgtgatgtagcccgtcaatgcaacgatgccatcaaaaaagccctaaagcagaagccaaagccaagctggaacgaggctgtgcctccgatcctgaaggagtaccacgagaaggttaaaccgatgggcgtaagcctggtgatgttcaacagcgtaatcggacgcctgaacgggcgttatggagtcgagtcatga

SEQ ID NO: 153170 - DNA, 294 bp, Enterobacter cloacae
atgcgaagaaaacaagcctcgcactggcagctacaggtgctgctgctgcatctgctgcattgggtgtgggggctgctggattccagttacttaaaagcacttccaagcaaatcgctgaaacagaccgctgggcaaagtcccttaacatttcgacccaaaatcttttggcatggcaatttgcagctgagaaagcgggcgtttctggggatcaaatggctgatatcttcaaagatattggcgataagattggcgatgcagttctcaaccaatcaggcgaagctgttgatgcattaa

SEQ ID NO: 153171 - DNA, 420 bp, Enterobacter cloacae
gtgcttggtaaaaaagttaattctggccgaaacctgctctttcgcctttttagccaggcggcgcaggtcatcccagcgcttacagatacccagccccggattcgccttctgccagaccgtttcatcaaagggatcatcgccttcgtccagggtgtagatgatggcaaagaaagtatcgtctttcactgcaccttccacatcgctgttgaaaccacgcagcaccttgattgcgtaatcacgcaattcgtagcaaatgccttctttgttgaaaccggcagtggtgataccgaaaagcagcgattgcaggcgtgcgccggtggcggtctccagaacgtcccagacgtcacgggttttgtgagcatgcagctcgtcgacgatggcacagtggatgttcaggccgtcgaggttgttcgcatctga

SEQ ID NO: 153172 - DNA, 270 bp, Enterobacter cloacae
atgctcagcaacatggcagagtcaaacgaccagagcgacgtaacgtttgctatcggctggtctgatggtgaatcaaagccgacagcgggaacaggaccggaagctgttgatggtctggtgcttccttctgatcgcacctggtacgtattcaagggatatgtttccgacttcccgttcgacttccagggaaacacggtcgtgcagacttctgccactatccagcgttccgggcagggggcatggattccgaaagagcagtctggtagctga

SEQ ID NO: 153173 - DNA, 270 bp, Enterobacter cloacae
atgctcagcaacatggcagagtcaaatgaccagagcgacgtaacgtttgctatcggctggtctgatggagaatcagagccgacagcgggaactggtccgggtgctgtagatggcctggtgcttcctcccgatcgaacctggtacgtattcaagggatacgtttccgacttcccgttcgactttcagggaaacacggtcgtgcagacttctgccactatccagcgttccgggcagggtgcatggattccgaaagagcagtctggcagctga

SEQ ID NO: 153174 - DNA, 1314 bp, Enterobacter cloacae
atggatggtggtaaaattgaattggaaataattggagattttggtgatgactttcaatttttcagtgaggataatatcccaaggatagtcgggcacattgaaaatgatggcctacttactcttgataattgtttttatttaacccgcaacttctcattcggaggaatatcaaagtctaaaatctttgtacataaagctttgatcggtgctacttgggaaaaagacgaaagggtgacttttaatacattatctttcgaggttgactgtttagatgaatggattggtattacaggaatcagtgtagagtattgccacaaggaaaaaaatgcaagtattacttatgatccaccaaaagtgataggcattgatcttgatgttgggatgaagcttgaaatatgttttgagtatacacttccaagaaaatcacgccttaaagaggctaaaattactcagcgagtatactttaagctttcaacaacagaatcgcgcgatttgaatgatttcactgcaatggcttttaagatagtcaacttaatgtgtttcgctatggatgaagtcatttctatgaaaaatcttgtggctacatcaaacgacattcaacgcagtggttctggtgagagaaaatatcctgcacttatcaaaatattttatcagagtattgcatactctgataaaataccgaatcgaactttccatgatatgcttttcagttattccacgatagaagagaacgctcagcaagtatttaataactggattaatgcttatgaatcactttcgcctgcatttagtctatacttctctaataaaaatggcgctcataaatatttagaaggaaaatttttaacactggcacaaggtttagaaacttatcatagaaggacaagtaatgaaacattaatgacagcagagaaatttgaatcgttagtgtccaaaattcttgatgcttgccccgaggaaaatttggattggttaaaaggccgattaactcatggcaatgaaataaatttaggtaagagacttaagagaattattgagccgtttaaagaacgaattggaacctcaggagagcgaagtaagctactgagaaagattgtcgacactcgaaattatttaacgcattatagtacagaccttgaaagtaaagcagccaaaagtagagagttattaattatttgtaataaaatggaggctattttcaacttgcatttcttgactgtcgttggttttaatgatatcgaaataaacagggttatagataattgctaccctcttaaaacaaagctaggtgagaaactgcctattaaaaagtag

SEQ ID NO: 153175 - DNA, 279 bp, Enterobacter cloacae
atggcgaaaggttattatctggtaaagggcgacataactacttgcggtggaaagattcttgagggtgatccgaccgataccgtcatggggatccctgtagcccgggagcaggagaatgtgacctgcggaaaacatgcaggcacgtacaaaattgtgggacatattccgaacaataatgccaatgggcgtaaatatgcgggttcgctacatagcaccagcagttgcccctgtggctcaaaatttatcccttcccggcatgaacgtacttatggtggctaa

SEQ ID NO: 153176 - DNA, 1152 bp, Enterobacter cloacae
atggtgctgatgatcttgattggattcagtatcgtcatatcccgtctggtgacgggaaaaaataacgtattgctgaccgtgggtgctcccgcgattatgcttggtgggttgctgtttattttgttcgtgatttatctgctgcgtgcaatttccgccaatgcgcgagacagggagcgggaacagacgatcctcaaagaagttcgtcggggcagacgtgcgctgcaaattctggcggctgagtgctgcacggcacactcctctgcgaataaaccgttcacggccattggcagcaatctcgtgaaaaatgagaatgtcctttatccccagctatcctggcgcggggaagaagatatccgtctgagccagatagcccgtaccgggggagccaaagaagagcagcatcttcaggcgttattcagggcactaacccgcaaactggcgcagccgctgtcttttctgccagcagacaagtccgtaatggtgcttctggagcactcctcatctatacctgaggagaaagccttcgcccttttctgggacgcagtgcggcagtcaggtattcagcaacctgtttctatccttgccggaagaggtgcgcaggcgattgatgactggctcgaccactatatccgtagcgagtctgtccttctggtggtgtcgtggcaatacgcaccgctcaatacctcaatgtccgctgaagctataagcggaatactgttcgggaaccgactaacgcaggacatccttccgccgctggcctttcttcaccgccctgaagccggggaaggagagcctgacgcgttgcactatgccattactcaggcgctcgattgggtgccggttggcactgaaaagccggagcatctttggcttagtggggttgatgctgaaatcgaagcgcatgccactttgatgaaaggcattagtgctacaggtctgaaaaatatcgacccgcagatgggttttcataatttcaatgattttctgggtgatcccggtaatgcatcactatggcttgccgtggcaggtgccacacaatcaatacaacaccaaccggcccatcacttactaattagccgcgatcaacaaactggaaaggtctggaatatggttgtttcccctgcgtcttccgttaaggagggtgaagcatga

SEQ ID NO: 153177 - DNA, 816 bp, Enterobacter cloacae
atgaccgacaatttgtttgctcgcgctaaaccaaagcttaaccctcccgtcagtgcctggaaggaggacatgccagagaataatcaaccacagttagttccgccgcagttgctctggctaaataaaataaatgacacctggctggaaattcctcgttacgataaagggatgacctggtggggaatgattccttctgcagtattaatgcttggttttaccatctactcactttatagtattgtcataatgaaaacatcttggcatctaagtgaaaatatattattccttgttatattgttaagttttgtgttttttttaacaatgtttttattttgtattaggttgtattgtgttactcctcgagatgaacctgtccgtttcaacaaaaaaagacaaaatatttatatttttaaatgtaaaaaagaccgtatcccctggtttaaatggccggtcattatcacccgatataactgggctgatgttcacggtgaaattcggtattgcagcgatcgctaccgttcgggccatcagctatggggctcggtctgcgaaccgggaacgtataatgtcatccatcgttttcagcttgcggacggagagccggcagagttacagcaggtctggagtttcctctgcctgtatatgaaaggtgagccagtgcccgcagagcccaaaaataaaggcaggcccgacagctggcgaccacgaaaagcagataaatggccggaagagtgggcgcgggaatccaccactgcaccagatgttgaacaaccatccgtttcacaccaaaaaatattaaccgcctctgcaaaataa

SEQ ID NO: 153178 - DNA, 3141 bp, Enterobacter cloacae
atgatggatatgaacgcacaggcaaataaaaacgcagcggcaagccagcaggcagcatccacgccttcaggctgcaagtcgtgtgagcgtaagggggttgcgatatacccgctacgtgtggcagcagtcccggtttcactggttaataccggctggcatcctgccgttcctcaccaggaaacggagctgaagggaggcgagttcaaatacgccctgcgtacactgcgcgagggttatgtgtatgttctggcagataaacaggtctggtatgcctaccaggtcaccccgcagggttttttgcgcatgttcaatgcgaaggaaatgccggaaggagggaaggtggaacctctgagtgccgcctgtcttcagcagaatcatgatatccgcagcagctttatcaatatcgacccgaagcatacccatgcagccgtggccttcagcaatgacccgtggccccgtgatgtgctggcgaaatataaacaagccggtgccccggcaccgcgttttacacaactaactattgctgatggaaaaacagtgacaattgaaggtgcggggcgcagcctgacgcttgaccccacgctctcaactctgacaaagaacgtgctggagtttgcgacagaaaaattcccgggtattgtcggaaaagaggggcagcccgatggcgcgtatggtttttacccccgacgggatatcaagaagcagacggcgctgggtaataaggtcgcggagttacaggaactgtacggtgcagtgcatgccattgtgctggatgatgccatcgggattgttcaggaattgaatagtgccagaatggatgtcgttaaggtaatgaccgactatcaggctaagactgaaaatcggcataagaagatgatatcagatgccattatacaaattcgggccggaattgcggaaaaaatagcttcagatcccaccatccgagtgattcccggaaaatatcccatcagtcgtaccaaacaggtatccaagaaaactcgggatgcgatggagcgtctggaggaatattaccatgaatcaactcgcgctgaatttgcctctggttatcagtcaatagttgattgttaccagcagaagctgaaatctgtcgtacaggatttaagtgcgtcttatcagtctgttttttggcataccgtgatcgagcatgattatgcgccagaggtcagtgttattagttgggctgcacttctgagcacgcttgccggtaatctccacggtggcatggtagggatggacaaaagcgataaagcgactgatggcggtagaaccgtctggctttcatggatgcaggacccgaaaagtccaccttacagggctttgctggcgggcagaaaagatctgacgacgtcggtctatgacgggacgatgacttacgccaatcttaaaacgttgctcaatagcgacgagatgggacatttccttaacagtgatgccttcaggcaaacaacagcaagtctggtgatgtcgctgaatggggctttcagccaactgagcagtgtgctttcagagaaagcagaagctgggtttgtccgaacaatgtcggccctggcctgtgcagctggtgaagggcctatggttgcggtttattccggagaaatgaccataagggattatcagaatgtcgttcgtaagccattaaatgcctacggacaatctgtgctgactcaacgtcttgagaatattgacagtatcatcagtgcttcccgggcgggtcactggcctgaaatcaccgacccggtaatcctggacctcaaaattcaggtcaaactggcggctcccttgaaaacgatggactcgttgatgtttaagcaggcagcaagaaaggcgggaacgagcgtgtcggcgataaaatcggggcgcttgctcaaaaatacaggccagctggcggggctaccggacttgacaccagagatagtcagtcactctctgacaacagggaaaattcctttaagcgccgcagatatgcgcagggtcgcaggctttcagtctgaactgccgccgagtttttatgcaggcagtctgggagtggtactagccggagtcatgcttggttttcagatccataccatgcatgagaatatgaaatcgctgaaaacccggttacctgactcacaatctgtgatgtcgcttagctcgggaacgcttttaatgatggcgaccggggcagaaatcgtcgggcagacctatacgatattccaggcgagcaaagagatggtgcacccgatgctgaaagtggccggagtgatcggtggtgttgcggtggtgattgatggtgtatcgcttttgatgaaatcttgtgacgttagggctgctggggacactacagcagctgatttttataaggccgcaggttttgtctcgatagttgcaggtggggttggaatagcttttggaattgctggcaatttcgcgcttttcagtgaagcattaattttagggccagtaggctggtgtattgctctgggattagtggctctaattttggcatctgccgctgacagcaatgttcgctcgccgctggagcgctggctgacccatacctgttttggcgtggttgaaaagcgcggcggtaaagagaaagcctggagtgccgcaagcctgagtgatttgcaggacgcgatgaacgagctacacaccattgccagcggtgtttcagcgcagctagtgcgtgaccggatcaccgaatttttgtctagtactacgttatcgggaaccgaaatggtgtccgtgctggcgacccttcctgattgtagccagtcagggtctgactggctggttgagttaacagccgtgggcaatgggggcagggaggtgctggcgcgtaatggttccccgacaaagcttgcaggcctggacaaaccagtgcctcaaacttatgaggtgagttatgttatgagcatggttgcggacgccgttccacctgccattaaaatgacttctgcgccagagctggatgaaacgctaatcacggcgggtaccagcaaaatgctgcagctgagtggagaatacccgctaaatacccggcgcttcacgggcatggaactgaaagtcacttactggccagacaaaaagaacccagaagaaattttgcaactttcagctaccatggacagccaataa

SEQ ID NO: 153179 - DNA, 873 bp, Enterobacter cloacae
atggaatcccttacaaacttaactgatgccctgaatgcaaggcataatgaataccgctacctggtgcttgatccgctaaaaaaagtggcgacttggaatcccctgcatgcagacatgctcagggataaccagggtagggatgccctgcgcaggatattgcgtccagatctggcctggtcgccggagcattgtccgattctgctgttgcttgcttctccgggcggggctctggatgaagatctggtccgaagtagtgaaacctatgcatccggagaatcactgtacgagaagcgctatgtctgcggctggctgagttcagcactttcgcctgatgaaatggctgtctggctggctgatttatgcaaacgcatcaaaccgggcgtcagtatccctgcgttcgaacccctgcgccttgaactgttgcaggcgactgctaatcctgagttgctggcaggtctgcttgccgcaacgagtcagtggcactggatgtcctgtacgggtgaactgaggacactgagtggtagctccggtgacgatgtctggatactgaactggggagctgaacaggcacaagctgaagcccgtaatatttggcgcttgctgtctgcctggcatgaatccagtcacgccttaccttcagaggctgtgcgcctagccgctaacgcatggtctgcttccgggaatgtggcgttgcatcacctcagcgaccggttgtgcctggcgctcaataccctgaccttgcccgttgatatcactgcacatgctgtcgtacaggcccggctgcaggaagccgcggaaaacccagtgctgcgctttacgcaactgcttcaaaccctctcggacgctgtctggcaggaacttcgccaaggataa

SEQ ID NO: 153180 - DNA, 459 bp, Enterobacter cloacae
atgaagaaaatattacttttactctgcatggtgtctgctgtagctaatgcgaaaccactcggccctgctgagcaggccgtgaagttcaataaatggtatgtcagtcagatagcaaaggacatttacccaatattggacgggaacgagatcgataaattcgtcacagcgtcaacgatgaaaaaactgcggcatacgcaggatccaggatacggagaagaaagtgacgtattttacgacgctgatttgtttttaaaggcccaggatattcgtgatgactggtcagcgaatgtcgccgccatcgctgtagattccgatccggtttgcgtgaacgtttacatcgcgttcggcaagaaacaggagcatgttgtcgttgactgcatggtcaaagaaaacggggcgtggaaagtgcaatcagttacagctgcacagtacacgcgaaatgttgctggcgacaaatga

SEQ ID NO: 153181 - DNA, 267 bp, Enterobacter cloacae
atgattatttgtaaacaatcacaccgttacaacacgcttttcattagcttacctcacgatcaaggtggtgaaggtcgccataaatgttgcggctgcgcttacgatcagggttaccgcgctggcttggctcgcacgggccaggtttgggtagatttagccgccttacctgatagccaggcgggaaccgttcgccataaaagccctcaagctgcgtttgctgatggctatcgtgacggggtacgtgattcctaccgtcaggttggataa

SEQ ID NO: 153182 - DNA, 2151 bp, Enterobacter cloacae
atgagtagctctaataaaattatcgtttcgactgtaaatgaaatccgcttcgaaaccgacagcgcgtcatacaaacgtagccttcagaaaatcaaatcgcttaaggcagctcacgagaagcccgctaaagcgctggagaaggctcagaagaaagtgcaagtctctgaaggcaaggcagcactagccgcagcgaaagcccagacagcgaagcttcgacaggctgaacaactgtctaaacagcaacagaaacaagctcagatacaggccaaaatggagcgggacgcagtagcccacgccaataaaatgacatcacttcaggctcgccagttatctcagcaggagcagaaacaagcgcagagtgccagactagcagctatatctgacaaggtgagacaggcgagtcgctcccgtgcaatgacctacaaccctaacatgcttggagttcactccgacccatatctggtggcacgtcaaaatgcagcgatgaaccgtggtcacggcgctgttgctgctgacatcgcagccaccaaaaaggcgatggccctggaggagaagcgtcagcgtgagaaagaggccagtctgaaacgccagagcactgcatacgatactctgcgccgtgccagtttaactatcagtcatatcgaaggcgctagcctggctgacaagatgaaagctgtgcaggcaatcaaagaggctaccaagggatactccgagcagcgttataccatcgcagaaatgcgccatgaacttgctaaagcgactctggaaaccaggcggcaggcacgtattaaccgccagattgttaaagataaagcgaaagccaagcgagcagggcgcatcaatgctcaacgtctgaccagtgaacgtagcgaacgtggttatggtggcctcgctgctactggtgtaattgcaggtggttccctgattggctcaatgggggttgctcgtgttggtcagacactacagggcagtgttgaacgcaaccaacagatgaaggctttacagtctcaaggcatctcacgtcttgaatatgaagccgtgcgtgatgttgtcgctaacaaaaccggctttaatgtctcgcctgataagatgctggatttacaggccgattatcgggacaaggtgggccagttgacggctaacggggtttggaagaccgacaagagcggaaaggcaacgctgtcaggtggcggggaattgggcgatcttatcaacgccattgcaagcaaatccaatgcaacgacggcgaagcgcgttattaaggagctagacaagctcgattttaacaccgcaatggtttacctggctcagttgtcccgtcagttcaaattttctagtaaggaaacggctgcgtttgcagaaagtatcaacgatgcgagcaaggttttacccgcctttgtagacggtggtgacgctgttcagaaacgcatggatgacctcgcccgtaatggttacgccctgtcagacgcacaacaggaacagctaaaccgcctaagcgctctctctgttgaatattcaaggatcaacgattcgttgagtgatattttcagctcaggttttgctgatgggttgggagaggttggcaagaacacttccagctttagcaaaggtatggctggcctcgttcctattatggatagtttggggaaggctgtaggccaggcgactgctgatatgttgttatttgccggacgggtgggccaacgtgttaacgagggtgcaacactgccggatgcagtctacaacaccgttgtggatgactctgcaaacggtgctgccaattggataaaggaaaagacaggatttgatccacgtagcatcggtcagacgcttaagcagatttatcggtggctggatagttccgctccgagcaatatcggctcaggcacggcgtataacgatccagcgctagcgttgaatgttcctggtttcaactcaatacaaccccagcaaccaacgtttacgattccgacaattgacagcatgacgcagcgacagccgattcctgttgcggtcactggcgaagctgagattaaactctcaccgcttgatattaacgtgaatgacggcgctattaacggtttgattgataccaagataagggaaaacaaccaggcgcagaataacctcatccttgggattgcagaataa

SEQ ID NO: 153183 - DNA, 213 bp, Enterobacter cloacae
atgaaattagctttgatcggtactggcaacatgccgcttatgcagtggattctagatggtaaaggcgatgatgcgatcatcaacatgtcagcgttagcgcgtaggcttgggtgtagtcgctccagccttcttgaccgcattcaggcctacgggttcgattctgctattaagcattacctcaacctacagcgacaacgaaaactgaaaacataa

SEQ ID NO: 153184 - DNA, 936 bp, Enterobacter cloacae
atgccgaactacctgcgctttgtgcgtggcctgatagactccaacgatctgccgctgaacgtctcccgtgaaattcttcaggacagcaccgtcacccgtaacctgcgcaacgccctgaccaaacgtgcgttgcagatgctggaaaaactggcgaaggacgatgcggaaaaataccagaccttctggaaacagtttggcctggtgctgaaagaaggtccggcggaagacaccgcgaacgtggaagctatcgctaaactgctgcgcttcgcctctacgcacaacgactcctccgcccagaccgtgtcgctggaagagtatgtctctcgcatgaaagaagggcaggagaagatctactacatcaccgccgacagctatgcggcagcgaagagcagcccgcatctggaactgctgcgtaagaaaggcatcgaagtgctgctgctgtctgaccgcatcgacgagtggatgatgaactacctgaccgagttcgacggtaaatccttccagtccgttgccaaagccgacgagtctatcgataagctggcggatgaagtggacgaaagcgcgaaagaagccgagaaggcgctggagccgttcgttgagcgcgttaaaacgctgctgggcgaccgcgtgaaagaggtgcgcttcacgcaccgtctgaccgatacgccagccattgtcaccaccgatgcggacgaaatgagcacccagatggcgaaactgttcgctgcggcgggccaggccgtgccggaagtgaaatatatctttgagcttaatccggatcatccgctggtgaaacgcgcggcggatacccaggacgacgcccgctttgcggagtgggttgaactgctgctggatcagtccctgctggccgagcgcggtacgctggaagatcctaacctgttcattaaacgtgtgaatgcgctgctgctggcgtaa

SEQ ID NO: 153185 - DNA, 309 bp, Enterobacter cloacae
atgaaagaactacgtttttatggcggcagtgacgatttattcgaatgtgaaggcgcgtttcgagaagaagtttactgctttggaaaaccaggtatttaccacctgaagtcatcagaaggagaaatgaaggtcatcgggtattacatggataccgggatctggagtgttggagtcagtcaggttgatgaaggcataccattgcctgaatgggccgcatcttatagccaggcccacgaatatagcccaatgctcacccttcacgttcctgatgacacagccctcgttcaagacgatgaagaggacgactga

SEQ ID NO: 153186 - DNA, 258 bp, Enterobacter cloacae
atggcagaaattatccaggcgaaatgccaatgcggtgagccaataagtattgagctcaattgcgaacgcgcatcacgcaaagacggtaaacgcccgttctatccagatgaaaacgttgtgccatggtcaatcgttaatgatggtgagcgaatcttctacagccaggacggagtgacaactttcaggtgccgtggttgcggcgggtggattggtaacacggtaccagaagccaaattcgaatcagcatgtaaggaatag

SEQ ID NO: 153187 - DNA, 726 bp, Enterobacter cloacae
atgagttggctcttttcgcaggcgctggcgggggaatactcggcggacacctccttggctgccgaacagtttgcgcagttgaacgtgatgcctacgcagcacaagttctcgcgcaacgacaaaacgatggaatcctccgagctttcccgatttggtctgacgtgtgcagttttgacggaaagccatggaagggaattgttgacgtcgtttctggaggatttccgtgccaggacatcagctcggccggtcgtggagcaggaatcgatggtgacaaatcaggcctatggaaagaaatggcacgaatcatcgatgaggtacgacctgaatacgtattcgtggaaaactcacccctccttattggaagagggcttgccgtggtcatcagtgaccttgccgaaattgggtttgattgccagtggagtcgtgtttcagcaaaagaacttggtgcgcctcataagcgagaccgtttgtggctggccgggagaaatgttcgcgacaccgcaggcgagggattaccggtccggctctctggacagatggaacgacccgcgacgctctcggaacctcaacgaccaggttggtggcctgctgaacccgagatgggaagagtggctaatggggtggcccatagggtggaccaaattaaagcccttggcaatggacaggttcctcgagtggcagcaacagcattctccatgctcacaaagccatgaggaggccgcatga

SEQ ID NO: 153188 - DNA, 369 bp, Enterobacter cloacae
atgagcaacatcgacaaacgcgccttacgtgaagcggcggagaaggcgctatcagcagtggatggaaactggcagacatggcgtgaagctgggatgaattaccctgagatattcacttcttccggacacattgttgcaacggttaacggttcgttcgctgttgttcggtcagatttcatcgccgcagccaaccccgccaccgttctggcgctgctggatgagctggaagccaaagaccagacgattgctgagctggagaaaagccatgctcaagttatacatgctcgagaccattacaagagcatggtcgacgaaagatttcgtcgtattaatcagggtatcagtctcagcattaatggtgagggctaa

SEQ ID NO: 153189 - DNA, 231 bp, Enterobacter cloacae
atgattataagactgaaggcaacgatggtatcagataagcatggattcctgaacccagtatctgagagagatatttacattaacggagatagcatttctagattcttagaaaaagatgaaggtactctaataacgttggtcgatgggttcaaaacagtagttagcgaaaagccatatgaaatttattgtaagctgaatggaattcaagacccaacaaaagccgcatattga

SEQ ID NO: 153190 - DNA, 162 bp, Enterobacter cloacae
atgagcaaagagccgtcaagtgagaatgatgtcgtctcggtgcgagttaccattcgagatagtaaagatttatctcaagagcaacttgaggggcggataaatgctgagtttgatgagtttgtaaaaaccgcgatagtaactcgacgagaaagcaatgattga

SEQ ID NO: 153191 - DNA, 222 bp, Enterobacter cloacae
atgatgcggtctgactggcatcccgccgacattatcgcagcgctgagaaagcgggggacgtcgctggcggcggtttcccgtaacgccgggctggcgtcctccacgctggcaaacgcgcttacccgccgctggcctaaaggcgaaaggctgatagctgaagcgctgggcgttgcaccagaacacatctggccttcccgctaccgcaagcccgaaaatggctaa

SEQ ID NO: 153192 - DNA, 225 bp, Enterobacter cloacae
atgaagagcgtcaaaattgaattttcatccgatggtattgtaatcatgcacgctggatttaaggtcttgcagggtaatcgcgtgttggttgaggattccctgtctggcaagatttcagatgtatttgtccgtcactatgaagtacgtgctgatgacggccctgtatctattcagtttgcgaaaggggatatccccggcttaaatgtgaaggccacactatcctga

SEQ ID NO: 153193 - DNA, 408 bp, Enterobacter cloacae
atggatagattctcctcaaaaatagccacaatttccggcatgaacaataaggaaataatcgatctccatatcgccatgcaggaggagatcaagaaacagtatcacctgagagacaatccagaaaacttacagaatgccatttcgctttgcgaaaagtgcattgctatatctggaatcgttattcaggcaatgaagaaaaaacatcgatctgattgcgacgaatacgccagagtaacgggtcgcttatcacctaactcaaagttttattaccccaaccactacgctgcataccagctatgtgccatcctcaagaaacaaggcaatgtaaatcagatatcctacattgaggacaagatgattcgtgaaggctggggcagcggtaaaagcgttgatcttctagatttataa

SEQ ID NO: 153194 - DNA, 234 bp, Enterobacter cloacae
atgtctgatagaaggtataagcacccgcaagtcaatttaaggctacctgaagacttgaaagccaggataaatgaactggccgaagctaatggaagatcagcaaacgccgaaatggttgctgccttagaggcgtgggcggagaaacacaaaggtgcccaagcactgaaccttgcctccatagcggaaagactggcatccctggaagaagaagttaaggctttgaaggaaaattaa

SEQ ID NO: 153195 - DNA, 147 bp, Enterobacter cloacae
atgaaagttaaaacactgagattgccagagtggctggaaaaagcgatggaggacttggccaagaagagtgatcggtctttcagcaaagaggcggtcagagcgatgagagaatatgcagagcgtcaagggattaaatgcccagaatga

SEQ ID NO: 153196 - DNA, 720 bp, Enterobacter cloacae
atgcaagaattactcgattatgcggcatcgtcgcaggatgaagtatgcgcgctgatcctgaatggcgagcgagtgttccgctgtaggaatgtgcatccacagccctggcatcacttccgcataagtgacgacgactggcttgcagcggaggaagaaggggagattatcgcagtattccattcgcatccgcaaagccagccagcgctttctggtgctgaccggcagatgcaggtaatgacggggctgccatggtggcttgcatctggcgggcaactgaggaaatacaggcctgtgccactcctgctggggcgcaggttcgaccacggcattatggattgctacacgcttttccgggacgcatatcacctgtgtggcattgacctccctgacttcgaaaggacgaatggctggtggctgagaggggagaacctttatctgaacaacatgtcgcgcaatggcttcaatcaggtatcgccgggagaagcgctgccaggtgacgtaataatcaggcaaccattccccggagctgacccttgccacgcaatgattctgctcgatgacaatatggttcttcaccacgattgctcagggcatttaagccggagagagcagatgcgcccggcatacgttaagcagatgcattccatatggagacatgaacagtgctcatctttaaatttgcagggcatttacgccgacatttccgcaaagtcgagctga

SEQ ID NO: 153197 - DNA, 393 bp, Enterobacter cloacae
atggtatcaaccgcatccccagcaccatcctgcatggctatcgagcaggaaattcaggccaaaggcttaaccgcgccgcgcgttacgccgcagcacattgagagccttatccgctccgaagtttatttcactggtaccgatggtgctaattctcccggtgcgcgcgttaaatctgaatacgttgaaggtgagcgcatcctggcaccactcgatctgttaaccttctgcgtcctggttctgcgcaacggcttcaccgtcaccggcgaaagcgcatgcgccagcccggaaaacttcgacccggagatcggtcgcaagatcgcccgcgaaaacgcggtgaataaaatctggatgctggaaggttatctgctgaagcagaaactgagcgagaaatga

SEQ ID NO: 153198 - DNA, 300 bp, Enterobacter cloacae
atgacgtatatcgacgacgaagaacgcaaatccgaactggaggctgaacagcagatcctcgctcagcgcgatatcgaagatatccagttcgtcatgggcagcgagcagggccgccgcgttatctggtcactgctggagaaagggaaggtattcgcgccgtgcttcgccggtgattcgcatttaaccgcattcaacgaagggcagcgcaacctggcgctggttctgtttcagcgcgtcatggcgcactgccctgatcagtatctgaagatggccgcagaggccggtgaggacaatgtatga

SEQ ID NO: 153199 - DNA, 324 bp, Enterobacter cloacae
atgacacaggtacaaacccagcgcgtcgtgcgctttgatggcgcaaatcaggtggtagaggttccggatcctgccccggcaataattggcgccccgaccaccactgattacggtggcgtgaagttgggggcagccattgcagctccggcagcaatgacagctacctctgacaccaactcttccgcatcagacgttgccgggcttgttactgaccacaacgatctggtcgccaaatacaacgcgctgctgacagataccgctgcactgcgcaccactctttccgctgttctggcgcaactcaaagccaaaacgatcccggtttaa

SEQ ID NO: 153200 - DNA, 1452 bp, Enterobacter cloacae
atgttgcatgataatgtatctatagacagccgtatcaaggggatttggtatcaaatatccagccaaaataagcatccatcaattacattagatgaaataaaatccttagcagacgagaggggtttaattgtccttgaattaaaagaaatcaaatttggttatgacgtgcattctgatggcatactaataaaaacgaatacaggtagtgctatttttcctaggctaagggctagcgaagtaaatttatcccaagaacgaatcaccccgacaatgaattatgaaaaatactggaagcatattgactggtttttgccaccatacatttccaacggggcattatcggaatcaataagacgatgtggtgttaaccctaagaacttttcaacaattgataccaaaatagctcaaaatcgttttgaacatgaattcagctccttatacccattatcagttataatccccgtaactattcaaaatctatcccaatctacggcaatcagcaaacaccgccctattattaaagaagctatattagctttctacagcggaatgaaaatagccgctattgctgctctcatcccaataattgaagatattttgagagtcatcgttggtgaggaaggaagcgaactagatacagtaagtaagattaacagttgttttgatttagcgcgattgaacattttaaaacttgatatacatggggttgactggattcctaacgaatttagcgaccctgcatatttaaaagttaacaatgaaagagtgtttatgctcgagactcttagagcatggttgataaatagtttttacgcaaacactagtacctataacaaagagtctggattcaatagacaccattttgcacacgccctttctgatgtatggcaaaatgaaagtaattttttcagggcaataggtttaatacatgcgttagcatttcttgaatgcttttcattagtagagagcagaattagaatatccgttcctgaaagtaatgatgaatcacagtcttttcatgcagaggtgctggcctgtcttcaggcacaagttattaaaaaatttgcattgaatcgctttcagttaacgcatgaattgccatttaatgcgacagcatctgatgacggatggtcaatccgagctattacactgagtgaaaaaatggataaaatcataataccgctactgagagataaaggttggcaatgccacatcattggagacccaataaaagatggtgaatacataaccgttgaagcagagaaaaacggaagaaatttaaaaatagcattagtttatagttttgctatatcttcagaaatctattcacggtttagtgggtcatatgattttgtgctgtgtcaaggcgcttcttacatgagtaatgagtttacttctcatttacaatgccaagctttacccttgagcgcctggattgctccagacgcttga

SEQ ID NO: 153201 - DNA, 588 bp, Enterobacter cloacae
atggagcttgatgcaggaatcagtaacgaacatgtcttagataggatttgcgatgtctacggtttcgcccaaaaaatccagttggctaggcacttcaacattgctgccagctccctacaaaaccgttatacacgcggcagtatctcttatgacttcattgtccattgcgcccttgaaacaggtgccaatattggatggttgctgacaggtaaaggggaaaaatttgccaatggaaaaacttcaatcccttccgtatctgaggaactgaccattcaatctttcactttaagtgaaggaaaactggttgatgagagtgtatttaagatttctaaatcgctctttagccgcgttcctaataacccgcaatgccttcgctcagacaacgttactcactttctggagctcgacgcatcactctctgatgggtcatggctagtagatattgagggtgcgaaaagtatccgcgagttaaccgtcttgcctggcaaaaaactacatgtggctggcggcaaagtgcccttcgaatgcgggattgatgagattaaaacaattggtcgtgtggtgggtgtttacagcgaggttaattga

SEQ ID NO: 153202 - DNA, 522 bp, Enterobacter cloacae
atgtttgattttcagatttccaaacatccccactatgacgaagcgtgccgggcttttgcgcagcgtcataacatggtgaggctggccgggcgtgcgggtaaccagctcgcggggctgcttgctgccctgtcacccgcagggcgtcggaagcttgccagtgagattgcgaagcaactcagaacggcgcaacagcaacgtatcaaacagcaaaaagccccggatggctcaccgtatcaggcgcgaaagcgccagccactgagagccaaacaaggtcgaattaaacgggcgatttttcagaagctccgcactaaccggtacatgaaagccagtggccgtgaaaacggtgcagtggtggaatttaccggaaatgtgcagcgcatcgcgcgtgtccatcagtacggactaaaagaccgtccaaacgcgcacgctcaggatgtgcagtacgcagagcgccagttactcggattcagcctggaagacaaaaaattgattacaaattctataatagagcatttggtttga

SEQ ID NO: 153203 - DNA, 1143 bp, Enterobacter cloacae
atgccctgggatgcgagagataccatgtcattacgtaccgagtttgttttgttcgcctcgcaggacggggcgaacatccgttccctctgccgtcactttggcatttcccctgccaccggctacaagtggcttcagcgctgggctcaggaaggcgccgccggccttcaggaccgcccgcgcataccgcaccattccccgaaccgctcatctgacgacatcactgccctgctgcgcatggcacatgcccgtcatgaacgctggggagcccgcaagattaagcgctggctcgaagaccagggacacaccatgcctgccttcagcaccgtccataacctgatggcccgccatggcctgctgccgggaacggcgcccggtattccggctacgggccgcttcgaacacgatgcgccgaacaggctctggcagatggattttaagggccactttccctttggcggtggccgctgccatccgctcaccctgctggatgaccactcccgtttttccctgtgcctggcgcactgtaccgatgaacggcgcgagaccgtgcagcagcaactggtcagcgtgtttgagcgttacagcctgccggaccggatgacgatggacaacggctcgccgtggggtgacaccaccggcacctggacggcgctggagctgtggctgatgcgccacggtatccgggtgggccattcccggccttaccatccgcagacgcagggcaagctggagcgttttcaccgcagcctgaaggcggaagtgctacaggagagatggttcgcggacagcggtgagttgcagcgcgctttcgaccactggcggacggtgtacaaccttgaacggccacatgaagcgctggacatggcagtaccggcctcgagataccagccgtctgcgcggcagtaccgcgccggcacgcccccaccggagtacgatgaaggcgtgatggtcaggaaggtggatatcagcgggaagctgagcatacagggtatcagtctgaacgcaggaaaggccttcaggggagagcgtgtggggctgagggagacacaggaggatggctgttatgaagtatggtggtacagcacgaaagtggggatgatcgacctgaagaaaaagtcgatcatcatgggtaaaggatgttaa

SEQ ID NO: 153204 - DNA, 2412 bp, Enterobacter cloacae
atggctggtgaaattttacgcgaaggagtttttagcgaagccgatacttgtcgtgagtttatcacgccacggttagttgaagcaggttggtcgatagctccgtgttccataggggagcaacgcacgtttaccaatggtcgtattattgttgccggaggccgtgtccgtcacggtaagcaaaaacgcgcagattacttactctactatcgtcgtgatttccctttagctgttgtcgaggcgaaagagattagcttacctgcggaaaatggtgttcaacaggctcgtgaatatgctgaaatgcttggcctcaagttcgcatatgcaactaatggccaccgcatcattgaggttgacttcattttaggtactgaacgtgaagttgatcgttacgctacacctgaagaactttttgcgcgtttgaatgccgtaagccaaatttccaaaagctccgttgaacacttgttagaacccttcaacattatttctggtaaaatacctcgttattatcaacaaattgcgattcaaagaactatcgagtctatcctccttggccagagaagagtcttggtaacattagcgactgggacaggtaaaacctgtgttgcttttcaggtatgttggaagttatggaaaagtcgctggaaccgaaatggcgaatatcgtcggcccaaagtattgtttcttgctgatcgtaatatccttgtcgatgatccaatggcgaagatgtttgctccttttggcgatgcccgacataaaattgcaggaggagatgcaatccaaagccgtgatatgtatttcggtatttaccaagctttgagtacatctagtgaagatgtgttccggcaataccgtcctgatttttttgaccttattattattgatgaatgtcatagggggtcaagcagggaggatagctcttggcgcgcagttcttaattattttgattctgctgttcagtttggtatgaccgccacgccacttcgtgaagactcccgtgacacctacctgtattttggtaacccagtttatacctatagcctgcgacaagggatcgaagatgggtttcttgctccatatcgcgtccatcgcgtcatcacaacagtggatgccgctggttggcggccaagtaaatatgagcttgaccgctatggtcgggctgttcccgatgatgaataccagacgaaagacttcgaacgtgtggtagctttgcgggcacgaacgcgggctatagcaagacacttgactgactttttgaagggcactgatcgttttgccaaaacgttggttttctgcgtcgatcaagaacatgccgccgaaatgaggcaagaactgctgaatttgaatagtgatctggtgaggcagtatcccgattatgtctgccgcgttacctctgatgaaaaggggattggtctcacgcatttagctcattttcaggatgttgataaaacctctccagtgatcctcactacatctcaattgctgacaactggcgttgatgcggagatggtcaagaacgttgttttggcgcgagtggttggttcccgttctgaattcaagcaaattattggtcggggaacgcggctcaaagtcgattatggaaagaaatattttaatattattgattttaccggcacagcgacaaggcattttgccgatcctgattttgatggcgaaccttcacgcattgaagaagtattggtcaatgaggatggagagataatcgcaacaacaattgatgaaacatctgaacaagttggaactgatagtgtactagatgaggagtctgtcattgagggagatgttcgcggtgagatcatcagcgagtctccgctggaacctcgcaaattttatgtcgacggcggcgatgtcgaagtcataggccatctggtttatgatctcgacactgacgggaaaaaactgcaagttgtgcggtataccgagtattcgggtcgggctgtgcgcacgctttacccaacgcgagaagatttacaatcagcttgggctaaccctgatactcgcattgaagtattgcgtgagctgtcagagcgaggtattagttttgaggagctaacctcaagcagtgggcaacctgatgcggatccatttgatttactctgccatctggcatggaatgcccctctacttacgcgccgtcagcgcgttgaaatggcgagaaaacatacgccggatttgtttacccagtatggggatacggcaaaagagatacttgctctgttgcttgaaaaatacatcgagcgcggcatcattcagtttaatgccctgtctgaattaatgaagatacaaccttttgatcgatatggtagcccatctgaaattgccaatctccactttggtggtgtgaaaggattaaaagacgctgtatctgggctacagacagcactttatcaataa

SEQ ID NO: 153205 - DNA, 1803 bp, Enterobacter cloacae
atggcgaaacacgctactgaaaaaaaaacaccagcctctcgcaaggtaaaagcccccttaacaacacgtgaaaatctgactgccttgatcggaagtgcccgcaaaatacttagaaaagataaagggctcaatggtgacgtggatagattaccgctccttacttgggttatgttcctgaagttcttggatgatctggaaatagttcattcagaagaagctgagctagatggtaaaagctatcaatctataattgagcctccatatcgttggcgtgactgggctgctcgggaagacggtatcactggtgatgaacttcttgattttattggtcaggaacgcactattcgtgccgatggaacgatgggaaaaggcctgttcgcctacttgcgtagtttgggtggtgaaggtgaaaaaggtagccagcgtgaagttatcgctaacgttttcaagggtgtacagaaccggatggttagcgggtatttgctgcgcgatatactgaataaaattaatggaatccggtttagcgccagtgaggaaattcatacactttctcatctgtacgaatcaatgttacgtgaaatgcgtgatgcagctggcgattctggtgagttttataccccacgtccagttgttcgttttatggtacaggttacagctcctgagctaggggagactattctcgatccggcatgcggtactggtggttttctggtagaggcatacgattatcttgcccctcaagtgatcactcctgaacagcgttatgatttgcagcgaagtacactctatggccaggaggcgaaacctctaccttatatgttggcacagatgaatctgttactgcatggcttggaagcaccccagattgcttatggtaatacccttgaccgtcgaatcaatgaaatcggccatagtgaacgtgttgatgtaattttgacaaatccaccatttggtggggaagaagaagttggtattaaggctaattttccacctaatatgcagacttcagaaacagctttactttttttacaatatattatgcgtaaacttcgtgtggctggatttggtgctgaacgtggtgggcgtgctgctgttgtcgtaccaaatggaaccctttttggtgatggtgtatgcaatgtcattaaagaagaaatgcttaaagagtttcgtttgcatacaatagttcgtttgccgcaaggagtctttgcaccgtataccgatattcctgcgaatttacttttttttgaacgtggtggtccaacgaatactatttggtattacgagctgccgcttcctgaaggacgcaaaaaatatagtaaaacggcaccaatgcaatatgaggattttactccagtgatccaatggtggaataatcgtaccgagaattcaaattgttggaaagtcgatttttcctcaattcgtcaaaaagctgttgatgcagcgactccaaattggaaaaaagctgaagaagagcgtatctcttcacaagagttggctaagttagttcgtaatttagaacgagatttattggtaggtagtagccaagaaaaaacagggttacagcaacagatccgagctctgaaggataaaatacaaatacatgaacaacaggctaagctattgcaaaataaaggtgattctttatattggccaatttataatttggataaaaaaaatccaaatgctgtaaccggtttggaatatatagatccaaaaaccttaatagactctatgtgtaatgatcaaaaagtagtaatgaaacttctgaaagaaattgaaaatctggttaatgagggattatga

SEQ ID NO: 153206 - DNA, 1077 bp, Enterobacter cloacae
atgaatagttatccaatagtccctttaagctctgttcttagggtaagcattgatgctgtgcctagtgcaactcttgattctataaatttagctggagtatatagttttgggaaggggcttttcaagcgaggaacaatctctccgcttgatactacatataaaacttatcaccgactaaatactggcgattttgtcatcagctcgcctaaagcatgggaaggggctttatctgtaatagataatgaatttgatggctggtttttatcatcggttttcccaactttccgagcggaccccgaccgattagataccaattatttaaactggtactgtaaaagacgaaatgtgtggcagcagttgcaagataaatctagagggatgggcgctcgtcgtgagtctgtgagcgcttctcgttttcttgatttaaaaattcctctgcctgagattgcagaacagaaacatatagttaagaaattaaatacattagcggataagtcagctcaaattgaattccgcttgaagtcaattttaaataatattgataatttgttaaggagttatgtattttatccaggaggagataaggctgagcgacatgcaatgtcaaagttagtatctctcaagaaacctgatgttaaagtcgtcagtgatcaacgctatgattttgcaggagtttactcttttggtaaaggagtatttactagttcatctaaatatggcgatgaattttcctacgataagttgtcaactgtccgtgctggtgattttatttatccaaagctgatggcatgggaaggtgcaatggggattgttccatgtgaatgtgatggtttagttgtatcgccagagtttccggtatttagtattaatactgatatcatcttgccagaagttatcgatatttactatagaacgcctgaagtatggcctgctttagctgagatcagcggagggacaaatatgagacgtcgtcgtttacaaccttcatcatttctcaactatgagatgcctgttcctccaatgaatgtgcaaatggaaatccgcagacttggtgatgctgccaacttactgatttag

SEQ ID NO: 153207 - DNA, 705 bp, Enterobacter cloacae
atgacttttaccttctcaaatgaagcacaaacaatatctgtctataactattcaccagatacacttgaatatattgggatttcagatgcctatattgcgcccaatacgggtctaccaggaaactgtacactaatttccccgcctgaaatacagcccggctcaacacctgtatggacaggcgataactgggaattggcagaagatcatcgtggacaagttttttatgataaaaagactggtaaccaaatattaattactgaattaggtccactaccagataatgctactattatttccccctcaagtgtctttgatcgatgggatggtgaagcatggcaaccttcaatcgttgatgccaaacaagcgaagatttctgaaataaaatcgcaacgggatttaattactgctgactatatcatcattgatggtaatcattttcatagtgatgccaatagccgaatccagcagctatgcctgactaaaatggggcaggcaaagcaaattccgacagggttaatgtggcagaccaagaataacggtttaattgaactgactaacgatattgctgctcagtttgaagcagtcacaatgaatcacgatatgcgcttgtttgctaatgcacagagtcatatcgctgcagtagaagctctggatgatattcaggaggtgattgactacgactactcaacaggctggcaaccatga

SEQ ID NO: 153208 - DNA, 708 bp, Enterobacter cloacae
atgaaaggagtaactcgacagacaggtattatttgcgatattgatgaaaaggctgttcgcgtgagagtcaccttgcctgaatgcgataacttacgcagcaactggcttcctgtcctgcaacgcaatacacaagaaaataaagattactggttaccggatattggtgaacaggtggaagctctgcttgatgacaatggagaagatggtgttgttctgggagccgtttattccaccgtcgatactgcgccactcgcatcacgtgacaaacgctacgtacatttttccgatggcgcagcctttgaatatgatcgtaagacgcaccagctcaccattaacggtgggattgaaaaaatacttattgagataaaagacacgactcgtctcacctcaccacagatagaggtaaaagcacagcaagttttggtgacgtctgatagcgtaaatgtaaaagcggaggatgtaagcattgaggcaacgactgttgacgttaaagcattggacgttactgtcgatgcgccaataagtacctttaaaggtaatgtcacgataatgaaaaaattgacctggctcggtggcatgatgggcagtggaggcgctggcaacagtgctgcgatcaccggcaacgtcaacgttcagggcaacgtgaatgtcagtggttccgttatggatggtggaggaaactcaaaccaccactctcacggccagtaa

SEQ ID NO: 153209 - DNA, 954 bp, Enterobacter cloacae
atgtatgccgttttaggagagattgaatttgaagtcgtcgcttactgggacgcctttgaaaccacaatgggtgtggattatgccagtcatgctcgtatagaaggtaaacctggcgtgcaatatattggtgataaactggacaaaattaccctgcaattcacttttcacagccaatattgccagccgtcaacagagttcggccgcttgcgcgctgcgatgactgcacatcaggcgatggcgttggtatttggcaatggtgattatcgcggctggttcgtaattaccgatctgagcgccagccaccagcataccgatcccagtggcaatgttattgcccagagcggaagcctgtcattgcaagaatacacgggcgatccgaaggctcccctgctgcctccggctatcactaatcaggaacctaatatagacgagatgctggaggattaccctgaaatcagcgactcctggttcgatgatcttttaagtgccgcggaggatggaatgcgtgatgccaaagagatgatggatgatatggccgacgctattgatgacattaaaaaaaaggtcacccaagccaaagaactggttaaagaagccaaagcgttgaagaagaaatgtagagatattatcgactcactgaaaaaaacgatcgattcagtagaaaaactattgcggcaacctctggatctgcaaaccctcgccggtctaccaaaagcgctggccgcgaaaatacaggcattactcgacagcctaccggggatccgcgaatgtgccagcagcgccacatcacttattgaacatgccgaatctctgtttgatgccatcaccaacagcgtagcggaagccacttacgataacgcagcattattagttaatcaggggcgcagcattttgcaaaagcgcgcacccgaagtaagccaacttgctgccgtagatattacgaggatgttgtaa

SEQ ID NO: 153210 - DNA, 2262 bp, Enterobacter cloacae
ttggccaacgatgttattactcagctacaggcacgtaatgagacgttgacgcaggcaatagcccgttacggctcactaaacgccagcatgctacaggcgctcaataccgagcaaatcaaaattacccagctcacgcaacagcttactgagtcaacccttcgccgggaagtaaatgatagacaacgcactgaattactggaaaaaacgaaaactttcaccggacaaatcagcaaacttctcaacgtcgcaacgcccgactttaagttgccttacgaattccaggactacatggtcaatatcgcggtaaaaggcggcatgactagcactacgcaggatgccttgagcctgaatattcgcgactggagtcttgctttcaatcaggatcaaaaagagctgcaaaatgcgaccttcacgatggttgaaggcggcataaccgcattacaggatcttggccgctacatgccagacattgccaaagccgcgacggcaacccgcgacagtgcgcaaatctgggcgcaagcggcgattgccacacatgacaatctgaacatcgcgcctgaagacttccgttccgcacaaaatatgctgtacagcatcgcaaaaaacggcggtagttcggttgaggagcagacaaaatggattaaagcttttgccgataaaaccggtctgcaaggcatagcaggtcttgctgaactgactgcgacgttgcaaatcgccatgaagaatggctccagctttagtgcggcttctgagaatttcgatcattttctcaaatccaccttttcaaaagagacggatagctggttcgctagtcagggcgtggatctccagggatcattgctggagcatcagcaaaacgggactggcgtaacggaagcgatggcgcatatcgtgcagatgcagctggataaaatgaatcctctgattctggataccttcaaacagactatgaaaattgaagatgtgtccgcacgtagcgatgcgctacaagcaatggtgagtaaatttaacctcggcaccttgtttggcgatgcgcgtacgctggatttcctcgcccccatgcttgcaaatcttgatgaatatcgtcaattaaaagcaacgacaatacaggcagcaagtcgggatcttatcagtaatgattttgctctgagaatggcctcacccaaagagcaaaccaaagcactacagctcgcgctaaacgatttgtggcttactattgggctggaacttatgccggtggttagcgagctggcgcaaaatattacgcctctgatacaacagttcagcgcctggctgcgggaaaacccagcactggtacagagcctcgccaaagtcgttggtattatctggttattcaacggtgtgctgaacactctgaagctggcagtgaatctaatcgcatcaccctttattcgcctgatcgatattttcctgcgggtaaaagccagtcttgcgctgggcggtgcagccactactgcgctgtcggcacttaactcattgggtaacggtgtaaaaatactggcgtcattgttgggacgcgctctggttggggggctgaaactggtcggacaaacgtttatctggctcggtcgtgccctgctgatgaaccctgtcggattggctatcaccgccatcgcgggtgcagcctatttaatctatcgtttctgggaaccgatttccggcttcttttccggcctctggactcgtattaaatcagcctttaacggcggtattgaaggtattacccacctgattttggactggtccccactcagcctgttttataacgcattcgccagcgttctggactggtttggtattgatcttcccgccaactttagcgaattcggcagcaatattctggatagcctgatcaatggcattcttaacgctctgccgttcctgaatagcgcgattgagaaaataaaaggacttatcccggattgggcaaaaagcacattaggtatggatacggaaaagccgagccctggtattgccggcaaggcacccacgccaggaagtaaacccgccgcagcgccctcaaccacgatggttcctgcatcacgaagttcaaagccttatatgctgccgtcccggtcaccgggcaatatccaggtacacttttcaccacaggttacggtccagagcaacggacaaaacacagctggtgagattaaaaacgtcatgtcgctgtgtaaacgggaacttgagaagatgattaatgatgtcatagcgcaacaacagcgccgggggtatgcctga

SEQ ID NO: 153211 - DNA, 318 bp, Enterobacter cloacae
atgaccgaaaaatatacccttcagtttccttttagctctgccgccggagaacacatcgccgaactgcaattacgccgtctgaaagtcaaggatatgcgcgccgctcgccgcgccagcgataaaccagaagaatgggatgaaccgctaatggccgcaatgaccgggctggtaccagaagatctatcagagatggatctgctcgattatcaggcactacagaaacgatttcaatccatgcttggtatggttacagaatccagggcaattgtggcaggcgatggcactgctggcgaagtggttccactttcagcccggtga

SEQ ID NO: 153212 - DNA, 198 bp, Enterobacter cloacae
atgaaatacatttatcacggtccggcaagcggcgtcacgctctccgatggccaggaagttttattgtggacacaaagcgaagttgatctacctgaagacaatgagtgggtcatgacaatgatcgcgcgccgccacttatcgccagttgtcaaaaaagaaactgaaactaatgcagaggatgttgtacatggcagctaa

SEQ ID NO: 153213 - DNA, 459 bp, Enterobacter cloacae
ttggaaacactggctattattaatgctattgttaaatgcctacaagaatcagtttctgaattagatgcactgattttagcgacagaaccctcggaatatattccgaaaggaaataaaccaaccgtaatactgaaatactgtggttcggattttacttcgctggaaagtacagatgcaattgtcttgaaacggacactcaagttgacggctaccgtaattgttccaaacatcgatgaagcaataaatgcactggatcgtgttcgtgatgcgttgggtggtatatctcttcccgactgcgaccgtccactatggcccgaaaacgaaaggtatatcggtgagaatgctggtctttgtcgctatattctggaattggccaccagcatgccatttatcgctaatcaagtaagcgaggatttacccctgcttacgcttgttaattataaggaagatattctatga

SEQ ID NO: 153214 - DNA, 687 bp, Enterobacter cloacae
ttgttgcgcagcagcaatgattcgccgcgctattctcgttgcggcaacctgtcttgccgttgcactggggttataaccatgtggcaaaaaatcacttttctgttatgcacaataatcagcatgccatttgctgaagcaaaaggccctcctcgcgaatccctacaatggcgaagtgaactgattcgcaccgccagagaaatttggggtcttaatgcacctgttgcagatttctcagggcaaatacatcaagaatccggctggaatactatggcgcgctccccggtaggagcggccggtatggcacagttcatgccagaaactgcgacatggataagtaagctttatccagaattacgtgacaatacgccctataaccctatgtgggccatacgtgcacttgtgcagtatgaccatcgtctctggaattcattcaatgcgaaagataactgccaacgaatggcatttaccctgagcgcatataatggcggagaaagttgggttaaaaaagataaaaaactggctacgtcaaaagggctcgatccttctgtctggtttgaacatgtggaacgggttaatgcagggcgtagtacagcaaactggcgtgagaatcgacgatatccaaaaaccattttgtttaattgggcatcgctctatctacaatgggggccagcaagttgcatctcttaa

SEQ ID NO: 153215 - DNA, 738 bp, Enterobacter cloacae
atgaaaatgttcatccatattgcgcttctcgccagcctgacctcgtcgctggcgtggtctgcgggaacggtacaggtctacactccggacagcgaaaaacctaaaaccttaaccaatgccggacatctgctcgatctggtggggcagccgaggctggcgaaaagctggtggaccggggcggtgatcagcgagcgtcaggcgacgatcgtcgcggaacaaaaacatcaggcgctgctcgcccaactgagcggtctggcacaacaggaagatgccgacgatgccgcggccattactagcctgcgtcaacagcttcaggcggttaaggtgacgggtcgccagatggtgaatctcgatccggatgaggtgcgcgttgcggaaaacggcaatccgtcgctggaaggggattataccctgtggcttccggctcagccctccaccgtcatcgtgatagggcttctcagcagccctggcaaaaagccgtttacgccgggccgggatgtggcgagctatctcgacgatcaaagtctgctcagcggagcggataacagctatgcctgggtggtctatccggacgggcatacgcagaaagcgccggtggcttactggaataaacgccatatcgaacctatgccaggcagcatcatttttgtcggttttgccgaccatttctggacgaaagcgtatgacgggcttaatgccgatatccttcgctccctgatacagcggataccggaataa

SEQ ID NO: 153216 - DNA, 306 bp, Enterobacter cloacae
atgaaactcgcgccttacctgataacactgacgctgccgtttatctcgttatctgccagagcggattaccacacccaaattaacgcaggaaataccgtctccggcgtggttgtcgatggttcaaaagacaatcaacatgtttgtggcacgctaactgactctacgatcacaggcccctacgcctggagctacgttggcgatggcgggcagaccaatcacatcaccgttaccgatcacggtgagctatttctggaaccgtacggcagcgcttattacacacagataaccgacaatggtgatctatag

SEQ ID NO: 153217 - DNA, 339 bp, Enterobacter cloacae
atggcaaaaccatctactcgaacctactctcgttatagccgtgatgctgcgcgactgctggggctgatgattcgtactgctcgtattgaacgtaaattgaccgttgaagaactggctgaacgtgcaggtgtatcgcgtggactcgtttatcgtgctgaagaaggggacatggggtgtgcaattggcgcggtatttgaactggctaccattgtcggtgttccactttttacacctgatcaggcatcgatgacgttacataccgcgaacgcagagaaaactttatcgctgatgcctcgctcagtgtatcactccaaaaaggtgataaacgatgacttctga

SEQ ID NO: 153218 - DNA, 1278 bp, Enterobacter cloacae
atgacttctgataacagtcccgatctggcatatgtatggatctggttgcctggtgcaactcaaccgattgttgcaggtgcgctaactcgtgatggcaacaggttcatcttcaactacgggcgcagttacctggaacggggagatgctatccctgtctatgagccggaacttccgttggtacggggtgcgatttttcccgcaccaggtctacagcaggcgagtgcattacgtgatgctgccccggatgcctgggggcgtcgtgttattctgaaccggctgatgggggctcagggcagggatgctgaccctgacagactggatgaactgacatatttgcttgagtctggctcggaccgaattggaggactcgacttccagcgatccgcaacagagtatgtgccgcgtgagtctcaaagcgcatctcttgaagaattaatgcaggccgcatcaatggttgaaagtggcgtaccgctaactccggagctggaacaagcgctttttcacggtagttcattaggtggcgcacgaccaaaggcaatgattgagtccggggagcgtaagtttatcgcaaaattctcctcctccacagatacctataatgttgttaaagctgaatatatcgctatgcgactggctgcctgcgctgggctaaatgttgcacctgttcttctccgccatacagcaggtaaagacgtcatacttattcaacgctttgaccgtatacaaagccatgcagggtggcagcgccgcctgatggtctctgcgctgaccatttttggtcttgatgagatgatggcaaggtatgcgagctatgaggatttgacggatattattcgccagcgcttcgatgcacctaaggagacattacgagagctgttcgggcgtctggtttttaatattatttgcggtaacacagacgatcatgccagaaatcatgcagcattttgggatggtgaaaaactgagcctgacgcccgcttatgatatttgtcctcagggccgttctggtaatgaagcaacgcaggcaatgctgattattggtgaaaaccgaatgagcaatcttgcggtttgtctgtcggcagcggctaaatttctgctgagcgaacaggaagctattgacgttatcacacactgtatccggacggttcaccagaactgggaagaggtatgtcgtgaggcttcattgagcgaagtggatcgcaacttcttgtggggacgagtgttcctcaacccgtttatttttgaaggtactccagaagcgatcgtacatctgcgttga

SEQ ID NO: 153219 - DNA, 204 bp, Enterobacter cloacae
atggccgttttactgaatcgtgtattgcctcataagctaaatattttcgatgggatagtggaattagtgggaggaccactattagttataggagcaattgtgtgctttgatgtattcgaaccctggccgctaaaaatcattggtatgtttgcgtggattgttttgattttctttgtaccttcaataataagtcctaggcgttaa

SEQ ID NO: 153220 - DNA, 771 bp, Enterobacter cloacae
atgctcgattatgctgcttttccggaacaacgacaagctcggatccgtcagatcttgatcgaaagtggaagagtggtgtgcgcagagctggcggtccagatgggggtttcagagcacaccatacgccgtgatttgcacgagctgagcaagaagggcatctgtaaaaaggtctacggcggggcggtgcttcagctgccggaggcggggagctttatcagccgcgagcagataaacagtgcaaaaaaagacacgatcgcgcaggaagcggcaaaccttgtcaaggcaggctgctgtatttttatcgataccggcacgacgaatctggcgctggcgaaagcgttgcctgcggagttgagcgttacggtggtgaccaattcgccggttattgcggcggcgctgctgcaccatccgctgtgcgaggtcattatgatcggcgggccgatccagcgggcatccggtggggcgactggcgcaacggcggtaagccagatccagggggttatcttcgatcaggcctttatcggcggctgcgcgatggatcctgatacgggactgaccggctttgattttgctgactgcgagttcaaaaaagcggtgattgcccagagtaacgagaccattgtcgcgctgaccccggacaagctgcccggcgtggcgcgctacgtggtggcaaatagccgcgacattgacgtgctggtagtggacgagaatatggatagggaccttatcgatacctttgtggcacaggatgttcgcattgtgtgcgcttga

SEQ ID NO: 153221 - DNA, 1932 bp, Enterobacter cloacae
atgccagaaactccattgcagtcatcgcttttcgaagaagattacttgttgcgtgagcttgggcaagtagcccacgttccgcaggttgcgttaactgaattggtggctaatgcatgggatgcaggggcaagtcgtgttgatctcattattccttctgaggccggaggtatattgacagtaacagataatggtcatggaatgacctcgcaacaatttaggcatcgatggatgacattgcgttaccgacgtgaaaagcatcagggactgaatgtagaatttccaactgctcgccaaggtaagccacgcaaagcatatggtcgcaacggtgttggtcggcatggattgctctgttttgctgatgagtatcaggttgaaacttggcgcgatggtatattgactaaattcgttgttggtactgaatcaggtgcaagcccctttgttatacgtagcgagcatcagagcaatcgggaaggtagtggaacaaaactatccgtagaggttactcgaaaactacctgatcctgatgagatcatcactgttctttccgctcgttttattcacgatcctgagttcgaaattagggtaaatggtatacttcgaccgttttctgaaattagtggaaaagttagtgaattaacgcttaacttagatagtgaacataaagcgacagtaattattattgactctacccagcttaaccattcatcaatacaccagggaatagctttttgggtacaaaaacgcttggttggtaacccttcatgggcaatcgggcaggtcattaattttgatggtcgtacccgatttgcccgaagatataaagtgatcgttgataccgaaggttttgaggaagaagttaagtctgactggacaggttttcgcacctcaaacattgttaacgctttatataaggcgacggctgaacatatcagcaaaatttcagaagagcttgctgaggaagttgtcgaagaagctactgcggatgctttaacgcaaaaccgaaacgaattagctagtctggggcaaggggcccgtctggaggtagcggagtttactaaagtcattgctcagtctcatcctaccgtgtcgccagacttccttgctacagctgttaaggcggttattcatcttgaaaaatctagaagtggtgctgcattattgcaaaagttagctttacttccacatgatgatatttctggcttggacgagttattatcagaatggaatataaaagatgctctacgagttcttgatgaaattgatagtcgaataagtgtaatagagactattcgtagaattgcagatgatcctgatactgatgagttgcacactttacatccgttgattctgcgttctcgttggttatttggcgcagagtatgaatctcaggaatattgctctaatgcaacgttacaaactgttgcacgtgaattatttaaaaatgtacaggcgcaattcatcaacgaaagaaaacggccagatattgttgtactaccagataatacaacttgccaacttacaggcttagaatcctttgatcctatggatccgacgcttacgcaattacaacatgttttacttattgaattaaaaaaaggaggcttcctgctaacgcgacaggaagtcaaccaggccgatggctatgttcaggatattgcagcatcgggtgctattactggcagtccacatatttgtgcttgggtggttgggcaaaaaattgcaaaaggtgtcgcaaccgacaaaaaattatctgataacggccaggattatggtcgtgtacgcgcaacgacttttggcacgttagtcgatactgcaaatcgtaggctaatgaaattcagagatgtgttggcaaccagatatggagatctttcaactgatggtttacttgaaaaagtgttttctcaaccagagcagaaaagcattgatatgtag

SEQ ID NO: 153222 - DNA, 1377 bp, Enterobacter cloacae
atgagtacaccaatattaccgttcctgcccgataacgcagactggatctatcaacccaatctcagcgacgaatttaacggtccggacctcgacccgcgctggtgcccgtattatcaggcaagctggggcgatctggatgcctcccgcgcccgctaccgttttattaccgaatccgacggcaccgtcagtctggaactgtacgtcgataatgccgggcagggatactggcagccatggcgagccagcaacaacacctacaaggtggcgggtatcactggcggtacgcgggactatatgaacatgtggccgagcggcggttttcctatcactaaccatatgccgtattacgatgcctttgccacccgctacggctattttgaaatccgcacccgctttctgagcggcagcgggctggccccggccttctggttcctggggatgcaggatgcggtgtacaccgaaaatatggaggtcgattcgccggaagtcttcacactggagaacgtcgttaagtttaatctgctgcctcgacaaggagaggcgagccagtcactggtgaccgcttatggtgagggcgctacgctaccggatctggacgatggctaccatatttacggcctggaatgggatcctgaatatctgaagctctatattgacgggcaactggtttcaaccatagaggttgctatcgactatcgtatgttcccgctgatttccctcaatcaccatgaaaccaataatccggatgtcgggaatatctacgataacgatccgccgctgccaaacgacgaaaccttcactatcgactattaccgtgtgtttaaaaaagcagatacgcccgccgacccatggcctaattatcagaacccgctattgcctggatacaatattgccgaacgtgcctttattaatatctatggctatgacggcgataactctacgtcaagagaaggcaaactcaacgacggggactatttcagcgtggcggatacctatccgaaaggaagcggcaccgaagaggagaatgagcgctggtacaacgatcagttccgttatatctatatcgagtggcatcagccagtggatttcgatacggtgattctgtatgccacacaggctcactccaccgccccgcagaatatccgtattgagatttccgctgacggctacggcaactggacgaccgtgaagcccgatttcgatctgggctggcagacagatgatccgggtattgccgaaggactgaaaatcacgctggacgcaccattgcagcaaaatcagcacgcccgcatcgtcatcaataccgcgccggaaagctacgcgttgagcgaaattgaaatcggcacacaaattaacgccactacccgctttaaataa

SEQ ID NO: 153223 - DNA, 1008 bp, Enterobacter cloacae
atgaacagaaataccctgctctgcgccctgccgctgctggtatccggcatcggcctgcccgtgatggcggctgatattgataccgatgatattcagcaagaagtagatactggtcaggaccaggtgcccgtatcaaagtcctggaaagtccgcgcgggcctgctgatcgaaaccgaaaacaaagaaggacagtcattcgacaaagacggcttttttgaacccacgttgtggatggatttctcccgcgatcgctggacgttttacggctcgtattatcaggaaacccacggcaccaattacagcgacgggttcagccgcgataactggtttaaccaatacgaatttgacgcccgttatctgatggtggaccaaaaagatctggctctgggcatgaccttccacttcagaaattacacctttatctatcaggataacccggaaaaaacgcagtccggcggctataactcccagcgctggtcgttccagccggactggcgaattaatttcaccgataaattcaaatccaccggctgggtgacggtctacaactggtacaacaatctgcatgaaaacggtctggcgaaccgggaattaaaaggtgaaggcggcttcgaatatcgttttaacccgaccatcgcggtgcggctgaattactttatcgatcggggctggaataccaacagcgacgaccagaccggtgagttctgccgctcgcagctacgcccttatattcccatcaccttctcactgtttgacgcaggccccaccaccatcaccccttatggacgctggacgctggatgtctggtcacaaaatgcctcacgcaatcaacggatgcataccacggaaacccgtaccggcatctttatcgagcaaaagctgtcgccccatctctccatgacgctggattacgcctatgaagtgcaggcccggcatgatttatctcccggcgataagcctgttgtgaagttccacaaaaccggcctcggttttatctatagcttctga

SEQ ID NO: 153224 - DNA, 3150 bp, Enterobacter cloacae
atgaaaaaaacaatcggatggttctctttactggcgctgtcaatttctctggtctgccaccaggcggcggcaagcagccacttatctgcgtcggcaattcgcgtaatggatgcggagggcaacaacgtcagccagcccctgctggacaataatccggcaagccaatggcagtcgaagctggattacaaccgctggctggagatggacttaaaaggcacgtaccagcttagcgagctacagctctctaccccactcaacacgctaacgcgcttcgacgtttacagcagcgatgatggcgtgacttaccgcaaaatcgcctccgcaaagactggcaaaccgaacgaccgtctgccgctcaacgttcgcgccagccgcctgcgcatcaatatcaccgactattcggcgggtacaaagggcgtggttaacgatatcttcctgacgggggataaaatcagcgataccgcgccgacgccgcctgcaattcaggtcgccgattacgcagcgaccgagtgggcgaaacgtcatgagcgtcgccagaacacggcatatcgccagcaggaagtcatcagcgaagcacaggcactggttgagcgggtgctcggtgcgcagtaccagaaccgcttcaccttcacggttactccctccagcaccggcaaagacagtttcaccgtgaaggaagctgacggcaaaatcagcatcagtgggccaaacggtatttcactggcctccgggctgaactggtatctgaaaaattatctgcacgtcaattatgacccgctgaacgtatccaatctgctgatccccgctgaatggccgatgccggagggtgtgacggaaaaagcaacgccgtatcagtacaagtatgcccttaacttctgcacgccgtcctacaccatggccttctggcgctggcacgattacgagaaattcctcgactgggaggcaatgaacggcgtcaacctgatgctggatgtcgtcggtcaggaagaggttcagcggcggatgctgcaccagttcggctacagcgataatgatgtgcgccagtatctccccggcccggcctacttcggctggttctacatggcgaatatgcagagttttggcggcccgctgccacagagctggtttgctcagcgtaccgagctggcgcgtaaaatccacgacaggatggaagtgtacggcatcacgccggtcttccccggtttcgccgggcaggttccagatacctttgctgccaaaaatccgcaggctcaggtgatcgatcagggcgactgggtcggctttgtccgcccgccgatgctgcgaacttacgttaagcagggagaggactatttcagcaaagtcgccgatgtctattaccagacgctgaaaaccaccttcggcgatatcagccactactacgccgtcgatccgttccatgaaggcggcaaccgcgccgatttggatatggtgaaagtggcgcagaccgtgcaaaacaagatgctggagcacgataaagatgccgtgtggattatccagaactggcaggaaaaccccaccgacgcgttcctggacggcctgaagaaagatcacgcgctgatcctcgatctctacgccgataacaagcccaaccatgctattcgccacgagttcagcaacacgccgtggatctggaacatgctgcatgccttcggtggccgcatgggcttctccgggatgccggaagtgctggcgcaggagatcccgcaatcgctggcggaatcgaaatatatgaaaggcgtgggcgtcaccgccgaatcgctcggcaccaacccgatgctgtacgaaatgctctatgacatggcgtgggaaaaatcgcccatctcttcaacggcgtatatccacagttggctgaccagccgctacggcgcacagtcgccggagattaagcaggcgtgggatataatggtgaaaaccgcgtatcaccgccgcaaagaccgccagcgggcggaagactccatcatcgacgccaagcccggcttcggtgtcacccgcgcctgcacctactacaccgcgcttatcgactacgacaaggccgagtttgaaaaaatcctgccgctctacctgagcgtttacgaccgttttaaggataacccggcgtatcagcacgatctggtggatatcacccgtcaggtgctggctaatgcctcgtatgaatattaccgcgcctttgaagatgcctggatgtcgaaagattacagtgccttcaatcagctttccggcaagttcctgcgtcttatcaggcttcaggacaaggtgctcggcacccgcccggaatttatgctcggtacctggatcaatagcgcccgcacgatgctggatggtatggacgactggacccgcgaccagttcgagtttaacgcacgggcaatggtcactacatggggaaccgagcaagccgccgacgccgggctgcgcgattactccaaccgccagtggcaaggactgactggtgacttctactaccagcgctgggcgacctggattcaggcactgaagagcgcggcggcgaccgggcagaagcaggatgccatcaaggtccactggttcccgctggaatatcgctgggtcaatcaggccggtaacggctatccgacgcagccttccgggcgcgatatccgacaactggcgcagcaggcgctgaaagaattctccgtcaccagcgaagacttacgcccgtaccgggaaagtaaggataagcgcaacctggcgctgaataagccggtctttacccatggcgatattatcaacgccgaattctcgaccgaacgcgtggtggacggacagtcctcaacgctttggggtaataaaacctggcctgcggatctgattatcgatcttcaaagcgtgcagaaggtagacggtatcgaactggagtttgagcagacagcggaggatatgcgaaatccggtagtctccggctggacggtagaaattcaggacgcacagggtaactggcgcaccattcaggataaatcaaaagacttctcgcaaaagcaggtcgtcaatgcggtgccgtataaaggcgaagcgcagaaagtcagggttgtgcttaccggagcagatttcaaactgcgcccggatctgaagccacagctggcagaagtccgcgtgctggcggcaacccaataa

SEQ ID NO: 153225 - DNA, 2628 bp, Enterobacter cloacae
gtgtctaagtatagttgggtccctgtattcaaaaacgtctgtagatggattgctgactacgagaataaacagcaagaattggtccaaattctacgtgaaataggtgttgataaaggtctggaagacgaactttctgatggaagtagagagtctctgaaagtgatagacccgttcactttttttgctacttttatgaagtatggcgtggtcaaacgtactgagctctttgctgctctgcttaaaagagtaaatttaccaagttccgcacccagtgatttcaacggtgttccaaatgcacagccactcaaagtttggctctttccttatgaaaaagaacgttctgatgatatggtgcccagcctttgggcactgtttcatcagatgcgtgcagggaaaattgatggtaaattgttcgacaaaattctgaaaatccctcataccggtttcgccaaacttactgagtgtttgttttatttatcaccggaagaatatttccctgtagatgcccagacgaagcattggctcaagaaaaaagggcgtgaattacctaaagagaactggcaatcctaccaggagttgttgtcatggctcgatagtacacagtcaaaatcatattatgaaatatcgtatgaagcttggtttgaaaatcaaagtggttcgttcacttcggtaattgcagacgaatacttaagtaaccgcttccctgagagtcggtcgtcaaccaaacatctgattgcttataaaacgaatgcaatgagggagttggcatttgatccaggtaaaaccccggagaaaaagaagaagattaaaatctttgttgatgagcagcctaccgatccagatctttcccaagttattgcctatgagagcggcaagagccgcaaccatcacctcgcaacacacgctccaacccttgctcaggggaatgcagcatgggctgttgagattagtacacttgatcaattaattacactgtgtgattggtatgcaccccacctagtgaaggacctatctgccatggaaaataaagagaaatcagtaaaaaatcacacatcactgaatcagattctttttggtcctcctggtactggtaaaacctattcaacactggaacgtgcagttttgttggcagaaccttcatggtataacgatctggaaagtcagaaccttagtactgaggagtatcggcaagcggtcaaaaataaatacgatacgttatgtgcagacaaacgcatcgcgtttaccactttccatcagagtttttcgtatgaggatttcattgaggggatccgtgctgaggtagctgaggaaaatcagggcataaaatacaagatagagaacggtattttcaaagatattgctgaccgtgctgctaaggcagttgcagctaaagaaataggactctctcaagcccctgatatctggaaaatctctattggtcgtgcccatgaaaaagaaatgcgtgatcgctatatcaatgcaggtgaagctcgtattggttggaatgacacgggggatttgtctcagacctttgaacagaagacacaggaacaacaggattactggaactccttgagtcatcctaaccacaatgctcttaacgccttttcacatgatgtaaaggttggggatgttctattgtgcttgaaaaatgcggaaactgttcaggcagttggaattgttacttcagactattcatttgatgaaaacgccgctatttcggatgattacgcgcatatgcgcaaggttaattgggtgttaaaggatattgaactgaatatccttgcgcttaatggcagtacaaaaatggttcagcagacattgtatccactttatcggatcagttggcatgctttaattgctgaattagataaacaacacattcctctgccagcctcatttcataaagttaacaacatcagagaacgccagaattatattttgataattgatgaagtgaatcgcggcaatatttcccgtatttttggggagttgattacattgctggaaccggataagcgattgggaggctatgatgagcgctcagttattctaccgtattctaaagaattgttctctgttcctgacaacctgtatgtcattggtactatgaacacggcagataagtcattggctcaacttgatctggcattacgtcgtcgcttcgagtttgtagaaatcatgccacagccagctttactgtccgacctctcagtatttggcgttaatatcggtgatctgctgactgttatgaatcaacgcatcgaagtcttacttgatcgtgatcataccttagggcacgcatacttctggccgctgaagactgtcaaaactgagaatgaaaagtgcaaattgatagctgatatttttgcgaaacgtatcattccgctactgcaagagtatttttttgcagactgggaacgtatcggttgggtactgaatgatagcgaaaaaacacctgaaaacagatttatccagacagattttatagatcatggaattaaaagcttattcccggagtctattgcgagccaattaaatgatcgcagataccggattaatcaaagtgctttctcaaatgcagcagcttaccaagggattttacccaatgggggagttgccaactga

SEQ ID NO: 153226 - DNA, 1293 bp, Enterobacter cloacae
atgatacaagtgcgtgagtacgcccggctgaccactgatgaacgcgcaacaccatctttggattgtgcagttgtaaaacgtgagacgctagaatggttgcagaaactggcctcagaatggaaaggtgaggaaccattgctattgtctgatggctatcacgtatttaaattaggtagctatatcggatacttgcaaagtccagatggagaggggattgaaattttacccaagacaaactttgggcaggataaccctctgcaaacaaggaagatcttacagcgcatgctcttggctgctttaaatattcggccacggatcgctgggccagcggaactaatgcggatgaatgttcctttacatgaatggatttttcgacagttcctgtctgagttgcaggtcttagtcaccagagggttgtgttttgattatcgtcgtgtagatgaagaaagccgcttcatacgtggacaactacaaatccagcgtcagcaaaggcaatctccggcacgtcaacatcttttccatatcagccatgacatttattcaccaaaccgtctggaaaatcgcctgttgaaaaccgcactcaattatgtgttggcaacttgccagaacagtgaaaattggcgattggcgaatgagctctcacatcgtatggctgaaatccctttacaggcaaagccgcaacgcgaactgcgtttttggaacagtagcaagctgatgcagatctacaatgatgtacgcccgtggtgtgagttaatacttgagaaaatgaacccgaattttcagcaaggcagccacaaaggtgtatcgctcctgttcccgatggaacagttatttgaaaaatatgttgaggtctcactcaggtcatgcatacgtagaggatgtcaacttgtatcacaagccagttctcaatatttgcttgagcatacggtaggcaatagtgataagccacaagctatgttcctacttaaaccggatcttttgctgaggggttcgaatggcgctcagactctggatacgaaatggaaactcattgagcagacatcttggcaaacagataaaaaatataacattgcccaatctgatctttatcagatgtttgcatatgggcataagtatcagaatgggcaggggcatatgatgttgatttatcccaaacatttattttttaaccaatcattacccccctttcactactcgaatactttgacggtctgggccgtccccttttgtttggatagccagcaattggttccgggctattggcaagaatattttcccaacctttacagttaa

SEQ ID NO: 153227 - DNA, 3114 bp, Enterobacter cloacae
atgtttggcaagctacttaaaggcatcgcaggtaagatccaagctgatttcaggcgaagcctgagaaataacgaacattataagaagaaccgctggaatctgctggagagagtacaggtttactgttctacacattaccttaaagcaatgctgtttctctgggtaacggctgggggggcagtaatgacggctgaaattttacgtcctatacttctcccatatgcgagacaacactttaatggagcttcagcacttactggatggatgtccagcatgcttgggagccaggtaaccctcataggcatcgtattcccactagttgttggcctgattagtgtgcttttccagaagaaatcctctcgaattcatatacagtcagcctatcagctgcattctggatatatgttttccggtctcagtgggttgtctttggccgcatttattttgattggaggattatttcttgctctgggggataaatatctaaatacggttttttctgtgacagcttttttctggatgatctttaatatcctactatcgatgcgtttttttatatctagcctgaatgtactggatgacgaaaagcgcgatcgactgatgcttaaatattttcattcacagattgtgagtccttctattcaggagtcactaatttggaattggatgcaattcccgggggcttacatagatggagataggataaatggaatcacgtttcttccttattatgaatttgataaagacgacttgtttttattccagattaagatgaatcgagagcaggttgtcaaagatgtctaccttagacctttattatttcttttaagaagattacgtcccctaccagatgttgaggcaaaaatagtgttgcttccttcctgggggactgggaataataaaatctcagttctagcatattctggtgtgaatccttctgttatgtggttattcttatttaaactttgttttcacaaaggaacaagtaggagaaaaactgagtacagaaatattactcgcgatttttatggtgaagtttacgacacacttcaagataaaaatattagctcatttgaaattgcgacaagcaggctggtaaaagtttttacgtctctgaaaaatggcttctcttataatgaaggaaactatcttgatgaatgtaatatagtaaataattatgttaccttcagtgattcgtttcatacgactttctgggaattctgccatgaaacaataaaaacggccgaaacaagtggagagtatttccgtagagttatggatatcccatcctcgatctatcgttcttcagaaggaaataatgatcctgacttccaacagtttatcagatcactttttgctgtgtggcatgcccttataaactggcgagctggttatggagagaatctttcaatcagtcagagccagcgacaccgagaattggtcgtcgatttcataggtgagtgggaaatctggaatatggggctccataaagcagaagttgaacaggacaagtatgctaattgcttgctccatcatctttgttatgcgccacggatagttatgttagccctcacggcaggcgatcggtttgcaaccgatcatgctacagatatgcttttactctggttgaatcagactagtatggagcgagcatgggaggcagaacatctctggcacagttattttcttacaccatgttttcttgatcttcccgtcagtgggaaggagtggaggacagtactcaaaaataatccttattctagagatgcagcgtacttctttattttttcgaatgctctcgttgatttaaggcttcttgttattgggtatattttgacgagcttcgaatcacaaaaaaatgagtatgttaatgaggttataagtaggttgctaaattcagagttggcattccctacagggactcatgaaaacatgactgataagttcattaacgctaatgatattattgacggcattatacggcttgaataccgcacctatgagcatgggaatgattggtataaaatgctcaccgaaatgattaattctttctcctttttcaatgagcgccagcaggttacaggtcgtatatatatgggggctcgtgaggatgtgagagatatgtatgccagcatcgccgagataggaatactgctgtcatctactgtttcaacggtcagctgtcgagtcaaaaaagcgctcactgataatcttttttcttaccataacaagcaacagatattacatagattgcagggattaaaacgtgaggtatcacagtttcaaacatctgttttactatcccataatgattatgaagaaagagttgtacattttaatgtgacgcttgatgcttatattgatatttttagtcagagtgtgacagaagatgttatcttggccaaggaggacacgaaactcattcgtaataacgaattgatgctaaccgaaaaaacccccagaatccttgcggaacatgctttattttcacattttaacttggttttcaaagagggttttaatacaccattagaaacaatgatcataagaactataatgagcaaagtatgtatggcacaaggaattaatactgatttctctagagggctgacaccactatcaaaagttaaagcacttatgcttaaaaaattgtatcatctggttggaaatatgccgatagaatactctgaagatattaacagtacagaagagttttgcaaaaaaatattagaaattacgagtggtaaaccggaatttacgcttataatttttggaacgaaattcgctcgtgatttgcgggatcttattcatcatagggaacttcatgatgtactggggattactattaatgatacatcgcgtgaaagtggtgcattgccatttaaaattaataactgtaccgtctatgaggtttggggaagtgaggataatcacacccttctggtgaggaacaattccttcagtgaactgcgaatgttccgctatcctgatggtagtttgttcaccactttctggcgaatcagtgatgaaacccctcttgaaggtaccctttacactgtttgggaccctgaaatagaagtaactggttccgtggtggccagaataaatcactga

SEQ ID NO: 153228 - DNA, 324 bp, Enterobacter cloacae
atgaaacctcgttatccatttttcatacttgctatagtattgtgcccaattatgacaggtgtttttgctgcccccctcaccgagcgagaagagttaaccctgctcctaaaccagcttaaccaaatcgaagcctcgcttcaccgcgcccaacaaagcgccagaaccggcatcaacgagcgctactactttgactatccacgtattcacggcgatatcaccaccctgcgtagcgggattgaacattacctcacgcccgcgcgcgcccaaccgcgagatacagcgacgctcgtagggcaataccgtgaggagaaagccacgccatga

SEQ ID NO: 153229 - DNA, 987 bp, Enterobacter cloacae
gtgatagaaagaggggataaatatattaatagcattataaaaaacattaatgcacactatgaattaaatgaaagtgataaagaaagagagaataatcgcttatcggacagaacttcatttgatttaaccaacacggtacctcctgatgttcaagtcaaaagtgcactatcaatattcattaactattattcctttatcctttcgcatatatctttttttaaggaattaaaaacgctaagaaaatcactagaagcagatttgtcatgttcgcatgataaatcatctgcgaaatccatattaccagtagcacttaattcaattagcagcaatccaacttacgaaagtaaagatgaactaggtattttatttaataaactaagaataaaatataaaaatgaaattacatcactaaacaaacagcttgttacgaataaatcctggggatatttttttgacaacatacttattccccagattttttcattgattaaaacttgtgcttttttaagaaaaaattatggtgatgatcttgcccttgtaacacatacagttttagattcaagtgggatttccaccaaattcaaaaacgctagagttatcaattttatactaccaaacatgacaaatatggcaaccgcaggctacggacttggtaatcctgccacagtcatgcctatgactaataaccatgatatagccagcaatatcagtgctgcgctacggctttttgatcgaaatgctttacagagctatttaacagaaattaccattaatgggaagatcaagaaaatagaagaaattctctgggggctattttactattatgaacgagattggaatgaaaaaaaacttagcgatagttcctgtatagacatcataagcgacctatatgatgcaccaatatcagaaagtcgattcctgagtggcaaaaagacagcaaaaaatatcattgaatcattcaaaaaaaaatgcctacgtgatgactga

SEQ ID NO: 153230 - DNA, 393 bp, Enterobacter cloacae
atggagtaccgcgaacgacgcgagccgttgggcctctctgatctgctgctggtttaccatgatttcctcttggccttatcgcggcgaacggaacggttaatacaagacttcaacgcatttattcagtgtttcaatgggcggtggatggccgccggttgtcataaatgggcagactcgaaaatctgcctatgtatgaccgataaaaaacccgccggagcgggttacttgatgagtgaggctgcatattcgaggagatatagcttcggagccagccagattttcagccagtcgaagttaaaccagaagccaatgaacataaccagtgcggtgattccgccaccgataatccaaaatacacacatggcgtctccgaattcgtcgagcggaccatga

SEQ ID NO: 153231 - DNA, 1455 bp, Enterobacter cloacae; identical to SEQ ID NO: 32297

SEQ ID NO: 153232 - DNA, 357 bp, Enterobacter cloacae
atgtcgagtagcgaaaatcaagaacagtctttgcagaacgttccgcaagaaggtgagtggatctctggtacaggaggtacaggaggtacaggaggtacaggaggtactggaggtagtggtggtgcatatgagcaagggtttaaagatggtctggccgttggagttcacgttggatataacgaagccgtagagcggatcaaaaccctactgccggggatgattcgccacgaaatcatgcagctgccagatattaaaagtgcgttgtctgatggcttaaggaacggtagttcggggtgcggacgtacgcttgtcaattattatcgctacgggaaaaatacttatccggacgttaagtga

SEQ ID NO: 153233 - DNA, 816 bp, Enterobacter cloacae
atggcatcaaaaataaactggctgttgcaaaacaccgctccgggaagcctggttttgcaatcctggctaacccggaacaacatatcgccttctctggcctttaaatacgcgcaaaatggctggttaataaaactgcgggctggtgtttatgtgcgcgcaggacgagaaccagactggagtgatgcgctatggtgtctgcaaagccagcttgaagcgccagtgcatctggccggactgagcagtctctcctggcagggtcgttcccattacctacaacttaaacagagtcaatgctggcttagcgttgaaaacaaaacaacattacccaaatggtttaaagaatttcccggcgttgagtggttggtggtatcggctctgaagctccctgaattagatgaaaaataccgaactgagcttgaggttaaagggaaaagaataaccgccagtacgccagaactggcagcctacgagctgttaagcgcagtccctcaggaaatctcatttgagcacgctgccaagctttttcagggactagtcaatctcaacccacgtaaagtggagaagctgcttacgctcagccagtccgtacaaaccaagcgcctgtatctgtttttcgccagtttctatgaacatgcatggttcaaacgcgtggataccagcaaaatcgaccaggggtcgggcaaccgacaaatcgttgttaatggcaagctgaacaagcaataccagataactgtgcccgaaaattttactaagaagggaatttccttgtgtggcaacgggagccgtcaagaaatacatttagcatataaagagtga

SEQ ID NO: 153234 - DNA, 684 bp, Enterobacter cloacae
atgcccgaccacgcgtcaccaggacccgtgcgtcgccccggactgctcggctggatagcattacttcccggcgtgctggctggcttttgcctcggcgcatggatgctgacaatagcgctggagtggctgggcgatgcattgttctggcagaatgcctgcgccagccatagcgaacaggtattgcaggcaacatggcagtggtggcggggttcagctagcgcaccagtgtggttagtagaagatctggcgcttgtcagcggtacgttgcagcaagggattgcgacactggttcattcgctcaacgggcaaagtgggttgttctggacagagacggtcactacggtgatccgctgcgcgttactgtctgcgggtaacgtcaccctaacctttttgctgcgactggcgattttgttgcaggctctgccgctgtttgcgctcaccattaccattggcctcatcgacgggctggtaagacgcgacttacggcgattcggcgcaggccatgagtccgggtttgtttatcaccatgccaggcgtatgatcgcctccagcctagtggcaacggggcttgtgtggctggcagtgccgatttttcttgtaccagagtatgtgtttataccagcggcagcagggattgggctggcagtatccatgacgggcggatctttcaaaaaatacgtctga

SEQ ID NO: 153235 - DNA, 609 bp, Enterobacter cloacae
atgcttaaacgtctggcttacctgattaccggcagtgctcttctgctgctggcggcggcagtgttctggtgcgtcaaccgcctgaacaccctgacgctggcgcagcaacagacacaacaccagatagtggaatggcgcggccagtcacaacaaaacgacgattaccgccagctacaggccaccgtaaaaaatactaccgaccgcacagaagcccttgccagacggcttgacgatgccacccgcactcaggccgaacgacttaaccccatcaacgaacagctcagagcactggaaggaaaaatccagaccctgaacaccagttatcaacacctgcaacaacagaccgccacgcgcagccgcgcaaaggcaaaacgccccatcccatctccgctttgggccgcaaaggcccctttttctcttatcagcagcgagtttcgtgccgggcggcagttcgccgtcatcgcgccatccggctaccgctcgctctcacagcttcagcttgttgcccccggcgacagcgtgcagggctggcaactgctgcaactggacggcagccacgccactttccgtaaaggcgggcagcggatgacgctgaacgccggagagtaa

SEQ ID NO: 153236 - DNA, 855 bp, Enterobacter cloacae
ttgaaagaatacagcggcgcagttttttttgtggatatcctaggagtcggagccttaactcaagggaaaatagaaataagtgaaaatgactttttggctcataattttggctataatagtggtttttcagaacatcaattttgtgcaaaactattattaaaatttagaagaatattgatatctgctacgcagcatgtaaaaaatataaaagtggcgcaactatctgactgtgcatttatttggtctgaagaccccaatttagttgttaatgtagctcgcgatataatgtggaaaactgtattgggcggaatcctctgtaggggcgggctggcaagtggacagattgttgaacccgataaaataaacactaaattaggcatgtttatttgtgggggggctgtgacagatgccgtgagactggaggaagctggaaaaggtgccagaatatttattaaacaagacttagtgtcggatttaactaagatcccaagttcagcatttataccaagaaaaagtttgatcgatttttcaattatagatgaatttcagtggtataaatatcctaaagagatttcttcgatatatgataaatccaatgaaaagttggtcgtggattcgataataaagattttggttatgcttaaacactctccaaaatatgcatggaatgcgtcaagtagcttaggtcgagttcaactagccagctcgattgatattatatcctcagagacggcgaggtcctcaaagaattttgatttaaagtttggatatgagtatgtagtcgatgacttaggtaacagaagtgaagctttgtttaaaaaaatccttaattactatcagaggatgattaattga

SEQ ID NO: 153237 - DNA, 654 bp, Enterobacter cloacae
atgaacataaaaaaattatgcaccacactatttctggctctcatgtctatgatttttatctttacattcttaattacaaataagaaaccaagtgaaacccctgatacttacactacaattacaagtattatcacaaccgcatgcgtattttatggaatattaaaacttgaagactggaaaaaggaaaaaaagaatgcattagtttattctcagtgtacagattttcataatacactcttgtcattttcagtatttattcagttaacgctaaattatatctatggaaatcatgagctataccgattaaactctgaaaaaagtggcagaacagaaaaagaaaacaaaataaccatcacgaaaatcaatattgaaacttataaagaggtaaagcaagatctgttgccgttaatgaagacgctttcatcttacttcaaaataaaagatcgcatagaggataaatataaaaaagaaatatattatcttttttcaatatatacacgtttctgtttaggcgtttatcgtccgattggggaaaatggaatacatatactattagataaaacgacaaccgaacttaaaaccctaaaatatcatattatagcaggaaaaataaataatgctaaaattgaagatatatttaaccttgacgattaa

SEQ ID NO: 153238 - DNA, 741 bp, Enterobacter cloacae
atgaaactcaccccttacctgataacactgacgctgctgtttatctcgttatctgccagagcggattaccacacccaaatcaacgccggaaataccgtctctggcgaggttgtcgatggttcaaaaggcaatcagcatgtttatggcacgctaactgactctacgatcacaggcccctacgcctggagcgacgttggcgatggcggacaaaccaatcacatcactgttaccgatcacggtgaactgtttctggaaccgggcggtagcgcttatgacacgcagataaccgccgatggtgttctacaggtgaatggttatgctgaaaacacctatgtggatagtggcggacaggtttacgttaacgccggaaataatggcgttgaagatccagaacaaggcggtcagattgttaataccaccgtcggtgctggcggcctggtcgttaatcgatatggcatcgacacaaatacggtcattggagctggcggcgaactggataccggctggaattacccttatgaaacccgcaacactgcaatttcccgtaatgccgtaatacaaaacggcggcattcagcaggtcagcaacggcggtacaagcgagggtagccaggtcaacgatggcggcagattaatcgtcaccggcacatggcactacaatgtcgtcaccgacactcagccttcggcctggtatcgcggcaccgctgatgacacttcggtttacggcgtgatgcaaaactag

SEQ ID NO: 153239 - DNA, 813 bp, Enterobacter cloacae
atgccacaggacacattttttcagagccagagcgaggctcagccaaagcttaatcctcccatatatcgctggcaggaggatatgccggacaataaccagcctcagctggtgcctccccagctgatttggttaaatgcaaaaaacagtatctggatggaaattccgcgctacgaaggggttgtctggggagggatgctatttggcggagtaattattcttgcagcaactttatttatgatggttatctctttttttgtaataggtgatattgtcgataatttaggttttggcgtgagtagtacaagtttgataatgttgtttttttttattaatttcagccttgtctcaatggttatcttgttttttaaaatttatttgtctgaacctcgagatcaacccattcgtctgaacaaaaaaaggcagaagatctacgcctttgactataaaagaaaatggtggaatccctgggccagatggccgacgaccatcaaagtttaccgctgggcagatattcacggcgagatgcgtttttcaagcgatcgctataccggaggttttcagctgtttgcttccgtctgtcagccaggaacgctggacgtggtggaacgcttccagattgccagcggctctcctgcacagctgcagcagctctggagctatctttgcctgtatatgagaggcgagccggtgccggatgaggcagttaacaaaggtcgccctgatttctggtgcccgcgtaaagcggataaatggcctgcagaaatggaaattgaatcaaccaccgctttagaaaaaatttgctccctgaactga

SEQ ID NO: 153240 - DNA, 846 bp, Enterobacter cloacae
atgtcacaggacacattttttcagagccagggcgaggctcagccaaagctgaatcctcccatatatcgctggcaggaggatatgccggacaataatcagcctcagctggtgcctccccagctgatttggttaaatgcaaaaaacagtatctggatggaaattccgcgctatgaagcggttgtctggggagggatgctatttggcggagtaattattcttgcagcaactttatttatgatggttatctctttttttgtaataggtgatattgtcgataatttaggttttggcgtgagtagtacaagtttgataatgttgtttttttttattaatttcagccttgtctcaatggttatcttgttttttaaaatttatttgtctgaacctcgagatcaacccattcgtctgaacaaaaaaaggcagaagatctacgcctttgactataaaagaaaatggtggaatccctgggccagatggccgactaccatcaaagtttaccgctgggcagatattcacggcgagatgcgtttttccagcgaccgctataccggaggttttcagctgtttgcttccgtctgtcagccaggaacgctgaacgtggtggaacgcttccagattgccagcggttctcctgctcagttgcagcagctctggagctacctgtgtctgtatatgaaaggcgaaccggtgccggatgaggcaatcaacaaaggccgccctgatttctggtgcccgcgtaaagcggataaatggcctgaagaaatggaacgtgaatccactactgcgccggacagtgaactttctgctccccgtgaccatagcgaactgccagataaaacgcgctaa

SEQ ID NO: 153241 - DNA, 2370 bp, Enterobacter cloacae
gtgcatgccattgtgctggatgatgccatcgggattgttcaggaacttaatcacgcccgcctggatgtagtggatgcgctggcgaaatatcgttctgaacccgcgaatattcatcagggcaccatttctgacactattttgtctattcgggaaatgataacaaaacagatagatgcggataaaagcattaagcctgtcacgatcccgctttatgctgattcacccttcgatgagggaataaccatcagccgtgaggatatggttgcttccaccaagcgttctgcgctggagaggatgcagaaatattacagcgaacccaaccgcgctaaatttgcccgggattttaaagccgtggtggacggctatcagcaaaaaatgatggcggtggcgaaagatctggatgcctggtatcactcggctttatggctgatggtgatcaaacaggactattccccggtaaccagcgtgatcagctgggcggctcaacttaacacgctggccgctaatttgcagggggcgatggtaggaatggataaggacaagtcggcctggcaccagtggatgaatagccctgacagcccaccatttatgtccctgctcggtaaagagtcggggctgattgctgcgatctacaacggttcagccaactacaccaatatgaagaccctgctgaacagtcaggaagtctgtgactttgtggacagcatctacttcagccagcccgtaagcagcctgacgatgtcgatgaatggcgcattcagtatgattggcgagaagatctctgccaaagcgaacgcaggattcgagcgggtactccaggcaatggcctatgcagcagaaggtgaacctgcggtcactattttttcgggtgaaattaccgttcgtgaatttcagaatatcatgcttaagcagctggatgggcacggacgtcccgtttggggaaccatgcggggaggcaccacgacctcccatgccggtacctggttgcaggtcactgatcccgtcatacttgagcgaaaaatccacgtacgctttgcatccttactgaaagatattgaatcaccgatctataagcaggccgcacgcaaggcgggttccagttcggctgccctgagtaaaggcacgatgctgaaagatggtagccatctttctggatttccgaacctgatcctcgcgcaggatgccgtagacgcttctcttgcaacgggtagtatgagtatgacgctgggggatacgctgaaaatagcccgtcagcagtaccagcttccgcgacgggtattcagcagcagcggcctgggtctggtgctgggggccgctatgctgggtctgcagaaaagtgccctggacgccaaccttaaagcgctgaaggaggctgtgccgggggatgcgcaggcggaaatgaagctggcctccagcgcgctgatggtgacggcatcggcggtggaaatggtcgggttcggtcatatgatcgcccgctggggcaccaatccctgggacgtaaagcccaacataatagtgcgtggcgctgaaatctacgcccatccgctgatccgagttgccggggtgattgggggcgtggcgtcggtagtggatgggattgctctgggtgtcaaagcctgggatgcaagacagaatggggatttttcagcagaggttctttacgctttgtcttctggcgcaacaatcatttctggtgctttaggtatttttgcaggttttgcaggtgattttgctttgtttggccccataggtatctgtattgggctggccatattaggtgctgtactggcaaccatggcagccgatgaagttcgttccccgctggaagtatggctcagtgacacctgtttcggcctcaagcgagccgaacatgaaaaacactgggatgctaacagtctcgacgatcttcaggcagcgatgaaagcgtactacaccattgccagcggcgtttctgcacaaatccggcgtgaaagaatggcagaagtgatgcttaactctgccgggacggggctggtagcagtgcaggtgaagttgccggggtgcagcaagctgggctcggactggctgatcgaactgactgccaaaggcagcgggggcagccagttactggctcagtcggtgtcttcagggaaggtgacaaatgtgaaaaccgcggctaagcagagttttgatatcaacccgatgggaatgggatctgccactttgtctgctgatttagtaatgaaagaaagctgggaaacaagcgggctactgctgcagggagagtttgcgtttaacagcatgaaattcagcgatgtggagcttaaagtgacctactggccggataagctcaagccggaagtaaatctccagctaatcaccagcacctaa

SEQ ID NO: 153242 - DNA, 141 bp, Enterobacter cloacae; identical to SEQ ID NO: 36145

SEQ ID NO: 153243 - DNA, 705 bp, Enterobacter cloacae; identical to SEQ ID NO: 8686

SEQ ID NO: 153244 - DNA, 288 bp, Enterobacter cloacae
atgggtatgcttcgggtcgatattgataaagctgctgcggatatcatgattctgctgaagacaggcggcactcagaggttccaccttccctccttccggcatttccttcgcattgaacatgcgcaaaaaaccctgcggggtgacctggtaggcataccagacctgtttatctgccagaacatacacataaccctcgcgcagtgtacgcagggcgtatttgaactcgcctcccttcagctccgtttcctggtgaggaacggcaggatgccagccggtattaaccagtga

SEQ ID NO: 153245 - DNA, 315 bp, Enterobacter cloacae
atgaatatcgaagaatttatgaatgaagaaaaccatatgtgcaatttaggcgaggatcttttttgcaagatcttcgaacccggagcaatttatgatttgccaaatagcgattttaataaagaaatcatttactggctcagtcagtatcttgtcggaaatttgagacaacctttagacgcgatctctgagcttgatattttcgagcagttttatgtttacgagacatggttctcgctaattaaatgccctgatgaaattagaaatttatcgaaacggataattcgatatcagattgggttaaaaaccattctttga

SEQ ID NO: 153246 - DNA, 1071 bp, Enterobacter cloacae
gtgtttagtgcaatagacctcttctgcggtggcgggggactaacagttggattgaagcaagctggctataatgtcttggctgctgttgagcttgattctgtagcggcagagacttacaaagcaaacaatcataatacaactttgatagaaagagacatcagacatgtttctggtgcagagattttaaagtcaataggtctcaaaaagggagaactaacccttttggctggttgtcctccttgccaaagtttttcaacgttgacaagaaattactctagtgaagatagtcgtaattcattgataaaagaggttttacgtttgatctctgatatagagcctcaaatgattatgattgaaaatgtcccaggaatgatgggtaggggaaagccgttcttaaaagaattcatggacggtatagaggctcaaggttacatagcaaattttggtgttctgcaagttgccgattatggtgtaccacaggataggaaaagatttgtcttactggcaggaaaagggtttgaaataaaaatacctaaggctactcatagcttaaacgataatgaaaatttaaaaaagtggataactgtaaaggaagctttagctggaatggttaaaccaatatccttagatgaagcaaataagaaaggagggccaaaagcttttaactggcatgttatccgcaaacaaagtgatatcaatattgaaaggctaaaatatctaaagcccggccgtccacgtttcgatttacctgatcatttaagaccaaactgtcataaaggtgataattcatcttttagcaatgtatatggacgaatgagttgggataaagtatccccgactattacagggggatgtaccgtactgagtaaaggtagatttgggcatccggaagaaaacagaacactatctgtaagagaagcggctcgtttacagacatttccagacaactttatttttaatactaattttatcgatagagtatgtcaaataattggaaatgctttaccatgtaagtttgcctaccatatgagtaaggcttgcttagactcattaaaaatgcttaaagaataa

SEQ ID NO: 153247 - DNA, 528 bp, Enterobacter cloacae
atgatagagttttcaaagttcaatgagctcatcaacaaaacaaaaaaattttttataaaagatgctgaacttagaagttactttctaaatctggataattttaataatagaatatcaaattcggaattaagaaaaattagaaatggatggtttgcacacccctttgaggacgaaacaaatttaactgttttcagagagggtagctttcaaaactcaatattcaaagtccttgaagaactaacctcaccagaaagtaaggatgactttaaaaaaagtaaagacagagtcctttttttctgtgaaaagtatcttttttcatgcaaaaatagttggactccaaaaaacggatttactatatcaaccaaacctcaagaaattttaattgatatgaacaaattttctactgaactaaaaaaaataagactttataatatcgaaccttttttctcagtagaagataaagagctttatatattcatgaaagaccctgcacactatatatataatgaccctcacttcaaaaaataa

SEQ ID NO: 153248 - DNA, 339 bp, Enterobacter cloacae; identical to SEQ ID NO: 144243

SEQ ID NO: 153249 - DNA, 339 bp, Enterobacter cloacae; identical to SEQ ID NO: 151695

SEQ ID NO: 153250 - DNA, 228 bp, Enterobacter cloacae; identical to SEQ ID NO: 120227

SEQ ID NO: 153251 - DNA, 294 bp, Enterobacter cloacae
atgagttttgattcccaaaacaaaacactactcagcaaacaacgtgaattaatcacggccgttgaaaaaattgaacgagactccgtaaaactacaaaatgagataatccgttatctccaggatgtatctaaaaataatcatgcgaatctactaatctcaggaaatacgtcatctttgataaatgatatcgttgcgtttgatgaaagtgattgtattagcctgacaggcgttgggaaaaatcacatacaaataggtgccatgcttttgcaaaaagcgattaagcatggctgctaa

SEQ ID NO: 153252 - DNA, 807 bp, Enterobacter cloacae
atgttacgtgcacacttcaataatatggaaaaattactcactgttcagggagcttcagtagccatcactggtcattctttacacaaaggaacaccaagagaggagtttatttccaaatttcttaaagatcacctgccgagcaatatatccattggtactggtgaaataatagaccatcaatccaaacccggtgatcaacggaatcaatacgatattgtcctgtaccgcaatgaatatcccaaaatcagtttcagtgatactatatcagcttttttaattgaatctgtcgttgcgacaatagagataaaatcaactctaacatatgaagagttgaaaaaatccataaactcggcccacaatgcaaaaactctaaacccaagctttgaggagctattttcagcttcaaatttaagtaggggaataagaaattttctggttgcatataacggcccacaacagatgcaaactgtacaaagctgggtagataaagcacatcaagagctaggaatctctgtaccttctttaccgaacaatcaaacaaggtttaacattgcaagtccatcacttgacgcaattttcattcttgaaaaaggcttcattcattatgacaattttatcgcaggactaaacaccaaccagttcagatttggggaaaccactatcaattggatttatacagattcgtctgaaggaaatcttttgtatttatttcatatgcttcagcatttaataaaatctgttcaaggaagatttctcaatgccgccccgtacttatcagagcaaaaatataatgtttatgtaaaataa

SEQ ID NO: 153253 - DNA, 441 bp, Enterobacter cloacae
atgggcataaaagtgaagggcatcagccaggcgaagagaaataccaaccgcattatcaatgaaattgagggtgttaaggctgttcgcggagttcgttcggctctcatggttggagggttaagagcggcctactacaccccaatcgacacatccacgctgattaacagccagttcagtgaaattaatatgaacggccacatcatcactggtcgggttgggtatagcgccaattacgcagcatatgtccacgaaatgcctggcacgcttaaaggccagccaagagcccactttggaaccaccagagaaggcaagaagtttggaggcggtcaagagcagggtacatactggggtacacatggagagcctcaattcctcaaaagaggatttgaagaagagcgtgattcgatagacgcggtgatgcgcaaggagatgtcgctatga

SEQ ID NO: 153254 - DNA, 483 bp, Enterobacter cloacae
atgtctttttataacaacattcagaaaaaattatcagagttaagagacgctcaggagcagtactgggcagacctccaatcccgcatcgactatttccaaaatggtctaataacctatcttggtgtggatgaatcagtattatatgattcgaaagataaacgctatcccattgttactgtcggaaatatgaagggtgatttcgtagaaaaggtcccaggacataaaatggaaagggttgaaggtgagatcaactccttgcttttctatgtgcaagtaaatctttctaaagcaaatagcgaaattattgatagcaaaaaaatattaaagtgccttatctggcgtagaggtgatgattacttcgttaatgtcgaagatgtagaggtaaagtgcagaagaaaaactagcacaaatgactttactttagcctatgacgaaatttataaaaatcttgagaatcatttagacaaaagaagctacgaataa

SEQ ID NO: 153255 - DNA, 183 bp, Enterobacter cloacae
atgagtgatgagtttaaaacaggcgatattgttaagctcaagtctggaggcccggacatgactattaaggccttcttaacatctcaggggaattcattcctttgccaatggtttgctggaaaaaaactagagcaaggatatttcaaacccgattcacttgagcgtgcaaccccaaagccataa

SEQ ID NO: 153256 - DNA, 429 bp, Enterobacter cloacae
atgttaggactttatggcggagcaacaggtttagttatcgaattagcagttaagaaagctattgaagcctttagtaaaaaatcaactgatgtcgcgcagaccacagcgcaactatcagatgaagcaagaaaggcagagcttcaatcgttagttttccagtctcaggcaaaagtccagcaagagcttgctatcgcaagaagaattctcgcagctgaagaagttgaaatcgaagagttctatgatggctctgcctcggcagaattaggcgctaaagcatcaacagagaaagtctcttttggtcttaatggcgagggacggaaaatcaccaagcgcatcattaaattcaagggcttcaataaccagattgaacacatattacaggaaatcgatagtagtacggttgaaatcctggacccgcagcagcaatga

SEQ ID NO: 153257 - DNA, 204 bp, Enterobacter cloacae
atgactaaagtttatgcgcgaatgatttgccaccctagcggaaacttgacgtttcaagtcagagagattggcaacacaatgtggacagacaagcaacgcggattcatatcagcgcctaaagataatgtcgaatttatgtgtcttgttaatgctgatttagcgtctttcactaagtcaggagttgaggtcatctggttaacatga

SEQ ID NO: 153258 - DNA, 471 bp, Enterobacter cloacae
atgatcgtcgctattatcaagaaactatggctgcccatagttgtggtagtgctgctggtttcaatggcgtgggcaattaaccactaccgcgataacgccatagactacaagaaacagcgagatacagcggttaacgaagctgctctggcaaatgcaaccattaccgacatgcagacgcgacaacgcgacgttgctgcacttgatgccaaatacaccggagaactgcaggatgcaaaagccactatcgatcagcttgagcgcgatgttgctactggcaagcgtcggttgcagctcaacgccaagtgcgccacgaacggagcgaccggcacctccagcatggatgatggcagcagcccccgacttactgactccgctgaacgggattatttcaccctcagagagcgaatcgccacagtgactaagcaggttaactacctgcaggactacatccggcagcagtgcttaaattaa

SEQ ID NO: 153259 - DNA, 477 bp, Enterobacter cloacae
atgcaagcaatcaatgctcagcggaaagcttttctggatatgcttgcatggtcagagggaaccgataagccaggtcagccaacaaagaaccgcggatatgatgtgatagttggtggatcgctctttacgagctacgcagatcaccctcgcaaattgatcacgcttaaccccaggcttaaatccacggctgcaggccgataccaattgctatcccgctactgggatgcttaccggtcacagcttggccttaaggatttctcaccgaccagccaagatgcggtggcattgcagcagataaaagagcggcgcgctcttgagttaatcgacaatggcaatatcaggcaggccattgaacgttgcagcaatatctgggcgtcactacccggcgctggttacggacagcacgagcacaagattgaaaacctcctgaagaaattcaaagaggcaggcggttttgtgacagagccaaaatcatga

SEQ ID NO: 153260 - DNA, 261 bp, Enterobacter cloacae
atggcggcttacaaatttttcatgttcgacccagataacggattcgaaacgtataagacagccgaagaggcgaaggcagcggctgatgaggccatcgactactaccgtggagatgcgggtgacgggtggccggaagaagtggagcaggtttgctggggtgaaattaagcaggatgcgcagcaggtagggctgcgcccccgagatgaagaggacaagagtggttgcgaaatgatttgcgactaccaactgacagacatgtaa

SEQ ID NO: 153261 - DNA, 228 bp, Enterobacter cloacae
atgacagacgaagcgatgaaaatggcattagcaaagcagttgacgattgctctgcaaaacctcggtgctcctgtcgaattactctgcattgtagggagctacggagatacccagaccgactcagacattctcgaaatgctcgagcagcataacgaacgcggcacctgcatggatgtgattatcgcgccggaattcacatggaaaccaaaacccggcggtgcatcatga

SEQ ID NO: 153262 - DNA, 621 bp, Enterobacter cloacae
atgtcaggacgtactgtaaccgtatgcaccatattaggcgttgctatagcggctattgggctgtatctcccctaccggagcgaaataaacgaaaatctttatcaaagggaattcctcactggaaaatggtcaaacgatgctgaatttatcagcaacagtaaggatctggggctagataacgatcagcctttagtaacagcgcaaatggctgttgataatgacggttccatagacggcgagatcatttccgcaggattatgtgatggtatgccgttaacctggaacatcacattcaatagcgaaagcccgtcgataaaaaacttcattattgctagaaaattctatatccgtcagcaggttgatggtgcaatggatacaagccctgttgtcgcaactatgaagctcgtgaagcaagacaggaaacataactccattacttttgaggtcgttgatgatcctcaaggaatgttacctaaccaactgactttagctaagaatcttccaaaatttgaagaaaactataattctttgcaagactattgtgcgaattcaacaaaggaatttttcaaaaaaagagctattgagagaaaaaaagcgttaggtagcgctgaggattcttga

SEQ ID NO: 153263 - DNA, 795 bp, Enterobacter cloacae
atgtcagttttattaagagagcaagatgtaaaagtcgcatttattgactggctttttagaaaaggcttgttagaaaacgcaactattattaatgaaatggttgtagcgaattggagtcgccgcgctgatctggctgtggcgaatggacacttgcaagcttttgaaataaaaagtgattttgactctcttaaaagactagatggtcagttagaaactttcacatctcgttttgaaaaggtaactgtcgtttgcgcaccaaaatttacctatgaaatttcgaagaaagtgacatcagatgttggtgttattgaatatctaaatactagtaaaggcattcgttttaaaatagttcagcgtgggcgcacggcagtactcggtaataagaaagtttatattaatttcttactaaaaaaagagttgcaattactgcttgttgaaagcgggaaaaggtttttactcgagtctggtcgtgaggctttagagcggatagctgaacaaatccccctatctagaattagagacttcgcgcttaaagcaattaagcagcgctataaagaaacttctgatgattatttgaataaattagcaggtagtggattgtcgaatgctaacgatctgattctgttaagtaaatcaaaaaagagacgggaacataatcactttaaagatttcgaagataacgctgaagaaaaattaaatgatttttatacagttgatatagaggggtttatgagaaagcacggagaagttgggagcatcactcccatcaaggttttgaaaagggtcgtgcgataa

SEQ ID NO: 153264 - DNA, 1065 bp, Enterobacter cloacae
atgaaagtaaattttgatagttattcatattatcctgcattaaggactcgtgcagctgaaattcttggcttgagtcagcttgctcatgataagaaagagaaaatacttccacttataactttaggaaaatggccccgctcagatgaaattcaagtttctcttgataagagtctggaggcaatgaataacttaccttttatcctagacgttactcaagagaacaagcatcattgcgcatcaagctttgaccttctatcttccgaaaacaatttctctaactggatagctttttgctctaataatgaaaatgttatccccgtagttcaaatgcctgaatctgcaaggttaagggatatagtacaacaggcaagaatacttgaagagaataaaggttccattgcattccgcataaagaatcttaacactgatataaataaaacaatagcatcactcgtgtctctcgactcccctgaaaatgcagttatcttcattgacttgggctacattcgcggacatgtatcagcaatgacgtctgctgcaataagtgcaataaaccaaataagaacagaaattcctgaagctataataagtgtactgtcgactagtttcccaagttcggtcgcaaactttgcaggagaaaatggtcaatctggttatattgatattatggaaagagaattccaccaaactatcggagggcgaggagtttctatatacggagatcatggttcaattcactctgtagtatatgatgatgttggtggacgttatgtcccaagaattgatattgcattagatgatgcttggttttttgagagaagaccaggacttgatagcaaaggctatattgaagcggcaagagcgattcttaaaagataccctaattatcttgaagaagaatcctggggggcgctgatgattaaaaacgctgcatcaggcgatattgctggtatgggaagtcctgctaaatggatttctgtgcgcgtgaatcttcacataacaaagcaaattgagctatctgaagcacttaaaacagattacgatcctgaagaggatttcttctaa

SEQ ID NO: 153265 - DNA, 840 bp, Enterobacter cloacae
atgacaacctcatcaacagtctttaacgaattcaaatttagtatattgatgtcagtttatattaaggagacttatgataattttacagcgtgctataaaagtataattgataattctttattgcccgatcagattgttattgtactggacgggcctgtaaatcgtgaaattcttggctttatcgaatgcgaaataaataagggtatcccgataacacttgttaaatcagatcataacctaggtttaggctcggctttgaacctcggattagagttttgccggaacgagtgggtttttagaatggatacggatgacatttgcatcaatgatcgttttgaaaagcaggtaatgtttataagaaataataaagatgttgttttagttggtgggcatattgcagaattcgatgaaaatatggaagtgatgacaggtattaaatcagttcctttaacatacgacgatataattgggtttattaaataccgaagccctttcaatcatatgagtgttgctttcagaaaaagcgcagtcatttcagttggtggatatcagcaccatcattttatggaagattataatctctggctaaggattgttgcaggtaattttaaagttgctaacgttaacgagatccttgttaacgttagaggtgggtctgaaatgattaaacgtaggaaaggcgtagcttatatcaaaagtgagtggcttttgatgaagatgaaatatagtttaaaaatttctacatgtttcgaatcattatatatctttatgatgcgtagtatacctcggttgcttccaacaagtttacttaatgttatttattcttttctacgaaagtaa

SEQ ID NO: 153266 - DNA, 957 bp, Enterobacter cloacae
atgaccaatttgtataaattcatgggtgctgatatagccgataaattaatgatagatgaaaaacatattggtataaagttttctcacttgcatgaatacaatgacccatatgagtttttcctcacaattgattttaaccgaggtcctgatgaactggctttttacaatgaaatgatcagcatgcttacaaagcaacctgccacttgctttacaaaaagtcctgtaatatccccaatgtgggcgcattatgcaggcaattcatcaggatttgtaatagaaattaacgaagagaagtttaaaaacttcctgaatgaaatcggcttccaagaacattgcgcaatagcagatgttgagtatatggactctccagatgaaggtattgaagatgttctagcaagagcatttcatatctgtaaacctcgttatatttattggcttatttcatatattaaaagagcagcatatttgactaagcaaacttgctggagttatgagcaagaaagacgagtgataattgatgagaaagcgcttactaaaccaaacgactggctaatgctacttcctgtaccagttacttgtataacgggcgttattgttggacacaaatcaaatgattctttgaagcaaaaaattcaggttttagctaaaaaggctaaatgcagatattttgagatggtaataggtaaaacaactactgcaccttttcttttatctaagaatcttaaatcacaccagtttgttgatgggaagatagaagctgtttctcgtcaatgtaaaaaatgttatgagccactagatttcgatagtaaagtttgtggttggtgtgggattactcagcaagatgtaaaaatggctacgtatcgaaactcttttagaatgatagatagctatggaggcttgcaaaaatacatttccgctatgaacgatatcactgataaatatcatgggcaaaattag

SEQ ID NO: 153267 - DNA, 210 bp, Enterobacter cloacae
atggcaaagctgatgaaagcgagtcaatggggacgccgagagttcaccgatgactctgttcctgataaccgaacgattaaacgttgggtcgagaacggtttactcatggggcgtatcgtagacggatctgtttttgtctgcgaaacggaaaaatggggcgtcgactcaatggttagtcaagcagttcgccagttgattaacgagggctaa

SEQ ID NO: 153268 - DNA, 489 bp, Enterobacter cloacae
atgaacacgcttactaaagaatggctccaaaagaccatcacggagcttgaagaggagcgcgatgcgacgccaggcgcagtaaacgaagatgcgacgagggcacttgctgcgatgaaacgagcgcgggcatcactcgaagcggaaccgataggagctttccacatcgccgatcagcaggtaggcggaaccacggattatatcaaggatggcgagtggcccattgatgacggcattattgaggtctacgccgccccgccagcaccgttagtgccggatggctgggtgatggtaccagtcgaaccgacagaacacatgatcgtccagggctttgaatctgagccagatgagagctttagtgatccagatgcttgggaagcatacgatgctatgagcggctgtcagcaggcggcgcaccgtgcaaaactctgctgggctgcgatgattgcggcagcaccgaagccgctaccatccaccagcagcgaagagtaa

SEQ ID NO: 153269 - DNA, 831 bp, Enterobacter cloacae
atgtctcagcaattagacagcagcgccatcaaacaggttaaagacctagttctctccggctatcacctgaatgatattaatggactcgcctgtccaacagctattttgccggaaaatacaaaagtagcgagcctggaacatttttcacttgagcgcttccgcttccgtggcgccatgaccacgaccagcatcgatgatttcgcacgttattctaaagggtatgccagtgtcgaagagccggctcgctgctttattgatgcggacaatatgacagcgcgatccgtatttaatatcggcacgctggaaaacccgggtcatgctgataacgttgctgcaatcaccctgaaacagactgcacctttccgcgcgctgctggcgattaacggcgaccgactgaagcaaaagcagatcgccgaatggctggaggactggagtgattacctgctggcctttgatgctgaaggaaataccatgcagatttcacaggctgctcaggctgttcgtcgcattactatccagcaggcaactcagcaggatcatgaagacggtgatttcagcgggaaaaaatcactgatgcagagcgttgaagccagcagcaaagatataatgccggtagcattcgagttcaaatgcgtaccgtatgaaggtcttggtgagcgagcatttagccttcgcaatagtctactcactggtgacgaaccacgctttgttctgcgtattgttcagttggaagcgcaggaagaagcgatcgccaatgaattccgagacttgctaatcagcaaattcgacaacgagccagtagaaacctttattggtaactttaaagcgtaa

SEQ ID NO: 153270 - DNA, 666 bp, Enterobacter cloacae
atggacatattgaatcttctagaagttttgaagccatcaggtaacgtggtaaccgtaagaatagataatgcaaagaatggtttggagacgctatatgactttattatcacattagcgccaacaataattgctattgttgcaattattgcctcatattatcaattcttgagaagcatggcccaacaacaagatcaatttagtcgaggtgttgaacaacagattaataacttaaaactgagtgttaaactcgcaactgaagtcgagctaaaaaaagatagttgtaaggggataagggaagcatgcgtgagcttactgagtcatgctactgacgcttattcaaaaaaagctacttggatatggtatcaagatataccgaatgataaaaaaaccgattacgatcgggaaaagtatagaacatcttatgatgaatatatagaagcactaaagcgttttcgcgatacggaatatcttattgaaacttatctagatgagatattagatgctgagtttagtgatagtatcaaagaactagatacgttcattagaattgaaggtttgaacagcgaagataataaacaagccaaaagaaaatgcctctctctttgccaggcctacattaggcgtcagcagaaagaaatagttgagctttcaaattcagtttcttag

SEQ ID NO: 153271 - DNA, 534 bp, Enterobacter cloacae
atgagaagagcaaaagctgctaacaacgctaagcatgaagcaggacattggatcacagggtggatacttgaaagagcaagtcaagacctggtaatagctacccatgatgtaggggactcatactgcgagcgcgtgccacatccagatttccttaacctttcccagatcaattgtcatcttgggaatcgtattatcaatttactcggtggagcaaaagccgaaagtattgtaagtggtaattttaataaccagatctttaatgatctcgttaacaattaccaaggagcgtggccggatttttttattgcctctgagttattcagatactactacagatcactcgatccttcagtccgcctatcgtttaccgaagaatggcaatcacttgttgatagaactgaggcactaatcaaaaagtatgagacttttattaatgatattgcggatgaggtgctcaaccgttttcgagaagaccaaccaactgtaaccatttcacaagaggatgttttgaatatacttacctctcgcatatga

SEQ ID NO: 153272 - DNA, 204 bp, Enterobacter cloacae
atggttgagcaaaattattggtttttttcatggaacgctttcgatgctgtaacttgggaacatctacctgagtattcctatggcgaagtatacgcttgcgatagcgggaaaaaacctaatgaaatttttgagtcattaatggctgaaaaacaaaggctacgagaaaacctgtggatacagtgtattgcattcaacaaaatttaa

SEQ ID NO: 153273 - DNA, 1263 bp, Enterobacter cloacae
atgaagctgataacaggtttactttttttactggttccggggctggttatagcgaagggcgtcagtctggagcttaacgccgttccgctgccgcaggcgctgaacatgatttatgttcaggtgttcgacaagccttttatgcttgacccggagcttgccaaatctgacaaggtggtgacgttccgtatcacgccggatatcgatgaacgggcattcattaagcgctatctcggcaacatgaacattgcgatttacaacaaacagggcatcgattacgtggcaccattcacgcctaaagcgtatgtggcgccgcaggaaacctttgtttatcggcctcgcttccgttccgtggcgtatttgtcggatattctggccgggcagtttacggggcagtttaatagtcagcgtaattcgttaccgtccgggcagatctcgccggaagcggctgtagcaggtacggcatcggactttatgaaccgtaccggggatgtgctggtttattatggccggaagtcagagattaagcggttgcagacgctgttaccgctgattgataccgcttctgaggaagtgattgtcgccgcttacgtgtttgaggttcagaccagcgagcgtaacggctcagggctggcactggcggcgaagctgctttccggcaagctgaacattcagattggcacgtccggcggttttgacaactttatccgggtgaataccggctctctcgatgcgctgtatgagctgttcaggacggacagccgttttcatgtcgtcagttccccgcggctcagggtgaaggatggtgcgtcagccacgttttcagttggtaatgaggttccggtgctgggtcaggtgagctacgccgacaacaggccgatacagtcgattgaataccgttccagcggcgttatcctcgacgtgaagccgcaaatccggactgacaacattgaccttgtgattaagcagcagctttccagctttgcgaagacagatacgggcgtgaataacagcccgacgctgattaagcgtgaggttaatacggaggtctcagcggctgacggggatattattctgctgggtggcctggctgaatctaaggtcacgaacgccgataccggattcagtttcctgccgaaaggctggctctccagttcgtccgacgagaagaacaagacggatatcctcgtcgtgttacaggcgaaaaaagtcaggcgcgccagcgccgcgcacgcaccgagttcccacgaggagcgcgcgcggtga

SEQ ID NO: 153274 - DNA, 288 bp, Enterobacter cloacae
atgtttggtattctggtttcagcctttaacgtggcgctgggttttgtgctgcgaacggtggttgtcaaatttattctgttttttggcctgtactttgtcgtacaggcgtttgttccggttctggcgtcactgctgcctaagtctgttgatattgccgggttattttcgtcattgccggacagcgtatggtatttcgtgaatctgtttatggtcacggaagggattaaactgatgttttcagcattgttaactcgctttattattcgtcgcattcctttgattggttaa

SEQ ID NO: 153275 - DNA, 1863 bp, Enterobacter cloacae
atgcgcctgggcggtcattcagggtctggaaagttaggtattactatattgtccttactggtttcatccggtgtacatgctgatgcagtaacagcagacggatttggacgtgtaattcagcaaatggttgaaacccgtgaagctcaggttgtttctcaatctgcggggcgtgtgttcgcaacgggtgccagttctctcggtatgggcgcgggtatcgctgtcgctgcggaggttatacgcgaacgtcctgacgtttttgattcaatccgcatgtgtggcgagaaagtgggtaaccctcagctttgcaccggaacgtcagttttcgcggctgcttatggccttgcgaagcatacaattgacgattcgatatctacgggtatttcaagttttggcagtaatatgatggctgccggacagacaacatggggattgttggggcaggctgcgggtgttatttccgttgctgaccttgctttaaagcagggcgcaaaagctgttgaatatattacaagtggaataaaacaggatgatggaacttatttacttaatttgtccaatggcgctactgttacttcttctgttgcaccttcacctaaaagccctgttgctgtttatttgccctctgatgctactggcttttctgcgaagaatattcaggattcgataaacccttataatcagcaggttaaacctgttcagattgcgccaacctattacaatattgatgcaccaccgccgataagccagccatttccgaatgatgtatatcgtgtgtcagtaaagggtactaaatatccttattcgactgatatcagggatgcaaagggcgatgctgtacttgtcagtgataatccggtaatgattgcgctttataagtcgattaatggttattctcattccaatgtgacttatcatgaggcttctgacgacaataacttacatatcaggatgccaagaaattttaaggtttattcggtttccgttaaagactttcagtatgaaaagccgaatccttattttggtggatattcatcgattgtaactgttgttttatctgttgcgacaacaacggttacgcttgaaaattcatgggatttatgtaaaagcgagaaagtacctgcgccgggcagtacggctgataatcccaaaacgcagtggaaaagtatttgccaccctgagaaggccgtgtataaaacgacgaatgatgttcaggatgttaaagaccagatattttttaatacagaatttgatacatcaactttacctcaggtaattaatggcgaggttattgataatatagatttcaagccggaagaacagttaaacccggctgcgctggttaatcttattaatggccttgcaggtcagactgttgttcaggaaggatatcaggggataccgcttgataaaccttttacggcggctgaactgacggctgcggctaatgctgttggcgtaaaacttgataagggcttgctttatagtccggttgtcgttcctcagtcgtgggttaatgccagacccggtgcgggaacggatacaggtgtacaccctggtacaggcacagataccgatacttctgttgatttaggcgaagaccccggcattaaagcgccggaacttgaaaaaccgcctacaggtgaggaaattctaaagccaattacggaattaatgccggacattaaaaatctgattatttcatcgaaggatgttcagtgtccggtatggtcgttcgaactctgggacaataaatattccattgattctcactgcgagcttctggaaaaaatcaggccacttctgaaagcggtattcctgcttatctggggcattatttcgctgcgtatcattctgactgcgtga

SEQ ID NO: 153276 - DNA, 249 bp, Enterobacter cloacae
atgtttggtaagactaaacaggttttaacccgtattggtgcttttactctggctgttgctgcacctgctgtatttgctgctgaaggtgatgttgttggtggtaaaggtattgaccttacgccgctgactaacagcgttaatttcggttccgtcctgaccggaattatggcggtagcgggttctcttattgttctgtatgcaggttctgcgggtgtccgctggattttgcgtatggttcgtggcgcttaa

SEQ ID NO: 153277 - DNA, 270 bp, Enterobacter cloacae
atgtcagatgaggtaatcatcaggacaaaatattgcaatccgaatatgagctttggcagccctgacggatgcgatgaagtcactttgaaattaccgaagtcagaagttgttaaattacagtcttcggtagtttctcaggataagcctgttcccgatattgattattcagtcgcggcgcaattctgggggctggcttttacgacaacctttttcctgtggctctttgcaaagggaataggtgaaattcttaaacacgtaagaaatgcataa

SEQ ID NO: 153278 - DNA, 291 bp, Enterobacter cloacae
atgagtaatttacttaatttagaaactactgttaccggaaagattaaacgctttaataatagtggcggtttttattatacaacaattgtttctcctgcggctgatgcttatagctttccgcctgtcattcgtattaaatcaaagaaaccattaggccgtattggtgatgaaattacagacgtacattgccgtattactggttatgaacggagtttcccatacactgataagcagacaggtgagcagtctaaagggtataacgttgatatgctgcttgaattattagaatga

SEQ ID NO: 153279 - DNA, 1116 bp, Enterobacter cloacae
atgttcttcgactggttaagtattgaacaggatttcggctttcaacttcctattctctcggatgttgcttaccagcgtattcatcttgaaagtggtgaggctagtgcgctttctcagccaacttttcagcaccggggatctttctgtgatgtcgtttctatctctatccgtggatctgttctaaaaatgacgggcaacccctcgcggtgggggcggcttgataatttatttggcttacctactgttgatgcttgcgttatggttttcaataagatccttcttgatcttaaattgcctgttttcacaaaatgcactcgattaatgcccggtcagtctaaagaaaccgaaaaagcccatatggtaactgatggggcgttaattaaagagcttcatataacatctaataaatctgttggcaaagggaatgaggatgattatatttcagggctttcgactcaaccctataggaatagtgtcccacggttgcattcaaacggtaaatctgttgactggttgtctaaaaaagggaatgttaatcttatttatccgactgtatataataagtcacatgagattgagttacatagtttattaaaaataaaaaataaattctctgagcagtcaaaagagtttaattatattgttagtgtgattgattattgtaaggaaaatggaatagtcagatttgaacaaaaattgaagtctcgttttattcaaaagcactctctaggtttttgggggttatctgattattctgtcttaaataagttacattctgattttctggctcttgatgaaaagttatcggtgaatgctatggattttgaaactattagtgaacatcttattacccgtggaatagttgaaactacacgggcagctaatactacagctatgtatgcgatccaatggtttcatggtcatatttttgatttaagtaaaaatcaagtgcgtattcatcgagcaagactccgcaagattggtattgacattgcgcaaaaatgtaatgtttcgaaattctctcctgttgttgtcaagcaaacgcgagagattaaagtttctgattgtgttattccatcgtggtatgtaaaaccgtctcatttacgagttgcatag

SEQ ID NO: 153280 - DNA, 189 bp, Enterobacter cloacae
atgcctacaaagcacataaacgatgttcaatggcgaaaaatagagaaagaaaccgttagagcggtatcaaccctagctgttccagttaaagataccaaaatgctcgaatggataatcgccaaagggttagagacgatcacagaagacgactaccgcaagttcctgaagacagaaagcaaaaaaaaataa

SEQ ID NO: 153281 - DNA, 267 bp, Enterobacter cloacae
atgaacaaagaccagataatacaagtacttaatgaaacagagaatgacagccccgtagcaagagcagaattagcaagattcctcgtaaaaacaatctacaattttgtaaaaatggagaggccagaaggtgaaggtctggacggacgtgatggcccagaaaggcgcagcatgggaaaaattgtagatgcggcagaaaaccactactttaacatgataaaagaaagccatgaaaaacagggaattggaagaaaaaaccctgaggaatga

SEQ ID NO: 153282 - DNA, 1263 bp, Enterobacter cloacae; identical to SEQ ID NO: 153273

SEQ ID NO: 153283 - DNA, 1035 bp, Enterobacter cloacae
atggctatttctgcgtatgtgggcattcccggaagcggtaaatcttacgaagtggtggcaagcgtcattattcccgcctgtatcgctgggcgtcgcattgtcagtaatatttacggccttgccacgcaaagtatttatgattactgcgttgatattaaaaaggcagacagggaatcacttggtgaaattttacttgttcagaatgaagacgttcagaacgataatttctttccctacaaaacggattcaggcattgcggatgatacgttctgccgtccgggggatttaatctgtattgatgaagcatggcgcatatgggagagcgataaaggaatccccacaaatcatcgctctttcattgcagaacatcgtcatttcgctgatgaaaagacaggcgtgacctgcgatttagtggttatgaatcagtctgttgccaaccttccgcgattcatcaaagaccgggtggaaaccacgtatcgcatgagtaagcatgtggcgctggggctgcataaccgttaccgggttgacgtatttacgggcatcaagctgtttaagtcgaatctgacgaacagttatcagaataaatatgacaaggcgatatttcctttatataaatcccatgagaacgggcagggaagggagcttgtcactgataaacgccagaatattttcagttctaaaatgctgtggtttaaagccgccgggttactgattctggcggtaattgccattttttatctgttctggtttttcacgtcaaacggtagttcagagcctgaacagcagacaaaagttttacccgccggaaataacactgtggtttcagttcctgctgcgccagttaagcccgttgtctcggacaaatggcggcttgccggacggcttaaacgcgatggtcaggcgtgggttgtcgtggctgacacgtccgggaggctgcgtatagagccggcttctcagttcagctttgacggcatgatgatgacgggtgaaatcgacggagaaacggtgacggtttattcaggggcgatacgatga

SEQ ID NO: 153284 - DNA, 288 bp, Enterobacter cloacae; identical to SEQ ID NO: 153274

SEQ ID NO: 153285 - DNA, 249 bp, Enterobacter cloacae; identical to SEQ ID NO: 153276

SEQ ID NO: 153286 - DNA, 291 bp, Enterobacter cloacae; identical to SEQ ID NO: 153278

SEQ ID NO: 153287 - DNA, 1116 bp, Enterobacter cloacae; identical to SEQ ID NO: 153279

SEQ ID NO: 153288 - DNA, 189 bp, Enterobacter cloacae; identical to SEQ ID NO: 153280

SEQ ID NO: 153289 - DNA, 267 bp, Enterobacter cloacae; identical to SEQ ID NO: 153281

SEQ ID NO: 153290 - DNA, 570 bp, Enterobacter cloacae; identical to SEQ ID NO: 10920

SEQ ID NO: 153291 - DNA, 342 bp, Enterobacter cloacae
atggctattgaaggcactgcggcgactgttccattaagccccggtgaacgcctgaatggacttaatcacattgcggagttaagggcgaaagtttttggcctgaatattgagtcagagcttgagcggtttattaaagatatgcgtgattcacgggatattaatagcgaacaaaataaacgggcactggctgccatattctttatggcaaaaattccagctgaacgtcatagcatcagcattaatgagctgaccactgacgaaaagcgggagttgattaaagcaatgaatcattttcgtgcagtggtgagcttatttcccagacggctaaccatgccgaattaa

SEQ ID NO: 153292 - DNA, 234 bp, Enterobacter cloacae
atgcgtaatattgaaaccctctcgaccaaaaccggaccggatgacgcagggcttaatattttactgacagaggctcgtctggaagaacgccgggcaagggctgaagcaatggcagctcgccttgatagcctggcgtgtcatatcacatcccgccagctaacccacgtcgaagcggcagaactgcttcgtgtgactgctgaagcaatccagaacgaagcgcaggagatccactaa

SEQ ID NO: 153293 - DNA, 228 bp, Enterobacter cloacae
atggctgatgcaatggatctcgtacagcagcgcgttgaagaagaacgccaacgccatatccgtgctgcccgtgccaaaacgccgggcgtgtcccgcgtgctttgcattgagtgtgaagcgccaattccgccagcacgccgccgtgccattccgggtgtgcagctttgcattacctgtcaggaaatcgcagagctgaaaggcaaacattacaacggaggtgctgtatga

SEQ ID NO: 153294 - DNA, 858 bp, Enterobacter cloacae
atgagcaccatcctgaaatgggcgggaaataaaactgccataatgtccgaactgaaaaaacatcttcctgctggcccgcgactggttgaacctttcgcgggttcctgtgctgtgatgatggagacggattatcccagctatctggttgcggatattaatcctgatttaatcaacctctataaaaaggttgccgctgattgtgaatcgtttatatctcgcgccagagttttatttgagaacgcaaacagggaggtggcttattacaacataaggcaggagtttaattactcaactgaaattactgatttcatgaaagcggtatatttcctgtatctcaatcgtcacggttaccgtggtttatgtcgctataacaagagcgggcatttcaacattccctacggtaattataaaaatccgtatttccctgaaaaagaaattcgcgcatttgcagaaaaggcccagcgagcaacgtttatctgcgccagctttgatgaaacgctggcgatgttgaaggcgggggatgtggtgtattgcgatccgccgtatgacggtacgttttccggctatcacactgacggcttcactgaagatgaccagtatcacctggcatctgttcttgaacatcggtcatcagaaggacatccggtcattgtttctaacagtgacacatccctgatccgttcgctgtatcgcaattttactcaccactacatcaaggcaaaacgcagcatcggtgtggcagctggcgagggtaaatcagcaacagaaattattgctgtttccgggccgcgctgctgggtgggatttgattattcgcgtggcgtggatagttctgccgtgtacggagtacgtgcatga

SEQ ID NO: 153295 - DNA, 2415 bp, Enterobacter cloacae
atgagtcatgccgatatgaacaactgctgcggctttaacgaagctgccgcatcgttctcatggaacagctcgaaaaaggccattaacccttatctggacccggtggaagttgcgccggtttctacgctttcaaacctgatcactctgtacgctgccgataacgagcaggaacagctgcgccgtgaggcgctgagtgatcaggtctgggagcgttatttctttaatgaatcccgtgatcctgtccagcgcgaaatggaacaggataagctcattagtcgggcaaagctggcgcatgagcagcagcgttttaatccggatatggtcattctggcggacgtcaacgcccagccttcccatatcagcaagccgctgatgcaacgtattgaatacttcagcagcctgggcaggccaaaggcttattcccgctatttacgtgagacgattaagccatgtctggaacgactggagcatgtacgcgacagtcagctatctgcatcttttcgctttatggcaagccatgaagggctggacggcctgctgatcctgcctgaaatgagtcaggatcaggtgaaacgcctgtccaccctggtagctgcgcatatgagtatgtgccttgatgccgcttgtggcgatttgtatgccaccgatgacgttaagccagaagaaatccgcaatacatgggaaagggtggcagcggaaaccctgcgtctggatgtcatcccgcctgcgtttgagcaactccgtcggaaaagaaaccgccgtaaacccgtgccctatgaactcactccgggttcgctggcgcgtatgttgtgcgccgactggtggtatcggaaattatggaagatgcgttgcgaatggcgggaagagcagttgcgtgctgtctgccttgtcagcaaaaaagcatctccctatgtcagctatgaagccgtgttgcataaacgtgagcagcgccgtaagtcgctggagtttttccgttctcatgaactggtgaacgaagacggcgacacgctagacatggaggatgtggtaaacgccagcagcagcaaccctgcgcatcgccgcaatgagatgatggcctgtgttaaaggtctggagcttatcgcggaaatgcgcggtgactgcgccgttttctacaccatcacctgtccgtcacgtttccattccacgctaaataacggcaggcccaacccgacctggacaaatgcgacggtaagacaaagcagcgattatctggtcggtatgtttgctgcatttcgtaaggcgatgcacaaagccgggttgcgctggtatggcgtgcgggtggctgagccgcatcacgacggcaccgttcactggcacctgttgtgtttcatgcgcaaaaaagaccgccgcgccattacagcattgttgcgtaagtttgctatccgtgaagaccgcgaggagctgggcaataacacggggccgcgctttaagtctgagctgattaacccgcgcaaaggaacgccgacaagctacatagcgaaatacatcagtaagaacattgacgggcgtggtctggctggcgagatcagcaaggaaacgggtaaatctctgcgtgataacgctgaatacgtgaatgcctgggcgtctctgcatcgtgttcagcaattccgcttctttggcattccggggcgtcaggcttaccgtgaactgcgattgctggctggtcaggcggcaaggcaaaagggggacaaaaaagcaggtgcgccggtactggataacccgcgccttgatgccatcctggctgctgctgatgctggttgttttgccacctacatcatgaagcagggcggcgtactggttccccgtaaatatcacctcatcagaaccgcttatgaaatcaacgaagagccgaccgcctatggcgatcacggcattcgtatttatggcatctggtcacccattgcagagggcaagatctgcactcatgcagtgaagtggaaaatggttcgtaaagccgttgacgttcaggaggcggcagccgaccagggcgcttgcgccccttggactcgtggcaataactgtccccttgctgaaaatttgaaccaacaagggaaagacaaatcagctgatggggataccagaacggatatcacccgcatggatgacaaggagttgcacgattacctgcacagtatgagcaaaaaagagcgccgggaactggcagcaaggttacgcctggttaaaccgaaacggcgtaaagactacaaacagcgaattacagaccatcagcgacagcagctcgtctatgagctgaagtccagaggatttgatggtagcgagaaagaggtcgatttactccttagcggcggcagtattccgtcaggagcaggcctgcgtatcttctatcggaaccagcgtttgcaggaagatgataagtggcgggatctgtattaa

SEQ ID NO: 153296 - DNA, 234 bp, Enterobacter cloacae
atgcgcattgaaataatgatcgataaagagcagaagattagccagtctaccctggacgcccttgaatccgagctttaccgcaatctgcgccccctatatcccaaaacggtaattcgtatccgtaaaggtagctctaacggtgtggaactgaccggactgcaactggatgaagaaagaaaacaagtgatgaaaattatgcagaaggtgtgggaagacgacagctggctgcattga

SEQ ID NO: 153297 - DNA, 732 bp, Enterobacter cloacae
atgtcaatcagatatcacctcgttttttgtcaagaaaagaataataggctaaaaatgaaaattaaccatattgcgttacctatatctcttgctgtaatcctaactggttgcgtgcctcatgcttctaaccgaaatatcacagctattgaagtggtgaagcctgctattgggcaaagtgctacagcctacatgggcgaccccatcataacatctgctactggatataaaacggacgtactagagcttggtgcggctaatggtgcgctatcttctatctctgcaggtacatattgcagcgaagggaatggaatttaccgcaatcatcataatcctcaagctgttgcgctaaaaaatatctatggacaaatcggcacctatgttgattatgtaagttacgatgctgcaaaaaatgagatatcaccaccaaacggcacttcttatacagcctcagaaatttctatcaagcgtgttcctgatgggctgtgtcgagtgagtaactcattggttaagactatagaatacaatggaaatgcaggcggtgtaatgaagtttacctatcgtgagtttgcaaacgatatggctcgtgcagcgtttacaacagatttttctgtagattcgaagggaagtgatgttatcgcttacaaaggagccaagttcaaagtgaacaaggctgataactcgtctatttcctatacaattatttctggctttgacaaggctgtcacgttctag

SEQ ID NO: 153298 - DNA, 1761 bp, Enterobacter cloacae
atggtcgcaacttctaaattactacttttgaaagtcgcagcatctcgtgctgacttggcaaaattgctagatgttaagttggtgtttttaacgaatattctttacagaattggtactgataatcagtataaagatttctctattccaaaaaaaggtaagggagtcagattgatttctgcgccagaagatagtttgaaagatctccaaagacgaatagccgatcttttaatggagtgtagagatgaaactttcaaaattaaaaaaattaaaaacaattactcctttggttttgaaagaaataagtcaataatttccaatgctttcagacatcgtgggaaaaatataatactcaatattgatcttaaggattttttcaaaagctttaattttgggcgagtgagagggtacttcctatccaatagggatttcttattaaatccgattgtcgccactactttagctaaagccgcatgctataagggaagtttgcctcagggtagcccgtgttctccagtgataacaaacttaatttgtagcattatggatattagattagctaaattagcaaagagtttaggttgttcatatagtcgttatgccgatgacatcacgttttcaactaataaaaaagaatttcctaccgatttggcaatatctcttcctgagggggttgtcttggggagcattcttgtcagtgaaataaaacgtgctggttttgatattaatgatgctaaaacaaggatctcgtacaaatccacgagacaagaagttacgggacttactataaatagatttgttaacgttgataggaaatattcgaataaaacaagagcattagctcattcactttatagtaagggagaatataagctacctgatgaagatggtaagctagtcgtggggagtatcgaaaaactagagggaagatttgggtttattgaccagattgataaatttaataacatacaagataaaataagtaaacagcctgaaaaatatgcgcctattcatattacattaaaaaactacaggttaaagctgaatgtacgagagaaggcatatagtaaatttatttactacaagttttttcatggacatgcttccccgacaatcttgacagaaggcaaaactgatcgagtatatttaaaatcagctattcgttcactttctgccaaatttcctgagttgctcaagaaaagcacagacggtaaaggaaatgatatcaacttgaatatttttaaatctgatgagaagtcaagttattttattaatatgtctggaggtagcgcagatcttaaaaaattcatcgaaagatatatggatgaatattcaagctactatggaagcattcctaagcacccggttatcatggtattggacaacgattctggttctaatgagattttgaatttccttaaaaataatgttaagagctgccccgatgataccaataaaatgagaaaaatgagatttatccatgtctttaaaaatctctatatcattctaacgcctttaagtgctactggtgagcagactgcgatggaagatctttttactcatgatgtattatcaactattcttggtggtaaaaaatttaacaaaaagaacgatggggactcaaaaactgaatatgggaaacatgttttctctgtgaaagtagttagggataaaaaacgaaaagttgattttagtggttttgaaataatactcaacacttttaaagatgtttttgaacattataaaaaaatatgcagtatatag

SEQ ID NO: 153299 - DNA, 834 bp, Enterobacter cloacae
atgacagtgaaagcaaagcgttttcgcatcggggtggaaggtgccactaccgacggacgtgaaatccagcgtgaatggctggaacagatggcagccagctacaacccggcggtgtataccgcgctgattaaccttgagcacatcaagtcttatctgccggacagcacctttaaccgctacggcaaggtgacggcgctgtttgctgaagaaatcacggaaggtccgttggcaggcaagatggcgctgtatgccgacgttgagccaacggaatccctggtggaactggtgaaaaaaggccagaaattattcacctctatggaagtcagcccgaagtttgctgatacgggcaaagcctacctggtcggcctggctgccactgatgaccctgccagtctgggcaccgaaatgctgacattcagcgccagtgcagcccataacccactggcaaaccgcaagcagaatcctgccaatctctttaccgctgcagaggaaacggtgatcgaactggaagaaatccaggacgacaaaccgtccctgtttgcccgtgtcacggcgctgtttaccaaaaaagagcagtccgatgacgcccggttctctgatgtgcataaggccgtggagctggtcgccactgagcagcagaacctgagcgcacgcaccgaaaaatccctgtctgagcaggaagaacgcctgtctgaactggagactgctctgcaggagcagcaaaccgcctttaacgaactggtgaataagctgagtcatgaagacagccgccaggactaccgccagcgtgcaacaggcggtaacgcccccgctgacactctgaccaattgctga

SEQ ID NO: 153300 - DNA, 465 bp, Enterobacter cloacae
atgaagtttgttgcgccagaacaggcaccggaacaggcggaaatcatcagaaatacgccgttctggcctgatgtggacctgtcggagtttcgcagtgtcatgcgcactgacggcacggtgacgcagccgcgtttaaagcaggttgcgctgtcggcaatttcggaggtcaacgcagagctgtatgagtttcgcagacgtcagcagatgctggggtatgtgtcgctggctgaggttccggcggaacagctggacggcaaaagtgagcgcgttcagcactatttcaacgcggtttactgctgggcacgcgccatgctcaacgaacgttaccaggactatgacgccacggcatccggtgtgaagcgaggcgaggaactggcggaagccagcggtgatttgtggcgtgacgcccgctgggccatcagccgggtgcaggacgcgccgcactgcacagtggagcttatctga

SEQ ID NO: 153301 - DNA, 216 bp, Enterobacter cloacae; identical to SEQ ID NO: 96755

SEQ ID NO: 153302 - DNA, 378 bp, Enterobacter cloacae
atgaaaaagaaattaatcagcgggctgtttctgatgttatggatgacgctgttaatcgaagcaatggtgtatccgcaggggatttttccggtactggcagcgtccggcgtttggatagcctgtttgctgacatgggcggtaattccggtagcactggctgcgttaattaagaatggcccgctctggcaggagttgagggcatctttgctgaagacaattacccgaaaagaaaacgtatttatcagctgggtgatgcgattgctgattgtcgtcagtctcgcctggacggggtgggctattaccctggtcttttatctgctgaccgttattgccttctggatgacccgtaatcagattgcgcaacaggtatcagcatga

SEQ ID NO: 153303 - DNA, 429 bp, Enterobacter cloacae
atgaaccggttgctgctggttgtgctggcgttattactggcggcgctgggctggcagacgtggcggctggctgatgccagccagaccatcagcacgcaggcagacgagctgcatagcaaaagccaggcactggcaaagagcaacagccagcttatcagcctgtccattctgactgaaaccaataaccgggagcaggcgtggctctatgccgaagcagaacagaccagcgcgctgctgagacaacgacaacaccgaatcgaggaactgaaacgtgagaacgaggatttacgccgctgggctgatactcctttgcctgctgacattatccggctgcgggaacgtccggcactcaccggaggtacggcttaccgtcagtggttgtccgcgagtgacgccgtgtcggctggatcaggcaacgccgcgcactaa

SEQ ID NO: 153304 - DNA, 579 bp, Enterobacter cloacae
atgaacgcacaattaaccgaaatcatgcgccttatcaccaacctgattcgcacaggggtagtcaccgaagtggacagggaaaactggctttgccgggtgaaaacgggcgagcttgaaaccaactggattagctggctgacgctgcgtgccgggaatgcccgcacatggtggcgaccatcggaaggtgagcaggtggtgctgctgagtctgggcggcaatctggaaaccgcctttgcgctgcccgctgtctattcgaatcagttcgcaccaccgtcgacgtcggcggacgcctgcgtgacagaacatcctgacggtggctggtttgaatacgaacccgccaccgggcgctggtatgtcaggggcatcaaatcaatggtcattgaagccgctgacaacatcaccatgaaaaccagtgagtttgtactggaggctgaccgcacgcgcattaacagcgaagtggtgatcaatggtggcgttacccagggcggcggagcgatgagttctaacgggatcgtggttgatgcgcatcagcatactggcgtcctgaaaggcggcgatacaaccggaggcccggtatga

SEQ ID NO: 153305 - DNA, 1587 bp, Enterobacter cloacae
atgagcacaaaattttataccctgctgacggatattggcgcggcgaaacttgccagcgccgccgcgctcggtgtgccgttaaaaattacccatatggcggtcggcgatggcggcggagtattgccaacgccggatgcaaagcagactgcactggtgaatgagaaacgccgggctgcgctgaatatgctctatatcgacccgcagaacagtagccagattattgctgaacaggtgatccctgaaaatgagggcggttggtggatacgtgaagtgggcctgtttgatgaatccggggcattgattgccgtgggcaactgcccggaaaactataagccgcaactggctgaaggcagcgggcgcacccagaccgtgcgcatggtgctgattaccagcagcacggacaatatcaccctgaaaatcgaccctgccgtcgtgctggcaacccgcaagtatgtggatgacaaggtactggagctgaaggtgttcgtggatgataagatggcaaaacatcttgccgcaccggacccgcattcacagtatgcacccaaagaaagcccgacattgaccggaacacccaaagcgccaacgccagcggaggggaataacaccacgcagattgcgaccaccgcgtttgttcaggcggcactgatggcccttattaatggtgcgccagccacactggatacgctgaaagaaattgccgctgccattaataatgacccgaaattcagtaccaccattaacaatgcgctggcactgaaagcgccgctgtcgagtccggcactcaccggaacgccaacagctcccacggcggcgcagtcggtcaacaatacacagattgccactaccgcttttgtgaaatcggcaattgcagcaatggtgggttctgcacctgcggcactggatacgctgaacgaactggcagcggcgctggggaatgatccgaactttgccacgacaatgcttaatgcgctgtcaggtaaacaaccgctggacaatacgcttaccaatttgagtggaaaggatgtcgctggtcttctcacataccttggtttgggagaaggctctgcattaccggttggggtgcctgttccgtggccttcagccactccgccaacaggctggctgaaatgcaatggtgcggctttttctgctgaagaatacccggaactggcaaaggcttacccgaccaataaattgcctgatttacgcggtgaatttattcgtggctgggatgatggacgtggagtggatgcggggcgagccttgctaagtcttcaggatgactcttttgaagctcacaggcatgagtcctttttttacgcgggtatttcacgcaatgaaacaccattaaaaaatcttccaagttcagacgagatgctgactttaagttccactactaatgccttgtccccggacagtattgatgccaccaattcgttaattggtaatgatgattacaactgtctgattgaaggaaataaaaataacaaacgaacggcaacggggttgagcaccagtattgtcggtgcagcagagacacgcccacgtaatatttcatttaattacattgtgagggctgcatga

SEQ ID NO: 153306 - DNA, 606 bp, Enterobacter cloacae
atgatgtataacgccatcttaaataataaatttattgccacaaaggcaggagagattaccgtttataactatgacagtgagacacgggagtatatttctgcatcaattgaatatcttgctgtgggtgtcggtatccccgcatattcctgtttagatgctcctggcacatataaggtgggttatgctatctgtcgttctgcaaattttaactcatgggaatatgtgccagaccatcgcggtgaaatcgtctatagcaccaaaacgggagagtcaaaagaaatcacagctccgggtgattaccctgaaaataccacaactatcgccccgttaacaccatacgataaatgggatggtgagaaatgggtgaccgatactgaggcacagcatagcgtcgcagtagacacggcagaagcacagcgccagtcactgattgatactgcaatggcctccatcagtctgattcagctgaaattacaggccggacgtaaactgacgcaggcagaaacaacccgccttaacgctgtgctggattacattgacgcggtgacggcaacagataccagcaccgcgccggatgtcatctggcctgaactgccggaggcgtag

SEQ ID NO: 153307 - DNA, 444 bp, Enterobacter cloacae
atgaatcaatatatttattccccttcggaaaatgctttttatgctgttaatttaaaaaacacttatgaagtaaatggaacatggcctgctgatgcattagatattcctgatgacatttctgtaaaatatatggcggaaccgccacaagggaaaatccgagttgcaggggaaaatggttttcccacatgggttgaaatacctccaccatcacatgaggaacttattgaacaggccgaatcagagaggcaattattgattaaccaggccaacgaatacatgaacagtaaacaatggcccggtaaagccgctattggtcgtctgaaaggcgaggaactggcacaatataattcgtggctggattatctggacgcactggaactggtcgatacttccggggcgccagatattgaatggcctacgcctccggcagttcaggccagatga

SEQ ID NO: 153308 - DNA, 567 bp, Enterobacter cloacae
atgcttattggctatgtacgcgtgtcaacaaatgaccagaacaccgatttgcaacgtaatgcactgaactgcgcgggatgtgagcggatttttgaggataaaatcagtggcactaagtccgacagaccggggcttaaaaaactgttcaggacactatcggcaggagacactctggttgtctggaagctggacaggttggggcgcagtatgcggcatcttgttacgctgatagaagagttgcgtcagcgtggcgtgaatttccgaagcctgactgacagtattgataccagcaccccaatgggccgtttcttttttcatgtcatgggggccctggctgaaatggaacgcgaactgatagttgaacgtaccatggcagggttggctgcagctcgtgtcaaaggcagagtaggtggacgccgtcctaagttgaccaccgaacagtgggcacagattgggcgtttactcgaggccggagaatcaagacagcgtattgcactgatttttgatgtaggcgtttctaccatttatagaaaatttccggcaaataagagcaatgaatccccctga

SEQ ID NO: 153309 - DNA, 3078 bp, Enterobacter cloacae
atgagtgataacaacctgcgtctgcaggtcattcttaatgcggttgacaagctcacccgcccatttcgatctgcgcaggccagttcaagagaactggctgctgctgtcaaaaaatcccgcgatgcaataaagcagcttgatcaggccgggagcagtctggacagcttccgaaagctgcaggcagaaaatcagaaattaggcgacaggctgaactatgcccgccagcgtgcaaatttgctcagtcaggaactgggagcgatggggccgccttcgcaacgtcaggttgttgctctgggccgtcaacggctggctgttcagcgcctggaagaacgccagaaaaagctgcagcagcagacggcgcttgtgcgtgctgaactgtaccgggcgggaatttctgcgaaagacgatgcgggagcaactgcccgtttagcccgtgaaacatcacgttataaccaggaactttcgaaacaggaggcgcggctgaagcgactgggggaagctcagcgcaggatgaatgcagcgcgtgccagttatgcccgttcgctggaggtgcgtgatcgtattgcaggtgccggagccaccaccacggctgcagggctggcaatgggtgcgccagtgatggcggcagtaaaaagctataccagcatggaagatgccatgaaaggtgtggcaaagcaggtcaatggtctgcgtgacgataatggcaaccgcactgcacgtttttatgaaatgcaggatgccatcaaggctgccagcgaacagttgccgatggaaaacggtgcggtggacttcgctgcactggttgaaggtggtgcgcgcatgaacgtcgcaaaccctgacgacagctgggaagatcagaaacgtgacctgctggccttcgccagtacggcagcaaaggcggcaacagcctttgagctgccagcggatgaactgtcagaaagtctggggaaaatcgcccagctctacaaaatccccacccgcaatattgaacagctcggtgatgcgctgaactatctggatgataacgccatgtcgaaaggggcagacatcattgatgtgatgcaacgtctgggcggtgtggctgaccgtctggattatcgtaaagcggcggcgctgggttccaccttcctgacactgggcgctgcgccagaggttgcagccagtgcagcaaacgcgatggtgcgtgaattgtccattgccaccatgcaaagcaagagtttctttgaagggatgaatctgctgaaactcaatcctgaagtgattgaaaagcagatgacgaaggatgcgatgggaaccatccagcgcgtgctggagaaggtaaacgcgctgccgcaggacaagcgcctgtctgccatgactatgttgtttggtaaagagtttggcgatgacgcggcgaaactggcaaacaacctgccggaactgcagcgtcagttaaaactgacagcgggcaatgatgcgctcggctccatgcagaaagaatccgacattaacaaggattcactttctgcgcagtggttgctggtcaaaaccggagcgcagaacaccttcagcagcctgggcgaaacgctgcgccagccgctgatggatattctgtacacggtgaaaagcgtcacgggggcgttgcgtcgctgggtggaagctaacccggaactgacaggcacactgatgaaagcatcggctgttgtggctgcggttaccgtcggcctcggcaccttagcggtggcgctggctgcagtgctggggccgctggcagtgatccgtctgggattctctgtgttgggtatcaaaacgttatcttccgttacggcagcagtaactcgaaccagcagcgcgttgtcctggctggctggcgcaccactggcactgctgcgacgcgggcttgcttcatcgggcaacgccgcaggtttacttactgcgccgctgtcgtctttgcgccgcacggcatcactgacgggaaatgtcctgaaaactgtagcaggtgcgccggttgcacttttgcggtctggattatccggtttacgtgctgttgctgtgatgtttatgaatcctctggcggtactgcgcggtggactggccgccgcaggcacggtgctgcgagtactggcatctggtccactggcgatgctgcgcgttgccctgtatgccatatctggtctgttaggtgctctgctcagtccgataggtcttgtggttactgcactggcgggcgtggcgctggttgtctggaaatactggcaacccatcaccgcatttctcggtggcgtggtggaaggattcaaagcggcggcaggtcccatcagtgcagcgttcgaaccgcttaagcccgtgttccagtggattggcgacaaagtgcaggcgctgtggggctggtttactgatctgctgacgcccgttaagtcgacctctgccgaactgcagagcgcagcggcaatggggcgacgattcggggaggcactggcagaagggctgaatatggtcatgcatccgctggactccctgaaatccggcgtttcctggttgctggagaaactcggcattgtcagtaaagaggctgcaaaggcgaaactgccggaaagcgtgacgcgtcagcaacctgcgacggtgaatgcagacggtaaagtgatgatgccatcgggtgattttccgtcatggggatatggctttgcggggatgtatgacagcggcggctatatcccgcgcgggcagtttggcatcgtcggtgaaaacgggccggaaattgttaacggcccggcaaacgtgaccagccggagaaatacagctgcactggctgccgttgtcgccggaatgatgggtgttgctgccgcgccagcagagcttccaccgttgcatcctttggcgcttcccgcaaaaggcggtgaagcgatggtgagtcgtgcagctactgtgccgcccatttaccggattgaagcaccgacgcagatcatcatccagacacagccaggacaaagtgcgcaggatattgcgcgggaggtggcccgccagcttgatgaacgtgaacgcaggctgaaggcaaaagccaggagtaactacagcgatcaggggggatacgacgcatga

SEQ ID NO: 153310 - DNA, 486 bp, Enterobacter cloacae
atgatgatggtgctgggattgtacgtgtttatgctgcgcaccgtgccgtatcaggagctgcagtatcaacgcagctggcgacatgcggcaaacagccgggtaaaccgacgtccgtccacgcagtttctgggaccggacaacgacatgctgacgctttccggtgttcttatgccggagataacaggtggcaggctgtcgttgctggcactggagcagatggcagaacaggggaaagcatggcccctgattgaaggcagtggcacgatttatggcatgtatgtgattgagggactgaatcagactaaaacggagtttttccgcgacggtatgccgcgccggattgagttcaccctgtcgctcaaacgggtggatgaatccctgtccgatatattcggtgatctcagtgcgcaactgaataatctgcaggacacagcaacgtctgccttaagcgatatcagtaaaacggtgggagggctgctgtcatga

SEQ ID NO: 153311 - DNA, 1101 bp, Enterobacter cloacae
atgaatttcagctctgaactgcttaacaaaggcaacaaaactcccgcattcagcatcagtattgagggcagggatatcaccactgtgctggataaccgcctgatgagtttgacgctgacggacaatcggggctttgaagcggaccagcttgatctggagctggacgacgccgacggaaaaatcgtgctgccgcgccgtggtgcggttattacgctggcgctgggctggaaggggcagccgcttttcccgaaaggggcattcacggtggacgagattgaacacactggcgcaccggaccgcctgactatccgggcgcgaagtgctgattttcgtgaaacgctgaatacccgccgtgaaaagtcgtggcacaagaccaccgtcggggaagtggtgaaggaaatagctgtgcggcacaaactgaagatggcattgggtaaagacctgtcagataaacccgtggaacatatagaccagaccaatgagagtgacggcagttttctgatgcggctggcgcgccagtacggtgctattgcgtcggtgaaaaatggcaatctgttattcatccggcagggacagggtaaaagcgccagcggtaaaccactaccggttatcactatcacacgtaaggacggcgacagtcaccgctttaccctggcagatcgcggagcctacacgggcgtaattgccagctggttgcatacccgcgaacccgtgaagaatgaaagcaccacggtgaagcgtaagcgcaggactaagaagcagaagaaagagccggaagcgaagcagggcgattacctggtgggtacagatgaaaacgtgctggtacttaatcgcacctatgccaaccggagcaacgccgaacgggcggcgaaaatgcagtgggaacgcctgcaacgcggcgttgcgtcattctcgctacaactggcagaaggtcgggcagatctctacacggaaatgccagtgaaagtcagtggctttaaacagccgatagatgatgcggaatggaccattacgactctgacgcataccgtcagccccgataacggttttacaaccagtctggagcttgaagtgaggattgatgatttcgaaatggaatga

SEQ ID NO: 153312 - DNA, 219 bp, Enterobacter cloacae; identical to SEQ ID NO: 10578

SEQ ID NO: 153313 - DNA, 723 bp, Enterobacter cloacae
atgacgccaaccattgacctgcttcgttcccaccgttccattcgccatttcaccgatgagccgattacccaggcgcagcgggaagcaatcatcgacagcgcaagaggcacctccagttccagctttttgcagtgcagctccattatccgcatcaccgatccggcgatgcgtgagcagctggtaacgctgacgggcggacaaaagcacgttgcccaggcggctgagttctgggtgttctgcgccgattttaaccgtcatctgcaaatctgccccgaggccgagctggggctggcggaacagctgctgctgggcgtggtggatacggcgctgatggcgcaaaacgcgttcacggcggcggaatcgctggggcttggcggcgtctatattggcgggctgcgtaacaacatcgaaagcgtgacggaactgctgaagctgccgaaacacgtgctgccgctgtttggtctgtgcctcggctggccggcggataacccggatctgaagccgcgcattcctgctgcgatgctggtgcatgaaaaccactaccagccggtcgaccaggacgttctgcatcaatacgatgaagagctggcgaactactatctgacgcgcgacagcaacaaccgccgcgacacctggagcgaccatattcgtcgcaccatcatcaaggagaaccgcccgttcattcttgattacctgcacaaacagggctgggcaacgcggtag

SEQ ID NO: 153314 - DNA, 1395 bp, Enterobacter cloacae; identical to SEQ ID NO: 151775

SEQ ID NO: 153315 - DNA, 972 bp, Enterobacter cloacae
atggatacacagaaaatagaaagcattctcaaaaaaaataggcacatcaacgcaagatttgctagtcatttcatatcagcttttaatgtatggaacactcttttagctcccgttctcataggtttgggagtttcatacttatttcaatacaaagatgatgtcactaaaattgacaacttattctttttattatgcttgatgttaattgctattcatttagtttttgctttagcatttaactatttagataaacgcagtgacacaagcacagaattggctgaggtttcaaatagttataataacttaatctgcgacattgatacaataaaagaaaggatgcgaatatctaatgaacttaacgccacgcaaaaacttgtcatttatttatcaacattgaaacttaatagtcatattcgtgacctcatggagaaaaagaaagatgatagcttcaccagtgaacaactagatgatttttttgacgatttcatagagacaattctttcatatctgctaaagcatcgagaaactctttttggttatgaaagtaaatctcgttataatattgctttttatatttacgacgttgaacaggatcaattggttgtttcatctagacattgcgatgatagaatagatagaaaagatcgtgcttggaaatcaggatttggtcatgtcggattgacttatcttcataaagaattaaaaatatgccctaacattaacaatagtaccgaactaaaaataactaattcatcagataaaatcaattattgctcctttatctctgtgccaatattgacgtatagcgaagataatactgaaaatgattgcctaggggtattagtactgaccagtgcattacctgaacaattttccttaacgagagataaagatttccttcaaaacatatcatcattaatcgccatctatatagatgtcatttttaatatttacaaagaaatgaataaataa

SEQ ID NO: 153316 - DNA, 243 bp, Enterobacter cloacae
atgaaaaaacctatagttgttaccagtaaaggctatgctaagctattgaccccaaaaggtaatagcaacgatggctttgcggtttcaaatgactttgaaaaagtttttttcaaatattcatctcaaggattgagtaatcaggttgaagaaatgatgaatgattggatttctgaaaaggttcggtcggaggaagaggccatttttaaagatatcaaacatcattcccgtattaaaactgcctga

SEQ ID NO: 153317 - DNA, 345 bp, Enterobacter cloacae
atgaaacttaaattattagcattgattttattttttataccatcctttttatttgcaaaacaacagagctttgtaggttgctttagctcagggaacatcaatgtgaaatatgttgaaatatcacatgaaaatgctctattaggttatgtggtttatgggaattcatcagtgtttatacctcttgcatatataaaaaaatcagaaatggcttttggtgatagaccatcagaatttactgtgacatggagtgaggttgttgacggtaaagtcaatggtttctacgtaattgctactcaaggtgcaaggtttaataccttttattataaatccctgtctggaaagtaa

SEQ ID NO: 153318 - DNA, 552 bp, Enterobacter cloacae
atgaagtcttatatgagtgtgaggatgaaaacttcacttgtgtttttttcttttgtttgtcgtatatgttcgtttaatgtatatgcaaatgattcttgggtgttttataaagtatccagaactgatttattttccaggcatgattcgaaaacaatacagaatctcaatgagttatatggtaaagctaaaattaattcgaatgataatatactaacgattaataacgatttactggagagttcaacggtctgctcagttgagtataggaagaagaaagaaacccctctttcttatttttactcaaagaaaacattgacaatgtatgaaaatgttttcaaaaatgacaatctttccttagcgaaagatatttacatattacaaccctatgatcctgataaaacctgtccacctccttatgatgaaataatagagagtgatgactatttgttgttggttgttcaggattatttggtgttttttaaaagcatagcgaacaacgctgggaaattagaaaaaccatctgataaatctagtttttctacatttttgtga

SEQ ID NO: 153319 - DNA, 408 bp, Enterobacter cloacae
atgcagaaattcagcgacccgatgacggcgcgcgcactgctccagtcgcaacagaactccgacgaggcgctcagcatcaagcgcgatgctgacccgacatttgatttttgcggctatctggaagcgctgccgcagacaaacgggatgtttatggggaacgccaatattatcccgcgacagccacgtaactatctctatcacgcctatctggtctatatggaggcgaacggttacaagcatgtgctgagcctgaaaatgttcgggctggggctgccgatgatgctgaaagagtacgggctgaattatgacaagcggcacaccaagcaggggacacagaccaacctgacgctaagggaagacagcaacggcgactggctgccgaagtgcgacgaaaccgtagtgacataa

SEQ ID NO: 153320 - DNA, 1956 bp, Enterobacter cloacae
atgaaaaatgaagatttttataaagttatagatagccagctaatggatgtcattaatagtgaggtgtattcgaactatttttctacattcaatcaagacaatcaaaaaaaatcctttgcttttcttatctggtttttaagaaactacgcagacattagtaatgttgaggattacattactgatggttgtgatgattcgtcttgcgatataatccttgaacgagttgattctcaaggtgtagttacttattatgttgtccagtcaaaatggaatgcaataaataattgcgagtctgaatttgaaagcaaagaattaaaatcttttttgagcgacgtgcaaagtgtattaaagggagataaagcaaaaggtaccaatgaaaagttcaataatcaatatgataaattaagagaacacattaaaaaaaatggtcgtgttaaagttatatatttatctcttaaaaacaactgtgataattgccaagggaatatcgattcatttaaaaaaactatggatggggatattgatatagaagggtttgatattaatcgtttgaaaatagattatataagtagagaattcaagaaaagttacccgccaaatccgcttgaaaatatttacgatcccagtttagataagattagaattgaaatttgtcgagattcaggcaatagctgtgtggagataaactcaccttttgatgcttatgtttttttgattaaaccaaaattgttatttgagttggtaacaaagtatggtgtttctctttttaacaagaatgtaaggaacccattacttacatctgcgataaattctgaaattaagaatacaattcataaaaacccagcatatttttggtattacaataatgggattactgcgataactagaaaaataccaaagttaagcaacgaagcaatagagtttgaagtgacaggacttcaagtcattaatggcgcgcaaactgcgtactcaatttataccgcgtataaggactgcagtccggcggaacgtgcaattttagatgaagaggcaagaattacttttaggttactaaaatcaggcggtgatgatttcgatttgaaagttacaaaatatacaaactctcaaaaccctgtttctgatcgtgatttttggtccaatgatatgcttcaaaaaagaattcaggattattttttcaatactaattattggtatgaaagaagagagggtgaattcagggagttgcctgctggtattgctgtaatatcaaataaatattttgccaacgctcacttaagtttcaatcttggaggggctgttgatgttgttaaatctgctatgcaagatagggttgatgatttagatctcgtatttacttctcggttagataataaggatggtttatatgagaaaatatttaatgagggaaccatgcctgaggatgtacatgcatcatttattatgttggatcaagttacggaattaccatcttttaaaaaatctttttctcagttaatgtatacaaattgctttcatgttttaagtatatctagagttgtaatggataagtacttaagaatgaagtatggatcaaatgctaaaacaacaccatttatactaaaagtttcaaagaatgttgacattggtggtgagatcgaaattatacgtaaaatcattgctttctcagttgaattgcttgggagtaatgtcaataaacgtgatgatgatgaagtaaatgattatatattcaatcttatgacaaagtcagcttattttgaaatcatactcgatgaagttagaacgttggattttacagtcgaggatattgaaggccaagggttggaattgtatttagaagatgaagatgaagatgaagatgaagatgaagatgaagatgaagatgaagacgaagacgaagatgaaaaagaaaatgatttagagaaaaaggttactgttaataaaacttccattcattaa

SEQ ID NO: 153321 - DNA, 429 bp, Enterobacter cloacae; identical to SEQ ID NO: 22853

SEQ ID NO: 153322 - DNA, 195 bp, Enterobacter cloacae; identical to SEQ ID NO: 36234

SEQ ID NO: 153323 - DNA, 321 bp, Enterobacter cloacae
atgaaaaagccattaccgcccgtattacacgccgcgctatatcggcgcgccgtggcctgtgcatggctgaccctgtgcgaacgccagcaccgctatccgcacctcacccttgacgcgctggaaagcgccattgccgccgagctggagggcttctacctgcgccagcacggcgaggaaaaaggccgccagattgcctgtgcactgctggaagatttaatggaagccggaccactcaaagccgcgccgtcgctgtccttcctcgggctggccgtgatggatgaactctgcgcccgtcacatgcaatcgcctgttgtgcactga

SEQ ID NO: 153324 - DNA, 591 bp, Enterobacter cloacae
atgaacgtgcgtcaggcgcagccgctgggcctggggcactcaatcctctgcgcgcgcccggtggtgggtgataacccgttcatcgtggttctgccggacatcattattgataccgcttccgccgatccgctgcgttacaacctggcggcaatggtggcacgtttcaatgaaacgggccgtagccaggtgctggcgaaacgtatgaagggcgatctctccgagtattctgttattcagaccaaagagccactggagacggaagggcaggtgagccggatcgttgagtttatcgaaaaacccgatcagccgcagacgctagactccgacctaatggcagtcggccgttatgtgctgaatgcggatatctgggctgagctggaaaaaactgagccgggcgcctgggatcgtatccagctgaccgatgcgattgctgagctggcgaagaagcagtcggttgatgccatgctgatgaccggcgacagctatgactgcggtaagaaaatggggtatatgcaggcctttgtgaactatggcctgcgtaacctgaaggatggacaaaaatttaaagacagtataatcaaaatgctataa

SEQ ID NO: 153325 - DNA, 417 bp, Enterobacter cloacae
atggtgaatttagaaaatattcttttatttctgattgttgttttatttttacttgtcgtaattatggacttcatcagttcccgttattttaaaaaacacgaggccgaatataatcagcttctttcagaatataggcaaaaaggctacgatctcgatctggtgacaaattacgcatcattttttggttcgctggcgaactatcaaaaaataatctggtttgttcgtcttcgcaaaggcgtgaagatgaaatttaccaaagacagaaatgttcaggacgatgcctataaattcgttcaggctttaccggaagagagaatcggctggatattaaaactgcatcgacgctataaagctcaggccttactttttacgctatggctgcttatcggcattattttcctgaatgtagtcaaatag

SEQ ID NO: 153326 - DNA, 1395 bp, Enterobacter cloacae; identical to SEQ ID NO: 151775

SEQ ID NO: 153327 - DNA, 870 bp, Enterobacter cloacae
  misc_feature (736)..(766): n is a, c, g, or t
atgaaaaaagtatcattattattaactgtatgggtattgccattattttgtagtgcttcggatgtggtgaatactgattattcagtttcttcgatgtatagtgggaccattgggaagagtaatattacaatgaatcttattacttccagagatactgtctctggaagttatatatatgataaatataaaaataggatcttgctaaacggagtagtaaattctaattctattgagttaaaagaaaagacaagtaacggcactgctgctataacacttgttcatacagataagggttatacaggtaagtggtgtgataaaaaatgtgttcctgtaacaattcaaaacaataattcattcaaagacggtgaattgagagatattaattcggatgactctgatatagacacttataaaataaatttagcatttaagaataaaaacgaaagcataattattactgatgctatagatccaccatctttggagtttgtggatattaatagtgatggcttttacgacttggtagtcagaacggatcatcgtccaaataatggtagtcagactgtttatctctcaggtgataatggattgactgaagataagaacttatcaaaagaaaatggcacccttgtatataattcttataaaaaactcattgtttttaattcaaaagacgattgctgcaataaatttaataaaattatttacttttttgataatggtataggagtgaagnnnnnnnnnnnnnnnnnnnnnnnnnnnnnnngtaaagcagtgaaggttgataacatattctttgactactcatctaacgaaggtaaaaattccagaggtgataatgtttcaaaggataaattcgagtcttactaa

SEQ ID NO: 153328 - DNA, 192 bp, Enterobacter cloacae
atgcttggtaaggtattttttgtggttttgtcatgttctttgttattaaacccactagctacctatgctagaaattatccctgctcagggaaaaagggaggtgtttctcactgtacctctgatggcaaattcgtttgcaatgatggaactattagtaaatccaaaaaaatctgtactaaaaactcactataa

SEQ ID NO: 153329 - DNA, 2058 bp, Enterobacter cloacae; identical to SEQ ID NO: 32296

SEQ ID NO: 153330 - DNA, 711 bp, Enterobacter cloacae
ttgcaccgctgggatactaccggtaacccgctcgaaggatctgctgagaaggtcacgcacaaccgcctgacgcagctgaacggcattcgctggcgctatgacatccatggtcgcaccgtggagaaggataacggccagacccgctggcactaccgctacgacggcgagcaccgcctgacggaggtcatcagccagccgcgggaccgcaacaggccgcagacgcaggtcagcttccgctatgacccactcggacgacgcatcagcaaaacgcgtcgccagatggtgggcggacagccaaccggtaacccagtcaccacccggtttgtctgggaagggttccggctgttgcaggaggtgcacggggatgtgccgctgacctacgtctacagcgatcaggacagctacgatccgctggcacgtattgacggcgttgatgccccggaaatcttctggttccactgtcagcccaacggcacgccggagcggatgacggatagcgaagggcaggtgcgctgggaaggggtgaacagcgcctggggcaaactgctgcgggaaagcgagacgcaggtatcaggatattcccagaacctgcgcatgcagggacaatacctggaccgtgagacagggctgcactacaaactgttccggtattacgacccggactgcgggcggtttacgcagcaggacccgatagggctggcggggggataa

SEQ ID NO: 153331 - DNA, 795 bp, Enterobacter cloacae
atgctcatgcacccgcagagccttgtcactggcgctcatggccgtaaattccgcctcgctcatggtatcaaacgggctttgcgccggtggccggacggcgtcataaatggcgttccgcgtggcctccccgccattctgcataaacgcatcattccagtcgccgaacaccggcggcagggcgacaatgccctcacaggtttctgcggccgcggcggcttttgtctggccgtcgccgttaaggtcacggtcggcagcgaggacaatctggcaggccgggtgtttctgacgggcaaggctcgccagagaaaggaggttcacggaggacagcgccaccatgacggtttcaccggtcaggtgatgcacggtgagcgcggttgcatagccctccgctatccacaggcgttttcctgcctgttttttcccttcgatgacatgacatgcccctttaacctgaccgcccttcagggtgcgtttgagaccgtcagaactgataagctgaaggtttaccagcgcgccggtatcgtcatacagcgggacaaccacatcaccggcgcggaacgtcacgccgccggttttatgcatcgacgtcagtaccggacattcccggtcggggaagcccttgcgggtcaggtaggcgttgccgctggcaggtcgggtgttctccatgagcctgacggccagtgcggccgccgctttacggtcagcttcggtttcagcctctgctgtcgcaatcacttcgggggcaaccggtggcaggttgccggtcacggcatccacctttccggcggcctctga

SEQ ID NO: 153332 - DNA, 267 bp, Enterobacter cloacae
atgtacactgctttttcttccccgtcttctgcccctgccgcaccactgatgacggtttctgatgccgttcaggagcgctttatccgcctgcccgaagtgatgcatctgtgtggcctgtcccggtcgaccatttatgacctcatcagccgggaagccttcccgaaacaaatctccctcggtggaaaaaatgtggcgtgggcgcagtctgaaatcaccgcatggatggcagatcgcattgacgaacgcaaccggggctatgacgcatga

SEQ ID NO: 153333 - DNA, 195 bp, Enterobacter cloacae; identical to SEQ ID NO: 143199

SEQ ID NO: 153334 - DNA, 762 bp, Enterobacter cloacae
gtggtgattgccactaagttcggtttcggcgtggaggaggggaagccaacctcccttaacagtcatcctgaccatatccgccgcgccgtagagggctcgctgaagcgtctgaaaacggaccatatcgatcttctttatcagcatcgccccgatccgaatgtgccgattgaggatgtggcggaaagcgtgaaggcattgatccaggagggtaaagtgaaacactggggattgtcggaagcgagtgccaggacaatccgccgcgcacatgcggtactccctgtgactgcagtacagagtgagtatgccatgtggtggcgtgaaccggagacgcggatatttccaacgctcgaagagctgggtatcggctttgtaccttactgcccgaccgcccggagtttccttgccggggcagtcaatccaagccagcggttcgacagcacagatcggcggcataacctgccacgcttccagcccgatgccctggccaaaaacatggtactgcttgaattcgcgcagtcgtgggcccgccgcaaaaacaccactccggttcagttcgcgctggcctgggtgatggctcagcggccatggatagtccccatcccgggtacgacgcaatatccgcacctgatagaaaatagcggtgcaccgcaagtccggttgacggacagcgagttacgcgaaatcgatgcagcgcttgccaggatcccattgcagggcggtcgcgcagatccgtttaccgaaagtcagtttgataaaagttaa

SEQ ID NO: 153335 - DNA, 1950 bp, Enterobacter cloacae
atgcaaaagaatcttccagaagaatcactacttgagaaactaacaaaagaagaacttcttaagctagttaaagagatgcatgaagataaaaaaatgcacgctattttctctacggacgcagatttgtatgctaatgatgcaactctaatgtggcagggtcggaacagattcttggctgaaacagtaacaccagtcacgataaaaagcgatgcgaaaaagagtttccctgaaaaggtcgggggaaatcatcgcatcattgatggtgataatttagctgtgatgcgctcattaattaatgaattccgtggcggtccgaacactggattcgatgtggtatacatggacccaccatataacacaggaagtgatgcatttatttataatgataattataggttttcaaaggcagaagtagataaattaaaagatgctattggaagagttgaaaagggtgtttcacttgatgacccatcccgacatactaagtggataaatcatattgctcctcgtctttgggcagcaagaaaattactaaagcatactggtgtgttaataatttctatcgatgaacatgaattaccaagactgtggatgcttctagaagaaatgtatggtgaaaaaaaccgtattgccacacttatttgggaaagatcgaggaaaaatgacgcaaattatatttctgaaggtcatgagtatctattagtttgggcccgtgacaaatctgctctcgattcaaaaatgaaagaacttgctaagaataagaaatgggagagatacaaaggtaaatggagaaagcctaaagaaggtgcagaagatatactaacagcatactctgatgctaaaaaaatatttttggatgatattcctaaaatccaaaaatatatgaatgattttttcaaaaatctgccagaagaccatcctgcaaagaaaattcgttatcggaaagtagacaaaaatggcgtctataatgacgacggtaatctaaactggccaggcggtggtggtcctcgatatgatgtattacacccaattacacataaaccatgtaaagtcccagcatctggctggaggattgctaatcctgaggtaatgcaagctttaattgatgccgataagattgctttcaaaagcgatcataatggtattccgagaatgaaaacctatttacatgaaatggaatcagaagtcgcaacttcggtgattagaagaatgggtcaaagagcggtagaaaccgtaacaaatattcttggaaaaaactcattcgataatcccaaagatcatgaaatgttggcagaactcttcaaccttgttacttggagagatcccaatgcaattattttcgatccttatgctggaagtggaactactggtcatgctgttttgactatgaactctgaggataatggccagagaaaatttattttagtagaaaatggtgatccttctaataaaaaaatcaaccgcgatcactatgtgaataatataacggctgaacgaattagaagagtcctttccggtaattgggctgacaaatcccagcatccaaaaatcaatgaaggattcaatttctatgaagctaaaaagactgtcagcaaaacagtcatcatggaatctaatagagaaaatttggctgatattattttacaggttgttgaagatgattctaaccgtttagattgtcgcatggatggctataaatatctaattggaaagacaaaacttggctttggaattgcgttggtgtgggaagcaggcaaagccaatggacatcagcccttaacaagagaaatccgttcagtaattatggatgaggctaagaaagcgaatgtgaacagacctgtttatatttatgctgtagccaatgtatctccgttgaatgatcagctttaccgcttccagcagattcctgattcaattctggcgagattaaatttactggaagaagagtaa

SEQ ID NO: 153336 - DNA, 270 bp, Enterobacter cloacae
atgacgagtagaacaaagacgattcttcggtggggaggcattgctttagtattcgccatctactctatcgccttgatgataccagtgcttgattttgggctaacccggaaatacaacggccccccttcaacaggtcagatggaagcccgtttatgtgaagcgatcatagatgacttatcgcggtcaatggataatctcttaatcactgcttttgtcgggagcgccatttgccttgttttggccttgcttatcttcaagaaagtgaaatga

SEQ ID NO: 153337 - DNA, 462 bp, Enterobacter cloacae
atgaagcagtacaccaacaaacttacaccagaaatgctggcagcttttgacgaatcaccatttacagccgaacaactcgccggaatgaacgacgaagccagttcactcatcgaaaaacaaaacgcctacaatctcgctcatcccgttacagctgcttatctgatcgctacagagggcagcttgacacgtaatggtgggaaagtttttagcgaatataacggacggcagatcaaacttgatgacggcacaatgctaaacgtgtctcgagttggcgatgaagtgcgttacccagatggaacatccgcgaagatcaccactggtgcgggaaacacaccaggcgaatctattgccctggttggtagctcgctggataacggcgatgaaattattagctgcccacaaaatgccggaagaagagtagtccgagccggggaatcgttgccagaaaactttctgaaataa

SEQ ID NO: 153338 - DNA, 1758 bp, Enterobacter cloacae
atgaccgttgagaagctgatcaccgaccatatcgatatctggtcttctgcactgcaaacccgctccactgccgggcgcggcagtaacggcaaaattgacctctatggcattaaaaaactgcgcgagctgattctggaactggcagtacgcggcaaactggtgcctcaggatccgaatgatgagccggcgtcagagctgttaaagcagattgcgaaggaaagagaagaattagttaagagtaaagcgattaggaaacctaaagcacttgaaaaaattgcaataaccaatactccctttgatttacctgatggatgggaatggtgttatttgaatgatataggtgattggggggctggagctacgccaagtcgctctaattcgaaatattataatggtgatattccgtggttcaaatcaggtgagctttcttcagatttcatttcggagtcagaggaaagtattacagagcttgccttgcaggagtgttcactccgagataataaagtcggtgatgtattaattgcaatgtatggtgcaacaatcggtaagacatcgatattaaatgttcgaggtacaacaaatcaggcggtatgtgcttgcactccatatagtgggatttcgaatatctatttaataacacttttaaaagcttacaagcgtgtctttataggaatgggggccggtggggctcagccaaatatctcacgagaaaaactcattgctacggtttttgctctcccaccacaaaatgagcaaaaacgaattatccacaaggttgatgaactcatgtcactttgtgaccaactggaacagcaatctcttaaccgtctggacgctcatcagcaactggtagaaaccctgctggcaacgctgaccgatagtcagaatgccgaagttcttgctgaaaactgggcacgaataagcctgcatttcgacacactgtttaccaccgaagtgagtatcgatgcgcttaagcagactattctgcaactggctgtaatgggtaaactggtgccgcaagatcctaacgacgaaccggcttctgagctgcttaaacgtattgaacaggaaaaagcgcaactggtgaaagaagggaaaatcaaaaaacaaaaaccgttaccaccagtgagtgatgaggaaaaatcatttgaattgcctgatggttgggaatggaccacgatgcaaggactatatccagagttccaaaatggattatctagccgaggcagttcgtcaggtaaagatagtgttgttatccgtcttgcagatataaaaaactggaaggtatcctttgctgacaccagagcaatcgctataactgattcggaaaagcagaaatattgtcttgataagaatgatatattaatagttcgtgttaatggtagtgctgatattgttggtgggtttgttctatacgatgatgaccaaaacgtgtgctattgtgatcactttattcgattacggcttccgtataagagagttattgatgagaactacttaatactggttgcttcttctccgttgatacgaagaaaaattaataatttatttattacaaccgcaggtcagaaaaccgtcaatcaaacacatataagttctcttttgttccctttaccaccatataaggaacagaaatgtatcgttgctagggttaacgagttatttagtttatgcgaacaactcaaattacgattgcaatccgcccaccaaacccagctcaacctggcggatgccctcaccgacgcagcattaaactaa

SEQ ID NO: 153339 - DNA, 423 bp, Enterobacter cloacae
ttgctcaacaaatggggcgtccacccgcgccagatcgcccttgaattaaccgagcgcgggtttgccgatcctgccgtcagcgtacctgctatcgctgcatttcgccgcgccgggcacgctatctacattgatgattttggcacgggttactccagcctgagctatttgcaggatctggatgtcgatactctgaagattgataaatcctttgtggatgcgctggagtacaagcacgtgactccccacatcatcgaaatggccaaatcgcttaaactggcgatggtcgcagaaggcattgaaactgaagggcagatcgaatggttgcatcgccacggcgtgcagtacggccagggctggtatttcagcaaggcgctgcctaaagaggatttcattctctgggccgcgcacaacctcaggaaataa

SEQ ID NO: 153340 - DNA, 474 bp, Enterobacter cloacae
atgacgttgaagacgacatcgacggtcttgacgacgacggcgtgggtgaagttcgtgttcatcgggtcaatactgcgcccggcgcagcgcatggagagcatgaagccccccgcgctccgcagcaccaatatcaaccaccgtatgcctctgcccagccgcgccagccagcgccgccgccagtggaagaacctgttcgtcatccgccgcaccagcctgtgcaacagcagcccgttgcgccacagcctgtacagccgcaacctgtccaacagcctgcacagccagtgcatcagccacagcctgttcagcagccgcagccagtgcatcagccacagcctgttcagcagccgcagccggtacaacaaccgcagccgcagcctgaaccgcctgcgccacagcccgccccgcgcgctgagccagagccggttgcagagccagaaccggttgttgaaaagccgcagcgtaaagaagcggtga

SEQ ID NO: 153341 - DNA, 207 bp, Enterobacter cloacae
atgagcggtaaaaaatctgcacatatcaatgtaaatgcgtactccaaagacggatatgcgggaacagtcagagttagtaaagataccacgtatctcaatttgacgactggctggaaaataccaatcattgaagtcagtaaatctcctcaaaggttcgcggtttttatcgaatcgcgtcacaaaaatcagcacccatctctgtggtga

SEQ ID NO: 153342 - DNA, 690 bp, Enterobacter cloacae
atgtctagagaaggttcgttagatctgttacttgaagtagaagaaaatcttgaaacaatgaaaaaaacgcagcaaatcaggccagtgaaagtcaaatctatgctcgaacacttgagaagttcgttagaatatgtggccaatgatgcttatgataaatacgtatcaccagttccatcaaaaagaccaaaaattttcttcccatatggcgagcaaaaatttatcgataacttttttacacaaaaattaaagataaacccaccatcttcctctccgctttatgaagttttcaattcaattcaagatttccgcactggcgaagataccctcacaatgatgtgcaatctgacaaatgaggttaaacacaggaaacctatccctcttgaagaggaaagttcggtcaaagacataaatgttagaattgatggctttggtatttttaatgtagccaaccctaatagggttgtctttaaaaacaattctatcaacggtcagaaattagaggattttactttcgaaaatggaaaactagaaagaacaggcaatggtatcccagtaaatatcgttatcacagaagataaaaaaattagatttcatggtgaagactatgaagtagtaccgtttatagaatcgtgtcttataagattaagaatttttattaacgaagcctacgatgtattagagaactgttag

SEQ ID NO: 153343 - DNA, 492 bp, Enterobacter cloacae
atgttatttgaccaaaacgactggaaactcaaagtcaccgacatcgacctttacgcaaatacttgcaagctggacggtcagtcctatccgctgtccctcgctatcaagaccctcattccgggctacctgtcaggcctgccgtctaccagccgtgagtctatggagttactggaagctctggctgaagctggtgtagctattggcaacttcttcagtaatgacctgatgaccgcctaccaacgccgccagatgaataaacgtgtcgaggctgagcgtatcgctaaagagcaacgcattcaggcggaccgtatgcgtgaagagaacatgaccgacgaagagtggcagaaagagctgcaacgccgcgaacaggtcaaagctgaacgccggacctatggtgagaacctccgcagtgctacccgttccgctggacgctcacgtgcctccattatggctgacctcgatagtggcgctaactggatggattccatctaa

SEQ ID NO: 153344 - DNA, 234 bp, Enterobacter cloacae
gtggtgtctgaggttggagctttgagtctgaccagcaggcttgaggagaccatgagtttatcttgttatggattgtgttatcacaattccaataagaagaactttaagtccagcctccagtcctgtcagtccgaagtaaactatggtctctataatatgatctccatacttcgggtctcactggaagtcctgaacactttcgagtcaagttctccgaagttcattactgtttga

SEQ ID NO: 153345 - DNA, 411 bp, Enterobacter cloacae
atgagtatgagtaaggttgtgcttgctgggctgttgcttgcttctgtcagtgttcacgctgaagagacccgttcattcaaatgtggtgattacactgtcatgaccaagtgggctaaggagggcaaattcaggaagatgactgtgttgaaaggtgatgatgttgttgcaatggaagatagcactgagcctgtgatgaacaatgggatagggaatgtaatcactgttcaaaactcagaggtggatttaaagaatgtctcctatctgttcattgagcaaacaaccaaagggaagcctgcccctgatggtatggataaatgggagaatcaatatcagttgtccatcatctatcgggacatggatgttgagatgaaagctggtaaagacttccagtgtacatatgaaggtaaatga

SEQ ID NO: 153346 - DNA, 264 bp, Enterobacter cloacae
atgaaaaatgtgactgatagtgccctttttagcttgttggaatgggctgtggcatcgctaaagaaagtagaaaatctacctgaacaggactgttttgaattggatttgaaggtggatttgataaacatcattcgtgactgtgcgacagctatgaacaaccctacttttgatgaagtggagattatgcaggatgctacggatgtagctgagagactcggagaactggacgagatttttgtagaggggctatgggagaagatgtaa

SEQ ID NO: 153347 - DNA, 447 bp, Enterobacter cloacae
  misc_feature (421)..(430): n is a, c, g, or t
atgaacaacagcaaacatacagtcattgaagtggatactaatctagttgaaattgaaaagggatttaatccccgagaggcggtaatcggagatttgtgttacgaacaagaacctgtcaaatcgatgattgtgtcaatcaaacaagcctttaaggaaggaaggcaggttgatatgatcaaggtcgtaaaaagaaaaggtaaatatttagttcgtcaaggtcatactcgttttcatggcttaaaattagcaatttctgaaggtgctaatattccaaaattatctgttatcttaatcgattataaaaacgaaattgaagaataccttgagaacctcgatggtaacagaagcaatgggctaaatccggttgggcaagctcatgcattagctcatgctgttagtctcgggtattcggttgaagaannnnnnnnnnactaccgcaattcgtaa

SEQ ID NO: 153348 - DNA, 147 bp, Enterobacter cloacae
atgcgacatttctctcctctcaagccggatcgtcatccggcttttttattagtgatgcaattcatagcgatcttcaatgttattaacaaatctgacgcctgcgcaaacgattacctcgattttgaaaccgtaaataatcagccttaa

SEQ ID NO: 153349 - DNA, 552 bp, Enterobacter cloacae
atgacatccactgtcgtaagtaaaatacccagcgcccgtcgcagcgccgctgggattactactaccgcaataacttggtgcgcgaagagcgggacgataacccgttcaaatggtaccgctggcagtacgacagacagtgccgggcgtctcctggttcaggacggcacgctggccggagaggagcagggggtctgggatgcagccgctaacccgctcgaaggttctgttgagaacattacgcacaaccgcctggcgcagctgaatgatattcgctggcgttataatacccatgcttgcactgtagagaaggataacggccaaacccgaggaaccgcaaaaaaccgcagacgcaggtcagcttccgctacgatccgctcggtcgccgcatcagtaaaacgcgacgccagaagctgggcggacagccaaccggcaagccatcaccacccggtgtgtctgggaatgactgcctactgggggaagcgcacggggatgtgctgttcacctacgtcgacgaaagtggtcaggacaactacgatttgctggcgcgtgtag

SEQ ID NO: 153350 - DNA, 492 bp, Enterobacter cloacae; identical to SEQ ID NO: 120740

SEQ ID NO: 153351 - DNA, 651 bp, Enterobacter cloacae
atgcgcctggttttatcatctctgatcgtgatggctggatttctgagtggtcaggctgctgctgcgcctgagcaagctccgcacgctgatatccgtgacagtgggtttgtctattgcgtcagcgggcaagtcaatacgttcaacccacaaaaaacgagcagcggtctcatcgtcgatacgttagcggcccaattgtatgaccgactgcttgatgtagatccctacacctatcggctggtgcctgagcttgctgaaagctgggaggtgctggataacggcgcaacctaccgcttccatctgcgtcgtgacgttcagtttcagaagacggcctggttcacccccacccgcaaactgaatgcagacgatgtggtgtttaccttcgagcgcatctttgatcgccaccatccgtggcacaatgtgaacggcagcagtttcccctacttcgacagcctgcagtttgccgataacgtccaaagcgtgcgcaaactggacaacaacaccgttgaattccgcttaacgcaaccggatgcctcctttatggggtataggaagtataaaccacctttttgctcctcatccgaagtatcttacctgaaattccctcactcgtttaccgctcaagccccaattttaactgccggtccagcctaa

SEQ ID NO: 153352 - DNA, 156 bp, Enterobacter cloacae
atgtgccgcagcggtccggggattccttcaagtatccagatccagcgggtagccggaatgtgcaagccaggcaagtacgacagccagagacgtttcaccagcgtggcgatcaggtgtgacacctcggaagagacgaggagaatgccgataaaataa

SEQ ID NO: 153353 - DNA, 273 bp, Enterobacter cloacae
atgacgttcgattactccatcttcgagagctctctggatcacggtatcaacacgtccacgcgctgcggacgttttcatggcacgatcaaacaggtcgacacgatcaaggtcttcaagttggggaacgtccaccagcaaagcgccgcagcgacgggcaaaataatcagccaggagagacgtattcgagatatcttccatggcctccagctcgttcacttcgaagaaccggcaaccattcttctcatacaggttgttattgaactgagttactga

SEQ ID NO: 153354 - DNA, 444 bp, Enterobacter cloacae
atggtcggcttcaccggcgcatcggtatcgatggtcacggtccagctgctgctggctgactcattacccatcgggtccttcgccgtggcggtgaaggtgtggtccccgcggcccaggtccacgctcggcgtgaagctccaggtgccgtccgcgcccgcggtggtggtgcccagcacgttgctgccgtccatgatggttacggtgctgcccgccttcgccgtgccgctgatttgcggacgggtgtcgtcggtgaccgcgttctgggacaggctgccggtcacgctgccggcgtcgtcggtcacgccggtgatttccaccttgcccgggaccacgtcaacggtgatgaccacgtgcgacccttccggcccggtgttgcccgacggatcggtgacggtggtggtcaggtcgtgtgcgccgttcgccagcggctggtcaggggtgtag

SEQ ID NO: 153355 - DNA, 444 bp, Enterobacter cloacae; identical to SEQ ID NO: 153354

SEQ ID NO: 153356 - DNA, 291 bp, Enterobacter cloacae
atggttatcacacgaccaacaaagacgaatgctgcccggagcgtggcgcattaccgtaaagtcagtggcatgccagtcagtgtgaggccactggcattcaaattttctctccagccaggcatcaaggctactcaggccaccagctcgctgaataaccctctcgttaacgaaaatggcctgcatattggcatcatcagtaataggctggtgggcttcagggattattccggacggcagatgctggatggcttcggatggtggctcaataactacccttccctgacggaatag

SEQ ID NO: 153357 - DNA, 492 bp, Enterobacter cloacae; identical to SEQ ID NO: 15993

SEQ ID NO: 153358 - DNA, 270 bp, Enterobacter cloacae; identical to SEQ ID NO: 153277

SEQ ID NO: 153359 - DNA, 717 bp, Enterobacter cloacae
  misc_feature (664)..(673): n is a, c, g, or t
atgaatttcagggcgctgtatttatgtattaaacggattttggggatattctcatctcaggagaatgatgcaacctctgtaatgattgaggatatatcaagcctctctccttttgcgcagattctaggagatcagaagtacactgttcctgatcatccaaatccagaagtcctgaaattcatcgagtatccaactcgtccgacgggcatacagacatttaatgaacagtcaatcctgtctctgtatcgggaaaagctgcactcaatttcaatgatgttagctatcagcgatagcgacatcagggacgatgcatatacatttactaatttagttttaaagcccttggttgaatatgttcgctggatacatcttttgccagcttccgaaaatcatcatcataatggtattggtgggttactttctcacagcctggaagtggccatactctctttaaaaaatgcgcatcactcagaactgagaccaatcggatatcaagatgaagaagtagtccgtagaaaagtatatctctatgctgcgtttatctgtggtttagtccatgatgccggaaaggtttacgatctcgacattgtaagcctgaatttagctagtccgatcatttggacgccaagctcacaaagtcttcttgactgggcacgtgaaaatnnnnnnnnnntcaacataatatctggtccagcgttttccttgagcgaatcctaa

SEQ ID NO: 153360 - DNA, 744 bp, Enterobacter cloacae
  misc_feature (315)..(324): n is a, c, g, or t
atggatgtttctgtaggacaagaaaactcagaaccagatactgagggtaactgcccaccaccagctgaagttgtgtattcccagaccgaagcagccgcaaccagtgtgatggcaagtgaagagcccgccttacctcctgtacttgaagaatcaaatggagagcatgcgcccacagacgctaaggggcatcatctttcgccagcactggccagactgttcgccccaacagcaccggtagaaaaacaaaatcccaagcgcaaccggaataaatcatcggacaaagcagaagtacaaaaaccagcatcacctgtttcnnnnnnnnnngtttctggtcacaatctgaacagtaaagtctttgcatctactgaatcagaccaaaatggtgaattctcgcttataagcgaaggtgacgttacagagcttgaatttgtagaaattgcgttagtactgcatcaaattctgtccaaaatggaggtggcgtttaaaagaaagcgcaaaaacagatttatggtaagtactcctaatactctctatctgacccaatcttgcgtggaaaaatttgggtcgcagttagaggctcaagatcttttcaataagcttcctcagtacctcgttaattctggtgctgtgatcaatacaaaatgccatgcatttaacatgcctactttgctggccgcatcagaccgggcgaaagtggacattgaacgaattatcaataacctgaaagaggctgggaacctataa

SEQ ID NO: 153361 - DNA, 330 bp, Enterobacter cloacae
atgaccaaaccaattgtcttcagttacaaatatgggttccctacgttccacagcaaaaattgcattgctgccgcccatcttacgagccattgcgtcaaaatgtctcttaattgggttgaagacgaatggcaactcgatctcacgtttatcactggagaggttagctatttgatatgcccgatccgcatgttccggaccccactcaaacccatcacaaaaataggactttcgctcgggtatatccttatttttattttgataatcctgaaccagttgacgatactttcgctcattggagaaaaagttacttttgttaattacacgcagtga

SEQ ID NO: 153362 - DNA, 504 bp, Enterobacter cloacae
atggaagaaaaaggattttctactaatgaagaactcgcagcatatcttgggattagtcatgtatcggtagccaaaagaatccaggcggcccgtattgacgaaacattaatctctttattcccggattatgaaggaatcccgaactcctattatagtcgcttgtctcgtttacagaaatatgtgcaaaaaaatctatttcctttagatgaagtaatagataatgttaaagaggaaacaaaagatttagacattggagatctccaggttgctcaaaaagttgtaatggaaaaaatcacacaatctgtggaaagtgtttgtgaaaaaacttattccacaaaatgggaaacaagtgatcttattacttttgataacaaagataagtatgcaagaatcagtaaaaacaatactggtagaaaaattcgctttgaattcaataggataaatgcgggttttattaaggaactagaggagttcataaaagaaaaattaaaagtatcagaataa

SEQ ID NO: 153363 - DNA, 195 bp, Enterobacter cloacae; identical to SEQ ID NO: 36234

SEQ ID NO: 153364 - DNA, 2967 bp, Enterobacter cloacae
atgccacgtcgttcaatcctgtccgccgccgagcgcgaaagcctgctggcgttgccggacaccaaggatgagttgatccgtcactacacgttcagcgaaaccgacctctccatcatccggcagcggcgcggcccggccaaccggctgggcttcgccgtgcagctctgttacctgcgctttcctggtgtcatcctgggcgtcgatgagccgccgtttccgcccttgttgaaactggtcgccgaccagctcaaggtcagcgtcgaaagctgggacgaatacgggcagcgggagcagacccggcgcgagcacctggtcgaactgcaaacggtgttcggcttccagccctttaccatgggccactaccggcaggccgtccagttgctgaccgagatggccttgcagaccgacaagggcatcgtgctggccagcaccttgatcgagcacctgcggcagcagtcggtcattctgcctgccctcaacgccgtcgagcgggcgagcgccgaagcaatcacccgcgccaaccggcgcatctacgatgccttggccgaaccgctgtcggacgcgcatcgccgccgcctcgacgatctgctcaagcgtcgggacaacggcaaaacgacctggctggcctggctgcgccaatcgcccgtcaaaccgaattcgcggcacatgctggaacacatcgaacgcctcaaagcgtggcaggcgctcgacctgccttctggcatcgagcggtcggtgcaccagaaccgcctgctcaagatcgcccgtgagggtggccagatgacgcccgccgacctggccaagttcgaggcgcagcgacgctatgccaccctggtggcgcttgccatcgagggcatggccaccgtcaccgacgaaatcatcgacctgcacgaccgcatcctgggcaagctgttcaacgccgccaagaacaagcatcagcagcaattccaggcgtccggcaaggcgatcaacgccaaggtgcggctgttcggccgcatcggccaggcgctgatcgaggccaagcaggcgggccgcgatccgttcgccgccatcgaggccgtcatgtcctgggatgccttcgccgagagcgtcaccgaagcgcagaagcttgcgcagcccgaggacttcgatttcctgcaccgcatcggcgaaagctacgccacgctgcgccgctacgcgccggaattccttgccgtgctcaagctgcgggccgctcccgccgcgaaggacgtgctcgacgccatcgaggtgctgcgcggcatgaacagcgacaacgcccgcaaggtgcccgccgacgcgccgaccgagttcatcaagccgcgctggcagaagctggtcatgaccgacaccggcatcgaccggcgctactacgaactgtgcgcgctgtcggagatgaagaacgcgttgcgttccggcgacatctgggtgcaggggtcgcgccagttcaaggacttcgaggactacctggtgccgcccgcgaaattcgccagcctcaagcaggccagcgaattgccgctggccgtggccaccgactgcaaccggtacctgaacgaccggctgacgctgctggaaacacagcttgccaccgtcaaccgtatggcgacggccaacgagctgccggacgccatcatcaccgagtcaggcttgaagatcacgccgctcgacgcggcggtacccgacaccgcccaagcgctgatcgaccagacggcaatgatcctgccgcacgtcaagatcaccgaactgctgctggaggtggacgaatggacgggcttcactcggcatttcgcgcatctgaaatcgggcgacccggccaaagacaagaacctgttgctgaccacgatcctcgccgacgcgatcaacctgggcctgaccaagatggcggagtcttgccccggcacgacctacgccaagctggcttggctgcaagcctggcacatccgcgacgaaacctacggggcggcgctggccgatctggtcaacgcacagttccgccatcccttcgccgagcactggggcgacggcaccacctcatcgtcggacggccagaacttccgcaccggcagcaaggccgagagcaccggccacatcaacccgaaatacgggagcagcccagggcggacgttctacacccacatttctgaccagtacgcgccatttcacaccaaggtcgtgaacgtcggcgtgcgcgattcgacctacgtgctcgacggcctgctgtaccacgagtccgacttgcggatcgaggagcattacaccgacacggcgggcttcaccgatcacgtcttcgccctgatgcacctcctgggcttccgcttcgcgccgcgcatccgcgacctgggcgacaccaagctctacatcccgaagggcgacgccgcctatgacgcgctgaaacccatgatcggcggcacgctcaacatcaagcacgtccgcgcccattgggacgaaatcctgcggctggccacctcgatcaagcagggcacggtgacggcctccctgatgctccgaaagctcggcagctacccacgccagaacggcctggccgtggcgctccgcgagctgggccgcatcgagcgcacgctgttcatcctggactggctgcaaagcgtggaactgcgccgccgcgtgcatgccggcctgaacaagggcgaggcgcgcaatgcgctggccagggcagtgtttttcaaccgcctgggtgaaatccgcgaccgcagtttcgagcagcagcgctaccgggctagcggcctcaatctggtaacggctgccgtcgtgttgtggaacacggtctatctggaacgggctgcgcacgcgctgcgtggcaacggccatgccgttgatgacgcgctgttgcagtacctgtcgccgctcggttgggagcacatcaacctcaccggcgattacctctggcgcagcagcgccaagatcggcgcgggcaagttcaggccgctacgaccgctgcaaccggcttag

SEQ ID NO: 153365 - DNA, 2427 bp, Enterobacter cloacae
gtgcagccgtcttctgaaaacgacagccgccgcctcgacgatctgctcaagcgccgggacaacggcaagacgacctggctggcctggctgcgccagtcacccgtcaagcccaattcgcggcatatgctggagcacatcggacgcctaaaggggtggcaggcgctcgacctgccttccggcatcgagcgatcggtgcaccagaaccgcctgctcaaaatcgcccgtgagggtggccagatgacgcccaccgatctggccaagttcgagccgcagcggcgctacgccaccctggtggcgctcgccatcgagggcatggcgaccgtcaccgacgaaatcatcgacctgcacgaccgcatcctgggcaagctgttcaacgccgccaagaacaagcatcagcagcagttccaggcatccggcaaggcgatcaacgccaaggtgcggctgttcgggcgcatcggccaggcgctgatcgaggccaagcaagcgggccgcgatccgttcgccgccatcgaggccgtcgtgtcttgggatgctttcgccgagagcgtgaccgaggcgcagaagctcgcccaacccgaggacttcgatttcctgcaccgcatcggcgagagctacgccacgctgcgtcggtacgcgccggaattcctctctgtgctcaagctgcgggcagcgcccgccgccaaggacgtgctcgacgccatcgaggtgctgcgcggcatgaacagcgacaacgcccgcaaggtgcccgccaacgcaccaaccaatttcatcaagccacgctggcagaagctggtgatgaccgacaacggcatcgaccggcgctactacgaactgtgcgcgctgtcggagatgaagaatgcgctgcgctccggcgacatctgggtgcaggggtcgcgccaattcaaggatttcgaggactatctggtgccgcccgcaaaattcgccagcctcaagcaggccagcgaattgccgctggccgtggccaccgactgcgaccagtacctgaatgaacggctgacgctgctggaaacgcagcttgcggccgtcaaccgcatggcgctggcgaacgagctgccggacgccatcatcacggagtcgggcctgaagatcacgccgctcgatgcagcggtgcccgataccgcgcaggccttgattaaccagaccgcaatggtcctgccgcacgtcaagatcaccgaattgctgctggaggtggacgaatggacgggcttcacccggcacttcgcgcacctgaaatcgggcgacctggccaaggacaagaacctgctgctgaccacgatcctcgctgacgcgatcaatctgggcctgaccaagatggcggaatcgtgccctggcacgacctacgccaagctggcgtggctacaagcctggcacatccgcgacgagacctattcgacggcgctggccgagctggtcaacgcgcaattccaccatccctttgctgagcactggggcgatggcaccacgtcatcgtcggacggccagaacttccgcaccgggagcaaggccgagagtaccggccacatcaacccgaaatacggcagcagcccagggcggacgttctatacccacatctccgaccagtacgcgccgtttcataccaaggtcgtgaacgtcggcgtgcgcgactcgacctacgtgctcgacggtctgctgtaccacgaatccgatctgcgcatcgaggagcactacaccgacacggcaggcttcaccgatcacgtttttgcgctgatgcacctgcttggcttccgcttcgcgccgcgcatccgtgacctgggcgacaccaaactctacatcccgaagggcgaagccgcctacgacgcgctcaaatcgatggtcagcaacgaccggctgaacatcaaggctatccgcacccattgggaagaaatcctgcggctggccacctcgatcaagcagggcacggtgacggcctcgctgatgctgcgcaagctcggcagctatccccgccagaacggcctggctgtggcgctgcgcgagctgggacgcatcgagcgcacgctgttcatcctggactggctgcaaagcgtcgagctgcgccgccgtgtgcatgccggactgaacaagggcgaggcgcgcaacgcgctggcccgcgcggtgttcttcaaccgcctgggcgaaatccgcgaccgcagtttcgagcagcagcgctaccgggccagcggcttgaacctggtgactgccgccatcgtgctgtggaacactgtctatctggaacgggccgcgaacgccctgcgtggccacggccaggccgtcgatgacgcccagttgcagtacctgtccccgctgggctgggagcatatcaacctgaccggcgattacctctggcgcagcagcgccaagatcggcgcgggcaagttcaggccgctacggccactgcaaccggcttag

SEQ ID NO: 153366 - DNA, 1218 bp, Enterobacter cloacae
atggtactttctgggccactttgggagttgggccgaggcggtagtggccagttttctatatttgcagacggtattgaggatgctagtggaattgccaagatccgtcttgtcattaaacgaagtaatggttctgtggtctccgacaataacctgagttatgacacagccaataaacgtgcgttctatccgtggattaaagatatgaacacccaggctggcatgccctcaagtgatcttgatgaagaattcaccttcaatttcatcgttacggacctggcaggaaatacgcttaacattcctccccagcggtttttatatgacgatcaaatgggagaatttacgccatttgcagttcatgactcacgtgtaagcaccagtgttgtacccggcatttcttcgggatacgtcccgtttaaacgaggccttacagtgctggaaaacccctacaagttggttatacgtatcccaagaactaactggaagccatatcgaaatggtggcatgagcattaccaataactatggcggagtacaggtcctttccgaagatgccacctatgtctacgtggaagttaagctgccacagggtgccttagatggaaactactatagacctgtgaatacatatcaatggtctggaggagatcttggtcagtatgccagctggctcaactgggatcctgcctctgtaaagagtccggcttggggaagttcacccatagaaagacaaaaggctgatggaacatggttcaacagcgtaaactggaacctgttcaaggcatctgatatgcctataaaacttactaatatccggttcaatgtacaggctaggccatatgatcaaaaaatcactggcggagcaacatgcagtattccagctggctcaacaacctgtaccgtctctttgccccaggatattataaatggcactaccggctatcttcatagtggctatgaagtaaggtcaaccaccgaagcaaccttctttgcccctatatgggagaatatagcctggcatacactgggtccctccgtcactggatttgattacattgaaaccaccaacattctccaggtttacgtgaatcaacctggagatggttcatatttcgaccatgtttatgtaaatcgagtttggttgtcagataaaaaccgtaacaacgcagaaataagcgtaaccggcaaatggcgtaaattctcccatttgatcgtcatataa

SEQ ID NO: 153367 - DNA, 540 bp, Enterobacter cloacae; identical to SEQ ID NO: 19206

SEQ ID NO: 153368 - DNA, 267 bp, Enterobacter cloacae; identical to SEQ ID NO: 153332

SEQ ID NO: 153369 - DNA, 717 bp, Enterobacter cloacae
  misc_feature (652)..(679): n is a, c, g, or t
atgatatctgtaattaatggggttgttgtagcattaaattctttattaatatttttttcgcttttgatattattaaaagatttttttgttaatccatcaggggtgttaatgaatatattctcgtttacacttctgtttggcgtgttttactacggtgttccgttccttaatatcgagtttttgtattcatttttcggatattctattgagcaaaacagcataataatcgcaaaattttttgcattctgggcgctttgtatcttttttttggtttatatcctcactcgtcaaaagcatttaaaatatgaatatcatttggttaatattcctaggagaggaatttattatcctgaaattatttgtttgttgataatgagtgtatccatctttgtcacttgttttgttattgaaagtattgggggcgagcttatttataatttcaataacagagttgctgcccaggcaatttatgcagaatatgaggttaagtttaaactgccaattttattttatttaacttttgcatcgtatttcattttatatattcgtagttatacaggcagtttattcaaacgttcattgatcgtagttccattatttgtatgcgtgccagaagtactatcgggtggaagagatttacttttttcttttnnnnnnnnnnnnnnnnnnnnnnnnnnnnttcttttgtgttttatttctgtgcaatatatgcattaa

SEQ ID NO: 153370 - DNA, 543 bp, Enterobacter cloacae
gtgtcacttgataaagtgcttttgagccatttcacttcattatcaattgtaggggtgtataccttttatacaagtattggcaatgcattacaggcgttattggatgcaggtatgattagttataaatataaagatattttgtttgtgagccgacagcgaaaagctgtggagtttatggtttatatcaaaaagctctattttacttcgttaatttgtatggcgtctatttttctcgccagtttgctgtttttcactatttttaattacaatgattattatgaatacgcttttgctttattgattgtgttgatatcatcaagtttacaatctttaggagctctttttaaacagtatgcaattatgaattttaggagttcaattctcaaagcagggttattatcatttgcagtatttttgattgcgtgtggcacttataaagtattacaccttggccctatttatacaatcgcaattagcgttttgtttgctagttttagttatattttatatttgtggaaatggttgaaaaaagctaatgagtaa

SEQ ID NO: 153371 - DNA, 492 bp, Enterobacter cloacae; identical to SEQ ID NO: 15993

SEQ ID NO: 153372 - DNA, 141 bp, Enterobacter cloacae; identical to SEQ ID NO: 36145

SEQ ID NO: 153373 - DNA, 315 bp, Enterobacter cloacae
atgagcaataaaatttcagccatcccggttcaacgcgaccagtacggttattggactcatccgctttacgatgaattttgcgatgggcgtgaatctatctcgcatgatgaattcaacgcctggctggataagaatgggctcgaatggaatgtagtttaccgcgatgaagatgatatagacccagaggcagacggttacgacatttccgcctggcagccagactcaccagatggtgatggatggtttgttggttcaattcacgacactgaagatggtgcagtatgcatctggttacgccaggaggccgcccaatga

SEQ ID NO: 153374 - DNA, 267 bp, Enterobacter cloacae
atgaataaatttatttctagcacttttaataatactaccgtcgaactggatggaaaccattacgaaaagtgcgtttttgaaaattgcgaaattgtatacaaggggttactaccttttaatttaattaattgtaattttattgcatgcaaatggaaatttgaaggtgcagcgtcaaacacaattaattttttaaagattatgtataaagatatgggtgagtttggaaagaaaatggtagaggcaactttcgaaaatataaaaaaatag

SEQ ID NO: 153375 - DNA, 777 bp, Enterobacter cloacae
atgaaatatttatcgcttcagcaggcgatgcttggcatgcgtgtaaccatgacagacgatggtgtcattctgaaaagcccggcaggcagcgcacattacgatctgaagggtcgccgccacacagttaaaggtaatgcggaatttttaccgatgcatttaagggtgaaggataagcgtcagcataatctcagtcgtattgtctttgagaaagactgtacgactatttacggagctaatggaaaaccacgagtacgcattggtaattgggatactccgaaagaaccgaaaggctatcaatttaaggcaggtggggtattgactgtcaatgacgggcaggtgttcgttaccgatgtgaagattggcgatacgatgattcacgatggcgtattgtctacgaactatagcgttaaattgaacgtagctgacaaaggcaaatcacacgaagctggcatgaccctcggtgttgaaggcgaccagagcaaagtagtgtttaaagctgatcgctttcatttgcatgaagccgctcaatcaattatcggaaacgccgtcgcaacaaaagcgaagataaatatcgcgcttggtgatgaaacgaagcaggccgtcattgatgccgtgcgtgaaagcgatttgttcgcatccctcgaggcaaagcttgatgcgcaaacagcttcagtagttggcatgcaacaggcgatgcacgatgcggtgaacgatgctctccgaaaggcgctcaagccaggcgggacgatctggacttctttgaagcgtggattctga

SEQ ID NO: 153376 - DNA, 1212 bp, Enterobacter cloacae
atgtctgaagtaaacgaaattctgaaaaaagtcactgccagcattgaagaggcaaccggcaaattcaacgcgaaagcagaagacgcactcaaagaggcacagaagtcaggcaggctgtcagaagaaacaaaagctgccgttgataaaatggcatctgagttcaatgcgctgcgtgaagctgaaaaaaccctgaaggccgcaatgggcgaactggagcaacatgttgcccagatgccgctggcaaacgcgaaacaggttgtcgagtccgttggccaccaggtcatctccgctgaagccctgaaaacctttgcttccagtgtggaaggcggtaagcgcatcagcatcccggttaaggctgccctgacttcggtggatgtgcctgatggtgttgtagagccacagcgcctgccgggtattgatacggcaccgaaacagcgtctgttcatccgcgatctgatcgctccaggccgtacgtcctcctcagctattttctgggtgcagcagacaggctttaccaataacgcgaaagtggttcctgaaaatacgcagaaaccatacagcgaaattgagttcacgccgaaaatcactggcgtcagcaccatcgcgcacctgttcaaagcctcaaagcagatcctggatgacttcgcacagttgcagtccaccgttgatgccgaaatgcgctacggactgaagtatgcagaagagcaggaaattctcttcggtgatggaaccggcgttcatctgcacggcatcgttcctcaggcgtcagcgttcaatccggcgttcactgtcgaacagcagagcgggattgacgatctgcgtctggcaatgttgcaggcacagctggcacgcttcccggcgtctggtcatgttcttcacttcattgactgggcgcggatcgagctgaccaaagacagcctgggtcgttacattctggcgaaccctgcggcgctgactggtccgactctgtggggcctgccggttgttgcaacggaagcggcagccttccagggtaaattcctgaccggtgcatttaacgctggcgcgcaaatcttcgaccgcgaagatgcgaacgtggttatctccacggaaaacgccgacgatttcgagaaaaacatgatcaccatccgttgtgaagaacgtctggcgctggctgtgaaacgccctgaagcgttcgtgtacggttcattcagcaccggcgcaggtagctga

SEQ ID NO: 153377 - DNA, 135 bp, Enterobacter cloacae
atgccgaatcagcacattatggcgttagcgctcgcgctgtgcaacgtaagcaacggtaaaaccgtccgaattcctgccatgacaggaagccagcttcatttgcttatgatgtggctacgggctttacaggaatga

SEQ ID NO: 153378 - DNA, 177 bp, Enterobacter cloacae
atggtgatcaacatggaacgcttacttgtgctctcactgctgacgctggcactattgccagccctggcaactgctggacaaattacgatgaccaatccacaggaggaacagacagagaacggaaaaacgctatgcccgtatgcaaagacattcaacactgaggattcagaagagtga

SEQ ID NO: 153379 - DNA, 843 bp, Enterobacter cloacae
atggcaaagaacaactttatcgacgggaaagtatacaaatacgcctcaatcgaagaagcattattatcagcaacccgaattacaaatctcaaaacaggcgagtcagtaaagctaatcggtaacgctaaactcgcatatatgatcttgcgaaagagattctatcacttcaccaaaccgccaaaagataagaaatattttacgaagggcaagcactacgacaccatcgaaagtatcgctgcggcaatcggtgtttctgacgttggtacagtgagaagtgcaattggcagcctggaagccgccggactgctaaccaaaaagaaatttggaaaaacttatgaatggtcagttgtcgatctcactccagaattatttcttctcgaacgtaacaccgggacggcaaaaaagcctgtctgggtggattgtctaaaacatccagtgtttggcaacgctaaagaagacgtagcgccagaggtgcaggaagaaaagcaacagtctgttccagaagccgatccgatgtgcgagtttgacgatacgccggaagaggaagcgccagcgccggaaaaagtgaagccgacacctaagcccaccaagaaaccagcggcaaggaaagcacctaccaaacagcaaatcgtttccccattcgagttcagaaagccacgagatgaaaccagagattggttttatttgcaacgttacaacgatgctgatcggtttactggattcactgagtttgatctaccctatctggcgatgttcgacagtcagggaacattaaccaatgaatacgccattcaacacttgaaaatgaagcgtgactcatacgcacgacaacaacaaacctaa

SEQ ID NO: 153380 - DNA, 1236 bp, Enterobacter cloacae
atgacaatcaagggccaggagtatctttatctttcaccggacggtgtatggcagtttcaaatctacatcccgtcttatatgcgtcacatgttcggcgggaagcgcctgtatcggaaaagtacagggacaagagatatctacaaggcgcgtcacttccgtaaccacatgctggtagagtggaacaaccttaaagaacagttcaagcctgatactgaggataagcgtattcagcttgcgatcacttccctgcactctcaaatcaggaagaacaagaataaaccattgattgaagagcgagccagttcgattcctcacctgtgcttcttacgagatgaatacgctactgcctaccaggatcggagatcattctccacactgagcaaatcggcgcgagccgttgaggtgtttctccagagtattgggaaagttgatatcagcctggatcagattggacgccgattagttacagacttcatagaagagcagcagaaacgcgatgtagcgccccagaccgtgcaaaactggcttacatcgttaggtagcctctacgagttcgccaaacgccgctatgacgctatagcccccctaaatccgtttcatggtcacaaccttgaagcgcggcgcacaattgaaagctatcagccgtttgaatggcatcagctatctacactactcaacgaagcagacgaagagctacgagcagttattctgatcggtttgttctctggtgcaaggctggacgaaatagccagcttgaagaaagaagagatcgttatggtggaagggatacggacattctacattagcaaatccaagacgaaggcagggattagacacattcctatccatgcttttctgatcggcatggtggattattatctgagtttgaacactggagattacctgttaccacaggctaacaagattgaacgcaaagacggtaagaaaggaccattctattcccaggcattcacccgcttacggcgtcgcgtagtgcctatggctacagaccgtcagtgctttcacagtttgagggggcattttatcacgtgtctcgaccgtgccggagtacccgaacaacggatcggatatatcacggggcactcttcacaagccgcttctacagaagcattcaagacctacagcgcggggtgttccatgaaagagctatccgactatgtggaaatggtggattatccagaaatcatctttccagaaacgaaaaaaggggcgtaa

SEQ ID NO: 153381 - DNA, 1419 bp, Enterobacter cloacae
atgcaggtcactattgatggtgtcccgtttgtgcctgcctgcgcttcagcgtcacggattggcattgccattactacccacaaccggccagacgttttaaaccgcgccattgagcagcacattaaacatctgcccgccggtgcgctggtggtggttgtagatgatggttcagcaacgcctgttaaagcccaggatggcataaaactaattcgccatgactcgccaaagggcgttattgctgcgaagaactgctgcatcgaatatctaatgctggcgggatgtgaacacctttttctgtttgacgacgatgcttatccgatagctgataactggcataagccttacgttgagtctccagagccggtactgtcgtacattttcccaaactgggctaatggtaagccgattggtgatgcaaagataattggcggtgacgatcggcatgttgcctattcccatactcgaggctgcatgatttacgctcagcggtcagctatagagactatcggagggtttgaccctgcatttggtttcgcgatggagcaggatgtcgaatatttagatcgggcctttcactccggtctgacatcgtggcgttttgctgatgttgttggttcagaaaaacttattgactccctggacagacatcaatcggtcagttcgtcacttacgcctgtccagcgaagcgataacctgagtaaaaatcaggaaatagttaagctcaggcggttacagcgttttgcagaatacgttccgtattctcaccgcccgcacgtacttacgtcctacttgacaggttctacagatccgcaacgcgggaggatgtgggaaaagagccttaaggcagttcagccgctgattgcgtcgacaaattacccggtcactgtactgactgatgtggagttgactgatacgcaggcaattgtcgagcgtgtcaagccggattacggtttatccgtctatatgcagcgttggcggattcagtggcaatggttgcgggatcatccagaggtaaccgagctatggtgtacggattccaccgatgtcgtgatgctgaataagccagaggtatcgccgggcattctttatgtaggctgggagcctcaactaactaatacagagtggatgattaaaaaccatcagcacgctgatatccgtgatttcctgacaacccccaggcaattgcttaattgcggcgtagtgggtggagacagggcaacaatgctggagttactgcatgctatggttgtcgagctggattgccagcactccgaaagcccgactgaccatttcgaaatgggagccttcaataaggttgtttatacccgcttcaaagacaggtttgtaaccggcacacgggtaactacgatattcaaaaaaaacgaagcaagtggggtgagctggtggtcgcacaaataa

SEQ ID NO: 153382 - DNA, 336 bp, Enterobacter cloacae
atgggcggaacaattgaaatcagtgaggttgggatgacagtcaatatggctggtggcgggaaaatagttgtcggcaattggggtgatggcccagtaaatacggcagccgctcgccccccccttaccccggaagaggagctttatggtcgtgggctctgtctcctgcctgatggctgggaagatctaagcggtgacgggcgctggcaatatcatcttagcgaatctttgcgtcatctatggtcttcgttcaacagggaacagaagatggctatcgcttattccatcagggaactgtcagatgagttgacgaatatcgcatacgaaagttcctggtaa

SEQ ID NO: 153383 - DNA, 123 bp, Enterobacter cloacae
atgattaaaaaaaggccatttttaggaataactcactatcaaaagctgaacgtttatacgaattgcacactcctggtgctgcgtatgtcgaattgtggtgcaggagaaatgacagaattgtga

SEQ ID NO: 153384 - DNA, 1464 bp, Enterobacter cloacae; identical to SEQ ID NO: 140328

SEQ ID NO: 153385 - DNA, 201 bp, Enterobacter cloacae
atgttaacagtaaaagtaatgtcgccaggtggcggcgaagagattcattgcgggttgagcgtagggttcaatcctggtcagcagagcatcgcggtatcaggaatggacaaaaatgtgttcctgaagccgggagaagtcgcctacgtgatgaaccagaacggaaagacggtttctcgctacgagcatattgaccgccagtag

SEQ ID NO: 153386 - DNA, 210 bp, Enterobacter cloacae
atgaccactatcgtaataggccacgaggtgcaagacgacaagattcacatgatagaggaattgctacatgacgtagcgctacgtgacgttaactggagcggcgcaaagttcgaaattgagcgaggagactttacctgcattccagacgatgaaagcgctgatgctgtaaaattgctcaataagatacaggaaataatctccggttactga

SEQ ID NO: 153387 - DNA, 489 bp, Enterobacter cloacae
atgagcaacatcgacaaacgcgcattacgtgaagagttatcgaacccggcgatcggtagcaatgcccacctgcgaaagttagcgctggcgctgctggatgagctggaatccaaagacaacagaatcaatcgactcgaagccattgttgctgttgcagaacagcgcaacgccctgatgcgtgagtggaagcgcgctctgaaagtaccttgcgacctcgttgatgaccaggtgccagtagtaattcatggcatggttattcgccttgagaggctcaaagagaccgaagcgaagctggaagccgcagagaagcggattgctgatctggaggcgcgggaggtgaggctgccagaattatgcgtgggggttgttcaaggtggacatgcggtaatggtgccatatgcagcaggacactggtttaacaagacggcaattttggagatgcttaccgacgctggcattaacatcgccgcagccggtaaaggagagtga

SEQ ID NO: 153388 - DNA, 648 bp, Enterobacter cloacae
atgagcgatagattttacatgctgtgcactcgcgaaactgttggtaataacgcgtcattccactgccacaacggcaatgggtatagctccaatatcgaccgcgcccacgtatacacgcgtgaagaagctcaaagaagctgggaattgggtagagagattgatcaaccagtttgtgctgacagcattgattcaatggctgtatggcatgtcgattgccagtacatacctaccgaaagcgttattgaacccggatgtgaggcctacgtagcctacaaaaaaggaagttggaacggcaacgatgtgtactggctacagcacggcggacttccaactgacgacttcagcaaggcattcatttttgtttccgccaacacggcagaaccagggattgtctggattcctttttatctggctgacaaggctaagcgccgtaccttctgcatcaatgactttaatcgccgcagtatggtgcaggcggcagggctactcatgcctgattggctgaaaaaacacaatcgaaaaaaggcacgtagcggtaaggttcgctggaattgcccttgctgcggaaagattagctggcagttcaatccatacgattttgaaggttgtcgtgatttttcctgtgaaggctggagggccgcccaatga

SEQ ID NO: 153389 - DNA, 432 bp, Enterobacter cloacae
atgaatcaacgcgaaaaattagcatctgaaaactgtatggcaatcgaatttgtgaactggttcttcgaccacaagaaagatggctgtgggaatgcctggttcatgatgatggctgcaatgtgggaaggttggagcgctcgggaagcgcaggttaagcagctggctgcggagaatgtggggctgaaggagctaatcgagcagcatgctaatagtgttgctgtgtgcccgaattgctctcatgaagagccgagcgaaactgacgatatcgttgcgctttatcgttctatggaaaccccatccaccgactctttcctggctgaagtgcgggccagtgctattgaacatgctgcatcagagcgctggggtagcggatacgtattcgacgagctcaatgagttcgccgcccagcttcgcaaaggagtgcagtcatga

SEQ ID NO: 153390 - DNA, 1752 bp, Enterobacter cloacae
atgaaaaacgcgcctaatgtgaaaaccctcccgcgcgacaaaatggaggaggccatcatctttgctggaacgggagcatggaaagccgctcaggattaccagaaaggcaagggcgagcatggagacgatgttccacctgtggttctggatcacacccaactggcggaattaccacacctgcgcattgttgataaaggccgtcggtttgtccgtgtctgtcaggccggacttatcgagcaaaaccaaatcagcatgattgcaaataagctgtgtgaggctggcgttaccaatgctgagtttatcaacgaaaaaggcgagaaagaggactggacgccattgatgaaacgtctggaagacgagccccttatggtgactacgaggggaagtgctacgccagcgcttaaccagatgggagccagccagcgcggggaagttctgcttgctcattacgatggcaatctggcgatccatgctgattccgacacggttcatcattacaacggcgtggtgtgggttccgctttcggataaagagctgcagcgagaaatggcgcagatttttattgatgccgaagtcgcctattcgcagaacgcgattaaatccgctgtcgatacaatgaagctgggtctgccagtgatgggtaatacagcccgaaatcttattggtttcagcaacggggtttttgatacccggttaggccaatttcgaccgcatgataaaaaggactggcttatcgttgcgagcgaattgccattcagcgaaccagcagaaggagagactctggcaacccatgcgccgaacttctggaaatggctccgccgctcagtggcggataatgaccgaaaagcagaccgcgtactgtctgcgctgtttatggtgctggcgaaccggtacgactggcagctgtttcttgaggtaacggggccgggcggaagtggtaaaagtgttatggctgagatctgcacgatgctggcgggcaaggccaacaccgtatcagcgagcatggcggcgctggagaacccaagggaaagggcgctggtagtgggctattcgctgattatcatgccggatatgacccggtacgctggcgacggcgcagggattaaagctatcactggcggggataaggtagccattgaccctaaacacaaagcgccatattcaacccgtattccagcggtggtgcttgccgtcaataacaatgccatgtcgttcagcgacagaagcggggggatttccagacggcgggtgattttcaacttctccgaagtggtaccggaaaacgaacgcgatcctatgctggccgagaagattgaaggtgagctggctgtaatcattcgccacctgctcactcgcttttccaggcaggacgaagccaaacagcttttgcatgagcagcaaaaatcagaagaagcgctggccatcaaacgtgaaggggattcactggtggacttttgcggctacctgatggcttcggtggtttgtgatggaatgctgattggtaatgccgagatcgtgccattcagcccgcgccgttatctgtatcatgcttatctggcttacatgcgggccaatggtcttagcaagcctgtatcgttaatgcggttcggtacggatatgccaggcgcaatggctgaatatggcaaggagtaccagaagcgcaaaactaaacatggcataagatcgaacgtcaccctgcatgatgattcagaagactggatgccaatgtgtaccgatacaacaaaagaataa

SEQ ID NO: 153391 - DNA, 453 bp, Enterobacter cloacae; identical to SEQ ID NO: 140466

SEQ ID NO: 153392 - DNA, 228 bp, Enterobacter cloacae
atgttttgtgaccacagccagtttgcccatgttacaaaacagcgggacaagatgtgtttttggagtaccgccggcacgccaatgactcctggtcaggctctgcccgacacccgtatgtttgctatctgtttgcttcccttttgctacttgtttgctacctgtttgctatctgtttgctatctgtttgctaccgctaccttcagcagtgcaaagattaaggcacgttag

SEQ ID NO: 153393 - DNA, 672 bp, Enterobacter cloacae
atggcggagtatggcgttttactgacgaccacgagcggggaagtatgggtgaccgcgaatagctcgccaatcgctctacaggcgcgaaagacagcggcacttcagggaacatcggggttcaataccaaagtgacgcatacattccccgcaggtcagcccgttgtcgccttcgttcattgtacggttgaggtcgaaatcactcagacgataagcgggaaaaccatcacgattgattttctcagaccgaatgcaaccggcacagcatacgtttattttttctctattttcccgcagacaaagccagattacgggctggctgtgtgggatgcatcagggacgctgattttaacaaacgaaacgcgcacgctcagcgatgtggtcaccctcggcactgctggagtagatgccagctcaggctataacatcaacaccaccctggcggggaagtgggcatgtatgcctgccatgcttggtcttattactggagttatatcggctggcggccagccgcagccctactcggcgatatacaagagcatggcaaaacttgagggaggcaatacgcgaatattcgccagaccacaaacaacgcccagcggaagccttcagaacgtcgcgtattcgaatctgaggaacgtgattatggccatcaactgcgccaactacgactaa

SEQ ID NO: 153394 - DNA, 138 bp, Enterobacter cloacae
atgaaattagatcttaaatcatcgccgcgccatattaagcgtttaccgacaataccaaaggaccgtattttgatcctgtcaataaagtttgtgttttaccaaacggcgattatagcgatgatgactttgtcagtctga

SEQ ID NO: 153395 - DNA, 132 bp, Enterobacter cloacae
atgcttccttacatcctttctgacttatgctatcgccgcggagaatataaccataaccagtttcagctctatcaggcacaatcccaaaagttacaagtttgccttgttctgcacaaggaatcgcttgtctga

SEQ ID NO: 153396 - DNA, 141 bp, Enterobacter cloacae; identical to SEQ ID NO: 36145

SEQ ID NO: 153397 - DNA, 444 bp, Enterobacter cloacae
atgtctgcactttatgaaaaatcgcagctgacgaagatccttatttcctccctgccagccaccaaagaaacgatggataccgcaaccttcctcgatctgagttgcaccatcaaagaaattcagttcaccggtgggcagaagcaggatatcgacgtaacaacgctttgctctaccgagcaggagaacatcaacggcctgccttctccgtcagaaatctctctgtccggtaacttctacaagaatccggcgcaggacgccttgcgtgaggcgtatgacaacgatacgacctacgctttccaggttatcttcccgtccggaaagggctttaagttcctggctgaaatccgccagcacacctggtcttccggtaccaacggcgtagtggcggcaacgttctccctgcgcctgaaaggtaagcctgaaaacatcgaatctggctcctga

SEQ ID NO: 153398 - DNA, 642 bp, Enterobacter cloacae
atgcaggggcaatacctggatcgtgagacagggctgcactacaatctgttccggtattatgacccggactgcggacgatttacgcagcaggacccgatagggctggcgggagggattaacctttaccagtatgcgccaaatgcgctggggtgggtggatccgtgggggttgagtcgttgtaaaaatgactggaatgagtttcagaaaaaatctaataagcgtcagttctcttcgagaacacaagcatctaaggcctacgcgttatggaagaaacaagactgggcggcattagagaaatttatgggcgatggtgcctggcctcctaatcgtggatttattactgcaacgaaaacgactctaaaacctggtacaaaagttgaccgctacggtggttggaccgatgcagatggtttccgcgatagtggtacgtttatatcccctgcgggatcatctttcgaggggagagccctccaacaaaatactttaaacaaaccatattcggtttatgaagttctaaaaccgttgccggtagatagtggtcctgctataccatggtttgggcaaccgggcagaggaacccaatacgaaacatccgaagcgatcgaagcactaattgaaaatggttttttgaggaaaatatga

SEQ ID NO: 153399 - DNA, 1281 bp, Enterobacter cloacae
  misc_feature (1262)..(1271): n is a, c, g, or t
atgaaaaatgccgcatccgatggaaagtccattggtagcgccgtacaactgccgagtatgtctggagggacaatcaattcaaactataccaaggaaggggcaaagctgctctctcgggatgctaatggcaacattggtataagcagtaatcccaatactactcctggaaccaaaacaaataccggagagattttcagctcagagcaaaagcacagcgatattaagttcaatgccgcagatcgttatggggatgaggatggctttgtaaacgatataaagaatcggaaaagccagttatttgatgctcaaagttatgatggcgttgcctaccgcaccctcgtaaatgctaacaaggacaacccggcatcatctataaagcctaacgatcccatgtttactgcggggagaaatgagataacaaatgctgttgctggtactggaaactggcttcagaactgtaatgttgagacctctaaaaaaacagtaaccacacactatcctgattacaaagagttctactgtaactcgcctaagcaagataacttcagcagctgcacgataacccgtgatttttcagtccctgtttacatttcaggcggaaacggagacatgtcgatgtgcggcgataattgtgtgcgtatatggtttggtcgccgtgatgacaactactggagtgacggggtatatgataacgaactgacattaaaattccatccggatgcaaaattggcctcagcaaagattgttaacgcggagtgggatgaccacatgcgggtaacacttgatggcacgcagatttttgctcacatagatggtgcatatcgagaaagtgactatccggctcctaagggatcttgggagttaaaaaaatcgtggaaactcgacaaggtttacgatgtgactgataaggtcagaaaatcggtgtatgaggagcctgatcgagaagtgacaatggcatccagagtatgggttggtgggaagggtgaagggtattttgaggttgagctgacttttgaaaatatgaagctcgaagataagcacgtccaggaaccagctggttgttacgatgctgtacaagctccgaatacattctgccgtttcgatcggtttaaagatatggatgttggcacaaaacggcttccggaaagcgtgctttcattggcaaagcctctgtatgaaggtgataaaggatttcttacctggaagacaaaccttgaaggctacttttgtgatccattggccaaagacaaaatttgctcttnnnnnnnnnngctcttatga

SEQ ID NO: 153400 - DNA, 633 bp, Enterobacter cloacae; identical to SEQ ID NO: 30074

SEQ ID NO: 153401 - DNA, 627 bp, Enterobacter cloacae; identical to SEQ ID NO: 105687

SEQ ID NO: 153402 - DNA, 3147 bp, Enterobacter cloacae; identical to SEQ ID NO: 105638

SEQ ID NO: 153403 - DNA, 2457 bp, Enterobacter cloacae; identical to SEQ ID NO: 105688

SEQ ID NO: 153404 - DNA, 420 bp, Enterobacter cloacae
atgtcacatatgaaaaaaaccactttcagcggtcgatggaatgaaaaagcactatctatggggtggacggctatccctaacgctcttttcttcatgcaaaggcctttaggtatatctccaaccaactttaatgtgctgctaaatctctttattcactggtgggaagcaggcacatggccatatccttcacaaaaaggtttggcatctcgtatgggggtttcggttcgtactatccaacgctctttagatgagatgacagagatggggcttatagaaaaaacagccactatgagaaaccatcccagatacaaagggcgaaacatttacgacttaactcccatcattaaaatgatcgaagaaatggctccagagctaaaaaggactgtaggcaataaaaaaagcgacagccaagaggggtag

SEQ ID NO: 153405 - DNA, 429 bp, Enterobacter cloacae
atgtacagcatcaaggtcgggttatccagcaatggtcagtactacgccgcagggatggggatcggtgtagagaatacgccgtccggcatgcagtcgcaggttatcttcctggctgaccgcttcgccgttactcaccaggccggcgccacggtgacccttccgttcgttatccagaacgggcaggtgttcatcagagacgcgcttataggtgatggcaccatcagcaacgccaagatcggcaactacatccagtccaataactatgtcgctggctcagtcgggtggaggctggataagggcggtacgtttgagaactacggttcgacagctggtgagggggcaatgaaacagacaaaccagacaatcagcgtgcgggatgccaacaatgtgttgagggtgcagatcgggagaatcacgggaacatggtaa

SEQ ID NO: 153406 - DNA, 1542 bp, Enterobacter cloacae
  misc_feature (1066)..(1075): n is a, c, g, or t
atgactcctgatatatcttctcgtccggaaaatcctgtcctatttattgagtggtatctgcttaactcattgcgagtaaaagtccttcagcaggtaggtcacaaagaaaccctcgatccgttttttgactatgcccaaaagatactttctccagtaatttctgatgttgaggaaatttttcatgatgctcttggttgtgaaaatactcagggctgtgaatcccttgctcgtaagaccctggctcttttagagagactgcgggatgaggcaaaggaacaacagcagcagacagagcaggaggagcaggaggcatatgatgaatccgagaccgataccgataccgaatcagaagataaatcgcttacgtcgactgatagtcgtgaggatgattctgaggacgatagtgaaggtcaggcagatacttccgataacgctgatcttgctcaagagggatgttctgagccttcagaacttgctgaagataacgagggaaataatgaacccaccggtggcaatcccacgggtgataacattattgaagacgatactgatgcgattaacccttccgagagtgaatcagatgaagccagttcgactaacgttgaagatgaaagtaacttttcatcggctcaatgggagatactggcagatttgttggatgcctttcttagcagtgatgaggatagcgaagattatcacgatgctttggctaaagagattgaaggtattgcatcaaaagtatccgatgacgtgaaagccgaattcggtgcttctgaatgggatatccctgatctccttatcgatttgaatgtttacaatgaggctttgtctctgagtcattcaatcggtagcgacttgtctgttttacagcaggttaaaatgcgtggccgaaacaaaactcatgagcgtggaattaccttcgatggaaatcgattaattctgtcacaaatgggagttcgtgatgtcttcagagctcaaagcgaatctaaaaatagagggcatgttggcctcgtattagttcgtgatatttcagcgtcaatggctaatgatgaaagatatattcatnnnnnnnnnnaaagatatcttcatgccattaagtcagatcttgctttatcgatggccgctgaaagtttgtcaaaaatgcatgtctccaatatagtttttcccttcaaggaaagtgaatttgagattatcaaaacgtttgatcaaagcgttgaggaatctctatcgaaattcactcttggatgtaagggttattatacccctacgggatctgctttaatggcagctgttgatctgttacttgacagccaattcgataggaaaataatttttcttataactgatggttatccgaataaatcggaatttactatcgtcgaagttatggaaaaggctaaatgtaatggaatagaaatcgttggtgttggtattaagactgatgaaataattggttttgaaacggacactttcgtaacagttgatgatacttctttattgtctattgaagtcagtaagctagttcatcaaatactttcttaa

SEQ ID NO: 153407 - DNA, 378 bp, Enterobacter cloacae
ttgcgcttcattggctgcgcgggcgctggcgttactgtcagcaaggttggcttcgtaatttcgcagttgctcacgcaatttaacctggtcaatcagcgcagcattctgcaataccgtctttttctgggcttctgtcagagaagcaagttcgccctggctgacctggtatttaaccttcgccagttcagtattctggccttgcagggcaatctgctctttttgctgcttgataaggcgcttatacacatcctcggttttctcgccttcggttttaccgcccttcgccttaggtttgttggcctcattattccgccactcagcaagaccgttattaatcaactcctgacggcctgtctggaattgcggatcactggttaa

SEQ ID NO: 153408 - DNA, 186 bp, Enterobacter cloacae
ttgcgtgaggcctatgacaacgatacgacctacgctttccaggttatcttcccgtccggcaagggctttaagttcctggctgaaatccgccagcacacatggtcttctggcaccaacggcgtggttgcggcaacgttctccctgcgcctgaagggtaagcctgaaaacatcgagcctggctcctga

SEQ ID NO: 153409 - DNA, 366 bp, Enterobacter cloacae
atgaaaagcacatcgacaaccaacagaactgaatattacaaaatcagcagctttatctttctctatttctttacctggtctgccagtattggtctgctggcgatctggctcggtcagaaagccaacctgagcggatcggtgattggaaccgtctttgcggtgaacgggatattctccgttattctcaagccgatctacggctatattctcgataagatcggcatgagcaaatatctgctctattttgtggtgatcatgtcggccctgatggcgccattctttatttatgtttaccagccgctgttaatgtctaataccctgctggggattattatcggcgcgctctatttaagctttgcctggtaa

SEQ ID NO: 153410 - DNA, 1119 bp, Enterobacter cloacae
atggtctgtcatatgaccccctctgttgctctatttaaagggtgtgtgatgcaagatcttcacagtaaagactcagtaatcaatcattatgccgatcgttatcaatgttatatgccaattgatgtccgtaatggattaagaagcaatagtatagatgcgtcgaattcatctctcccatgggatgtaacattacctttagtcacgactgaagatgtttcacgtgataaagcgcttggggcgtttgtgggattggctgttggggacgccgtcggcaccactcttgagtttaagaaaagagacagtgaacatgtagcagatatgattggtggcgggccttttcaattaaaacctggtgaatggacagatgatacgtccatggcattatgtctggcagagacttatctttcagaaaacagaatgcacaccgatgtgcttagaaaatatatcctgaaatggtatcttgacggagagaatagcagtaatggtcggtgcttcgatatcggcaatacgacgcggttcgcgcttgaacagtatatgcgtgtcggaccttcctggtatggtaatacagagaaacacactgctggtaatgctggggttattcgtcaagcaccggtgtctatctttcgtcgaaaatcactgcgtgcgatttacttcgaatcacaggctcagagtcgagcaacgcatggcgcggtagaatcaattaacgcatgccaatttctcggattggtattgcactatttaatcaacggttatcaaaaagaagaagctttttcgcctcatgttttcccactgtgcgcgcgtgtaatgatcataaacgcgggtgagtataagcacaaaactcgcgaccagattcgttcaagtggttacgttattgatacgcttgaggccgcgatgtggtccgtatggaatacggataatttccgtgatgccattctgctggcagccaaccttgccgatgatgctgacagcgttgcggcgacggcgggacaaatagcgggggcgttgtatggttattccgctatcccgcaggactggaaagataaactcgtacaacacgaacgtattgccacaatggcgggtaaactattcgatagagcacctgaggataattttttatag

SEQ ID NO: 153411 - DNA, 213 bp, Enterobacter cloacae
atgtctggcgtagctggaaagccgcaccagacaaggcttcacgttttactactagcaaccaaaagccataaaaagcggttagggtgtggacacattgtggacactcttacctccattagcacccttcagcgggttaagcgaaatcgcgtcctgcaggtactgaggagcgtagtgcgcatagaccattgtctgcgcaattttcgtatgacctaa

SEQ ID NO: 153412 - DNA, 1179 bp, Enterobacter cloacae
atgaacaaatcgattaagatttcttccatcctattcgtcgttataggattattaatatttggctacttcctgttcaaatccagcattgatgggtactcgatatggccatcttctaaaacagactatacagttacaggccagtttggggattttgtaggtggcgtcattgggactttattcgcactagcaggaacatttttaatatatttaacatttcaagagcaatctaaagaaaacaaaagatctgcttttgaagcggtgttttttgaaatgattaggttacatagagataacgttagtgaattaagatataacgttacacttgggcaagagattgataaatatgaaaacagacaagttatgcgagtcatatttaaggagtttattgagtgttacagagaagtttgtaagttttcaaactccaaaaaccccaaagattacataactaaaaaacacctagagcatttaaatgacataattgaaaaaaacaacctcaccgccaacccaattgatctagccagaattgacattgcctactgcatggttttttacggagttggcgaagagggtgaaatatttttaaagaatctcttccgtaaaaaatacaattcaatttattactataagctcatctacttcataaagcttaagccgaaaaaaacaaacatctccagattccataattggaaaacaataagagatctagatcttgagcgtcttaaagcattaattgatgagctttacaaaaacaggaagcaccctgaaaaaacgctttccctatcagatttcgctgccaacctagatatgcatttgccatatgaaaaatattatggtggacatcaattccgattgggtcattattttagacatctataccagagctataaatatcttgataacactccttttttaagcaatgagcgccgttatggttatgggaaaatgttgcgagcccaactttcaacttatgagcaagctttacttttagtaaacagcctatcaaatattggaatgaaatgggagttatcacctgagatgtcaagtgacaataagagccagcaaaaattcataaccaaatacaacttaataaaaaacctgcctggcgagcaacttttcggcatacgttataaagattattaccctagcgtgcattacgaaaatgatgaacacacaatttaa

SEQ ID NO: 153413 - DNA, 1455 bp, Enterobacter cloacae
ttgaaaataattgacaattctttattgatagatgtagctctaactgaagaagtatatgagcaagtcaagttgcttctaaccggtctggatgacataagtttaaaaattgaaagttctgttatctccgctaaagtaatagacctaccaattgctgtaagttctgtgttttttaaaaactgcacttttgtagtttcgacggtgatctctaaccttaaagatggacgtttttttaaaatcgaaaactgtaaaagagatttttttcttggcaatgttaaaattaagggggttaattgccgtaaccttgttattgaccaagatgaaatcgaaaactttgcagaacgcctttctccagatattgaaaagtgcattatcgagtatttcgaatgtacgtgtgaacaaccacccgtcttcgatgaggtagtttttatgaaaaaggttttcataaattctaatataaaaggcgagccctgcggtttatttttcaatagctgtaatttttttaaaaactctcagctaaatatagatattaaatcaccaatttcaatccacatggataaatgcggctttttgaaattgaaatcaaaatctgattctgatactggaagcgcatttctaaattttgccgaaggcacgataataaaaaaacttgatatatcagaatcaaaaataggaaggatgaattttgagctattttctattgctgttgaaaatctcataataaaagattcagtagttggagggttagatctttcaaccattgagaaggatgatgataaaaacaattatatatataacatgagtgtaataggctcattattgcgtaagtttagctttaggcatagaaaaataattcatgcagttgatttctctaatacaaaattttccacccctcctcaaatacagggttcaaatattccggagggtagtgtgtttcctaataaagagcactttgtcagtcggaaaggcttgcaggatgcgtcgtgctatcgagcgttaaggttcatcatggagtctcaaaggaatagagagtttgagggtatgtttttctcactagaacaagagagcctgttaaatggacaagaaaaaaaatttaaattttttagtgtaaattacttatattatttgttttctgattacggtacgagttatcgtacgcctttaatctttctattaatatccatgccagtttttacaatcatttatgcacttattagttccccgataatttcaattttcttgcctatagattggggatgcgttattaaatcattgatcattacattgaagcaaacttttttaccttttgacgtattgaggaataatgacttcctaactaacaaaaacacgttttcatatatggtatttgtgctcgtaggtgtacttaatagcattgtttcggtctctcttatagcgctttctggtttagcactaagatggaagttcaaaagaggttag

SEQ ID NO: 153414 - DNA, 525 bp, Enterobacter cloacae
atgaaaaatataacgttggccgaaaaactgatcatgctgtcaggtgcggcgctttttgcgcttatgatcgcggtgaactccttttgcgtgaatgataatcctggtttcagggtgcctatgaccacctatttgatcgtcatgattgcgctgttctttctggataccattatctttatttttatccagatgctgtatgcctccgaccgatcgcgtttttccttattcatcctgagcctggcatttcttagtgggctggtttatttcattgagacgatcattgtcattcagcttccggagcatgctggttttacccaggcggcaaaaaccaacgatacggcggtattctatttttttcggcagctgagctttatcgtattactggcgctggcggtccgtgtggaaaaaatcacgatacgatccacgctcagattccgaaataagatcagcatgacgttagcattaatgatgacactggttatgtttccgatgctggcccattatctaagcagctaccatccggcctag

SEQ ID NO: 153415 - DNA, 2502 bp, Enterobacter cloacae
atgaatctatctgactctttgcaaagcgttttatccggggcgggaaccctgaaccgctacaggctggatgttccttcctgtccttctccacttgatgtggaagacttcagcggtattgaaggcctgagcagaatttacaggtatgacatcatttttaccactacggacaaacatcttgaggctgcctggtttttgtgtaaacccgcaacccttacgatggggggcgggttactggagagtctgactgaacagaaaaaagtgcacggtgtcattactcatttcagacgcatttctggctctgccgaccagatacagtacctgatcacgcttaaaccattcctgtttttgctggataagcagcaccgcagtcaccgtttctttgtcaataagtcagtacccgaagtggtcgggcaggtgttgcaggagcacggtctgcacggctgggaatacgagttcaacctcagacagagctacccgaagcgtgagcagataaaccagtatcaggaaagtgacctggcgtttatccagcgcctgctggcggaggtggggatattttactggtttaccctccaggaagacgcgcagacagaagtagtgcattttgccgatgcgcagcgggcgctgatgtttggtaaaatgctaccggtgaacagcccgtccgggatgagcgacagcggggcggaatcggtatgggggctgaatgtctcccacaacgtggtggaagccagcgtcaccacgaaagattacaaccaccgtgacgcacagagcatccttcagtctgcgccggcagatatgatgcggggcgacggcgagggggtgacctacggcgaggtgtaccactaccggctgcgccatctgacgcggggtgacaaaatcgacccgcaggcggaaaccgccaacttttacgcccgcctcgaccacgagcgctttctggcaaacaagacacagataaccggcgtcagtaccgatgctacactggctccggctcaggtactgaccatcactgacagcctgccgcccaccctgcctgctgtcttacaggaaccggtgctgattatcagcacgcattttactgccagtcgcaagagcgcccttctggtggatattttgggggtaccgtacagcgaaacggtgtgctggcgtccgccgctgctgccgcgcccgaaggtgaccgggacgatgacggcgcgtatcaccagcgcaaaagccaacgatatctacgcctggcaggatgcatccggactgtaccgggtgaaatttgacgccgatcgtgacgagaaaggacagggtcaggagagcatgccggtacgtctcgccaaaccctacggcggcgacgtgtacggttttcacttcccgctcattcagggcacggaagtggcgatcgcgttccatgagggcgaccctgacaggccctatatcgcccatgcgctgcatgactcgcggcatgttgaccatgtgacggagaagaacagcacccgtaacgtgatccgcacgccgacgaacaacaaactgcggatggaagacaagcgcggtgaggagcatatcaagctcagcaccgagtacggcggcaagacgcagctgaacctggggcacaatgtggatgcgtccagggtgctgcggggtgaaggcgcggagctgcgtacggataagtgggtgagcatccgggggggcgccggggtgtttatcagcgcagacaaacagtcttcggcaggcgacaggatgctggcgatggatgaggcgattgcccagcttgaaaatgcgctgggtatagcgaaaagcctggcgtcggcggcggaatcggctcaggccctgccgtcagataccgggaaccagcagacgctgaacgatgcgctgaaagaactggcgcagccggggatggtgctgaatgcgccgcagggcgtgagcatcagcagcccgcagacggtacggttgtcttcgggcagcgccagcgtggggataatgtcacagcagaatacggatatcagcgccatgaaacgctttacggtggcggcgggagaggcggtgagcctgctggcgcgaaaggcggggatgaagctgtttgcggcgaagggaaaggtggcaatccaggcgcaggatgatgcgctggaggcgacagcgaaaaaggatattaccgtgaccagcgtggaaggccgggtggaaatcacggcggcgaaggaactggtggtgaactgtgcgggagcgtatataaaactcagtagtggcaatattgagctgggctgcccggggaatatcctgctgaagtcagtcaatgtgcagaaaatgggtaaggcggattatgatgtgaaaaaaaaagaactttccgtagggttcagtaaattttttactgcgcgagatgaagagtcaggagagattatgccctttacccgctataggataacaaccggtgaaggaagggtatttgagggcaggaccgatgcggaaggtaaaacagttaccatttataccgccctgccagatgccctgcatattgagttactttaa

SEQ ID NO: 153416 - DNA, 2271 bp, Enterobacter cloacae
atggctaccggagaagagacaagtaaaacaactgtgcagggttcagggtctgttgtaaaagggaaatgtgagcctgaatgttttttacacccgggcagtgcgacactgctctttctgaccgcttcagaaaacaaagttatcgagcaggaacataactttctggctggtttactggaggcccagaaacaggcacaaaaaaatcttgatgatattaactatgaagcgataactcaggcaggcagggtgtcggcaagaaagtttgagagtgaaatcaccaatgcatatgcggcattagatatagcgaacaaggcactacgccaggagctgatgtcactgacggcaaatccgccagaaggtgagttactgaatgataaaatgaaagataccgcgattggtatcatggaactcattccgcttaagaagaatacggtaaagggagttaaaaaagtctatgtccggtcagataaaataaaacagcactggcggacatacaggctcagtgaagttgataaaaagagcggtgaagccagttttataaaatataaaaataagactatcacaacccaggatgctgatggtaaaacggttgagaaaactattcgccaggcaaaaatagatactgaaaaactaataaaacagttcagtactgtccctgcttctcttaaatgtgaactggttaaagacacgaatgttattgtcagcagctgggcagaagagatgaacaagtttctgacatggccaaagggaaacgataaggtcgacgaatctgtctaccaccagtatgttgacatcagcgcacaggctcaattgatgcgctacagccatggagcagggctttcagcgaaatataatccgtcagaaggaaagttggagggcaagatagaaggccatgccagttttgctctaggggaagccaaggccgaagctgttctgtacttgccggacaggttaggcatcagcctgttatttcctgcgaaagaggtgaccaaacaaacaccggatggcgtctgtaatatgggagcactgcgttttgccatgaaactggtgttgtcaggtagcgttggtgccagtactgcaattgaagtgggggtaaaagtagactggagcggagaaatgggaaaaggctatggcattaaaggccatcctgccaccctgactgctccaccgttgccaggacaacagcaggtgaatttaaagaccccaaacatacctgacgcgcaggggggcggtgaaattggtgtttttgttggcgctcaggccggaggtaacatcagtggggctattgaatggtttgacccgcatcctgatgagacgccagcagatccagcagaaaaaggtttggagaaaggtgacaagcccattgttaataaagagaataagtttgccacgatagccaaactggaagcaggtatgacagttcaggcgggagctggcggcagtggtgttttttatatcacttatattcagggtcgtttccgcatttattgtaaagcggctttttgttggggagtgggcgcaaaaggagaggtggggtttgaggttgacggcagtagctttgcggctttcatgaagagctttctttatatgctgaggaatgtggattatcagaagcttgagctgatgatggaaggggatgccttccgctctctatgcgcaatccctattattatggcggcacaagggatacaggcgggtgaggccatgcttaagaatatggtcgtaatattgcaacaaattagagcagatcttaaggatgaaaacaaacgcgtcagcttaatggacagtattttgtctaatcctgatcagcttaaatatacccctccggaaacaaaaggggcagtgattgccacattaattgacaagaactgggcggactggcttgatccacgaaatcagaataatgattttttttccgttaacagctggaagctcggtcctttaaagaaacgaaaacaagcggtgtttatggcactgaagtgggtacaaagtcaggcagattataacaatgtcatgcagcatttgacggtatcaccaggggagaaaaaaggcagtaaggaactgaatgaaaaagatgtgattaactttttaggcatcggggaacacaaattgcttttttacacaaattatggcgaaaaactaacgttgttgcataataatctcccgactaccgttgacccggatgaaccatttaagcctatcccggatatcctgatgtcagaatatcttgccatggttgacgagcagcatccaattaatacaatgattgcttga

SEQ ID NO: 153417 - DNA, 894 bp, Enterobacter cloacae
atgaaaaataacattatagctattttagttactgtatgcttactagtcgggtgcgatcagggaaatgctgccagtagtgaaaaaacggctaaagagcttgtgggtaagtcgctctctaacatggtttccgttcagggcggcgagtttttaatgggggattttgggccattagttggtgaaaaactgcctttcagcataaaccaggatgacaaggtattacataaggttgtattaagtgatttttcgatatcaaaatacaaagtcaccaatgatgattataataaatatctacagataacaggagtaaaaaaaaaccccattaatgttctggtggaagattacccatcattgcaaaaaggtgattattctgttggaatcacctggcaacaggcaaaagactattgtcagtggttaggtaaggaatccggtaaaaaaattgatttaccgacagaggcacaatgggaatatgcagcaagatccagaggacaatacattccgtatgcaacgaataatggtgagttcctgcctggtaaaaacatccccagccaggatgagctgagtgaatatactgatggagctggtattcctatttatccagtggggaaatatcccccaaatcccttaggtctgtatgacatgggacttagtggctcagaatggaccaatgactggtatgcgtcagattattactctcattctccggtaaacgatcctcagggacccgcaaaggggaccgaaaaagtcctgcgtgggaatgttggcggtgacagacaatacgctttaaccatgttcagacaatcagaattgccgattccaaagattaataaagacgatgactttgaaaaatatggcgttggtccacagtatgttttccgttgcgtcatcaataaataa

SEQ ID NO: 153418 - DNA, 315 bp, Enterobacter cloacae
atgagcctgatagataccctttcaaatattaccggcactaccctaaatcgctatcagcttgattttccctcctgtaccgcgccgctggatgttgaagatttttgcgggacagaaatactgagccagctctaccgctacgacatcagtttcaccagcacggacaggaacgtggatgccagccagttgctgaacaaaccggccacgctgacgatgggcgcggtgtattacagagccttgccgaacagaagcgggtgcacggcgtggtcacgcattttgagcacaacagtgtgtctgccgaccaggcagaatacatga

SEQ ID NO: 153419 - DNA, 144 bp, Enterobacter cloacae
atgattctacaatggttcgctcacaattggaccatttccttgtaccacaacaatggttacttggtaggggggctgaaacatgtgaagaacttgttaaaggagaatggtatcgaaaaatgggaaagatattctggtaagccctaa

SEQ ID NO: 153420 - DNA, 609 bp, Enterobacter cloacae
atgacgttatgcgcaatatggtgtttgttcagggggggcacctttgagatgggcgatatttgcctgaagaaatatgggctgccctgtacctttgccaatgagcatgccagttttcccgtgtataccgtcaggctggacagcttttatattgccaaatataaagtcacttacatggattaccatctttataccaacaataaaggcttgcctgagttaaaagttgatgcagggtaccttgaggattatccaaaattgcgtgattctaacttaccagcaacagctgactggcaactgagcagagattactgccagtggctgggggagaaaactgagctacccattgatttaccgaccgaagctcagtggaaatatgcggcccgtaaccgaggtcaggatattcgctacggaactaatgatggtcatctcagagtaggagttaataatccttcttatcaacagcaagaaagttactcaggggggggaaggggctattaccagtggggcagctacccagcgactccattagtactctttgaaatggggaccagtggccagtggatgcgtgactggtacagcaggacctattacccagcacagcccgcagcataa

SEQ ID NO: 153421 - DNA, 1158 bp, Enterobacter cloacae
atgggctgggtacgaacaaaagcattaaccacggagcaccctccggccccttcactggtctggtggctgcttgccggtgcactaatggcgatcgccggaatcctgttgtttctcctccatgctttcggcgccatcaaaacgctgtcagaaatggatatctggtgggtgtccctggctcctgcaggatgctggctgctggttttttgcctgcgttgctacctgtgggacagagagctgaaagtgcatcagtttttacagaaagaggcggcatacgggcaacagcagtgggaagcctgggccgaacgttaccaggcggttctgggcagtacggtgctgttgccggataatattacggcggcagtctgggggaaggaacggcctcagcaatacggacttacccgcaggattgattacctcccggcagaagcgcctgcacacatgggcgtgatgcggatattgcttgccagcgtcgaagaacgcgtgcagcgcctgccggcagagttgccgctgcatgtcactctggtgacggaaaatccctctcctgaactgaccagcagtttcaacaatctctggaaagaacacattcccggccgcgccgtgcctgatgagattaccgttaccgactcattctcattgtcggaagtggaagcgcgcctgaagcaagctgtactcacggttaatttactcctggtcatccagcttaacggcggtgaagcctattccgacgggctggccgcgctgctgctgaccagcgacgacgtggcgcaaaaataccatctgccgcatccggcccgcctgttgcgccccatgcctctggacatgaacaattttgaagacgatatcaccctgttcctggaaacccagacggtcgcctgccggacagcctccgtgatcggagacgtaaaaaaatggacggaaaagagtgcggcgcttattacccgtggcagcaaaatgaatgccccgtggaaggctgaagatatcgcgctgctggaaaaatggtgcggtattcccgggcctgcttcgccttggctactgactgcactggcgacagatctggtcagcctgcgcagacagcccctgttgacgctgttttccactgaacaggaacattttatcagtaccatcaccccagggagtgaagatgaatataccgggtaa

SEQ ID NO: 153422 - DNA, 156 bp, Enterobacter cloacae
atgttccgctggccggcgataaggcaaacgagggtgagaatgattgatttcgcacgcaaaccaggacggcagcaggccgtaaagctgaacttcttcgaggtgattattcgccgcctgtgctacctgctggcgcaaaaggggaatccagatgtgtaa

SEQ ID NO: 153423 - DNA, 309 bp, Enterobacter cloacae
gtgcaacccaaggataacgtcattcgcttgcctaacgggaaccttgatgcttccgatgaaataatccatgatgcaacttatggtgggggtaatggtggaggtagcgatatgttgcagagagttaaggatctagaaaaagacgtccagcaaatgaaaactgatattgctgttatgcgatctaactatgctacaaagacagatgtaagcgacgcaaaaaattctattattttatgggttgttggcgcagtagtgttcgcacaactcattccggcaatacctaagatattagaaattttctttcataaataa

SEQ ID NO: 153424 - DNA, 465 bp, Enterobacter cloacae
atgcgagtaaagcaacaatttaccgataagtcaacatacgcctgcctatcaagtggtaaagctattgtttacaatccatatatgaatagaaaagaacctaaccagagcctgatatctaggctgactgaactgaataacaaaggcttctcaaaaacagagatggccaaagtagctaatgtcagcaagcaagctgttaccggatggtttcgaaccggcaagatgagcaaagaatcggcacttgccttagctgatgcagctggggtgtcggtcccctggctattaggtgaagacgttgatgagaaagacgggctcaagccagacgaacagcgcctactcgagctctatcgccagttgccggaagaagaacagcagaacatgatccgcatcttcgcaatccgtcttaaggaactagacgagttgtatgaaaggtacataaaggggcgtattcgttcgcaaggggattga

SEQ ID NO: 153425 - DNA, 219 bp, Enterobacter cloacae
atgactggaattgaacttgcaatttttcgatctggctcggccagcgcgcttggtgctttgatcggtgtttcaaaaatggctgtttcgctttggcgccacaaggggattccggctgagcgagtgttgcctatttatggggttaccggcgtaactccccacgaactgcgccccgatctctacccaaaccccacagatggtttacctaaacaggagccttaa

SEQ ID NO: 153426 - DNA, 780 bp, Enterobacter cloacae
atggacgacactaataaacacggtctgtcacgttatatacctgaagcgattaaacgtgaagtaaggcagcgatgtggtttcggatgtgtgatatgtgggttcggtttttatgattacgaacattttgatcccgactttgttgacgctaaacttcacgacccaaatgggatgactttactttgttcgcaatgtaatcagaaaagggctcgtggaaggctttccgctcatactgtagagatcgccaatagaaatcctaagtgtaaacaattaggttttgcgaatgaaatgtttgattttcataatgaccctatcaccgtgaagtttgctggagttactttctataactgcaaagacctcataatggtcaatgacagaccaattctaacagttctaccatctcaggagccacatgggcccatgctactttctggtgtgttttgcaatgcgattggccaagagacactaagaattcatgaaaatgaatggtcagcaaaaactgacaattgggatgtggtatgtgagggacctcgcataacaatacgcggtggtcttggcgatatagttttagcgctcaaaatggaggtacccaacggactagttattgagcgacttaatatgttatttgaaggtgtgcatataaagggcgataaagatctccttgaggtctccataaatggaagaccatggcagatgtggcagggatgctcagttcataactgtcaggtaggaatatacatgtcaagcggagtgtgggcagctaatgattctatgtatagttaa

SEQ ID NO: 153427 - DNA, 1005 bp, Enterobacter cloacae
atggatagatttgaaataaaacttaatgaaatcaatggaattctttcaaagaatcaattggggcttatctatgattttataaatgatagagataatggtctcgtactgccgttttttagtaaatacatggactccgttcaaaaattagatctggatttttgcattacaaccaactcgcatttccaatgcggcattatttatgatgaaaaattgatatttatgtcttatggcacatttgatagactatgtaagttatctgacttaatttttcggtcagggataataacagggaaaagtactaatttaaacttttatgacttacatctcgttaccaatccatttgttgggtttaacaatgagataagagaagaaagtgagtccgaatcacacttatttatgtttatccttgattgtctaatgctgtttatagttagccacgaagtaggccatttcattaataaacatggcgaccgagcgaaaaagcaatctattgacactatctttgatgatgttttaggacataaaaaaattaatcgcgcagagctaatatcaagccacgcaagagaattagttgcagatggttttgcgcttaatattgtaaaaaaacatgtacagtctgcatttgagcagaaggcatcgtatcttgataacttgcttgatttttatagcagcaaggaaggcggaattgcattttcattgctattaatattgtgctatttcaaactttctgatggcttatcaccccatgaacattttcaatcgacacatccctcaacggcggcacgagttcgattcattctcagttgtcatattgaatcattagccaatgaggatgaagaagaaaattttggattttactatggtttaatcataactcaattgaaatcaatatttgcatctatgggagatgactttgagttaaattggataaaggatacgaactcacctgaaatgaccgagtggtttaatgatgtttataaagagcatccaaaatggttagcataa

SEQ ID NO: 153428 - DNA, 144 bp, Enterobacter cloacae
atgcaaaaacgaggatttgtactctatctggtcgccattattgtttttggattgtttatacaaatcgcaccaggagagcttcttactggtttcaaaaacgccttcggagatgccttagtgggcataattgggcccaacagataa

SEQ ID NO: 153429 - DNA, 192 bp, Enterobacter cloacae
atgacagaaggtttctactggatacagcacaacggcagagtgcaggttgcttactacaccaatggtgtaactgaggatcttgaaacgggccagacaataactggtatctggcatctgacgcagggaaacgacatttgccacaatggagaggctgaggtgattgaaggccctctacctgtaccatttaaatga

SEQ ID NO: 153430 - DNA, 318 bp, Enterobacter cloacae
atggctgagcaggcgacggaaattcagaaggccgctcttgcgagcgaccagcagcgcgttgccggggggggcgacagacttacggaactgcttccgggcccggtgacggggtgctacatcatgcttaacgattcagcaaattttttaatgttgcttttttgtaaacagattaacactgtgcagaaatcctgctatgctgcccgacgcggtatcgggcatttaccctacaaactgctgtctcacaggagcgtgaagagaacgcccgccgcatatgacaatgagagcgaggagaaccgtcgtgctagaagaataccgtaa

SEQ ID NO: 153431 - DNA, 738 bp, Enterobacter cloacae
atgctgaccgggcaaatcaaacagttctggcttgagtctggctgcgtctatggttatcgcaagatccatctcgatctgcgtgataccggacagcagtgcggagtgaaccgggtctggcggctgatgaagcgtgccggaataaaagctcaggttgggtaccgtagcccacgagcacgtaaaggcgaagccagcatcgtgacacccaacaggctccagcggcagttcaatccggactcaccggatgagcgttgggtgacggacataacctacatccgaacccacgaaggctggctgtatctggccgtggtggttgacctgttctcccgaaaagttatcggctggtcaatgcaaccccgcatgacaaaagagattgtcctgaacgcattacttatggcggtgtggaggcgtaatcctcaaaagcaggtactggttcactctgatcagggtagtcagtacacgagccatgagtggcagtcgttcctgaaatcacacggtctggaaggcagcatgagtcgtcgcggtaactgccacgacaacgcggttgcggaaagctttttccagctactgaaacgcgaacggattaagaaaaggatctacggaacgagagacgaagccagaagcgatatttttgattatatcgaaatgttttataacagtaagcgtcggcatggttcgagcgagcagatgccaccggctgaatatgaaaacctatattatcaacggctcagaagtgtctag

SEQ ID NO: 153432 - DNA, 1563 bp, Enterobacter cloacae
atgagcaacattatcttcaggaccatcaatggcattgttagacccattacaatatctggacataccgcgaaaattaaaaaaaagaaagcaacattcaaacctgaatatcatctagaaaagaatcattataacaattttcgtgcatttaccatcccaaacgtaaagtgtagaaaatgtggcctgcatgtttattattatgaacatccatcagggtcacgagtattgtttgatgaacttggtccgccgtggcccctccatccctgctttgctgatgggcagaatataaagaaaaaatccgttagtccttctgttaagacggtcagtaaaaaagaaaaaggatggtttcccattattattgagaaagcacagttacgacagaaccatattgaagttaacgcacgaacagaaaaatcagtgctaaattttctcattactgcctcaaccctaatggcaagaaagattacagtaagccagataaaagatctcttggtgctggcgaaggtgcaggcggaaaacaacatactggttcagttccacgatggtaaatctagctgggagcaaaaagcaacactatcctccctatcgcgttccagtaacgatgaaaagccagctattaccgaagtatcggtgctcagtgagaaaaaatttaaaaagttaacgccgctccaaaacggcttactaagcatcaaaaaagacaagctccttattgattttttattctacggggaaaaacatcatcagtctattggcggtaaccaatggcataagctacagaaaaaattagatcatttcaaactttactttaggaaagataaatcaggagataattttattttttatgttataaacccagtcagtagagagtttattaccttctttgtcaagggaacgaataagaaaaatgtgataggttcgtcagtcgcacctgacaatagagttaagttagtggatatttatcaagaagatatagaaacattacaaattaaaatcctaggtaaaattgacgatagttacattaccttctatatgcccaggaaatatcttcgtgcgaatgaaaatatcgacgcgttactcaacaatgaaataaccatctggctggaacatgccggaggcacagagtgtcatttatctatcgacgatgctttaggtaagcaaaaacaaactccgcgcggtaaagtcagcattctctcttgcacccgtgcagaccagaccgatttacctgaagagacagattttattgttgaaaacattgatgcgcgagaggatgcacatatccagctatatatttactcacaaaagaagaaatggcagatgtctttatttgttagcgattctcaacgcaactattttattaatctttatgccactgaatcgaagctctctctgaaacggcgaattgatagaaaaaatgacatcatgcatttgtatgttaaaaatagatgtattggctattacaaaatgctgatccctgacgccaattcaactttgaaagaagtcgtttcaaaccatatatcgcaagatacacaattaggaatagcgtttcgcaacgcattgaaaatataa

SEQ ID NO: 153433 - DNA, 531 bp, Enterobacter cloacae
atggcggttagagggcgagccggaaccacctggtctgcctggatgcagacttacaacaccggcaataccataaaggccagcgacggaacgcttaaggctgcctccccagtagttaagttgtttgctgacggttcgtttgaaactaatgacgaatcagagggctgcactgtaacccgtctggctaccgcccaatatctggtggaagggtgtcaggggctgaactcagacgcagcatggggcggcatcgatggcggttttgacatccctaccgatcgcaacaagcagcctcttatctggctggattatgaggttagcaccgatggttctgtgctggtgaaaacctatcaccgcacacatcctgatgcgccagcctttgccagaaatgaactggaaggcgtgggtgacggtgatccggtcgatatcccccgtgaccagtttgtgtccgtgcgtgtcgaaatgcctgccgattctttatacaaccaaaaaatcagagcagcagagctggccatgactgctgatgcgggtgaataa

SEQ ID NO: 153434 - DNA, 690 bp, Enterobacter cloacae
atgtgtgggcgttttgcacaagctcaaacgcgtgaagaatacctggcttacctgtccgatgaagctgagcgcgacatagcatacgaccctgaacctattggccggtacaatgtcgcgcccggcaccaaagtgctgctgttgagcgaacgcgacgagcagctgcatctcgatcctgttttctggggttacgctcccgggtggtgggataagccgccactaattaacgcacgcgtcgagaccgcggcaaccagcaggatgtttaaacccctctggcagcatggtcgcgctatctgctttgcagatggatggttcgaatggaagaaagaaggcgacaaaaaacagccttacttcattcaccgcgctgacgggcagcccgtattcatggcggcgatcggaagcacgccattcgaacgcggtgatgaagcagaaggttttctcatcgtgacatcggcagcggacaaaggtctggtcgacattcacgaccgccggccgctagttttgtcgccggaagctgcaagagagtggatgcggctggacgctggagggaataaagcgttagggatagcttcagacggtgcagtgcccaccgataagttcaactggcatgcggtaacgcgtacagttggaaatgtaaaaaaccaagggaggaatttgatagagcatataacaatcaaatctaatatcagttag

SEQ ID NO: 153435 - DNA, 813 bp, Enterobacter cloacae
atgcctaaagaaatggatcgatatggtgccgttaaagtagtctctgggaaatttaaagggcgtattggttattacgatgatgatgacttgatttttccagaagattttgaatgggatgaaaatgatagtctggaaaacaacgagaatattactccagttgctattgtctattttggtgattttttgttagctacagagcactacgctatcccttatgatgatttagattacccttcaatgaatgatctaataaaaaggaaaaatgagcttacagagttatgctcaccttttaatgttaaaaaaagaattccatataaaaaaataagcagttatttttcagagttacattacgttgaaactactcttctagaaaaaattgtggagcagcgctacatgagtaagccaagtggagctaaagtctttatctcccattcgtcattggataaaccatttgcaaaaatgttatgtatggatcttgaagcaaatggatatattccatggttggatgaatgggatattaaagttggtgaaagtatacctgaacgagtttctaacggattacaggaagcagattttgtaattgttattctctctgaaaatgctatttcttcaaaatgggttgaaagagaatggcaaagtaagtattggaatgaaattgagcatgatcgtattcatgtgcttcctttacttttgaaagattgcaaaatacctgagttattaaaaacaaaaaaatatgcggattttagaaaagatttcaatactggattaaaagacttattagcagcacttgaagctttgtataaaaagaaatga

SEQ ID NO: 153436 - DNA, 228 bp, Enterobacter cloacae
atgacaagagtttatgttgatggaaaggaaatcgcggacttggacactgctcagaaggtaactgtctatccaaaagttggagatcatatctttagcgcttggcctaaagggatgtgtggcggaggcatgagtgagcagtcaggtaaggtgactgaagacaatgtgcttatgttcaggattggatacggaactaatggtgattttggtatataccccaccgctttctaa

SEQ ID NO: 153437 - DNA, 294 bp, Enterobacter cloacae
atgtctaacgaacaacgcatagaaagcttcgaggcacgcattcgcaaacttgaagaagaaaatgccaatcagaagcaaaagctgctgacacacgaagtcatgacagggcttatgctaactaatgtattaagattaattgactctttatctcccaatacaaaaccatcgcaaaagctgctggaatcccttcaaaaggctcaagcaaaaattcctgatagcgatgcgagaaatgatccccacacaaaggacgcatttgaaatggcaatcaaggcagtgaatcgcgcgttaaaatag

SEQ ID NO: 153438 - DNA, 351 bp, Enterobacter cloacae
atgatttcatatgaggttgagtttccgactcaaaaatcgtttagcttaaaaataaacggttactcttcagcggagggactggactgtaaaacggttgagtctattggcggtgacgtcaaagtacaactcgataagaagacaatgctgactgtaccttaccgtgaagatatttcgtcagacttcactctggaaggatataaggcgagagcagtaatctatgcggaaggtattgtaactaagattgtatttgcggcccaaatgcaggccgcagaaagcattcaagaagatgataaaatgaaggatcgccttcttgatacagttgctattttaacgcgcgattcactgccttga

SEQ ID NO: 153439 - DNA, 543 bp, Enterobacter cloacae
atgcagcagcaaggttctataggaagacgacttgaagctgcgctcgtcgcctttcgcaataaagactacgagacgtgtctgattcacttgtttccagcattagataaaacagctaaaaggagacgacctagcgcaaaagttggtgaacgcatctgcaaatttcttgaagaaaatgaagacttgctctcttacattgcaatgaacggttctgtattacgtaatgtgcatgtcggtgatatgagcgtgccgaaagctatttattcatatgcaagatgtccaatagcgcatgaaggtgagctcgatccaagacttcagattaccgaagaaaataaaatgatgtttggcaaagaatgggtgttcccaacaagttatatttttgctttaatcattgcggtgttaatagcacctgaaaattcaaatgagtttttacaagaaaatattattttagatttcagtaataaaagcttctcagcaaacgaaatgtggggatgtgctgcttcggtaagaaaagaaattgggttaaccgacatgctagcacgctga

SEQ ID NO: 153440 - DNA, 354 bp, Enterobacter cloacae
atgactataaaaattatcggctgtacctctgtcggcaatggcgtggatggtatcagtattgttacagatgggcatagcgatgtacatatcgaagatgtcgatgtttccggaaacaaaagacatggtatctcagttgataaaaaatttggattactctactcggccggcatcatctcagaaacgcctgaaaaacttttgtaccaagcttatgaagaacttaccaggtcacatgacaaaagtgaagctaatcaggtcaaagttctaaaatcaattggtttggataagtacatcgctaaaggagcgaatctggcaaccattgcaggcttactcattcaaatattcggtggaaagtag

SEQ ID NO: 153441 - DNA, 144 bp, Enterobacter cloacae
atgataaaatacagtcttatacaaatcagtaacttacataacgttagattaaaaagcatggaggtttcttgcaatatcaatctcacacatgagcacttagagccaaagccagtaaattttgttacatcaattaagtttatttga

SEQ ID NO: 153442 - DNA, 156 bp, Enterobacter cloacae
atgaaaaaggaattaggtatttggagtggtaagcaagatgacacagaggttaattttgttgaacaaggtaatgtagccaatatcaattacacctttcatatcggaacagtagccatgtttatctattcctgccacaaagaaaaggctattaactaa

SEQ ID NO: 153443 - DNA, 408 bp, Enterobacter cloacae
atgaatgccaaactagccctctcagtgctgttgattgcttccttcggtgctcatgcagaaacaagcactatctatcagtgtgcagagtacaagctgattgatgtgaaagattttattgataatggtgttcatgaaaactacatagctattacaaaaggtaaaactattatcgctggtaatagtgagatattaaatgacactacacacaagccgatgcacaccacacaatttaactttgatggtacggttaatgatgtggctatattgtcagatgaagataagacaaaaaaggatatatgggcttatatgatgaatattgacggctacaacatgactagccgtgtaaggattgtagatattggcaataaagaacgcccttacattgactgtcagcaggtgagcaaatga

SEQ ID NO: 153444 - DNA, 219 bp, Enterobacter cloacae
atgctgaggacgatgctcagtatctttctatgcgtcaggctgctaaagctcaagaggcgcaggctaaagctgttcgtgaaaccagtgaagatagtgggccatctttgggagattatattatggctgatgctgcatgccaggatgctcctattgaatgtcgtcgtcatgtggcagattcatcattatccaagattggcctttaatatcgcaatgcaatga

SEQ ID NO: 153445 - DNA, 312 bp, Enterobacter cloacae
atggctaaatacacagtaaattcgttttctgtatcaacgggggttacgccaaatggctttaccagagtgtatctggatgtaaaccttaccaatcaagcgggaaatccaaagatagcgcagtactctctatctgaggatacaagggcaacaactcaaggtatcgtcaacatcctcaatcaggggttctcatacgcacagcagaattttgcgaaggttggcattacagagtttgccgagcgaaactatctcttctttgacttgccatcacaaggcaaaagagaaaatcatcagtttactggtaagaaaatttaa

SEQ ID NO: 153446 - DNA, 798 bp, Enterobacter cloacae
ttgaagctggcgctggcatcgctcgaagcggagcctgttggcgaggttgtcctcggtgagtatgacgattgcggatgccgcccggatgcgaaggtggtgtgcatagccgcggatgggcaggctgattgggaaaacctcaaggatggaactcgcttgtacaccgccccgccagcgccggtatctgttcctgagcccattaagcgtaatgatgcggatggatggtgggtgtacaaagggcgtagagtcggtggtggctgcgcggagtggtacaaccgggctcttgatgactgccgcgccgccatgcttcagggtgtcgatggcaagcctgagttaacagtctggtacggtgcaatgccggaaacgaacggcaaaactaactggaccgctatgctgcatcgcaaaggtcaccacccgtgggaaggcatcacaatcgaccgttccgagtatcctggccgagtacgctatgaagctgaccgcatgcgtcaccttatcggtgagctggcggatgagccggatatcctggcttacgattcagatgctcacagcggatacgttgaacctgtaacgacggcttacaagttgccagaggggtgggttgcggtaccggttgagccaactgaagacatgatcgtcaatggtttcgagtctgagccagatgagagctttagcgatgcagaagtatgggaagcctacgacgcaatgagcggctgtcagcaggcggcgcatcgggcgaagctgtgctgggctgcgatggttaaagccgcgcctaagtatgatgcaaacaaacaattaagctga

SEQ ID NO: 153447 - DNA, 168 bp, Enterobacter cloacae
atgaaagcgtggtctctcgaagagctagcgctgctgtggcgacactcaaacgctgaagtcgcagagattaccggccgcagcattgaagaggtcggagataagcggctgcaaaccaatattgagcctaatggctgggatgttaacgatccggagcgggaggaatcatga

SEQ ID NO: 153448 - DNA, 219 bp, Enterobacter cloacae
atgacgcaagaaacagacaacgccatccgcgcgcagggccgtaaatgcgtggacgaaatccgccaggcaatgaaagcccggccaaagccgaaatggaattcagtggtgccgccgatcctcaaaaagcatcacgcaaagatagagcctatgggcgtcagccttgtggcattcgttagcagaattgggcggatgacaggccgctatggagtggaatcgtga

SEQ ID NO: 153449 - DNA, 657 bp, Enterobacter cloacae
gtgaaagaacgcggaatgattttcaacgctgagatggtgcgcgccattctcgacggccgcaaaacgcagacgcggcgcattatgaagaaacaacctgagccgagtaaggcgcgtgagggtgatttctatttcccatgcaacaagatgcaaagcatggtgcacgtgtctgacttcattccgggtaatagcatgattcctgatgcgcatgagttcttcagcaagtgctgtcctttcggagaagtcggcgatcgcatatgggtgcgggagacgtgggcgcgctataacatcgaccaggatagccatgatatggcttaccgcgctacaacgccggaagactggccggaggaaggccgctggcgtccatccatccacatgccgcgctgggccagccgcatcacgctggagattaccggcgtgcgagtggagcgcctccagtcaatcagtccgaacgatgcctcgcgtgaagggttgattaagctccctgccacaggccggtattgcttaaatcagggggatcagtatttcggcggtgcaagccatgatgcacgcgaagtattttcctggctttgggagtccatctacggagcagaaagctggcagtctaatccgtgggtgtgggttatcgaattcaagcgcatcgaaggcggtggcgcatga

SEQ ID NO: 153450 - DNA, 657 bp, Enterobacter cloacae
atggggatgctatcgtttgatataacttgtccgcactgtaaaaaagaaaatgctgtcttggaagcattcggtgaacatcatcgtcatgctaactatatttatgatgtagctttcttttgccggagttgcgcccaggcggggatagcggttgtgatgtcacctcgtatggatttgggtccatacaagcagtctaggcaacactctgaggtggatcttgtaattcctcgctcagaaagcccttacgaattgatggctgtttatccagagccttcagtgcttcttgcgcctgatgcgactccagttagagcggccgattctttcattgagtcaaaagataatcttcagagaggcaagtttgacactgccgttatgttatgcagaaaaaccattgatatagctaccagaactctattaggtgaggattcaaaaaaagagacgttggtacaaagaatttcaattctacactctaagggactaattactgagcagatgaaagactgggcgcacattgtgcgtgtagattccaacggagctgtgcactcagatgaagagttctccaaagcagaggctgaagaactgataggttttactgaagtcttcctaatttatgcttttcagctgccagcaatggtatcttccagaaaacaagagcactag

SEQ ID NO: 153451 - DNA, 168 bp, Enterobacter cloacae
atgtatacccagctcagtatccgtgtaccagagttcgccttcacaatcccaccctttcagttcgagataacgatgttcatcgaaccgataaacaacctgtgtgggcggttctttggcctggcatccggtcgccagcacaacggacgtcgctgcgagaacggtacataa

SEQ ID NO: 153452 - DNA, 3003 bp, Enterobacter cloacae
atggcagaattaactccattcgcgcttaaagatgcacctgctctgattgagtctgtataccctgcacagaaaatttcatttgaagctcaaaaagagcgtaaagctaatcttggacaaacacttacaggcctcggttcttactggaaaggcagaaaaccattaatccttgttcgttcggtggtactgggtactttattgccccagttagataataccgaaaaagatctagaaattttcgaaatgctgatgggctttgatattgaaagtttggcaaagcgtgccttagttcaaaatgacattaaaccagcagaaatagctgctcgaattgagctccacaatccttgggattttttctctcataatataaaagtcaacgatttacgtttcaatgatttagacaccattcattttcccataaataccgatgctaatggtttaaaattacgctggcgccgagatattgaagaaagtgaaaaactgaggatttatcgctactatcttgaatctattaataattatgagaaaaaagccgctctttgtaaaaggccggaggaggtcgatcaaaattggctctatgcacacgtttggccaaaaattaatcggtattacaaagcatttggtgttaatgctgggtctcatcaagaactcgttgaacaatttggtctacttcgctatgggcatcgtccaaaagttgccgatacatttagcggcggtggttcaattccgtttgaagcagcaaggcttggttgtgatatatacgcctctgatctaaatccagtggcactcatgttgacatggggtgctatgaatgtgattggagcatcatcagaacgcaaaaaagaaattgtagctacacaaaagatggtagcacacattgttgatcaagaaattactgctttaggtattgagcatgatcaatatggcaatcgcgcgaaatctttcctatattgtttggaaacaatatgtccggaaaccggctggatggtgcctatgtcaccgagttgggtcatctcgaaattaaaaaatgtcatagcaaagttggttccgaattacaaaaataagtgctttgatatcgaaataattacgaatgctagtactgccgaaatgaaagaggcagataaaggtaccgtacgtgatggggccttggtatacgagctggatggtaaaacttatcgtactccaatcaagactctgagaggcgattataaagatattgatggaagtaataaaaatagacttcgtttatgggaaaaggaagactttgctccaagagcaggcgatatatttcaagagagactttatgcaatccattggataactcgggaaactctaggtcaaagtcgccaagaaacatttttcacaggagttactgatgctgatgcggaaagagaggccttagttaatgatattgttagaaaaaatattagtaattggcagcgagatggcattattcctgatatgcagattgaggatggagaagaaacgactagattaaaacgtgaaagggggtggtcttactggcaccatctttttaatggtcgtcagcttttgatgtatgctttatatttcaagcactccactcctgaggattatatttttaacgcaaaatctttggactggaatgcgcgtatagccaactggatgaaccattgggaaaaaaccaataatgtattttataaccaagcactgaatactttttataactatggaacccgttgttttactagtcatgaggctggcagatcctttggcttcgcaaatgctcctattcatgatgtaacagttaaaattaaaaatcatgaagcatctgcattggctgagcagaatgatatatatattaccgatccgccatatgctgatgcagttcattatcacgaaattacagagtattttattgcttggttacgtaaaaaccctccaaaaccatttaatgaatggacttgggattctcgtcgagccttagctatcaaggggacgggagatgactttcgtaaaggcatggttagcgcttataaagcgatggctgagcacatgcccgaaaacggtatgcaatgtgttatgttcactcaccaagataccggtgtttggtcggatatgattggtattttctgggcctcagggttacaggtaatcggtgcatggtatattgccactgaaacgagcactgagcttaaaaaaggtggttatgtacaaggaacggtcattctgatgctacgtaagcgcccagcaggtgaaaatgtgggctttaaacaacgactattaccagctgttcgagcagaggtaaaacgtcagatcgaaaacatgctgcatttaaatgatgaagttaaagataagcttggtgagccagtctttaatgactcagatcttcaaatggcaggttatgccgctgcacttaaagtattgacatcttatacacacattggtggtgagaatgttacaaactttgtattacgtccacgcaataaaggagaagtgacggtcgttgatgaaatattgcagcaagcagccgaagctgctaatagtttattggttccagaaggtttatcttctgatacttggcaaaaaataaacggcatccagcgcttctatttgcgcatgatggatattgaaacgactggggcttccaaacttgacaattaccagaattttgcgaaagccttccgagtagaagactatggccgtgtaatgggtaatatttctgcaaataaggcacagttgaagcgagtgtgcgagtttgcttcacgtgagctgactgatagcactgaaatcggatcaacttggcttgggtccctgatcattggtttacaagaaatactcaatgaaaaagagcctcaagctgtaattagtcagttacaggaagagttgccagactttatagaggtccgacccctgttaatagacattctcaacttttttgagaaaaaagctcctgagaaatctactcgtgatgccgctgaggtattaggtgcgcgcttgaggaatatgcgggcgtttggtcagtga

SEQ ID NO: 153453 - DNA, 1212 bp, Enterobacter cloacae
atgggcctaaaggctgggcaaattttctggtaccgcgcgcagctggtggaccgcagcggaaacgaatcaggttatacagactttttgcgcgggcaggccagcatcgatgtatccgatatcaccgatgcaattctggaggacatgaaaggctccgatacgttcaaagacctgatcgagaacgcggtggacagcaatgcaaaaattgcaggcatggctgacgacattaaacaggccaacgacgaactggcgcaacaggcggaggaaatcgccaaaaacgcccaggatatcgggaaggttcagaccagcgttacaaacctgtcgagcacggtcggagatgtgtcttcttctctgagcaagcttgagcagacagtggcgacggccgataccgcgctgggccagcgcatcgataacatcagcgtgtctgtggacggtatgacgggaggagtgaagaactccgccatcgcgattattcagggcaatctggcgcaggtggccgcgcgcaaaacgctgtcggcatcggtcgccggtaacagcgcgcagctggaccgcattgatgaggtgatcgtcaacgagaaggaggcaacggcgcgttcgctgctgagtttgcagactgacgtgaacggcaacaaggcatccatcaacagcctgaaccagacgttctccgattaccagcaggccacggccacgcagataaacggcatcacggcgaccatcaacgggcatacgtcagccattaccactaacgcgcaggccattgcgaacgtcaacggcgacctgaaggcgatgtacagcatcaaggtcgggttatccagcaacggccagtactacgccgcagggatggggataggcgtggagaatacgccgtccggcatgcagtcgcaggttatcttcctggctgaccgcttcgccgttactcaccaggccggagcgaccgttacgcttccgttcgttattcagaacgggcaggtgttcatcagagacgcgctgataggtgatggcaccatcagcaacgccaagatgggtaactacatccagtccaataactatgtggctggctcagtcgggtggaggctggataagggcggtacgtttgagaactacggttcgacagctggtgagggggcaatgaaacagacaaaccagacaatcagcgtgcgggactccaggaatgttttgagggtgcagatcgggagaatcacgggaacatggtaa

SEQ ID NO: 153454 - DNA, 444 bp, Enterobacter cloacae
atgtctgcactttatgaaaaatcgcagctgacgaagatccttatttcctccctgccagccaccaaagaaacgatggattccgcaaccttcctcgatctgagttgcaccatcaaagaaattcagttcaccggtgggcagaagcaggatatcgacgtaacaacgctttgctccaccgagcaggagaacatcaacggcctgccttctccgtcagaaatctctctgtccggaaacttctacaagaatccggcgcaggacgccttgcgtgaggcctatgacaacgatacgacctacgctttccaggttatcttcccgtccggcaagggctttaagttcctggctgaaatccgccagcacacatggtcttctggcaccaacggcgtggttgcggcaacgttctccctgcgcctgaagggtaagcctgaaaacatcgagcctggctcctga

SEQ ID NO: 153455 - DNA, 894 bp, Enterobacter cloacae
atggtgggcggacagccaaccggtaacccagtcaccacccggtttgtctgggaagggttccggctgttgcaggaggtgcacggggatgtgccgctgacctacgtctatagcgatcaggacagctacgatccgctggcacgtattgacggcgttgatgccccggagatcttctggttccactgccagcccaacggcacgccggagcggatgacggatatcgaagggcaggtacgctgggaaggggtgagcagcgcctggggcaagctgctgcgggaaagcgagacgcaggtatcaggatattctcagaacctgcgtatgcaggggcaatacctggatcgtgagacagggctgcactacaatctgttccggtattatgacccggactgcggaaggtttacgcagcaggacccgatagggctggcgggagggataaacctttaccagtatgcgccgaacgcgctggggtgggtggatccgtgggggttgagccgaaaatgtaaggatccttctaaagaagcgactcaatggcaaggccctcataataaagactataaaggaatcgatagttactcgaacagaacgcttaaaaaaggaacagtcctttatgcattacatccaaatggtgatcagttaccttcatataccgtaactcatcctacagttaggcaatataaaggtgattcattaggatatcatgaagcgttacaggtgaaacttaatccagatttcccattgcgaacaaaggttagggcatattatgtttctgaggatatatttgttgctagtggtcgtgctaatgcgaatccgcaatacggaaaaggtggagggatgcaattctatatacctgaagaagcacgtagtaaattaattcctggcaaggtgatagatatatga

SEQ ID NO: 153456 - DNA, 435 bp, Enterobacter cloacae
atggctaaagcaaaggtgatcatccatgacaccttcgcccactatctggacgcaagaaattttcctgacgggaacccgactgcgaatcccaacgaggaacgcaaacaggtttattacatcgaccgtaaatcaggatcagacgatgaaaccgtagagtttgagctttccagtccagccgatctgcgcgggcaactcattccgacccggcaaattcagccaatgtgcacgtggtgcatgcggggctggtacaaaaccgggaacggctgcacctacgccgggcaaaacggctggttcgataaagacggcaaccgtgtggacgatccttcacaggatgtttgctccggactgttgtcaacggggtgtaaacctcgtttcggagagaatgagcaactggattatggcgggttccccggcgcttcacttctgagaggataa

SEQ ID NO: 153457 - DNA, 1338 bp, Enterobacter cloacae
gtggcaaaaacacttttacgcagcggtaatctggatgattttcaggccgttggcggcggcggacaggccgtttttgaatcagcgctgcaaatccgcgaagcgcttcggttgcgcaaacagcaggctatcgttgattgcctggccatcccccaggtcaacgacggcggcgatcgcgttgactggtactccccggttgagggaaccgtctccagctggaaggcggcggatgaagatgatcgttatcgcgccctgcgctatctggaaaacacgctcgccagcgtggagtcgctgagtaaaaaatgccttcagtcaccgaaaacggcgcagcaactgtttggctctctgctctcaaaagcctttcagtatcccggtgaaaactttgttttcctggtggatggcaagccggtgatctgcttctggggtttcgtcaaccttaacgaaaacgcgcgcgatgacgtgctggactgcctgcgcgaatcgttggtcactgaacctgagccagtggtgattaacgagcctgaacctgaaccggagccagaaccggccccggtggtgacctttgagcaggccgacgcgccgcttatcacgcctgtgactacagtccgtatcaccgacgatgaactgtatacgccagagccggtgcgcatgaacgccgcgccgccagagcccgcaccggcggccatacagaaaaaacgtcgctcccccctgtggttgctgccggttgccgccgtcattattgcagccatcgccaccccgctgctctggccaaaacaggccccaatcgcagcgcctgttgccacaccagcgccagtacccgtcgccattgctccggcccccataaagtcggttgagccgcttgaactgaaactcccgctgcaccaggccgaagtggtagagccgaaggtgaaaacgcctgccccggcagccgaaccggtggtcattaccgcgataccgaaagatgcgatggtgatggaggcaaaccaggtcaaagcggggttaacgcgcttcctgaacggcacctggcgcgcgtttctcgatgtgcaggatccgctcaccggcaaaccgccgtcgctgcgctaccagatccagaacaataaaggtttcgcccgggtcgtgcatggcgacaacattgtctgccgggtagacgtcttttccggattacacagcaacggcgagctgttgatcaaaacgcgcggaaacgcgcgttgcaccgacggttcacgctatccgatgccggaagtgacctgtaaggcaggtgccagcgatgtggcggaatgcaccgcacgttacgatgccaacaccgtcgttcctctgacgttcaagaaagcaggtgtctga

SEQ ID NO: 153458 - DNA, 783 bp, Enterobacter cloacae
atgacaaatgggcaacaagcaaaagtgtctgttattatgccgacatttaattcattgagaaccttaaaagagtctatttcctcagttatgaatcaaacctacgccaattgggagttacttataactgatgattgttcaactgatggctcattcgaatatgcattgtgcatggcgaataaagataaaaggataagggtttttaaaaattctgtaaatagtggcgctggggtatcaagaaacaaaagtattgaagaggctacagggaaatatatagcctttttagatagtgatgatttatggcatcccgaaaaacttgcaaagcaaatttcatttatggaagtcaacagtgtggcattaagctacacttattatcagaagattagtgtagagggtgagttaggtgcgattataacctcaccaagtaatataaactataagcaactacttaaatctaatgtcattggttgccttaccgccatatatgatcaatcaattttgggtaaaatatacatgcctaaaataagaaagcggcaagatatggcgctttggttaaaaattttgacgaagatagatgaggctaaatgtttccctgaaatattggcgtattatcgcgaagggcatgaaagtttgtcatctaataagttcaaggttgttttttcacagtggcatttttatagaaattacttgaaattcggttattgtaagtccttttattacttcacgttttatatgtttatggctttccgtaaacataatataaacagtgtggttgttaataaatag

SEQ ID NO: 153459 - DNA, 864 bp, Enterobacter cloacae
atgcattctttaataaaaaaaactgactttcttctggaatgtctttatgcaacaatcaagttttatcttttagctaaattccaaccgaaaaaaatttataatagtgtaagtgaagattctaattatattatttcattgacttcataccataagcgcttcgacacccttttcttaacccttgaatctttgttgcgtcaatcatacaaacctaaagctatctatctttggttatcatcggatgatattaaaaaatacaaagggacacctttttatttagacgattataaaaaaagaggggttgttgtaaatgtattacatgaaaatctaaaatcatataagaaactttgttatattgaaaatgttttgcgtgatgctaaaattgatttcgtattaactgctgatgatgacattatgtatcctgcaaactgggctaagaaattgatcagtgttagtgagttacataaagcagtttcttgttttagggggcatttcttaaaatataatgggaaaacttttgattataacaacagtataaatgatcattatttaagtaatgaacctagctttagattgttacctacaggatgctccgggatttgttatccaagaaattcaataagtaacctagtttctgataaaagatttatcaaatatgctaatgatgctgatgacgtttggttcaagggaatgaccctcttacaggggtttaagtccgttcgagttaatgaggtcaataaacatttcccattgattttatctagcatgagcgatactttatactccaaaaatgtcaacaaaagcgaaaatgaacaaaagctaatacttacattcactgagctcaaattattggacgtatttaaatga

SEQ ID NO: 153460 - DNA, 567 bp, Enterobacter cloacae
gtggtctcctcgttcgcctataacgccgtagcctttggcctgccggtgatcatctccagcttctttgtgcagtcgatgctgaccaccattctgatctcgctggcgcttaacctgctgttcgcatttgtcggcgggctgctggcggtgcgctatgttccgcgcttcggcgcatggcggatgtcactggcgggttatgcgtgccagcttgcggcactgctcggcctggcgctgattggccgccctgacggggctacggaaggcgtggtcgccgtcgcgatgctggcgctgttcctgtttggtcagggttttggtccaggtgcgcataccatgacgtttgcctccctgagctacccgacctcgctgcgcggcgtgggtgtggggcttaaccagacgctgatgcgcagcagttcaacgctgtcactgtttctgttcccgctgctggtcgcctcgctggataccgccgtgttctgggtgattgcgctggcgccgtttatcggtctggcgtcgctgctggcgatccgctgggagccgtcggggtatgatgtggatgcagaggattatcggtag

SEQ ID NO: 153461 - DNA, 1464 bp, Enterobacter cloacae
atgttagaaaaaataatcacaaaaaaggaagcaaaggttttcctgtttttgttcgtgatttctattatttacatactccctattttgaatgccgaccgatattacatagatgacttagggcgttcaatatgggggtattcaaagtggggtgtaaatggcaggccattagctgatattattatggcttccatttcctttgggtatccattattagacatctcaccacttccgcaaattgcaggcttggcttttatttgcgcttctctttctgtttcattatgcagaattgcgccagatttcggccaatcggcaatcattgcatcggcattgtgcttcataataaatccttttatgctggagaatctatcttacaagtatgatgcacttcctatgttgcttagcgcttcgctacttgtaatatcattctcgtttggaaggaagtggtggcatttgcctgtaccggcttttatggtcatttgctctctttctctatatcaggcaactcttacattatttgcctcaatggcagttattgagtttgttttttcagcacgtgatttcaggggtaagatattagaagccatgataagggtcttgcagttagtctcaggatacctattttacagtgcctatattggcccaaatttcatccaagggtcatacaatatatctcactcagaaaccattctttcacaaccagacatggtcagcaaagcaattgaaaactcaaccggtttcgttgatttgattgacgcatacctcaccggcatacccgattggataatgtttattacagcttccttgtctattgcaggattggttttcttattaatagaatcagtaagaaaggagtcagaaaaaaatatatataaaataatagtgacattcattatagctctggcgccggttgctctagttgcgttctcattcgcccacctttctctcttaaaatttccggtttacgccccgagggtgatgatatcttttggtggtgttatgcttattgtcggtctattgtgctgtaagagcatgataggaaggataggtctgctgccattatttgttttttcttttgtgttttgcattgcttacgccaacactatgaaatcacaaaaggaatttgatagctacatctctgcggaaataagttctgttatcaacaagcaaaataatgactataaattcatttcaattgcaggaaagatgccagcctctgagcaatataggcttgctgtaagcaaatttcctttaatgaaagaattagttccaatctacatggacaatgggtggggttggggttctgctctactggcacattacggagcggattataaatttaagcaaatcaatcaggagattaaatcaggcgtttgtaaaaaaacacctgtattcgaatcaactaaatacgacctttatgatcttgatgacatgattattgtaatgtttaagggttttaattgctaa

SEQ ID NO: 153462 - DNA, 1860 bp, Enterobacter cloacae
atgtggaacgatgttgaaactgcggatgatttactaaattttaaactgatagcaggaattgctacacgtcttgtcttcgagtccgccggagagccggtatccattgggatatctggcaaatggggaacggggaaatcatcccttgtcaaaatgattggggaaaaactccaaaatgatagttccaaagatgactatgttttcttggaattcaacgcatggctgtaccaaggatatgatgatgccaagttagcactgctacaatcggtatcggataaaatattatcaattgctaaagaaagagaaacctttattgataaagcagtttcttttgctaaaagaattaattatttcagagcattgaagattgcagcacctgcaatttctggagcgatctttggaagtgtagtagctggcccaattggcgggattttaggcgttgtaagtggtattgcttcaactggtaaaataaccgaagacgatgtagggaaactgaaggatgattactcaaaactggcacctcaattcaatggaatattaaacccagaacaatccctttcgttgccacgacaaatagaagaactgagaaccagtttaaccagcttgctaaaagaattaaatataacattggtcgtattggtagatgacctagatagatgtatgccaaatacagcaatatctactttagaagcaatgagattacttttatttgtaccccaaactgctttcataatagcggctgatgaaggaatgatccgcagtgctgttcgttcccatttttcgcaaactgatcttgatagcgatctagtcactaactacttcgataaactgatacaagttcctctaagggttccgcgactaagcactaatgatgtcaaagcctatgtagttattcttttgtcagaactggctgtccgccacaatattattccaaaagaagatgctgagtcagcgaaaaaggtaattttagagaaagcaaagaaatcttggcaagggttattgactaaaaaagagttaaacaaagcctttggcaagtactcatcagcacttgaaaaagaaataaccatcgccctcgaaatttccgaaatattatcaagcaccaaagaaatcgcaggaaatccacgcttgataaaaagatttctgaacaacttgattataagacaacaaatagctaaggaacaaggtttagcaatttcatttgaagctcttgtaaaaatgcaactatttgaaagatgcgccacaacaactgctttcgaatttcttgcgagggctgttactgagagtgaagatggaaagcctatttttattgaaaaattagaaagagaattgcaaagaggaaatccttatgtttctcccgacagcagctggagtaacccattcattgagtcatggttaggcattaaaccaagtctatcatcaattgatttaaggccattattatatctcagtagagaaaaattcatttctatttcaagtattgatgaaattagtgatgatgcaagagcgttgctagagtcaatactaatatccgatgatactttcgatatactttcaccacagctcttagaaattggcgagacggaggcggagaaaatattaataaaactcaaggtaaagtgtcgtttagaacaatggagctttgagtatttaaaaaaatgcctgtttgtagtatcaggatatagttctttaaacagcgagctcacatcgcttctgaaagaaataccagctgatatacgccctgcacctctaattcctttaatagcaaagtatccgtgggcgatggaaatattagagtcatgggagaaagaccctaatacaaataaaccagcattgaatgcaattaaattgaaagcaaggagataa

SEQ ID NO: 153463 - DNA, 864 bp, Enterobacter cloacae
atgggtacttcaacttctagttcaggctctggtgctaatgttccattcattcctccatgggaggacaagctacaaagcctcccgataggttcgggagaaataagctacccgaactcagatgacggggaggaagtagaaccacaggagtccccgtctgttgatcataatgaaagcattgatggaatagcaccacctaggagatatgccactgccaggagagaattacggcattatgctgagagctcagataaatctcacttcaggaaagcggttggaagtttctcaaaagtaggaaatggcggtgcaaagaaagcctcacgtaaaatgaggacatcaacacgcgcagcgactaatttgttatcattattactatctttgagagaaggtaataatgaatcagttaaaaactgggcgcagaaattattaaaaagtaacccctccgcatctgagattattgacgcaataatttcagaaactacaacatctgggggcactgtcgatgaggagtctataaaaaattcaatgtcatttgcattatcagagttaataaataaagataaagacatagatctttttcgcatgagcgacagcaatatttggaatttaatagagctatacctttccaatgaagttaaaaataaactaattcatgaaattgggcaattatttgagggatcaaaaaacataccatcaagctcaatgaaaaatataaacatgatgagaaaatatcttcagtcagaaatttcagagcaaatatcagaattaaaaaaagaagttcctaacccgagcaccaaacaatttcaaaaaataatggacaaagccctcgagaacacatttattgtttatgaaggagcattacaatga

SEQ ID NO: 153464 - DNA, 1284 bp, Enterobacter cloacae
atgaaagtagtatgcgcacccgaaaagcttttaccagaggttttagaagaaggtactgagtatttttctctttacactatcccctcgaacaaaaaaataggtcatatagctcaagactggaggataagactaaaaaaaatgggttttcatcctgatgttgtgacttgggattttgtgactatagcaatgtcagtttgtgccgctgacctggcatgtttaagaaaaaaaagcgctgatggctggacccgagagattgaattatcaataacggtttgcaacaaagacaattggattccacatcttgataagctacaagatgcatttcgttttttaacaggtgatttttgggaaataaaactaaatgatggcggcgaacatcctttagaaccctcaaaactgacaacttcctctgcggactgtatatcattactgtctggcggaatggatagtttaattggtgctattgatctaacggaaaatagtcgctcaccatgttttgtttcacaaatggcaaaaggcgattctaagaagcaaatagagttttcagaaacactaaatggtaaggtacgtcattaccaatggaaccacagaataaaagtcccccatgtaactgagcgttcaacccgtggccgctcattaatatttatttcgtacggtgttcttgctgcaacaattttaaaaactaaaaatccagttgagttgtacatccccgagaacggatttattagcctgaatattccacttaacgaaggtaggttcggaagccttagtacaaaaactactcaccccgtttttttagctatcattcaagatatttttaactcttctggaatgaatatttcaattaaacgtccttatcaaggatatacaaaaggtgagatgattagaaattgcaaaaaccttcctcttcttcttaaccacatcggtaacactacaagctgtggccgttttggctactataattatcaacattgcgggcggtgtgtcccctgcttagttcgccgagctgcattcctaagcgccggaatatcagatacaactaccaataaatactattttgatgatataggaaatcctaattcggaaagagaaaaaggagcaaatgatattggtgctgttgcccgtgcctgcttacttttcagagaaaagggaattaatgatgttatagggggagcgctcgctttctcaagtaaatctactgaggggcggaaattttattctgatgtagttgagaatgggctcaaagaacttgatgctcttctaacaaagcatggagtcctataa

SEQ ID NO: 153465 - DNA, 567 bp, Enterobacter cloacae
atgacaaccttaacgctggagcaggcttatgaagcctgccagaacaacaaatccgcctggctgaatctgagggcaaagctggccgcgaccgaagaggaataccgcgaacagcttcaggcggatactgaacaccccgccggtcgtcttcaggtactgcgcgacacaattgaagtcaggcagtgggaaattaacggcgcggccgggcgctatatacgctcgcatgaagccgtgcagcatatcagcatcagtgaccggcttgatgagttcatgcaggcgcacggcgatatgctggcctccattctggcaccggaactgatggatatcagcgggcagtcagaccggatgaaagagcgtgcggttgaccggtcactgatttatctgcgtgaagcccttctggtctggctgacgggaggaaaaaaaatagaatattgtgcacaggacagtgcaattttaacggccatcggattcaggcctgacgcggcttcgcgggtggataatcaggtaaaatattcacccgcaaaaaacatgatttttgcccgccgtcgtgcagaactggccgcacagtag

SEQ ID NO: 153466 - DNA, 231 bp, Enterobacter cloacae
atgatgcactgtccgttctgcaaaagtccggcgcacacacgcagcagccgatatttgtcggaaaaggtgaaacagagttattaccagtgcacgaatattgtctgttcggcttctttccgggcgatgacggcagtggacaaaatcatacagtcaccggcactggccgacctgagagatgacgaatttatcgtgggcgagtccggtaaaattaaaaaacaacgttttcattaa

SEQ ID NO: 153467 - DNA, 738 bp, Enterobacter cloacae
atgactgacaccacccttcctgaatacctgaaacctgcgtttaaccgtcttgataaggcaaaagccgtccacactgaaaatgcccgcaatctggatgaggtcaccacggccatcacccgtactgcggagcaaaaagcagggctggagcaggagaacggcattgatactggcgaatggcgcaatgcctttcgcgccgccggtgcagtgctgacggatgaactcagaaaccgtcacctgatgcgcgttgcttcccgtgagctggcacaggaatgtgacgcgatggcagaagtactgagttttgaacgcgataaactggaagcggcctgtagcgtttcggcacgggactaccgccaggagcattacgacatcctgagaaaatatgcctccggtgagcttgataaggcactcagggaagcctgtgggccgatcatccgggcgatgaagctgaaaatgctgtcacgcagtggtgagcctgaaagggaagcggaagccgcactggggtatgtggagccggagaaggaaatcatgcaggaggtcgtgtcatggcttatggatgcagccacgaaacatcacattcgcctcagtgatgaacccgtactttatcgcgccgggctgtcggccgaaacactcccgcacatggattataagacagcctcaacgcctgcacgccgcacccgattctataacgagctgcgtgaacgtgaggccgaccttaaagcgcgtggcctgctgccatga

SEQ ID NO: 153468 - DNA, 1260 bp, Enterobacter cloacae
atggctatcacagacgtagcagctcgcacagcaaagccccgcgaaaaagaatacaaactcacagactcccacggcttatatctcttagttaaaccaactggttctaaacgctggtatctgaagtaccgatttgaaggtaaagaaagcagggttgctttgggtgcttatcctcttgtatccctcgcaaaagcgcgtgaaaaacgtgatgagatacgcctcttgttagctgaagggattagccctaatgcaaaaaaagaagaggtgagagagcaggagcaagcaacgttaaatacttttgagaaagtggcaaaagactggcactcgaacaataagcgttggtctagcggtcatgctgaaagagtatggcgagatttagagcgcaatattcttccaactatcggcgctagaaacattgcagatttatctactcgagatctcttgcttccactgcgtgaagtagaaatgagcggtcgcttggatgttgcttctcgtttacagcaacgtatcacaggtattatgcgctacgccgtacaaagtggcctcattgaccgaaatccagcacaggatctcgctggagctattgcatcaagaaaagcgactcacagaccggctttacctcttgagaaactacctgattttctccaaaagattgaatgccataaaggccgtttgctaacacgtttggctcttcaactatgcctcaatgtttttatccgttctagcgagttacgttttgcacggtggaaagagattgatctcaagaaagcactttggactattcctgctgagcgagaggctattgaaggtgtgaaacattcccaccgtgggtcgaaaatgagaacaactcatctagtaccattatctcatcaggcgatagccttactcaaagaaatcagaatgttaagtggtcatagtgatctagttttccctggagatcatcatccaactaaacccatgagtgaaaacaccatcaataacgctttacgtgggatgggttatgacaccaaaaccgaagtatgtggacatggtttccgtgcgatggcgtgtagtgcgttagttgagtcagggctatggtctcgtgacgcggtggaaaggcaaatgagccatcaggaaagaagcggtgttcgggctgcgtacattcataaagcagaacatttggaagagcggagattgatggtgcaatggtgggctgattatttagatgccaatgcaaacgcgcatataacaccatttgagtttgctaagcggtatcagccataa

SEQ ID NO: 153469 - DNA, 675 bp, Enterobacter cloacae
atgccatcaaatagcatcccccattacctctataagcgtaaccacacctggtggttcaggaagcgtttcgtatctgacggcaatgccatcgaatacagactgagcctgcaaacagcaagctttcagcgtgctcgtcttcttgcccttcgtttacagacactttgccaacagatggttgcttctttgggggcccccaagaaactgaagaatggcgtgatggaaaaatcagcacaagagcaaatcagagcaaaacttcgagcaaaaattgccgaatggaccgccgaggaaacagaacattggttctgcggctctgcacgtaatgaaggtgatctgaacgattatcttgagacattagatatggctgtctctgatttgaaagaacgcatcgcttacgatgataaaccatctctgcaccgggccgaagcaagtacagttctggacgaactaccacacctcaaagctactctcagtgaatacgattaccaggtcattgctcgcatggtggcacaagccaaggtcaaatccttgcaggataccagagcaattattttgggcggtatcctcatattcagtaacggcaatgtcagagccaaaattcttcctaaagtgcagaacaacttaatccagttcttcctgtgggataagggcaactggcatccttgtagttataagtag

SEQ ID NO: 153470 - DNA, 903 bp, Enterobacter cloacae
atgctactaccaatacgagttgataaacggtttttgaacttatttaagactgtacaaatagacacttgcccacagcaatcaacgttaaacttgcatatattgaatattgaaagcaatcaattcatatattcaaagttggttgaagaacttcgggaacttattattagttatgtacattctaataggcgaattgaagagtttaaacaaaactatcctgcttatagtcctaagccattctttgaagcaatacaaaaattccgaagttacacttcaaatgaaggtgaattgggtgagttgctcttatatgcctttcttgaggcaggattaaatgctcccaaactactttccaaaatggaattgaaaacggattcaaatgactatattaaaggttctgatggtgtacatttattagaaacagacgatagtttccagttaatttttggtgagtctaagttgtatgccgatctgttagacggcgctcgagaggcatttgattctatagttgacttcaaggctaatggaatggggtttgaaagagggttaatagatacacatgttataaatgaaatggtttcagaagctggatatgaaaagataaaagaagttttgctaccctctggtaataatggaccggatctcgacctgtcatttggtatatttctcggattcgaactaccagttgataattccatcttagcattgaagaccaaagaattcagagagtgggtaaatgaatctgttaaagagcatgcttcacgtgttgttaaaactatacaaaaaaagattatcaatcatggattatttgggcatgagtttcacatatatatagtcccttttacgaatatagatataacgcgtaagcagctaattaaagatatgctaactatagagggggattcatga

SEQ ID NO: 153471 - DNA, 2220 bp, Enterobacter cloacae
atgagtgaattaagctctaataatattcatttagcggctcgccttgcagaagatgcttttgcgagcccttatttcaaagaaatatataagtatataagtgaattatatgacaagtttttatttgatcgtggagcgataaaaaattttgagctgtctgaaaccaataagatctcgcatgctttacgttttgccgatattttgtctcactccgatgttgaagtatatagaactcgtgcatttgaaataataagcaaaatagcagcattcaaaaatgatgatccatacttcaaatttataggttcagcggttataaatagaattggggtatacgcagctgaaaaattaatatctgatggggtctcattacccttagatcgagagatagactccataataaaaaaatcggtacaaaaaacagatgacgatgggatatatttcacggacaggcaatatgagttgtatcaattattgaaaaatagttcaactattagctttgctggcccaacctcaatggggaaatcatttgttattaacgcctatattaaagagattacgtcgaaatataatgacaaaaatatagtgttgatcgtacctacaagagcattaataagccaaaatgcccttaagttaaaaaatgaaatggcgaattcggcatgctctaacagctatacgatagttaccacatcatatatgatcgatagcgaggttgatagcggttatatttttatattaacacctgaaagattggttagtcttattagtactatccctgaactaaagattgattatttatttgtggatgaggctcaaaaacttacaactaagaatgactcaaggagtcttgttacgtattcggcaatagagcagactcttaataataatccgggcgcaaagctattcttctcatcgcctaacctatcaaatcctgatgtgttcaattctctctttaatcgttctaaatcaaatgtttatagaagtacagaaggtgccactgcacaaaatatgtattttattgatttattaaatgacagttttagtgttgtaaacacacacgatagaaaccttgaaaaaattgaaagggattttaacaagtataaaagtgcgaatgatttaatttataaattaaatcacaaaaaaagtaagatcatatactgtggtggtgttgaaagtacccttgttagaaccagggattttatcaaatatcttaaaataaataacagagctataaagccaaaaaatatagagatatcagcacaaattaaggagtttgttcatgataattatgaacttgctgaagctattaattacggtgttgcctttcacttcggtaatttgccacaatcgattagagatctaattgaacataacttcaaaataggaaatatagaatatctcttttgtacgtcaacccttctcgaaggtgtgaacttacctgcgagatctgttttcattctaactcataaaaaaggccttagccctttagagcctgttgatttttggaatttggcaggcagggctggtcgattagctatggaattatcaggagatattttttgtattagggatgaagttaagatatgggataataaagcaatcaataacattctattatcagatagaaatgatataacattgacgccaagtttttatattgaagacaaaaaaagattaaatgagttgcatgaaataatagcaacgggagaaacaggaaagattaagaattctgaatttctgcgaacattaggtgatatgattagaattgatacgatgcgggatgagaaacatcttccgttaattaattattttcagcacagtggtaagccagaaatcgtattaagtgcaaaaaatagcactaaagatattaatctaccacttaatatacttctggcaaatagtcatattcctgttgactcacagtataatgcgtttaataaaataaaatcactcagtgttaatgaaataaaattgtcatggcagccctcatatgatgaaattaaatcgaagctgagcttgatttttgagctttatcagatagataagttcgcaactggtcaaaatcgtctatattctaattcgatcccttattacgcacttatactttctcaatggatgtatggtaatagccttcaagagataatatcaggggcaataatatacaagaaaaacaaaatcatttatataaagaatgcaccaattccttttgatagcaataattcatga

SEQ ID NO: 153472 - DNA, 594 bp, Enterobacter cloacae
atgaacgtgaatatcaagccaatttttggcaattgggatttaggatatgcaatggataagcatatgattaaaagtacctatttgggtgataatgaatatggacggcctcagtttcataacgaacgtactgaagttggtgaggcactttatcagctgaaatatcagcatgactggaaccaagttgaaccactcgcgcagtgtctttttgaaaaagcacttcctctttttaaggatattcagctaatcattccgatgcctgcctctaatccaagagccagacagccagtcacagcaattgctgaagttcttgcaagtaaaatgggatttgggatgaattgttttgacggattaatcctgaaaaaagccggtggtccctctctcaaaaatctgagcaccagagcagaaaaacttgaagctgtagcgaatatgttttcatatcaagagcttatatcttctgaagggacttacaacgcacttatcattgatgacctctatcacacgggtgtatcgatggaggcggcggttgcggcgcttcgtggatatagtaaaatagataaaatctatgtcgcggccctgacttggaaaccagaatga

SEQ ID NO: 153473 - DNA, 555 bp, Enterobacter cloacae
atgaaaaccgtttttgtagctggatcgataaccattaaaaaattggcccctcaaatcgttgagaggttgaagaaaatcgtcgataagaatttcaacgttgtggtcggtgacgcaacaggcgttgactcatccgtgcagcaggagttgttacagttgggatgtcgtgctgctacggtattcagtagttctataagaccacgcaataacctcggctcgtggcccgtcaacgtcgttcatacagatcatacacctggcacgcgcgcatttttcaccgcaaaagatattaaaatggcggaagccgctgattatggtctcatggtgtgggataccaaaagccctggcacattaagtaatgttattgaacttttatcccgtaaaaagtattcagtagtatttattaataagtctaaggagtttattgttatcaaagaaccaaaagatgtagacaagttgataagctgtatgtctgcttccgcgctcgaaaaagttgaagaaaaaataaaactttctgaaagattggcgcgactaaaaaatgagcagatagcacttgtttaa

SEQ ID NO: 153474 - DNA, 222 bp, Enterobacter cloacae
atggcgcaggaagccagacgtgaagagtatcagattgaattgcgtaatgctgaccattcagctaaattagcgttagatgctcaggaattaattgtctctgacctgactgagttgtattcaacatttttaatgacaaccgtttccgagcgatttaccccagcagccatgggtatatgggtatttacggataatcctgtcacgcggcttttattaattgtataa

SEQ ID NO: 153475 - DNA, 558 bp, Enterobacter cloacae
atgacaactgtgctcggatatgtgcgagtttccaccagcgaccaaaacgttgaaaaccagaagcagcagatagccgatgctgcttatagcgttactcgctggttcagtgatgaagcggtgagtggtgcaatcaaggcggaagagcgtccagggtttggtgaactactcaattatgtgcgagaaggcgatacgctgattgtgattgctatagaccgcctggggcgtaacacgattgacgttctttccaccgtggaaaaattgcagacgaaaggcgtgaaagttgtcagcttgcgtgaaggtttcgacctgtcaacgccagttggtaaagcgatgctcactatgatggcagggcttgccagcctggaaaaagatctgatcgcagagcgtagaacagcaggtatcaagcgtgctcagtctgaaggaaaacattgcggcagacctataaaagcaaccgttgaacaggtgcgagaattgttagcgcaaggtttaccgccagcagtggtacaacacaggttaggtatcagcaaagccaccttctatcgactaaagactttctga

SEQ ID NO: 153476 - DNA, 861 bp, Enterobacter cloacae
atggctgagaagtattacagcattctgacaaacaggggcaaggagctggaagcgcaatcttccgcaaccgggaagcccgtcattatcaaagattttgtcgtgggggacggaaacgggcaggccgttagaccggatccggcgcagacgaagctggtgcgtgaggtatatcgaagcgcaatttctgcactacaggtctctccggatcaggcgaaccagttttttgctcagctagtcctgccggttgccgttggcggattcgtagtcagggaagttggcctgctgacagatgctggcgaactgtattctgttgcgaactgtgctgccattgaaaagcctgaaaacggtgtcagcgtcagtttgcaattccgacttgcagtatcagagacggcggcagttgaattaaaagtggctactggcgatggtcttttcctgcggatcgatcgaaatcttggggagatcgctgagcatggtccaggggcacaaaaaagcgcgcgagaagcgatagacgtcgttgatgcgaccatatcccgtaaggggctggtgcagctcagtaatgctaccgacagtacgtcggaagggatggcggctacaccaaaggcagttaaggcagcatacgatcttgcggacggtaaatacacggcacaggatgctaccacagcaagaaaaggtatcgtccagctcagtagtgcaaccgacagcacttcggaggtgatggcggccacgccaaaagctgttaaggcagtaaatgatgaattggcgaaagtcaaaaatagtctagggactgcctccgggaagaatgttgtcacctctcagaccgatactacggctggcagagtgttgactgttggatatgggtggtag

SEQ ID NO: 153477 - DNA, 219 bp, Enterobacter cloacae
atgggcgagatgggtgttgttgaagcggagcagactgaaagcggcggactgactatccgcttgtttaaacagaaatacatgctgagcgatggcgtggagatcgtcaaaacgaaaggggaaccgatggacgtgccggtgaacagttggatcgatgttcgcctggatatgccagatgattctgcctttaatcagcggataaatcaggaacttcagccatag

SEQ ID NO: 153478 - DNA, 1290 bp, Enterobacter cloacae
  misc_feature (1217)..(1226): n is a, c, g, or t
atgaagtattataaaaataaaaaaaatagaattttgctaagtaacattttttcgttagccagtttgcaggcattgaattatttattgcctatattaatactgcctttccttgtgcgatcaattgggattgggaatataggtgtcatttcaacagcctttgccatatcaatttattttcaaatgttcggtgagtatggattcaatctaacagctacgaaagaagttgcaaggcaaagggacgacatcacctatattaataagttatttagtgcggtgttatatataaaaataattttccttttgatagggtttctgatatatatatgtgttgttgaattgatacctgaatattcacattcatttttgatattcctttttacgtatcttattacaataggacaaactctatttcctacttggttgtttcaaggttttgaaaagatgaagttcatcactataattaatggattaactaaaatcagtggtgcagttataactatttttattgtaaaaaccccaagcgatagttttcttgtacctttaatcaatggaatatttgcaattattggtactttattagcattcatcgtagcatatcaacgtctcaatgttcgagtgaattcttttaatactaaagttatcagtattttattaaaagatggatggtatatttttcaaagcaaaatcttcagcacattatataaaaatagcaacataattatattgggctttttcgccaatccagcaactgttgggctttattcgctattggaaagagtaatacgcagtgtccaaatgatacaaaatgtattgggggatgctcttttcccatatgtaaatagaaatgttaaaagagatgaaatcttaccattgcttaaaaaatataatactaaagctgttcttttttatatttcattaactttctgtttgattgtgttctctccattaatctcatattttttattgaatgctttcaattctagttttatcttgatgttatgcatattttcattagtccttttttttggagggctaagttattactacggtgtgcttgggttaatatcggtaggaaaaactaaaagcttttcaagtgctgtgcttgccactggggttgttaatatttttctttgcataattatgagtaaatattttgatggcatgggcgcagtagtcacttcggtaataagtgagttgatactgttttgtattatagnnnnnnnnnntattatagttttcgttattagtaggattgaattaaagaaaagaaatgaaaaagaaaattattag

SEQ ID NO: 153479 - DNA, 156 bp, Enterobacter cloacae
atggaacttacaggattccaaatccataaaatttgtcttctgtcagatttattcattaccagaagagatgctattaaatcaatcctatcaattgaaaaatacaaagttgcggcatccaccactggtttagacgaacagcgatataaaatacaataa

SEQ ID NO: 153480 - DNA, 231 bp, Enterobacter cloacae
atgaccgtaatcgtcgaatgtattgagactaatggcgactggactgtcggccatcgttacgccggggaattggtctctggcggattcttggctctgaaagatgatgatgccgaagatgatttcgaatggaccgctgattctcggcaggaatatgaccgggaaacagatgagttcgagaccatctggtttttaccaggcatagaaggtgtttcgttcagggagattgagtga

SEQ ID NO: 153481 - DNA, 345 bp, Enterobacter cloacae
atggagtatgtggactactggaaggagtgtataggtatcgcagctgatgagtgcgacctggaacttactgatgagcagttagcttgcctggccgaatccgcaaaaggcggacacgaaaactatggaatggcattttactctcccccagattcggatcgatacaacgatatcgacagagagtgggagaaaaaatacaaagcacttcaggctgaatttgatgcatatcgcggaaatgcggagtcggctgttaagcaagctcttcgtcagcatcgtgacgacaacgtcagcataggaagtcatggagaggttcttcttcatggcggaagaacagtacgaattcagtag

SEQ ID NO: 153482 - DNA, 936 bp, Enterobacter cloacae
atgagcacacttaccaaacaatggctacagcagaaaattgccgacatggaagccacccgcgatgaaatcccgttcggcctggatgaagacgacagtaatacgctggctgccctgcgtatcgcgctggcatcgctcgaagcggagccggtttaccaggtattctctttcaaaagatggcgtgacgtaagtgaagaagtctttgagtcggaaagtaaagatgggtgtcaagtcagagttttatacaccgccccgccagcgccggtatctgtgcctgatgaacgctatcagcacctgagtgagctttatcacgcgcaggagaagcggctgttcaagctcgcacagcgaatcaagggcccgtcattcgataaatacgcatactcaccgtcacaggctatcgatgttctggagtcggcaatttttggtgagtgcgaagatgactgccgcgccgccatgcttcagggtgccgatgtatccctcacacatgagggtaagaaccatcacgaggataagctcggtatggttaaccatcttggtgatgtcaccgaaaaggtagaacctgtaacacagattgagccagtagcagacctgtacggcttaacctcaccaactggcggcgaaacatcattcactttcgacgctgttgaagctcgtgatttcattgatggcggttggtcatgtcaggagtacgtggagcttgaacgctttcaggaggctgttagcggcaactctccggtgattcaggatggttgggtgatggtaccggttgagccgacagaagacatgatcgtcaatggtttcgagtctgagccagatgagagctttagcgatgagaaggagtgggaagcatacgaagcaatgagcggatgccagcaagcagcgcaccgggctaagttgtgctgggcggcaatgattgcagcggcgccgaagttagagtga

SEQ ID NO: 153483 - DNA, 171 bp, Enterobacter cloacae
atggctagccctctcgctcgcgtcatcacaaacgaaatcttccgcgttccggtgcgccgcaagcgtaagccagcgattaagccgtccgacattccgaccctgaaagattacaccgcccgcctggtggatcagaaatggctgcgtctcgcagcgaggaggcgccatgtgtaa

SEQ ID NO: 153484 - DNA, 927 bp, Enterobacter cloacae
atggcgacgaagaagacgaagccaccgattctgccgcgtaactatcaggatccgaccggggccgatgcgctggaacgccgggcaatgaaagacttcgccaggcggatgaataagattggcaaagcgtacaaatcagcactcgacaaaataccttcctccctcgcagtaaacgccagatacgaataccagctaaacccaacgctactctccatcatcctgaacgatgccagttacctggttgatcaggtgctgcttgaaggtggcgattacgacctgtggttttacgagtacatcgatctggcatcagagaaaggtaccgggcagtcgttttacaacctcagccagcaatcaccggcttatgccgctgggcgtgaatctctcgcctctatcctcgcaagtgacccatatcagcaacgaatggcgctggtgcatgcgcgtgtgtttgaggaaatgaaggggctgacagctgacgttaagcgcgacatggcgcgcgtactgactgatggggtggggcgtgggctcaatccgctggatattgcccgcaacctgacggaccagaccggcatcgagaaacgccgggctaaccgtatagcgcgcactgaagtgactaccgcgctgcgccgggctaagtgggatgaagaccaggaggcgaatgacctcttcggcctgaaaacgctgctggttcacatctcggcactgtcaccgacaacccgacatacccacgcagtgcgccatgcccacctctacaccaacgaagaggtgcgtgactggtacagcaaagatggcaactccatcaactgcaaatgcagccagcagtcggtgctggtggatgcggacggtaagccggaatacccagacaccatcacgaaactcaaacaggaatataaatcgatgcaggcgcgcggttacgcctgggcggagaaataa

SEQ ID NO: 153485 - DNA, 756 bp, Enterobacter cloacae
atgactaatatcattcctatgaaatacgatgatcgctctttcccgttcacatctgactgctggttcaatgccacggtggctgcgaagcaccacggcaagcttccgaaggactggctgaagactgaagcgacgaaaatctacatcgccgaattggctgaggaacttggtatttcaggctctggcgtaaaagaggatttttctcctcttttagtcagagtagaaaaagggcgaaacggcgggacctggctccaccctgagttggtggttgagttcgctcgttggttgtctgttaaattcgcccgggcctgtgatcgccatatcaaaaatctgctgctgagtaagaactttcaactcactgaagatcagattgttagtcttatggtctgccagcaaccaacaacgtgggaaaaacgatttaaagaaccttattaccaggctctctcgaaaatgtcagggcttccatacttcggtcatgttggtggctgtccagcgcttttcggtcaaattacgtctcgctgggtctacgcggttgctttgcctgctttcgtttaccagcacgcaaaaattgctgcagcagatagtggcgagaaaattcatcagcatcttaagccggatgcgctggaaaaggttgagcagcaactggtagcagtaatgaatattgccaattgcagtatcgaccagaaggattttgaggctcgctgcatgtcggcattcccgatcaaaggacagatgaaacttttatatgcagcagcatga

SEQ ID NO: 153486 - DNA, 360 bp, Enterobacter cloacae
atgactttcggatgcgatttcggtcccgatgatggttattactcaggatatgttgaattctcatttcgcccatcaatgagacagctaactactgacgaccttaggattcttgatgaacatttctataaatggatcagtgatttatacttggatgatagttcggaaccccatccattggaatattgcaaggggagccttgcttgggagtatacccctcttgaatacaagggaacctatgagaaagtctccgtttggtttcgcgtgacagagccgcagggcgctgaatggctaataaatcatctgagacattttctggtggaaatttacccatcgtttcctcacattaaaaagcccacctga

SEQ ID NO: 153487 - DNA, 195 bp, Enterobacter cloacae
atgaatttcatcaatccgatttggctcgtcaacaaggtctatcccaccattattgacgccaccatccgcatggatttctttacgataagggaatcgagtaaagtgatcgtttatttttgctttttccattgggccctttccgttagttgtatgcctttgaaggctaacctggtggcggagtatcgcaaagcttga

SEQ ID NO: 153488 - DNA, 1089 bp, Enterobacter cloacae
atgctcagccagcttaacctgcgttttcataaaaagctgatcgaggcgctgaaagtgcgcgccggtcgcgaaaatacttcggtcaacgccctggccgaacgcttcctcgatgacggactgaaaacggtcgcgcccggcgacgggtattttcagctcattgccgatccggaggccacggtccggcagctgtaccggcatatcattctgggccagacctttggcacgtcagcgctctcccgcgacgaactgcgctttgtcctggttcacgctagggaggccttcatgcgcgggcataacaggctggccacactcccggccctggacacgctgctggacatcaccggcaacctgctggcctggcaggtggagcacgatcgccctgtggacggtcactacctgaaggggattttccgcctggccgggaaaaactggacggaagagtttgacgacttccgggcagcgctgcgcccggtcgtggatcagatgtatgccgaacacctcctgcgtccgctcgagagcgactgttttggcctggcggaggtgccggacgcggtgctggcagaaatcttcaccctgccgcggctgaaagctgttttcccgctgatgctgcgtgggctggactggaacggggaaaaggccagagacctggcccaggagctgcgcccggtgatcccggccgtaacggaaaccattgaggccggtacgctgcgcctggagatccgcatcgacggccagcaccccggcgcgcgcccgggcgcctggtatgagacaccgcggctgcacctgctgatcaccggccaggacttcgtggtgccgtacggctgggaagcgttctccgaattgctgggcctgttcacgctgtacgcccgccatccggaagccctggcgcacggccaccagggcgagcgcgtgatgttttccccgcccggccacgtatcaaaagagggatttttcgggatagacggcctgcggatttttatgccggcggaggcctttgagacgctggtccgggagctcgccacgcggtgtcaagaaggcccgctggcggaggccctgaccgggctgcgctacctgtacggagatctgtaa

SEQ ID NO: 153489 - DNA, 138 bp, Enterobacter cloacae
atgctgccatgtgatttcaaggtggcgtctcagaagcgtctgtctgtggtgatcgtcctattttcggcaaaaatcaatcatatttatgaactggaatgcaataatccacaaatgacaataatcactccttatttctga

SEQ ID NO: 153490 - DNA, 909 bp, Enterobacter cloacae
atgattgaaaaaatatgtgaagtgattgatggggaatacatctgtgacattgatatcagtgtggaggaatggaaaattttgttaaaaaataaaaaagtttttgatgaaaaaagtattgctgcgttaaaaaaatggttcattgaaccaaatcattcttgcacatgtttcgatattggtaagaagtacggccttcacagcatgagtgctaatggtgttattaatggcttaggtggccgagttcaaaaagagcttggacgattcgaggtgaaaggcatcggtaatatagcggctggcacaaaatttattaccgtaatgaacagcaaagaaatcgacgtaaaaccaaaaagaaacttatggacaattcgcgaggaacttgttcaggcaataaaagaactggacttttttggtgaaacacaaagcaccaataccgaattttattctgatgatgagttgatcaatgctatagatgaaaatagtgaatttgaagatgctctgaaattcgaatatagcggaatagctaaacctaaaaaaaatgcgatagaagttaaaaatggcctcttgtatccaagaagtaaggcggtatcaaaaaatgcactgaacaaagctggctacaggtgtgaagtcgatggtgatcatccaacgttcagaaggcgaaattccaccttaaattacaccgagcctcaccacatcgtacctatgtctaagcaagatgattttgaagtttctcttgatgtggaagaaaatataatttccctgtgttgcaattgccataaaaaaattcatcttggtgaggggtttgaaggtatgctggagaaaatatatgcagagagaaaggaattattaaaaaaagtagatatcgatataacacttgaaaacttgatccttttttacaaaatggaaggtaagtga

SEQ ID NO: 153491 - DNA, 264 bp, Enterobacter cloacae
atgaatgatcccaagaccgtgcagcaggacgactttgcgccgttcgacgataccgcgaacgccgccgccgccctgcgtgaaaagctcgccgatgcgatgacgcccggcttccaggtcgagttcgacccggaagaagcggagaaggccggggccttccccgaggacgccttgagcgagcaggacgccgccgagagcgacattgacctggtggacgcgaccgtgcccgaggacacgacgaccgcggccgccaatgacgggaggtaa

SEQ ID NO: 153492 - DNA, 2214 bp, Enterobacter cloacae
atgcaatttgaacgccttgtaatcgctgaaaaaccggagctggcaaaagccatcgtcgagggcctgggcggcggcagccgcaaggacggctattacgaatgcggctccgaccgcgtgacctggtgctacggtcacatgctggccttgctagacccggaggactacgacgagcgctacgccaactggaacatggccgacctgcccatcgtccatattccctggcgcaagaaaccgtccggcgatgccggtgcgaaagctcagttcaagaccatcctcagcctgttgaagcaggcgaaaagcgtggttcacgccggcgacccggacgacgaaggccagcttctggtcgatgaaatcctggaatacgccaactgccgtctgccggtgcagcggctgcttatcaacgacaacaacgtgaagatcgtgcgccggcagctcgccgcgatgcgcgacaaccgcgagttcgccggcctgtccgctgcggccgaggcccgcagcgtcggcgaccagctatacggcttcaacatcacgcgcctgtacacgcttgcggcacgcgcgaagggctatcaggggctgttgagcgtggggcgcgtgcagactccgatcctgggccttgtcgtgcgccgttgccgcgagaacgcggcccaccagaaaacctactactacctggtgaacggccagttcgaggtcgagggcattcagttcccggcccgttaccaggtcgccgacggcgatccggtggacgagaaaggccgcctcagcaacaaggagcacgccgagggcatcgcggccgccgtgagcggccaacccgcccgcatcgtgtccgtgaccaccaaggcgaaggaagcggctgcgccgctgccctacaacctgctgaaactgcaaatggacgcctcgcgcaagttcggcttcaagccggaccaggtgaaggacattacgcaggccctgcgcgagaagcacaagctcatcacctacaaccgttccgactgcgaatacttgagcgaggaacagcacggcgatgcgccgggcgtgctggcggccatcgcacagacggcccccatgctggccgctgctgcgcagcgcgccaatccgacgatcaagagccgcgccttcaactcgtccaaggtttccgcgcaccacgcgatcatcccgaccgaaagcacggccgacctgtcgaagctcaccgatgccgagcagaagatttacctgctgatcgcgcgcgcctacgtcgcgcagttctggccgaagcatctgtatgaccagaccgacgtgcttgcccaggtcggcgatcatcgtttcggcgtgcgctcgaacgtcaccacgtcgccgggctggaagattctctacaagaacgacgccggcaacgaggacctggaaggcaatgccgacgacattgaacaggacctgcgcaagctgcgtgacggccaggccggcacctgcaccgatgcgaaggccgagcagcaggagacgaaaccgcagccgctgtacacgatggaatctctgctgtcggaccttacccgcgttgcgaaatacatccgcgatgaccgcctgcggaaaatcttgatcgaaaaggacaagggcaagcaaggcgagcacggcgggatcggcacgccggcaacgcgagactccatcatcgccacgcttttcgagcgcggctacctggtggagaagggcaagcacatcgtgtccacgccgaccggcgaagagctgtacgacgcactgcccgacacggccagattccccgacatgaccgcgctctggcatgagcagcagaaggccatccaggccggcgagcgcgacacgctgtcgttcgtcaacgagctgatggaatacatcggcgccgaggtcgccaacatcaaagacaacggcctcaacatgaagatcgacacgcacccttgcccgtcctgcggcaagccgctgcgacgcctcaagaagaaggacaagaacgaatacttttggggctgcaccggctttgccgacggctgcaagttcgcgtgcgacgacaagggcggcaagcccgtcccgcgcgaggccccgaaagtctccgagctgcacaagtgcatggcctgcggccacggcctttcccgtcggcctggcaagaagcgcggcatgttctggtgggggtgcagcaacttcccgacgtgcaagcagacataccccgacctgaaaggcaggccggactacagcaaaggccgtaacggcaccaaccaggagtga

SEQ ID NO: 153493 - DNA, 534 bp, Enterobacter cloacae
atgagccgcttccagcgcctcaccaagtacgtcgccatcggaggcggcgcggccttgttgctcgccggcgcggcctatctcgccggcgcgaaggtcaacaccaccaaaagcattccggtcggcctgtactggaaatcgaatgcgccggtggagaagggggcttacgtcatgttctgcccgccgcaagtcggcgtgttttcggacgccaaggagcggggctacatcgccggcggtttctgccccggcgactacggctacatgatgaagcgagttttagccgctaaaggcgacgaggttgccatcaccgacgccggcgtgcgcgtgaatggcgggctgctgcctcacagcgcgctcatcaaggccgatccatcaggacggccgctgcctcgttatcagtccgacagctacaccctggggaccgccgaggttctgcttatgtccgacgtaagcgacacgtctttcgacggccgctacttcgggcctgtcaatcgttcgcaaatcatcaccgtcatcaggccggttctgacctggtga

SEQ ID NO: 153494 - DNA, 1908 bp, Enterobacter cloacae
atgaagaaccgaaacaacgccgtggggccacagatacgggcgaaaaaaccgaaggccagcaagaccgttcccatcctcgccggcctgtcccttggggcaggcttgcagaccgcgacgcaatatttcgcccattccttccagtatcaggccggacttggctggaatatcaaccacgtctacacgccctggtcgatccttcaatgggccggcaagtggtacggccaatatcccgacgatttcatgcgcgcggccagcatgggtatggtcgtttcgaccgtgggcctgctgggcacggccgtcacgcagatggtcaaggcgaacaccggcaaggcgaacgactatctgcacggttcggcccgctgggccgacaagaaggacatacaggccgccggcctgctgccccggccgcgcaccgtcgtcgagctggtgtcaggcaaacacccgcccacttccagcggcgtctatgtgggcggctggcaggacaaggacggcaagttccactacctgcggcacaacggccccgagcacgtcttgacctacgcgccgacgcgctccggcaagggcgtcggcctggtcgttccgacgctgctttcctgggcgcacagcgccgtcatcaccgacctgaaaggcgagttgtgggcgctgaccgccggctggcggaagaagcatgcccgcaacaaggtcgtgcgctttgagccggcatccgcgcagggtagcgcgtgctggaacccgctcgatgaaatccgcttggggaccgagtacgaggttggcgacgtgcagaaccttgccaccctgatcgtcgatccggacggcaagggcctggaatcgcactggcagaaaaccagccaggcgctgcttgtcggcgtcatcctgcacgcgctctacaaggctaagaacgagggtacgccggccaccctgccgtcggtggacggcatgcttgccgacccgaaccgcgacgtgggcgagctttggatggaaatgaccacctacggccacgttgacgggcagaaccaccctgcggtcggctctgcggcccgcgacatgatggaccgcccggaggaagaatccggttccgtgctgtccaccgccaagtcctacctggccctgtaccgcgacccggttgtggcccgcaacgtcagcaagtccgacttccgcatcaagcaactgatgcaccacgacgacccggtaagcctgttcatcgtgacgcagcccaacgacaaggcccgtctgcggcctctggtgcgcgtcatggtcaacatgatcgtccggctgctggccgacaagatggacttcgagaacggccgtcctgtcgcgcactacaagcatcgtctgctgatgatgctcgacgagttccccagcctgggcaagctcgaaatcctgcaagagtcccttgccttcgtcgccggctacggcatcaagtgctacctcatctgccaggacattaaccagctcaagagccgcgaaaccggctacggccacgacgaaagcatcacgtcgaactgccacgtgcagaacgcctacccgccgaaccgcgtggagacggccgagcacctgtcaaaactgacaggcaccacgaccatcgtgaaggagcagatcacgacgagcggccgccgcacgtcggcgctgttgggcaacgtctcgcggaccttccaggaagtgcagcggccattgctgacccccgatgaatgcctgcgcatgccggggccgaagaagagcgccgacggcagcattgaagaggcgggcgacatggttgtgtacgtcgccggctatcccgcgatctacggcaagcagccgctctacttcaaagacccgatattccaggcccgcgcggccgtaccggctccgaaggtcagcgacaagctgatccagacggccaccgtcgaggaaggggaggggatcacgatatga

SEQ ID NO: 153495 - DNA, 2199 bp, Enterobacter cloacae
gtgattgccaagcacgtccccatgcgctccatcaagaagagcgacttcgcggagctggtgaagtacatcaccgacgagcaaggcaagaccgagcgcctgggtcacgtgcgcgtcacgaactgcgaggcaaacaccctgcccgctgtcatggccgaggtgatggcgacccagcacggcaacacccgttccgaggccgacaagacctatcacctgctggttagcttccgcgcgggagagaagcccgacgcggagacgttgcgcgcgattgaggaccgcatctgcgctgggcttggcttcgccgagcatcagcgcgtcagtgccgtgcatcacgacaccgacaacctgcacatccatatcgccatcaacaagattcacccgacccgaaacaccatccatgagccgtatcgggcctaccgcgccctcgctgacctctgcgcgacgctcgaacgggactacgggcttgagcgtgacaatcacgaaacgcggcagcgcgtttccgagaaccgcgcgaacgacatggagcggcacgcgggcgtggaaagcctggtcggctggatcaagcgcgaatgcctgccggagctgcaagcggcgcaatcctgggaggacctgcaccgcgtcctgcgggaaaacgggcttaagctgcgcgagcgcggaaacggcttcatcttcgaggccggcgacggcacgacggtcaaggccagcaccgtttcgcgcgacctgtccaagccgaagctcgaagcccgattcggggcattcacgccagccgagggcggcgaagccccccggcggcgggagtatcgagcgaagccgctcaagacccgcatcgacaccaccgagctatacgcccggtatcagtctgaacgccaggaaatgggggccgtgcgcaagggcgagctggacacgctgcgccggcgtcgtgaccgcctgattgaagccgcgatgcgcagcaaccggctgcgccgcgccgctatcaagctgctgggcgaggggcgcattgcaaagcgactgatgtacgcgcaggcgcacaaggctctgcgcgccgacctggacaagatcaaccgcgagtaccggcagggccgtcaggcggtccaggagcgcacgcagcgccgcgcgtgggccgactggctcaaggccgaggcgatgaagggcgacgacaaggccctggccgcgctgcgcgcacgcgagggccgcagcgacctcaagggcaacaccatccagggcagcggcgaggccaagccgggccatgcggccgtgacggacaacatcacgaagaagggaaccatcatctatcgcgtcggcagcagcgccgtccgcgacgacggcgaccgcctgcaagtctcgcgcgaggccaccacggacggcctggacgccgccctgcgcctggcaatggagcgcttcggcgaccggatcaccgtcaacggcacagcagagttcaaggagcggatcgcgcaggcggccgccgctggccgtctggcaatcacctttgacgacgccgcccttgagcgccgccgtcaagaactactgacgaaggagcaagcacatgagcaacccgaacgaaatgacggacgaagagatcgcggcggcgatggaggcattcgacctgccgcagccagaaccaccctcaacgccacaggcggcgacggcgaccgacgggacgctcgcgccgtcagcgccggcggaaccgtcgcactccgcaagcccaacgttggacgcattggacgaaagccgccgccccaaagccaaaaccgtttgcgagcgctgtcccaactcggtgtggttcgcatcgccggcggagctgaaatgctattgccgcgtgatgttcctggtcacgtggagcagcaaggagccgaaccagctcacgcactgcgacggggagtttctgggccaggaagagggctaaagcccgaacagatcgcggcggccgagaaatatgttgccgagcgcgagcaaaagcggctaaacggcttcgatataccgaagcatgcacgatatactgattatgttggtgcgctgtcctatgcaggcacccggaacgtcgaggaccaggcgctggccctgttgaggaaagaaaacgacgagattctggtgctgcccgtcgataaggccacggtgcaacgcatgaagcgcctcgccatcggtgatcccgtcaccgtgaccccgcgaggctcccttaaaactacccgaggtaggagtagatga

SEQ ID NO: 153496 - DNA, 372 bp, Enterobacter cloacae
atggctgatgaaaccaagccaaccaggaagggcagcccacctatcaaggtgtactgccttccagacgaacgaagagcgattgaggaaaaggcggcggcggccggcatgagcctgtcggcctacctgctggccgtcggccagggctacaaaatcacgggcgtcgtggactatgagcacgtccgcgagctggcccgcatcaatggcgacctgggccgcctgggcggcctgctgaaactctggctcaccgacgacccgcgcacggcgcggttcggtgatgccacgatcctcgccctgctggcgaagatcgaagagaagcaggacgagcttggcaaggtcatgatgggcgtggtccgcccgagggcagagccatga

SEQ ID NO: 153497 - DNA, 405 bp, Enterobacter cloacae
atgccaaagagctacaccgacgagctggccgagtgggttgaatcccgcgcggccaagaagcgccggcgtgatgaggctgcggttgcgttcctggcggtgagggcggatgtcgaggcggcgttagcgtccggctatgcgctcgtcaccatttgggagcacatgcgggaaacggggaaggtcaagttctcctacgagacgttccgctcgcacgccaggcggcacatcaaggccaagcccgccgatgtgcccgcaccgcaggccaaggctgcggaacccgcgccggcacccaagacgccggagccacggcggccgaagcaggggggcaaggctgaaaagccggcccccgctgcggccccgaccggcttcaccttcaacccaacaccggacaaaaaggatctactgtaa

SEQ ID NO: 153498 - DNA, 726 bp, Enterobacter cloacae
atggcgaaaattcacatggttttgcagggcaagggcggggtcggcaagtcggccatcgccgcgatcattgcgcagtacaagatggacaaggggcagacacccttgtgcatcgacaccgacccggtgaacgcgacgttcgagggctacaaggccctgaacgtccgccggctgaacatcatggccggcgacgaaattaactcgcgcaacttcgacaccctggtcgagctgattgcgccgaccaaggatgacgtggtgatcgacaacggtgccagctcgttcgtgcctctgtcgcattacctcatcagcaaccaggtgccggctctgctgcaagaaatggggcatgagctggtcatccataccgtcgtcaccggcggccaggctctcctggacacggtgagcggcttcgcccagctcgccagccagttcccggccgaagcgcttttcgtggtctggctgaacccgtattgggggcctatcgagcatgagggcaagagctttgagcagatgaaggcgtacacggccaacaaggcccgcgtgtcgtccatcatccagattccggccctcaaggaagaaacctacggccgcgatttcagcgacatgctgcaagagcggctgacgttcgaccaggcgctggccgatgaatcgctcacgatcatgacgcggcaacgcctcaagatcgtgcggcgcggcctgtttgaacagctcgacgcggcggccgtgctatga

SEQ ID NO: 153499 - DNA, 438 bp, Enterobacter cloacae
atgagcgaccagattgaagagctgatccgggagattgcggccaagcacggcatcgccgtcggccgcgacgacccggtgctgatcctgcataccatcaacgcccggctcatggccgacagtgcggccaagcaagaggaaatccttgccgcgttcaaggaagagctggaagggatcgcccatcgttggggcgaggacgccaaggccaaagcggagcggatgctgaacgcggccctggcggccagcaaggacgcaatggcgaaggtaatgaaggacagcgccgcgcaggcggccgaagcgatccgcagggaaatcgacgacggccttggccgccagctcgcggccaaggtcgcggacgcgcggcgcgtggcgatgatgaacatgatcgccggcggcatggtgttgttcgcggccgccctggtggtgtgggcctcgttatga

SEQ ID NO: 153500 - DNA, 1347 bp, Enterobacter cloacae
ttgagcagctacagcagagccgagcgcgcaccgtggggagacttcccgaaggtggttcgcaacggcgaccttggttctttgaccaacgagcctgaataccaggctgcgaagcagggcgacgcggaagcggcgcttaatttggtcgagcgcctgatttcggacgacactgttgcccagctcaagacgctgatcggcgacgacaagccccgcatcgttccagtcctcgccgtcgaggcggcggggaacaacaagattccggccatgatggcggtcgttctggccgaccgccttggccttgaggtcgaaacggacattgtgcagcgggagaaggtcgcccgaaccggagccggttcagatcatcgcctggcgttcaacccgactttcgagggggaggtgatccccggccagaagtacatcgttgtcgatgacacgctgacgatgggcggcaccattgcctcattacgcggctacatcgagaacaacggcggcaaggtcatggcggcgtccgtcatgaccgcccatgaaggcgcgcttgacctggcggtcaagccgaagatgcttgcgggcatcaatgagaaacacggtccagcaatggacgcattttggaaggaaacctttggctatggcatcgaccgactcacccaaggagaagccggacacctccgcgctgccccgtccgttgacgcaatccgagatcgcatcgctgcggctcgaaatgaagcagtcaatcgagtgggggcaagccgaactgcgacgacggcgcgagcagggcaacagcagtccccggcagtaaagcagtccagcggcaacagcggcgaggatttgctacaggcggcccaggaggccgagacggaacagcaggccctcttagaatccgcgcccatcgagcagacctaccagcagacccttgcgctctacgtgcaggcaaagcatgaccaggtggagcgcatcgaggaccgcctagaacagctcgtagaccgtcagcaggcgcgtttgcagcagctacagtccaatgcccccggcttgctgtccctgccgcgtacaaaggccgcctggcagcagcagcaggcccaacagcaagcccgcttgcagaccctgcacacgcggctggacatggtgcgcgaaatcaaggaaggcatgggcattcacgcgcccaagatcgaggaactggcgacgcgcaagatgcgcgcggagcatcccgagctggccggcgactgggattcgatgcgtgaagcagcccgacggcaccaggccctgatgcgcaagcaggagcaggagaagaaacaggcccaggagcgcgagcgcgggcgcagtcagagcttgggcctgtcaaacaagcccagctaa

SEQ ID NO: 153501 - DNA, 348 bp, Enterobacter cloacae
atgaaacaccgcctcctggtcatgaatgggcaaagaattgtccagaccgagaaccaaggcgcatggacgaaccagaaggtagataaagccggggccctgaaacctggcatttacaacatctatatggcccaaaaggccgataagtcgcagcgccacgacggcagcatcgtccacgcagatagcggcagcatttaccaacaggtggggaagaactttgtaatgcacgcccggtcagatttcgataaagtacctgaaatcgggagtgcgaaaagcatcacctatgacgcaagtggcaaggcacaggtaagtgccgaaagcgtcaagttgagtcgcgggcgcactcgttag

SEQ ID NO: 153502 - DNA, 927 bp, Enterobacter cloacae
atggaactgaacaaagagacgcgcgaccgcatttttgcggctgcggacgagctgttcgagcaaggcgaccgggagaacttcccgaccgtggatgcagtgcgtaaggccgcccgcgtcaacatgaacgacgccagcgccggcatgcgcgaatggcgacgccagcgcacggcgcaggccgccccgctggcagtccaggtgccggacgcggtgcagcaggccggcaaccaggccgtggccgccctctggcaagccgcccaggcccttgccaatgaatcgttgcaggcagcgcaagccggctgggatcgtgagcgcaacgagttggaagccgtgcgcggggagctggccgacgccttcgaggcgcaggcccgcgagctggaagaagcccaggcgcgcgttacattgctagagcagcaggccgccgaggcggccgagctggccgcacgccagcggcaagccctggccgaagcacgcaccgccctggcaggagccgagcagcgggccgcgctggcgacgcagcgggccgacgaggtggagcgtcgagcgcaggagctgcgcgccgagctggactacgctcaccaggacgcccgcgcattcaaagaagagagccgcaagaccctggacgcggccaaccaggaaatgcaggcgcttcgcggcgagcgcgacgccaccaggcgcgaagcggagagtttgcgcacggagttggcagcggtgaaagcgaaggcgcaggccgacgccgaggcccaccaggagcaaaggaagttggcggcgcaagaggcggccaggcaggccgagcgctttacgacggtgcaagccgagcgtgacgaagcgcggcaagaggcaaaggcagcccaagaagaggccgctatgttgaggggtcggctagacgcggaaacgagtgggaggaaacacaaagcgggaggaaagtaa

SEQ ID NO: 153503 - DNA, 528 bp, Enterobacter cloacae
atgactgacgaacaaaagaaacggctcctgatgttgcaagctatccggcgcagcatccaggcaatgcgcaggggtgtttcggggccggatagtttcaagggctggttgaccggcatcggcatcatcgcggcggggttcctggttggcgagctgctgccatcccctgcccccggcgtcggcctggttgtgccaggggcctgcattgccggcttcgtcgtcggctgctggctcaacaggaaaggccgctcatggccgacagccatttacgaccaattggcccgttaccagccgctcaacgagcgggcgtaccgcgacctgcaagagacggtgaaggaacgcggcctcgactgcgatgcggtcatggagtggacctacatcgagcaggccgagttcatgcccctggtgcccaccagggaggacctagcgcgcgacaagttcctgaccgcgacgcgggccgatagggccgaggacgatgcgcgtgcgcgcttcgtcgtgctccatcccaagaagcgcggccccgacgcatga

SEQ ID NO: 153504 - DNA, 504 bp, Enterobacter cloacae
atgaatccgatgctgttctacatcgcgggaggcgtaggcgcggcgttgctgctggtttccgcgatcatgctgttcaagctgcgcgagccgaagaaggaacaccgaccgcagcgcaaggcggcggccccgacgccgcagccggtcgataacgagctgctgcgcacctttcgccggccgtcgcaggccagccaacccgagccatccacgacgccgccggcgcggcgcactgccccgccgagcagcgaacaatccagagggaatgacggcgatttcgtcacgtcggccctggtggccggggcgaccaacagcaccatgctgggctacctggccggcggctcgctgaccggggccatgctgggcgatgcgctgcggccggatacgccgtctgcggcgttcgcggacccctcgccgtgcttcggcagcagcgacacggacagcggctggaccgataccggcagctcttgcgatttcagttcgtccgacaccgatacgaacaactggtga

SEQ ID NO: 153505 - DNA, 1077 bp, Enterobacter cloacae
atgactgcggctcaagccaagaccaccaagaaaaacaccgctgcggccgctcaggaagccgcaggcgcggcgcagccgtccggcctggggttggatagcatcggcgacctgtcgagcctcctggacgctcctgcggcgtctcagggcggttccggccctatcgagctggacctggacctgatcgacgaagatccgcatcagccgcggacggccgacaaccccggcttttccccggagagcatcgcggaaatcggtgccacgatcaaagagcgcggggtgaagtcacccatttcggtgcgcgagaaccaggagcagccgggccgctatatcatcaatcacggcgcccgccgctaccgtggctcgaagtgggccggcaagaagtccatcccggcgttcatcgacaacgactacaacgaagccgaccaggttatcgagaacctgcaacgcaacgagctgaccccgcgcgaaattgccgacttcattggccgcgagctggcgaagggcaagaagaaaggcgatatcgccaaggaaatcggcaagtcgccggcgttcatcacccagcacgtcacgctgctggacctgccggagaagatcgccgatgcgttcaacaccggccgcgtgcgcgacgtgaccgtggtgaacgagctggtgacggccttcaagaagcgcccggaggaagtcgaggcgtggcttgacgacgacacccaggaaatcacgcgcggcacggtcaagctgctgcgcgagttcctggacgagaagggccgcgatcccaacaccgtcgatgccttcaacggccagactgatgccgagcgtgacgcggaggccggcgacggccaggacggcgaggacggcgaccaggacggtaaggacgccaaggaaaagggcgcgaaggagccggacccggacaagctgaaaaaggccatcgtccaggtcgagcacgacgagcgccctgcccgccttatcctcaaccgtcggccgccggcggaaggctatgcctggttgaagtacgaggacgacggccaggagttcgaggcgaaccttgccgacgtgaaactggtcgcgctcatcgagggctga

SEQ ID NO: 153506 - DNA, 780 bp, Enterobacter cloacae
atgaaaactttggtcacggccaaccagaaaggcggcgtcggcaagacttcgacccttgtgcatcttgccttcgactttttcgagcgcggcttgcgggttgccgtgatcgacctggacccccagggcaatgcgtcctacacgctcaaggactttgctaccggcctgcatgcaagcaagctgttcggcgctgtccctgccggcggctggaccgaaaccgcacccgcagccggcgacggccaggccgcgcgcctcgccctcatcgagtccaacccggtactggcgaacgccgaacggctgtcgctggacgacgcccgcgagctgttcggggcgaacatcaaggccctggcgaaccaaggcttcgacgtgtgcctgatcgacacggccccgacccttggcgtcggcctggcggccgccctcttcgcggccgactatgtgctgtcccccatcgagcttgaggcgtacagcatccagggcatcaagaagatggtcacgaccattgcgaacgtgcgccagaagaacgccaagctgcaattccttggcatggtgcccagcaaggtcgatgcgcggaatccgcgccacgcgcgccaccaagccgagctgctggccgcgtaccccaagatgatgattccggccaccgttggcctgcgcagcagcatcgccgatgccctcgcatccggtgtgccggtctggaagatcaagaaaacggccgcgcgcaaggcatcgaaagaggttcgcgccctggctgattacgtgttcacgaagatggagatttcccaatga

SEQ ID NO: 153507 - DNA, 315 bp, Enterobacter cloacae
gtgttatccatgaagaaacggcttaccgaaagccagttccaggaggcgatccaggggctggaagtggggcagcagaccatcgagatagcgcggggcgtcttagtcgatgggaagccacaggcgacgttcgcaacgtcgctgggactgaccaggggcgcagtgtcgcaagcggtgcatcgcgtgtgggccgcgttcgaggacaagaacttgcccgaggggtacgcgcgggtaacggcggttctgccggaacatcaggcgtacatcgtccggaagtgggaagcggacgccaagaaaaaacaggaaaccaaacgatga

SEQ ID NO: 153508 - DNA, 954 bp, Enterobacter cloacae
atgaatgccacaaacaccgatgttttcgcccaggtaggcggcctcgaggcccgaggcgcgaagatgaagaagcggggcacccgcttcctcatcgcggcgctggcagtccttgccattgccgggatcggggcagtaacgggatgggcgatcagcccgagcgcgacgcccggaagcattgacgtgccgcaggtgctggcatcgacattcagcgaccaggtgccgggcagtgagggcggcggcctgggtggcggcctgcccttcacttcggccgtcggggcattcacggacttcatggcggggccggcaatttttaccttgggcattcttggcatagtggtcgcgggtgccgtgctcgtgttcgggggtgaattcagcgggttcgtgcgatccgtctgcatgatggtgatagccgtcagcatgattttcgtgtcgtcgaacttggtgaagggcattctcggcggcgatcacgacgccggccctgcggagccttcgccgcgtgcgcgattcatggcggccgtggaggccaaggatttcgcgcgagtgcaagagctgatcgaggcgcgtggagccaagtcggcggctgattatgtccttgcgcagctcgccgtggccgaaggtctggaccgcaagcctggtgcgcgcgtcgtggtcgggaaagcggcgggcagcatggcaatgccgcctgcggcgctgggttttacgccaaggggagaagcggcatacgccatcgagcggtcagcctatggtgagccgaggtccagcattgcgaagcagtaccagcaggaatggaaccggaaggcggcgacctggtgggcgatggccggtgtggccggcatcatcggcgcgatcctggcggcggcggcaaccggctttgttgggctggcagtgtcgatccgcaaccgagtgaagcgcgtgcgcgacctgttggtgatggagccgggtgcagagccataa

SEQ ID NO: 153509 - DNA, 1137 bp, Enterobacter cloacae
atgaacgcactgaaaacgacgcacgacgccaaggcccctatcgtcgccttcgacatgaccccggcaaccctgcgcgagctgggcttgcaggaaagcgacgtgccggaagtccatgcggtcgcgcagcggatcgaggtcggcagtccgcagaccgttgccgagttcggccgcgacgtggccgagcacacgtcccgctacgccgatagcctgctggaccaggtgcgcaacagcgacctggacgaagcaggcgagaaactgacccaggttgtcgccaaggcccgttccctgaacgtcggccctttgtccgacaaccgttcccgcctgcccctgattggcccgctgatcgaccgcttccgcgtccgttcgacgggcttcatggcgcgcttcgacacgacccgcgagcagatcgaacacctggtcagcgaagtgcagaccacccagcaaggcatcgcgcagcgcaatgcctcgctcgacgaaatgttcgcagccgtgcgcgaggaacaccgccttcttggcgtccacatcgcggccggcaaggtccgccttgccgagctgcgcgagcaggccgagggtctgcgcggcaatgtcgggaacgacccgggccgcgtgcaggagctggccgacctcgatgcgatggttgccaacctggacaagcgcatcggcgacctgatcgccttgcaacattcggccatgcagagcctgccgaccatccgcatgatccaggccaacaaccagatgctggtcgataaattccacaccatccgcgaaatcaccgtgccggcgtggaagcggcaattcatgctggccttgagcctcaacgagcagaagaacgccgtcgaactggccacggccatcgacgacaccaccaacgacctgatgaagcgcaatgcggccctgctgcatcgcacgtccgtcgagacggcgaaggagaaccaacgcctggtgatcgacgtggacacgctcaagcaggttcagacgacgctcatcaagaccgtcgaggacgttattcgcatccagcaggaaggcgtgcagaagcgcaaggatgccgagaagcagatcgccgcaatgcgtggcgatcttcaagccaagctgacccgccagcccgtgcgcgagctggcccaacaggagtccgtatga

SEQ ID NO: 153510 - DNA, 774 bp, Enterobacter cloacae
atggaagaacaaagcgtgaacatggcgcgattgaagggggaggttttgcccgccctcttcgcgtcgccggcgacgattggcgagtacggggccggcatcgacggggcggattccctcaacgagctgtcgaatctgatggagcacggcgcagttgccgcgctggccgacaaaatcagccagatcgtggcgaagctggccgacgcggacccccgcaagatcgcggaaaagcctacctggttcgagaagatgcttggccgtgaggttgaacgccaggtgaggtatcaggtcgcccgcaagacgctcgaccagttgctggacgaagccgagggcgtagcgcagcgcgtgcgggacacgttgcgcgccttggatgacatgctcaatacgcatgaggccgaggtagaccggctcagagcctacattcaagccgggcgcgagttcctggacgagaaccccgaggccggcgcggccaaggccggcgtgatcgagttcgacaagccgcgcgaacgcttcgcgcgcaagctcgccaacctggcaaccctcatggcgtcccatgaaatgagcgtcactcagatgaagctcacgcgggcgcaggccgtggacatgctggaccgcttctctgaaacggcatccgtcctggtgcccgtctggcgtcagcacaccctcgcgctcatcaccaccaagaacatgaatccggcaatggtcgccgaggcggccaaagctcaccaggcgctcatgcggagcctttcgcagagcctggaaggcatcaaccaataa

SEQ ID NO: 153511 - DNA, 315 bp, Enterobacter cloacae
atgccaagacaggaacctaagcagccgggctacgtgtgcccgacgaccgggcgggtggccgtgctggtcaaggactacgccgacagcgacctaaacggcgacgcatcggcgtactggttcaatccggaggccgagggctggggcatggacccttggaaactggtcgaaggcgtggacccccacacgcaaggctgttcgatggatgtttgctttgccgacggttcaagcaagacggtcgggccgctgatgacgttctttctcagcgcgaaggatgctgcgcgcctagcggcgctcaaggggcaacgccaggagtga

SEQ ID NO: 153512 - DNA, 324 bp, Enterobacter cloacae
atgtcgaagattatcaagttcccaggcgtggaagtggaggccgaggcccctgccccgcgcgttgaggccccgagcaaggccccgccccggttcacttttgccaagggtgtccaggccctggtccgctttgtatgggtcgttactgtcctggtgtggccggtggcgaagtggatcatctctatcgacgttttctttcagttcctgcggatgctgtaccactggaacacccttggcgttcatgccggctggacgttcctggtgcatttcgcggtactgaccgcactcacctatttcgtgtcgctctacaagcccaaggggctgtag

SEQ ID NO: 153513 - DNA, 222 bp, Enterobacter cloacae
atgatgcaagtaggagatagggtgaactggcagcacaccccgcgcggcgggtacgggtattccgtttgtgttgctggcatagtgacgaagatcgcggctaaacgtgtgcagattcgggtagccgttcgcagtggtaacgagtggcagcaagtcaccaagtgggtcgagccggccaggttgagcaccagggaaaagccggttcccgagttggacggggcatag

SEQ ID NO: 153514 - DNA, 231 bp, Enterobacter cloacae
atgaccgataagttcatgccgtggatcgacgagctgccgaacgtagaccaggagctggtcgcgcagcggaatgctattgccgagaagcagcggcgcgctgatgagctgatgcaccaggtcgagcgcctgcgcatcgaggtcatgcgggagtcgtcgaggttggaggaacgggcgaaacagcgctggaccttcaacgaaatcgacttggcgaaattccgggccggtcactga

SEQ ID NO: 153515 - DNA, 216 bp, Enterobacter cloacae
atgcccaaccgcaagatcgagattgtcaccaccaattgccgccgctgcggtaagtccatttcgacccttagccgcagcctgatcggggcggacgccctgcgcgaagagctgggcggtatctgcggcgattgcattacgccggaggaacgacagcggatcgagcaaggcaccttgctggccgcgctgcggcagtgcgctgccgccgggacaagctga

SEQ ID NO: 153516 - DNA, 234 bp, Enterobacter cloacae
atgaaaagcaagatcatgtcttggctcgatgagctgcccggcgcggccgccacggattttctggcccgtcgtgaccagatcgcggcgctgatggagcaggcggcagagcttacccgccaggccgaagagctgcggcacaaggcgtacctgcaaggttgcaccctggagggtgaagcaaagggccactggtccacccaggaagtcgaacgcgcgaaggctcgcgcaggctggtaa

SEQ ID NO: 153517 - DNA, 258 bp, Enterobacter cloacae
atgagcgacgtgaatatccggcttgagtgcctgcgcccggcggaacgctgggtgcagccgaccggcgcagaaatccgggaagtcttgcacttggccggcctcaccggcggacaggctgcgcgcatcttgggcttgggtgccaagggcgaccgcacggtgcggcgttgggttggcgaggattcgccgatcccctatgccgcctgggcgatcctttgcgatctagcggggattggggcgatctggaaaggccagggctga

SEQ ID NO: 153518 - DNA, 669 bp, Enterobacter cloacae
atgctcaattacgtctcccattacgaccatgcgcgcggcggcatgacggtggaccaggtagcggacggggttttgcgcgccctgttgcgctcgcatcgccggtatctggacgcccgcgaccaggaccgccttgccgacgagccactgccggcgtggctcgcgggtatcacgccaccgccgcgccgcgtgcgggccgtggtcgaggactggcggaagccggacgaactgccgccgggcttcgcctgggttgatgccgtgctgccggcgcaccaggcattcatcgcccgcaaatgggcggccagcgccaaggcgaagctcgcggccgcgcgtgcgaaagctcaggagccggccgggcagcgcagggagccggttacaccggccaagccggagccggagccggccaaggacgaggacgcgccggcgtggccggcgacgttctttcctggcctgcggtgcgagattgtgagcgtgcatcacccggtttttgccaaggaaatcgggaagcacgtcatcattacgaagatcagtcccgaaacgcgacaggtgtgggcgcacgacgacaagccgccgcgctatcgcatcaatcgcaacggtagaaaggtttgtgaatatgacccgcgttgcatcgagtcgtgctacggctacgaccaattgcgggccgccatttga

SEQ ID NO: 153519 - DNA, 1149 bp, Enterobacter cloacae; identical to SEQ ID NO: 54020

SEQ ID NO: 153520 - DNA, 351 bp, Enterobacter cloacae
atgagccataatcagttccagtttatcggtaatcttacccgtgacaccgaggtacgtcatggcaattctaacaagccgcaagcaattttcgatatagcggttaatgaagagtggcgcaacgatgccggcgacaagcaggagcgcaccgacttcttccgcatcaagtgttttggctctcaggccgaggcccacggcaagtatttgggcaaggggtcgctggtattcgtgcagggcaagattcggaataccaagtacgagaaggacggccagacggtctacgggaccgacttcattgccgataaggtggattatctggacaccaaggcaccaggcgggtcaaatcaggaataa

SEQ ID NO: 153521 - DNA, 312 bp, Enterobacter cloacae
atgacgaaacatgagctgtcggagagggcaggggtttcaatttcgtttttatcagacttaaccaacggtaaggccaacccctcgttgaaggtgatggaggccattgccgacgccctggaaactcccctacctcttctcctggagtccaccgaccttgaccgcgaggcactcgcggagattgcgggtcatcctttcaagagcagcgtgccgcccggatacgaacgcatcagtgtggttttgccgtcacataaggcgtttatcgtaaagaaatggggcgacgacacccgaaaaaagctgcgtggaaggctctga

SEQ ID NO: 153522 - DNA, 960 bp, Enterobacter cloacae
gtgagcgggaaagaagagtttcagaccatcaaggagcgggccaagcgcaagctggaacgcgacatgggtgcggacctgttggccgcgctcaacgacccgaaaaccgttgaagtcatgctcaacgcggacggcaaggtgtggcacgaacgccttggcgagccgatgcggtacatctgcgacatgcggcccagccagtcgcaggcgattatagaaacggtggccggattccacggcaaagaggtcacgcggcattcgcccatcctggaaggcgagttccccttggatggcagccgctttgccggccaattgccgccggtcgtggccgcgccaacctttgcgatccgcaagcgcgcggtcgccatcttcacgctggaacagtacgtcgaggcgggcatcatgacccgcgagcaatacgaggtcattaaaagcgccgtcgcggcgcatcgaaacatcctcgtcattggcggtactggctcgggcaagaccacgctcgtcaacgcgatcatcaatgaaatggtcgccttcaacccgtctgagcgcgtcgtcatcatcgaggacaccggcgaaatccagtgcgccgcagagaacgccgtccaataccacaccagcatcgacgtctcgatgacgctgctgctcaagacaacgctgcgtatgcgccccgaccgcatcctggtcggtgaggtacgtggccccgaagcccttgatctgttgatggcctggaacaccgggcatgaaggaggtgccgccaccctgcacgcaaacaaccccaaagcgggcctgagccggctcgccatgcttatcagcatgcacccggattcaccgaaacccattgagccgctgattggcgaggcggttcatgtggtcgtccatatcgccaggacccctagcggccgtcgagtgcaagaaattctcgaagttcttggttacgagaacggccagtacatcaccaaaaccctgtaa

SEQ ID NO: 153523 - DNA, 438 bp, Enterobacter cloacae
atgacaacggctgttccgttccgtctgaccatgaatcgcggcattttgttctaccttgccgtgttcttcgttctcgctctcgcgttatccgcgcatccggcgatggcctcggaaggcaccggcggcagcttgccatatgagagctggctgacgaacctgcgcaactccgtaaccggcccggtggccttcgcgctgtccatcatcggcatcgtcgtcgccggcggcgtgctgatcttcggcggcgaactcaacgccttcttccgaaccctgatcttcctggttctggtgatggcgctgctggtcggcgcgcagaacgtgatgagcaccttcttcggtcgtggtgccgaaatcgcggccctcggcaacggggcgctgcaccaggtgcaagtcgcggcggcggatgccgtgcgtgcggtagcggctggacggctcgcctaa

SEQ ID NO: 153524 - DNA, 312 bp, Enterobacter cloacae
atggctctgcgcacgatccccatccgtcgcgcaggcaaccgagaaaacctgttcatgggtggtgatcgtgaactggtgatgttctcgggcctgatggcgtttgcgctgattttcagcgcccaagagctgcgggccaccgtggtcggtctgatcctgtggttcggggcgctctatgcgttccgaatcatggcgaaggccgatccgaagatgcggttcgtgtacctgcgtcaccgccggtacaagccgtattacccggcccgctcgaccccgttccgcgagaacaccaatagccaagggaagcaataccgatga

SEQ ID NO: 153525 - DNA, 2559 bp, Enterobacter cloacae
atgatccaagcaattgcgattgcaatcgcgggcctcggcgcgcttctgttgttcatcctctttgcccgcatccgcgcggtcgatgccgaactgaaactgaaaaagcatcgttccaaggacgccggcctggccgatctgctcaactacgccgctgtcgtcgatgacggcgtaatcgtgggcaagaacggcagctttatggctgcctggctgtacaagggcgatgacaacgcaagcagcaccgaccagcagcgcgaagtagtgtccgcccgcatcaaccaggccctcgcgggcctgggaagtgggtggatgatccatgtggacgccgtgcggcgtcctgctccgaactacgcggagcggggcctgtcggcgttccctgaccgtctgacggcagcgattgaagaagagcgccggcggcatttcgagagcctgggaacgatgtacgagggctatttcgtcctcaccttgacctggttcccgccgctgctcgcccagcgcaagttcgtcgagctgatgtttgacgacgacgcgaccgcaccggatcgcaaggcgcgcacgcggggcctcatcgaccaattcaagcgtgacgtgcgcagcatcgagtcgcgcctgtcgtcggccgtgtcgctcactcgcttgaaggggcacaagatcgtcaacgaggacggcacgaccgtcacgcatgacgacttcctgcgctggctgcaattctgcgtgacgggcctgcaccatccggtgcagctccccagcaacccgatgtacctggacgccctggtcggcggacaggaaatgtggggcggggtagtgcccaaggtcggccgcaagttcgtccaggtggtcgctctcgaaggcttccccttggagtcctatcccggcatcctgacggcgctcggcgagctgccctgcgagtatcggtggtcgagccggttcatcttcatggaccagcacgaagccgtgaagcacctcgacaagttccgcaagaagtggcggcagaagattcgcggcttcttcgaccaggtgttcaacacgaacaccggcccggtcgatcaggacgcgctttcgatggtggccgatgctgaggcggccattgccgaagtcaacagcggcatcgtggccgtgggctactacaccagcgtcgtcgtgctgatggatgaggaccgcacgcgcctggaagctgcggcccgcgatgttgaaaaggccgtcaaccggttgggctttgccgcgcgcatcgagtccatcaacaccctggacgccttccttggtagtttgccgggccacggcgtggaaaacgtccgccggccgctcatcaacacgatgaacctggccgacctgctgccgaccagcaccatctggaccggcaacgcgaacgcgccatgcccgatgtacccgccgctgtcgccggcgctcatgcactgcgtcacgcaaggatcaacgccgttccggctgaacctgcacgtgcgcgacctcggccacacctttatgttcgggccgaccggcgcaggtaaatcgacgcacctggcgatcctcgccgcgcagctccgtcgctatgccggcatgtcgatcttcgcctttgacaagggcatgtcgatgtacccgctggccgccggcatccgtgcggccacgaagggcaccagcggcctgcacttcaccgtggcggccgacgacgaacgcctggcgttctgcccgttgcagttcctgagcaccaagggcgaccgtgcttgggcgatggagtggatcgacaccatcctggcgttgaacggcgtcgaaacgaccccggcccagcgcaacgaaatcggcaacgcgatcatgagcatgcacgccagcggcgcgcgcacgctctccgagttcagcgtgacgattcaggatgaggcgatccgcgaggcgatccgccagtacaccgtcgatggcgcaatgggccatctgctcgacgccgaagaggacggcttggcgctgtccgactttacagtgttcgagatcgaagagctgatgaacctcggcgagaaattcgccctgcctgtgttgctctacctgttccgccgtatcgagcgcgccctgacgggccagccggccgtcatcatcctggacgaagcctggttgatgctcggccacccggcattccgcgcgaagatcagggaatggctcaaggtgctgcgtaaggccaactgccttgtgctgatggcaacgcagagcctgtccgacgccgccaacagcggcatcctggacgtgatcgtggaatcgaccgcgaccaagattttcctgccgaatatttacgccagggatgaggacacggcggccctgtaccgccgcatgggcctgaacgctcgccagatcgagattctggcccaggccgttcccaagcgtcagtactactacgtgtcggaaaacggccgccgtctctacgacctggcacttggcccgctcgcgctcgcgttcgtcggcgcatccgacaaggaatccgtcgccatcatcaagaacctggaagccaagttcggcgaccagtgggtggatgaatggctgcgtggccggggcctcgcccttgatgaatacctggaggcagcatga

SEQ ID NO: 153526 - DNA, 759 bp, Enterobacter cloacae
atgagttttgcagacacgatcaagggcttgatcttcaagaagaagcccgcaacggccgcagcagcggcgacgccggccgcgaccggcccgcaaaccgacaacccgtacctgacggcgcggcgcacctggaacgaccacgttggttccgttgtgtcgcaaaagcagacctggcaggttgtcggcatcctttcgctgatgatcgtcctcgcggcggtcggcggcatcatccacatcggcagccagtcgaagttcgtgccctatgtctacgaggtagacaagctcgggcagacggccgccgtggggccgatgaccagggcgtcgaaagccgatccgcgtgtcattcacgcctcggtggctgagttcgtcggcgatgctcgcctggtgacgccggacgtagctttgcagcgcaaggccgtctaccgcctctatgccaagctcgggccgaatgacccggccaccgccaagatgaacgaatggctcaacggcaccgccgacgccagcccgttcgctcgcgcggccgtcgaaacggtcagcaccgaaatcacttccgtaatcccgcagacgcccgacacctggcaggtcgattgggtcgagacgacgcgcgacaggcaaggcgtggtgaaaggccagcccgtgcgcatgcgggccttggtgacggtctacgtcgtcgagccgacggcggacaccaaggaagaacaactgcgaaacaacccggccgggatctacgtccgggacttctcctggtcgagacttctgtga

SEQ ID NO: 153527 - DNA, 894 bp, Enterobacter cloacae
atgaaaaaggaactgtttgctttggtcctggccgcgtccgttagcgtgcctgcatttgccgccgatcccggcgcggacctgactgacctctatttttccggcaagaacccggagctgaccgcgcaagagcgggcggccatcgccatcgccaagaagtgggaggcgggtaccgccggcatgcggccggtggccggccccggtggttcggtgcgcttcctgttcggcgcgcagcagccgagcatcgtatgcgccgtgctgcaagtgtgcgacgtggccctgcaacccggcgagcaagtcaactcgatcaacctgggcgacaccgcccgttggacggtcgagccggccattaccggcagcggcgcgaacgaaacccagcacctcatcatcaagccgatggatgtgggcctggaaaccagcctggtcgtgaccacggaccgccgcagctaccacatgcgcctgcgctcgcatcgcacgcagtacatgccgcaggtgtcgttcacctacccggaagatgcccttgcgaagtgggacgccatcaagaaccgcgaacagcgggatcgcgtcgagaaaaccattccgcagaccggcgagtacctgggcaacctgagcttcaactactccgtcagcgggtccacgtcgtggaagccggtgcgcgtctacaacgacggcaagaaaaccatcatccagatgccgcactcgatggaacagaccgaagcgccgacgctcctggtcgttcgcagggagggcggcctgttctccgacgatgaaacggtgatggtcaactaccgggtccagggcgaccgctacatcgtcgatacgattttcgacaaggccatcctcatcgcgggcgtgggcagcagccaggaccgcgtgaccatttcaagggggaactaa

SEQ ID NO: 153528 - DNA, 483 bp, Enterobacter cloacae
atgcgtaagattctgaccgtcatcgcactcgcggccacgttggccggctgcgcgacctccaagtacggcagcttcgtccaggacgcgccggccgcctacaaccagaccattgcgaccgacgcggtgaagcagctcgtcaagctctacccgccggcgcaaaccaagctggaattgcagcaggctacgcccgatccgttcggcattgccctggtcactgaccttcgcgcccagggctatgctgtcatggagtacaagcccgacggcaacgcggccgcagctccggctgctgcgtcctcggccgctgcgaagccggcaacgccgcaagcccagggcggctatccgctgcgctacgtgctggaccaattcagcgacagcaacctgtatcgcctgaccgtcatggtcggctctcaatcgctcacgcgcgcctacctcgcccaaaacaacacgatggtcccggccggcgcatgggttcggaaggagtaa

SEQ ID NO: 153529 - DNA, 1392 bp, Enterobacter cloacae
atgagcgaagatcaaatggcaccggacgcatcgccagatgcggtcaagccgaaaagcggggttcgccgcgtcaacaacatgccgatgtacctcatcggcggtgtgctcggcatcttcctgctggtgatggccctggttgctgcggatcgcgctgcgcagcagaaccagccgggagctgcgaaggctgagaaggccggcagcaccagcatgtttgccgacgaaattgccggcaaacagcaggacggcatcatcaaggccaagccgctggagattccgccggaacaaaccgcccagcaaccgacgacggagctgacgccagccccggcgcagggaacgactatcacggtcgcacggcccgagaacctggaccagcccccgacgccgccgcagggtgcgcgcaacgaggacctggaccgcatccgcatggcgaagttgcagatgctggaagaggcgatcaaggccaagacgacggtgcgcatcgacgcgccgcgcagccagggcagcgccggcggcggtgctccgcagggccgcgaggaaacccttgcgcgcatccaggagctgcgtcggcaggctgagaacgcccgcgccaccgatccgaccgccgcctatcaggccgcgcttgcgcaggctcgcacgatgggcggcgcggcagggggtggcggtatgggcggctcgggtgcgccgaccctcgtgcagacctcgaaccgcagtggtggcggcgctggctatgggtcgttcgacaaccgcagcgagggcgaccgttggcggctcgactcccagccggaagcacctgcaacgccctatgtgctgcgcgctggcttcgtcgttccggctacgcttatctcgggcatcaactccgatctgccaggccaaatcatggcccaggtatcgcagtcggtgtacgacacggcgaccggcaagcacatgctcatcccccaaggctcgcgcctggtgggcagctactcgaacgatgtggcctacgggcagaagcgcgttctggtggcatggcagcgcatcatcttccccgacggcaaggcaatggacattggggccatgccgggcggcgatagcgctgggtatgcaggcttcaacgacaaggtcaacaaccactacttccgcaccttcgcatcggcattcctcatgtcgggcgtcgttgcgggcatcagcttgagtcaggaccgtggcaacagcaacagcggttacggacgacaagacgcgggttccgcgatgagtgaagcgttgggtcaacagctcggccaagtaacggcgcagatgatcgccaaaaacttgaatatcgcgccgacgctggaaatccgtccgggctatcgcttcaacgtcattgtcacgaaagacatgacgttttctaagccctaccaggcgtttgactattaa

SEQ ID NO: 153530 - DNA, 777 bp, Enterobacter cloacae
atgaagaagctcgctaagaatgttttagccgctaaagtagctctggtgctggccctctcggtcggcaccttggcggtcacgcctgcgcaagcgggcattccggtcatcgacggcaccaacctgtcacaaaccactgtcaccgcgattcagcaggttgcgcaggtccagaagcaaatcgaggaataccggacgcagttgcagcagtacgaaaacatgctgcaaaacacggtggccccggccgcctacgtgtgggaccaggcgcagtccaccatcaacggcctgatgagcgccgttgataccctgaactactacaagaaccaggcgggcagcatcgacgcttacctgggcaagttcaaggacgtgtcctactacaaggggtcgccgtgcttctccctgtcgggctgctcggaaagcgagcgcaaggcgatggaagagaaccgccgcctggcgtccgaatcgcagaaaaaggccaacgatgcgctgttccgtggcctcgatcagcagcagagcaacctcaagtccgacgccgccacgctggagcaattgaagggcaaggcgacgacggcgcagggccagttggaagccctcggctacgccaaccagttcgccagccagcaggccaaccagctcatgcaaatccgtggccttctgcttgcgcagcagaacgccatcgccacgcagatgcaggcccagcaggaccggcaggcccagcaggacgctgcgggcgcgaagctgcgcgagggttcgtaccgcgcaagcccgtctaagacctggtga

SEQ ID NO: 153531 - DNA, 210 bp, Enterobacter cloacae
atgaagaaatccaacttcatcgcagttgccgcgctggccgccgtcatggcggccagcctggcaggctgcgacaacaagcccgacaccgacaagctgacctgcgccgatctgccgaaggtcacggatgccgctcaacgcgcggagctgttgaagaagtgcccgcgcggagaaccgggaggcttcaagcccagcgaaaagaaagagtggtga

SEQ ID NO: 153532 - DNA, 1587 bp, Enterobacter cloacae
atgaaaatccagactagagctgccgcgctcgcggtcctgatgctggccttgatgccggtagcggcatacgcccaaatcgacaattcgggcatcctcgacaacgtattgcagcgctaccagaacgccgcgagcggctgggccactgtcgtccagaacgccgcaacctggctgttctggaccttgaccgtgattagcatggtctggaccttcggcatgatggcactgcgcaaggccgacattggcgagttcttcgccgagttcgtgcggttcaccatcttcaccggcttcttctggtggctgctgaccaacggcccgaatttcgcgtcgtccatctatgcgtccctgcggcagattgcaggccaggcaacggggttggggcaggggctttcgccgtccggcatcgtcgatgttggcttcgagattttcttcaaggtgatggacgaaacctcgtactggtcgccggtcgatagcttcgtcggtgcctcgttggcggccgccatcctctgcatcctggccctggtcggcgtgaatatgcttctgctcctggcgtccggatggattcttgcctacggcggtgtgttcttcctgggcttcggcggctcgcgctggacctcggacatggcgatcaactactacaagaccgtcctcggggtcgccgcgcagctcttcgcaatggtgctgctcgtaggcatcggcaagaccttcctcgatgactactacagccgcatgagcgaaggcatcaacttcaaggaacttggagtgatgctgatcgtcggcctgatcctgctcgttctggtcaacaaggtgccgcagctcatcgccggcatcatcaccggcgcgagcgtcggcggtgctggtatcggccagttcggcgctggcacgctcgtcggtgcggccgcgacggccggcgcggcaatcgcaactggcggcgcatctatcgcggccggcgctgcggcggcggccggtggcgcgcaggccatcatggcggccgcgtcgaaggccagcgataacgtctctgccggcactgacattctgtcgagcatgatgggcggcggcggtggcggcggcggtggtagcgccggcaccagcggcggcgacggcggcggctcgggtggcggcggtggctcgggcggcggtgaaaccccgatggcctcggccgccggcgacaacagcagcggcgcacgcggcggcagttcgggcggcggctcgggtggtggccgttcgtctggcggtatcggtgccacggcggccaagggcggccggatcgcggccgataccgtcgccaacctggcgaaaggtgccggctcgattgccaaggccaaggccggcgaaatgcgcgcatcggcccaggaacgcatcggcgataccgtaggcggcaagatcgcgcaggcaattcgcggcgcgggtgcggcggcgcagaccgctgcaaccgtcgccgatagcaacagccaggcgcaggaacaacctgcaccggcacccgcaccgtcgttcgacgacaacagcctttccgcaagcaacaacagggaagcggccgccgacgcggattccgaagtggcgagcttcgtcaacaagcccgcccaatcctga

SEQ ID NO: 153533 - DNA, 600 bp, Enterobacter cloacae
atgcaactgaaaaaagcgttctcgtcggccgccctggtggtggccttgggcctcggcgcaactggctcggccagcgcgcaagacgtgctgacgggcgatacccgcctggcctgcgaggccattctgtgcctgtccacgggcagccggcccagcgagtgcagcccgtcgctctcgcggtacttcggcatccacaagcgcaagctgtcggacacgctcaaggcgcggctgaacttcctcaacctctgcccggtatcgaaccagacgccggaaatgcagacgctcgtttcctcgatttcgcgcggggccgggcgctgcgatgcgtcctcgctgaactccgtgctgcgtgagtggcggagctgggacgaccagttctacatcggcaaccgcctgccggactactgcgcggcctacaccggccatgcctataccgacttcaacacgaccgcgccgcgctacgtcggcacgccggaagagggcggctattggatcgaggcggccgactacgaccgcgcgctcaaggagtacgaggcgaagctgaaagagcggcagcagcagtacggtcgctatggcagcgacgcctaccgtcggttcgagcggtaa

SEQ ID NO: 153534 - DNA, 705 bp, Enterobacter cloacae
atgccgtttgccaagctgctggcacggaacgctctgccggtggtcgccctggtggcggccactggcttcggtgcggcggatgcgaccgccgcacggctcttccccgatctgtcggaacagatggaagagcgcgttgtgtgctcggtgtctgcggccgcgaagtacgagattccggccaacattcttctcgccattcgggaaaaggagggcggcaagccgggccagtgggtcaagaacaccaatggcacctatgacgtgggcgagctgcaattcaacaccgcctacctgggcgacctggcgaagtatgggatcacggcccaggacgttgctgcggcaggctgctatccctatgacctggcggcctggcggttgcgcgggcacattcgcaacgacaggggcgatctgtggacacgcgccgctaactatcactcgcgcacgccgtcgaagaacgcgatctatcgcgccgatctgatggtgaaggccgacaagtgggcgaagtggctggatgcgcgtttcgtcaccgtcaactatggccccagctcgccggcgcagccggcagggaaggggaccacacttgcggccgctgatacgtcggcagcagcgccggccgaagcgcagccgatgaagcaaggccggatcacccgcaccagcctccgcagctcgggttacgtaccccggcagctcatcatcaacaacacgccataa

SEQ ID NO: 153535 - DNA, 264 bp, Enterobacter cloacae
atgggcattcgcaacctgacgcagcgatacatgaacggggccagggcctacgcggcctgggcggcatcgcaggcgaaagcgccgtttgatcttctggtactgggcatcgggcctgtcatcgtctttggcctggtcgcgcatacgctgctcgcgttcctgcccacatgggccatgtacgccgccggcgctctgctggtcctcgcggccctgcctttggcgctgcacgtcctccgggaatacgcgctgcgctatgggcgcaaatag

SEQ ID NO: 153536 - DNA, 735 bp, Enterobacter cloacae
atgaatacacgcgccatgaacgacgccagcggccgggcctcgctgcctgccatggtgatcgccgacggcaccattgaagccttgaagtggctcgccttgcttgccatgaccggggatcacgtcaacaagtacctgttcaacggtacgctgccatatctgttcgaggcggggcgcttggccctgcctcttttcgttttcgtcctggcgtacaacctcgcccgcccgggcgcgctcgagcgcggtttgtacgggcgagcgatgaaacgcctgttggccttcggcctggtcgcctcggtcccgttcattgcgttgggtggagtggtgggcggatggtggccgctgaacgtcatgttcacgctgttggccgcaaccgcgatgctctacctggtcgagcgcggccgctcggtcgctcctatagcgctgttcgtcgtggccggcggcctggtcgagttctgttggccggcgctgctgctggccgcgtctgtctggttgtacctcaagcgcccgacgtgggcggccgcgttgatggcgctgctgtcttgcgcgtccctgtggtacatcaatggcaacctttgggcgcttgctgttgtgcccctggtgatcgtcgccgccggcgtcgatcttcgtgtcccgcgcctgcgctgggccttttacacgtactacccgctgcatcttgccgctctttggctgatccgcattccgatgcgcgaggcgggctacttgtttttcacctga

SEQ ID NO: 153537 - DNA, 420 bp, Enterobacter cloacae
atgcaattgctcaagaaatgcaccatcgcggccctgccgctgctcgccctgtccggctgcgcactgctgaacatccccatgccgacgccgcccggttcgaccccgccggaaatgctgaccgtgccagtggcgcaaatctgccgcgacgctgacaagaaccctgttcgggcaacggagctgtacggcaagaaagggttgtcggccaccggcaaggtgcaggtgatttccgaaggcttcaagcctcgctatcgggtgctgctgcgcgctggcagcgcctcggtccatgctgggaccgataaccagctcgccatcaagtcggtttccaccggccagaccacgcgcgtcactggcaccgtgaaggacgtgtcctacgaccataacggctgctcgatctcgcttgacgatgcgaagttctactga

SEQ ID NO: 153538 - DNA, 696 bp, Enterobacter cloacae
atgctgacacggttgaagggcttccttgctcgtcgccgcgagttgaaggaactggatgtgtccgtggtgagccggccccggccggctccggcggaattggtccaggttgatgcacgcgaggccgtttggcgcgtgccggtgcccggccaggccgaccgcttcatgtcggccaagcctggcgcgatcaacgatgaaatgttcgtggttcgggtggacaccgaagcgttctatcgggcttggctgcgcagcagctcgacgggccgcgaaacgcggtcggacaactgcccgctgcgctcggaaatgccgcaggactacaagttcaagcacgccgtccagggcttcgcgcacggcagggaaaatcctgtgccgctggccttcgccggcgcgcaccaggagcgccaccgggtggacattggtttcagcaacggggtcacgcgctcgttctggctgattgccaacaaggctccgtcgttcccgatccaggtccacggccgggagtcggccgagctgctgaacaaggtttgcggcctcgatcctgcgccgctgtcgttcacggaactgttcgcgcaggcccaacgccaggctccgcaggtcgccacaccggcccggcctgcgccggcagcggccacccggccagctcccaaggtgcagccacgccccggccgaagcggcccgcgcaaaggccgcggactctga

SEQ ID NO: 153539 - DNA, 663 bp, Enterobacter cloacae
atgtatgtaatcgcctgcggcatcgttgccggcttggcggctgcggtggccctgttgggcttcacgccgatgatggaggcgcttgccgccggcgaacgccgcaaggcactcgcgcaatggacgcggacgatgttcctggtgctgctgcctgtcgtgctgatgtgcgcgcccatcgggtccagcatttacgacgccgtgcaagcggacgctggcaagcccatcgctttccacaacggccggatcacggtcgtcatggccctggtcggcagcttggccgttgtcctggtcgcggctgcgcgtgcggtggtcaaccgcaagcatgccagcttctggttcgtcggctgggtgatggcgtcggttttggccggcggcgtcggcgcgatcgccagcgcgaagcaactggcgttcctcggcgaacatagcggcatggtggccttcggcttcttccgcgaccaggtgaaggacatgcactgcgatgcggacgtgatcctggcccggtgggatgaaaaggcgaactcgccggtggtctaccgctgcccgaaggcgtacctgctcaacaggttcgcatccgcgcccttcgtgccctggccggactacaccgagggggaaagcgaggatctaggtagggcgctcgcagcggccctgcgggacgcgaaaaggtga

SEQ ID NO: 153540 - DNA, 624 bp, Enterobacter cloacae
ttgaaggtcgcccgcatctacctgcgcgccagtacggacgagcagaatcttgaacgccaggagagccttgtagcggccacgcgggccgccgggtactacgtcgccggcatctaccgcgagaaggcgtccggcgcacgcgccgaccggcccgagctgctgcgcatgatcgcggacctgcaacctggtgaagtcgtcgttgcggagaagatcgaccgcatcagccgcttgccgttggccgaggccgagcgcctggttgcgtcgatccgggccaaaggggccaagctggccgtgcctggcgtggtggacctgtcggagctggccgccgaggcgaacggagtggcgaaaatcgttctggaatccgtccaggacatgcttttgaagctcgccttgcagatggcccgcgacgactacgaggatcggcgcgagcgtcaacgtcagggtgtccagttggcgaaggccgccggccgctacaccggccgcaaacgtgacgccggcatgcacgaccgcatcatcacgcttcgctccggcggatcgagcattgccaagacggccaagctggtcggatgcagcccgagccaggtcaaacgagtgtgggcggcctggaacgcgcagcagcaaaaataa

SEQ ID NO: 153541 - DNA, 534 bp, Enterobacter cloacae
atgaagcgccgaagctacgccatgctgcgcgccgctgccgcgctggccgtcctggtcgttgcctcgccggcatgggccgagctgcgcggcgaggtcgtgcgcatcatcgacggcgacaccatcgacgtgctggtagacaagcagccggtgcgcgtgcgcctggtggacattgacgcgccggaaaagcggcaagccttcggcgaacgtgcgcgccaggcgctggccggcatggtgttccgccggcacgtcctggtcgacgagaaggacaccgaccgttacggccgcacgctgggcaccgtgtgggtcaacatggagctggccagccggccgccgcagccgcgcaacgtcaacgccgcgatggttcaccagggcatggcgtgggcctatcgcttccacggccgcgcggccgaccctgaaatgctgcggctcgaacaggaggcgcgaggcaagcgcgtcggcctctggtccgatccgcacgccgtcgagccgtggaaatggcgacgcgagagcaacaaccggagggacgaaggttga

SEQ ID NO: 153542 - DNA, 294 bp, Enterobacter cloacae
atgggtatacccaatttgaccaagggggacgcgatgagggcggccaagcactaccgacaacttctatccatcgacttcaacatcgaggcgctggccttcgtgcctggacccgacggcacacgcggccggcgcatccacgtcctggggcgcgaggtccgcgaccggcccggcctggtcgagtacctttcgccggcgttcggctcgcgggtggcgctggacggctactgcaaggccaatttcgatgcagtgctgcacctggcgtaccccgatcatcagcaatggggccacgcatga

SEQ ID NO: 153543 - DNA, 252 bp, Enterobacter cloacae
atgagccgcctgacaatcgacatgacggaccagcagcaccagagcctgaaagccctggccgccttgcagggcaagaccattaagcaatacgccctcgaacgtctgttccccggtgacgctgatgccgatcaggcatggcaggaactgaaaaccatgctggggaaccgcatcaacgatgggcttgccggcaaggtgtccaccaagagcgtcggcgaaattcttgatgaagaactcagcggggatcgcgcttga

SEQ ID NO: 153544 - DNA, 312 bp, Enterobacter cloacae
ttgacggcctacatcctcacggctgaggccgaagccgatctacgcggcatcatccgctacacgcgccgggagtggggcgcggcgcaggtgcgccgctatatcgctaagctggaacagggcatagccaggcttgccgccggcgaaggcccgtttaaggacatgagcgaactctttcccgcgctgcggatggcccgctgcgaacaccactacgttttttgcctgccgcgtgcgggcgaacccgcgttggtcgtggcgatcctgcatgagcgcatggacctcatgacgcgacttgccgacaggctcaagggctga

SEQ ID NO: 153545 - DNA, 465 bp, Enterobacter cloacae
atgctcagcacacttccacaagctcatgcaactttcttgaaccgcatccgcgatgcggtcgcttccgatgttcgcttccgcgctcttctgatcggcggctcttacgttcacggaggactcgatgagcactccgatttggatttcgacatcgttgttgaggacaactgctacgcagatgtcttgtctacacgcaaggattttgccgaggcactgcccggcttcctcaacgcgttcaccggcgaacatgtaggagaaccgcgccttctgatctgcctatatggtccgccactgctacacatcgatttgaagttttctcttgcttccgatctcgaccagcaaatcgagcggcgggcggttctgtttgctcgtgatccggcagagatcgagaagcgcattgaggcggcagcggtggcatggccaaaccgtccctccgagtggttcgaagcacgttgtcagcgccagtga

SEQ ID NO: 153546 - DNA, 222 bp, Enterobacter cloacae
gtgaggcgattggaaacccttcgactggatgaagagcgcagactagccaccaccattgcgctgcacgatgcgttgtctgtcagggatgccatcaaagcatctgcctccatctatctcgacctccgagccgccgatccgtcgttggaaccgacaacgcatatgccaggtcttctgtacgacttaatagaacgtgcggtaccaggcacgcctaaccgtcagtga

SEQ ID NO: 153547 - DNA, 816 bp, Enterobacter cloacae
gtgaacgatattgatcgagaagagccctgcgcagccgctgccgtgcccgagagcatggcggctcacgtgatgggatacaaatgggcgcgtgataaggttggtcagtccggctgcgcggtctatcggctgcatagcaagtcaggcggctccgacttgtttctgaagcacggcaaagatgcttttgccgacgacgtgactgatgaaatggtgagattgcgttggctggcggggcacatttctgtgccctccgttgtaagcttcgttcgcacgcccaatcaggcatggctcctgacaacagcaatacatggaaaaacggcatatcaagtgctgaaatcggatttcggagcccgtctcgttgttgttgacgcattggcggcgttcatgcgccgactgcatgcgatcccagtgagcgaatgctccttcaacagtgaccacgcatgcaggcttgcccgagcgcgggagcgtatcgaggcgggggttgttgatgtcgatgacttcgataaggagcgcgaagggtggacggccgaacaggtttgggaggcgatgcatcgcctcctaccgctcgcgccggacccagtcgtgacgcacggcgatttttcactcgataatctacttatcgtcgaaggtaaggtagtcggctgcatcgacgttgggcgggctggtattgctgatcgataccaagaccttgccgtgttatggaactgtcttgaggagttcgaaccttcgcttcaggagaggcttgttgcgcaatatggcattgccgatccggataggcgcaagctgcaatttcatctcctgctggacgaacttttctaa

SEQ ID NO: 153548 - DNA, 291 bp, Enterobacter cloacae
atgaacatcgaggcgtacccgcacgattttcgcggctcgctcgccgtggtttctgcgaccggcgtggccggttgcaggacctggacgctgcgcagcgtcgaaaccgggaagcactacgagcttgcgccggcttcgattgaaggctggcctctccctgcgaagcgtgaggacagtcggcccaacagcatcatcgtcaactacgacggcaacgacgtgatcgcgcttgagctggcgaccggcgagttgtaccgcacccgagcacctgcaacgaccttacgactacggaggtag

SEQ ID NO: 153549 - DNA, 441 bp, Enterobacter cloacae
atgaacaaagtacagatcggggcaccacgcacatcggcaagccctggcgtcatcatgaaacccgagggcagcgtcaagatcgccgtcatgaacggcagccgccaggtggaccaggtagtgaacggcgaatggctgaccatgaaggtgttgcccgaggcggggctaccgaaaggcattcaccagttgagcgatgcgaaggacgcaagcaaaaacgtccacccgcacaagcacgtcggccaggtgctgcacgacgatgggcgcaacgtctaccagttcagcgaaggcgggatcgtgaaacacagccggggcatctttgagaagccgccggttgtcggcaagaactacgaaatcgcctacagccggggccagggcaaggtcatcggcgaggtgtcccaggaacaggcggccaaggccgagcagaaacgctcgcgctcgatctag

SEQ ID NO: 153550 - DNA, 2166 bp, Enterobacter cloacae
atgtaccgcgccggcgcggagccggcggaaggcaaccaatcgctggccgcgctgaccgaaaccacgctgggctttgagctgcctgccgattggaccggccgcgtccaggtccaggccaacgtcgaggtcgagcacgacggcgaacggtccgtggtgccggccggcgaccgagagccggagttttggggcgtctatgcgaaccatgcgtggggcggccaccaatggcttgccgacttcgccggccccgacgcgcagaccaatgccgaagcgctcgccgaccgcctggccgtgatcgacgcttacgcgacggccaacgagtacgagcaggccgcgaagttcgcccgcatccatgaagagcgagttcgccgcgatcccaacagcaccgacgaggaccgcgttgccgccaaggaggcgcgcaaggccgccgagggcacggccatgctgcacgacgaggacctacagcgccggatcgccgactacgagcgcgagcagcaggaaatggcccaggccatgaacgccgccgagcagccggcggccgctcaagcccccgccaagcccgagcgcgcctacttgaacgtgccgttcaaggagaaagacgaggtgaaggcccttggagcgcgctgggaccgccaggaacgcgcctggtacgttccggcaggggttgaccctgccccgttcgccaaatgggcgcgcgagggcgctacagcggccgtagaggcccgcgccgaggcccagcctacccaacccacggccgagcgccccaacgcggcccaggagcgcgtctacctggccgtgccctacggcgagcgccaggttgccaaggcggccggcgcgcagtgggacaaggtggccaagtcctggtacgccggaccgaacgccgacatgggcaagctgcaacgctggctgccggacaacgtgcccacccagcaatccccggccgtcacccccgaagatgagttcgcggaggccctgaaaagcatgggctgcgtcgtcaccccaggcggcgagcaccccatcatggacggcaagaagcaccgcatcgagaccgagggcgacaagaagggcgagaagtcgggcttctacgtcggccacctcgacggccacccggccggttacatcaaaaacaaccgcaccggcgtcgaaatgaagtggaaggccaagggctacgccctggaccccgccgagaaggccaagatgcaggccgaggcggcggccaagctggccgcgcgtgccgaggaacaagaacgccagcacgaagccacggcgcagcgcatcggccgccaggcgcaaagcctggttcccatcacggaaccgacgccgtacctgcgcgacaagggtctacaggtgcacgccggcgtccttaccgaccaggagggccagaaaacctacatcccggcctacgacgccgacggcaagcaatggaccatgcagtacatccaggaggacggcaccaagcgcttcgccaaggacagccgcaaggaaggatgcttccatgtcgtcggtggcatggatgcgctcgcggccgcgccggcgctggtgatcggcgaaggctatgccaccgccgccacagtggccgaagcgctggggcacgcgactgtcgccgcgttcgattccggcaacctacaggctgttgccgaggccctgcacgcgaaattcccggacaagcccgttgtgatcgccggcgacgacgaccgccaggtgcagatcacccagggcgtgaatcccggcaggacgaaggcacaggaggccgccaaggcggtcggcggcaaggccatcttcccaatcttcgcgccgggcgagaacgcctacccgaaggagctgccgccgatcaccccggagaactaccgcaaccatttgcacgctgaaaagcgcctcgcggacgcggcggccggcaaggtccagttgagcgaggccgacacggccaagctcaaggaatcgctgttgaacgatggccagctcgccgccctgtcgaacatgaagaagcacaccgatttcaacgacctgtccgagcgcagcagcctgggcaaggacggggttgaacgccaggtgagaagtgctgtcggcaaggtgcttctcgacgagggccagcggcagaaggtgcagcagctcaagcagcaagacatcgagcagcaagaacagcggcaacgccgcgcgagaacctactaa

SEQ ID NO: 153551 - DNA, 1023 bp, Enterobacter cloacae
atgactatcacgactgtcggtatcgatcttgctaaaaatgtgtttgctgttcacggtgttgatcaaaatggtagaactgttctggttaagcctaaagtatcgcgtgctgcacttcctgagttaattgcaagtttgcctccctgtgttatcgggatggaagcatgctccggggctcactactgggcaagattgtttcggcagtatggtcatgagccacgtctgatggctgctaagtttgtatcgccttatcgtatggccggaaaatcaggaaaaaatgatgcagctgatgctcaggctatctgtgaagctgttcgtcgtccgcatatgcggttcgtaccagtgaaagacgaaagccagcaggccatgcagtgtttacatcgtacccgtcagggttttatcgaagagaaaacagcaacgtataatcgtctgcgaggattgatatctgaattcggtgtcatcgcgccacaaagtgctgatgccctgcgccacatggtttctgtgcagaagagctctttaccgcttcaggttcagcaatgtgttgatgatttgatggaacacgttgatcgcattgaagctaacatcactgaatatgaccgaattttgtcccacatagccaaaacagatcatcgcagtcagcggctgatggagctaaagggcgttggtcccacaacggcctgtgcactggtcgccagtatcggtaatgcacatgattttaaaaatggacgtcaactggcagcctggctggggctgacgccatcacaatacagcagcgggggaaagtcgaaactcggcaggatcacaaaagccggtgattcgtatctgcgaacgctactggttcagggggctcgttcagtgcttattggcgccgggaaaaggactgactcattcagccgttgggtttgtatgttggttgagcgcagagggtactggcgggctgttgtggccatcgccgccaaaaatgcgcggctgtgttgggcatcactacattacggtgatgatttccggctgtactcagtcaactaa

SEQ ID NO: 153552 - DNA, 270 bp, Enterobacter cloacae; identical to SEQ ID NO: 130230

SEQ ID NO: 153553 - DNA, 270 bp, Enterobacter cloacae
gtgggtatcgaaacgataatcgggctggccgcactggtgatttccgccattgcaggcgcttttggcctgggccatattcgcggcaccagcaaagctgaagcgaaagccgaccagcagcgcaccaaagataacgcagcggcaacggtcgcagcagccgaacgccgggtagaagcaacgaaagaggccagcaatgtacagcagactgttaaccatatgtctgacgacgatgttgatcgcgagctgcgggacaactggacccgtaagggttga

SEQ ID NO: 153554 - DNA, 219 bp, Enterobacter cloacae
atgggggaagaacaaaaccctgtttctgtcgcacgggagtgggtggctcaggccacttcgctgaaggcgggggtcaccgtcaccctgtccgatgtgtcccgatactgcgacgtgcaggtggagatccgcaccaacggaacgcttaactggcgcgcctggtcgtttgaaccggattttctttttgaactgaaacgcaatctgcaatacgtgcagctttaa

SEQ ID NO: 153555 - DNA, 225 bp, Enterobacter cloacae; identical to SEQ ID NO: 129758

SEQ ID NO: 153556 - DNA, 1029 bp, Enterobacter cloacae
atgaaaaaatttacgttagcgctggggctgttgatcagtgcatttgcttcctctgcggcggatatgtcccgtggggccgataatttttataaaagcgataaggtgacgcagcaaaaagtcacctttaaaaaccagtatcagatggccgtggtcggcaacctgtttatcccgaaaaagatgaaccagaatacccgacacccggcgatcgtcgttggtcacccgatgggagccgttaaggaacagagttcgaatctctatgcgcagaagctggcggagcaggggtttgtcacgctggctatcgatctctctttctggggagaaagcgagggcaaaccggggcacctgatttcaccggaaatctacacagatgatttcagcgcggcggttgattatctaagcacacagccgtttgtcgatccggatagcatcggtgtattaggtatctgcggcagcggaagttttgttatcagtgctgccaagattgacccgcgtatgaaagccattgccaccgtcagcatgtatgacatgggggctgcatttcgcaacggcctcaaccattcccagacgccggaacaacgaaaggcctttatccggtcagccacagagcagcgtttagcagagtttcagggaggcgagacggcctacattcccggtaccgtgaatacactggacgcttcaacgcctgatattcagcgcgagttctttgatttctaccgcaccgaacgcggcggctacaccccacagggtcagaaagaagaactgacgacgaaaccgatgctgagcagtattggcaagtttatgaacttctatccgttcaacgatattgaaaccatctcgccgcgcccgatgctgtttattaccggcgatcaggctcactcaaaagagttcagcgaggacgctttcaaacgcgccggtcagcctaaagaactgtatgtcgtaccgggcgcagggcatgtcgatctgtatgaccgtaccgacgtcatcccttttgacaagctgaaagactttttccgtaaaaatctgcaataa

SEQ ID NO: 153557 - DNA, 321 bp, Enterobacter cloacae; identical to SEQ ID NO: 103996

SEQ ID NO: 153558 - DNA, 228 bp, Enterobacter cloacae
ttgaaaaacatttttgtttcagtgttcgcagcggcagttgcgctttcagccctaaccggctgcacgcgcacaagctatgccatccacaccaacgacgggcgtacaattgtcagcgacggcaagcctacagaatcagactcaggcctgctgggctataaagacgcaaatggtgtcaaacagcagatcaataaagccgacgttaaagaagtctctgaaattccgcattga

SEQ ID NO: 153559 - DNA, 486 bp, Enterobacter cloacae; identical to SEQ ID NO: 95527

SEQ ID NO: 153560 - DNA, 384 bp, Enterobacter cloacae
atggtcagccacgtctggctgaccatgcgcagcatccctttcgtgcgctggctcatggctgaggacagcttccggtcgtggtcgaggatggcggcgctgattctcttctcgctttcgctcagttccgctctgacagacttctcgtgctcgctgaatgcggctttcagcatctcgccggtagtctgctgctgcgctttcgatttctgctctaagtccttcgccagcgttaaaagactgttcatagatggctcccttcagtcggatgtttcgccccccgtccgggtcggcaatgctgatgctgctttttgtggtgcgaaccacctcaaaacctgcgctttccagcgcctcagtgacgtcctgacgcgttttcagctccccggatga

SEQ ID NO: 153561 - DNA, 519 bp, Enterobacter cloacae
atgactttgtcatgcagctccaccgattttgagagctacagcgacttccgtcccagccgtgccaggtgctgcctcagattcaggttatgccgctcaattcgctgcgtatatcgcttgctgattacgtgcagctttcccttcaggcgggattcatacagcggccagccatccgtcatccatatcaccacgtcaaagggtgacagcaggctcataagacgccccagcgtcgccatagtgcgttcaccgaatacgtgcgcaaaccgtcttccggagcctgtcatacgcgtaaaacagccagcgctggcgcgatttagccccgacgtatccccactgttcgtccatttccgcgcagacgatgacgtcactgcccggctgtatgcgcgaggttaccaactgcggcctgagttttttaaatggcggaaaatcgtgttgaggccaacgcccataatgcgggcggttgcccggcatccaacgccattcatggccatatcaatgattttctggtgcgtaccgggttga

SEQ ID NO: 153562 - DNA, 384 bp, Enterobacter cloacae
atggtcagccagacgtggctgaccatgcgcagcatccctttcgtgcgctggctcatggctgaggacagcttccggtcgtggtcgaggatggcggcgctgattctcttctcgctttcgctcagttccgctctgacagacttctcgtgctcgctgaatgcggctttcagcatctcgccggtagtctgctgctgcgctttcgatttctgctctaagtccttcgccagcgttaaaagactgttcatagatggctcccttcagtcggatgtttcgccccccgtccgggtcggcaatgctgatgctgctttttgtggtgcgaaccacctcaaaacctgcgctttccagcgcctcagtgacgtcctgacgcgttttcagctccccggatga

SEQ ID NO: 153563 - DNA, 648 bp, Enterobacter cloacae; identical to SEQ ID NO: 140488

SEQ ID NO: 153564 - DNA, 285 bp, Enterobacter cloacae; identical to SEQ ID NO: 151639

SEQ ID NO: 153565 - DNA, 1170 bp, Enterobacter cloacae
atggtgggggggcgtgatagaatacgccgccttgaagttcaatgtcgtgagtattccatgtcagataacagccagaaaaaagtgatcgtcggcatgtccggcggtgtcgattcctccgtttccgcctacctgttacagcaacagggctataaggtggagggcctgttcatgaagaactgggaggaagatgatggcgaggaatactgcactgccgctgcggatctcgccgatgcgcaagccgtgtgcgataagctcggcattgaactgcacaccgttaactttgctgcagaatactgggataacgtctttgaactgttcctggaagagtacaaagcggggcgcaccccgaacccggatattctgtgcaacaaagagatcaaatttaaagccttcctggaattcgctgcggaagatctgggcgcagactacattgcgaccggccactacgtgcgtcgtgcagatgtgaatggcaaaagccagctgctgcgcggtctggacggcaacaaagatcagagctacttcctttataccctgagccacgaacagatcgcccagagcctgttcccggttggcgagctggaaaagccgcaggtacgtaaaatcgcggaagagctggacctgatcaccgcgaagaaaaaggactctaccggcatctgcttcatcggtgagcgcaaattccgtgatttccttggccgctacctgcctgcacagccgggtaaaattgtcaccgttgatggcgatgagatcggccagcaccaggggctgatgtaccatactttaggccagcgcaaaggtctgggtatcggtggaaccaaagatggcagcgaagatccgtggtatgtggtcgacaaagatgtcgaaaacaatattctggttgtcgcccaggggcacgaccatccgcgtctgatgtccgttggccttatcgcgcaacagctgcactgggtcgatcgcgagccgctgaaaggcacgctgcgctgcacggtgaaaacgcgctaccgtcagaccgatattccttgcaccgttaccgcgctcgatgacgatcgcattgacgtgcgttttgacgagccggttgccgccgtcaccccaggtcagtctgctgtcttctacagcggcgaaatctgcctgggcggcgggatcattgaacagcgcctgccgctgcccgctgtttaa

SEQ ID NO: 153566 - DNA, 1278 bp, Enterobacter cloacae
atgatctcacgctggcaatggattctgaagcgggtatttaaaaagttatggttcagggctgcattattcgcaattgtagcgataatgacggctcttttatcaattctgtttaaatcaatgatccctgagtcggtatcggtgaaggttggcgcagaagccgtggataacatactaaatatactggcatcgagtatgctagcagttaccacattttcgcttagtatcatggtcacagcgtacggatcagctaccactaatgtgacaccaagagctacacgtttagttgttgaagatgtaaccacccaaaatgtactggccacattcatcggttcttttctcttcagtctggtagggatcattgctcttaatatgggagcctacggagaaagggggagagtcattttattcgttgtcacactggtggtaattggtttaattctcatcacattgcttcgttggatacagcatttgacctctctgggaagggtaggagagacgactgcaaaggttgagcaggcggcaatcgaagcatttgttgaaagagcaaaaagcccatatctgggcggatatccatggcttgagaacaatgaacagccaaacggaacggttgcagtgtatccggagatgattggctatgttgaatatattgatatggtgaaactcggcaagctgttatctgaggatcctcgacatgtttatcttgtggcgcaaccgggcagtttcattcatccgtcgatgccagtattgtatctgagtcaggggcaggggccatcaatcagaaccgatttgctcgagacgatcattgtctcggatgtacgctccttttctcaggatccacgattctgtcttagcgttatggctgaaatagcctgcagagccctttcaccggcagtgaacgatcctggcaccgcaattgatgtcattggcagaggtgtacggattctatcggcgtatgcgcataataaatctgacgaaattgatgtgacatatccttcaatacatgttgcgccacttcagaacagcgatctacttgaagacttttttttacctattgcccgtgatggtgccagtatgagggagattcagataagagtcctcaaaggactctctatgctgagcactggttggcctgggatatttgctgaggccgcgcatactttagcatttgaaacattagagcatgcaactcgtgctgatcatatagacactgacagatatctaataaaatcaatttattataatttattttatgacgagggttccaataaaaaaccatag

SEQ ID NO: 153567 - DNA, 546 bp, Enterobacter cloacae
atggaggtcaataaaaaacgcctttcagagatttttggtgtcagcatccgcacgatccagaactggcaggatcagggaatgccagttgtgcgaggtggcggtaaagggaatgaagtgctttatgactctgccgccgcaattgaatggtattccgccagggacgcagcgatagaaaacgaaaaactgcgtaaagaggttgaacagctgagagttgattcagaatcagacctccagcctggcacgattgattatgagcgccatcggcttacccgagcccaggctgatgctcaggaactaaaaaatgcaaaagagtccgctgaggtggtggagaccgcattctgcacgttcgtgctgtcgcggatagccggagaaattgccagtatccttgatggaatacctctgtcggttcagcggcgctttccggaactggaaaatcgacatattgatttcctcaagaaggacatcataaaagccatgaacaaagcagctgcgctggatgaaatgataccggggttgctgagtgaatatatcgaacagtcaggttaa

SEQ ID NO: 153568 - DNA, 129 bp, Enterobacter cloacae
atgtgtttgaaaatcaaaaaaaaccctcagaaaatgagggttaacggtcaaggtgaattcattttgattattggtgttggcacaaaagaaccgcttaatcataatggctcattgaaatatcgcaactaa

SEQ ID NO: 153569 - DNA, 861 bp, Enterobacter cloacae
atgcggtttaatacgccactacgttatccaggcggtaaaggtaagttattcaattttatgagtaaaatcatagggatgaacgatttacaggacctgcattacgcagagccatacgccggcggtgccggtttggcgttgaagttactattcaaagaaaatgcttcacaaatataccttaacgatttgaacttagctgtatattctttttgggatagtgtactcaaccgaactgaagaattatgccatatgatccttacaactgaagtttctatggatgaatggcatattcaaaagtcaattatgactaatcctgaaaataaggatctgctacaacttgcttttgctacattttttcttaacagaacaaaccgctctggtatccttaaagggggggtgatcggaggtaagagtcaggacggaaaatggaaattggatgccagatacaataaacaagatttaattcaaagaattaaactaatagccgcgcaaaaggatcggataaatatttataatctcgatgctaatgattttattacaaaagttgtaaaaaatctgccaaatcactctttgacatattttgaccctccatactatgtcaaggggaaaggtctatatgaaaatcattatttacatgaagaccatgttgtcatcgccaataggatacagactgagattcaaacaccatggatagtttcatatgataatgttgcacctattcgaacgatgtacaattcatcaaaaaccttatcttatggaatcacctatagtgcccaagagcgctatacaggcgacgaagttatgtactttagtgatggcctaaagtatccggaatgtgctgacccggcaaaatttaaagggtaa

SEQ ID NO: 153570 - DNA, 1743 bp, Enterobacter cloacae
gtggctaactctatcacaaaactacgtagtatgaatgtggaaagttttcgaggtctcaagaatgtaaatatatcatttggggagcgaattactgttatttgtggtaagaatggcacatcaaaatcaaccatacttggaattattgcccaaatttttagtttttctcgggactattctaaagatcctgcggagttgctcgggtcttatcggacacttacaggtaatcgatttaaatctctatttagtgagcactttaggttttcaagtaaatttgatgcgcctggcgggatggaagtgcaaataacactctatgatggtgcatttgaaaaagaattgaataatttaagacttggtctggttgactcgacatatcatcagaaagcgaggccagttctcagaaataacgacgtcttaggcaataaaaataccagtcgtaatgttactcaccctgtaatttacttgagccttcagaggcttttaccaataacgctgagacctgaatatagtgagcgcgacgtccagtatatcattgataataaaaaagaaattctatcaatgaacagaaggttacttatcaaggaaaatggaacgtccattactgctaccacaggaactatcgactcaatggtagtgcatggagataattatgaccatgaatcggtttctgtcggtgaggataacgttggacagattatccaagctatattttctttcaaaagactaaaggaagaattgaaagattatcatggtggcatgctattgattgatgaggcagatgctgggcttttccctgctgcgcaaattgaattaattaacgtgctaaaaaaaatggctagtaagcttgatttgcaaattgttatgacatcgcactcacctatccttatagaggaggtgtttaaattaagtaaagttgctgataaggattataggacagtatatcttacggatacatatggacctatttcagctaaaacaaatctttcatggccagaaataaatgctgatctgctcgttgataccataaaagttgatgcggaagaagcatttcctaaaataaatatttactttgaggattttgaggcttatttgttcttcaaacaactaataacagaaagacatatcaataaaataatcactccgctaaaagacgtaaatataagttgtagtactatgttagatttaatggcgcggaaaataccagagtttattaataaaagtataatagttctggatggcgatgttgtaaatgataatggccagaatgcaaaaaaagcaaaatctgagaagagcctgtgcttattaccaacgactcttccgccagatcagcttttgtttgaatttttgtataatttagataaagaagatttgtattggctaaagaatcaaggtttcacaagacaggtttttataagaattagtggcgatattatagatcggctcaatatagttggagagaaaatatctctagaagatataattaaaaattacagaaaaggtaaaagtgaagagagtgtaaaaggagagcttagaaagttgttcaaggcttttgctcaaaatgataaaatccgttcgcttttaactggcccagtaagtaaaaatccgttcaggtattggattaaccaaaatccggagctaaaacttgaatttaagaaaaaatttgaagcttgcttaattaatgccctaattagtggttttggtattgattccggcaaagtgtatggttaccttcaaatcgataactga

SEQ ID NO: 153571 - DNA, 186 bp, Enterobacter cloacae
atgccacgaccaaaaactcatgaagagcgtactgtgattattaaccggattatcgaactggtgaaagagctgggccacatcatgacgaaggatgtcgtcgcgatgtttaacctgcaccgaaccaccgaggagaaatacatctggattgtcgtacagcgtggaaagcatatccgtcatggccgctga

SEQ ID NO: 153572 - DNA, 267 bp, Enterobacter cloacae
atgaataacgcactgaaactagcaactaagtacgcagggttcgcaagtatcgaatctgatgttctctcgggtctcgaaaaccttgaattagctcgtgtagcagtaatttctgcagcagaacacatgaagagcccggatcaagaagtggtcttagaggctttatctcttgttaaaaaattcatgcatcaacagcgagatgctgcacgtagcgagattcagaaaatccgaggcgttctctctggcgaactggagtcctatgatgattga

SEQ ID NO: 153573 - DNA, 1920 bp, Enterobacter cloacae
atgtctgttgagttaaaagtatttggcggagcttatttccccaaagataaagcattaaaaaagcatccgaatttaaaacccctcgcaactgccgttaatgcttctacaaaagctatcgcagaagccgttattttcggtaagctggcggccgaacagcctgaacatatcgatgattactttaaggtcaaaatctgggagcaccgcgaggatcttccctgccctgaccttgatgttttctcacctgagtttttcgacagcgtggcagtatggaatgtgaataccggtgagccagctgcggcaccacagccagaaagtgatgaaaaagcagactgggaggataacaaggcacaggaagaaattaaaactgtcgcgcggctcgaccaggcatcccgggcagcttgcctggcactgttcggcccggtccctggcatcactacggcccaatacggccagatcgtcgatctgctgaatgatgatgaatcgagttatgcccgcgaactggcagaagctctggggaaagaaacccgcgcgctggccttggaaccaggacggcaggagcagttactcgcgtggctacgtgagaacacaaaagagtctgctcaatggccggacattaaaaagcagatcgccaaatggattgatactccggtagataagcgcccgcaggcagccagtaccgataatgtaggagcggatgttgttcgcactgactcaggtgctcgcctgtgcaccggcacgcctacagatcgcaatttcaaacatagcaaagatagcctgggtaacgaaatcgctttaggcctgctggcgcgtgaacatgaattcaacatctacacagtcgacatgccgttatatcagcaggctgagaagatccgactgtcaggtaccgatgaagaattcaacgcatggtaccgcatgttcattaccacaccaggcgggttggacttctcgcgagcaatcaatattgccgtggtaaaaacggctccagaggacctttggaaagacccggttaaacaccgcgaatatttcaaccgcgtcatgaccgaatcagattactcgaaacctgatccgctgatcgtcgacattgcatgtggccgctcctcttctcctatgcctcaaacgattaaagggaatattattcatgatgaaaccaaatcgtctgtaccgggcgaaacagagttaccaacagtttgccctggcaaagctgcgcaactcgacaaagaactcaacgatgcattcgctcataacccagcaccagaagagcaagccagtgatcagccgcgggtggagaacctgggcggcggagtcttctctgtcgatgcgttgttaaacacccctccctcaaatgagggtgaaaaacaggaagtgccaccagcactaaatgatcgcgatattgaaatcgcccatgcactaaacgagcttgtgtccgggcgcacaaatatcgttgataaagacgatatcgaatatctcatcaccaccacgggtaaagatattgagcatctcttcccgctactgattgcagacatcacaacgactgaattttgtatgtcacccgatttcagtgatgaagaagtgcaggacgttgccactacgattctcgaaaagtggtctgacgatatcagcgttcgtcagaaaatagcgcttgatgcgatcgtggaataccggcgccctgaagtaccgaaaccggtagtgctcgctccaccagctgtcaaagcaaaacctcaaaaggcgactgcccctgaacctgaggaacacgatcggtggacgtcaccctcatacctgcaacagctaacgatcgcagcgctgcagggcttatgttccaacccggcatattgcaatcagtacgaggaattaccggctatggcatccggccttgcccgtagcgtgatcaaccatcaggaagtctcctgtgcgtctgattaa

SEQ ID NO: 153574 - DNA, 1515 bp, Enterobacter cloacae; identical to SEQ ID NO: 140571

SEQ ID NO: 153575 - DNA, 1128 bp, Enterobacter cloacae
atgatttataccactggcactattgccattagcggaaatacccttacaggtacgggaacaaacttcactgcagctggctcgctgattcgtaacggctgtaccgtcatcgcgctgaccagcccagcgcaggttttccagatcaccgctatcggcggggcaaccagtctcaccgtgacacctgcggcaagtcctgcaataccggccggaacgaagtattccattttgctgagcgacagcctgagcgtggatggcctggcgcaggatattgctgaaaccttcactatgtaccagcgttacatgagcggtttcgctgatgtgatgaacggtactacagacgtcactatcacgattaacggtgtggccgttaccgtaccgggccagaaatcactggcgaagaaaggggctaacagcgatataaccagcctaagcggcctgactaccgcgctcagtatcagccagggcggtacaggtgcaaagaatgctgctgacgctcgcacaaacctcggtttgggaaatgccgccactaaggatgttggccctaatactggtaatgtcttaggagttggatattttggtttcggaactccaactgttaacgttttaggaagtaccgaatcagggttttatggcattgatggctctggtactgcctgggcgccgcaagctggatcaggtattgtatgcgggtatgacccaacgcgccggcagcaaatatttacaggagcatccgggaatctttttgtccggaaccttagcgcatctgctatgaatacatcttcgtccaccattccatggacacagatgcagtctgttggaacatcagatattaattttaagcacgtcaacggcgatctcgatgttgctgattctcttgaaaacatctgtcaaatggagtttaagcgattctactaccttgatgatgatgagcagacagagcgccgtggagtaattgctcagcagatcgaacaaatcgacaagcaatatgttcactctgctgagggcgtagggaaaatgacgcttgaccttaacccactgatgatggatgccctggcagcaataaaggcacttaacgcaaaggtagtagagcttagtaaacaggttgatgagctaaaacaggtgggatcttga

SEQ ID NO: 153576 - DNA, 213 bp, Enterobacter cloacae
atgagaaaggttgagtgcacagttgatcggttcgaatggaatggtggcgaacgcaaaaaagttacagacacatttactggactgttccacgagtggggccttgagtatgaagagttcgaaagtgggcctggtaactattccgttggcatcgttgaactagaagatgggaaagtcgcaactttccctgcatcgaatatcaaatttctaagctaa

SEQ ID NO: 153577 - DNA, 219 bp, Enterobacter cloacae
atggccgatatcatcgacacagcagcagagattgaagagcttcagcgtaacgctgccctttccgctcatcgtctgaacagaaacgccgtatcggctgagcattgcgccgaatgcggcgacgatatcccggcgccgcggcgcgctgccgttcccggctgccagacatgcgctgattgccagagtgttatcgaattgaggaataagcagagggggcagtaa

SEQ ID NO: 153578 - DNA, 225 bp, Enterobacter cloacae
atgccaattgaagaacgccaggatatacaaggcgtaaatgttaaagctgagcagttaaatgccttaatgcaaacaattcacgctcatcatgatcaatttgaccgtcaccaactggatggccttttaggtctggcttatgacctagccagtttgatttatagctggacagagaaggaagaaactatcgttttagcgaatgaagatgcgcaaagggagattaaataa

SEQ ID NO: 153579 - DNA, 387 bp, Enterobacter cloacae
atgcaaaattcactttcttttaacgagccaattaaaacaccacaaatgctgttcggctctgacaatattaatgattttggaaacagagttaagagctgcaggatggaaggtgactcaatgcagccgactatcgaaccctgtgaggttgtagctttcgttgattgtggaggccgcgttcttacccccggcatctatgtttttacgggagatgtttttggccgtaactgcctcttcatcaagcgaattgaacccttaccggacggggcattaaagattatttctgacaatctccactaccaaactttcacgcttaactcgggtgagcaaaaagacatgcgtattcacggtcgggtagtcgcttctttggctgtgaggcgcttcgtatga

SEQ ID NO: 153580 - DNA, 423 bp, Enterobacter cloacae
atgatcgacaaccgcaccgccagcgtgattgacctggccttaaagaaacacgacacgcccgttggtccgttgttcgtggctcaacgccatggacgtatcaagaagtgctttagccgtgacactgcgatccgctatctggcgttttttatgacgacctgggcgtttgaagcctcaggttttcaatgcaggcatcctgatgtgctggccgtccatccactgaatccggaactgaattgctggcaacgcggtggcgtaacccatgagtatttcattgcccaccagcgttgcatccgtcgcctacgccgcattctggcacgtaaacgtgaaatggaaaggtggtgcaagaaatgggatgccatgcatgaccgctacgttaaagaacgcgaagaattgcaagcagaaaaaccgatcggagtacgctaa

SEQ ID NO: 153581 - DNA, 279 bp, Enterobacter cloacae
atgcaagctaaccagcagtcaatattacatcgcggaaagctaattccacttccattgctgaatgtagatctgcatgtctccccggaatttaccgggcgagtggtagttcacatcaaagaaggccgccagatttgcgattacccactgcgtgaagccgagcatatcaacactttatctggatttctggcgctagcccgacaggctggctggatggttattccgcctgaagaaatagcggagggcggagccagtggccctgacagcaatccgaattcctga

SEQ ID NO: 153582 - DNA, 348 bp, Enterobacter cloacae
gtgaaaaaactaattgaaattcgccgccgtcatcttgttcaggcaaagcttgattctgttatgcgtaggacgggtggaaacatccagatggcgaagcttgataacggcacgctgtttccggtcgagttaaccgaagaattattgacgaaggcactgataaagcttttcgaagaaatgatttacggcacgcataaacgtaccgaagcagaatcaattatttccggtcattacgctgattgcctcgggaaaagcaaattaacgcctgatgccgtgtatttcatggatgcactgattgaaacactggcggaagaagcaatgaaaaaacggagagcacaaaatgcaagctaa

SEQ ID NO: 153583 - DNA, 552 bp, Enterobacter cloacae
atgaatacattcatcatttgtgcatccggaccgtctctcaataaatcagattgcgaactgatctccggatcggggctgccggttattgctgttaactccacctggcaagccgtgcctgattgtgaatacatttacgcgggtgatctgcgctggtgggatgcaaacatcgatgttctgccgtcctccgcctctcgctggacctgtaattaccgggctcataaacgctatgggctaaatctgtttgatacagatacccggtgggccttcaactccgggcagcgctcgattctgtttgctgccagccagggggcgaaaaatatcatcctgttagggtttgactgctccattaatggcggtagtcactggcatggtgatcacgtcgggctggataatcctacagcagagagtatcactcgatggcgcggggagtttgccaataccgccagagcgctggccggtaaggtgaatatcatcaacagtagccgccagacagcgcttaagtgcttccggcgtctcggcctcaatgaggctttacacgaggtagcaagttaa

SEQ ID NO: 153584 - DNA, 741 bp, Enterobacter cloacae
atgaaaatgttatgttcggtaatgttgctggctttaacacttccttttacatcgtttgctgcaaataaaaatactgaattaagtcaaaatgaaaaggtcatgcttaaaaatttctttaagtatgacatgcaaaattatgttaattcagaaagtcatatattcccttatgatatgaaactcatttcagctgataagattgcaggggattatgaagcaaacgaggctagaggagacaaagattacaagggacaagccattgtaattagcggagctgttgagagaattagatcaactttaggtgatgttccagcagtggaactaagaactaatattggtataaatggtgtttccttatattttgctaaagagtatgaaagtttagcgattgatttgaacaagggtgatacagttaagtatgcttgtttaggtgacggggctgttatgggtagtccgatactcagacgctgcgtcccggttagtgtttatgtcgatgccgtttctcaaaatacgtataaagaaatgctatcagaattaaatggctatgctggcgggaatgatacggttaatgagttcttgttgtttgttaaaatgattactaaaatcactgatgattataagctttgtcttgcaattgattcttcatgtattattaatctgattgataaaactcctattgaaaagcgcaaggaaataggaattcagatatcgaaagagttaggtgtgaaaatttcagcgaaatag

SEQ ID NO: 153585 - DNA, 474 bp, Enterobacter cloacae
atgattaaatcatttacaagaaaagctatcattgttttttttgttttttttgcaacttcagtattagccatttctaaaaaagaagtaaaagttatacgcgttattgatggagatacattcgttattaatgagagtttaaatcatatacgaatggctaacattgatgctccagaaaaaagtcaagcttatggtttggaatcctattcggttttaaaagaaaagattgaaggtaaaggtgtgactttggatgttttatccaaagataaatatggacgtttaatttcaaatgtttatattaatggtgaggacgtcaataagtatatggtttcgaaaggtgctgcttgggtttataggtattattgcaaggacgagagttattatgctgctgagtataaatctaagcttactaaaaaaggtctatgggattcggataacccattgccaccgtgggtttatagagcccaacataaataa

SEQ ID NO: 153586 - DNA, 384 bp, Enterobacter cloacae
atggaagatgaagatatttaccatgatgaaattattgctcatgatgaaatcagaatgaaattcagagatatggggttggattggttatcagtcaggcaagccaaacgaaaattaaaacagttactttctgataccagtgcctcgcttctgcctcgtctacaggaagcttttgatcactatacgacgttgttaggtattactgatttatatcaggttgataaagaaactctcattgaagaacgtgttaaacattcacatctgataaagtatagtagtgataacgaagtaatatttgaagatgatcagtgtgtcagattcatgagtgaactacacgatctcgatttacagctttgtgcagcgtttgtgtgttcacatcaaccttag

SEQ ID NO: 153587 - DNA, 213 bp, Enterobacter cloacae
atgagtgctgtagaaaaaattcttgatagcatcggacttaaaacccatgaacttggctcacttgatcagactgatagcctgattctctgtcgtatctttgaagcggtgcagcagtacgcgatgtaccacgataagaaccctgagctggaaagcgagtgtgaagaaatacagacggtgatcaggaaacacctgaatcagagtgtgatcaggtaa

SEQ ID NO: 153588 - DNA, 237 bp, Enterobacter cloacae
atgaaaaaagttaattggttaaagagagataatattaaattggcatgggtgatcctctgcgtagcaataacaataacatccggaacgatttattggcagcagtatcaaccatgcgacggcgcgagttttaagcagttactgaatgccgttttttccacggttgctgttataggctgcactgctgcgattttattgtgtatcagcgtttttagtagcgttatcagtaaggtcgattag

SEQ ID NO: 153589 - DNA, 255 bp, Enterobacter cloacae
atggcgggttggtggatgccggatggtcaactactgatactacgggaaatgagcgctggagctgttctgtggcgggatgcaaaagggcgcttcttcattggtacagatgagaaaaactgtacagtatctgcaaaggccttattgaaaaaggcatacattatgccctctcatctggttatagatggtcgcgagtctatgcgtatcactccgactggacaaaatgaaatgggctataatcgacaccgaaaaatctaa

SEQ ID NO: 153590 - DNA, 315 bp, Enterobacter cloacae
atgaatcacgaagtaagttgttaccttgataggttaaaagttgaaattaaaaaaacctttaacgatgggattgttgttgcttatatcgaaatcgagcctcctatattaactatggaaggacaagatgatatatcattagtttcctgcgatttatggtgtgatgatccttcatctgcatacgatataaatattctaattaaaggagtagcagattttagcgtgctcgatacgcctgttgtgactactctggatgaggctaaatcattggctctgattatcggtcagcaagtaagtagttataagataagtgcatag

SEQ ID NO: 153591 - DNA, 513 bp, Enterobacter cloacae
atggcaacggtaaacgtgaatgtgcgtattgactcagaactcaagcaaagcgccgatgaagcgatgctactagcaggaacgacaccaacacaggcaataaccctgttgtaccagtatattgctgaaaacaaacgcctgccttttatcactaccaaaatgattcaaacacataccgaactggaaaaggaaatatacttacacttccatgaaggtagaacgattctgaaaaggattttacaaagcatagagatttgcgaaaatattgaaggccaggatttcctatataattacgagtgtttaaataagcttcatacctccatgcagcgaaaactgcaatttattgatgaaaatgtagaactcagtgagttatctgccgcattaaaaaaatctattctgatatgtggaaacttcactaattttggatatggtaaaaaattcttcaaagtgactaaagaagagtatgcaaatctgaatgaagaagtcgatgaactatggaagatgggaagaaaataa

SEQ ID NO: 153592 - DNA, 273 bp, Enterobacter cloacae
atgaaatgtcgttggtcaaagtcccgtaaaaaaatatccgaagccgtaatagcattttggtacaccctagcagggtacggtatttattttcagtccagatttacaaccgaaagtgtcacacgcatgaaagattttatgggtgaaacacatggcttgctctatgccgtatacggcaatttattaaatcctctacttactattacggcagggtacaccgcagtatatctgacgttccgcttcattcgtcagatcacggagaaaggggggaaataa

SEQ ID NO: 153593 - DNA, 465 bp, Enterobacter cloacae
atgaaattcagacgacaggagcgttattcttatcactggacgccagctaaggaagccgcttatttacgcaagccgcagcgtgtacagaataaaatggttgcccggtatcctcttattgccgaccagcttacaacgccacagagtacgctggaagcagaaaaacaacgtcgggaagaaatgagccataaatcagaaatgaatatgcgaaacttccgcgctaatcagtggcggcaagcccggaaactttatttttcatgcgacacgcatacccgcgatattattaaaaacgcatggcaggacggcgtatatccggctgatcctgcctacctgatttatgtgatagagaagcataacggcgactatcagcgccgttgtgatttctatgccgaacaggacagaatccggcgcgaggaaaccgcgcggatatataacgtccgtgcaaaccagattgatttattccaataa

SEQ ID NO: 153594 - DNA, 339 bp, Enterobacter cloacae
atgaaatattttgtcaagatgctgagttttttagttgtcgttattgggtttaatttttttataatttttaattggcttcctgcattgtttgtaaatattgaaagaggatattatgacgcattctcatttattgccgttttgtgtggcaacaatcccgatgcatctgtgctccattatttaaatgctaataaccatgatggggtattcttttttatctttatgagccctgggatttttgtttcatggctagcattttttgctatctataaagcgatcttgcttgatgctccactgtcgttgttttcttcttcaagggaaaaacatgttgaggttgtttaa

SEQ ID NO: 153595 - DNA, 141 bp, Enterobacter cloacae
atggaggcagtaacggcggtgcgctacgtgaaatctgcgattttcgcagggatatcgggcgaaagaatttacgagagaacggcagaaaacaggccgctggagcggcctcagttaaacaacctcaacatgtttttcccttga

SEQ ID NO: 153596 - DNA, 192 bp, Enterobacter cloacae
atgcgtatttctattgttcagatggtgaatgattactatgaaggtagtcgtgaaaaagcggcaaaagccgccgggattaattcggttcaacagcttaataatctggtatcaaaaggtcatgaagttgcgagattagacaatggcgactggatcatgctgacaagcaaaacgaaaatattccgaaagccataa

SEQ ID NO: 153597 - DNA, 168 bp, Enterobacter cloacae
atgactcacgggaaaaaaacttttaatattcctggctttcacgaatcggtaaaaagagactttgaagctggcctgattactcttgaacaggctgccactgaattttacaaaggtaactggacgccttttttagatattgaatatacaaagaagcaacttggtatttaa

SEQ ID NO: 153598 - DNA, 204 bp, Enterobacter cloacae
atggcaacaatcacctcgttactgcgcctggaaccaggcgaagcggtatactattttacggcgggtaaatcttatccggttgcggccagccgggaacacctgaaattgccgggcgtggatgtcatcgacgatgaggggacgtctgtctttgttcgcctgtcagactcaagtcatggcgaatttgaggtgatttatggcgactaa

SEQ ID NO: 153599 - DNA, 591 bp, Enterobacter cloacae
atggcgactaaagggactgaaatactgccggatggtgaactctgcgaaagcgaactggagccagagcggttagcgcatgggatcgttaatctgaacagtaaatacgtgccgggtgctgaggaaaagaaacgctatcaaagcgctggcattgttaaacatatcattgaatttgattcgtcgattaaatggtctgttgattccatactcgatggagtcgaaaaggcggaaaacggcgggtattcatctgcggaactctcagagttaaaagagctgacaacgcagtatttcataaaactaaatgacattcaggatcgtgtcacccggcaatgttatgagctggcagaaagggcgctcctttctcatggcattaaattagatacagagagtgattttgatattgacggctatcagtttaaagcaacgcccgttacagataaaataaactacatagtgtctgatttgttttcttacagtgatatcgctaatatcaatatgggtcttgctgatgtgacggtaacaggcgataaaaaaataagaaaaacgcagttgccagcgcttttaatgatgaatctttgggttaatagcgaatga

SEQ ID NO: 153600 - DNA, 438 bp, Enterobacter cloacae
atgaagtctgttttttgtgcgttaatcatcggttcaacaataatcctttctggttgcacagtcgataaaaataaaactgaatctaatgcaaatcaaccggaatcaggttcactctatattgcaggttcaagttttcagaaaattgtcctaagtggggataaatcaaaatgcggtaaaagtacgtttgatgtccagtggaaaagcaagcatgatgctatcttaccgaaagatgtattcgtgccttttgtattgactgacgagtttgatggagattctggactcactcatattactgtgttaaccgctccatctttcaatgaaacagtctcgaaagtatatggttcactactgaagaaccaggctttaataaaagataagagttttatgaatatggcgattgtccttgatggatgttctcttaccgtcatagataaatag

SEQ ID NO: 153601 - DNA, 549 bp, Enterobacter cloacae
atgaatatcttaaagtcatatttatttattatatttctgagtgccaccttggggagtttcaatgccgtggctgatacattggcagcaactgataatacggccaatgagggtgcttatggtggggcgcattatggtgtatttgagtacacagatacaaattcactgataaatgcagtcaaactactggataaattcggttatcattctaatgttgtggccgaaaccctggatttaaatgcttatcggggtagcgttataatttttaaacccgaagccagcggcaaggcgctctcatatgaagatgtctttgcatcctttaaaaaatatatgactccactgaaattcaaagagagtgacgcgattatcgttaaaaacacgcctctatcagtaaatgaaggtggtacgacaataaaactattttaccagttattgtttgacggcaataatattgaatccagccaacctttccagatccctaaaggcggtcttgcattaacggtgctcaaaatggatggtggaaaacttcttgtcattacctccgcaccttga

SEQ ID NO: 153602 - DNA, 396 bp, Enterobacter cloacae
atggataagtttagtgaaaagtttattaacattgtattgaatcatgttgagactattccgcaggaagaatataagaaatttacgcaactgagtgaacacggtgagtctgtgtatcctaatagtgatgcttggcgtggatttgcatgtcgggcgacaagaagagaattaatagaacaggcatggtcagttaacgctattaaaacggatgaatatatggatggatttcttaatgctgaaacagtcaccgttggtcatatagaaatggatgttgaaaacgaacatattaatgcccctgtctatttctttcctgatcgtgggatctacgctgctgcttgcggtaacaaccgtgtttatgatgcgtggctctcatggccttgttatcctcatggctggtaa

SEQ ID NO: 153603 - DNA, 360 bp, Enterobacter cloacae
atgaaagtcgctacaattaacttctctggtaacaatggaaaaaccacattagctgagcatgtttttgccgcccgtatgcctggtgctttgcagttaactatcgagacaattaacgctggtaatgaagatatagaaaaggttcgtggtaaagattttggccaaatgatggaagctgtaatgcttgcagatcaagctatcgttgatgttggcgcaagtaatgttgaagataccatgaagttaatgaagcaatactctggttcacatgaagaatttgattacttcgttgttcctgcggttaaagaaagtaagcaactggaagatacccttgcaacaatccaggctctatcgtcattagggtga

SEQ ID NO: 153604 - DNA, 357 bp, Enterobacter cloacae
atggacaaagaaacaagaaagcaaatagagagagatctcgataatgaattaatgaaaatgttatccgttgtaacgatggataagttttccagctttctcgtggaaagaggaattgaaggtttaacatgtaagatgtgcggcagtgacgacattggtgttcctcttatggctcctattgggcatcaggcttttttaaattattcgaaagttgatggcggtggacctccgcactccctttataattatgagtacaggctaccatgtaacaactgcggatttgtgcatagtttcgctgtttaccctgtgcttaaatggatagaagatcaggagggagacggtggctcaaaggcagactga

SEQ ID NO: 153605 - DNA, 351 bp, Enterobacter cloacae
atgaaaaaactcatcctgatgattgcttgcagctcttttgccttggcgggcgtagctcatgctgattcccagtgtgggcctttccacttgggcacaagcccggcaaatgatggatgggcacgcattaacggtgcgaagcctgaaagtcagaaggtaacgttcctcaagcaaaaagaagactacgacaacattaaaatggaatggcgcatggctactgatcagcctggccggtgggtagggctcgaatacatcaagcgcaacggcaaagcaattctcaacgctcagtggctgcaagccagcatgaatgcgccgcgtcagtatgcaacatacgactgcgtgaaggttaagtga

SEQ ID NO: 153606 - DNA, 2109 bp, Enterobacter cloacae
atgagcggtaacgcagatacgattaaagatttccttgtttcgctgggattcgatatcgatcaggctggcgcgaataagtttgaagccgtgctgaaaggcgttaccgcgaacgttctgaaggtcggcgcggtggtggaaggcgctgcactgagcattgtcggatttaccacccagattgcgaatggtctggataaaatttactgggcatcccaacggacgggtgctagcgtccagggaatcaaagcgctgggatacgccgcatcgcaaaccggcgccagcgccgagtcggctatgtcctccctcgaaggtctggccggtttcatgcgtagcaatccgggcgcggaaggtttcctgaaccgcctgggcgtccagacccgcgatgccagcggaaagatgcgtgatactgcgtccatctttactggcgttgggcaaaagctcaacaacatgccgtattaccgcgcgaagcaatatgcgcagatgctaggcatcgatgaaaacacgttgatggcgatgcggcgcggcatgaatggctttaccgccgattaccagtcgatgctgcaaaagacggggttcaacgctgataaggcggcagttcagtccaacaaattcatgacgtccatgcgcgggcttacgtcgctgttcggcatcatgcgggacaagatcggctcaaatctcgctggtggtcttgctggttcgctggacagcctgcggcggcgcatcctcgacaattttccgaagattgaagatacgctgaccaaagtcattaaaggcgtgatttggcttgcgaacgcattcacgagaatggcgtggcggctgatacagggcgctggctctgtcattgactggtggaagcgtcttgatgatggcagtaaaaatctgctgaaaatattcggcgctctactggttgcatggcgtctgcttaattctgcgttcctgaaatccccgattggaattattaccacgctgattctggcgatcggattgctgtacgacgattaccagacgtggaaagagggcggcaaaagcctgattgactggagcaagtgggaaccagcaatagaaaaggcgaaaaaggcaattctctggctacgcgataagctgttggggctaaaagatgctgtcggtgggtggcagaactcgctggaaattttggctacgttcattgctggagtatgggtgtcaaaagtattgggggcgtttggaaaaattgccggtctcccaatacctccgtggcttaagctatggggattgtatgctggttatgtggtttcagatcgtgaaaacataaaagccagtgcgcaatcgtcttgggactacgcaaaaaggaacgttggcgacgctcttgctgcgatcggcatcaaaaccgatcttggtcacaaagatgttagcgaggtacgagaatggcctgcatggatggactggttgcatggtggccccggtaaagtgattcgtcaggcgcagagtaatggcgttgtgtacggggataatattcagtcagatattcccggtaacgatccggaacagcgggcgcagtccgttaagcgacctcaggcgacagctcagggcaaggtattgctcgactggatggggccaatgttcaataagctggagtctctttatcagctcccggctggtctgttgaaaagtattgctatcactgaatcctcaggaaaccagttcgccgttggccctcaaacgaaatacgggagtgccaaagggctgtttcagtttgtcgatagcacggctaagagcttgggattgaaaggcaatgacgttttcgatccagagaagtcagcccaggcagccgctaagtacctcagccagttgttacggcagaatgggggcaatctcgacaaagcgctagcatcctataactgggggatcggcaacgttcaacgatatggtatggggctgatgccgcaggaaacgcgcaactacatcccgaaagtgatgagtaatatgccaaccagcgccccggtgattcagcaggaaacgaatattaacatccacggcgtttccgatccgcgcgaggctgcccgtttgactgttgatcgtcaaaagggtgtgaactcacagttaactcagcaactccccgcaggaccgagataa

SEQ ID NO: 153607 - DNA, 702 bp, Enterobacter cloacae
atggcctttttccgacaatcaaatgatcctcgcttaatgaagagagtattggcattgtttggagaacaggaatcagttttggatgaagtggcattgagtatgagaggaagaaaagttacttttggcgaccttgccatcccggaggacagttctctcgaaacaaaaacattacattcaaacttcgtgcgctttacccaggaaagttctgataaagttgagatagcaaaacgtttcgccaaccttacgaaatggatggaatcgtcgtcaatcaagatgaggagtaataaaggtacagcaaccttaacaaaaattgctttagacacttgtaaacagtgggcagaaaagactggttggatgaatatgataaatcgtgctgctgcaatgtcattaggccctaggaagaaggacgaggaatacagcccagagaaagtagtcctatcaaccttgcatggttcaaagggtcttgagtggaataaagtaataataatgagttgtaatgcggatcagataccaagtaaaagatcagttggggaggaggcaatagaagaagaaagacgtttgctttatgttggatttacgcgtgcagaaaagcaactttttgtaatgtggtatggtgatccttctttctttttaagagaatgcagtgaagaaaagataaaagaagcagctaatattcgaatttctccactttatacagaataa

SEQ ID NO: 153608 - DNA, 1023 bp, Enterobacter cloacae
atgactgatatcattgaacatgaagatgaaaatgaacccactggcaaggctaaaggcgggaaagctagggctgccagtatgacccaagaggaaaagaaagaggctgggaaaagaatggctgaggcaaaaagagccaaagcattgcttcctactgtagcaaacgaaggttatctgcgggttggagatgcagaacttgaggtggctgtgctagataatggggagagggttgtttctgccgcatcagtatttacagctttggggagaactcgccgaggaaataaaaaacatcttgaagatcagaggtttatagatgggatccaaacccctgcctttatggatgcaattaaccttattccatatattaatcaagaacttaaggatgtgatctctcgtgttgaatacaaaacaaaaaccggcctaatcaaagatggctataacgcagtaattcttccccttgtgggcgatttgtacctcagggcgagagaagatggagcaattaaaaataaagagcaatttgccgtagcgcaaaaagctgaagttctagttagatcgcttgctaaagtcggtgttatagcccttgttgatgaggctacagggtatcaaaaggaaagggaaagagacgctcttgcaaaattgcttgaagagtttattgctaaagaaatgcgcccatgggttagcacttatccaccggagttttttgagcagttatgtcgattgagaggcgttccgttcaaagccaatatgcgtaggccgcaatactttgggcatcttgttaataatataacttatgaccgcatggcacctgagctcagaagcgcactaaaagaagaaagagcaaaaacgaaaaaatctggagcgaaaatgcatcagtttctgtccgatggaacaggatatagccttcttcagaagaggctaaccggggttacaaccctgatgcaagccagcgatacatatgatgggttcatagaattacttgataaagtacacccgctcatgaagatagaagagattgatatagattga

SEQ ID NO: 153609 - DNA, 309 bp, Enterobacter cloacae
atggacgtctttttggaaaagctaacattgacacgaaaggaagccgctgagctacttggtatctcgacggccacagtgactcagtgggttcttgaaggcaggctcaaagcctatcgggtaagcgacaggcctaaatcgccgtatctatttacgaaagaagattgtcaggctgctttgttcgctgtggaagtcgaaccaaccaagctaagggacaaagaggaaaaggttgaagctaaggtggcgtttacgaggcgacagatagaagttaataaaaaattgcgtcaaatgctaaacatgcctgagaaatag

SEQ ID NO: 153610 - DNA, 2775 bp, Enterobacter cloacae
ttgccagcttccgaaaatcatcatcataatggtattggtgggttactttctcacagcctggaagtggccatactctctttaaaaaatgcgcatcactcagaactgagaccaatcggatatcaagatgaagaagtagtccgtagaaaagtatatctctatgctgcgtttatctgtggtttagtccatgatgccggaaaggtttacgatctcgacattgtaagcctgaatttagctagtccgatcatttggacgccaagctcacaaagtcttcttgactgggcacgtgaaaatgacgtggttgaatacgaaatccactggcgaaagcgtattcataatcaacataatatctggtccagcgttttccttgagcgaatcctaaacccggtatgtcttgcatttttggatcgggtaaataaagaacgtgtttattcaaaaatgatcaccgccctaaacgtttatactgatgggaatgactttttgtctaaatgcgtgaggaccgctgatttctattctactggtacagaccttaatgttttacgtgaccctatcatgggtctgcgttctaatgatgcagcagcaagggccattagtaccatcaagcacaactttaccagtatcaatatcaacaattacaatgctaagcctatgcacatcattatcgtaaatggtgaggtataccttaacgagaacgcattccttgattttgttctcaatgatttcgaattacataaatataacttccctcagggagaggctggtaagaccgtattggtagaatccctagttcaacgtggttacgtcgagccctatgatgatgagcgtgtcgttcactacttcattccgggtatctattcggaaaacgaaatatcaaacatctttagaaatgggatagggaaactagaattctataaccttcttaagctaaggtggattggtttaatctttgattcctataaaatccctgactcagtgccgggtctttttagcgttaatgccaataaagactttatttacattgacgagcaaaaaacagttactgaatacagaagaccagtgcccggtcgggacgttataactaaaattactgatactgttgagacggctgttcttaaggttaatgatttaggccgctcctctgcctctattgatgttgatatacattctaagaaaaatgaaggctcatccgacgattttgagaagaaagccgaaagtgataatgaaattgataatgacacgcagatagttaaatctgagggtgaggaagcagctgatcctgtcattcctgatatagaagaaagtgaagatgaatcggcaaaggacacggaatcccatgtcctggtcaaccaacttcatgaactccttttaagcgctccactttccaatgactatatagtgtgtgttgatgctgtcccctacctcaacatagataccactatggcattgctgccgggattagatgaaaaagcattcagtgaagagccctatttccaactgacattcagagaaggctctctcgatggaatgtggatagtaagggacattgacgatctgcgtttagtccagctcggcgataactgcgccgggttccagctcacctatcatgagccaagaaggccaacaactttaaagtcacttttcaatacttctatgtatcaggcattagtgattaatgatgagtcttctgttgaaaactctgccccacgtccaaagcaaacgcttgagctgcctcccccacgtgtaaatgcagtcgaagaacattctggcgacgtggaatatcatggaaccgatagtgcatccgcgactggtccgctgaaaactgaggctgtggaatatgaacattatcaacatctttttgagaaagaagatgaagagcatgagatcattgattataccgatttctcacagcttagtgtttctcggccagaagtcggtagttgtgcaacaagctcttcggtccataatgaaaagcttctctccgagccgtcagaattaccagaacttaaccgagaacagaacgctgatccccagggtacgaatgaacgctctatggatgtttctgtaggacaagaaaactcagaaccagatactgagggtaactgcccaccaccagctgaagttgtgtattcccagaccgaagcagccgcaaccagtgtgatggcaagtgaagagcccgccttacctcctgtacttgaagaatcaaatggagagcatgcgcccacagacgctaaggggcatcatctttcgccagcactggccagactgttcgccccaacagcaccggtagaaaaacaaaatcccaagcgcaaccggaataaatcatcggacaaagcagaagtacaaaaaccagcatcacctgtttctggtcacaatctgaacagtaaagtctttgcatctactgaatcagaccaaaatggtgaattctcgcttataagcgaaggtgacgttacagagcttgaatttgtagaaattgcgttagtactgcatcaaattctgtccaaaatggaggtggcgtttaaaagaaagcgcaaaaacagatttatggtaagtactcctaatactctctatctgacccaatcttgcgtggaaaaatttgggtcgcagttagaggctcaagatcttttcaataagcttcctcagtacctcgttaattctggtgctgtgatcaatacaaaatgccatgcatttaacatgcctactttgctggccgcatcagaccgggcgaaagtggacattgaacgaattatcaataacctgaaagaggctgggaacctataa

SEQ ID NO: 153611 - DNA, 993 bp, Enterobacter cloacae
atggtactacaaccagctgtacaaaaattgcaaacgctaattgttacaaccggaggtgtcaatctatctacaggcaaagcaaataaaataggcataagaataggtgccaatggtggatatgttgaatcaggtaatgcaattggttctcaggggtcatggagtgaacctctagcaaaatattcatttgatcctggtgatggtcacatagccattgctcagtttttcaaagatggtgtttctggtaatgatttcctttacagaaaagctgtttcagggcatccagaattaaacacaatgagcactaacttaagtcttggcggtaatgatataaatgccgctagaaatattactgctactggtaatgttagttctgcgaacgccacgatctcaaacaacctgactgccgctaatgcgaatgtgacaaacaacttgaccactgccaatgccagcgtcacaaacaatttgaatgcggccaatgcatcaataaacaatcttaatgcaggtacaaccaggacaaatggagaaacgtatactggtggttggttcagaactacaggcgatacaggttggtattctgagaagtggggaggtggatttaatatgaccgattccacatacatcagggcatacaatggcaaatccatttatacgagcggtgaaatgagagctggcagcttacgctctgacggtgatgcctccgttgccggtatcatcaagctagatcaggtcaactctgctggggcttcatgtccggtaaatggcgctctaagccgcgatagcaagggtgcgacactttcttgtcaatccggtgtgtggactgatgctggacaaggcaaagtaggctactactgccgccgtacatcttttgacaaaggacgttcagatgattacgtaggctacaccccgcgaactgatgataactgtcctgtgattcagccagggcagcaacctaatggttactgtagttgtatgaaaatccttctggcctattag

SEQ ID NO: 153612 - DNA, 267 bp, Enterobacter cloacae
gtggctaaaaagtacacattgggggaggtaattgatcactatgtaaaaaatgtgactgtagataaaaagggatggcagcaagaaaactaccgtgcaaacatggtcaagcgtcacgcaatttcatcattagacatcaaaaaaatcagaagtaatgacatcgttacatataaaaatgacaggctggtattaggtggtggtaactcaggtcgtaatatttcaggaaatacactgaggatagagctttcttttttatcatcagttttttaa

SEQ ID NO: 153613 - DNA, 444 bp, Enterobacter cloacae
atggtaaaaattaatttttcgcatgcgaaaaacttcgcatacatcgtatttttattatcagtaaatgtaaatgccgctgaggtgaaaacgctagccgatctggatgtgctacaaggcgaaactatgtactacagggcattggctactcgcaatgaagcaaagagtaaagcgggtaatgacgtacaacagcaaataaacactgtagggcagacaagtcagtccgctaaaacaccctcaccagtgttaccaaacgtactaagtattatgggtaatcaaaaaggcctagtagcaaggctgggttattctgatggtcaagttagcactaataaagtaggtgatatcgttaacgggacattgaaaattacgaaggtaggaatcaacggtgtccaggttctttcgttgcctgaaaataaattttatgatttgaaggaggcacaaaactaa

SEQ ID NO: 153614 - DNA, 246 bp, Enterobacter cloacae
atgtcaggtatctttgaaattatcgaaactgacgcggagtttatgcggatttatcatgagcaaggaaaaatgaaggcttatgaacactggttcgtaaacggtggtatgacattatgttcaagtcttgttcgccttgttaatgccgggaaagtaaaccctctctatgcgcacaggagcatttgtaacctggatcgtgaccagcgcatgtttacccaagagattataaactctcgcaaggaggtttaa

SEQ ID NO: 153615 - DNA, 243 bp, Enterobacter cloacae
  misc_feature (194)..(203): n is a, c, g, or t
atgagcgactacatacctaaaaagagagggctgcttatactggattggtatgtcccccttaatattttattgctgattctcgttatgtgtgtctttttcacccgttatacatttggatacggtttattgaatgggtgcctgcctgctgatttttatatgattgatcattcggataaaagtattaaaacctgtcnnnnnnnnnntttattggtaaagctccagcttaggttggtttccgtgtag

SEQ ID NO: 153616 - DNA, 399 bp, Enterobacter cloacae
atgtctgatccattaactgtagctggtgggtttgctgccgggactgtgggggtgacgcttgccactctgtttcccgaagccactcccggcgtaatgcttttctccctgggaggcgctgcgctctatgtgttgacgtctgagccgcaccagatatggaaacaggcggtattcgcgattatttcgtttcttggtggcgtctcgttcgcggtgcctatggcgacaattatggctggcgttattaattcagcactgagtttgctgacaccaccagtgaccatcgaagtatcaccaaatatcggcgcgctggtggctgcatccatttcggtcgctatccttcttcgcattttgtccaaatccaaaaacgggagccttcccggactggatgggggtgatgaatga

SEQ ID NO: 153617 - DNA, 276 bp, Enterobacter cloacae
atgatatgggattcgctgattcttcacgcaaacgcggtggtttgcctgctgataatgttccgtctgatgttcttcaacaagacgggaaaatcataccggcgtggcgtctcattgttcgcgtatctgataattctgtcagccgggtataccgcattccggatcatccacggcgattacatgcaggttgaccctggtgaattcatgctgaatgcgacggtttgcgttgcggtatgggttgcaggtggaaacctggcaagatttttgagggcaacgtaa

SEQ ID NO: 153618 - DNA, 405 bp, Enterobacter cloacae
atgaaagaaaatcttgttgcttatattaagtcaattgagttcgacaagaatgactcattcatgtcatcaactcagtttgtacctttcagttttgaaccagtacaactcaacttcaataaccacaacaccatgaggttttacaagtacatcttcgagatgaaccagctcatgaacacaatgtatgagtacaactcattgggtttactggctgtaagcgactatccggttatgtctcacaacattataaagagtattaatttatatgttgagaatgtgaaaaagactctgaatgtttctcgccgtaaggatgggccatacagtccagcagagttcatcaccaaagtaatgcaatataaaagtgtgcaggcatacattgcagccgaactgtcaggcaaacgtcgataa

SEQ ID NO: 153619 - DNA, 249 bp, Enterobacter cloacae
atgaacgacgcaattatcacggacaatgagcgtattaacattgaaccaaaagatgtaatggtaaaaggttcaaataaaaagcaaggcgtaaacgctcaaacttctactcaacgtagaccagagcaccagggaatggccaaagttattattaaccccggcaccccagactttaaccggtttttaactgccagaaatggagcagtcatcagaggtttttttctgcggtcttggacggtgattccaatgtaa

SEQ ID NO: 153620 - DNA, 210 bp, Enterobacter cloacae
atgcaggatgataccttgatagtcttgtctttcacgcggcttatatttgtcaatgtcgataccaatgtagtgctgaacgatcttattttcagggaagccatggcgcaaagcctgttgggcaataaaatcagaaacacagataaatttatcaccctgatttttaagtttcttctgatgaagaaaatagctaatccaggctggagaccgtga

SEQ ID NO: 153621 - DNA, 204 bp, Enterobacter cloacae
atgatttatcaatgtgatgccgccaatgcagtggagatattgagcatccaccactcattcgcggaaaccatatgccgcccaagagaaaggctaaaggcaattgctcagggtctgatagcccatgacaggatgctcgccgattgggacgcagacaggaaaagcgccgagtatcgccgaagagtaacaccgaaattacaccaatga

SEQ ID NO: 153622 - DNA, 408 bp, Enterobacter cloacae
atgaaggtgctgaaagaccgcggctatgagtacggcgaacactgggggccgcacgacatcgaaaaccgcgagttcgcagctgatgcgaagtcacgcaaagagctggcgcgcgaagggtacgaaatcgacggtcagatgtactcactgaatttcaaagtggtgccgaaagctggcatcgataccggcattgagtcggcgcgtgaaatcctcccgaaatgcgtattcgatgaggagaaatgctcggaaggtatctctcaccttgagggctaccggaaggagtgggacgacaagcgcggatgctggaaagacaaacctctccatgacgccacttcgcatggtgccgatagtttccgttacttcgctgtgacgaagaacaaccgcaagcaggttggcacagtattcttctaa

SEQ ID NO: 153623 - DNA, 213 bp, Enterobacter cloacae
atggttgttgataaggccgaaccagcacggcatggcgatatcattatcgcggagatcgatggtgaatttaccgttaaacgactgctgctcaccccacgtccggggctgcaaccaatgaatcctgcgtatccaacgctatggccagagccagaacagctacagatttttggagttgttaccgcttttgttcataaaactcgcggagcacagtga

SEQ ID NO: 153624 - DNA, 471 bp, Enterobacter cloacae
atggcccctttgtcgctgtatgagcaattagaactggtaaaccagacccagcgcgacgatatcgtcagtaccgatacctgctgcgcgagtgaagtcgttctcatcaaccaggttgattttgtaatcaacgtaggtggacatgtttttgttgaagtagtaagtcgcgccaacatcaacatatttcagcagatcctggtcgccgtagccgttttccaggtccttacctttagattgcaggtacgccacggatggacgcagaccgaagtcgaactgatactgcgcaaccacttcgaagttctgcgctttgttagcccagcccaggtcgcccgcacgggtcgcgttgtaagtctgagtatactgtgcagccaggtagatgttgttcgcgtcgtatttcagacggtttttttttacctttctttacgtcagcctacattttatgtgctacccctcagaaatgataacgactattaa

SEQ ID NO: 153625 - DNA, 492 bp, Enterobacter cloacae
atgacaacaaagaaaaaactgtctaatcagatagacccagaattgcagacttttatcgataaaatcgctgcaaaataccagccaatccctgaagtactacaacgccgcattgaaaatgccgaagcccgctataacagttatcagaactttgctgatatcccggcgcggctggtggataagcttcagaacctgattctggaaggctggcgttttcatctttctggcccttcctcagtacttgccaatccatcgatgatttcagttactctgcaaaagccagaagccatgatcgaagaggaacttaaggcgctacgctccagagcatcggaggcttacagtgatgaattattcaattcaatggaacatgcaattgatgaactgatgcagcaagctgcccaagactcacaacggaaggccgaagaacaggcagaggcagagcaagccgcaatgcgggatcgtttacgctctctcctgaatggtgttaaagcatga

SEQ ID NO: 153626 - DNA, 810 bp, Enterobacter cloacae
atggtaataacttatacgcacgtacacgtatacatgtgtgagggagtaaatttatgtaaagcacgtaaaggaggatcattgttacatcaagtacacccacaactagcgcaccatccagtacaaccacaaactacgccttacaaaacagttatccacgatcacggacgataccaggtcataacgggcgattcgtttatccataacggctacagctacgcagtcaacaccactgacagatccggcgttcggttagatattctcacacctgctgccgcagaacttgacgcgatgttgtccatctacagccgggtctacctcactcgcttcgatcttcgcttgccacaaggtacgtccgtagacactgctaacgaatgggtaagccagcttttcaagaaactacgtgaacgcctgaaatcaaagtttcgcaggcctgaaggagtgacggctccgatcctcaacttcgcttacggctgggttcgggagaaagaactggcaaaacaggtgcattatcattgctggatagctcttccacatcgacaggttaaacgactcggaacgccaacaagtgggattgctggcactatcactgaaatctgggtaaatctgtcaggaggtgagacaacgctggtagagttcccgaaaccaagtgacaaatacacgaaacactacgtaattcatcgtgacaaagcggaaacccttgaaggtccgatcttctggttgtcatacctggcaaaggagcgcggtaagtaccagacaggggaaggtgaccgggtgcattcaacatcaaaattgcggaataagcatctgtga

SEQ ID NO: 153627 - DNA, 570 bp, Enterobacter cloacae
atgagtcgtacttttgcatattgccgtgtttccaccagcgaacagacaaccgaaaaccaaatcttggcgatccgtcaggctggttatgacgtacctgataatcgtgtggtatcagaaactatatccggtggcgttcaggcgatgaagcgtaaatcttttgctgatatggttactcataagctggaagccggggatcggctggtggtgcttaagctggatcgcttgggtcgtgataatctagatgtacagcaaacgatcactatgctggtggaaaagggaattgatgttgtatcactggatctgccagtgcgtaatctcaccagtgcggaaggtaagctgatgctgcaaatgttttcggctttcgctgagttcgaaaagtcccgcattattgagcgtaccagagagggcctcgcacgagcgaagaaggaaggaaagaagttaggtcggcctgtggcgactaatacactaaagcgagtgcaagaagccaaagcaaaaggccttagccaatctaaagtagctaatgtcttgggattaggaatagcaactgtaaaaagacactggaaccattaa

SEQ ID NO: 153628 - DNA, 645 bp, Enterobacter cloacae
atgagttatccccaccggtttatgagtggcgaagaagacaaaacggaagaaataataaacaccatccttcgcttcggaataaaagaggaaatgctaaccagaattagcgggctgctgattttgcaactttacggttctttcatgtccagaagcgaaaacccgttcattatcattgacgaaatttcttacctggaaggcaatcctttacggggcgaaagcagaaccaaaccaccgacaatgtttaaccggaagccttatcttcgggggctatggcacaagcactatcacggtgctggcatagatgttatggctaggaatatacaaatcgctctgaaaatttacggtttaccgcgattagaagcagaagttgaaaaagtcatggaatcaggtgaagaacggtattttacagccgaagatgcggcactgatcgcccatgaggctgtgagggagaattggttgcgacgctccaacgaacaaaaaatcactggacactggattatttatgccgtccatgaaggtaaaaattactatctgagtcttggtcggcacaccgatgatgaagcggaacttcggcggcaaatcgaaaccgcctgcctgtaccagttcccttttttgtcggacatactttgccctgttacggattaa

SEQ ID NO: 153629 - DNA, 1116 bp, Enterobacter cloacae
atgatggaaaacatgaatatcgtaactgctgagcagcaggctccaaacactatctctgccagcaactcaattttcaacgttcaggcactgggtcagttgcaggctttcgccgggctgatggcccagtctgtcgttacagtaccggcacacttggcaggaaagcctgcggattgcatggcgattgttatgcaagccatgcagtggggcatgaacccttacgcggtggcgcaaaaaactcacctggtcaacggccagttgggttatgaagcgcagcttgttaacgccgtaattaccagttccagtgccattcatggccgttttcattatcgctacggcggcgactgggaacgttgcaccaaaaccaaagaagtgacccgtgaaaaaatgggtaagaacggtaagtacactgttgccgaacgcgttcgcgactggactgatgaagacgaagaaggtctctatgttcaagtcggagcaattcttcgtggggaaagtgaaatcacctgggataaacctctttacctgtcgcaggtggttacacgaaattcgccgctgtgggtttcaaagcccgaccagcaaatagcctacctcggcgtgaaatattgggcgcgcttgtactgcccacacgtgatcctaggcgtttacacgcctgatgagattgagcagcccaccgaaagggaaattaatccggcaccggctcagaaaatgagcctggctgatatcaaaagtgaaaacgtagtaaacacgcaggatcctcaggagccatctgtaaatatcgacactttggctgatgaataccgtaaacggattgattctgctgaaactctggacgatgccactaccgtcggaaacgacatcaatgcttctaaatccgtactgggtgcagcattgcacaccgaactgaaaaacaaagctacgcgccggtaccactttgtgaatgcaaaaaacaaagttgatacagctatcaacgctcttccacaaccgggagtggaaggtgcgggagaacgcttcaaggaagttgagaagatgctcctggcggctaaacggctcttgggtgatgaattgcacgataagtaccgcatcaccctcgatgatatgaaaccggaatatgtggcctaa

SEQ ID NO: 153630 - DNA, 504 bp, Enterobacter cloacae; identical to SEQ ID NO: 147982

SEQ ID NO: 153631 - DNA, 354 bp, Enterobacter cloacae; identical to SEQ ID NO: 144736

SEQ ID NO: 153632 - DNA, 1386 bp, Enterobacter cloacae
atgttcaaattaaaattactcagcatcagtaccatattcatcctggctggttgtgtttctctggcacctgaatatcagcgtccgccagctccggttccccagcagttttcattgtctaaaaacagtctgacgcctgcggtaaacagctatcaggatacgggctggcgaaacttttttgtcgatccccaggtcagcaggctgatcggtgaagccctgaataataaccgtgatttgagaatggctgccctgaaggttgaagaggcccgggcccagttcaacgtcacggatgcagatcgttatccccaactgaatgcctcatccgggatcacatacaacggtggtctgaaaggtgacaagccgaccacacaggagtacgaggcgggtctggagctcagctatgagctcgatttttttggcaaacttaagaacatgagtgaggctgatcgccagaactactttgccagcgaagaagcccgtcgtgccgtacacatcctgctggtctccaacgtttcacagagctatttcagccagcaactggcgtacgaacaactccgtattgcgcgggaaacgctgaaaaattatgaacagtcttatgcattcgttgagcaacaactggtgaccgggagtacgaacgttctggcgcttgaacaagccagggggcaaatcgaaagtacccgcgccgaaatagccaaacgagaaggcgatctggctcaggcaaacaatgccctgcaactggtgctgggaacgtaccgcgcagttccgtcagaaaaagggattaaaggtggggagatcgcaccagtaaaattgccaccaaatctgtcgtcacaaatattgctgcagcgtccggatattatggaagcggaataccagttgaaagcggctgatgccaatattggcgcagcgcgagcggcttttttcccgtccattaccctgaccagtggtctctcctctagcagtacggagctgtccagcctctttacgtcaggaagtggaatgtggaattttattcctaaaattgaaattcctatatttaatgctggcaggaacaaagccaatctgaagctggctgaaattcgccagcaacagtccgtggttaattacgaacaaaaaattcagtcagcctttaaggatgtttccgacacgcttgcgctgcgcgacagccttagccagcaacttgagtcacagcagcgttatcttgattcacttcagataactctacagcgtgccagaggattgtatgcaagtggtgctgtcagttacatcgaagtgctggatgcagaacgttccctcttcgcgacgcagcaaaccattctcgatcttacctattcccgacaggttaacgaaattaatctgtttaccgcgctgggtggcggttgggtagagtaa

SEQ ID NO: 153633 - DNA, 681 bp, Enterobacter cloacae
atgaaaatattaatcgttgaagacgaaattaaaacaggtgaatatctcagcaaggggctgacagaggcggggttcgtcgtggatcacgctgataatggtctgaccggatatcatcttgccatgacagccgagtatgatttagccatcctggatatcatgctgcctgatgtaaacggctgggatatcatccgtatgctgcgcagtgccggaaaggggatgccggtattactgctgacggcccttggcacgattgaacacagggtcaaaggacttgagctgggtgcggacgattatctggtgaagccctttgcgtttgctgaactgctcgcccgggtaagaaccctcctcaggcggggaaacacgatgatcacggaaagccagcttaaagtggctgacctctcggttgatctcgtatccagaaaagtcagccgcgccgggaaccgcattgtgctcaccagtaaagagttcagcttgctggaattcttcattcgccatcagggagaagttcttccccgctccctgattgcctctcaggtctgggacatgaattttgacagcgacactaacgcgattgatgtcgcagtaaagcgactccgcgctaaaatagacaacgattacgggacaaaactgatccagacagtgcggggcgtgggctacatgctggagatcccggatgcatag

SEQ ID NO: 153634 - DNA, 243 bp, Enterobacter cloacae
atgtttctgaacgatgcaggaaaccaggaggggaagacggttgcaatgacgctgtacacccaggctacgccggtgcccattgcaacaagggtaaacatattcagggagcggttacgtaacgacattccggcccgggcgaagaatggccagccacaccacaacacgacaggagaggccagaagcagctgcagccatgtgttgtactgtggcggtactgtattcctcaaggcgggaaacagatga

SEQ ID NO: 153635 - DNA, 522 bp, Enterobacter cloacae
  misc_feature (442)..(451): n is a, c, g, or t
atgggggacattgtgattaaaaggcgtaacattcgacgatcagtttatggattgcttattgttcttatcgccggaaatgtgtggttaggccttagagctgataaaattcataaagtgcgttatcaggatttctggtcaccggcaactgtgattaaagtaactgtaatgccttcaacgaatgaaatccagctcagtggtaaaatccctaaatcggtaagagtttcaaacaattatgttgagtactcgttaccgggcacactctcggacaagaccatttaccgaagcgtgttagaagatgagatgctcactttgcttaatgctggaggtcaacttgaagttaaatacactctggacaagcagacaaatcgaactaaggtatgcactaagtgcttacgggtgattaaagatattaaccatcaatattcagccactgaggtaaagnnnnnnnnnngaggtaaagcatgggcagtcctaaatttgaaattgctgagcaaattaaaatgtggatcgttgtttatctag

SEQ ID NO: 153636 - DNA, 696 bp, Enterobacter cloacae
gtggcgtactgccgctatgccgatgattttgtcctcatcgtcaaaggcaccaaagcacaggcggaagccatcagggaggagtgtcggggtgtgctcgaaggcagtctgaaactcaggctgaacatggataagactaaaatcacccatgttaatgacggctttatctttctggggcacaggatcattcgcaaacgcagtcgttatggcgagatgcgagtggtctcaacgatcccgcaggagaaagccagaaacttcgccgcatcgctgacagcactgttatcaggcaactacagtgaaagcaaagtcgatatggctgaacaactcaaccgaaaactgaaaggctgggccatgttctatcagttcgttgattttaaggccaaagtcttcagttatatcgaccgtgtcgtgttctggaagctggctcactggctggcccgcaaataccgtacaggtatcgcttccctgatgaggtggtggtgtaaatcaccgaaaccgggtcagagcaaaacgtgggttttatttggtaaaaccaatcacggcaagctcagcggcgaaatactgtaccggttggtggggcaaggcaagaagctgttccgctggcggctacccgaaggtaatccctatctgaggacggagaccagaaacacgtatacatcgcgctttacagaagtggcaatggcgttcgccagcatttaa

SEQ ID NO: 153637 - DNA, 297 bp, Enterobacter cloacae
atggaaagtatttatgcgaatatccctgccattatggaggtattagcgagaaccagcccagtaacgtacgatgattttgttaaccaaattgataaagatctcaataatatcataagcataactgaatctggcagacagcatcattatgggaagggtgaagatgccattacagagcatttgatagtgcaattgaaacagctttacccatccgtgcaccatgatgctcaaaatggagggcattgtgacatctatatcgaagtaaaaagtactggtgatgctgccaacttactgatttag

SEQ ID NO: 153638 - DNA, 420 bp, Enterobacter cloacae
atgctagaagaactggtgaagtcaactgcttcaccggtttatgctgtctgctcagacattacggcatatctggaacgtaatcctaagcaacataacctgacaattggtgggctcagggctgcattgaagcgttctgctaaggacgataatgtattgattcaagctgcatttaccttaacggggcatcctttcaacacccttgaggttcgctacaagttatacgatgagttaatcctagatgttgtacaggaaatagatcatccgacttatattcacgcaaaatctgtcggcaacttcattgatgaagatgggaatgatattccggtaaaagaacttgacgctagagtatttccttattttatcaatgtgttacacgaggctaaaaatctcactaccttcagcattacgggggatgagtga

SEQ ID NO: 153639 - DNA, 1074 bp, Enterobacter cloacae
atgccaacatcttttgagcatcaactcgatacgttgctagaacgatttagttttaacttcactaagtatgaaatcaacaaagtcttgcaagttacctctcaaagcaaggttgcttacaaacaggaaattttgtctgtagttgatgggaatgaggagttaaaaaacaaaatcaaagaattaggccttctggcgcttcagctagatactaggcaagttgaagtgtttcgtattaccgaagatggtgataaagatgcgttggacgcttttttctcaagcgttcaagttacttctgagacagctattaacgatgcgtttccattccctattgaagataggtccgaacttaaccgattgagcactggaattatttatccaatcaaatctgatgctgtctcagtggggaaatctgagtatcgtcgactcattgcttgctcaatggtggataaagagatagaagagcctgttcctgccgagcatttatctcaaacaggtcaaagtcttctaggaaatgatacagtttttacgatgaaacgaaaggtaagaactcagctttttcatgtcatttactggtgtcctgaaagttcaaaattgatcatatcggtcgatagaaatgggcttacaatagctgcaagtcaagatcaacttttcatgctgagacgattcttaatgcagcatggtgtagactatggccaagcaacaaacgtttttggcgctattgagccactttacaatgcagtggatggttctgtaactaatttagggcatgtcactactgacggaaaccctgtccgtatccctcttaaaggtagacaggaatgccttaaaaaggatcattatcatcaggctggtgaaggtggaggatatgtccatgctaagttcatggttgccaaaaagtggaaattcccagtcgatgatacaggcaggattgttgaggttgaagttgctcttgctggccagcctaaaatgttagatacagctcaacctttatccgactttgcggtcaacaaagtgagaaggcttgaagattttagcttcgctattgataaagtcttgtcccatgttcccacacactag

SEQ ID NO: 153640 - DNA, 1290 bp, Enterobacter cloacae
atgaccgaacttcccgacaacatccttcacctgccgcaataccaagtactgggctgcaaatcaaccgacgacgaaatgcacttccaggtggacgtgcccgatcccatcgcctgcgaggaatgcggcgtgcagggtgagttcgtacggttcggcaagcgtgacgttccctatcgtgatctgcccatccacggcaagcgggtcactctctgggtggtccgccgccgatacacctgccgggcctgcaagacaacattcaggccccagctaccggagatggtggacggattccgtatgacactgcggctgcatgagtacgtggagaaggaatccttcaaccacccctacacctttgtggcggcacagaccggcctggacgagaagacggtgcgcgacatcttcaacgcccgcgccgagttcctggggcgctggcaccgcttcgagacgccccgcatcctgggcattgacgagctatacctgaacaagcgctaccgctgcattctgaccaacattgaggagcgaaccctgctcgacctgctggccacccgccgccaggacgtggtgaccaactacctgatgaagctgaaagaccggcagaaggtcgagatcgtcagcatggacatgtggaacccctaccgggcagcggtcaaggctgtgctgccccaggcccgtatcgtggtcgataagttccatgtggtgcgcatggccaacgatgccctagagagagtgcgcaagggcctcagaaaggagctgaaaccgtcccagagccggactctcaagggagaccggaaaatcctgctgaaacgcgctcacgaagtctcagaccgggagcgcctcatcatggagacctggacaggcgcgttcccgcaactgctggccgcctacgagcacaaggagcgcttctacggcatctgggacgccaccacacggctccaggcagaagccgccctggacgagtggatagccaccatcccgaagggccaaaaggaagtctggagcgatctggtcagggcagtgggaaactggcgcgaagagaccatgacctacttcgagacggacatgcccgtcaccaacgcttacacggagtccatcaaccgactggccaaggacaagaaccgtgaagggcgcggttactccttcgaggtgatgcgggcacgaatgctctacaccacgaagcacaagaagaaggcaccgactgcgaaggtctctcctttctacaagaaaaccatcggttacggactgccggacttcgcagaggaactcaactacggagtcgatctatcaaccatctga

SEQ ID NO: 153641 - DNA, 1023 bp, Enterobacter cloacae
atggcccccgaactcgccagtgaactgactccacgatttaaggaaaaacccaagtggaccttcaatttcaccctggacggggaaaatggcatccccatcaataagcgcggcagcgggataaggaggcttatcctgttgaattttttccgggctgaggctgaaaagaatgtcgcggggacgcccagaaacatgatttatgccatcgaagagcctgaaacgtcacagcatccaaactatcagatgatgctgatgaaagcgttgctggcactggcaggccagccgcaccgtcagattatcgtcaccacccatgtcccggcgctggccggattgatccctgtcgaaggtgtacgttatgtcacccgaaatgaggcgggtgaacccgtagtaaaaatgccggatgacgctgtgctgaaggaagccactgaaagcctgggggtgctaccagagaccggtatggaaagggcgcaggggattgttctggtagagggaaagtcggatgtcactttcctgaggcatgcggccagttcattaaaacagtcaggtgtgctgccagcctctctggaggacgtgaaaatagtgccagtcctcataggagggtgtggcagcgtcaaacactgggttacattgaatctggccaacgatctggggcttccctggtgcgtttttctggactccgatattgggggagaccctgcacaggttatgtccattcagaaacgtaaaagagaagtggaggatgccggtaaggtattcttcgccacgcgtaaacgtgaaatagagaactatctctgcccggatctgatcgaagaaatgaccggtgtagccgtcacgtttacggacacctgtgatgctaaaaaaataattggccgggcggtgggaatgaagcccgataatgtgcttgataaattctggccccggatgacagcggaaagaatcatctcaagatcaacctatcatgacggaatgcaggaaaggattgagctggttgagatcctgagcgatattgttgccatgacgagataa

SEQ ID NO: 153642 - DNA, 228 bp, Enterobacter cloacae
atgaaaccacaaacacgcacgcgctttacactctctttacttaccgccgggattctgtgcgccagtacggcatcctgggcggccaacgtcccggcaggaaccgcgctggcagagaaacaggaactggtcagaaataatggcagtgaaccggcttcgctcgatccgcatatagagtcgaaagcgatgtcgaattcaatattatcagcgatttattcgaaggtctggtga

SEQ ID NO: 153643 - DNA, 246 bp, Enterobacter cloacae
atgaagcaggttggcatcgtcggttggcgaggaatggtaggttctgttttgttacagcgaatggtcgaagagaacgacttcgacggtatttctgtgcatttttacagtacttcaagtgcaggtgtcgccggtcctgtcattggtggcgtcggctatacgctaaaagatgctaattcaatcaatgccctgtccgaaatggatatcattataacctgtcagggcggtgattatactaaagcaatatga

SEQ ID NO: 153644 - DNA, 534 bp, Enterobacter cloacae
atgcgtaaagatacccgcttcaaatttaatgcctacctgtcccgcgtcgcggagctgaacggtatttccaccgatgacgtggcgaagaaattcaccgtcgagccgtcggtcacgcaaaccctgatgaccaccctgcagatgtcatccgcgtttctgaccaaaatcaacatcgtgccggttgacgaactgaagggcgaaaaagtcggcgtcggcgttaacggtacgattgcgagcaccgccgacaccgccggtgatgatgagcgtaagaccgctgactttaccgcgctggagtccaataaatacgagtgcgaccagattaactttgacttccatatccgctacaaacagctcgacctgtgggcgcgattccaggacttccagacccgtatccgtgacgccatcatcaaacgtcagtccctcgatttcatcatggccggtttcaacggcatcgagcgcgcggcgacctccgaccgtaaaaaaaaatccattgctgcaggacgtggcgatcggatggctgcagaagtaccgcaatga

SEQ ID NO: 153645 - DNA, 525 bp, Enterobacter cloacae
gtggctaccattcaaaacccgataattgaaggacaattaactttcacattcccagaaggagcaatgtcgacaaaatacgatgattggtctttctaccgaaatcagtttaatagcgcgtttggtggaacgaaggctgttgatatcatttacttggaaaatgatatttgctggttcattgaaataaaagattatcgtttttctccgaggacaaaatcaatggatcttggggaggaggttgctattaaggtccgtgatgctatagctgggatttacgctgctggatgtaatgcgaatgaacaaaccgagaaattatttgcatgcgatacgagaagaaaaaataggattcgcgtggtactacatcttgagcagcctctaaaacattcgagactatttccaaaggttatcaatccggtaaatgtaactatgaaattgaagcaattgctgaaaggaattgatgcgcatccagttgtggtagacagagagacgttgcgcagagacatgaattggcgagttaatcaaacatga

SEQ ID NO: 153646 - DNA, 1083 bp, Enterobacter cloacae
atgcttaaaagaatgaaagtaaaaaacctaacggtttttcctgaggctgatttcaaattttctcctgatttaaatgttattatcggtgaaaatggttgtggaaaatcacatttgttgaagactgcatatgcactaattgcagcgagtgcagaggaaggaagaaagcctaatgctggagaaccgaccaaaacttcgctgcaaaaaaattacgcagataaactcatcaatgtccttcgccctgagacgctggggcgtttagctcgtcgaaagcaggggcgggaaagatgcgaactcagttttgaatttgatgaaaaatatttgaacttttcgttgggatttgccacctcaagcaagtctgaagtgcaaattgaactgctgaataaaacttggcaacccaagtcacctgttttcctaccaacccgtgagatgctcacgctctaccccggatttgtgtcagtatatgacagtcattatctggaatttgacgaaacatatcgagatgtttgcctattattgggggccccagcgctaaaaggtcccagagagaaaaaagctgccgagcaccttaagccgctagaagaggctatgggggggaaagttgttttagataacaatggtcgattctatctgtctgtacctggtcaaggcaaaatggaaatgccacttgtggctgaaggcctacgtaagcttgctatgctttcaaggctgatttctactggttcgcttttggataaaggataccttttttgggatgagccagaaacaaatctcaatccgaaattaatcaaacttgttgctaagtcaattctttatttatgcctgagtggtattcaggttttcatctcaacacactcactgtttctgctacgtgaattagatgttttgtatgaagatgaagggtttaagtgtctaaaacatagatatttttcgctaaagaatggggataacggtgttgaagttgaacaaggcgattcgatcgaagatctaacgacacttgtacttcttgacgaagaactgcaacagtccgatcgttatatgtcttatggagaagaaagtggctaccattcaaaacccgataattga

SEQ ID NO: 153647 - DNA, 348 bp, Enterobacter cloacae
atgaaacctcaatctgcaacaacttcgcaggtggtaaagccctgtctgtcgcccgtggcagtctggcaaatgttactgacacgcctgctggaacagcactatggcctgacgctaaacgacacaccgttcagtgatgaaactgtgattcaggaacacattgatgccggtatcggtatcatgctggctgatgccgtgaattttctggtggaaaaatatgaactggttcgtatcgatcgcagagggtttaactggcacgatcaatccccttatcttcgggcgctagatatcctgcgagcacggcaggcaactggcttgttgcagcgaagtcgtaataccactgatatgtga

SEQ ID NO: 153648 - DNA, 465 bp, Enterobacter cloacae
atgaaaaataaactgattatttcatttttactggcttcagtgctgacgccttctgtctcgcatgcgtttggcaaccgtgatagctgggtaagtggctatgcgcagggaacgtctgaatacaccatcctcggtaaagggcagtcacaactttatctagcctgcgatagttccggctcacagccagcgaccattatcttcactgacgtgaacggccatcaggtcagcatggacagtggtcagacacttaccatgagaattgataacgctgaagaagtaaatatcagcgaaagcgagtctcatgtgggttctgacaatatgatgtgggcatggaacaaattacgcaccggcaaacgtgttgtggtttcaggtagcggggtaaaacctgccactttcactttagcgggggctgctgcaattcttcctgccttcggtgacaacggctgcttgcccggatttgcactgtag

SEQ ID NO: 153649 - DNA, 159 bp, Enterobacter cloacae
atgccgttaattctgttatggggcggtctggccctgttgctgggtatcgtggcttccgctaacggacgctcgttctggggctggttcattctcggtctgataatcgacccgatactggcggggctgctgtactggcttattgcaaaggaccgcacatga

SEQ ID NO: 153650 - DNA, 888 bp, Enterobacter cloacae
atgaaacatctctcgggctacgcccttatccgccgtcacctgcggcgctatccacgctcactacgacaacatttgctgaaagagctcaatcaactcgtcacgtacgaacccgtgattggcattatgggtaaaaccggcgtcggtaaatcctcgctgtgtaacgcgctgttccgcagtgatgtctgtgcagtcaatgcagtggaggcctgtacccgccagccacagcgcgtacggttacgtttcggtaatcacttcctgacgctcgttgatttaccaggagtgggtgagagtgttacccgtgatggcgaataccgcgagctgtaccgggaactgatgccacaactcgacatggtgctgtgggttcttaaggccgatgatcgcgcttatgctacggaagagcagttttatcaggacgtattcgcgcgatacagcgggccgttgccaccggtgctgtgggtactcaaccaggtggacaaaactgaacctgccgaacagtggcgctggccgtccgctcagccctcggcattacaggcggaacgtattgcgcagaagcagcaggcggtggctcgtcagttacagatagcagcaaccgatattctgccggtttcgatccgtgggcgttaccgtctgtcacgtctggtggaggccatgattacccggctcccaaagcaggctcgcagcccgctggttccccacctgcagaacgggtatcgtaccaccagcgtcatcagcaccgccagcagcagctttggcgatgccgtggtggaagtgattgataagattattgacctggccccgctaccacaggtggcccgtactgcactacatgccgtcacgcatacagtcgcccgcacggcacgctccctgtggggatttttcttcggttag

SEQ ID NO: 153651 - DNA, 927 bp, Enterobacter cloacae
atgtacaggtatattgaagtgaattcagtcagggaaggggtctatcttctctggcgccttggtcatgcagaaaatgccagacgctttgctttcagttcgcaaaagaacaggcaacaaattcaggacaaaattaacggtattattgatgataaaatacaaaataatgacggtgactcacgtattctcagagcagtgctccggtatgcctcaaattaccgtgagcgtagtgttgatgaatctcagttgtcatggctcaggcgggatgcttatggttgtctttatttctggttagggttagtaaaagaatacgtaacattcgggatgacggagagtaatgaagtgaacccccgatattattaccgacgggaggggcatttctggcttactggtgagcttatgtcgtcatcagtccctgacacaccggaacaatgttatctggcaatattatccatcctggatatgttacctcaccggattaaatgcaaagatgccattatagcggaattgagagatgaatattttttcaataaggaccgactaagaaaagatttttcctggatggctgatgcagagcctgaaaatattgaatggataatggaacaattcagtcagcatcgaaaaattctgcgggaattcagaggtgttagtcttgttcatgaaatgcagagtcttgccatccctgcaatatattatctctgggaagaggaacctgacacaaaacaactttttcttaatgtgctacgtaagcgctatgcgaacatgaagcatcgtaagaaagtagcggttaaggcaccggttaatattcgcatttctgaaaatgcaaaaaagactctggttaaactggagaaacgctttaaccgaaacagggctgatgtgattgaatatctgatagaaaaaacctggcaagagctgaaccagaaaaactaa

SEQ ID NO: 153652 - DNA, 234 bp, Enterobacter cloacae
atgctcaccggaaaatacggcttttttactgccttcggaccgggtatggatctgcacttccttgccagcccgggaaaccgccaccacctgatggccgattttaatcttctcagccgggatctgacttttaagtgccgccgtcagcgcctgcattcctcccttaagcctgaaagacgccggggagctctcccatgccgggtagcgttcgggggcgaatccagctggcgttcgtag

SEQ ID NO: 153653 - DNA, 321 bp, Enterobacter cloacae
atgaacgcatacctcacttacgaccgcatcgaagatcggcgctgggctgagcagcagctcaccgacgagaaagagaagtggatcgacgaccgggcgcaggcaatcatcaacctgatgccgaaagagccgtccggcctcttccacttctcggtaccgattgaatccagcccatacgaaggacttcgcagcgataaagctggcgaggcctacaacgatttcatttcggcagttgcttacgcccaggctgaatacgactgggatcaccgtaccggctggctgaaaataaccaggaccaggtactcattctcaaccagaaattaa

SEQ ID NO: 153654 - DNA, 198 bp, Enterobacter cloacae
atggaaactttattcgcactcgtcctgaccgtggcaatgaccaacggtgattatcaggatgtcattctcggcgtttacgacagccagcaggaatgcagcctggcagctacagagcagaaagtgtcagctgagtgctggccggtagaaagcatcatccgcaacggcgagttcccggcgaaattcatcgcgcagcagtaa

SEQ ID NO: 153655 - DNA, 129 bp, Enterobacter cloacae
atggtaaaccagcagcagatcagagaggcccaacggctcgcgtcgttcgcggtgctccatcgcaatgctccggcgtgggaagaagcaaaacgcctttacgccgtcgccatcgggaggactcttcactga

SEQ ID NO: 153656 - DNA, 387 bp, Enterobacter cloacae
atgaaatctcttgcagagcagatgcgtaaccacgaccgcgagcagatgagccgcatggcccataacctgccggagcagtaccaggagcgcgcgccagtcgagctggtggcacaggtattcaacaagctgttcaacgagctgcgtgccgcgttcccggccagcatggcgaacttccgcactcaggaagacctgaacgaattccgccgtcagtggctgcttgcgtttcaggagaacgggatccactcaatggcccaggtcgatgccggcatgcgtgtagctcgccgccaggagcgtccattcctgccgtcgccgggccagttcgtcgcctggtgcaaacagagtggcggggcgctgggcatcaccgttgaccaggtgatcgccgaatag

SEQ ID NO: 153657 - DNA, 771 bp, Enterobacter cloacae
atgtacctcgtaaagagttgcttcaaaagagataacatctggaaaagaaagactataaaaattggaactctaactgaatatagagacacagaacaacaacagatcgctgacagagaagaaggaatgataaacttgtccttcgacctaaaccatttccatatgccaataccactactcaataatttgaataccattagtcatggcttaagcagttttcatcttaaagaaattaaactgcgcccaaacccattatttacgaatcacgtttatgcggaaaagtattctgcaaccacgtcccttattaaattcaatagatttatattttgcatatcaaaactcgacaaacctgatacgtgtaaaaatattttcaaagaatataatgactattggtatcttccggaggatagaacgcaactttttggcgatgcgctatctttattaatacttgaggaagtctcaaatagggttcagagaggtgagcaaattttctccacggatagtgtaaccgatccattagaaatccgttggtattgcaataatatattctatacccctagacaggtattaatagataacacaaagctttacaaagaaagctctaatatcctttattggctatcggaaggccacatggttaaaccagatagctttcagcatgaaaaagagatgcgttttatttttgacatctatagcaatggggaattattgcaaccattaaacaaaccattatttgttagtgcggaaaagattttacctctaattaaaaagtga

SEQ ID NO: 153658 - DNA, 351 bp, Enterobacter cloacae
atgccagcactaatcccacgcgcgtgcagaaagcgtggctgcccaggcacaaccactgaccgttcaggatattgcgaaaagcaccgcaatgaaggttggcagcagcaccagcagggtaagagccgacatgaacgaggatatggaagtaagtgggacatcattcgcgcacgagtgttaacgcgcgacaaacacatctgccagaactgcctgcgtggtggacgtgtggagcctgcaaagacggttgaccatatcaaggcaaaggcacacggcggtactgatgatgactctaacctcgaaagcctctgctggccctgccaccgcaccaaaacagggcgcgaacgtatcaaatga

SEQ ID NO: 153659 - DNA, 792 bp, Enterobacter cloacae
gtgggaaactcactacactatgtcaatataaagaacaaaagagatctcaggctttttctttggtatctctcagctagggatattgcaattcttattaacacgctggcatcagtaaagagtacttatagtgaagatgatatatttggaaataatgttgaaatcgcatcaggtgctattaatcaagccctgttactgataaaggacaaagctgttaaggggatttactccgcatcatttaacttctttaaatcgcttcagttaccctcttctgagttttcgtggataaagaaatctcctgatgcctgctatttctcatggctgtatataaaaactatggttcatgatttaaacggtgagttacaacttattcctgagattgtaggaaagataagaaatgccgattacatttatgtcgggcatgactttttgtataaaaggttactgataaatccctatcctgtggataataaagaaagaatagttgcaattgaggatttttttgaccgtgcccccacaactctgagacataaactcaacctgatgcatcgtattcgaaaacaatggaacgatctttattatttaagtgctaattttccactctctccaaaagagaagaagaaatgtgagtgggcttgggaatacatacaaaaagacaggagcaaaatgcgtggtaaaagaaaaaatccggatggcacgtattcggattacttaaatgctccatctgcaactgacagtatcatactttctgcattaagaccctcaggtgcttatgacctgctccccgttgattag

SEQ ID NO: 153660 - DNA, 204 bp, Enterobacter cloacae
atgagcatgattgatattcacagcgataaattcgtaaatatgcgttttattacggaactgaccggtcagtctgacaagtggttttacaaaatggcacaggaggggaagtttccgaaacctgttaaatttggccgtagttctcgctggattgaacgtgaggttaaagcatggctggaagagcgaattaaagaatccagagcgtaa

SEQ ID NO: 153661 - DNA, 1026 bp, Enterobacter cloacae
atgaacttaccagaagagtatttattatcgcatgtggaatatcatgacgatggtgtgcaatcgtattcaatcatttctgatgacaatatgctcagagataaagcagaacagttagataaatatcttaaagttttgggtaaagggaagtcattaccctttactgtttcgtatgaccgtaaaggttacaaacctcatacaagcgcttcattactccgcgatgctatttgctgtctggaaaggttacagaaagactatctacggactaggttagtcaatccgcgtatagcagctttccagcgtttattaaataatgctgatttgtgcgcacggatacatgaagggaaaatagtcggagtagatcaaataacgactgcggaaagcctgaataaacttattctggattatcgcacagctatcagtcaggccggatttaagaaggaatatcttaaatataaacgggcatcgataaaaaacttgaaaggggtgttgaattatcttcgtcatatgcagtctcgttattcccggttgttaatattgagagtagatttatcctggaatgatgaacataagtctgacgttactgcggacatagcccgccagtgccgccagcatttattccgcaatatgaaaaagaacccactgttccgtaatgtactaggaaccgtttggaaactagagtacgcacctgcccgtaagtttcattaccacatgctgtttttagttaatggtcacaaggcacgtcaggatgtcaacctagcccgggcattcggtgagtactggaaaaaacacatcaccgaaagtaaagggcattactacaactgtaacgcccacaaagacgattatgaagactgtggtttaggtaagcttgaacgagggaactcatcaatggaaaaaggtctgcttaaagcggtgagctatatgaccaagattgatgcctgtgcccgtctggtcttaccgggaaatgcccgaacatttggtcgaggtgaaatcaaggcactgaaaacgaaaaataaacggcgtaggtag

SEQ ID NO: 153662 - DNA, 234 bp, Enterobacter cloacae
atgcacaacgttatttttgtccctaatgctgtcacaggtcacggtgagtgggtaaccccgctaaccattgaacaggcagattacgattcgctgttctgccttagttgtaagttaaagctaggcgttcatattgaccctttgaccggggttaggagttttattcacttgccaggcagtattcataatgtgatgaaaatgaaaacctgtgagcacaggagtaaatcagaaatttag

SEQ ID NO: 153663 - DNA, 219 bp, Enterobacter cloacae
atgataagacctcgcactttacgccctgctcttttgcacctcgcgctgggaggcgcgctgctcggtgcgacgacattgagttatgctgatgaacagcctgcgttccagaaaattcccccgatattttacttggccctctctttaatgatgtgcaaagtgccaaactgtttcccgatcagaaaaccttcgctgatgccgtccccaaaagcgatccgctga

SEQ ID NO: 153664 - DNA, 246 bp, Enterobacter cloacae
gtgaaagtaggccatgtcgggttttttttatcagataaatcctataatgtttcgactgcttcattaaccgccacttacgtagcggtaaatattgaattgatgcgaagctcatgtaaacttgtttaccgtttgtcaaaatatgtcaggaagacgctgggccttattctgaaaggttcgtgcggtagctatgccctcaagatagtaacaccccgaaattatcctgactattttaacaatagcacctaa

SEQ ID NO: 153665 - DNA, 345 bp, Enterobacter cloacae
atgcgtaatgatatgcgagaaggcgaagataaagctcctattgatcaggcgctcatttatttagagcggatacgtgagggtaaagtgactacaaaatccggtcgcccaattccgggaaatattgatatacctgactattgttacgtactttgtgaccttactgaatccatgcaccgccgctgtcgtcgagccaatctgcggaccacatctgatggcatgggctatttcggttataatgaaccctctcatgcctacatcgaagtgattagttttgaccaattagtaaaagcggccagagagcgtaaccgggcattcttcgacaggcttggattgccttccgcttag

SEQ ID NO: 153666 - DNA, 633 bp, Enterobacter cloacae
atggcgagaactaaaggtgcagtagggaaaggggttgataataaagacgttcgtgattatctgttagctcatgggccgcttagtcaccagccgcacattgtcgatcatagtttaagaggagccaaagggcaggagaaggattcacaccgatattcgaatgagagaattttcgcgatgttgaggcaactggattacataaatgcaacaacagtattcaatcaaatgcaggcttacaataactccaaggggaaagaaaaggatccttcagttcgcaatgtgcaacgggttaccagagtccttcgatgtgcatctgaagcaatccggtatcacgcagaaaaatggcgtaaaaaggagtacggttctggggtagaaaatgtttgtgttttaaacttttctgatgaagaaagggaacgatttcgtcagttagtcatgcttggtgagatggacaaagctaaggtgctcgcagatatgtgcggattcattactcgtacctacgaatgccccaaagttgaaaaccaaaatgctgatgtcattgatttgaactttaggaaaaacaagcgggaactgatgccgcttactcaaataatcaaggagattggcaatcactacgtatcagcaattaaagcagcctga

SEQ ID NO: 153667 - DNA, 492 bp, Enterobacter cloacae
atgactacaaaaaagaaatcacagccccaaatttcgccggagttgaaaacttatctcgacaacatcgcagcgaagtacaaaccagatccgggggccttaaagcgtcaaattgataatgcggaagctcgctacagccgaacgcaacagttttctgacattccagcgcggctggtggttaaactccagagcctgatcctagacggctggcggtattgcccttcagctaattcttcagtgctttccaatgccacgatgattgctgttaagttgcaaaaaccggagaccttgatcgaagatgagttgaagacgctacgctccagaatctccaacgcttaccacgatcaactttttacagcgatggagcgtgagattgacgaactgatacatgaagcagcacaggacgcacaacagaaagcagtgcaacaagctgctgccgaagaagctgcaatacgtgaccagttgagggctgccctcggtatggtgaaagcatga

SEQ ID NO: 153668 - DNA, 150 bp, Enterobacter cloacae
atgacagcgcaaaccaacctgaccaaggggcaagagtgccccgttaccgttatcgacgaaggcgcattgaaacgagccattcagaaagcaaaggatattgcagacgctaacccggaaaaataccgtcggatacatccaactttacaataa

SEQ ID NO: 153669 - DNA, 258 bp, Enterobacter cloacae
atgacacacaaaatttgtccagtaacaaaccgcccaatcaaattgaatcgcggtgggattaaacatatgcctcggtactgcgttgttgatggtaaccgatatgagagctttcaccagttcggaacaagcatattgaaaaaatcagtgagtgagattattgaactgcggaacgagcacttcattgaaaaacataaatccacagtctgcggctacaccgtcgaaatgttttacaaatgcgacgaaccgaaaaagccttag

SEQ ID NO: 153670 - DNA, 507 bp, Enterobacter cloacae
atgactacacaccaaatcacgacccacgcttacctcagagcatccactgacgatcaagacgctacacgcgcacttgaaaccataaatgactttgttgaggagcatcggctaacaagtgttgagtattatgtcgaaaacttttctggtgccaagctggagcgcccggaactttcccgtctgcttgccgcagccgaaaagggtgactttttgctggtggagtccatcgatcgcttaacccgactccccgctgtacaatatgaagccctcaaggcccgcattgaaaagcagggcttacgcgtcgtcgttgtggatctgcctacatcgcacgatgcattaaaatccgcagcaggtgaccgcatcattgagcttatcaacggcctcatgatggatattgcagcccattacgcacacgaggactacaccaaacgccgccaacgtcaggcacagggtattgctaaagctgatcttgacccgccatttccggacagcttttgtatcttaagttaa

SEQ ID NO: 153671 - DNA, 903 bp, Enterobacter cloacae
atgggattattaaagacagggcttcgtaccgcaaatgccatcataacactctgcggatcgctggaattagagcgtgcgaaagcaagcttcgaatccgtttatgcttcctacaaaacaacgtatgacgaagtggcacaaataaaaaccaagattgataatcgcattagtgagttgggcgacacgctaaaaaccgtaaaagccagattggatcatatcgagcaagtgttagaaaccgccttcctttctctcgataaacagtcccagccaacaatgcatgcatcgcagagtattgagaagtttaatcaacagtattccagagtgctcagcttgggatttggtgggattgtcggtagctcaatggcattgggcgcgtgggcacttgtttcagccattggcactgcgtctaatggtacggccatcggcacgttgtccggtgtagcagcaaccaatgcgacacttgcctggttcggaggtggtgcagttgctgcgggtggagcaggaatgagcggtggtatgttagtactgggagggatcgttgcagtgccgattatctatttcgcagcgaaaggtgcatggaccaaagcccgtgctttccaggagcaagaagagcttgttgaacaagaacatgaaaatttacgtatattaaaaccagaactcgagaagcaatataatgatgtattaacatacactactcaattaaaccgccattgccaggtatggttggagcaaatgggcaatgggttagcaatcctttatccttgggggaaactcagcgttttttaccggaaattgctgtacgtcatcggtattaagtggaaaaaacctgagcatctggcagtcattaaaaccataaatgagcaaaccgtccagtttttgcattttttccaaaacgaaaacacgtga

SEQ ID NO: 153672 - DNA, 1197 bp, Enterobacter cloacae
atggatgctatccagcacattgtaatgtctatatgtgatggaattatgttaaatgatgaatcacaggtgtataaatttagttcaaccgaaaaagaagatttcattcaaaaatgtaaaaaaatactatccagtgataaagaatctatctcccctgttgtcgagtatgcgagattgagtgggaaactcaaatcagaatgggtgagtgatagtacggaaatagtcattattgatggggaaggtattggacatgacacaaaagaatcagcacagttagatgctaggcattatgatttcttttatgatactaattcaattctatttattgaagaatcaaaaaaaccatttgtgggtggtgggaaaaatgcactaaagagtatttttcaacgaggatatggtgataaattaaagttagttttcactaaacttgacgaagttattcctttcgattcagataccccaacagatgaagaaagaattgattgtgtaaaagatagtcttaataatgtcatggatgcgctaaaaaaagaaaatgtaaaatgcaacatttgtattgatgatatatattttcttggcgaccttaataaggttgaacataataaacggctggcatcgtgttttaactcaatttttgagagcacgatttcattaatggatgatgatgatattttcattgagccaaaatatgactttgagttattggcactgcatataaatgatacttccattggtttcaaagaacgatataatactttattaaataatgaacactggaaaacaatagaggcttttaatagacgtatgtactggagtatggaagcatttagaatgtttactccaattaccgactttgaggcagcagtaagtgaatacatcggagaatttttggcaaagccaatgtcatgggaatatgaagcagttgataatttaaaacgaaaaagtattgatagcgtgaaacgagaattcaacaagcttattcttagctttattcgcaataagttaattactgaaccatatgagaaatggaaagaatcctatttcttagctggcgctggttcaacgattagtagaaaacgtgagataactactatttttagtaatacagttattgatgcctcccaagctgaacgctttaaggtgtttaaggatcaaattaaagcgattgttgtcaagtcaatagagaattgtaagtccatctaa

SEQ ID NO: 153673 - DNA, 1230 bp, Enterobacter cloacae
atgtattcatttattgcgcgacagcctatttttgacaggaaaatgcagaccgtcgcatatgaattgcttttcagggtcggaatgaagaattcttttcccgatgtttcgcctgaatatgcaacttccaggatgatttccgaccagtttttatgcattccgattccccgcatcgctgacaatcacagctcatttatcaatgttccgcaccggatgataatcagcgggcttggcgataccttgccgaatgataaagtggttatagagatccttgaggatgccattcctgatgacgagcttttcctggcggtcagggaacttcacgacaatggctatcagctggcacttgatgatttcacgctggacagcgcctgggaccggtttatgagatatatttcggtcattaaatttgatgttcgggaaaaaacttaccatgagattgatcgctatctcaccgagaaaaagcacttgcttcacggcataaaatttctggctgaaaaagttgaaacaagagaagagtttgagctttacagccaggccggatttgttctttttcaggggtttttcttcagcagaccggagatcatccgaaacaaatgcctttctcagaatccgatggcgctttccagcctgatgatggaagttaacagggaaagcccggactttaccgtgcttgagcgattactgaaaaatgacctgactttatcatataaaataatgcgttatgtaaaaaacatgctgttcaaatcacacggtattactccgtcaggggaacttactctgaaagaaatgctgatgtatctggggtataacgaaatccgccgttttgtttcggtggctgctctttccagcatcggggtttcgggtgtcagcgaactttatcatctgagtatggttcgtggaaaattttgtgaattaattgccgggaaattaaacctcgcttcattatcctataacgcgtttgtttgtggtttgttttctttgctggatgttattctcgagcagcccatggatgatttaattcaacagatatcggttcccggaaatgtcgccgatgctctttgcctgcataaaggcgagctttttgacatacttaatctttctttgtgttatgagaagcttagctgggaagagacagctgaaatatgcagaacactgaatatctctgagttctctgttatagaaacaatgcagaaagccactaaatgggctgatgagctcgctgtatgttag

SEQ ID NO: 153674 - DNA, 144 bp, Enterobacter cloacae
atgacgtggaaaaccacacaggggcgggttaccctccttcttatcagctttttcgttgttttaattatggttacttatttcgttatcaaaatatttgtttctccgaaaatcattgataccgaggtaatgactccaacttactga

SEQ ID NO: 153675 - DNA, 711 bp, Enterobacter cloacae
gtgagcgtgctgtctaaaaatggcgaaatgaaaattcaggtaggagcgaatgacaaccagaccatctccattaatctcagccaaatagactcaacttctctgggtcttgataaatttaatgttgcaagtggctttactgcagttggttcttcgttaacaggtaaagatggttctaataatgatgtaacagttgctagcgctgacgtgaaggatactgctggggaagctgtcaagctttatacttataaagataccgccggtgatactcaatttgctaccaaagatgctgatggtaactacaccaaagcacaagttgcatttacagcagctgtggcagcagacccaacagctactcctcctgttgaagcggctgcggctaaggctgtagtaactacttctacagatgctgtgaatgataattcggtcactaaaacagccagtcctctgggagcactcgacgatgcgatcgcatctgttgataaattccgttcttctcttggtgcggtgcagaaccgtctgagctctgcggtaaccaacctgaacaataccacaactaacctgtcagaagcgcagtcccgtattcaggacgccgactatgcgaccgaagtgtcaaatatgtctaaagcgcagatcatccagcaggccggtaactccgtactgtcgaaagctaatcaggttcctcagcaggttctttctctgctgcaaggctaa

SEQ ID NO: 153676 - DNA, 927 bp, Enterobacter cloacae
gtgattaaaaaacaggcgttcaaattccggcttgaacctaataaaagccagtcgtctgacttttttatgtttgctggttcctgtcgttttgtttataacaaagcccttgctcttctcaacgataattaccattctggcaagaaattcatgggttacaatcaactagctacagagttagttgagtggaaaagtgaagaaagcctttcctggttgaaagcttctccttcccagtgcttgcagcaatctctaagagatttagatagagctttccggaattttttctccggaaaagcacaatatccaaagtttaaaaagaaagggcggcatgattccttccgtattccatgtcaaagggttagagtagatcaagataagaaaatggtgtctctccccaaagtcggttgggtaaaatatcgaaaaagtcgtgaaatcattggagagttaaaaaacgtaaccatttccatgaagcaagataagtggtacatcagttttaatacagagagtatggtccctgacccaatgcatccttctgatatcaaaacaaaaattgtacttagcgatcagtgtgagtttcctatccggttggatagcagcatggatagttctcatcagcttgatgaagtaaaaaaattagcccgacttaatagaatattaatcagaagaattaagtacagcagtaattggttgaaaactaaagggaaaattgacaggataaaggcaaggttagctaggtgcaggctagataacatccataaagtaactacagcaatttgtaaaaaacacgcagttgttgaggttttgagcttgatggattcagtatcggataaaaatgatatcactctgagcatgagatacgaatttgtcagacagctaatttacaaacaagagtggctgggtggtgaagttattcgccgagagttagcctag

SEQ ID NO: 153677 - DNA, 678 bp, Enterobacter cloacae
atgataaaaggactttgtccgacatgtggcgggcaacgaaattgcactgtgcatggacatctcttagttgcatgggaagatgatgttcatcctgtatacggaacatatgatcatcacttacttcaatgtaacggatgctctaccgtattttaccatttgaatgaacactttagtgaacatactactcatgactacataaatggtgaattcaaagagacgcctatagacatgatcactacctacccagcttttgatcacataccaactccttcatgggtgccaaaactcgaatcagtagattttcagctatttcagattttcaacgaaatgtattcttcttataagtctggtcatctaatacttgcctctatcggacttaggacaatttttgaccggacgacagaaatccttcaaattcatcctggtttgtaccttgacgaaaaaataaaacaacttaaggatgaaggttttattggggatactgaagccagtattttgtcgactgtagttgatgcaggtaatgccgcggctcatcgaggttggagccctacgaaaagggaattcgatgaattgctaaactcgatcgaacagtttgttcaacgaacagtcttaagtgttaaaacaactacgcatattgttgagaggatacctcctcgcgtgaaaagaccaaaaaaataa

SEQ ID NO: 153678 - DNA, 501 bp, Enterobacter cloacae
atggccgataccaccatcatcattaaaaaacgtcggcgcattattattgagccgaaagagcttaaggttaaagctccggccgaacctgttgaggtagggaaagtggacgttcaaaaactacattgtcccccaggaatgcgcgaggatattccggcaaaattgcgcggcagcgcaaggcggaattacaagaaaaataccaggacccaggaaaggctcagccagttctggccattgttgttttctgaatacaagccgctggccctcaagatatctgaagcaatggtgaatgatgccagagagcgtgatttgccaatctctgaggtgcagattaagcaatatctggtcagatatacccagagtgcgcgctatgtcatgtcggttgtggaaggaactcaccgttttaaccttaatggtgagccggtggatcttatcagcgatgaacacagggaacgcgccagggaaaagatactaaagctgagaaaagcaatgaactcgaagtaa

SEQ ID NO: 153679 - DNA, 498 bp, Enterobacter cloacae
gtgccggaaacggcggcaaaaatcctgtgcatcagccaacataagaaccggaaaatgacgctcctgaatcacgaaactcggtactatctggaagtgaccacgttgctcaaagaagacattgatgattataacttctattgtcgcagcaataatgtgcccagcattaccatatggcgttcagtaagttacagaagatttgatgtcgtatgttcctgggaacatcttgaacataaaaatcatgaagtcgtttgccacccactgttcgggccatgtataaccgcatacgcagaaaagcagctgaaaaaaatgataaaccagcatgactggcgcgggccgacccctcctaccctggaactctcaaagtgtcgccagctggtgaccttcaggttgattcagaatatagaatgcgcacgcaagctggcaatcgacagttacctgtttattacctgcctcatggaggaagtacgaaatcttcaggaaggggagcggattctatga

SEQ ID NO: 153680 - DNA, 864 bp, Enterobacter cloacae
gtggctaactctccagctctggtctcgcaatatctgcaggtccggaaccctaatccagaatttacgccccgtgaaggcaaaaaaactttgcctttctgccgcaagctgatggaaaaatctgcaggcttcacgtccagattcgatttttccatgcacgtcgcatttatgcgctcattaggccttcgtcgcagaatgccgccactgcttcgccgacgggctattgatgccttactccaggccctatgtttccactatgatccgctggccaaccgtgtacagaggtcaattacaaaccttgctatcgagtgcggtctggccactgaatctaaaaacggtaatctctccatcaccagggctaccagggcgctgcgctttatggcagaactggggcttatcacgtatcagactgaatatgatccgcagatcggttgcaatattccaacggatatcacgttcaccccggcgctgttctctgctcttgatgtctccgacgttgctgttgcagctgcgcggcgcagtcgcgttgaatgggagaataaacagcgtgaaaaacagaatgagccgcgcctggagatggatgagttaatagcaagagcctggcgttatgtacgcgaacgtttccgcagttaccagtcggaacgtaagctacatggcctgaaacgtgcgcgtgctcgcaaggacgttacccgcacccgccgtgatattgaatcgatcgtgaagcaacagctgacgcgtgaaatcgccgagggacggttcaccggtaatcatgaagcagtgcgcagagaagtatcgcgacgtgtcaaagagcgaatgctaatgtcccgcggtaataattacacccggctggccacgggcaccacttaa

SEQ ID NO: 153681 - DNA, 2307 bp, Enterobacter cloacae
atggcggagcttgcaaaattatccatacctctacacgggcgtctggctgaacgtttaatgctggcaccattctctgtacagcttttcctggcgtgctcgcttatttttggtgtggtatggccagccacccttctgctgtctttgccatttaacatcattctgctggtcgcattcagcgaccagcgttttagattacctctccggataccgatggatgttggtggcttcgacatctccactgaaagagaagaaagctggaagataccatttctgaaacttactctgcctaagataatcgtggggaaagcgaaaggtgttctctgtcttggcacaggacgtggccgtgacctcggcaaagagttgtggcttgaaagctctgatgctctgaggcacatgcagataatggccacaaccggcggcggtaaaactgaaacgctctactcgctgtacttaaatgcactgtgctgggcgcgggggtgctgcatttcagacggtaaggcgcagatagatctcgccgtggcaacatggtctatggccagacgtttcgggcaggaggacgactggcacgttcttaacttcatcaccggcaatgacgaccgcttcaaaaaactgatgatcggggataaatcccgccctcagtccaatagtaccaacccgttcgcctatggcagcccgaccttcattatccagttgatggagtcactgctgcctgcaggaaacggcagcgatgaaggatggaaagataaagcacgagccatgatgaatgccctgatctacgctctgtgttataagcgcgcgcgcgataacatcatgctgactcaggccgtcattcagtcttatctgccgcttataaaattcgttgggctgtatcgtgaagctcttgaagagggatggcacgaagaaggctataagcccatggaaaattatctggccaacctggctgggtttgatatgaaactcatcaaccgcccaggggaatggtcccagggcgcgcttgatcagcatggctatctcatccagcagtttactcgcatgcttagcatgtttaacgatacctatggccacgtctttcccaagaacggtggtgatatcgatatgcaggatatcctgcataacgatcgcaccctggtggtgcttataccggcgctggagctttctgataacgaagcagccaccctgggtaagctttatgtctccgacatcaggatgaacattgcaaaggatctgggtaacaaaattgaaggttccccggaacatactctcacggtgaagaaattcgccagtaaattcccgtttatgctcatctgcgatgaaattggttactacttcgcaccagggctggaaaaactcgccgcccagatgcgaagcctcaaatacatgctgattatcctggcgcaggacctgcaggcgatgatgcgccacgggaaagaggttcattcagttaatgctaacctcggtaccaaacagtttatgaaaactgaggataccgaagatacgctgaagatgattcgggctgttggtggtaccggtcagtacgctgagcagcgcaccatgagtcgaaccggtatgggtggttatgaggacgtggaccgcgttgagttcagagacagggataatatccagctggatgagctcaaggcactcaaggaaggacagggcatcattagcttcgaagatcgcctggtgcgaagcagttctatctacatccctgacgacgataagatttcaaagctgaacatcaaaattaaccgttttgttcccttacggcgtcctgacttcagtgatttatgtaatgaagtacctgcagctgcgcgccggcgacctgtttcccaggaacgtgtttctcaaattatcgatatctgtctctcgactttaccaggagcatggaatggccgcctgaatgctcgcttagcagataagacactgatggccataaccagtgtggccacagacctcgataaccgtgacgatctgaatttcacgccagaacaacgtggcattctcttgttcgaaacggctattgaagccttggagcaaaccgggggacgttattactggctgaaagagcaggaatccatccgtatttccaaaaagcgaatcgaagaggcgcacaggaacagtgccggtattacgcttccttccacttcacaaagagagccggtaccggaccaaccacctccggccggccaacatttatcccaaccaatatcagagagcaaccgcggttatgacgactggtatcagaacattactcagcacgattatagtgacgattttactagtacctctgacgacatcaggtactga

SEQ ID NO: 153682 - DNA, 1014 bp, Enterobacter cloacae
atggatgagaagctaaaacatgcggatttatcgtctttgccagaaccggtgagggaagccgccagggagcttgttgacctgaagtttcggatcgatatggcagcaaggggcggtgcgtcaggcataccacgtgatctgcatgggtgcatgacaggaggagaatgggggccgcatttcgggcaggaatttttctgcagcatcatcccttttttcccgcgtgattttgaaacctgctcagcaactgaaatgctggttccaaccttacataccttcggatgcagctggcggtggtggcccgatcgttattgtagcgagaaagatgagcacgatatacggcgccacattttttctgattacgggctgaaaagcacgagttacaccttcattcctcagctgggactgttctgcccgggtgaaggtaaaaatcgtgttaatttctgccgccatcacgggatcgaatacatcccggcacgggtttatcctcatgattaccctgaagctaaccggttgtctgtgtacgttcatgatactgccggtgggctggatgtatgggccgttcttgataatcgctatgctcagaaggtcacccactatgcttatgcactcccactattgcgcgcttatggggtagcgttccctggtaagtggccagcaggatggccatcgatatcggatctcctggctaaccaactgtgttgcacggatgactcaacctttcataaacccgttatcgatatacacgctgtcaggaatgagctggaccgtgatacgaccagcagagaaaaaggggagttatatgtcaaaaccagggtgtttgaactgcccctggccgggctgtttcgctttaccctgatcgcaatgtctttgagcataggggcgcttttcatctatgagatactggatgaggggctcctgtccaagatcgccatgggtataagcacgttcatggccggcgtggtcacttcgttattcatcccggcgttccgtatcaagcaaaaacatcttcaaaaatag

SEQ ID NO: 153683 - DNA, 1932 bp, Enterobacter cloacae
atgcttgcggtagtggctgaacgccgtcgtgatggtaaatcaagctttgttcaactcgtctcatataccatcctgcgtgatgatgttgagatgagcgaaacgctatcgcctgaaaaaccctttgtccgtaagtcccgttctgaggacaagattttcaacgacctggtagggtatgcaacgcgtaatgcactacccgattcacaggatgttatcgcaacgttcccggacggacgccagcaggtgcgttgcgataaagtcatctgtgaaaccaactgcttctctctggccacggcatccactgaaatggatatggttgccatgcaaaacacccgctgtaacgaccctgtatatcacgtcattctgtcctggccggaatccgagcgacctactccagatcagatttttgattcggctcgccattgtctgaagcgtatgggtatggaagggcatcagtatgtcttcgctattcatgatgatactgataatttgcattgccatctgacggtgaaccgcattaacccggtgagctataaagctgcctcattgtataacgatcacttcaccctggaccgctgctgccgtgagctcgagctgaagaacggatggaaacatgataatggtccatacaaagttaacgaagacggcgcgatcgttcgtaaccgcagcttctataaatctgcgccttcagctgcgcgccagctggagcactttggtgataaagaaagcctgttttcttatgctgtagataattgccgaggaaaaattgatgaagtgtttcttcagccagactacacctgggatgatgttcataacgtattagtgtcagctggactcgagctacgtccgaaaggtcagggcctggctatttatgatttggggagcgatacccaggcacctatcaaggccagcgatctccatcctgagcttaccctggacagtcagcaggaattaatcggtaaattcgttcctgccacgattcatcgtgaaactgataacgtgggcagagaacgtttgctgagcacggtagatattcaaacccagtacaacgatcgtcttcatcgtcgtgataaaggcgcccgtgctgaacgccgtgttcagcgtgccgcagcccgtcaggatttaattgcgcgctataaagcatataaaactgcttttgttcgccctggaatttcggccgacaccgtaagaacacggttccgggaattgtccgcaagctatcgtatccggaaaaataatgtccgaatttcacagcgtgatcctctgcttcgtaagctgatgttccgcgcgctggaagtcgaaaaaatgaaagatatggccgctttgcgtttgcaaatccgagaagagcgtaaagcgcttaaagagatgccaggttcccgaccgttatcgtatcgagcatgggtagagatgcaggccaccaaacatgatgctgctgctatctcgcaacttcgtggctgggcatatcgggagaagcgaaacaaccgcacggcagccatctctggcaacatcatcctcaactctgttgctgatgatatccgtcctgctcaaattcgtggttatgaaacacaggttaaccgcgacggtgccgttgtatatagctccggtggcaatcctgtattgcttgatcgtggtttgcttattgaggttgccgatgcaccggcagagaagggtaaaaacatcgctatggcgctgcacatctgtggtgagaagagtggagagaaagttgagattcgaggggataaatccttcgttaacgggaccattcaatacatcccgcatttcaacgcatcgtcaggaaaaacagttccgttgacgcatcctgttcagcgccagcaggcaggttatcatgccccgactgagacccggcatgatgccccagctgcaggtggaaatatgcggcctcatgtaccgcccaagcccaatattaagaactaa

SEQ ID NO: 153684 - DNA, 345 bp, Enterobacter cloacae
atgagtaagagtgaaagacgccagcgttcagcgttgctgggcagcgttcgttgttaccctgaagagaaagcgcagatacaggaaagtgccaaagctgctggcatctcaacaggtgagtttttgcggcgagctgctctcggaagacgtattgtcgcaaaaggtgacacccggcagatgaatgaaatccttaaactggggggcctgcaaaagcatctttatacagagatgcaaaagcagggaatgatgactccagagctgagtaagcagtttgccgagacactggctcagttgcagaagacgttaatgaaattcagggctgacagcctgaacaatacagaggactaa

SEQ ID NO: 153685 - DNA, 324 bp, Enterobacter cloacae
atgtctgataaaaaatggtatagcgaagaagatattgtactggctaaagatgcgcttagtgagctcccggatctttcaaagaaacgccttactaaaactgacgttcttgagcagctgcgtgaccagattatcgagctgtcagagaaaaaaggttatagcatagaggatatacgggatgcgctttctacggctggtatcccaaccagcgtgaaagcaattcgggaaatactgaatagcaaaaagaaacccacaaaccgtgcaagcaaatccagaaaaaattctcagtctgaaagtacgcaagattcaatgaacaaaacggcctga

SEQ ID NO: 153686 - DNA, 834 bp, Enterobacter cloacae
atggctcgtttatcttcatctttccgtaccgcgaacgttatccgtaaagagcgtgcattgaccaatgatgaacttatgcgcttcgtaccaagcgtattttcagaggaaaaacatgaatcacgcagtgagcgttatacgtacatcccaaccatcactttgctggacaatctgaggaaagaaggttttcagcctttctttgcctgtcagacgagaacgcgtgatatcggcaagcgcgaacataccaaacatatgttgcgcctgcgtcgtgagggagaaattgcaggtgaagaggtgccagaaattattcttctcaacagccacgatggtagcagcagctatcaaatgatccctggcatgttccgcttcgtttgcatgaacggaatggtttgcggaaaaacctttggagagattcgcgtaccgcacaaaggtgacgttgtcgggcaggtgatcgagggcgcgtatgaggttcttgaaattttcgacggtgtgaaagaatcacgcagtgagatgaaggaaatcagcctgagtaaggatgagcagcgtatctttgctgaaatcgcacttaactggaaatatgatgataaaggtgtcgggaaacatatcccgctagtgcctgatgatgttcttcaggcgcgccgtaatgaagacaaaagtgatgacctctggacaacttatcagcgcgttcaggagaacatgacgaaaggcggcgtatgggggaaaaccgcaaaaggaaaattccagcgtacccgccccgttaatggaattgacggtgacgtaaagctgaaccgcgcgctgtgggaaatggccgaaaaaatgaaggagcttaaagcctaa

SEQ ID NO: 153687 - DNA, 570 bp, Enterobacter cloacae
atgccaaaatattatctccagaatgcaccgcgcggtgtaaccgctatccaactcgataacggtgatgaagctgtctatcttgatggtgagtttattgcctgttgtgatctgggggaacgtgacgatccggtaattgaattaggcgaaatccttgccagaagtatgggggttccgttccgccttctgacgctgcccgttcctgatgttgaggaatggtcatggaacgacgttaccgatgcgctgaactggggcgcgcgagtgcagctaccccgaatgatgttacggcctgtcctggagtgcagcacatcccatataacggaaggtgacaacgcattgttagagaatctgatttccagccatgaggatagcgggtggatcttaaattccggagtggggtacttgttacgacttgatgccgtctacgacccgcttatcaggttgaggcgtctcggaatttccagaacgacacgggcattaatagcccgagccatacgtcaggccgatataagcatgattcatttctcagctgtaggtgatgaaatagaaggtgcaccgacctttgactggtaa

SEQ ID NO: 153688 - DNA, 243 bp, Enterobacter cloacae
atgaaagaccgctttatcattgcatgccgtgattacattgtaaataacaaaaacaagcgtcctcacaagcgtaagcccgccgagatcattcctgctgaagtgatcgcacgccgtactaaggcactggggaaaattgtggtacgcgccgaacgccgccataaacccgttcgtattccggctatgagttgcgcagagctggggcacttcctcacctcaacggaacaaacccgtgtaagcgcatga

SEQ ID NO: 153689 - DNA, 423 bp, Enterobacter cloacae
atggacgatatggttttttacccgaaagggcagttgttttttgaggaagccattcacgacggtaagcagttcgtgactcgctacggtaaacagccgctggatgttctgaacatgcagggcgagcagtacgtactggtttcccgtaatgaggcaattgaaatgatccgtgaagccgcacgtaagccggttgaagaaatcactgcggaaatttttaacgaccagcttgaggtggtgccgcctatcgactggtacggaaaaggagacgatcagtcgttcaaacttggtgagatgcacgcggaggatgtgaccgatatttacgcctattaccgtggtcgctacttccgttttcgtgaccgcgtgagcatgaaacacagcgaaattattcaacggatagagcaggaggtgttcgcaaagcagaaataa

SEQ ID NO: 153690 - DNA, 315 bp, Enterobacter cloacae
atgacgggatatgagctgagattatggcgaaaagggctgggctggagccaggataaagcggcggaagaactgggagtgtcgctgcgcacttacaaggtttacgaaaagtcggagcaagtaagtcgcctggtcacgctggcaatagcagcattatcggtaaacgatatgctgccaacttttttgaacagaaaaaccaacaaggacaaagcgctggctattctacaggcaactatttccgataaagctctgggcagaacaaggccaaatttcttagcgctaaaggagtcggaacagaatagcgctccggttctctaa

SEQ ID NO: 153691 - DNA, 828 bp, Enterobacter cloacae
atgtctcaacttaattttgcagcattttttgaccaggcaaaagaatccagcaacgaccgcacgtttccggacgttccgcccgtagccgtgcggtctgaaacccacaaaatgatgagctttgatgtggcaagaaagcagtttatcagtatttttgctcatactgctcgccaccttcgccgctgggacgtatttagcgatttcataacacttgcagcaagtgagatggatcttgcccgagtcagaacggctgaaaatatcgaacgaagccgcaagattttaacccgctatgagaagagcgatatagataacctgcaccggcttttccagctgatgatctgcgcgctggaagctaaatttcacgattttctgggttcgatctttatggagcttgagctggggtcgggcgatatggggcaatattttacgccttacagcgtccagtctttaatggccagaatgcttattcctggtattaaggagactatcgaccgtgaaggctttgcaactatcagtgatccggcctgtggctcggccggaatgatagtcgcttatgcagaatgtctccttgaagctgatatcaacccttctgctcacctctttgcaagctgtattgatatcgatccaatcgccgcagatatggcattcatacagctttctttattgggtatagctgccgaggtagtaacaggaaatacgttaacgatgcagctgagcagagttcgttatacccccgtttactatctgaatgggtttgaagagaaactgaatgcgcagcggcgtatcaaggccatgatcgacttcatgcggggaactcagaaggccgcataa

SEQ ID NO: 153692 - DNA, 345 bp, Enterobacter cloacae
atgcaattgaatacgaatgaatcttctgccctgctgggcgttgatgcgagtgctgaggctgagcgagcgtactggttgagccgtgaaaaagcggctgtttctgcccctgttgagattgacgtaaccgcatttcatgaagcggcggggctgatgctcccaatgaactggcgctgtgataccgcgcaggacacggaaagcttcatgcttgcagagatgtactgcgggaacgtcactgaaatttatatgcgctgcggtaaacgctatttccagctacgtgattactccaacctcaatcactcggaaatcgttaagagggtgcgggaggcattcaggccgaaacaataa

SEQ ID NO: 153693 - DNA, 501 bp, Enterobacter cloacae
atgagcacgacgacccccgctgtatacgttggcacctatcacaaatacaactgcggcagcatattcggcaaatggttcgacctcacggagttcgactcaaaggaagactttatcggggcatgccatgagctacatgcaaacgagcacgatccggagctgatgttccaggactgggagggcattccgtcacagtttgcgtctgaatcctccgtggaatgggcatttgtcgaggggtacaggcgcgcggaagaagagggcagggccgcggcgttttttgcctgggcggattatacgggcgactccgattacgacgcctttgacgatgcgtaccggggcgaggccgccagcgaggaagattatgcctacgagtttgtccaggataccggccttatctgcgacgtgcctgaatccctgaggatgtatttcgattacgaggcctacgcgcgcgatctgttcagcagcggcctcgtgtttgtcgatggctacgtgttccagaactga

SEQ ID NO: 153694 - DNA, 780 bp, Enterobacter cloacae
atgaacatcgcttaccgtcttatccaccgccatacacgcaatactcttattgcgcgcggctggcctgcggatttgaatattgaaaccagcctgaattacgttcgtggagagggagttgccttttacggcagcctcgcagcagacgatcttatgcgtcttcttcctgagattgctctgcgtggcctcatgagtgagaatttcctgaacgacgtcatgccacttattcaggatagtacgttcgttgttcgtctttaccggaattccctgggccatcgtaaggcacacgctggcacgatttctcttgaatatgacaactgcccagtgtccatgagtacaaagcaggttattggtgtgctgaaagctctgcgtgacgagatcaatcacctgtgcagctgcgtggcggccgctggatatcatctgacaaaagctatcagacccgctgcggaaccattggtatttacacgaaaaacccgcaatttcactcttatcgttaccgaagttgaaccggaacatgacgaaactgagtgggataatgcgactgtggatcagcgcctgaaggcagttcttgacgaaaaaaacaccttcaggagactggaaatccgtctggagtgtggcggtcgcctcgttggccagacgcatgccccgtttgctctgcgtcatcctgaaagccctgttcggacatggttcgagcgacgctggctacgtgaggtgataagcgaagcgagggcagagatcgagttaatgatgaaatccttttccggtatacgtcttgttgcatag

SEQ ID NO: 153695 - DNA, 342 bp, Enterobacter cloacae
atgtctgatcttcgagaacacggaaagcttgtccgccagttcctcaaagcggctcgtgagctcgaatccctgaatgtggtcgatggcctggaaaacatgaccctgggtcagctgcgtgaggagctcacgggtcgttcttcgcctggcgcaggctataagcagcagtatccgcgccacggcgcgaaatgggaagaggaggagaaacaacgcctgatcgccctggccgaggcgggcatgctcgatgttgacgagtttgccagggagtatcagcgccggcctgagtccatcttgaaatatatgaaaaagactggattactggataaaagattcagcgatatataa

SEQ ID NO: 153696 - DNA, 396 bp, Enterobacter cloacae
atggatacgcgacgcaaaattacgttttacctgaatcctgaaactaacgaagcggaccgctttgtctgccagaaaacggacgaaacgcctcagggggacagggggcgtttatggcgcgccgcgctgcttaccggctttgcatttggcaagcaggatgaacggctgccgttcctcttcagcgagctgctcaaccgcgatacgtcatttgatgacctgctgcagctgcttaaagccgtttacccccgtgaaaccgaggctctgctgcagggcagggcgcgagaggctgtaaccacagcccctcagcctccagagcagatgagcgattcggtatcgtctgatgacgaaacccgaaataatgcccggagcatgttcggcgggacgggaaacaatgtctga

SEQ ID NO: 153697 - DNA, 957 bp, Enterobacter cloacae
atgaaaattttcattgatgacggctctaccaatatcaaactgcagtggaacgaagccggacaggtcaggcagtcaatcagccctaacagcttcaaacgtgaatgggcggtggcgttcggttctcagcaggcgttcaactatcaactgaacggggagcagtattctttcgacccgatcagcccagaagcggttgtgacgactaacgttgcgtggcaatacagcgatgtgaacgttgttgccgttcatcatgcgcttctcaacagcggcattgagccgtgcgaagtggatatcgttgtcacactgccgctggcggagtattacgacaagaacaatcagcccaacgaagcaaacattcaacgtaagaaaacaaacctgctgcgtccggtcgaactcaatggcgggaaaaccttctccgttcgtcatgttgacgtgatgccagaatccatcccggctggtttcgaagtcgttaaaaacctcaatgagcttgattcactgctgatcgttgacctgggcggaacgacgctcgatatttctcaggtgatggggaaaatgcgcggaatatcgcgtatttacggtgattcaacgctgggagtctctctgatgaccggtgccgtaagagacgcactttcgctggctcgcacgaagggaagcagctatctggccgacgatatcatcattcaccgtaatgatgcggcctacctggcgtcacgcattaacgatacctcacgcatcgatcttgtttgtgaagcaatgacatcggctcacagccggcttgttaacagggttattgaagctgtcagtcgctttgagggatactcgcatgtaatggtcattggcggtggcgccgaactcattgcagaggcagtaaaaaaacactgtgcagtcagggaagaacgtttctacaaaaccagtacgtctcagttcgacctcgttaacggtatgtaccttattggataa

SEQ ID NO: 153698 - DNA, 654 bp, Enterobacter cloacae
atgatactaacgattgccaatacgaaaggaggagtaggtaaatctactctcgcggttaacatcgcagttgcaagagctcggcaaggcagaaaagtatggttagttgatggtgataaacaagggtcttctcaaacagctatcctggttcgttcagaagacggggttgaaccaggtattgcttgctcgcattacccagaaggccctgtgttaaggagccaggttctccaacagaaagataactttgacgatatcatcatcgaatgtggaggccgtgattccactgcaatgagagctgctttgacaatcaccgacgtccttttagttccttcagcacctggaagtttcgaagcctgggccatggatgccaacgccgatctaatcaaagaagcgcgaagtatcagagatggcttggtctgttattcgcttttgaacaaagcagatactcaagccagatcctccgacaacagagatatgctggaaatgatggaagagtacaaagaggacattccaatcctagacaaaatcatctatcaaagaaaagtttatgccaatgcagcgggcagtgggagaaccgtaagtgagctgaaattacgttcgcatgaaaagattgcagtgcaagagttagatgctctcatatcaatactatttaaatag

SEQ ID NO: 153699 - DNA, 285 bp, Enterobacter cloacae
atggcaatccaaaaaaaacccaaagctcaaccacccgtttcaaagaatgatgcagtagagaactttataaactcagcccctgatgcaaaagttcccgcttcgaagggagtggtaaaaggaaaaaaacagcagatcacaatcacaatggaccctgaactgattcagcgtattgacgaggctgctgcagagaacgggcaatcgcgcgctgcattcataaatatgtcttgcatcaacatactggactatggtttgcaaattgcgggcaagaagaaaataagcgagtag

SEQ ID NO: 153700 - DNA, 825 bp, Enterobacter cloacae
atgggaagcgagaaagattcaatactggattttgaagctgcacgatttgatgaatggcttgacgaaaatcacccggatgtggtccctggctctgaagagtgggatcaggctgcgcttctttactactgggagcaggaggcatttgctgaccaggctcagtgggatcatgaacacgggttgtttgtggcttccctgaataatgttcagcagagatatcagcacgcaaaccaggagctgaggaaactacatgccctgctcgataatgttcagcctgaactggtgtaccggatgtctttcgtccatgccgtgactgtcatggaggcgtatctgatgtactgtgcgagggcactgctggagcatgactggccgctcagacaattccttgatgagttctacctgaaatccgctccaaaggtcagcaataaagagaaactcgcggcgcgcacaatggatattgacctgttcaggaaggcggcccgcaattatgtttccgggatgactttccataacgtcagaaccattgagcgctatttcggtgccgtcctacacattccgcctgtctggccaactgaaccgctgggcatcatcgcagactggcgaaacgatcttgttcaccgcaacggtgtggatgaacatgatcaaccgagagtgatatcagcacagcagttgcagaacgccctgcagaaagtgtctgacctgatagaggcagcacatctgtccctgtgtctggaagtggactatttcggaaactggcgtactgaggaaaaccgggaaatcattgcatcagcgctgaacatccagccagctggagatggaacccgatga

SEQ ID NO: 153701 - DNA, 927 bp, Enterobacter cloacae
atgagtgaaaaagaacatgacatgacaaacgacggtggagagagcgtaacgtacacgctgcggaacattcccgccgacatcgaccgggtgatcaccgacctggcaactcacgcccgtaagccaaaggcgacgtttctgcgtgagttcctggaagacagcttccgggacgtcatcgacagtttcgccctgaaaaacccgctcatcgcctctcttgatgacgagctggccagttatctgggcgccgaggtcatggagaaacgctaccagagccactacatcacccgctggaaccaggaataccagaagctgctcgggatctcaacggaagaggagcttcgccgggtggtgctgaccaacacgcccttcctgcacgcacgtgccgaccaggtgcttaagggctggaaaaagatcccgcgcgggatctccctgaccttttccctgtttgccgagatcgccggccgggacagggaaaccattgaccgtgcctggaacaggattttttactcgcagctgcaggagaaaaaacaccgcttttaccaggatatcgaggccatccgtgtcctgaaaaagcttcctgtcctctccggctaccgctggacgaaggatgacatcaccgtgcgtatctaccgccctgaagactacgcctacggcgcgtggcgtgttgctctgactctgcccgaaaattacgccctacagatgtggaacattccgtttcccgagcttgaaggccgacgcttttccgccgacccgggctacagcgccctgatcagcgccgaacccgacagatgggatcaggccttccgttttgtggacgggaattgtgagcttcatctttacaccaacggcgtggaagaagaccagaatcccaccccgctaccggatgtcgctcaggcgttgatcaaagtggtggaatataacctgctgtaa

SEQ ID NO: 153702 - DNA, 255 bp, Enterobacter cloacae
atgaaaggacgacagagccgctatgtcaccggcggagagagtttcgcggagatcgcccgtcgcccggccgggacggtggtgatactcagcctgaatcccgatctggaagacgcgctgcgggaggtgtccaaatccctcaagtcggccttcagccggagcggccgtaaatgccggctgtcagccggaacaactgaagggccgttcagcgggcgccggcagggcacagccacgcatctgtttgtgtcggtactctga

SEQ ID NO: 153703 - DNA, 345 bp, Enterobacter cloacae
atgaaaaacttgttcgacaccgagggaacggttctattcccattccagactgaaatccattttatctggacgatttacaccacagctaaaaccctttccgtcagtgcctgggggcacatcggtcagaagcaatactggagcgcctgtctctgtattttgcttcttatggcctacgtgggtctctgtgctgcggtggtctgggctgtagtgccctggcttaaggcctttttcatggcgaaatatgctctttcgccattctggttcacgccagtaaagagtttgttgctcaggggtatcggtaaaatggctgccaccatctgccgaaagtttactctattaaagtaa

SEQ ID NO: 153704 - DNA, 621 bp, Enterobacter cloacae
atgagacaggaaaccacgtttcgcatccgggcgtttcgccaggctctggaaaaggctgtccgggagctgccggacgaatacagggacggatcacgctggtgtgaactggaaaacttcccggccggcagctgcgacctggccagcaattgtctggcgcaataccttaaagactgcggtgaaagaggggaacctagtattctgtttatgtgcgggaatgagactttccgtaaggcagaaaattccactgttcatggccatgtcatcgtcatacttgacggtgaatacatcgacctgacgctcgatcagtttgatgaatatgcggactacataccggctgagccactcgaaaccggcggcgtacttggcaccctgctgaggaaaatcccccagtatgaaggagaaatagagacccgccggataaacctcgatcgcctccagggaatttacgcatggttacggcaccgcgccgacgcaatactgaaagcagatcctgaatggcaggcctgggaacggtcgatagaagaagcaagggaagccgctgttaagatgttcccgtttctgtctgacatgcagaaaactgagtgcgaacagggccccgacagtcaggaggctgccagatga

SEQ ID NO: 153705 - DNA, 774 bp, Enterobacter cloacae
atgttgggtaaagtttctcaaataaaattggccaaagttctggcatcaaaatttaacagcggtgactggagggagctgtttgctgttaccgattgtgaagacgttcctgcggggctgaatcaattctaccggcatgttgactggggtaacgatcagctgaaaggggtggccatcgctgccatagaaatcaccctggacagggacgctgataacctttctaaaatctgggcgctggataatgttcaacgctatatcagcaataccgataatgatttattcaatgaaataaaggacattgttaatcagaatggacaaagaaacgtttccgcagcgccagtgaaaaatgtgaacgaaaacatttaccaggccttagaagatgcggaagtattgcttcagaaaaatggaccacagcgggcatatgatcgtgtgcacacagctcttcatgcttcattaagacaaatgagtgtaaaccatggcattacgaccgatagtacaaataataatgttccgggcctgctttccctgataactgcacatcttaaggccctgccggatgatggaagaaatgaagatgtgtttaaaatgttgaagtctgctgccgcaatacttcatggaattaataacctgcgtaacaattccagcatggctcatcctacagaaaaattgcttaatgaagccgatgcgcgttttgccataaacctggttcgttccattaggggtccgcttggaaaacggaatctatggtcactcccgtttttgcaacaccgattttga

SEQ ID NO: 153706 - DNA, 171 bp, Enterobacter cloacae; identical to SEQ ID NO: 149518

SEQ ID NO: 153707 - DNA, 393 bp, Enterobacter cloacae
atgatcagaattatagggtgctcgctctgctctattaccgagcacgaaggccgtattattcagagccgctctgaagattcgatcatcaatgagatcgaagcgattcgcgacacggtgccaggctttaccggtgtgatctccgaccttggcggcccaaccgcgaacatgtatatgctgcgctgtaagtcgccgcgcgcggagcaaacctgccgtcgtctctcctgcgtctatccgagcatctgcgagcatatggataccaaccacgagccgacgatcaatctctatcgtcgtgcccgcgacctgaagggcatcaagaagatcctgattgcctcgggggtgcgttacgacatcgccgtggaagatccgcgctacatcaaagagctggcgacctga

SEQ ID NO: 153708 - DNA, 684 bp, Enterobacter cloacae
atgcctgaaaaattgctatttaaagctccttgcccaaaatgccaaggggactgtaacgcatttgtccatggagagacttctactgagtggagtgatgacagcgatcctgataactacatgtatggtggaacattccataagcttttagaatgctgtggttgcagtaccgtcttttacttcattgattcatcccatagcgaggaatgggattttgacaaaaatggacagatgtacctgatccacaacattaaaaccttccctgcacgagatcttagaccaaagtggtttgattcgctctttcgcaaagattatatcctatatcatattttatatgaggtttataatgctgtaggtaacgaatcatatattctcgctactatcggcctcagaacagcctttgatcgagcaattgaaattatcggtatcgatccagagttaaaaatgtaccaaaaggttgatgctgtcttgaaggaaggttttgttggcgaaacagaacgcgagcagctcagtatagttaccgaggcaggcaatgctgcggcccatcgcggatggtcgccaaatagccacgaatttactcctttactacaagcaatcgagcgttttatagaaaagtcggttatgcgtgataagcgcattgaggaactcaaagaaataatcccaatgaaacaaaaaatacgcagatga

SEQ ID NO: 153709 - DNA, 783 bp, Enterobacter cloacae
atgaaaaaaattattgggttgtctctggcgttctgcactttctcatccgtagctggtggtccggtctcaggtgaaatccagccataccctgattacttggctgcttatgtcaaaacgcttgttacagccagttgcgaccgggtactttcagatgatggaaagagctccattgatagagccatcaagttcctcagcgctagcgccacgaaaggaatgaccaccaacacagaaagctactacgccgtttacaactctattgtctttggcgctgagatgggggataagctgaaaaatgctaagaaacagaaaatgattctggcaacgaaagacaaaattggaatagatagttgcggtggtgttggagcttatgcattgatacagaaggattttagaaagatggccctcgctgggttaatgcctttagcgccgcaatctggtgtcgtaaaaccgaagacgacaacttctgatgagggcatttaccgtacaacagcaaaagctctggcagaactgtacagcgctaatgaagttgcagcggatgacaagattggtggtcgtaaggtggaaatgaccggaactgttcaggacataacaaaaaatttcgcgaatgatgtcgttcttaaacttgaaagtggtaatcgcttcatgcctgtcagcctgagtatggctgattcagagatggcgcaggcgtcgaagctgaagaaagggcagaagataaccgtgacttgcgaaaagatgcagcttttcatcggtgcaccgtctggcggcaactgcacctttaactga

SEQ ID NO: 153710 - DNA, 243 bp, Enterobacter cloacae
atggcgaagatcacttcagaaaaggatgagaaaatgaaaggctatgttctaatactcagcggtttgttgtcgtcgtttagcgccagcgccgggcgcataacaatgagcgatccagaacagtcaactacggcgagcgggctgactctgtgtgtgtactccaatagtatctacacgtttacctacatcacgaagtcgaaacactgcccgtatagtaaaagtttcgacctcgctgaaagtggttaa

SEQ ID NO: 153711 - DNA, 1782 bp, Enterobacter cloacae
atgtttgcctgggacccaagagacctcaatcctgagcaggcggcggcagtaatcgagccatcaagcatctttctgatcgcttgcccaggtagcggtaaaacccgtaccctgacctacaaaattgcctacgaactatctcgccgtactgacaagaggatcgttgtagctattacctacacccaccgtgctgctgatgagattcaagagcggattgaggacctgggagtagatacctcgggtctatggattggtacgatccatgcgttctgtttagagtggatacttaagccatacggtatctattcccctgcacttgcacagggctaccgcgtgatcgacccacatgatcgtgagcatctcctggagaggctatgcgctccgtataaaggtgtcactcattgggattgcgattactatgttactgagacggggtataagcttggctgtgtggatatgggaaaaaaccctatcattcacaaggttttgaagttgtacttcgacgagctggcagcgaaccgacagatcgacttcgaacttatcctttggtatgcctacagcttgatgcgggacagaagccaaatcgcagtgctgctctcacgtgtattttcccacatccttgtggatgagtatcaggacaccaaacagatccagtacactatcgtcacgtccatacttcgtgcaggtaacggccagatcaaaatactcatcgttggcgatccgaatcaagctatctatggctctctgggtggctatgctatgccagtggatgaattccgaactctcgctgggatctcgattaaagagttagcgctcagcctaaactaccgctccagcgagcgaattattagctacttttcgaactacagcgtacacgcaacaaaaataaaaggcgctggcaaacatgccaactatcccagccgggtgacctacaatcaaaacgtaacacgcagcggtgtgcatgatgagattgtaaggctgattcggatgagtctcaccaacggtcactctcccgaaaatatctgcgtccttgctccgcagtgggttttgcttgcctctactactcgaaaactagtagcgatgttgcctgaccagcaatttgatggccctggtctcgtccctttcagtaacaatttcgataatttctggttcaagctttccaagattttactaacggattcctcccccaaactcctcgtcaggcgaatgcgttgggcgaacgatgtgatccaagacctcgaaagtttcggcgttgacacccatacactgacaccgcgtatcttgttgcgagagagtaactcactcacagtcaatgaaacggacgggctccgctacttggaccaagctttcaatgatctgctcaagaggctcaatatctcccaagacatccatcctgcactcttgacccatcgggaggcatttttcagcagctcggcagcgagaatagagcggctacagaaggaaggggcgacctacattaatcaagtgtcattcttcaaaaaagtttttcgcgagcgaaccggcatcacagtctccaccatccatggtgtcaagggggccgagttcgacgtcgtcatcgcttttggattactggagggtatggtaccgcactttaatgaagcaaatggaagtgccgccgcaagcaagctcctctatgtattgagttctcgagcccgtaaaaatcttcacttgatctcggaatcaggacgacagagaggaagatacggcctgtatacctcgaccgagttactcgcggcttgccgcttcagctatgaccaggactaa

SEQ ID NO: 153712 - DNA, 2139 bp, Enterobacter cloacae
atgcatatttccaaactgactttggtcaactataggaacttcaaaaacacgtctctccagtttcacaagggagtgaacaccgttatcggggaaaatggctccggtaaatctaacatcctgcgagctattcgcctcctacttgatgacaccatggtgcgtgcagcctatcgactagatgagtctgatttcagccgctcactcggtcaatggcaaggccactggatcatcatcagcatggagttcgaggagataaccgccgatgaatccgttcaagcactctttctccatggaacagcttctttggatgctgggccgatccataaggccacctataacctgatcttccggcctaaaaaagatatacggctgaagctggctgccttggacatctttgacgatgagcaactcacggagatccttgaggcaatcacaatcgatgattacgaaacgattttcacaggacggagctgggcggacttcagtaatccttcagtgtacaaaaaaatagttggcgatttcgataattgtatcttctcatcagagacggagtttccagaaatcggggcaaaggtgcccggtttcctttccgttacgaaagaggtatcgctgaccttcatccaagccttgcgggatgttgtttctgaattccacaacaaccgcactaacccgttattgaccctgcttaagagcaagagtggagaaatcaatccagcgacgatggagcctattaccgagatggtccacgaactcaacgcctcgatcgaagggctaaaagacgttcagtcagttcgcaatcacattcgtgagaccatcaaggacgccgctggtgaaacctactcgccagcatcactttcgatcaaatctgatcttccagaagaagccgataagcttttccagtctctcagacttttcgtgggtgaatcagaggaagggtacgaaggggcaatccatgaacttagccttggcggagccaatctcatctatttaactcttaaacttcttgagttcaagtaccagcgcgaaaaactgaccatggccaatttcctcctgattgaggagccggaagcgcacatccatacacacattcaaaaaaccctattcgatcgcattgcatatagcgacgcgcagatcatctacacgactcactccactcacatctccgaagtaagtaatgtaaaaaatatcaatattttgggccgtcatggtgcattctgcgaggcctatcagccagccagaggtcttgtacctagccagataaacagtatccagcgttacctggatgcagtgcgtagcaatcttctctttgccaaaagcgtgatactcgtcgaaggtgatgtggaggaaattctgataccaatcctaattaagctagtattgggagtcagtgttgacgagttaggcatcagtgtcatcaacattcgcagcacaggctttaagaatgttgctgtactcttccataacatccgcattaagaagcgatgcgccatcatcactgatttggaccaagccttctttgatgtcacccctctgccaactgatacaaaaggtgtggctaaggcaaaggccaaagcagctgggtcccagaaagctggtttagaacggcaggctgatctaaccgagttcactggagataatccatggcttgtaaccttttacgccaaacatacgttcgaggtcgactttgtcgcagccggtaaccatgaggccgttgtccaaactattacagcagtttacaaagacgaggaaaccaggaaagaggcgaaacagcaacttcaatccggggacttgtcacaaatgggaactcgtacgctgacgatggcaaagcaagagggcaaggggtggttcgctctcatgctcgcagagtacctgactccccaagtccagatcccagcctatataatgcaggccattcattttgctcatggcacttttcctcttccccttcttgccagaattctccagcaccgcgctgaatgcagatacggttccgatatattgaattcgcaagctaagcaagcatttcttctggtaattgagcgttttgtgcagagaaatattggcttggctgaactcaggcgagaaatcggccttatgatacccggagaccccattaatgtattcttagcggagatgcagtga

SEQ ID NO: 153713 - DNA, 942 bp, Enterobacter cloacae
atgactacccgaagaatcgcttatgcttattacgatccaaaatgggacaaatcaacgatgcccataattgcgctaaaccgaatcgaagttgagccgttggattatgaagcagaaatgaaaggtaatctccattgtccttcttgctatgaacctttgttaagagtgccaggggatccggcggtgtctatcatggctaatggagccgacgcgctttttaggcactatcgagatgaaaatgcgccatattgtcgcttacgaagtgggattatggttggaaaaaaatacgattccgaggctgaagcagctcaagctgtcgaagatggcgaactgattatcatcagtggtttcaagcaagagcggcctaatcacaatgtaagacaacaagatgtagaacacgctgaacctattgaaacagaatacgaaagtgaagatgggccatcagtaaatgttccagcttctaggcatgaaggtcaaactttccaactaccaagtaaggtgacaagcgttcaatctctgtgtacaaattttcgtcaaaattactaccgagatattcacgtagcggtaggggacgatgtacgccattatgtgttagctgagtgcttaaaggacgctgctgagatagattctgaggatgatatacccaatttttattttggagaaattgtaggcataaagcgatttgatcataccagtcacgtctttttaaggcaccctaagctcgttggcaatgttgatttcagaatatcagccaaaaattgtgatttggatgccagagggattacacaggcaaatgcattgagacgcatactgctcttttttgggaaaatagactcatgcggtgcagggtactggtccaaagataaaacgtggggggaaattgctgtacttccagcgaagtatgaggacttccttcgtgcaaactacagacatgatgaagaatga

SEQ ID NO: 153714 - DNA, 378 bp, Enterobacter cloacae
  misc_feature (230)..(239): n is a, c, g, or t
atgaaagcttttgtttttgttaatgataatggtgcggcctattgtcgctatgctaaaaatgagatacctgcacagtttgtgtatggtgtatcaaaactggaaaaaatgggatttgaggtaaaggttggcgaaggacgcttattcaaagatttagtctccttctggaaatttaagcctgacttgttttttatgccatttctcaaaagaaagacgatgctctatttcattcnnnnnnnnnnatttcattctggcaaaaattttcatgttcccaacaaaattcgcgggctggatgcatctcgacgtcttttcgccaccaggttccagactcaaaagaatgattcattcactgctgctgccttttttgcagctatatgttaa

SEQ ID NO: 153715 - DNA, 1353 bp, Enterobacter cloacae
atggactttacggaatatcaagaagaaataatcgaagatgttaaatcttgccttgaaaacttacaagtccaacccattttattcatgggtgcaggtatttcacaacgatatataaaagcgcctgactgggaaggtctattaaagcaactagcggaaatatgccccttgatcaaacgcccttatggttactacagccaaacaaagggtgataacaaacctctgattgctagcgatttttgtgacttctatgctgaatgggcttgggatgatggcaaggatcgctatccagagacatactttgaaggaacgactccaaaagatatttatattaagcatgaaattgcatccattctgaatgaattatcaaactccgttgatttctcgaacatggaatatacagaggaagttcagaaattaaggaaagtaaaacctcatgcaataatcacaacaaattatgacgacacattagaaaaaatatttgacaattatcaggcaatagttggtcataacgttgttaaagtgaattattcatcttatggcgaaatcatgaaaattcatggtagcagtcatgaagttgaaagtattgttattacaaatgaagattatgttgatttctataaacgtaagaaatatatcagtgctaagttgctaacatattttgctgaacaccccttgtttttctttgggtacagtatcaatgatgaaaacataaaggcaattctctctgatatagatgaaatcatcgctcccaataatgcattgattccaaatatttatcttgtctccttcagtaaggactgcgaggccactggttctcatcaaaaggaattgctaatcggtgttggtgagaataaaagcgttcgaatcaaggtgatatacgcaaataattttggttggatttttgatgcgttatcatctaatacaccggaaattagtgttaatccaaaacttgtgcgtgcatttctagccagaacgtacacattcgcatcagaatcccttgttaaacaagaacttccatacgattttgagatgttccgcaatattgcagagcatgatgatgcattagcaaaaatgtatggtatcgctgaactcaataatgggcaggcactaaatgctagtttcccatatacaatgtctgatctggcaaggattctcgacatgggatcgtggcactatgttaatcaagaattcgaaaaattaagaaaactaaccgacttcaacattaaagcatcagacaacaattatcatgttttcattaaatctgggaaaagtggtgtcggaaaatactcatctgaggcacttgacttattgcgaaaattgataaacggggaacagtttgagttaaacccataa

SEQ ID NO: 153716 - DNA, 1488 bp, Enterobacter cloacae
atgggaattttcagggatctttctgtcgccagaaaactgtcgctggggtttggcgcactgctggtatttatagttgggctgtttctggttaaccagtataactacgccatgataaaaggctccatggcgcgtacggcaacggtgaatgagttatatgatatcaatttggccattatcgatgccggtaaggaatttctcgctgataacgatgctgccgcgtatcagaaaaaatataaggaacttcaggattccattaccgccatgcagaacacagtctcaccagaagatctgggggaggggcaacagctctgggaaaaggtagtacttcagcagcaaaaatatttttccgctcatgacgaggctgtatcaaagggcggaagtgctgcttccctgaatggcctgtcagaccagctgaaacccatgatggatgacattaacgtcgtcctgaatgatgaaatggagcgcctggctgccagtctggttcgtgacaatattatcttttccattgtggcgctgctggccattatcgcggggattggcatcatgatcatcattacccgcagtatcacccgcccgctggatgaggccatgaaggggatagaggctgccggcaacggagatatgacaaccgcgttccgtgaacgttatccggaagatgaaacaggacgtctgctgtccgggctgaaagctacaagtattaatatcagccgcatgctcagccaggttcgcgacagttcctcttcggtgtcaacggcatcttcccagatagcggccggaaaccaggatctctcttcccgtactgaagaacaggccagtgcactcgttgagacggcgtctgcactggagcaactgacggccactatagaaaatacggcagaaaacgcccgtcaggcacagacccttgtacaggaagggggcagtattgttaagcgtaatacagaaatgatgcaggccactacccgtcagatggaaggcattcaccagtcctcccagagaatggcggatattattaacgtcattgaatccatcgccttccagaccaacatcctggcactgaatgcggccgttgaggcagcgcgtgccggtgaatccggacggggatttgcggttgtagcagccgaagttcgtagtctggcgaagaagagtgccacggcggccaaagatatcaaggggctgatcgatgaatcagtggaacaggcccagtctggccgtgacctgattgaccgggccggtgaagtcatgcaggagatgtcggtgaacgccgggcagatcgcccagataatcgtggaaattgctcaggctgcaacagaacaaagtggcggagtacgccagattaatcaggcgatcggacagatagatacctccacccagcagaatgctgcgcttgttgaacagtcagccagtgcggcaagggcaatgtctgagcaggccgacacactgtcttcactggttaatgcgttcagactccgggacgggcaggaaccgtga

SEQ ID NO: 153717 - DNA, 489 bp, Enterobacter cloacae
atgatagcccgattttttattcgctgcgtggattatcttaaaaatgacataacccgatatataagtgtctttttcattttagggtttgttttttcttatacagcatacaaaaccgggggggaaccagcgttaaaaatcatagtcgactcgtttgttagtaccgatccactatttttgacttttttaaaggcagcatacatcgcaggattactggtcataatagttaccggctttatcagtaaggcaggctgccgttattacaggaaattaattaactgcatcttctctgtagctgaagaaatggtggctttatatgaaaacatagcactattgctcgcagggttctgccttacaggcatgttactggggccacaaaaatcacttccgggaattgtattcatgcaaattatgattttctttactcttttttatgccttcaatttttgcgtcagaagcgaagtaaaattcattatgcataaacgaacataa

SEQ ID NO: 153718 - DNA, 351 bp, Enterobacter cloacae
atgagtgaaataaatccccgtcaggccagatatgcagacatgtatgcgagactgaccgaccagatgcagtctgtccggatcatccttgaacagatggaaggacacgagtacgccgcaatcagcacctacatgaataacatggaggcgattgcccgcttttacgaggtggccggaggaagcctcagtgaaccagacttcctgaactatctgaaacaaaaagaccttaatctgtttgttgaaattctcgctgtggggcgagccgtttctctgatgaaaaaccttctggtgaatataagacgtatccttgaaacggacagcggactgagccgacagggaaccatgccggaataa

SEQ ID NO: 153719 - DNA, 1098 bp, Enterobacter cloacae
gtgatcgcccttgccgataccgccgccgagcatctcgcgcgccagcgcagtttccagctcgctgcggatcaggcgcttgagttcacgcgcaccgaactcgggcttgtagccttcttccgcgaaatggtcgatcagcgtctgatcgaaagtgagcgtcacgccctggctggcggcgctgcgcgccacgcgatcgagctgcaggccgacgatgtggcggatctcctccttgcccagcgcatggaagacgatgatctcgtcgatgcggttgaggaactcgggccggaagtggccgcgcagcacgtccatgacctcggccttggtcttttcgtactcctcgccagccgcctcacgcgccttcagccgtcgctggatgatgtccgaacccaggttggacgtggcgatgatgatggtgttggtgaaatccaccacccggcccttgccgtcggtgaggcgaccgtcgtcgaacacttgcagcaggatgttgtatacgtcagggtgtgccttctcgatctcgtcgagcagcagcacgctgtagggcttgcgccgcaccttctcggtgagctgaccgccttcgtcgtaaccgacatagcccggaggcgcgcccaccagccgcgccacggtatggcgttcgccatattccgacatgtcgatgcgcaacagggcgtgctcatcgccgtagatcgattcggccaatgccttggcgagctcggtcttgcccaccccggtcgggcccagaaacaggaaggtagccaccggtttactgccttcgcgcaggccggcgcgggacagccgcacggcatcggccacggcacggaccgcctcgtcttgtcccaccaggcgctcgtgcagccgttgttccaagtgcagcagcttttcgcgctcttccaccgtcaactcgttgaccgggatgccggtcaggcgcgagacaacctgcgccacgtgttccgccttgacctcggcactgccggaggcccgctcccgctcccagtcctcgacgagcttcttgagctcggcctccttggcttcgatgcgcttgccgagctcggcggcctggtcgtactgcttgcgcgcggccacgtaatcctgttcacgccgtag

SEQ ID NO: 153720 - DNA, 1467 bp, Enterobacter cloacae
gtgcagttcggactccagctcctgcacggccaccggccgggccgtggccgacagcttcacgcgcgcggccgcctggtcgagcaggtcgatcgccttgtccggcaggaagcgcgccgtgatgtagcggtcggacaactcggccgccgcgatgatcgcgtcctcggagatgctgaccttgtggtgcgcctcgaaggtgtcgcgcaggccgcgcagaatcatgatggcctgggccaccgtcggctcgggtaccgtcaccggctggaagcgccgctccagtgcggcatccttctcgatgtatttctggtactcgttcagcgtcgtggcgccgatcaggttgagttcaccgcgcgccatcatcggtttgaacacgttggccacgtccagcccgccttcgccaccgccctggccggcaccgacgatggtgtgcacctcgtcgatgaacaaaatcagctcgccctggtgctcggtcacctccttcagcaccttctgcacgcgctcctcgaactcgccgcgatatttggcgccggccaccatggcgttgatgttgagttccaccaggcgcttgtcgcgcaaggtctcgggcacttcacccgccaccatgcgctgcgccagcccttcgacgatggcggtcttgcccacacccggctcgccgatcagcaccgggttgttcttcttgcgccgggccagcacctcgatggtggtttcgatctcctgcgcgcggccgatcaccgggtcgagcttgccgtcgcgcgccatcttggtcaggtcgcgcgagtacttgtcgagttctggcgtgttggtcggcgtctcagcgcggccatcctcggcgcccttgccgaccaccttgctgacctgttggcgcagcgcctgcggcgtcaggccgtagcggcgcagcaggttggcggccagcccttcgccttcctcagccagaccgatcaggaaatgctctggaccgacataagaatggccgagttcattggaggccacgaaggcgcggctgagcgcatccttcacgcgcggcgacacgccgatctcgccctcgaagggcttgtccccgcgcttggcctcagactcgatctgccgcttgaggtcatcgaccttgatcttgaactgacccaggatggtcttgaccacgtcgctgtcggccagcgccagcagcagatgttcggtatccacctcggagcggccaaattcggcagcgtgtttggcggcctcctgcagcaaggcttccgactgttcgctgatgcggctggccaacccactgccgcgacggcgcggcgcacccgaacctgcggtggcgggctcgccaaacgaggcatcgaccacgtcatcggtatcggcggcaactggcgtcgcgtcttcgccgatgcggaagaagtcactgccgaggaagtcctcgaacaggccgctgcgcgagccgaacaaggcttccagcggcgaaacggtgcgcttttgctggcgcactaa

SEQ ID NO: 153721 - DNA, 204 bp, Enterobacter cloacae
atgcctcgtcaaccagatattcgttccgcttttattgcggccatacagcaaaacccgaagggctatctctgcctgcatacaggcaaattcatcgccgaactgcaggagaggcactggcatttcagccaggaggatgcaaattcatggatcgagcgataccagccggacttcgccgataagacaacaaacggaagtgagaactga

SEQ ID NO: 153722 - DNA, 204 bp, Enterobacter cloacae
gtgtggactatccagccacccaaacggacgatccaaggcctgttcaatctttctggccattttgtcgcctatgtttcgatggctattgcccccaagcaactggctcaactgggcagggcttatcccgcacaattctgcgaaagctgcttttgtcgtatgtctgtcgcgcttcaggaactcaacaatgagctgctcaaggtttga

SEQ ID NO: 153723 - DNA, 270 bp, Enterobacter cloacae
ttgagagagtgctacgcactggctcacgcccccgacgacagatatatgttaattatttttacccgtcagatgaaaaccagacgtttaatctcccttgcagcgccgctgagtgccctcagcactcacacgctgaagcaaaaaggatttttccgaaggggttccggcgtgagccgtattaagttaacgggtaaatcatgtagtcgggtccactctttcgctaaactcagcagtctgaatctctgcgcgaagcgtatttgtgctgagagctaa

SEQ ID NO: 153724 - DNA, 222 bp, Enterobacter cloacae; identical to SEQ ID NO: 140650

SEQ ID NO: 153725 - DNA, 795 bp, Enterobacter cloacae
atggctgagttattgcgagagcaggaagttaaaatagccctaattgaatggttatataaaaaaggcatgcttagtgatgcaactatcattaatgaaatggttgttgctaactggagcagaagagctgatttggccattgccaacggaagcttgcaagcttttgaaataaaaagcgattttgactctcttaagcgcttggatggtcagttaaaaattttcaaatctagcttcgaaaaagttacaattgtgtgtgcgccaaaatttaccagtgaagtttctaagcgggtttcatcagatgttggcgttgtagaatttcaatctaataatagtggtgtacgttttaaaataattcaaaaaggaagggtttgctctcgcttaaataaatttatttatttgggatttttgcttaagtctgagcttaaagatctgcttaatcagcatggaattacattttcaaatgaactacatagggattgtcttgaggttttggcatctaagttatctttaaacaagattagagaatttgtcattacatctattaaaaataggtatcatgcgacttctaatgagtttttatctagactccatggtaatcaagaaatatctataggcgatcttgcattattgagcaaagctaaaagaaggaataattctttggttaagttcgagtttaaggcttgttcggagaaatctttaaatgaataccataaggttgatgttgactctatagttaggaaatatggcgatgatgtttcctatattccggaaaaagtacttaaaagggttgtgagctag

SEQ ID NO: 153726 - DNA, 1068 bp, Enterobacter cloacae
atgaaagtatattttgaaaattactcgtactatccagccctaagaacacgatcagcggaaatgaccgggctgaataatttatcatatgaaaacaagcaaaaaatattgcctttaatttctttggggaaatggcctcgctcggaagaaattcaggtatcgttagataaaagtttagaagtgatgagtaatctcccattcattttggatgtcacaaaggagaattctcatcattgtgcttcaagcttcgaactactctctcctgagaatggttttaaaaactggatagagttttgctccagaaatgataatattattccagtagtccagatgccggattcagcaaaacttagagatatatctatccaagctagagttttagaggatgttaaaggctcaattgcatttagaattagaaatctaaatacagacatcaataaaaccctgacgtcactagtatcgatggactctccggaaaacgccatagttttcatcgatttgggttacatcagggggaatatatctgctataacagctgcagcaataaattcgatcaatcaaattagaactgagattcctgaggccataattagtgtgctagcaacaagcttccctagttcagttacaaatttttgccgtgaaaatggacagtccggatatattgatgttattgagagagaattgcatcaaaatattggtggaagtgatgtcgctatttatggcgatcatggttcaattcattcagtagtgtatgacaatgtaattgggcgatatgttcctagaattgatatagcgttagatgattcatggtatttcgagcgccgtcctgggatgaataaagaaggattcattgaagctgcgcaatcaattttggcagagtatccacattatcaaagggaagactcttggggggctgcaatgataagaaatgctgctataggggatatagcaggtatgggaagtccagctaaatggattgctgttcgagtgaatctacacttaaacaagcaaattgagctatctgaggctctacagtttggctttgatcatgatgaggaagatcttatctaa

SEQ ID NO: 153727 - DNA, 240 bp, Enterobacter cloacae
atgtttcactgcccgttctgcaaaaagaccgcgcacgtccgtaccagccggtatctgtcggaaaacgtcaaacagcgttatcaccagtgtaccaatatcgaatgctcggccactttccgcaccatcgagtcggttgacggtgtgatacgtgccgcaccggagaaatccgaccccgcgccggtggcgccaccgccgccgcgtaaagtacagggctgctacagctcgccgttccggcattaa

SEQ ID NO: 153728 - DNA, 744 bp, Enterobacter cloacae
atgaaacccgaactcattatcaaagccatgcagaccgttatcagtaaacaggatgaaggcgcggaacaacgtattgccggtgcgctggccgcacttaacgaggcaaaagacgcacacacggccagcatgggaaaactcagcgacattgaggcttccattcagcgttgtgagcaggaacgacagaccgccctcagtgaaagtgcacaggccgaacaggactggcgatgccgctttcgaactctgcgcggcaacctcactcctgaactgaaagctgaacacagtaaacgtatcgccagccgcgaactggctgatgagttcaccggtctgattaccgagctggagaaagacaaaagtctcgccatgcttggcgcatgctcctccggtaaggcttatatcagcgcccatgaaaaagcgttcaccacttacgccaacagcgagtggaagaaggcgctggccggtatcagccccgcactgttacgtgcctttctgttgcgtatacggtcgctggaaatgagcggagaaacctcgccgcgtgcgaccgtgacccgcgagctgggtgatgccctgaatctgcagtcagccctgtatcattttgatatggagcaggagccggttctgtccgtaacgggcatgaatcgcccggtcataaccggggttgatatggcgctgttaagaagcccggccagacggatgaagcttgccgctgaactggccgcaaaagaccacgaacaggcagatggctga

SEQ ID NO: 153729 - DNA, 1272 bp, Enterobacter cloacae
atgaaaagtattgaagagaaaatatcagatttagagtttagtaaaacaagaacgtatttccaagaggtttacagtagttacaataatggaaactatcgatctgctgttgtaatgctttggtcggtaatggtatgtgatgcaatctacaaactagaaaaattagatgttgtttatggcgacaaatctgcaaagcgtatactgagtcatataagcaaaatgcaagatcaggagccattgtcgccttcatgggagataaagcttttcgagatgttatttgaagagaagtcaatgataggtactcctgaaattgtaaacataagagaattgcaaaaaaaacgacatctttgtgctcatccaataatgtcagaagaaagggttttatatgagccaaataaagagactgtgaagagccttatgctgaatgcgctcaatgattttctgttatataaagcatattatgataaaggtgtatttgatgttttggtttcaattcttgaaagcgagagcgcgtactatacctcaagaaaaaacgttgagaaattgatttcttcttatcaaccccgcatggcaccccatgtaatataccaagttttcaagagtttttgggcaatatcgttcagatcggaaaacgataaatgtaatgaaaatagacaacaaaattcaatggcagctgttgcattggcaaaatatttattacaagaccctaagcagctcgaatcaataagggacgatgttgattatttctctaggatttcaactaatattgaagttgttaaatatttatttgttagcctatgtcaaattcctaaaatgttccaattgctttctgagccaaccagggaacgtatcatagaatttagaaatcaagaagaaaaagaaaatgcatcggaatcacaaatagcatgctacattgcttcgatgtttacatttagtgaaatggctgaatacattgattttatcaaagctaaaattgctgactcaaccatttctaaactggataaaaatattatggatttcatatcgtcttattatgaaggctatgaaaataataccagttgcatggatttattagtggagtacgtactcaattcgtggtcctatgatatggctgattccagatttgattttttatttaagtattatatcgaaaacttaaatgcagaacaaattgataagatattatctggttatgaaaagaattcccaaataaaagatagaagaagagccgcggaagatagaagaagattacaagcccaaagagataaactttga

SEQ ID NO: 153730 - DNA, 180 bp, Enterobacter cloacae
atgactaaagaagaaaaagttatttatttaatgcgtctcgcggtagacactcatagtgcttatcgttctgcacaaatcgcatcggggaagggtatgaacgcagaccatgacccaatcgaagcaattgaaaaaatctacaacaagtacgaagcactactcgacaaaaaactcgctgagtga

SEQ ID NO: 153731 - DNA, 174 bp, Enterobacter cloacae
atgagtaaggttaacgtaaagcccgttctgctgaacggggagcagattcaggccctgaaaaccattcaggagagggagcgccagaagtcgggcatggggatcgcgccgtcaatccatgctgttgcgcgcaaggtatttgatgcagggctatcaaaaatggaggctggccagtga

SEQ ID NO: 153732 - DNA, 786 bp, Enterobacter cloacae
gtgagctactcaatcaaaatagggaaacatagcatcgagctggcaggttatgccggtaaggttgttgcgccaaatactcagatggccgctttattccgtggtatggcgggcgaactcaccagcctgaggacaacggcgcagcaggccgaagctgaggcggatttgctggacgttatccgcaacgatccggatctgaacgaacaggcaaaaaaccgcagggcaggtgaagcccggaacccggacacgctcaaagactttacccgtggggtggcagcggtaagcgagcaggccgcaaacattctcgattacctgaagaacaggctcgctccggttagtccactggcatctgatgatgttcagggattcatgcgtgacagtgaaatgcgtcaggcattcgcccgactggatcgccgcagccaggaaaaaatgttgctgtcgatgcacagtggaaagcatcaggagctgactgacgccttattaagggcgcacgcagtgtgttcgggactcgatacggaacagctaaaacgcctcggcttctcccgtatcgcatcagagaacgggcaggtgattagcgctgttgccgatctggtcgatgcggtgagaaaagacgtcgcacaaattacagccgtacgaacctggtataacaatctcgtttacgggaagaacgacgatccatcagaagttctgccccgcatgaccggccttgatcagttaagcgaacatgtcagcgcgatgctcaaaggcagccagcggcagaaacattcagaagagaagcaggccgcctga

SEQ ID NO: 153733 - DNA, 492 bp, Enterobacter cloacae
atgctgttaagtaaatcagcctacgccaggcatatgggcgtcagccggcaaactgtttacggctggatagcccgcggtgaaattgtaatttcaggcgataaggtggatgtcgaagcatcgcaggctaaacaaaattctgctggtgctggcgaacaccagactgaaatgacgtgggcgcaggccgctgcatttgtatgggggcgtgatggcagtaaagagctgccagccggtgcggatgctggcgaacgggtcagggctgctgccagcgagctgggtttcgatgttcaacacgaacccgatgatctgcagctgatactctaccgacaggatgaggaaacccacactttctgtggcaacgatcgtgcggccggggcgttgcgcttccttcgttccgaactggcctacgttgccgcaatgttccctgataccccggatgactggaacgaaacagggttgacagcgctctgtttgccgaagggcgaaaaactgtaa

SEQ ID NO: 153734 - DNA, 2667 bp, Enterobacter cloacae
atgtgggaaaaagatggcttcaaaaatgaaagtgatgttgagcagaagtttatttatccgtatttaacatctccttttccatatggacttaatttgcccagctcagtaattcaaacaaaagttaatgttagaagatttactatcggcaaaggtaatgaaacgaagttatattatcctgattatttaattgttgtggctggtttacccttggttgtaatagaggttaagggaccatctgaaaatttaaatgaaggatacagacaagcgagactgtacgccacggagctaaatgctcttttcgaaacaggtaataatccgtgtaagtttgtaattgcgagtaatggcattgatttttggtatggcccagccgatcaaaatgaaccaaaactgaaagttaaagtttcagaattatgcaattacactgaggcggatgcagaattacaagaagtattttcgtgggataaaattgaagagcttgccaatagtatttccaaagagctgaaaaacgaaagttactttaaacccaggaggttgatgggaggggtggcgtttcagaatgaagaggttgggaaaaacacctttggcgcaacgttaacaacttcgatatcctcaatttttaatcctattaccaatgcggataaaaagtttatagcccaatacggatatatttcctctaagaaaagagagcggtatgtagagcctatcgataaagttattcgcgctgctcgtccaccaagcgaaacaaatgcgttgttaatagaagatactagtagacctgatgaaatattagaccggttaagaaaccaaaaagagttagagcatcaggttatgcttattatcggtagtgtaggttcaggcaaaactacttttgtcgattatttacaagaaaaagccctgccaagatcactacttgaaaacgtggtttggtgccggttcgatatgaacaatgcacctgtttcaccaagtgaaatttatatatggcttaaaaataaaattattgaatcttgtaaaaagtccatccccggcgaagattttgaagatattgatgttattcgaaagttgtatcatgctgagataaatgcttttgataaaggggttggtaagtattacttacagagtcctgatatttatcctgtaaaattggctgagtatatacaaggcttgcaaaatgatttagacaaaacagttaatgcatttatgagatactgctgtggaaacagaaataagctaagcctcatagtgcttgataattgtgacaaaaagacacgagacgagcagttgttgatgtttgaagctgctcagtggttgaagtccgagtataaatcattggttatattgccattaagggatgagacctatgataataacaaaaatcaacctccccttgataccgcactaaaagatatggtatttagaattgatccacccatgtttcagcaaattctagtaagaagagtacagttagctttggataaactaaactctaattctggagagaaacttaaatttagcttgcctaatggtatgcaagttgaatatcctcggtcagatcaagcctattatcttacttctattgttacatctctttttgagcacgatcggtttgttagaaggatgatcgtagggctttcaggtcgtaacatgagaaatgctttagagatatttctcgagttctgtaatagcgcacatattggagaggatcaaatatttaagattaggcagtcacaggggcaatacacattaccattgcaccaagttgctaccgttttaataaggatgaacagaaggttttatgattctgacaattcctacataaagaatatttttagtgctaataatgaagattccaatcctaattatttcaccagatatatgattattgaatggctaagaagaaagttttctgaggcaggaacggaaggattcaaaggctattttactaaaaagaccttaaaagatgcattaactgggcatggcctcacgccgaacttacttgacagggaaataaattatctcttatcaagtcgttgtataattgcagagcatttaaggttagattatgttgatgatgaagatttgataaaattaggaccagcgggctttgttcatcttgatttagtaagcaatgtaagctatttagctgctatagctgaagatacttatttcaatgatcgttttatggctgaaaaaatagtatctcgaattaaagaggtaaattcacatcttcatattcaaaatacagttgataatgcttctgacttggttgattttttatcagaaaaaaagggtcagttaacaccacctaatggctcattcttattagatgatacatttgatgagcttacggatattagcgaggctcaaaacgccgtcgcaagagttcgaattaatcaatcttgggatccttggtttgatgcacataaaaggttgcctcgtggttcaagacaccaagttagtctcacaaatatagttaaatatggatcatttgtagagtttaaagatggcttagttggtttggtccacaattctaaatataatggcattttgccaaatattggtgataaagtagaagttgaagtcatttgggttgatgctgtgcagaaaaaaatgaacctttcgctaatatcaatcctgcaagaagatgccggtgatttatttgagaagtga

SEQ ID NO: 153735 - DNA, 984 bp, Enterobacter cloacae
atggaaataagtaaatcactaatcattgcattgtatttgatagttgttattatttacttaatatatctggttaaagttaatgcattcaaaatgaatgctgaacctataacacaccaacccctgtttacggcggcaatcgcattaccactgatatcattcttttcatttggtataatatcttggtcaacgcattcattacaattagattctgaggggtttaataactttctaaacataagtaagctaccactagctttgctttctctttctttaccatttggtgttgttgttaacaacatacatagaaccatacaaacagacaaacagataaaagaggctgaaaagaaaaacaaaacagattccttttacgcacatagaaaaaacacaattgaagtattccaaaacatggatttacttacactccacctaccaaatacggagcttaaattagaattcgataatcactattctttatataaaaaatgtttcccttatgcttctacttcaaataacgaattctcatattgtaagtcgtttgttgcaaaagcagaggaattgtgggttgagttagccatgaaattgaaaattaaagaacccgacaatcgtgttgacttatactttcatatttttgaaatagaaaacttatttaaagaattacataaacactaccaatttaaagaatataaccatagtcaattgtatcaagcatattacgaagtagacgaggaacgtgacttttatatgagtacaaaaatagcgaacgagaatactttaaaaggattcttgactgcgtattggcatgcgcatcttttgattatggagacgctagaacattgtggaagtatacaatttacgttccaaactatacgtatgctcatgtactcgataagtgaagagatgcaatactcttcttatcgctgcaactcacttgtaggagccaaatacccacgttttgaactgatcaagaaaaacaaagatccataa

SEQ ID NO: 153736 - DNA, 882 bp, Enterobacter cloacae
atgagccaaatatctgttatatctaaattaactggcgtggaaacgaccacggaagggacacagataacactcgatcactcctcaatcgttaaacttaacgtggatcgcgccgacatctcaggttactcccgcagcggaaacgatctggtgattaccctcaactcgggcgaagtgattaccctcaagaatttctacgtcaccgacgcgcagggcgtgagccagctggtgcttgaggagagcgacggtgcgctgtggtggattgaagatccaaccggtgccgcaacctatgaatccatcgcctccacggacgccctactggcggcgtcagggagtgatatcggcggcgccgcagcgtggccctgggtgctgggtggcctggccgtcgcaggtgggattgccattgcggcgggaactggcggtggaggtggcggagatgacgataacaacagcccgaatcccggcaatccgggaaatccttccgagccagataccacgcctccggatgcccccaccaatctacaggtctcacctgacggcaaaaccgtcaccggtaccgctgagccgggcagcacgattaccctgaaagatgccgatggcaacaccatcggaacgggcaaggcgggcagcgacggaaaatttacgattgatctcggtacgccactcaccaacggggaacagatcaccgccaccgccaccgatccatccggcaataccagccagggcggtcaggtcacggcaccggatctcaccgcaccggatgccccggccaatctggaggtctcccctgacggcaaaaccgtcaccggtaccgctgagccgggcagcaccgttaccctgaaagatgccgatggcaacaccatcggaacggggcaaagcgggtag

SEQ ID NO: 153737 - DNA, 2583 bp, Enterobacter cloacae
atgctcaaccgaattaccgtccagctcccggttgaggggctgcttttctggaaactctccggccgcgaggcgatgtccgagtcgttcgcgctgacgctgaccgtgctcggcacagacgcgcgcatcgaccgcagcaggctgctcggccagccggtcacggtgaccatcccgacgcagaatctgctgacctcccgctatgttaacggcaagattacccgcgtggcggtgagcgccgtggagctgacgggcacccgctatgcggtgtaccagctgacggtggagccggacctgtggccgatgaagcgcgaccgtaacctgcgtatcttccagggccagacggtaccgcagattgtcaaaaccctgctgggtgagcatcaggttaacctcgaagacaaactcaccggcagctaccgggtgtgggactactgcgtgcagtatcaggagtcgagcctggacttcatcagccgcctgatggagctggaggggattgcgtactacttcagccacgaggcggacaagcataccctggtactgaccgacgccgccacccagcaccagccgttcagcggctatgaggtcattccttaccatcagacgccgtccggcggcagtacggacgaagagggtatcagccagtgggcgctggaggacagcgtgacgccggggatttacagcctcgatgactatgacttccgcaagccgaacgcgtggcttttccaggcgcagcagaacccggcgtcaccgaaaccgggcagcatcgacgtgtacgactggccgggtcgctttgtggagacagggcatgcggagttctacgcccgcatccgtcaggagcgctggcaggtggagcatcagcagattcaggcgacggccacggcggcgggcattgcgccgggccacatttttaccctcaccaacgcgccgttcttcagcgataacggcgagtatctggtgacggcggcgggctaccatttcgaggagaaccgctacgcgagcggtgagggggagaccattcaccgcaccgatttcaccgttatcccggcgtcggtgtcctaccgtccggcacagtccacggcgtggccgcggacctacggcccgcagacggcgaaagtggtggggccgcagggggagagtatctggacggacaaatacggtcgcgtgaaggtgaagttccactgggaccgtctggcgaagggcgatgacaccagctcctgctgggtgcgtgtgtcgagcgcctgggcaggccagggctacggtggggtgcagatcccgcgcgtcggcgatgaggtggtggtggactttatcaacggcgacccggaccgtccgattatcactggtcgcgtgtataacgaagccagcatgccgccgtgggcgctgcctgctgccgcgacgcagatgggctttatgagccgcaccaaggacggttccgtggacaacgccaacgccctacgctttgaggacaaggcgggcgcagagcaggtgtggatccaggccgagcgcaacatggacaccagcgttaaaaatgatgaaacgcacaccgttggcggcgcgcgcagccattacgtgaagaaaaatgagctgcatcgcgtggaggctaatcagatccaggccgtgaaaggcggaaccgagatcctgacgggtaaaggcaagctggatgcagcggtggagcagtacgtcattgcttccgggacgaagctgcggctggtctcgggcgagagtgctattgagcttaacgctaacggcaaaattaacctgatcggcaaagagtttaacttctttgtggaaggggatgggtatatcaccacaggcggtaagctgcatctgaatacgtcgggcaccaagccgggcacaacggcgccgggatcggggcataaaggggatattgatgcggcggtgcaggagaagttttctccgaataaaagtgctaagaatccggctcccgcagcttcagcgccagcagcaaccagaccaaaaccaacaacaaaatttgcatcagcgccaccattaaaagggagttacgtctatcaaaataattcctacaactctgatgtgatgcccttcagtgaagatgtagttaaggaaatcaataagtcaccaacgcttcagacacaattaaaagatctaaaagataaagggtgggctattcagccgggagcagcaggaggggggagttacgctgatacgaataacaaattgattgtcatggaccctgaacacatggaagatacagcaacaacggtgcaaactctggcacatgaggcagggcatgcaacttatcctgttgcggtagattcttcgagtaaggaaagcttcatcaacagccagcttatggatgaaggtggagcaacgctgaataacattaaaatacaacgcgagatccttgcaaacggcggtattgatattgatatagcgggaagtgccgaaaacctaaaagcatataattctgcctatgataaaatggtaagtggtgagttatctcgcattgatgcagccaaagcaataggaaaagtgtatggtaaaggcgaaatagcctcagggactaatctaaattataatgattactatggaggattctatggaaagtag

SEQ ID NO: 153738 - DNA, 3411 bp, Enterobacter cloacae
atgacgccggttagttcatggagcagaggagggcttgccggcatcgtagccttaatctcactcactatagtgggcttgatcctgcattttggtcctcagtatggcctcgatacacgcctgaaacagatgatggcacttgcaactgcgtggcttgtcttgctgattgcttgtaacatgccgtttgtgttccgggttatgcgggaaaaacatcaccgctggcgggagcagaagaacagtgcgttaccttctgatgaatcaagggttgcccggattccgccacgcaatgccaccgttacaaccatgcgcgaagccatgcgtaacctctacggccgtcgttggggccgtaaaatacgcattctgctgctcactggcactgtctctgaggtggagcaattgaccccgggccttacggctcagctctggcaggaagaccggggtacgctgttgctgtggggtggtgatctcaatacgccagcagacagtgcctggcttaccgcgctgcgcaaactgcgccgtcgcccggtagatgggctggtgtgggtcacttcagcgtttgaccagctctcagcaccagggctggaacaaccgctgccggtaccgtctgaaagcaccatggattccctttctcacgccatcagctcacgtatggaaacgcttggctggacactcccgctgtatgtctggtccctgcatccgcgcgccggtaaaccggaagggcgtattacgcaggcgaccggctgcctgctgcctgccggttgccgtaccgaagggctggcagagcaaatctcagccctgacgccggatttaacttcacagggtctgcagcagatctgcggtgaggtgaaacataacttcctgctgacgcttgccgaccagctcattcgtgaacctgagagcctgactgcgccgctgtctgtgatactcaatccgtaccggccgttgctgctggctggcgtggtgttcagtcagccttctgccggagctgaacgtgccgtgcctcaccactggggcatggataagcgctgggatgtcctgcctgattctctacggatgctccctgccgcgctgcgtccgcgcaagcccggtattccctggcgcaggggcgtggcgtttgccgccgccctgacgatggcaggctgggctgcgtggatgagcatcgcgtatgtcaccaaccgcagccagattgacggtgcaaaggcccaggctttgcttgccgcccgacagaatcagccactggagcagcgcctgcacgcgctgtctgaactccagaaaacactggcctctctgcagtaccgttctgagcatggcgcgccctggtatgaacagggggggctgagtcagaatgacgcgttgctggccgcactctggcctcgttaccgggacagcgcactgccgctgttgcgggatgcagccgcagaccacctgcagaagcatatcagtgccttcaatgcgctgccgccggagagctcgctgcgtgagcagaaggcaaaaaccacctgggagcagctcaaactctacctgatgctggcgcgtccggaacatatggatacgaactggttcagctctgcattgcttaacgactggcagacgcgtgacggtgtaaaagacggcgtctggcaggggatggctccttctctgctgtcgttttatggcgcgcagctggttgcgcaccctgaatggaaactgcgtgctgatgaaagcatggtcagccaggcgcgttccctgctggttcgtctgatgggcgtacgcaacagcgaatcgaccctctaccagaagatgctcacacaggtgtcgcatctctatgtcgatatgcgcctggaagatatgaccggcgataccgatgcatcccgtctgttcagcacctcggaagtcgtgccgggtatgttcacccgccaggcctgggagcaggccgtgcagcccgctatcgagaaagtggtgaaagcgcgccgggacgaactcgactgggtgctgactgacagcaaacgtcaggtgaataagcaagatgagacttcaccggaagccctgaaaactcgcctgacggaacgttactttgccgacttttgcggtgtctggctggagtttctgaacagcctgcgctggaatcaggcggccacgctgtcggattcaattgaacagttgaccctaatggccgatgtgcgtcagtcacctttggtggcgctgatgaacaccctgaatgttcagggccgcaccgggcagacaggcgaagccatttcggattcgctggtgaaatctgcgaagaatctgctcggtggtgataaccaggatgccattgatcagagcgccggtgttcacggcccgctggatgcgacctttggcccggtactggcgctgatggataaaaaccggacaggtgcacaggagttgagcctgcagtcgtacctgacccgggtgacgcaggtgcgtctgcgcctgcagcaggtgaccaatgctgccgacccgcaggcgatgacccggctgcttgcgcagacggtgtttcagggcaaagccgtggacctgaccgaaacccgcgactacggcagcctgattgccgccggtctgggccaggagtggagtggttttgggcggacagtgtttgtgagtccaatggagcaggcctggcagcaggtactgactccggcggctgaaagcctgaatgcacagtggcagaccgccgtggtggatgactggaacaacgcctttggcgggcggtatccgtttaaggatgtcagcagcgaggtctcactgccgttgctggccagatacctcaacgctgattccggacgtatcacccgttttctccagacccgtcttaacggcgtgctgcacagggaggggagtcactgggtgccggacagcatcaacgcccaggggctgaccttcaatccggccttcctcagggcggttgataccctgagccatatttccgatgtggtgttcacccgcggtgaggcggggttgtcctttgaactgcgcccgggaacggcggatggcatcatggagacgcggctggttatcgacagccagaagctgacttatatgaaccagatgcccgcctggaagagttttatctggcctgcggacaccgaagcgccgggtgcggcattaagctggataagcacccaggccggcacccggcagtatgcggatatgtccggggcgtggggctggataaggctgctggacaaggcgtcagtcagcgcgtatcccggcacgggcagcagttacagtctcacgtggcaggcgcaggatggcaaaccgctgaactacaccctgcgtaccgaggcgggggagggcccgctggccctgctgaagctgcgaaacttcagcctgccgttgcagatattcaccgtcagcgagcccgccgctgaccccctgaccgatgacaccgaccccacagaggaaacgtactga

SEQ ID NO: 153739 - DNA, 255 bp, Enterobacter cloacae
gtggtcacactctgccaggtgttcggggttcatcgcagcagctacaaatactgggtgaaaagccccgaaaagccagacggcaagcgggctgtattacgtagccaggttctggagctgcataacattagccatggctctgctggcgcgaggagtatcgccattatggcaaccctgagaggtttcagaatgggacgctggcttgccggcagactcatgaaagaactgggactggttagcttgaatcgccacggataa

SEQ ID NO: 153740 - DNA, 534 bp, Enterobacter cloacae
atgaatcccaaactcaggaaagcatggtcagaattgattgctggagccaaatgggatgtaattgctctggttgttgttgccataattatttactttttgaaaaacaccttaaagtttgcagatgttaaagatgttgtagggactttacaaaatatatccgcggcaatattcacgattatcggtttgtgggtcggttttttgtatcctaatgcgatacaagggatagtaagtgataatgttgattatattaaaaatactaaggatgttccaagaatagaaaagttgatctacgtgataattgtttctgcattagtaatgttaggaactcttgtattttatatattcaaggctttactgggcaatgcatctatatatgttgagcatcagtcagtgattaaatattttgcgttagtatttgttttttacttgtgctggctccaaagtcgatgcatttttagcgttattaaaagtaatttcagatttgctaatagtctctactctcgtattaatgagtcaaagctaaaacacgattga

SEQ ID NO: 153741 - DNA, 1179 bp, Enterobacter cloacae
atggataacggctctattactttttttgatattaaaacatttggtttttacagattaaaacataaggcaaaagatctcgattataaatatgggacactgaatgaaatatttagtgagttcgatatttggttaaaaggaaaagcgattgaagaaacaatcccatgggatgttaataccagtcctatgcgctctaaaacatattgccgtggggtcgctattgatccgcaaacgaatgatattgttgttgtattactgagagcagtaggtgacggttcgggtaatttacatggagtaaaaatgggatcggccgtaggggctggcgaaagtgagacagtgaaagctggaactgatgtaaaaggtgataaaattatttggggagaaccatgttattattggatcatacctgaacataataaaatcgcctcaataatatttccgcattctggtgctgatacatttagattttgtcagtattttactactttcgttaataatcactcaaatgttgatggaaccaggaaacagtcaactacgagccatcaacatagccgtgatccaggcagaatgattaatgtcgttaagacaatgtttgaatacggcgaaggaaaaaataaatgcaactgcatttttaaatttgatgttgaacaaacaaaaatgaaaacagcagtaggaaatttggaagaaataattccaaatattactcaaactataattagagatgttgcaacagcgcgtgtagaagatgagcgtagtcctatccttcaattggctagtgagtatttaccatctcttttcggggaggctcctccattacaggctcctaagcgtatagaagtgcgcattgatggtgctccttcagctgaggaaattgcgagattatttgcccaaagagcggaagaaactgattgggctgatgtcggttttaaagttaaagattcagaaattccaatttggctaactaaatatgttgtgaaatcaacgcttccaatcgattcagatggactttcacattattcccctgaaaaattattagaagaaattaataaaattcgcggggatattcttgagtctgtcatggcgcaagaagatgccatagaagaaggtattcaggtcggtccagttgccaatgatggtgatgaaaacgaaaatgaccaattaattgcaaatggtcaagcttaa

SEQ ID NO: 153742 - DNA, 603 bp, Enterobacter cloacae
  misc_feature (297)..(306): n is a, c, g, or t
atggcaaataaatctactcctttaaaattatttcgcacacattataaagtggctgaagttgctaagatactaagttgtgaagaagaagatattttgtatctggccggggagaacgattttttgttctcagcctatgtaggcagggagggtaacttctcaaagcatcgagtaagaaatataagtgaatttattaatcatattgattcattggataaggatgatgagggttatagttatattagtcaatatagcctcataaaaatatatgaagtaaaaaatgataaaaatttagttatnnnnnnnnnnattttaaatatccgccaaaagtccaaaaagactttatcttttttagtggtcaatttccagattacccttcacttctcgttccagctgggaaagtgttttcaaatgatgttaaatttatccagatggactggaaaaattcggatggcttttttttggagcatgatgggtatcttgaaagcgaggacgttcgaaagcttcataacatcattaataatgagtcatcgtctgctgatgtatataaaacgctatcaattgctcaacaagagcgacatgcagcaaaaagaaatcaagttttga

SEQ ID NO: 153743 - DNA, 7068 bp, Enterobacter cloacae
atggacggcagcaacgtgctgggcaccaccaccgcgggcgcggacggcacctggagcttcacgccgagcgtggacctgggccgcggggaccacacctttaccgccacggcgaaggatccgacgggcaacgagtcaagcagcagcagctggaccgtgaccatcgataccgatgcgccggtgaagccgaccatcgacgcggcgctggacgacgtgggcaccgtacagggcgccctgtctaacggcagcagcaccgacgacccgacgccgaccctgagcggcaaggcggaagcgggcagcaccgtgaagatctacgatcagaacggcctgctgggcgaagtgacggcgaaggccgacggcacctggagcttctcaccgacggcgaaactgccggaaggtgagcaccgcttccacgtgacggcgacggacagggcgggtaataccagcgcagcgtccgacgatttcgtgctgaacctggactacatcgcaccagatgcaagcaaagtgagcatcactgacgtggtagatgactttggttctgtgaccggctccgtgacgtcaggcggtaagactgacgataacacgccgctgatcaaaggcaccggcgcggaagcgggcaacaccatcaccgtgtacaacggcgacaaggtgattggcaccgccaaagtacaggctgacggcacctgggagcttcaggtcacgaaagccctgcctgacgggacttacaacctgacggtgaaagagaccgacagcgtgggtaacaccacggcggcttcaccggaatacattattcagatcgatgcaggcggtcagccgctgccaccgaccctgagcagtgtcgaagatgacgtcgcgccgcataccggtccattgcagaaggatgcgacaaccaacgacaacaccctgcttctgaccggtactgcggaagccaacgtgacggttcgcatttatggcggcccgaacggtaccaccctgctgggtgaaaccaaggccgatgcccagggcaaatggagcttcaacacgccgaaactggcggacggcgttcatacgtttgtcgcggaagcgattaacgacattggtcaggtaagcccgcagactggcggcttcccaatcacggttgataccagcgcgccgggtgaggtcacaggctttatcgtgagcgataacgaaggtccgaagaccggcgtattggctaatggcgacaccactgacgatgcgacgccgaccatcagcggtaaggcagagccaggcagcgttgttcacgtctacgtgaacggccaggaaaacggtactgcggttgcagacgcgaacggtaactggacctacaccaccggttctctggcggatggagaatacaccttcaccgcgcgtgctgaagattcagcaggcaatctgggaactgaaaatgccggtgttaccgtcacgcttgatacctccagcgttccggtcaccatcgttcgcgtgatggacgataaaggcagcgtcacgggtgaaatgaaggcgaacgacgtcactgacgacgcgcgtccggaaattatcggtaaggcgaaagcaggcagcactgtcaccatcatggatggcaacgtggtgttgggcagcgtcaaggccgatgccagcggcaactgggtatttacgcctaccagcgatctgggcgatggcgtacacaacattacggcaaccgcgaaagatctgacgggtaaagaggatacctccagcaccttcagcttcgaaattgacagtaaagcaccgaatcgtccgagcattgactacgcggaggatcaggtgggtaccgttaaggacgacctgaacagcaacgatgtcactgacgatccgcagccgatcctgcacggtacggctgaagcgggcagcaccgtcaatatttacaccgttgacggcaccctgctgggttcagtcaccgcgaacagcaacggggcatggaacttcaagccgggcagcaagttacctgaagggaaaaacaccttctacgtgacggccacggatgaagccggcaacgtcagcgacaagtctgcggactttattctgactaccgactacaccgcgccggatgcgagcaaagtgaccattgattccgtcacggataacgtgggtaacgttcaggggattgttgcagatggcggcgttctggacgatacacgtccggtaattcgcggctctggtgcggaagtaggcaacgttattaccgtgtacaccacggataaagacggcaacaccaaagtactgggcaccaccacggtcgatcagaacggcaaatgggaactgacgccatctgaatcgctgtacggtgattccatcaaccaactgaccgtgacggaaaccgatcgcgttggcaacgtggcgaaaccggctgacagctatgacgtcattatgtccgacacgccggatgcgccagcgatccttaacgttctggacgataccggcacaaccgttatcaacctggccaacaatgcgttgaccaaagacgatacgccaaccctgaaaggaacggcggacggtgctgcgggcgatactatcaccatttacaacggcagtcaggttgtaggtaaaacaacgctgaacagcgatggcacctggagcttcacgccatctccggcactggctgacggtagctacacctttacggtgaccaataccaacagcgcgggtcaggagagcgatcgcagcggttcgtttacggtaaccattgattcaacagcgccgaatccggtttccggactgcaggtgtctgacgatcagggtgcctggaaaggtcagttgaccgacggtatgaccaccgacgacaacaagccaaccttcaccggtaaagcggagcagggcagcacggttactatctatgataatggccaggcgatgggtaccgtcaccgtcaccaacccagacggtagctggcagttcacgccgtccacgccgctggttgatggcgaacaccagttcgcgacccaggtaacggatccggcaggtaacgccagcgcgatcgttgacgatatcaccgttaacgtctctacgggcgcaagctatctgcagctgctgcaggtggtggatgatgtccaggaagcgggtggttctcgcgtgcttcgcgatggtgaagtcaccaacgacagccaggtacagctggtcggtaaggcgacggcgggcagtaccattatcatcaccgacgtgggtggcgttcagctgggcaccgtgaaagcggatgccaacggtaactgggaattcacgccgacgagcagcctgagtgatggcgcgcacacgctgcgcatcaccgggaccgacccgtccaataacccgctcacgccgatcgactttgatctggttgtggatacggttgcgcctgtcgcaccggctatcaccgatgtgctggacgacgtcaacccggttcagggttccgttgctcacggcaagccgaccaacgacaccacgccggaaatcaccggtacggcagagaagggaagcacggtgaatgtgtaccatcaggtggatgcgacaacccgcattctgctgggtaccgccgttgccgatagcacaacgggtcagtggacgctacaaatcactgacgcgaacaagctggctgaaggcacctggaatctggtcgcaacctccacggacgcggcgggcaacgtcagtacgccgagcaacacctggacaattgttgtcgataccaccgtgtctgacgcggttatcaacatcagctctgtctcggaagaccgtggcgcttcagatactgacttcattaccagcgataacacgctgttgattaacggtgagctgaacaaagccctgcaggcggacgagtgggttgagattagcctcgacaacggtgtgacctggacgcgtgcctcaacggtaaccggcacatcctggactgtggatatgcagagcacgccgctgaacgatggtgcttacaccattcaggcgcgcgtggtggataacgccggtaacgtcggcagcaccgattctcaggcgctgcaggtggcatcgggcggcagtgacatgaacggtctgtctacgacaaccaaagtgactaccgataccagccatggtctgacgaccggggatcacttcagccacgcggcaacggcaaccaacggcgacatggtcacccgtgaccgtacggtgaccatcagcggcaacctgagcgcggcgctgcaggcgggcgaacatctgcagatctctctggataacggaaagacctggaaaacgctggcgctcaacggccagagctggagctatgaactgccggaagcgacggcaagcaccacccacagcttcaagctgcaggtgattgacgttgcgggtaacccgggtacgaacacgaactttgccgatagctacaacgtggttatcgatctggattctccgaacggtattaccggggcgccagatgtgccgcagcacaccaccacaggagattcgttcaccttctccagcggtcaatacggtcgtgttgaagcgggggcgattatctcgctggtgagtgacgtcaacaacaacgggacatatcaggaaggtctggatcaggtcattggcttcgtgaaggctaacgctgacggctcctggagtctgaatacgtcgctgccttctggcgcacataacctggcctttgtggtctgggatgaagcgggtaaccgctcaagcatgagcgccagcaccagtacaggtgtcaccgaaggtggcggcagtacgctgattgaacaaacctgggggggaacgaccgatgcggatagccgcggtttgaacgccgctgcggtgaccatcagtcaggacggtttgtggtcattcttccagagtgctcgcggcacttctggtacagcaaccgctaacgccggacgtgtctatgactccgtcacgcgtgaagactacgattcaacgtaccttgcccaaccgtcaactgaaaacggtgcgggttacgacgtagatagcacgtcatacagccgttatgttaactccgcagcctttgcggacattaaccgcgatggctatgccgacgtcatgtctcagatcagtagctatagtaacgcgggtcgtaccgcctactggctgcagaacgcagacggtagttactccgcgaaggcgctggatcagggcaccctgaaccacctcggcggcgtgatttcctatgaccgtgaaggtgatggctatctggactttgtgctgggtgactccgaagcagactccatttcgttcatcaaaaatacgcagggcacgctgagttacgaggataattccggcttctctgacggacatcctggcggggcactgccaacgtcgctgagtgtgctgcacgaagtaggggctgtggatatcgataacaacggtaccgtagatattacggcacatatcgactacaacggcgctggcaacctcgtcggcaacaactcccgcggtctgggtatcttgtataaccagactaccgggacgtcgaagaccaacttcggtgaagttggctactacgcgaacgtgttccgtgacgatggccatgaagactacggtaacttgtctatctccatgacctatgcggattacaacaacgatggttggctggatctgttcctgagccgtggttcgaaggggggcagtaacagcgacgagagccgtatctatctgaacgatggtaccggtaagctcaatgcaacggacagccaggcgcagtggtttggcgataacgttgatggcggcacgtcgctggcagtggactggaaccacgacggtaagatggacatcatcgaagtgccacgctctggcgtgactggctcgccaatgttgtataccaataccggtagtaacaactggggcgccaataaagtcagcctgacaggtagcacgacgttcaacaacatgacgggtgccgtcgcactcgactatgactgggacggttcgatggacctggtgctgtaccgctctggcgcggatgctgatgtcgtggcaagagacgacgcgggacgcacgatgctggtgaaaaacaccaatatcgcggcggacggcacgagcctgcagatccgtattgttgacggcaacggcatcaataccttctacagcaacaccgtgaagttatacaactcagcgggcgagcttgtggcaacccagttgattaacccgcagtcctctggttccagcaacagcatgggtctggtgagcttcttcgggctggatccgaatgaagtttactccgtgcagatgctgcgcattaccgacggtgaagcggatcacgttggcgcaacgagcagcattggtggttacaccaacggtacggtaaatgagagctggggtggcctgacaacaggtaaagcccatgactcctacgtactgacggcggaaagcggcaatgcggcaaacaacacctctggcaacagcgggatcgtcgggacgggctataacgacaccttcttcggttctgcaggcaacgacacctacaacggtggcggcggctggaaccagattgtgagcggtaagccggtctggagcgaaactgccggtatggacgttgttgactatagccgttcaactactgcgatcaacgcgaacctgtggacaggtactgcaaccggtaacggcaccgataaactcctcaatatcgagggtctcttaggttccagccagcaggatacgtttacggataactccgcaaataacctgttcgatggtcgcggtggcaatgacgccttctacctggtcaacggcggtaacgacacgctgatgtacaacgtgctggaaggaatgaccaacgacagcaccggcggcaacgggcacgacactatccacggcttcaaggtgggtaatctggtgaaagacagtgatgcagacctgctcgatatgagcgagctgcttgactataagggctctatctccttcttcgaggacgatggaaaactggagctggattactcctcccgcggcgtgctggattacgtcaaggtggaagttgtcggaagcgataccgtgatcagtatcgaccgtgacggtcagggcggacagcatggatttactcaggttgtcacgctggctgatgttcaaaccgatctggttacgctgctgcagaataaccaaataatgatgtaa

SEQ ID NO: 153744 - DNA, 315 bp, Enterobacter cloacae
atgatgttcaccgtgctgcccggctcggccctgccgctcagggtcggggtgttgtcatcggtggtgtcgccgctcacgaccgggccctggtacgcaccgacgttgtcggtgaccagcaggtcggaggccgcgtccggtgcttttgtatcgataacgataccgaagccgccggttggctcactggtgcggcccacgccgtcggtgacggtggcggtgaagctgtggctgccgtcagccagcgccgtatccggcgtgaagctccagctgccgttgctgcccacggtggtggtgccaatcaggcggccgttgtcgtag

SEQ ID NO: 153745 - DNA, 573 bp, Enterobacter cloacae
atggtgctcaccctctggcagcgcggtggttggcgtaaattgccagccgccattttcgtccaccacggtagaaccaatcagctccccgttatcatagatatcgacacggctgcccggctctgcggaacctttgaaggttgggttcgcatcgtcggtggtgctgccgctgctcagatcgccacggctggaacccacgtcatctgtcgcaaggccgacaaccggtttttccggtgccacggtatcgacagagatatcaaaggacggagaggtcacgtcgtttccggccgggtctttggaaatcacggtcaggctgtgatcgccatcggccagatcctgctctggggtgaacgtccagttgccgtccggatccaccacggtggagcccagtacatcgtcgccatccatgatggttacggtgctgcccggcttgcctttaccgcccagttccggacgcgcatcatcggtcacgttgcccggcctcaggttacccacgatcggcccctgatcgtccaccacttcgcccacggtgacctggtttggatccggatcgacggtgaaggagatccccggtga

SEQ ID NO: 153746 - DNA, 693 bp, Enterobacter cloacae
atgatcgcctttagccagaggcttgtctggcgtataggaccatttaccttcgtcatcaacgatgacggaaccgatcttctcgtcgttgtcgtagatgtccaccacgctgcccggctcggcttcaccgctcagggttggagactggtcgtcggtggtgtcaccgtcgcctaccggcccctgcttgtcgcccacgttatcattgataacgatattttctgccggagacggtgccgcagtatcgatcacgatcgggaaggtaccgctggtgcgcgcgttgcccgctgcgtcagtcgccgtgacggtgaaggtgtgctgaccatccgccagcgcggtatccggggtgaacgaccacttaccgctgctatccgccttgacggtgccaatcactttcccgttgtcgaggatagacacaacgtcgcccggtgcagcgctgccgctcagggttggggtggtgtcgttggtggtttcgcctttctgcattgggccgacgtgcggctcggcgttgtccaccacgctgttgatggacggctcggtgctgaccgggatcagaacggtaatatcataagacggtgcttcacccgccacgcggttaccaacggcatcctgcgtttcgagcgtcagctgattaagcccttccaccagcggtgtatccagcgccagcgtccaggtgccttcactgttgactacggctga

SEQ ID NO: 153747 - DNA, 522 bp, Enterobacter cloacae
atgtttgccgttagcatccgtgctgtaaacaaagacggtgcttcccgcttcaccaataccattgataaccggtttgctgtcatcggtgatttcaccgctggccacgttaccctgacggccgccgacatcatccattacggacgtaatgttcagcacatcgccggttgctacaggtggggtgtagtcggtcaccagcacaaaatcatccgattccggaccggtgttgcccgcttcatccgttgcggtagtggtgatatggtgctcaccttctggcagaggcgtagttggcgtgaactgccaggcgcctttatcgtccgcaatcgtcgaaccaatatgctcaccgttgtcgtaaatatcgacacggctgcccggctctgcagagccgttgaaggttgggtttgcgtcgtcggtggtgctgccgttgctcagatcgccgcgaatagtgcccacgtcatccgttgcggatcccagcacaggtttttccggcgcggtcgcatcgacggtgatatcgaaggacggtga

SEQ ID NO: 153748 - DNA, 132 bp, Enterobacter cloacae
atgttcaccgtcgcccagcggcttatccggcgtatagctccattcgccttcgtcgtcgacgatgacggagccaatttccttatcattatcgatgatatggatggtatcgcccggcttgcctttaccgattaa

SEQ ID NO: 153749 - DNA, 804 bp, Enterobacter cloacae
gtgtcgcatttaaaaactgactggctgtgtgttgccaccgaaggggatacggtagacggaagagtcattgaacggcaatggattatagatatgggggaaacctatgactttaatcattacgtagcattgctctggcctgaacacgatcattctggagccagtttcggggaggtgcttgaagctacctggcgcgatggtgatgatggtcttgcccgtttatatgtcagcctctgcccgaacatacgtctgctgtatgcaaatgaagaggggcagttactgttcttttctattgagccagaagaggactggcgggggactggtcgtttttaccttaaaggcctggcagtaacgaaccgtccggccagtgttggcactacacgaatgcgtttcagtgagcgcagattatctaaacaaggttattaccgttgtgtattgaccacagaaggcaaaattaagcagggagaaaaaatgtcaaagaaaaaatggcagtcgtattttggtattaagccgaagtttgaagaagagtccccgtcagaggaagctccgcagggagacgataaattacaggctcttgcaaatgcggtgaatgaaatcgaaggccgcctggccacgattgaaaatacgctacaggaaatgcagggtgatgttgataccattgcagaagttgtagacacggaagagtttgcagaattgcgttccaacgcaaaagaaatcgttaaccgctttaacgatctgggtagtaaaggcggtcagcgcaaacagcgccaggttccgtccaaatccgggaaattcaatttcctgtaa

SEQ ID NO: 153750 - DNA, 198 bp, Enterobacter cloacae
atgaactgctgtcacagggcgaatcgtgttaccgatagcctgatcgaatacctgaccgacattggaggctgggtcggtactgacaagcaaaacccgcttaccctgttcggcaaggcgaatagccgtcgcgcaggaaatggaagtttttcctacacctcccttgccagtaaaaaacaggtaaggcgggatattctgtaa

SEQ ID NO: 153751 - DNA, 663 bp, Enterobacter cloacae; identical to SEQ ID NO: 97239

SEQ ID NO: 153752 - DNA, 663 bp, Enterobacter cloacae
atgggtaaaatcttgcttgtcgtatcagataaaggtggggtaggcaaaagcacctacgtggctaacacaggctcaatgctggtcaacaaaggtaagtcggtaattatcctgaagacagataaaaaccacgatctgttgagctggaacgaaaagcggacagataacggcttactcactatcccggttcacgcagcttacggaaacgtcagcaacgaaattaagcgccttagtaagctgtgtgaagttctcattgtcgattgccccggccacgacagccaggagttccgtagcgccctgacagtatcagatatcgtggtgacactggttaagccgtcctctgatttcgaaagcgaaacactgaccagtgttacagagaaaatccgcaccgctcagaaagctaacgcagctctggaaccgtgggtgctgttcaccagaatcaactcagcgaaaccccgccacagaaaagcggccattgatctggataaattactgcgttcggacaacatctggattcaacctctgaaaacccggatattcgagctggatgtgtatgaaagcgcctgtaatgaaggggcaggggtacatgacgttagccgggcatcgagcctttcaacagcgaaagcacagattgaacttgtggcacaggaaattggcattttatag

SEQ ID NO: 153753 - DNA, 285 bp, Enterobacter cloacae
atggctttaaaactaaaccgcccgaacatcgatgaatctcagcaaccagcaacaaacgcagaaaccgcgcgttttatctccggcgctactagagcgcctgtagcgggtaaaccaaagttgatgaacttcagactgccagcgtactttgaggagatcctggaagcggaggcgcagagaacaggccagagcaagacaaccgttctaaaggcagcgctggccgcattcgataacctggacgagaacctgaaaaaccactggctgcttgaatctgcaaaattagggtag

SEQ ID NO: 153754 - DNA, 312 bp, Enterobacter cloacae
atgttcatattcagatatattaaaactcttattaatatctacttgttatacatccaaccgatattggggatgttacttataggtataggcttatgggggttctatgcacctgatgagggaacttgtactaatctcaatattgagttatgcgctgtatcagctattgatgttctgaagcctgctatttttgtatttttaggcattattaccgttgccggatggtactttaccgaacttcagccgaagctaaggggggagggcaagtatatgaaggtaaaaacaggtgtaaaaccggaagatttcgttaagtaa

SEQ ID NO: 153755 - DNA, 285 bp, Enterobacter cloacae
atgaataaatcatggcttgaacaacaggtgcaaaatgaaaaattaaaaaaagtacaggaagagaaaaaagatggcactatccaaaaaggattgtacagggttcgtataaaagacaaatacaggtgggatttgtgggaaaatgatttcagagttgttattgcttattcgaaagatgatgcagagctaaaatttacagaaatgacaggttttaatgagcattactatatagaaagcattgaaaaaatagtgctttcagatatagaaaaaatcttactggaaaactga

SEQ ID NO: 153756 - DNA, 354 bp, Enterobacter cloacae
atgaaatatcaggttaaagagtttattaacgaaaaatattctaaggctgttaatattttaaaggataaccttaaagaacactaccatattttttatggtttgagattaagtgagattctttttcctgccagcgaatacggctctgaaatgttttttcaggagtttgaagcgattaacagtgtaatattgcctttggtgatttttgatttgatagaccgaaagccgattatggttatcggcttcggtgaagtatgtggagttgattcacttgttgattctggtatagaagttgtttctttagacggtttaagcgatctgctactggttgaaaaactgacgccattatttaactaa

SEQ ID NO: 153757 - DNA, 444 bp, Enterobacter cloacae
atggctaaaatatatgagtttccgcagggagccgaacgaagtaagctgaaaaaagaaatcatccgggaacgtaaaaaacgattgcgagaaacgaacggtaacccggttatccggcacgctaaatggttctggttttatctacgtcttgctacggctggcgcactgcatttagtctctgttatttctctggcagtcctgggggctttcagtaaagctattttctggattggtggaatgctctgtgttgttacatggttccaccttgagcgccagttctggacgccgcaaaatttcacgattccagtaatcgtaacgctgtggggattgagtttgtttgccactcccctgatggagctgcttaacaaaaaaatgccgtggtatcgtcttctggttcctgatgcaaagcacactagcactgaggcaaccaatgatgatcagccgtga

SEQ ID NO: 153758 - DNA, 873 bp, Enterobacter cloacae
atgaggcttatcgtgaagacagtaacgggattaacgaaagttagacatagaaatgaagttggggtaactcttgcatccctttccctttcagcaaaaagagtgctttttctggctctttgccagattgatacaaaggaaatgttagatgatgatattttggaggttgatgctgactttttttcaaaagctacttctttagataaatatgcctcttatgcagctctgaaagagggagctaaagttctttcttcaactacgttagttttaaacagagatgatttaaaaaatttggctgatgaacttgggatactatcatctaagaataaaatacctgatcgcttggatttaaacttaacagaattctgtgcctattacgatcatcttgcaactgtacggataaaattcacaaatacagctaagcgatatttttctaagttgattggttctgaaaatagatataccactcaggtattgaaatcagttgtgttgttgaacagtgtaaactcaacaaacctttatcaagtcattaggaaatattacagtcagaatagttcaaaaaaatcttttgatatatccgtggatgatttaaaagaggaaatgggactttatactattgaggaaggggagaagaaatataagtatcctaaatactcattttttgttcgtgatgttatcaataaaagcattaatgagataattgagaaaacggaaataaatcagttatctttctctgttgttgggaaaaaagggagaatggctcacatgcttagatttgagtttagtataaatgaaaaatcctcatccttttcggaagatgatatggcatttttagaggagtttgacaaagtcgttccaccaaaaaagaataagtga

SEQ ID NO: 153759 - DNA, 516 bp, Enterobacter cloacae
atgaatattcaggaagcattaaacgtttttggtttatccggtgatctgactgaaaaggacatcaaggcggcatacaaaaaagcggctttaaaatatcatccagaccgcaatccattgggtgccgagctgatgaaagcagtaaatgctgcgtttgattttctcatggctaacattgataaaatcaatcagtttcaaagcactgatgaaaacgcacgttacaactacggtgaagatctggaaaaagttctgaatacgctttccggccttacagggattgtctatgaagttattggtaattgggtctggattagcggagaaactaaagaacacaaagacattttaaaggaaatgggctgtaagtgggcatctaagaaaaaacaatggttttaccgtcctgaagaacacaaaagccgctggaaccgtaaagaacacagcattgaagaaattcgtgaaatgtatggtacagcgggtaaacgtaaggcgtcaggctggacacgtgtagaagcaagcgcataa

SEQ ID NO: 153760 - DNA, 237 bp, Enterobacter cloacae
atgaaaaacaagaccataacggaagcggagctgataaacatttttgaaagttacggagcctacatttgcccggatgagatcgaagttacagccaaagaatgcaatgaaaatggttcagtcttgcaccgtggcttaaacgcagaaggatgggcgcatctttttgcgaaggaagaagcatatcagcaggaatgcgaagcccaggaagctgcaagtgatgatggacactttgatgaatag

SEQ ID NO: 153761 - DNA, 552 bp, Enterobacter cloacae
atgaaagaacagaaaaatttctttgaacggtataaaccggtgtttgaaatcgtttgtcgaatcctggggaacggctggcgtgtaaatctgctcgatgattgccagtacaggattaagctaacctcacctgattttaaaaattactctatacatattcgaatggagaaaggaaggttagttatcattggaagcgtagatagtcgcagctggagaagtccttaccatacttgcacagtatcgccagagcgtaaccctgtagaaatcgccgccgatattgaaaagaaaatcctgtcggatgctttagataatgtagatatggcgcgagagtatgaacaacagttacagcaaaaacgcgagaaaaaactgatcctgaaaggaatgctatctcgtttagtgcatcttgaaagctggcatgggacattgaccgggtttaaagttgagaatgggttagatggtaacgtatcagaacggggcgacggatatgaaatggtaattcgtggcctgagtgtagatcagctcataaaggtagcggggtttattaaacagctatga

SEQ ID NO: 153762 - DNA, 270 bp, Enterobacter cloacae
atgaatgaagtcctgagcgacaggaaaaacaaaggtaatgtaacatacaggattgttgtgtctgaagatgcaacacgtttgtttattgaacttgaaaaactgatgaaggtacgctctaaagaagcggataaaaaaacaactaaaaagattgttttccaaaaatcattttattacgaagaattctcgaacgttaaagatgaaattgatgatccaattttattgaaattctatacagatactattgtgaaggtacaaaatcatgagttttaa

SEQ ID NO: 153763 - DNA, 243 bp, Enterobacter cloacae
atgagttttaagccaacacctgaagaggtgaaacaagcacgtattaaagctggctttacgcagcaggaagccgctgaacggtttggttttacgttatcagcctggcaagccaaagaaacatccggtaaaacgtctcgtggtttagccgctggtacgtatgaattacttttgctcctggctgatgaacatccagattaccagctcgttaagagagaaaaaaatcaggataaagtgactaaataa

SEQ ID NO: 153764 - DNA, 339 bp, Enterobacter cloacae
atgaacacgtatgttatcactttccaggctttaaacactaagaaagaaaaaatcacctgctctgcttttgtccattcagaaactctcttccttgccgttcattctttcgaagataaaaatcgcggtcgtggttatgttatcacgtctgttagtgaattgttgtccgaggaactgacggcgaaaaattccctcaagaaaaatattaacttttggtttaatgagtgtggtttaagtaaatctgaggttataaacgaagtaattaactggaagaatttcgcatatacccttaaagaactggaggaagccaaaaatgaagcgataagagaactgcggagttaa

SEQ ID NO: 153765 - DNA, 165 bp, Enterobacter cloacae
atgtcggaacgcatgttatcagcaatacagactgttgaaaagggtgggcgtccggtttttcccttgatgccattctctgcttttcctgagtacatggcattactcagaaaagccctggaaaagaaagaaacaaaagcactgatagaaaaacaggaggtgctatga

SEQ ID NO: 153766 - DNA, 258 bp, Enterobacter cloacae
atgaaaaaacaggagtttttagattttatcagtgcagaacagaggcggggagctgtccggttttcgctgggatttaacagcaaaggggaaattgtattgcactggactaacgaggccgggttaagagtctggagtatactaagcggtaacaggggaaaaagtcccagccgggcaaaccgggaaagaatgagtaacctccgccgctggctccatgatgcccggcagggcatggaaggcgacacaccagaggcagaataa

SEQ ID NO: 153767 - DNA, 546 bp, Enterobacter cloacae
atgaaaaaagttcaattcaggattgaagaaagccaacatgatgatctacttgattgtcttaaaacactttatccagatgaaccgggtttaaccgtggcaaaaggaatgaagctgcttgccaatgctttactgaaaagcaaggttaaaaatgaagatgttaatgtgtcaaaagacaatgatgattttatcaaaaccacaatgtatttgacagggaaacaaagaactttaatagagaaagcggctcatcgtcatggctggaatttatccagagaatgtcgttatcgaatccagacgacacttgaaaatgaacttgattttttcgatcaggaacttctggtgatgaatcgttgccgtaatgcaatagataaaatagggcgaaactttcattatattatcgttaatgataatgccagagtacttgataaagatgggttctatcaggacgctgagcggttgagttcagagataatgagtctcaaaagtgagtttgaaaactacattatgttatgcaaagggcgaactgtttctaacaaggttgaggtgtaa

SEQ ID NO: 153768 - DNA, 651 bp, Enterobacter cloacae
atgcgatctaaagatctgcttgtgtggttgaacgcagcacatgtagctgataaagtttttatgagatgtaaatttgtccttttgttttttttctctgattcggggtcatccgagtcgagagagcgcctgaaaggaaaaactatggaatggtatgttttgcaattcaccactacgagatttgcagcagtttttgctcatctcgaacgcctgaacttctcttacttctgtcctatggagactgaaaggtatcgtcgcccggataagataatttcatatcgagaaagacgtttgccgctttttcccggttatctttttatccaggcagattttgaagaggttcattccactacaataactgctatcccttacgtacaacgctttatctcatttggcggtgagcctttacctgtaccagaagatgtgatggcggagcttttgtacagacaatcacatacaacagctcaggcaaatcttttaaggaaatcaattccacacgattttgctgaaattctactcatggataatccgcagcaaagaagtatggctttcatccactacatcacagagagaagcttaacccacaaaatgaaacggaagaaaaatgactgctacccgaaaaaaaaccgcaacgagacgcaagccccaacgtaa

SEQ ID NO: 153769 - DNA, 645 bp, Enterobacter cloacae
atgttatctactactgcttttgcggcgcttgctttgcaatgcgcggccagcgttcatcccgatactgcgcatgaagttgcaagggttgaatctggttttaacccatatgctattgccgagataataccgaaggttgaacgtaagcccggtgacaaaggcgtagtgtcctactttcccaaaactaaggaggctgcactccagatcgtaaatcaaattgaatcacgaaatcatcgttactcagtcggtcttatgcaaataacgagtacgaattttgcaaacttcaatacaaccgctgagaaaatgtttgacccctgcgaaaacctcaaggtttcagagcaaattttggtggattgttataaacgtggtggcgatattttacgtggcctgagttgctattattccggcaatccagaaacaggaaccaaacctgaatcagattttaataacaccagttatatacagcgcatagggtttaatccgcctgataacaaaaaaaactgggtggttccttcagttaaagatgcaatcagaaaggagaatgtaacacagagtatcaaacctaaagaagttaccgtatatccccaatatgccatgcgtggcactgttttagatgaaaaggaaacaaacgatgttaaaactcaataa

SEQ ID NO: 153770 - DNA, 291 bp, Enterobacter cloacae
atgttaaaactcaataaacgttatttaactctttctgtatttatggctgcattgatgctttgtgtagcagaacccgcctttgctgatgatgtatccactaaaacaactggcttcttgcagaagattatcgattttctgacggatatccgtaagccagcaatcaccatcattgcgctggtaattggttatatcgctatcttctcacgccagcatgcagcgtggattacgcctttaattatcgggattatcatctttattgttgcgccatatctgcctgactggttagcgtaa

SEQ ID NO: 153771 - DNA, 2754 bp, Enterobacter cloacae
atgagtaccgtttttaaagggctgacacgccccgctttgattagggggctgggcgttccgctctacccctttcttggaatgtgcgttatctgcgttttgcttggtgtctggattcatgaggctatgtatgccctcatcctccctggctggtatgccatcaagcgagttacgaagatagatgaacgcttttttgacctgctttatctgcgaatgcaaatcaaaggtaatcctctggcaaacaagcgcttcaatgccgtccattatgcggggagttcgtacgacgcagtcgatatatcgaaagtggacaattttatgaagcttaaagaccagtcttctcttgaagagttaatcccgtattcatcacacatcactgataacctcattgttaccagaaaccatgatctactggcgacctggcagattgacggagcttattttgaatgtgtagatgaagcggatctagccttgcttactgaccagctcaatacgctgatacgtagttttgatgggaaacccgttaccttttatacgcatcgtattcgggttagaaaagaagtgcgacctgtatttgacagcaagatcccattcgtcaacagagtgatgaacgattattacgaatcgctttcggcggctgagtattttgaaaacaaattatacttaaccgtatgctataaaccgttcagcgctgaagataaagtgacgcattttctttcaaggaaaaagggtaataaaaatatcttcgaagaacccattaatgatatgaatgaaatatgtggcagattgagcacctatctctcccggtttcattcccgtcgtcttgggttatatgaagaaaataatatagtttattcagaacagcttacgctgttccagaaactgctatccgggcgctggcagaaagtcagagtcaccaatagtccgttttatacatacctgggtggtaaagacctgttctttggtaacgatgctggacaaatcactgcctctgaccatgcccggtactttcgttgcatcgagatcaaggactactttcaggaaacggatgccggaatttttgatgcactgatgtatctcccggttgagtatgtacagacttcctcttttactccgatagacaagcagtctgcaatcaaggcgctggatgatcagatcgacaaactcgaaatgaccgatgatgccgctaaatccttgctcgctgatttgaaagttggtctcgatatggtctccagcggctatatttctttcgggaaaagtcaccagacactgattgtttacgcagattcgccggagcgtctggtgaaggacaccaatattgtaacgacgaccctggaggatttagggctgatcgtaacctattcaaccttgagtcttggcgcagcgtattttgctcagttacctggtaactacacgttacggccacgcctgagttctatcagcagtctgaactttgccgaaatggaaagcttccataatttctttacgggcaaggagaaaggaaatacctggggtaacaaccttatcaccctgggcggctcaggaaatgatatttataacctgaactatcacatgactaccgagcatcaaaattacttcggtaaaaaccccacgctggggcataccgaaattcttggtacgtcaaacgtgggtaaaacggtagtgatgatgactaaggctttcgccgcccagcagttcggaacgccggagtcttttccacctgagaggaaattaaagaagttaactacagtatttttcgacaaagatcgggcagcggaacccggtatacgttcaatgggaggtgcttactttcgggtgaaagaaggagagccgactggctggaaccctgcggctttgccaccaaccaaacgaaatatttcctttatgaaagacctggtgaggctactttgtacgcttaacagtgagccgcttgatgattaccagaaccgcctgatttctgatgccgttgagcgcctgatgcagaggtcaaaccgctcttatccgatcagtaagttgcgaccactcattctggagcctgatgatactgaaacccggcggcatgggcttaaagcacgcctgaatgcctgggtgcagggaggggaatttggctgggtgtttgataacccggacgatacgtttgatgtggacaacctggacgttttcggtatagacggaacggagtttctggataacaaagtactttccagcgccgcttcattctatctcatctaccgtgtcaccatgctggctgatggccgccgactccttatctacatggatgagttctggcaatggattaacaacgaagcgttcagagattttgtttataacaaactcaaaaccgcgcgtaagctggatatggtgcttgtcgtagcgacacaatcgccggatgaactaattaaatcacctatcgcggctgccgttcgtgagcagtgcgcaacacatatttatctggcgaaccccaaagcgaaacgtagtgagtacgtagacgagttggaagtgagagaactttattttgacaaaattaaagccattgacccgttatctcgtcagttcctggtcgtcaaaaacccacagaggaagggggaaagtgatgattttgcggctttcgcaagactggatttgggaaaagcggcgtattacctaccggttctcagcgcatcgaaaccccagcttgaactgttcgatgaaatctggaaagagggtatgaagccggaagagtggcttgatacctatctggaacgtgcaaacctgatttaa

SEQ ID NO: 153772 - DNA, 771 bp, Enterobacter cloacae
atgaaaaagcatatcgttgcggcacttatcgcctctgttacggttatttctggtgctcaggctggtgttcccgttgccattgatgcaaaccctgaatgggctgtcgaagcgcagcgctggacagaacgcctcaaacagtggcaggacaccgtgaaccactaccagaaacagattaatgcctataagcaggagctgctgaccaaaacgggcattcgtgatgttcagggactggtgcagtctgcgcaatctgtcagtaaggagctggagaatatttacgaccaggggaactccttcattgatgattacattaagaacccggaagccaccctgtctgagcaagccagatcactactggccgattataaggtgacaaacacctgtaaggggctgggatatacgggcgacctggtgcggggctgtgaagcctcgttcctgtcccaactggcggggatcgagtacggcaataagctggaaagtaaactgcgtgaagataatcaggaaatggccgaccttatcgaccaggtgaagaacgcccaggacacgaaagccacgcaggacgcgacaaacgctgtatctctggcaagcctgaaatttaacaagctcaaatttcagtatgaaatgtatcgcgataagcagcgcgatcttgcagaatacaaggagaaaatgttacaggctgctttccaggagaaacaattaggggctgttaataaagaaactccagttgttgattataaggcagcatttgagcagcagagttatgaaatgaactga

SEQ ID NO: 153773 - DNA, 930 bp, Enterobacter cloacae
atgaaaatgaataaaggagcgctaattgtggcgcttctgttggtgtcgcacgtctgccatgcagccgttacgccagcagccagccgttttgatccccgtaatcagattgtcagttataacccgcaaaacacgacagtcataaacagtgcggttggctatacaaccacactggtatttgacgaggatgaaacggtcatcagtgccagaaccggctttccccagggctgggaagtgaacaaagaagataacctggtgtatctcgaagtgaagcccgtcaaacagaccgtacagaagaacagtaccgatgacaatggcaaccagtcttcagaggtggtcagtgtagcccttgatcctgaaaacgacctggaacgctggcgaacaaacctgtttgttcgcacaacaaaacgtaattacagcatggagctgaacgcccgaacgttccggcagccggataagatcgcgtttgttgttaattaccagtacccgcaggaacgccggaaggagcaagccgaaatcgagaagaaacggattgaggctcttaacaagcggcaggaggagcaggcaatcaaccgttctcttgaaaatgcgaagtcgcccaagaactgggattactggaagcgggtagctgacggcagccagtcaatcagcccggattatgcgtatgacgatggccgctatacctggtttggcttcagccccctgaagaaaatccccagcgtctttgttatgagcggcgaacaggaaacgctgactaacccggtagtcaaaaacagcggtagtttcaccgttgttggtgttcctgtagaccagcgctttgttttgcgtatgggaaatcaggttgttggggttgaaaaccggggctttggcaaagtccgtcttccggcaggagataccgtttccccgaacgttgagaaagaggtgatccagtga

SEQ ID NO: 153774 - DNA, 1215 bp, Enterobacter cloacae
gtgagcgaacaggaaaataaaatcccgaccgctgtagaaattgaacaggcactacgggaacggcatcagaaagaaattgagcaaaacgataaaacggataagggagatgaagatgacggtaaatcagtaaaacgcctgggtatcgagaagcttaaaaaatcgcgtaaggggctggtgattattgtggccgctttccttctgctggccgccggggtgtctgtctactatatcccgtcgattattcgtgcaatgtccagcggtgatgataagcctgccagtaatgcggtatctactggttcagtaaaacgcgcgacaggactcagcgatgatgttgatccattcaacaccagggaagaaccggctaagacggaagaacggaaggaaagcagcggcaaagcggaaacgccaccggaaaaagtacaacaaaacttcagtcgtgcgctggatgtggcctatggggggagcagctctgcttcctcaaattccggtggtagctcatcaacggccagcaataccaggaacgagggggacggcagtgacaaacaggcagaggttcagcctgttaatgcagggcaacccgcgcagctttctaaaattacgcgcgttccttatgaccctaaccttttcattcctgaaaataccgcgattaagtgctcgctggacagacgatttatttctgatctggctggcaagctggtctgtacgattaatgaggacgtatacagtgcaaacaggaatgtaaagctaattgaaaagggaacagccgcatatctgatgtataaaacgggcacgttcaatcatggtcagggagccgtgtttatcgctgctacgaagcttagaacacgtaaggaacctttcattgatattccgctgattgatacacaggcggcgggagcgctgggtgaggccggggcttcaggctggattgacacacattttgcagatcgctttatgggcgcgatgatggttggcatgatccccgatgtggcacaggccgcaagtggagcggctaaaagtaataaagacaatcagaccgactatacagctaacagtcgccaggcttttgctgatatagcacgcgaagcgtttgcaaacagcgtaaatatccctccaacgctttataaaaaccagggggaaatcattactctgatcgttggtcaggatttggatttctccagcatctacaaattaaaaatggtgggtacccggaggtaa

SEQ ID NO: 153775 - DNA, 198 bp, Enterobacter cloacae
ttgataacgctggatatcaaagagttttcaatgctgttaggaataagggaaagcgaaatataccatcatattcgtaagggcataccaataaatggcgttcctttccccaaaccactgaaacaaatcaaaacgcatcgatttaattacgaagaagtcatgcgttttattgaagatcttaaaggaaaaggtgaattatga

SEQ ID NO: 153776 - DNA, 495 bp, Enterobacter cloacae
atgagacatttttttaatgttctttcctttgctgttgccctgttgccagctacattgtgtgctgctcagattcaggggaaagttattcgcgttctcgatggagataccatcgaagttaaaacactacccgcgaaaattgttgtgtatgaagttccgattcgagtccgattgataaatatcgatgcaccggaaaaaaaacaaccctttggtcgctggtcaaccaatcaacttaaagccctgctggcagggcaatcagttaccgtctcttatacgcaaacagatcgctacgggcgagtcctgggacgagtggtgacagcgaacggcactgaggctaaccgccagcaagtgctaaaaggggctgcatgggtttatgacaggtacaacaccgataactcattaccggctctgcaacgggaagctcagacacagaagcgcggcctgtgggctgacagtaatcccgttcctccgtgggagtggcgtcataaacaaaactga

SEQ ID NO: 153777 - DNA, 1263 bp, Enterobacter cloacae
atgggtaaattaactctggtagagcaggctttacggctccataaagaatattacggtgaagataattttggtactgtcgtaaaggattgtgattactatcctaaagtggcagagatttttataaacagaaagaatcgtaaaatttattcgaatcttgatatcgaacccgttgcttcaaccgtcgttcatacgggaagtagccctgttatggctaaagccgggaggattaaaaagcttatgtttaaagatggttcgggagcataccggattcatcttggtcaaaatgaagtggttcatattattcgcttcattcttaactctaaagtcagaatggagtacgcagttggcacaaccaaaagtatgtcgatgcttcataatctttgcgaagctggacgcgctaaattaaaccgctctttaccccgtaaaggtatctggaaaatcgggtgttacgacggcgtttattatcacggtaaggcaaggaaggaagaaatagaaaacgctttacgtttttctgttcatccaaagtttaatgagctggagaatgactttaatcagttcttttcggatattgatttctacacccgttatggtcagtcaggaatgcgaaaagtgctttttactggtcctccgggcacagggaaaacgactatcgcaaaagctttgggggcaaaatatcaggataaatatgtatttgtttatgctgatgattactttaaagatgtttgctatgccgcagctcaaaagaaaatacccgttatcataatagctgaagaggttgatgaactttatcgggctgatgccggaacgttaagttttcttgatggggctgatacaccgcgaaatcttgccgggacatatgttattttttcaacgaactatcctaaccggattgatccgcgcatcagaaaacgccctggcagaattgacagaatcatatctgtaggtgcttttcggactaaagccgctgccgcttgtgccaaaatgtacttaccagacgatataaatattgaccttaaagaacttggcgcggtgctggacagaacgactcctgctgaaataaaggagataataaatattgctattggcatgattcgcggaacaaaaaacgaattaacagtagatgtaatcaagaatgcgcgtgcctttttgaaaggaacccttgaccttagtgtgcaggaggcagaagaagacatagaggaaagggaagaaatctttaaaaagaatggtgcgcagcctgactattcaagttaccttgaggattga

SEQ ID NO: 153778 - DNA, 456 bp, Enterobacter cloacae
atgagtgaaaatgaaacgtttgacgcaacaaaaaagctactcctgaatattcgctctgttcgtgtttttgcgcgagaaaccagctttgaacaactgctggaaatgcaggaaaagcttaacgccgtgatcgaagaacgtcgtgaagaagcagagcgtgaggcagcagaacgcgcagagcgcgaaagaaagcgccaggaactgctccagttgattgccggagaaggtttttcaccggaagaactgcttggcctgtccgaagatgcgcaaaaaacacgcaaaaagacgttgccaaaagcgccgcctaaatatcagtttgatgaaaacggcgaaacgaaatactggtctggtcgtggccggacaccaaaaccaatcgacgaagcgttaaaagctggccgttctcttgatgagtttctcatcaaaaaagatgcttccagcactgctggtgacgaacagtaa

SEQ ID NO: 153779 - DNA, 651 bp, Enterobacter cloacae
atggatatcaaacctaactcagtgatccacctggagccaggcgaaacattacccggctataccaatctgaaacccgtacctgataagtatttcgatgagttaaaggcactcataaataaactcaatactcaatccggtaatatttacctcaagttaaaacagatgtacgcctttttggatcgttttaacaaagaatttgtgagcacgtttacctcctgtcaaaaggggtgctcttcgtgctgtaaaatggatgttcatttaaccgcgcttgaggcaacacatattgcacaagcaagtaaacttactgccagagacaacccgcttacgaccgggcatgagtcaaaatgtccgtttttgtctgagaagggaacatgctcaatctacaattaccgcccgctgttatgcaggacatatcatgtactcactccgccggagatgtgtaatgacctggatgcacaagtcatgcagtatggttctcaaagcgcgaacatgggaaatcacatctacaaaacaatagcagagtggatctattttcagacgtatcactgcactggtaagttagaaaccaaagatatcagagactacttcccttatccccgcgaagatatccaaagatttcttcaccataaccccccgcgccctttttgctaa

SEQ ID NO: 153780 - DNA, 822 bp, Enterobacter cloacae; identical to SEQ ID NO: 97170

SEQ ID NO: 153781 - DNA, 255 bp, Enterobacter cloacae; identical to SEQ ID NO: 97171

SEQ ID NO: 153782 - DNA, 276 bp, Enterobacter cloacae; identical to SEQ ID NO: 97172

SEQ ID NO: 153783 - DNA, 279 bp, Enterobacter cloacae; identical to SEQ ID NO: 97173

SEQ ID NO: 153784 - DNA, 147 bp, Enterobacter cloacae; identical to SEQ ID NO: 19093

SEQ ID NO: 153785 - DNA, 483 bp, Enterobacter cloacae
atgagtgataagatcatgcaaacagtagatctgctaatttcacatagtcaaatattgttacgatccagagactatgacgaaaagctgagtcagtggggaaaaggtaatgtttctcaaggcgctgttttacacaaggattatgttgtattcgatccattaccagaggacgcatttggagcaaacgtcaatatcaaaatagataatgcttttaaattagatcaaaatgcacaacgctgcattgttgttccattttttattacggataaaaataagatccagatcgcatctgcgacagagaaatttgatgtaagcattaacgtaaccggcaagatttattcgctcttttatgaggtttgtgaagggggcgagatttattataattttactcttgtgcctgaaaaagaagcaatccctgctaagtttttattagacgacccttggggagggaaaaaatacaatcctctaaaagagggttttttttaa

SEQ ID NO: 153786 - DNA, 1137 bp, Enterobacter cloacae
ttgtgcgaagaggtgcacctgaacctggcctatcgctggttctgccggttgggtctggaagacgaagtccccaatcactcgaccttctcgaagaatcgccatgggcgttttcgtgacagcgatctattccgctggttattcaatgaggtgctgcggcgctgcatggcagccggcctagtcaagggtgaaggtttcgccgtcgacgccagcatcattaaggcggatgccagccggcaacgtggggtggcgggagatgaggtcgattggaacgatccaaagctcagcagccgcgcagtgcgcgagtacctcgaagcccttgatgaagaggcgctggctgaggctcttcccaagaaaatttcgctcactgatcctcagtcccgttggacagcagcgccaggtggcccggccttttttgcctactccacgaattacctgatcgacactgagcacggtgtgatcatggacgtggaagctaccccggcgcaccgtaccgccgaagtcgattcgactaggacgatggtcgagcgtgtcgaggcgcagttcgatctcacaccggaacgccttatcggcgataccgcttatggcaccgccccgatgctggcctggatggtcgaagaaaaggacatcgaaccgcatgtgccggtgtgggacaagaccgagcgcaaggacgacagcctctccagtaacgactttcactggagtcaggacgccaatgaatatcgctgcccagccggcaaaccgctacgcagtgaatggcgcgccttcacccagcaaaggtcgcgggtaactaaggccaaaaccgtcatttaccgctccagccaaaccgactgcgccacctgcccgttgaaagcgaaatgctgccccaacacgccgaatcggaagatcgtccgcagcatccatgaggctgcccgcgacgtggctcgacgcatcgccaagacaccggagtacctcgtctctcgctgcgaacgaaagaaggtggagatgcttttcgcccacctcaaacggatcatgaaactcgaccgtttacgactgcgtggcctaacgggtgccactgacgaattcaccttggctgcgatggtgcagaacctgcgccgcatggccaagcttttgcctcaagggccaccgctgacgggatag

SEQ ID NO: 153787 - DNA, 1137 bp, Enterobacter cloacae; identical to SEQ ID NO: 6112

SEQ ID NO: 153788 - DNA, 228 bp, Enterobacter cloacae; identical to SEQ ID NO: 6111

SEQ ID NO: 153789 - DNA, 1026 bp, Enterobacter cloacae; identical to SEQ ID NO: 13729

SEQ ID NO: 153790 - DNA, 486 bp, Enterobacter cloacae; identical to SEQ ID NO: 119601

SEQ ID NO: 153791 - DNA, 219 bp, Enterobacter cloacae
gtgctgttgtttctcaagccctaccagaggtccaaggtttgcagcggcatcagggttcgcttcgagataaccgctccaggctcccggcaattcaagcatgcggatggtgtgaccggttggcgcggtatcaaatacgatatggtcatatttttcccgcagctcatgattggtcagcagaccagtaaactcatcaaacgcagcgatttctgtggtgcatga

SEQ ID NO: 153792 - DNA, 204 bp, Enterobacter cloacae
atgtggtgcgcgcacagtgagcgcgtaccgccgtttgcgctgacccaggaaacgcctgtggtggtcagggcatcccgcctgcgcagcggacgccggatgtactggctgggctgggcggcgggcgtggtggtgctggcggcgctgtggttcaccttctcctctgtgctgtcgcagatggtggcgcagattgcggggcagggataa

SEQ ID NO: 153793 - DNA, 348 bp, Enterobacter cloacae
gtgaatgaagataatatctacgccttgctttctcccctggcagaaggacgggtatatccctatgttgcgccattaggtagtgacgggaaaccgtctgtctctccaccctggattatcttttccatcgtcgatgatgtttccgctgacgtactgtgtggccaggcagagagcagggtttccgttcaggtcgatgtgtattccacttcgatcgctgaatcacgatccctgagagatttggcgctcgcttcgcttgagccgttaaaccctacagaggtggtaaaaatccccgggtacgagccggattatcggctctaccgtgccaccctggattttaaagttaccccctga

SEQ ID NO: 153794 - DNA, 450 bp, Enterobacter cloacae
atgattgagacgagcctcgatttttccggcctgaatgacatcgcaaaggatctggaggcgcttagccgcgctgaaaacaataaggttcttcgtgatgccacgcgcgccggtgcggaggtgcttaaggacgaagtgatcgcacgtgcaccggtacgcaccggaaaactgaaaaaaaacgtggtggtggtgacccaaaaaagccgccgccgcggggagatttcttccggcgtccatattcgtggcgttaacctgcgcaccggaaacagcgataacacgatgaaggcgaataacccgagaaacgccttttactggcgattcgttgagctgggcaccgcgaacatgcctgcacatccgtttgtgcgacccgcttacgatactcgcgaggaagaggccgccagcgtcgccattgccaggatgaatcaggctattgatgaggtattgagcaagtga

SEQ ID NO: 153795 - DNA, 450 bp, Enterobacter cloacae
atgaaaactaaatcagcaggtaacaaattggctacgtatctccagagtcattcaatcgttcgtgatagctcagagagttttagcggtaaaaatatttcgttttctgtttctatgccaattgagcgttattatcttttcaaagaaatatcaaatcgttacaacatctccatgtctcaaatcgttaacgtagctttgcatgctttcgattctgaattgctgctttccctcgatagagagtcatcttttgaaattggacgtgctgcggatgatgggattacggcagacattggcggtgagccagtttcttactggtattcaaaggttcatcagaaagcagcacaggaagattttgcgcgtttctgcgaggccaatcctgatattccagaagaccacttggatgatgcttatcagtcttaccttgctcaatctgccagagaggagattttttga

SEQ ID NO: 153796 - DNA, 291 bp, Enterobacter cloacae
atgctttctatgaccggacagcttttaaacgtctttgaaaatccccgcggcgtgaccaaagagggtcgtgagtatggtgggaattataaaattcaggttctgggggctgtcaccctccagaacggtgaaacaaaaaatgacctcgttgacttaacctgtcacgatattgcggcgttcaggccgcttttgggacagcgaatttctttcccgattggggttatgtcgatgggtaagaatcagactgttttcttcattcccaagggtgggatgccggagccggttgggggttga

SEQ ID NO: 153797 - DNA, 999 bp, Enterobacter cloacae
atggtgtcttacaaggatgcttgggatttcgatgctggcgcggattggtgctttacaaaaccgcttgcggttgtggggtcacatgatgccaatgtcaggttaaaaacatctggtttcagcaacgaaggccagtccggtactgagcttcatatcgacggaaatctggtgaaattctttcaggggcataacctgtttggcagttgtgacattgtgggtctcgtttgtgatttcatggatcacatctgcagcatggaatcgcttggcctgcatcctactgattttcagaaacaggcatggcgtcgggggctgtttaagctatcccgtgttgatgtgacgtccatgtatcggctcaataaccgcaacgatgtactgagctggatttcatccgctgaatattcctcgacgatggcgcaccgtgggcgtggtcagcttaccaaagggtcaacgctctattttggtaagcattcccgccggtggtctctcaagttctattccaagggacaggaagttaactgtaaggggcatcgtttgccgcttgaactaccttcccgtgataaacttctcgcgtatgcagagcctgcattaagatctgaattaacgctgcgttcaatgacattgaaagaaaccgatctccagttggcagcgaactggccgcgaaatgcggagggtataacccgtatatttgaaaaatatctggcagggctaaacatgagcgatactcgcaccattccggcagaacagcttgccgagttgccttctggcgctcgcttggcttaccagtcatggcttgagggtcatgatttgaaaaacatgcttccccacaatactttctatcgtcatcgtcgcgccctgcttactttgggtgttgatattgctacggtgcttccacgtgaaaaatcgaacgtggttcctcttgttcgcgttctggaggctatcccgatgggtattcctgattgggcttatggtacgccgttgtatcaccagcctgttggcttctga

SEQ ID NO: 153798 - DNA, 213 bp, Enterobacter cloacae
atgtacagcagactgttaaccacatgcctgatgacgatgttgatcgcgagctgcgggacaactggacccgtaaggattgaggtagtggacactgcttgtgactgggttaaacccatctatggtactgatcacgactgggatgtactggaccgtcagacgaagaaagacatcctggcgcataataaagcgtggaaaataaattgtgaacggtga

SEQ ID NO: 153799 - DNA, 627 bp, Enterobacter cloacae
atgaacctttggggcaagacaaaagagcttaacaccgcatatgcaattggagagaaactgtataaattcacagtttttatgctggtattctcaggcggttctttagcaggattgctggctagttttgatcctttttttaaaaatatgactttttttagatattttttagtaatcattctttttgtttttttgttatctcttatattttgctttataaactattccgcagcaagttcagccaagaagaaatattttaattcattggcaattactaacagtaacgtgaatccattaagtgagacctttaatgacttaatgattaatttggaggatttacgcttgccgatgagcgaggtacataaaaataaaaggttcaaacgttgtcacttggtaggtccaatgactattgctttaattagtggaaatctctccaactccaatcttgatttctgcgaagaaataatagcgttacctgagggagaatatctgtacttaccgggtgttataaagtttttagattgcacttttcttgagtgtacttttgttcaggttactattatgactactgctgggacggcaaaagcaattaaggatttgaatccaaagcagaaagtaataggtttgtaa

SEQ ID NO: 153800 - DNA, 198 bp, Enterobacter cloacae
gtgttcatacataccacgtccgtatatcggatcgaatccacctactttctcaatggcgctgcggtggtaatacagcatcacgccgcgctgcccggtgtaagcgatgtgcttatcatcccggtacaggaccgccatatccttcagcttattcgtccctgcaagatcgagaaactgataagccaggtgcggctcgggtga

SEQ ID NO: 153801 - DNA, 1695 bp, Enterobacter cloacae
gtgggcaatccgccgaaaccggtcggcttcatcgcttctgataatgtggttttcggtatcgagcttagctggggattcccggcgaacaccgacgacacgctgaagacggaaattcagtacagcctgaccgggacggaagacgatgcgatgctgctggcagacgtaccctatccgcagcgcaagtatcagcagatgggccttaaggcagggcagactttctggtaccgggcgcagctcgtagatcgaagcggaaacgaatcagggtatacagactttgtgcgcgggcaggccagcattgatgtatccgatatcaccgatgcgatcctggaggagattaaagattccgaggtatttaaggatctgattgaaagtgctgtagacagtaacgagaaactggccgagctttctgatgcaattaaggagaacgccgatgggctggctgccgccgtaggttcgaataagcagacagcagaagcaatcatcggcaacgcgctggctattgccgatgttatcgtgcgccagacagcccaacagggcgctaactctgcgacattcgaacagctccgggaggtgatcgctactgaaacggaggcgcgcgtaacggatgttacccgtcttgaggcaaaaactgcgcagaacgaggcaggagttaccgaggtaaggcaggctctgtcagatgaagctcaggcaagggctactgctgttgaccagctcactgcgagtactcaggtcatttctgataaagctgattcggcttcgagtaaagctgacgctgcatcaggtaaggcagatgcggccgagcaagccagctcgcaaaatactgctgatatcaccacgttgcgacaggttgtcaccgacacgacttcatcaatggcatcccgtctggaggaactgggagcaagaaccgatactgccagcggcggcatccagaataacgctatcgcgctaataacgagtacgctggcgcaggttgatcagcgggtgagactcagcgcgcagtacggtgacagcaaggccagcatcgatcgtcttgataacgtcatggcaagcgacagggaggcaacggcgcgttcgctgctgagtttgcagactgacgtgaacggcaacaaggcatccatcaacagcctgaaccagaccttctccgattaccagcaggccaccgccacgcagataaacggcatcacggcgaccatcaacggacatacctcagcgatcaccaccaacgcgcaggccattgcgaacgtcaatggcgacctgaaggcgatgtacagcatcaaggtcgggttatccagcaatggccagtattatgcggcagggatggggatcggtgtagagaatacgccgtccggcatgcagtcgcaggtcatcttcctggctgaccgcttcgccgtcactcaccaggccggagccacggtgaccttaccgttcgttatccagaacgggcaggtaattatcagggatacggtaataggtgatgccactatcacccgagcgaaactggctgaaacaatcagctcggttaattacgttcagaaccaggctgggctgtccataaacttcagaacgggcacgcttgagaactacggttcaaccgctggggaaggggcgatgaagcagactaatcaaacgatcagtgtcaaggatgccaacaatgtgttgagggttcagatcgggagaatcacgggaacatggtaa

SEQ ID NO: 153802 - DNA, 570 bp, Enterobacter cloacae; identical to SEQ ID NO: 13730

SEQ ID NO: 153803 - DNA, 141 bp, Enterobacter cloacae
atgcacgtcaaatcccatgtctgccagccttacggcgatggcagcagccattgtggttttccctacgccacctttgcccatcagcataatcaggccgtgttcactgcgagcgatatcattgaccaggccagagagcgataa

SEQ ID NO: 153804 - DNA, 240 bp, Enterobacter cloacae; identical to SEQ ID NO: 80558

SEQ ID NO: 153805 - DNA, 408 bp, Enterobacter cloacae
atgggttttccatcgccagcaaccgactaccaggaaaacaggctgtcactcgatcagcactgtaatacaggagcgccgggagtattcttttttcgaagtgatacctactctttccgggaagggataaagcctggtgcgctgctcatagtagattttgggggcacgcccgttgacgggtctttggtgctctgtgtcctggaacaagaattcaggatcatgcgattgcgactacaccccaagcggtgtctccaggaactcgataagctggataacttgagggctatacctgatgacgatgaggacgggttggaggtcaggggggtcattacgcacattgttaccgatgcaaggggtcgtctcagaaaacggaatctatggtcactcccgtttttgcaacaccgattttga

SEQ ID NO: 153806 - DNA, 315 bp, Enterobacter cloacae; identical to SEQ ID NO: 153744

SEQ ID NO: 153807 - DNA, 675 bp, Enterobacter cloacae
atgaaaattaaagatagattcaacctatctcacgtggttggtttctttgtcggagttgttgttactgttatatttaactgggtagtatttaaagatccaaaacgcatcacagcaccaggagtagcagcattagttgctatgagtacgtttacactggcattatggtctgcttctcaagttagagaatggcttagcaataaaattaatgaaacaggttataaacaatgtgaattaataatagaaaaattaaggcgtgtcattgttaacctatattacataagacatttcttcactaggcttagaggggctaacaaaaataatggagaatttgatcgaatagctaaagaactttccccaatatttgaagagtacattcaaaactcaagtgagttaatcacagcaatggaatcactcccatcatggaaaattaaattcatccttaaaccaatagttaatgaggcatatcaccttctaaataaaaataaagtatcaactattataagatctactttagctctattgaatagtgaagcgggcacagaaaaaaagatagaatacgttaataaaaactgcaaagacgtcctattatcaattgatacagtaacctatcgactgttaggaattatctcagcaaattattataaaaaatttaagcatttatcacataactcttaa

SEQ ID NO: 153808 - DNA, 210 bp, Enterobacter cloacae
atggacagtttcagagaacaactacgtaaaggtgtagcctttactaaagaactaaagccttacatgaacagaatgattcacaaagtcacgggtaagtgttccactactgaagagggattctgtgagtttgacttaagtgaacacgaaaactttttccttctcaaaccttccaggaaccattctaagcgttgtaaaggagtggtgcgataa

SEQ ID NO: 153809 - DNA, 801 bp, Enterobacter cloacae
gtgaatgtgatcaataaagtatggcactttgttaaaccgtatatcttcaagtattacgttgctttcttttgtggtggcatgttctggatgttcctggatgtgtacgttactaaagggatagatgcctcttttgttagtgcttttgctgatattgctttagtagtttttgctgttcttgctttttatcaagctaaaagaatttgggttgatagaacaaagcaggatggttataaaattgctttagatttgctgcatgataaagcattcaagattgccactagtaatagcgatctgtacactgttttaaggttagctaaagttagttatctaaaattaagtaaggatttgataaaagatgttggtgatagcgttaaatattgtgaaaatgttgatgctataatcgaaacattaaaaatccaaataaaacaacttgatgaacaatatgatgatattgttctaccattaaaaaaagatattgaacaatctctttttaaattacgtaatatgtccgtgaaattttcgtctactactcaggggacattgttacgtgagatctttagcaattacataaaatttcataatcttatgcgtaaatatagcaatctgctattttcattgaagtatccgttggaaaacgaccctgaaacttatgaaaatattgattttattatagagcggattgaaaaaatagtaggggaaattgatgaattgatatgtctaatagatacaattaaaaaaaataataaatgtatagtggaagatgaatctagcactttattagactattttgattttcagtaa

SEQ ID NO: 153810 - DNA, 780 bp, Enterobacter cloacae
atgagtaatctcaataagaaagtaatcattggtttagctgtgtttttcatgttggctttggttggtaatttcttctattcaatctacgcgaaaatgattgataagagtagttataccgattggatctctgctttctgtaatgttgtaatggctggggctactgttgctgctgttcttactgctagaaactacttagcacagtttacggctcaggaagggtataaacttgctattcatttagttaataacgatttccctcaacttggagataatcttaaggcaatacttaatggatttgaacagataaaaaaggttcttgatgaatctaaagtaataggaagcataaatccagatacagcaccgcagttaacatcactattgtgtaatcctactgaaaaattaacaaagctatccgatactataattagaagtatttcaagtatagaaacatatggacttaagatgaataaggaaagggatgatagccacttaattattagtcaatacatccttagtaatcatttgagcttttttgagtattctgaagatttaagggcgtgttttgataacatcataaatggtgatttttcttgggaagaaaataataaattggttgttaatacaagagattattatgaactcatagataagactcagcaggattatgttgatgttgtcgaaaaaaccaattcaaaaatcaaagaagcaaagaatgcaatagcggcttttgataaaatggttgctaaaccacgccacataacaaatattttcaaggtttga

SEQ ID NO: 153811 - DNA, 726 bp, Enterobacter cloacae
atggctaaactaactaaaaacgaaactaaactacatcagcaggcattagatctgattcactctaataaagtattaacattcgatgaatgtgaattcatctttgataattattgtggtgatgccattggttctactggtgctttcttcactcctaatatgttcagttgggattttgcgattgacgcaggtaatactggttcatgtcttgaactatgtgctggtattggtaggttatcattcagtatctatcacagatataaaccagaacgattagtatgtgtggaattgaatcctgaatatgtagagataggtaagcgtgttctaccccaagctgaatgggtttgctctgatgtgttccagtataccagtagtgaaagatttgattgtgtttatggcaatccaccttttggaaaagttaaaacctctgatgattatgtaggttcttacactggtagtgagttcgaatataaagtaattcagtatggttctgccttttcagactatggtgtatggatcgtaccgcaaggtagtgccgggtttgtttatagtggtgctcgctactatgaacgtagagaaagtagtaagtataagaagatggctaaagatactggctatgtattcgaagctggatgtggaattgatacttctatctataaggacgaatggcacgggacttcagtagtctgtgaagtggtttgtgttgattacacaggtgaggactactga

SEQ ID NO: 153812 - DNA, 318 bp, Enterobacter cloacae
atggttgttttagatctaagccttgcgtatcgcatgactatcacgtctgtagtatgtccggtgaacatgtttaatgtagttgtcagttatgagcaagggcattcagtcgttactgtaactataaccagtagtgaatacatcatagagtatggtaaaggtttgaagatggtgattaacaaagatgactgcgacactgacaggcttttccagttgtgtacggtgcatccgtttacgattgaggggttagggcagttgatcaccagtgctggattgtgttttgacttagtgttggagtgtacgcaaacaaagatagggtga

SEQ ID NO: 153813 - DNA, 1734 bp, Enterobacter cloacae
atgagcactaacagagaaatagccatccatgctttaaaaagatatctaaatcggaactttgcaagtcatattgatatgagcaacgttgggagcagagcggcagatagggagtacaatcttctttcgagatgtatcgcagcgatgtctgttaaaatgcacaataatgaagtagataacgatatttgtgctgatagtgtatgtgatggaagtgatgatcatggtgttgacgctatatatgttaatcacgaccaaaaaactgttactgttgttcaatcaaaatttgattctagtggaaatgggtctattgcaagaagtgaaataaacgatttccttaattcatgcaaagaaatcttacttgaaaagtacaacctatttaatgataaatttcgccgattcgaacctgatttggataaagcgtatgatgcaacatacaaatatatatttgtcttctcatatagtggcagaaatgagttaagtgatgaagtcaaaagtataattgaacaaaatgaaaaagaacttaactatgatataggtccagatgcaacaaccatatcaattcttaatttagataagttaagagagtttatgagcaatcctaactcagttgaaattgatatggatgatgttgaagttcttcagtacggattaagtgataatccgttacctgcggtacacggaatcattactggtgatactgttgctaattggtggaaagaatacggggatggactctttgaaaaaaacattaggggaggtcttggtgacacatcagaagttaaccaagcaattaaggacactctgctaaacaggccggaatttttctattattttaataacggcataactattttagtagattcttacgaacctagaagacggaataacaccagcaggagggaatcgggaggttttaactttaaaaacatgagtgtaattaatggcgctcaaacaataagtactatagggaagagtttctcttccggtgaggtaacattagatgaactcagtaaggttaaaatttcttgcaggttcatcaaatcccttatcaataatagtgaagagtcagggaacgatgttgacgatatatccttagacataaccattgccaacaacaatcaaaacaaagttacatccagagattttgcatctaaagatcctctccaacttgaattacgcagatcaatttccttagaaataccttatcaatatgagataaaaaggagtgaaaatcccgttgtgaattcatcaccgtatataatggatatggatgacgctctcaattcattaatttgctgcaatccaaccattagaaacattgcaaacctgaaatctaatagaggtcgtttttttgaaagccttactggccctctatacaaaagcgtatttaatcccagcgttaccagtgttaaagttattaactcagttaacgtttatagaaaatgtcttgagcatcttttaaaaatcgagaaaactcgttccactaaaagagacgagaaaattgttattcatggacgttatgctcttatatcaatcgccatgaatattcattctagaataacaaatgcatcctctgtaatttcacttgatgccttacctgaatttgatcaagtattagatgaatcatatgcgaccattgctaattatattaatgaaaattatccaactagtcatatgccgcgtttttttgaaaatcagcaaaaattgaaagaaatttataatctgttcaatatgtag

SEQ ID NO: 153814 - DNA, 774 bp, Enterobacter cloacae
atgttttttatatgcaataattcgttattatttaatccagagacacatgcaattagcctggtcggacaaccagagtcggtattaaccctctcggctcccgctgcccgacttttacaggagttcattcgtaataaaggatgcgatctcagccgggaggtgttaatcacacgtgtctgggaagcatatggctttaccccatcaggcaataatcttaataaggcggtgagtgaactacgtaagagttttcaggttttgggtgagtgtcaggagatgatcgttaccttgcctcgttttggttttcgttttgatgcggaagttgttagccacccaaagctgcttttttgcgaacccaacccggagcctacaccggttcccgtatcgttcaacagtaaaatatcgcaaatatggaatcgggctcgtctcacaagacgggcaggtcttttcgtgctcactgctgccattataggaattgggtttttattatatcgtttacattacgtcattgcgcccgtagaacttaaagcaattaatgaaaaaatcggaagttgtcgattctggtttatcaacgaacaggatcggccattaaaaatgtcaaaaatatcaaggttgcttgaggaaaataatgtcatgtgccaacaggaggaatacgatatttattattttagtgaacgtcttacactttctgctgcggatgagatttttattggagcgtgtccggtaaataaaagcagaccttgcaaaagtattcgttacaaaagtggtccagaagaatga

SEQ ID NO: 153815 - DNA, 477 bp, Enterobacter cloacae
atgaaaacaaaactcctgtttggactcgggggggcgatggtcggaagcttgatggttgtggctttctctccttcccaaaacgatacgcaagatgtcctggcttgtactaccgaatttaattttacccgaaatgagggaaaaccaagcgaagtgaaggtaaatgccatagctcagttctatgtacgtgcggatggtaccggcttaacgacctataaaggcgcttcaaggataaaagggaaagagatgattgtggatcgcgacgtgaattttacttgggagaggcgaacgaatgaccatgttattatgttgacctataagaatactttgcgtcggcataatgacaatacgcccgatgcgctgtggggaagctttgcgcgtcccggggcgcgttattacatcactctgtccaaactttcctcttctgtgtggatgatccaggatcggctctatcccacctacatttgccgtgaagattaa

SEQ ID NO: 153816 - DNA, 834 bp, Enterobacter cloacae
atgcatatttttgatgggaatggaaataaacttgatgcagagtgctctgtttgtgaagaggatggaatttatggactaatccttgaatcttgggggccaacacataggaacaaggattataatacagcacttgattgtatcgttgagagactgattgattccggtgtagataacgttattgtatatctggcttcatccacagttagaaaacatatgccatccataactgaaaggaaaatccatcctggagaatttttctctcttaaaggtgataatcctcgaaacattcgcttggaaatgtgtagttatcaggctcattttagtagtacaggtaaaaaagatgttccttccgggaacagggcaaagcgaattatgataaatgttcctggtatcaatggcggcgaattttgggagcagatagtacttggggaattatcagaactttttcaacctacagaagatgaggctgttctaaatgcaagggttagcaagttaatcaaacaaaatttaagcgaacctaaaggatatcaatcaccactagtagtagagcgacttcaaaaggtctatgctcgagatcctagagtgaagacgtggatattacagaaaagtaatggaatttgtgaaagctgtggtggaaatgcacctttttatataaatgatggaatcccatatctggaagtacatcacgtagtacctctttcgttatccggtactgataccataagcaactgtgttgctctttgccctaattgtcatagagctttgcattatagtcaaaatgctaaagagctaattgagatgctttacaataaaatagagagattgcagaagtga

SEQ ID NO: 153817 - DNA, 357 bp, Enterobacter cloacae
atggcttcagttaaggtgacggctctgtgggtaggggatgaaaaatcgagtatttcattcgtttctccagttctgaatgacaacaaactcaattatgacaatgcttccttcggttttggcgttgtagaaaactacgagacatggggagtcgaacgatacccatttgtaatggaagaatttgggaaaggtttagcccttcttgattgggggtcaacaatccaaaagaacattgccacaattgatgttttggatgtacctctaaatgttgacggcatcattacatacaacgaaattgacgagaacgggtcgcaacgtgggccttatgtctaccgaatttcgactgtggaatcgttttaa

SEQ ID NO: 153818 - DNA, 474 bp, Enterobacter cloacae
atgtcgttctccgcactttttagtgcccacatccagttagcaatgtccatcagccactacattagtgccagagacatgatcagacatttagcccctcttgctttggccaccccattcagaaaatttgagtggagagataaaaaaaagcccgctcttttgaagcgggccaatcagttgactatttgtaaggtaggtgtgagtgaaaccaatgcctcagtagtgaagctgtatcggctgattcacataaggttcaggagaaccaccgagcattcagtaacttctcacgacttaaagcgtagcagtagttttcgaagtcataaaaaaaggcctgcgttttatggcaggctctcaaggaatttgaaacttgtattgttgttttcatggtgccgggtgcctcccggtgactctaccccagtcagcaaagacgcgcgcatacctgcagacagcagtcgactggaacgccctttcgcttag

SEQ ID NO: 153819 - DNA, 195 bp, Enterobacter cloacae
atggaagaaggtttctactggatacagcacaacggcaggattcaggttgcctactacaccaatggtgtaaccgaggatcttgaaacgggccaaacaataactggtatctggcatctgactcaaggcgatgacatttgtcataacggagaagccgagattctctcaggcccactttctccaccagtcatcaaataa

SEQ ID NO: 153820 - DNA, 492 bp, Enterobacter cloacae
atgaacaataaagtttcacaaaacaaaacaatagataaaaacgaagttgatctatctactttaggtaaagaaatttacagcatcgaaggtgtaactgagttaaaagaacgagaagtaaaaaaagaatcaaatgacataaaaaccataacaggtcaattcaaatataacacaaacaaattcaattacatcatgattgaaagaaatggttatcttttcattaattttagatttaacgtagagtacgaacttattgatgtaaatgaaaaatataaagatagattcaatctactcgagcatgtaaacgaactaaacaaaagaaatcttggactcaaaacctttatagaaaaatctgacgaagataaactcctggtttcttcaaacatagaatacgtattacacagcggcataggtgattttaaattcgtaaacaacgctcttgagattctttccatatctcaagcattcacaaagattggcaaagatagcgagtaa

SEQ ID NO: 153821 - DNA, 564 bp, Enterobacter cloacae
atgaatattatatcgtatattatttgctcatttttgatgttttttgtcggcaatattcagaactggttaaagccttatctcattagccatcaatatccttcatggctttatgattcttttcctttctatgctattatttatgttgcggtagggctcttcagcacattcatagctcaagctctcaagccaaaaactgcaactgaaaaagaaatttccgacctcaaaagacaagttaaaagacttgaaaaagagaagcaaaaagaaaaagacaagactatttttgaagaatcaaaaaaacatcaagctgaaatttcaaaaatacgcacaaaccatcgagaagaaatagagaaaaggtcaaatgaatatgaaaaagaaatattaagacataaatgcacaataaaagcaaaagatcaattcatatcatcaatgacaattcagttggcagaaaaatttgagacaattgaaaattataacaaagaatctgcaggtaactcaaacaaacatgcaagcacaacgaaaaataacgttggcagcataatgccggatataggcgactactcttaa

SEQ ID NO: 153822 - DNA, 582 bp, Enterobacter cloacae
atgcacagcgctgaagagtacaccatctctatcagacttgagagcattgaaggcgagaaattgtacgttgctcgcattgaagagcttccagatgttgaggagtatgccgatacatttgaatttgctcgcgaactggcccttgacaccattcgcactactcagaaaatttttgttcagaagggaatggcttttcctgagcccaagaacttcactcctcaagcagaagtaagcggaagagttaccttaagattacctaaaagccttcacgcttattgtataaaatcatcagaaagcgaaggggttagtttaaacacgtatttaattagtcgccttagctcaaatgacaatggacacgagcttgctgtaataaaaaaattaataacatccatgcatgatgaattacagcaactaaggaaagaaagcggtcttagcaacttattcgttaagcatgctttaacacaggtgtccaacgttaagacattcgcatcaactgtgagattagaaaccagcgaagaggaaaggtcgaccttgaaagttaggaactttttatcttcgtctttagggaaacaaatgaaatgttag

SEQ ID NO: 153823 - DNA, 426 bp, Enterobacter cloacae
atgttagaatttttgaattgtgtaagcttatattcagctatccctaaaatccaaaaggtcaactttgacagggagttaatagctgagaatgaggcggaaatcaatatggctattaaaactgatatagccgagaataccgaagattctccgccttcaaaattaaaatttacattttcagttaatgcagtggctttagctgaagatgacactttaatttttgaagcaattttggaagtagagtattttttccgaatcgtagatttagaagtttacaactcaatcacagataaagatcagttaaatctatgtgccaatcttactttcctggattttagaagaagacttataaccattttatcgggtgtaggcatgtccggaattaaaatgcctttgagcttcatgaagttcaatggtgatatgcagtaa

SEQ ID NO: 153824 - DNA, 2745 bp, Enterobacter cloacae
atggataataatacagtaattaaacatgttaagagatcaaccaataaagaagtaaaggtttctttaattatcatgtggctgatgttttttataagctcttggttatttttgtataatgatattcttggcgataaatactcatggctctttatttctccatcatatttagataaagggaaacttacatggataaatggttcctggggagcggtactgtcaatacatggaacgattgccgcattgtcaataacttttatggggatgtttgtgcagcaggtggcagatgcatcgaataaagatttcgttaatataacaaggcagttggttcttagggaatataaattttatcagtttagcgtggatgctatttgcggattgttgtttgggattttctttattgttgtaggtggtggcgttatccaatatggtttttccatggcttgctctttatattttataatgaaatatatggaggtatttaaacatttatacttcataacagaaaaaaaagaaataatcgaaaccatcttgcttaggaaaatgaaagtcgtgagtgagtatgtttatgaaatgaataaaaagagccgcgccatcaaagcagaatatgatgagtttttgaaacaatgcccatcattaaccgtaaaatatgatatggacataaatggccatacagaagtgaaacttgatgatcctttcttgcttagggataaaattattgtaggttttaatgaaaaggggctgcgacggctgcaagcgcatataacgaaggaatatgatggtggacatgtaagagtatatttatctcctggtttttacgactcgtcttttataaaagacgtttacgtttttcatgataaagaatttctgattgaatcatttgattctcttagagttttgattagtaagtgctttaaacatgatgatgtaagtgaagatttatatttttactatgaaatagagtctaatataattcaaagtacgtttagtgcattaataaatgataatggtaaacaactagaattctgtgtggaaaatttatatttaattattagctcctctcaagagctaaacatttttagaaacttagaacgattaatggctgatatgccatcagcaaagaacatgcctataggtatgttattgcatttttataaagatttaaattggaaactccatcatggatatccacactcggccgtggctgtatttgactcaatgctttctttgccaagatatatttatgagcctcaagtttattttacttacattagtatgtctcatcagtttattaaagatagggttagatattccagtaatgaagaatatttcggagtttaccttaaatcttctattaaaaatcttgtatatcggcaatatgatgttttaatgttgaatgcggattttcttacgcaggaattaaatttattacgttctaactcctatgatcagttggatgaacgtcagacaatgcttctcgaagtaacaaaaacaatggtttcgtatataagtattcgaatggaatatcttaaatcgaaagttgatgataagcgtttaaatgaactcattcatattgaagaaattcaaactctttcaaattgcttgcaaaaatggcttaatccagagtttctacaggaagtttactatataccaaaaacatatgatgttttgttttccagaacctctaggttcgaaagtaatacagatgaattagaattaaaagaagtaggagaagggcgagtagtcggtatcaatatcggttatcacagggctgttgctttggcattattgttttttaaagggattacttataacaactcccttagcattatctacatcaacgatcttgctgactttataaaaaataacaatctaactaccttttttatagacaaaatcataaattttattaaatctgactcctttaaacaactgattgagctattggagttaagtcagcgacaagatgaactcgttgattttgaaagtcgcaaggataatttacttgctgcttttgaacaactcaaaagtaaatcattacaagtggcgttatctggagtcataacttcatcgtataatcaaaaacttgttcaagattataataaagggctgacaagtgattttttaaaagcattgaaagaacatgttgacttagaggctatccataatgacaacttttcttccaatttggaatttgagtttcaaatagataaaagagagttgctggatccaataaatggggaatacttctctcagtcccattcaatttatgctaatgaaattatgaagtccataatattaaaattggttggtgaaatcgatttggacaaagtaaacgtaattcctattaatgatcctaatgccttgccagaaggggttaagttcgtaagcatgaattgtttggaagatgactttgagtattcatggagattttaccggggtgtgagatttaagagagatgaacgtgttgaaccttttacagataatggcttttattacattgatctaagcggctgctatgagttttacggcaacatagctcatgttttgaacgttcagttcggtaaaaccacagctgaattattgagtaaatataatttcgaagttagcgaaagaaatatggaaactaatgctcggatgtttgtttcactcatgctgcgctgggaacctaaagagtctcaaaatgttttctttatttctgatggagattgtagagaatatttggctaatgttgacaaaaaatcgtaa

SEQ ID NO: 153825 - DNA, 1074 bp, Enterobacter cloacae
atgaacaataataatgtaacatcttcaaatatgcgtctatttgcgccagatttcataagagtgatatctttttttatgattgtattgttccattataatgtggaaatatattataactaccccggttttttaaagctcggtgaattgtcctatttcggacagacaatgggtgatgttggtatttctatgtttatcattatttccggattgtctttggttatcagcaccaaagacaataatgactatgttctttttctgaaaaaaagagtgcttgcaatattcccatcgttttggataagttatttaattgttgctgcacttatgctaactatcaaaggcagttttgttggagatgggcattattggaagttcattctctcaataattggtcttgatggcttttttctttatcggatgcagaactattatctggtgggggaatggtatacaggttatatgattatcacatatctattctttcctgtgctgtatgaagctatcaagaaaacgccagtaatggcatggggagtcgtgtcagctatattttttgctgttggacttaactatcaaaaactgttctctgtttatattaattgtaatcctcttatgcggttgccagattttttatttggcatgagctatgcttattttattttaaagaacaaaaaaaatcgtctctatgcaatgttagcaggaatgttagccttagctattgcagttcctgctcgtgaaagcataatgccgcaactgtacatgttaatttttggtgtttctttattttcaatagctgtttatttgattgagtttttgggaagtatagactggctcagaatcattaccaattattttgcaaaacatgcattcgttgcatttttatttcatcatcagattctctattttgtcatgagtaaaattggcgggcgtatttcttcagggcttgagtctttgtgtgtgtttttatttatacttttctcaagtgttgttatggcaatattgacggagcccttagtcaggatcttaactaaaaaaatgagagctatcttgttaccttctgtttcgacttccagtcggtaa

SEQ ID NO: 153826 - DNA, 774 bp, Enterobacter cloacae
atgatacacataatagtagtaagtcattttcatgatgattatatcaagtcattaattaataaaattaatgaatctgaatttgatgcgagctctctatttagaatatacataaaagataatgtaaatagcctggggttgcgagagttttgcgcgagcgaaaagatttgttatattccatctcttgagcgttcggggttttcacgcaataacaatcatgctgttgcaaagataattgaagattattgcgttgacgttcaggaagattatttcttatttctcaatccagacgtattggtcgatgctgacacgcttaaacaattaagtggaatacttgcatgccaaaaatatgatctctttacagctgatctctacaaagatcagaatttgactgtacgagatccctcagtcagacattttcccaaattagttaacttctttacttcgtattttcttggttataataaaagtataatagatcgctctgatattaacactcatcaggttgttgactggtgcgccggttcttttttagggatgaaatgctcggtttttaatcaaatcaatggtttcgatgagcaattttttatgtactgtgaagatattgacatttgcatcagagcaaaaaatgcaggttataaattagtctaccttcctgaattaaaagtagtacattttagtcaaaatgataatagaacattgtttagcaaacattttctatggcatctgaaaagcgttatgtacatgtttcgtaaacatgttttaaaagtttgctga

SEQ ID NO: 153827 - DNA, 921 bp, Enterobacter cloacae
atggttgcactgatgacaagcagggataattctcagccacacaaggttatagcaattgttgtaacctttaatcctgtaacaaccaatctatcgtcactggtctctcagttagagacacaatcctatcgaactattatcgtcgacaatggtagtgaaaatattgaggatatttccaggctacaggcttcctgctctaacgttgagcttttgtccctttctgataatatcggtattgccgctgctcaaaacaaaggtatccgccatgctctaactcttggcggagattttacattattctttgatcaagatagcagtatagctgaagattttgtcagcaaaatggtcgaagattttgtatctcttaagcagagttacaatattgctgctctcggaccaacactgcaggatagccgctataaaaaaatatatcctgtaattagaatgtccaggcatggcttacgcactaaaatcattcccgatataacatcatctaaacctgttgaagtgtcatgtattattgcctcaggatgtcttgtcgataataaggttttattgttagacaaccttatggacgattcacttttcattgattatgttgatactgaatggtgtttaagagttattagccatggttttaaaatctttattactccaaatgtcattatgcagcatgaaataggtgatgctcatattgaaatgttggggtttgttattcctgttcactctgcatggcgtcgttattatcgagtcaggaatggtgtttttatgttgaaaatgcctcacattccaaagctattagctattcgggaaattgttttttcttttgtgcatcaaatgattttactttttaaaagtaaaaacattgaatacctgaaggtatatttccgtgcaatgtcagatgcagtcagaaaattattatga

SEQ ID NO: 153828 - DNA, 789 bp, Enterobacter cloacae
atgcaccacgatgttgtcgcaataacataccctggggctaaaaaaacgtgtacctcgaatgttgttgagatggatattttagaagcgagtgatgaaaaaatcatcgaggttttcgcggattttgatgcggtacttcatctagcctggagtgctggttttaaccatcacgatcaaggacacatcgcaaatgtgatgaagcactatcgtttcttaaaagccttaaccattgcaggtgtacaaaatatttctgtcgccgggactatgcatgaaataggctaccatgttggcgagattactgaaaatacggcttgtaatcctagcaacccttatggaattgcgaagaactttttacgtcagatttgtacctacgaaatggaaaaggccgacgtttcattaaaatggcttcgtatgtattacatcactggcgatgacagaaatagcaattctattttctcgaaaattatagccgctgaggatgccggtaaagaaactttcccacttaatagtggagaaatgctgtatgattttatcgacgttgaatgccttgcaaaacaaatcgcgacagcgactatccagacagaggttgctggagtgattaactgcagtagcggcaaaccgaaaagtttacgtacagcagtagaagagtttatagaacagcatagactcaaaattaaaccagtttataatgtattcccagctcgtgcctatgactctccagctatctggggtaatagtaataaaattgagcaaatcatggcaaatggttgcactgatgacaagcagggataa

SEQ ID NO: 153829 - DNA, 762 bp, Enterobacter cloacae
  misc_feature (160)..(169): n is a, c, g, or t
atgtcctcgctatttatcacatttaaggacattggtacgagtgataaatatgattttatttgccgtttgcattcaaaaaaatctccgcagaatggctttgctcgagctgattcgtttaaaaaacatctttacgagaaccttcttagcacacctgaatatnnnnnnnnnnatattggttatcctacgatgggtcacgcttggtttgctaattatcagccaactgctgaattatgtaaaaaacttggtgttgttgttccattggatgatgatactcctgttgcagtatacggaacgatgttctggttcaaacctgctgcattgcgccctttatttgaacatgactggaaatggacagattttaatgctgagccagcacatgttgatggaagtttatcgcatgttctggaacgcattattagttatgtagcaaaaaatgaaggtttcagtgtttataatgtaatgacaccaacacaggcagaaaaaaactatgctaagttagagtttaagcaccagaaaattatgtctgcactgccaaacggtgacgtttactggcaatattcaagcttgctcaggttgtttgcaggaacaaaatcaggaaaacctgatttcttcgctgttttaagcggatgttcccgattgctgtttagtgcattcagagttacggtttggcataaatatccccgcgtggctaaaatgctatatggtccatatcgtttagcgaaaaagatctataaactttcaaaattcaagaagaaaaactga

SEQ ID NO: 153830 - DNA, 642 bp, Enterobacter cloacae
atggcgaaaagaggcggtgacgctgctgccatccaggcggcgacgccagtcacgctgaatatggtgctgtcaaaccggcgctcaatggaggaaaacgctgcgctgctgaccgggatgaaatcagcgtttcaactttcaaacgacaagattgctcacattggcgaccttctctcgatgacgatgaacaaaactgccgccgattttgccggactgagcgacgcgctgacctatgccgcgccagtggcgaaaaatgccggggtgagcatcgagcaaaccgccgcaatgggcggtgcgctgcacgacgccaaaatcacggggtcaatggcgggtacgggtagccgcgccattctaagccgcctgcaggctcccaccgggaaagcgtttgaggccattaaggaactcgtcgccaaaacgtccgacagcaaggggaacacgcgcccgatattctccatcctgaaagaaatgcagcgcaactttgagaataacaacctcgggacaagccagcgcggcgagtacatgaaaaccattttcggcgaggatgcctgctcggcggcggttctgatggaagcagactcaagcggcaaacttgatcggctcactgccgcgttcaaagcctcggacgataacctaggaactggttaa

SEQ ID NO: 153831 - DNA, 336 bp, Enterobacter cloacae
gtggtcagctctgctgacgatggccattggcggcagattgtcaccattgaggatgcccttgccgatggttgcaccctgttcgacctcgacctgcttaaacgcgaaaacagtgatgaggactttaagaacctgtttatgtgcgagtttgtcgacgataaagcgtcggtgttcccgttcgaggagctgcaacgctgcatggtcgacgtgatggaagaatgggaggacttaaccccgttcgccgcccccccccattcggatcgcggccggtctggattggctacgacccgtcacacaccgccaaccgcgccgggtgcgtcgtactcgcgccgccggtag

SEQ ID NO: 153832 - DNA, 279 bp, Enterobacter cloacae
gtggaaaacttcactctgccgcatgaggtctcgcctgatatcgtgtttcacctgctggagcccgacattaatcaggagatttacggcctacccgaatatcacagcacgcttaattccgcctggctgaatgaatccgcgacgctgtttcgtcgcaagtattaccagaacggcgcacacgcgggttacatcatgtatgtgactgaccaggcgcagagcgcgaccaacgtcgagccgctgcgcaaggcgatgcgtaactcgaaagggctcggcaacttttag

SEQ ID NO: 153833 - DNA, 1671 bp, Enterobacter cloacae
atggaaaatttgattaccattccgcacacagaaagtattaatcggttactggtctactttttttgggatgctgacggtattgttgatgactatgttttgcactcgataaaagcgctaggtgagcattcatcccaaattatagtagttgtaaacggagaagttaatcctctcggatacagaaaacttcgctccgtctctaatcagttaataattcgtgaaaatattggtctagatgcaggagcttacaaagctgtatttgatcatgtcggttatgactacctaagctcatttgaggaagttctagttacgaacttcactttatttggtcctgtgttctctctttctagcttcttctcgaagatggattctacgccttgcgatttctggggacttgctggttataacgaaaaggtcaaaggccaaagcgatattgagcatctccaatcctattttgtggcgtatcgtcaatctctcacgtcaacacaggacttccgtaattactggcaacaactgccaaaaatagaaagctatcttgactcagttaacctccatgaattggctcaaacgccttatttctcttccagagggtacactttcgctagcttctcaccgtcggagaaatactcgaatatatctccgtacaattttgtcataagttgcgctgatcgtgttcttatcgaggacaattgccccttcatcaagcgcagagctctcttcttcgttaatggatattttgagcaaggctcaaacattcataaaatcgctcatattactaactttataaaatgtcataccgattacgatattaatttaatgcttgaaaatatcgagcgaactcaattaccgaaaccccctaagatcgaaattgaacctaaagaacatatcactcgttataggcattgtaaacggtggcttggttcatatatatatccaaaaaaagaggtccgtgacctcctcaaaaaacttttgtgggaggaagctaaccctcctcaacctgaaccctttgtagcagatcctcataatttgtgggaacagtatgtcaattgctttagaaagcagaaactaatttcaactccttttcaacttgtgccccctcaaatccagcacgtagggcgttacacctatgcagctcctgacacacatgtgcattgtatcggtacagtcatcggctcattctgctctatagggcaacgtgtggtaatcggacatggtaaccatccgaaagactttctgtcatcatcaccatttttctattttgatgaactagggttcaaaacaagcgaaatgccgactcacgatcggttctggtacattgagcccgtcatcataggcaatgacgtatggatcggtgatggagctttcataaagaatggggtaacaatcggagacggagccatcatcggagcgaaggcagtcgtaacgaaaaatatccccccttatgctatcgttgccggtatacctgcagaggtaattggatatcgctttgatgaaaagacaatttgttcacttcttgaaagcaagtggtggaatttaccagatgatactatccggcagatacctttcgatgacatagaaaaggcggtagaatttcttgctagtattaacaacatacttgtcgatgaacatactgaaaaggttgaagttattcccaccatgcaagtcgtgagttaa

SEQ ID NO: 153834 - DNA, 1212 bp, Enterobacter cloacae
atggttccgaagctgcgctttgaaagctattttgacaattggctctcaaataaattatctgatttagcagtcgataatacattgagcaatggtgtatttaatgatcctttaaatgttggttctggatataaactgataaatgtcgtcaatatgtataaggaaccatgcattgatgagaatgatttgtctttacttactttagatgaaaaaacttttagaaagaatcaagttttttttggcgatgttttttttacacgttcttcattagttaaagaaggtattgcatggtcaaatatttatcttggtcactcagaagatgtaaccttcgatggacatttaattaagttaacgccagatttaagaaaaataaatccaaaatttctttatttttgtttgaaaacatcattggtcagaaagcagttaatcgagagtggtaagactgctacaatgacgactattggtcaaagtgatgtaggcaaaacattagcttttatcccgcagcttgaagaacaaaccaaaatcgcagattttctgtcctctgttgacgaaaaaatcacgttactgaacaagcagtacgacctgctttgccagtacaaaaaaggcatgatgcagaagatttttagtcagaaatttcggtttaaggatggtggagaaaaggattttcctgaatggggagaggtaactttagaaaacatagggagttttttttctggaggaacgccgacttcaacaaatagaaattattataatggagttattccatttatacgatccgccgaaataaactcagattcaactgagctttttatttctgaagaaggtttaaattcatcttctgctaaattagttaacaaaggtgatattctatatgctttgtatggcgccacaagtggtgaagttggtatttctaaaatacatggagcaattaaccaagcgattctttgcatccgttctacattaaacacaagcttcctttattattttttgaaaagtagcaaagagcaaattgtatctacctatattcaagggggacaagggaatctatcagcagaaataattagaaagctgaaagttccgaccccctcgataggggaacaaaccaaaatcgccaacttcctctcttcccttgacgataaaatcgccgccaaaaaagcagaactggacaagttgaaaacctggaagcagggcctgctccagcaaatgtttgtataa

SEQ ID NO: 153835 - DNA, 756 bp, Enterobacter cloacae
atggaacatgacaattcttcactggttgagttgctaccggaattttttcaccaatggccaaaaaacctggtgtgggccagagaaaaagataaaaaaacaaatattgatgcatctcagctaactgaattcttcagccttctctctgaaccactgaaagttgttcagcatcgatctttatcttttgatccctgggaagtagcaggccttgggcgtaaagaagttcgtaacacagctgttcttgcctggcttcttgatcctgaggggactcatggtttcgggagactacctttacaggcattcctgcaggcaatacgacacagcagaaatgatatccctgaagattaccttcactattgtcgggtgcgggttgaaactaatcctactggcgataataccaatcgtgttgatgtagaaatcaatgcggataattttttcctgcttatagaggtgaaaattgatgcgtatgaacagccagaacaagtcgcccgatactgttctgatgctaaattgcgcgcaatgtcacgtccttgggccgttatctttttaacgcctcgtggcggaaaaccgctgacctgtggcttagatttcaaaccagaggatgttccctgtatttcctggcgacatctcgctacagctttagagtcttcgttgcaacaacattacaaagaattcatttctgccaatgaaaactcgccttcacgccaaatggctgcccatgccgcattttgctttcttaatcgagttcgtacattttaa

SEQ ID NO: 153836 - DNA, 648 bp, Enterobacter cloacae
atgaatccacacagcgatgcagaacgtcaggccggtatactgattctttcgcagctaaagatgtttaacgaagctgttgtttattttgaacagcatttaagccctgccttctggaaaagctttgatcagtgtgttgaaagatttatgaaagacaaccgctgggtaggtaaagcaaattatgaacatcaggattattgctggctagcccatccagcctgggtcattgaaggcgttaactgcaaatattggtttgaaaacagttcgactgttactgaagggaatgattatattttagccgtcctgacaggtacgggaaccgagcaggggcagtttggttttgagtttaaattgaatgctgggtattttggtggagtcaaaaaaattgctaattatgcgagtaatattcagcaatcctatcgtgagcaactgcagacactagggatattggaacaagggaaaggtaactatttcctacctatcacgattgaacctaatttactcactgaatgctggaaagagcatggtgagtttccagtggaacatgaagtatttttcccattgcaaacagctcttgaaaagctactacaatctacaaaaattctggatgctatatttttggccgaagcgcagattgcagtaagtgaataa

SEQ ID NO: 153837 - DNA, 402 bp, Enterobacter cloacae
atgcagcaagaacggggttttaaaaaacgctatatactcgtacctgtcttattcgcactcgcctacgcaggatgggttttatttttcaccaacttccctgtcgaacaagaattacattcaaaagtgaacgttaataagtgggctgttttgtacgttacacaagctaatggcggagctatgacatcctttacctatcattactatttattagatgcaaaaaaaagcgaagaagattttttaacgcatattgaccaggccacgccattcatggtgactaacgatcctgcggtgaaaatcgatgttaaagacgatggtgtatatctgcgtgttcgaggtgacgtatactctttccataatacgtctaaacttgccaatatccttctgaatgcatcaccatattga

SEQ ID NO: 153838 - DNA, 828 bp, Enterobacter cloacae
atggcctattattacgcctatcacagtgcatctaattccagcaattttgattacaacaagggctatggtgttagtccaggtagtgagaaaaagctgagtaatgtaaaaacaggcgactttgtctttgtcatccaaaatgttcataaatctgtgggataccagctttgcggactttaccgtattgaagggatcgatttcgaggagggaaacgtttacccccatcgtgtgcagttgagcgatgtgtctaagctagatgattttattacgcttgatcgccacgaactaagcaaagttctgcctccagcgggcaaagaatcccgttgggatcgcttcatgaatcacttcgctcaaacaggaagaacattccagaagcctctggacgcgacggttattgccatcctcaaggaacaacttaaccaacagcgagtggactgcgaagatattccaggccgcgatgaaaacgacttttacgacaaagtcagcaaggcgttaaaactacaatctgaggaaagacgaaagcggctgcaaaatgcgtctgttcatccggcgaaaaaacaggtttccgtctggcgttacgatcgtaatcccgatgtggtggccgaagtactcctcagagctcaaaataaatgtgaatgttgtgatgcccccgcgccatttcagcgtacgaaggatgggagatattatttagaagttcatcacattattccgctatcagaaaatggggaagacaacgtagacaatgctattgccctttgccctaactgtcatcggcaggagcattacggtgaaccgcggatagataaaagctggcaacctggcaaaaaataa

SEQ ID NO: 153839 - DNA, 786 bp, Enterobacter cloacae
atggctggcgaaaacctgtccagaatgggcgcagcaaaaatccaattgattgcagatcaacatggcaaccaggtaatagagaaatgccctgttagtgatgttgaatacagcttttatgaacatgcagcagatccactctgtggcgttattgaatcccctcgactgttgcacgcagatacccatcgacgcagcctgacgctcgaatacgttcctcataagatctcccaggaagaggttgcaggggacgacatactgaaacgactttcgagccttcatgattatcctgccgatcctgcatggatttatcacacccatacctggtcagagtcagcgcttgaaaaatccttgtctcttttggaattacccatgcgtgctgagcagcagatgcgatgttttcaacaagcgggcagcattttgtttagtcaggaatgtttaatttctggtgataccaatgcgggtaactggggaagaagagaaaacggggatgtgatccttttcgactgggaaagattcggtactggcagtccggctatcgaccttgctccgctggttcaggggatgggctcaaaacaaagcattttaccacttgccgagcgctactgtttttttgccacgcattctgatgcttatcaactagccggggaaattactatcgccaaagcatggattgtcacagaagtggtgttattactgcacgaaaggaaaaagcctgatttgaatctttaccttaactggtacagaaaacacctccctgattggcttgaagagtccgtctcatctctttaa

SEQ ID NO: 153840 - DNA, 1389 bp, Enterobacter cloacae
atgactctgaatgaattttcatcaactacagcatctatttttggcaattttgaaaaaatcataaggatgctaaaaagcataagtgaccctaaatacataaccgttgccaacagaagaagcaaattcttggaagatatgtcagagcatatttccataatcaataaattccatcctttcgcacatgctgagttctttacaaaagaagaaaaagaaaatattttttcactactaaaacttacggacaactacatatcatctatgatttctgatattttttcagatgatatttatcggagcattaccactatcaatgatgatttaattagatattcaagaatatctaaatttattcaaggcacgcataatcaacctaacaccttagctatgtttaaaaatcaagcatctaatgagatagccaaagtgaaagatctgaaaaatgaaattgaaataagtgctagtcaaatcagagagttagcagaaagaaatgcaaattctcatgataaaatcattaaacttgttacggacttgaacgccgagacgaaaaaatttgaaagcgccggttctgaaatagaactcatactaaaaaagagtagagatgcacttattggtatagaatcatctagtgaaaagctaagaattgttgaagaaacattaaataatatcgttaatgtaaacaaatcaatgcaaggcgaaatcattaaaaaatctgctgagtctgccagtgagattaaaaatctccttgataaaaaaactgaaattgaagaattaagaaccattatatctggtgaaataaataatgcgaaagaattgaactctaaagctaactccgcattgaatttatctggaacatatagactatcaagacactttagagatgcatacaaaaccgcaaataaaaacaaaaggttttgggccttagtatcaataggagctgcaatcgtatgtatagcattcgtggtttatatgcttgtcaagatgaatgaagtgagttcttatcctcctacaggccaagagccccacttattactattattttttgctcgattctcaatgattccagtattaataggcttctttgcatttagcgccatacaatatgtaaaacaaaacaacatcagtgaagattatgcacataaaaaattgctatctgaaactcttgtatctttcaagcaggaaatcaataagaacgataccgataaatcatcattattcatggataatattcttaaatcagtattaagatcaccgcttagctccatagaaaagaagtcacatcaaatggaaattgataaaataaacgaattgattaatacgacatctaaaattaataaagaaattatagaccgcgttttgcctgagaaagagaaagagaaagagaaagagaaataa

SEQ ID NO: 153841 - DNA, 195 bp, Enterobacter cloacae
atggaagaacgaaacaataagcagcacgataaaggtggtacggttcatatcgatgctgaaaccataaagaagatcgaggagtatcagtcattcatacctaaaaaccacccggaaatgcctgtccctaccaaagggcagattgtccgtaacagcgtgaatcactggcatcaccagacgctgggggcatgggtatga

SEQ ID NO: 153842 - DNA, 531 bp, Enterobacter cloacae
atggctttaaattatttggatttagaccaacagacacgtattcatatggctgaagaaattcagtttgataaggatcacaacaacttttatttgagtaattacctatctccagagggaaaggcgcagtggcctgcgttactagaagagtctgtgcagcacgatgatcattggttagaaagtgaaataattaatcggcgattacttgcagagttttacccaaaaagaaaacccaacagcatggagatgacacaagcaagagtccctcgtacagcagcacaaacactagcggaaggtgagtttaacaggctgtatgcaaggggcttgtgtgccagagttatctccgaagggggacatactgtagaggcataccgagcgagacattcagaaaatccccgaccagaatcagaacgtataatcggtcataaatttatcccacaggatattattcaagatttacgctcaaaccatggcgttgatacggcgattggtgtccctccgggacccaactcgggaatttcgataaaaaaataa

SEQ ID NO: 153843 - DNA, 465 bp, Enterobacter cloacae
gtgaaactgaataatctgtatctggtaagccgtccgcttttcccggttcgcctaattgtcgtagatacgctggcgcggtgcttcggtggtaacgatgaaaacgatgctcataacatgggggcgtttatcgaaggctgcgacgtcatcaagcgtgagactggcgccacgttgctggtggtgcatcattcaggaaaagacgataccaaaggcgcacgtggttcccgtgctttcagggctgcgctcgatgctgagttcaatgtccggcgcgagcgtgatggtggggcgataatcctgacctgcacgaagatgaaagatgcggaggagccaaaacaggcagcattcgatttgcgcacggtggaactttctacagatcgcgatggcgaactgatttcttcgctggtggttaatgatgttccacgagaggcaaaaggtgtagatccagagttggtagggatagctaattaa

SEQ ID NO: 153844 - DNA, 252 bp, Enterobacter cloacae
atgaggaacgtgttcgagcgtcaggctgcgtcgatgggtatctgcgtgcaacagtcgaggggattcaataacgccacagagtggatctgctgcatgttcataaaagctgtattcaacatcactaacagggcatttctctattacctggttgccatgttgatctgcaaccaattggatttttgctgcgcccattctggacaggttttcgccagccataccatcctcagccacacgtttggttacagaacgtaa

SEQ ID NO: 153845 - DNA, 471 bp, Enterobacter cloacae
atgactctcgatgttttattccctgtaataaatattatctcgccgcgtaaatttagcggcgatgcaaatatgcatgagttaataacattactttcagcagaaaaagaaagttcagaagcgctttcgcctttcttgcatcgactgcatcttctgtctttcgcccaaagcaatccgggtaacgccgaagagttgctctctgcgcatttacccaaagacgacgggatccttccggttctggacttcgcggactggccccgggtgcattacgccgcttcaggcgaagttcagacgcctgaatctgaggagtacttccgtaaaatgacatcggctaccaatctgttacgttctgcgctgatcgaagctgaacgcgcaaagggaacccctgcgctatatatactggataaattactcaacctgaacagcgccctgccggaaagatataaaaagatggcaaatattccctacgcataa

SEQ ID NO: 153846 - DNA, 1827 bp, Enterobacter cloacae
atggtacttactcctaaacagattggaagagcagccggtcgtatatttgaagtcagtttaccagccagttgggtatttagatcccaagaggatcaagatgactatggcgttgatggtgaaatagagctaattacagaaaatgaaaaagcaactggatttatctttaaagcacaaattaaaggtcagaatcacgttgagataataaataatggagagtcggcttcattctctatttctgtagagcgattaaattattatatgcaccagttggatattccaatagtattaattgttgtggatattacaacaaaaatggtctactggaaatgcctacaagatgataatgaattattgagttgtttaagtaatgccattagtaatgggagtaaaactataactgttcatctctccacttccaacactcttcctgaaaaaaatgaagagttgatattgtctgtcagtaagacgatggattggttaaagttacatgccgtaaataaaattcaaaagccgatagcagacttgattaaaaatagctcctcgaatttaatttctgaacttctgaggagaaataaggaaatgaatttttatctttacaatgaacaatatgagcggttgttactttctggaaaaaaccaagagttatatgatacggctattgttatttttcaatccttgtcagaattagttgaaacgagatttaactctggcttatatatagaaaaggtattgatgagcgctcagattgatgaggatgtaaaaaatgagcacttatttaatcttttctctgcgattatatcgatagtgagaaaagataagggtaaaaaacatttaagggtttattcggttttccttttgcgtatgtttttacttaaagggttgatagatttagattttcatgcacaattaacaaaaattcaaacagaagcagatcctctcacttcgtggattgtaaggcagggtaataataaccttgtaattcagactgcgactagtgttcaaaaaataatttatagcatgaataaaatcataatgttaggtgataataatctgattgttaattgtctaactagatgttgcaattcattggcattatatgcttatagattgaagttagataaaaatgataagcaatctttagctctataccaatggttggaattttgcctcaaaatcgctttgaaatcttctaaggaaaatgaagatcaaacatcatacgctaatctcattattctttatggtaagcataggtattattgtgagaactacagagaatatattgaagaggctttagtattatctggtgagttagatgatcaaagtgtgagggatgagataaaaacaatttttgataatctaatattttccaaggaagatgaaagctctcaatataaccctgaaacagaattaaaatttttcactgagagagccatagcaatgggtttcaaaatagatgaccctaacgatgatattggaaaactaataaagacaggtctagaagactataatccagaacgcgttataaaaaattgtgaacatttatacatgttcacatccaactcattgggaattccagcaagaacgttagggttatattcggcagcttcaaaatttttagtttgcacgaagaagaatcacgttatgggtggatggagactcgatgatatttattcatttattattggcggtggatttaaagaacaatattgtaagggatgtaaagaatgctcaccaagaccggattcatggaaatggacaagtaaatggcaagagcaacaagtagaaatacataaagagttagtgggccgtttgaatagaattttatag

SEQ ID NO: 153847 - DNA, 567 bp, Enterobacter cloacae
gtgaaacttattgatattttggttgaggaattgcctaagcgtggaggatggccagagggctcaactcgatgcatgcagacagatgggctatatgtaacctttcctgatattggagaccattgcgatttcgtggcgaaatgcatggccgaaggagtaagaatcgcaacgcgcgaacaatatgaaaccgcacttgcagacagcaaaccaaaatgggatggcgaggggttgcctccggtgggtgttaacgcagaggtgttctttgccgccgacacagagccaaaatggcattccttcttagcgaagtttattggtgaaaatcatgttattgctctggttggcttggaagaaattagctacaagaaagacgaacttctaacatcggatgttaagtttgcaccacttcgctcagaggaggacaggaagcgcgacgaagttggcttggcgctttaccatgctatcaactggaatgcagaaggtgagcttgtcagtccttctagaatggaggactacaaaaaggcattcgacgccatcgcagccggaaagattccacacatccgcatcgactag

SEQ ID NO: 153848 - DNA, 243 bp, Enterobacter cloacae
atgtacgacaaatatcaccttagtcgatgcgatgccatggaatggcttgctgagcactatcctgtatttcctgagtcgatgcctgatgtgccgatgcgtgtcgagtggtgcagcgaaaacctatttaagggatgggcgttcatcattctcctggatggcactctggcattcgcggactgcttgtcaccatgtatccgcgctgaagatatggaaggcttcaggctaccggagatacagatataa

SEQ ID NO: 153849 - DNA, 786 bp, Enterobacter cloacae
atgagcactattaccaaacaatggctccagcagacaattgcggacatggaagagcaccgtgacctgttccctggcgatctggatgataaccacgaaaatgtgctcgcggctcttcgtatcgcgctggcatcgctcgatgcggagcctgccattcaccggtggcgtcgtgtgacctctgaaccatacggcccctatccttggcattatggtgattttatcggcttctcaaagcccgttgatgggattgaggatgagtatttttactccgcccctccagcgccggtatctgtgcctgattaccctgacgtcctgccatgtccggtgatgctggagcctgggttgcgctttggaaaaggcgtgcctaccagaacaatgcttggagcattacagcgtcgcgctgagtattacgcagaacttgaagctatgacaccagaacagcgtgcggagcatgatgcaggcatgaatgagttcgccgccatgcttcagggtgccaaaaacgccgaatcgcgctgcaccatccagaccgcgccagcactggattctttaccaaaaattgccgcgtcgcgctgcagcaactctccggtgatttcagacggttgggtggcttgcagtgagcggatgccagaaacatacgtaaatgttttactgacggatgaggctgaagacacttgtattggtcagcttgaatgtgaggatgatgatcatttttgtatcaatagttcgaaacaacgatataaagcgacccactggatgccactgccagcagcaccgcagcgggaggcgtga

SEQ ID NO: 153850 - DNA, 213 bp, Enterobacter cloacae
atgagagatgaaagcaacagacaggagcctatggctccttttttgtatgcggttgtttacccatccggtgatgtttttgcaacccacaaaagcaagcgcgttgctgaaggtattgcacatatggaacgcgagtggaatcagtgcgaagtaattaccctatatgcaaaacaaacactcatgacagcgtggttaaaccagagggcgaagaaatga

SEQ ID NO: 153851 - DNA, 852 bp, Enterobacter cloacae
atggtaattccacaggtggttagcttctctggcggcaggacgtcggcataccttgtttacctgatggagcagcgaagaaagtctggcgatgacattcactacgtctatatggatacgggggctgagcatccgaagacgtatgagtttatccgaaatatcgtcaagcactggaatataaacctccactgcctacgtgtaatacctgacccggagatgggaaaggctagcagctacgaagagttaagcgttgacgagattggccccgacctaatcccatggaagcggatgctcaataagtacggtcacccgtatgttgggggggcgttctgcacggacagaatgaagtcggtgcctttcacgaaatactgccaggagagattcgggaaaggaaattaccacacatggcttggcatcagagcagatgaaccaaacaggcttagggatgcgccggggtttagttatctggcagatatcagcgatttcgaaaagcaggatgtgctcgattggtgggaagagcagccatttgacctaggaattcaggagcatctcggaaactgcgtattctgcatcaagaagagcgtgcagaaggtcgcactggcaaccatggatgagcctgaactggcagcacaattcgtagacgtcctggaaaaggaaatccacacaggtagagagcctgtcatgtaccgcggtaacaacactctcaaatcgcttatagcgctattcagcgacacatcacgcgatgagctcgcttcacgaatgacctccatgcggcaatacgatacaggctcatgctctgagtcctgcgaggcgttttcatgccagcttggatttaactttgaggatgctgcatga

SEQ ID NO: 153852 - DNA, 309 bp, Enterobacter cloacae
atgcgcctgacgatgacagacaaaacagagattaagcaaatcatcgcgagctttaacgacgatgacaatgcagcgattgataagcaggttgagatgctgtgcgcgaacatgcgcccggtgctcaacatgctggaagcacacaagcctgacgattacacgaaggatgcagtcgagtggcttggcgaagacgactgcaactatcaggaattcgctggcgaggttatgtgggacatattcagaccgcgcgtagaagttgagtatgcgatcggcatattcctgcgtaggcacacatttggggaagcagcatga

SEQ ID NO: 153853 - DNA, 147 bp, Enterobacter cloacae
atgtcaccagttataaatcacagcctgctcaaagcagcgcagagcaaagcggttatcgctcgctatctcgggaatgctcagatgtggctgcaggccaatgagcagatgaaatcagcagttggcatgccgtggtatcgcaaatcatga

SEQ ID NO: 153854 - DNA, 342 bp, Enterobacter cloacae
atgaataatcataccgatataaatctcatctacaactttctccttaagagcaagaagcgatggagtcaattttgtaagtcttttgatgttgatggagatgagatagttaaaaggctttccaaagacggctgcattgaaacccctaacccatcaaagaaggagggccttaaatgcaagccgattcttagtcatgatctcgtgaaaaggataattacttacgaccctgaatcaggacatctaaagtggagaggcgggaagaataaaggagaaattgctggacttgtctcagaagaggcaagagttaaatatcacggcgaattcgctaagacacagaatatctaa

SEQ ID NO: 153855 - DNA, 201 bp, Enterobacter cloacae
atggaagagaatgaaagtgcttatgatgaattgatgaacgctctggctttttatttaggtgatggcgtcttgatggctagtgaagaatcaattcgcgaagttattgcgcaagagcatgaccctatcgaaacaatcgctaatgccctcgaagattacagggcgcataaatccgaaggtaattggaaaacacaagccgcctaa

SEQ ID NO: 153856 - DNA, 225 bp, Enterobacter cloacae
atggagtggattaagtgtagtgagcagatgcctgagtcaactccatatggaggaaagcgcttatgcatcgtccatgcgttcgaaacgcatgttagcggagaaaggatgccatataacagttacgactggttcgatgatgatgaaaacgaatgggataatcacaccagagaagaagttactcactggatttacgctcaggacatcccattcccgccaagcgaataa

SEQ ID NO: 153857 - DNA, 252 bp, Enterobacter cloacae
atgaaacatacaccaggtccatggtattgggattctgaggggttaggtagcaaggatgtgttggtgttcggtaaaggctacccgtttgaaatgaccagcacagcaaacaagaacctgatagcagcagctcctgatttgctcgaagctctacaagagcttgtcttcctttacgagcatgacgaagggtgcagagagttaaccgaatacaagcgagccaaggctgccatcagcaaggttctgggggaggagtga

SEQ ID NO: 153858 - DNA, 426 bp, Enterobacter cloacae
atgaacgaacaagcaaacaagattctcgtcgacctgctgcaaaaagccagcaatggcattgatgcagcagtgtctttcagtcaggcgcagatacctgacgttattcaccagttacttgtttggaattttgcttcaagcatttgtgctcaggtgttcgggttgttggttgttatcgcgtgcccatttccaaccaaagcgattctatcgcgatatgcaaaggcaaaggtgaaggatgaaacatgggttatagaccagtcatttgactacacgaaatcaatgagcttctcggcattctgtgctctggttatgtgcgcagtggcattctttataggtgtgctcatggtggcaacaaactttgactggctgaaaatctggcttgctccaaagctctaccttatcgagtacgcagcgtcactggttaagtga

SEQ ID NO: 153859 - DNA, 762 bp, Enterobacter cloacae
atgcatatttatcgccgtgctaaaagatgggatgatttgagcatggacataaaagacatcaggcggaccaacctccgctaccagcagaaccttgctatccgcagtggaatcacgaaagctgactttgcagaaaaggtcggcacgtcaccctctaccctcagccagatactgggtgaaaaagcagtacgaaatttaggtgatgaccttgctcgcaaaattgaactaaacctaaaccttccacatggctggttagatcaattgcatccagagttagaggaagccgagaatctaggtgaagctaagataatcggtgggattgagccttgggataaccagacatcactggatgatgatgaagttgagatcccgttcctgaaggaagtgcagttggctgcaggagctggaagcacctttcgtgaagaccataatggatataagttgagattcgcaaaatcaacacttcgaaaactgaacatacagttcactaacgctgtatgtgttgaggttatcggtaatagtatggaaccggtgctgcctaacggttctacggtcggagttgatactggctgcaaggaagttaaagacggcaagatgtatgctatcgactacggcgatctactacgtgtaaaactgctgtatgcaatgcctggtggaatgattcggatcaggagttacaacagcgaagagcaccctgaagaaataagaccatcatcagatattcgagtgattggccgtgtcttctggtcatccgtaacctactaa

SEQ ID NO: 153860 - DNA, 273 bp, Enterobacter cloacae
atggaaaccaacgttaagcagtttgaacagatgaatgatctgcttcgctggagaaaacaggcctccaaggaagattgggaaaagctggcgaagcttgccaatacaactcctgggaacctggaccagctggcttatggatatcgcggagcatccgcgcagaaggcgagtgacatagcaaacgcatccttgaacttccgattccctaagcctgtaaccaaagaagcaatcgcctttcctccagtacggaaagtgactagcagtaaagcagcataa

SEQ ID NO: 153861 - DNA, 1167 bp, Enterobacter cloacae
atgggcgtcgttaagttagtacgaacggaagagatgtcttccaggagctctcacttggacaacagaaagcaaggtcactttgccatgttcaggagcgccctcaatgctccatggtcgaaagatacggccaagcttgcattgtgggtccgcctgcttggtgaagctcgttacaagcctggcattaacgaatttgcaggaagagaatggaagctggaagccggtcaactggtaacaaccactacggttctggcaagaaaactttgcgatcaggatgggaaggaaaagagcccgaaagctgttgagagaatgctcaacttcttctgcaagaaaaacatgatcaccaaggaaggaaacccttttggattagtaatttccatcacaaattactgcgaatatcagggcatttcaggcgtcgagccttccgtcgcgccatccgtcgaacctaaagccagtaatggcgcggccttgaagcttgtagccgtcgagggggtcgtcgaaccatccgtcgaacagaacaagaaggtacttaacaagaataataaaaccccccttaatcccccagagggggtggaagctctcgctcttgattgtctggattattacaacagtctggcaggagcaagatgctcatcgcctgaagctttcgtgaaagtacttagcactgtgaaagccaaaggggtttgttactcagttgatgatctcaagctggtaatcaaatgggctgttacctgttgggatgcgagaaagaccccgccgaaaccgaataacatctgccgcatgactcgcttcgatggttatctttcagatgccctggtgtgggctgatgggcagggaagtaatcctgcagcctgtcctcatgcagaaatcatcgccctgtggaacgagaaattccctgctaaggctgtatcacctcacgaatggaatcgtcgccgtcctgcgcatcgcgatctggaagcggtgtggaatggtaaaacgtcacaaggaaactggcgtgagttgcggcacatgggaatggcattcgacctgataggcaaatcatccctgttcacgacaaaaggcgatcagccctggttaacactggactggatacttaaccctaagaattggggttctgtgtacgagcaggccatcaacgagcacaagcagcgtaaaggagtcactgcatga

SEQ ID NO: 153862 - DNA, 1368 bp, Enterobacter cloacae
atgagcagatttgtagattcatacatcgagcgcaacgttcttggctcaatcatgctgggaagggatgagtttgccgatgcagctcaggatgctattgaagggctgagcgaaagcgatttcaccgtgtatgcgcacaaggtcgtattaagcactctgaagaaacttaactcaatcggatcacctgtcgacctgctgactgtcacctcagacatagaggctcggggagagctcgacaatgttggcggattcgcatacctggcggaaacgacgaaagacattccatcgcttcgcaacctgcctacatacgttcagaagctcaaagagttcacatcaggtcgcatgatgattcagatgctgcaggaagggattcagaagctttctgagcctactaccgacagcgtgcaggacatcattggaaatatccagaccagcattggagcgattgaggcattcagcgaatcaggaacgcgccacatacttgatgggattgagatcgcaattgacgaggttgagtcaatcatcaatggcgacatctggaagcaccggacagagcttgggctaacagacatcgacaaagcgtttggtggattcaacaacacggatttcatcgttgtaggcggtcgccctggaactggaaaaacaatgttcagcaccacggttactgagacggtggcactgaaaagcaagaagcctgtgatgttcttcagccttgaaatgcctattgagcagatttctcagcgcatcgcgttccaccgcgcaggggtaagcaaagaaggactgcttggcacgaatggcaagaatcaggatgccgaatgggcaaaggttggaaagtgcctggaagaattcggaaccgcgccaatacatatcaacgacaaaacatccctgagtattcaccagttacgcgctgaagctcgcaggatgcacaaaaagctcggtggccttggcgttatcgtcgtcgactacctgcagaagatgaagatgacaaatccggaaaacatgaatcagtcagttggtgaaattgctaccggcctgaagaacctagctaaggaattgcgctgcccggttatcgcattgtctcagcttagccgtaaatgcgaggaacgcgcgaacaaacgaccgcttaactctgacctgcgtgagtctggtgttatcgagcaggaggcagacgtaatttttatggtctaccgcgatgagaaatacaacccgcaaacagagcttaaaggcgtaaccgaaatcatctgcaccaaatcacgacacgcccctggcgcagagaaaacctactacttcagcaacaaacactccggtcttgacccgtacgcattcgtgcagaacgagttgcgcagctatcaggatgaatacgagtgttag

SEQ ID NO: 153863 - DNA, 300 bp, Enterobacter cloacae
atgaggccaaaatttcagcttgaaaccatcgagaaatacgtcacagaacaccccggctgtacctgtcccgaaataatccagaacaccagaataccccgatgctcagtaacctcagcccttttccagttgataagaggtcaggtgcttagcagagagggcagaccaaagcactatcagtattacaagtcagacaaagtggttattcgcaatgagcgaggtgatccgattccggaccacgatttacctaatccactgactgcatttatcaacaaggcattaagagaggtgagggctatatga

SEQ ID NO: 153864 - DNA, 222 bp, Enterobacter cloacae
atgaatacatcatggaagctattgctgaaaactctaatttttttgtttctaaacccacacatactagcccttacatgtcttggatttgtcttgctctcgctatggaaatcaatttatttcatagcggataagatggacgacatggcgaggaatatacgcaagctggatagccgccttgcaagtaaagaatacccgtcatggttcagatcgcttattgactaa

SEQ ID NO: 153865 - DNA, 255 bp, Enterobacter cloacae
atgagtaaagtaaaccgcagcaaatttgatattaaccgtggtctagccccgtatgacgaaacagcagtacaagagccagctataacgctcgttaaagtaacgcatctcgatctggattcagcgattgtaggtagtgaggcagaaacatactttctaaagccaaccgctcaaggatttatttacctttcagacctgaaagaaatcgccaaggcctacgatgaaggcgagctgtatcacgcagaaggcaactggtga

SEQ ID NO: 153866 - DNA, 324 bp, Enterobacter cloacae
atggacgaatcaagaaagcagtttatcgaaagtgacaaccttgtagacagacttcatggcatggctagctatttggctgataaaggggctgtgaaggcgcctgatttgctaaaggaggcggcaagggaaatatgcgagcttcgcaactcaattggagccatacgcaaactaaacaacggaatgtggcgctggacatcatgcatgtcatacaacgagtcatacgtaggcgagcctggcggattactaaaatcttccattcgagaaattgagcacatccttgacgctgagaaagaccgcgccgctggaatcaaagtgaaggggtga

SEQ ID NO: 153867 - DNA, 243 bp, Enterobacter cloacae
atgccatttatcaaattaaccatgcaatgcagcatctgctcaagcgctatagaaagcaccagaagtgcatatgagcccttgtatgtgaactctgacaacatcgaaaccctatttgaggccggaattacgattgtaagaatggcaagtggtgagcggttcgatgttattgagaaaccagaagccattctggcgttaattaaccaatgcgtgcagaaggtgagccatgaggaaactaacgtttga

SEQ ID NO: 153868 - DNA, 438 bp, Enterobacter cloacae
atgaggaaactaacgtttgaattaagaagccccattcatcagcagaacgccatacaagccatacagcaaatcttccccgacccaaccaagccaatcgtagtgaccatccaggaacgtaaccgaagcatcgatcaaaatcgaaagctctgggcctgtcttggtgatgtctcgcgtcaggtcgaatggcatggtcgatggctggatgcagaaagctggaagtgcatcttcactgcagcgttaaaacagcaggacgttgtgcctaacctcgccggaaacggattcgtggtgataggccagtcaaccagcaagatgcgcgtaggtgagtttgcggagcttcttgagcttatccaggcattcggtgctgagaagaatgtgaagtggtctgacgaagccaggttggcgctggagtggaaagccagattcggagatgcggcatga

SEQ ID NO: 153869 - DNA, 177 bp, Enterobacter cloacae
atgaagaaacagcgacgaagcataacccaaatcgcaatggacaacctgatattcatccctaccaaacgctccagaaacaaacccaagccagtacctacagaatcagacgtaacaaccttcaactacaccgcgcacctgtgggatatccgctggctgcgtgaccgtgcgaggaaatag

SEQ ID NO: 153870 - DNA, 363 bp, Enterobacter cloacae
atggactattcacagttatcagattttgaaattaacagaatggtgggtgacgtaatctttaaagggctttgggcatgcaagcctgaaacgtcaggaaatgataccagcaaatggtattacggaaatgcagattccacctttgagcctctaaacccattgcctgactattgcaatgactgggcggcggcagggccgattatcgttgaaaacaaaattaccatccacgctcctatgcattacgacgaaccacaggaatggttggcatttgatgcccatgactcagatgcggattttatggatggaaacccactacgagctgccatgattgtctttcttaagatgcaggacgcaaaacatgtttaa

SEQ ID NO: 153871 - DNA, 186 bp, Enterobacter cloacae
atgtttaacactgaatggcctcaagagtacgagcagcagagcatacgtagaacgttgtgcgcaggctgcaataaggagctaaccccagaggaaacctatgcatgttctgaatgcgtggatgaatggctgatttatcgtgatccgaacggagatatcaccaatgaggacagcaaggcgcagatgtaa

SEQ ID NO: 153872 - DNA, 609 bp, Enterobacter cloacae
atgaggacagcaaggcgcagatgtaaaaacgaagagtgcagagaatggtttcaccctcaacactcgaacatatggtggtgctctcctgaatgcggaacaaagatagcactggatcgacgaagcaaggagagagaaaaagcagagaaagcagcagacaagaaacgacgacgagaatatcagcagcagaaagacaagttaaagattcgaaagctatcgctacaacccctcagttacttccacaaattcgctcagcaagcttttaacgaatacatccgcaccagagatgcaggcaacccttgcatcagttgtggaaggcttaccggcgcgaaaatgaacgcaggccatttcaggacggttggcgcatcaccagagactagatatgacgaaaccaactgccacgctcaatgcgaatattgcaattcatatctgtccgggaatatcggtgcataccgtccaaagctaatcgaaaaaatagggcaagaagcttacgacaggttaatgggcccacacgatcgcaagaaatggacgcgtgaaggtttgcaggagctggctaggcattacaggcaaaaaaccagagaactgcgtgacagcagaagtgaggcagcatga

SEQ ID NO: 153873 - DNA, 189 bp, Enterobacter cloacae
atgagccttgacctgatagttaactctattatctggaccgtttttattgtttgggcaatcaggctttttattaaacacaagagacagaagaaagctgatagggcaatgtcgcttggatacctgttctcgttgaaatatcgactgcttagaaaactacatggcaaagattcatggggaaccaaccaatga

SEQ ID NO: 153874 - DNA, 486 bp, Enterobacter cloacae
atgaaccttgaagacattttcgagtacgagccgacgtctggcgttctcagatggaaggtaagattatctaatcgcgtcaagattggtgatattgcaggtaccgataatggtaggggttatctgagagttggtatagatggaaaggattatgtggttcaccgcatagtatgggagatggtgaacggaaaaatcccagaaggaatgcaaatagatcatatcaacagcgttagaagcgataaccgaatttccaatctccgcttagtaactcatctcgataatgttaaaaatcaaaaaagacattgcaccaacacttctggagttaccggagtcagttggaataaagagagaggaaagtggtgcgcatacatacatgtagaaggaaagaggaaacatatcgggctttatgactgcattgaaaatgccataactaaaagaaagcaggctgaaaggaagctccgataccacgatctacatggaaataaatga

SEQ ID NO: 153875 - DNA, 249 bp, Enterobacter cloacae
atgcaattactaaacgtacccgcacctaaaggcgtgtggactcaggtctatgatggtaccgcagaagcaaccatctctatttccggcactgaggcatatatctgccagtcaacatcagcgccgggaaacctcattggtctcccatttagcggatcctctttgactcagtacatttaccacgcctcttctggcactcctgtatacgtcaagccacttaacgctgacgcaatcattatcgttaacgcatag

SEQ ID NO: 153876 - DNA, 186 bp, Enterobacter cloacae
atggcgaagattaataaattcctgatttccgttcaccaggatggatttagttgggaaaactttgagtcgaaggttgaaccggtgattaaagatggttttctgaccgttaaactcacaaacggaacacgcagctataacctgcagaaggtcaatcagtacacagtccaatacgaaactgaagagtaa

SEQ ID NO: 153877 - DNA, 600 bp, Enterobacter cloacae
atggcaactccggattgggaggccatcgagtcggcttaccgtgccggggtgttgagcctcagagagatagcatcgcagcatggcataagtgataccgccatacgtaagcgagcaaagaaagaagaatggacgcgtgaccttgcagcgaaggtaaaagccaaggctgatgacctggttcgcaagagagaggttcgcgcacaggttcgcagtgagaaccaaatcagcgaacgcgaactggtggaggctacggctgaggcaatagccaatgttcgcatggagcacaggggcgatataaagcgagcgagagagttggctaaccttctcttcagtgagctatcagctgaatgcacagacgttgaagctctccataagctcggcgaattaatgcttaaccctgatgataaggggcaggacaagctgaacgacctgtaccacaaaatcatcagcatgccccaacgcgtcaaatccatgaaagaccttagcgacaccctcaagacattaatcggccttgagcgcgaggcttacagcatcaaagaggatgagccttcaagcgtcaacaaaggaaccagcctcaatgacttctacaacaccaactcttaa

SEQ ID NO: 153878 - DNA, 1374 bp, Enterobacter cloacae
atgacttctacaacaccaactcttaaccctgtattgcgagacttctggactacgcaatcacgcaacaagattttgtacggtggccgtgcaagctctaagtcatgggatgcagcaggttttgccatctatctggcaaacaattacaagctgcgattcctttgtgctcgtcagatacaaaacaagatcgccgagtcggtctacgcgttgctgaaaattcagattgagcgctttggactgcaatcgcgtttccgtgtgctgaaagacaagatagtcaatcgagtaaccggtacagagttcatcttctacgggctgaagaatagcgttgatgagataaagtcgcttgagagtatcgacgtgctatggctggaggaggctcacgccctgactgaagagcaatgggagatacttgagccaacaatccgtaaagaaggctctgagtgctggtttatcttcaacccaaacctctacaccgatttcgtgtatcagaacttcatcgtaaacccaccaccaagaacgctggttcgcaagattaactttgatgagaaccctttcttatcgaagacgatgcttgaagtcatcgacgcggcgaaagagcgagacgaagaggcatttgagcatgtctatcttggtgtgccacgttccgatgatgatgcgacggtaattaaacgctcctggatagaggcatccatcgatgcacacataaagcttgggttcgagccagaaggcatgaaacgcatcgggttcgacgttgctgatgatggtgaggataagtgcgcaatggtgtacgcgcatggctctgtggcgttctggtgcgatgaatggtcagcaaaagaggatgagctaagcaagtcatgctctcgcgtgtatggtgaggcgcttaagcgcgatgctcatattacctatgactctatcggtgttggcgcatttgcggggagcaaattcggtgagattaacgcagagcgtaaaaccagaatccagtatgcgaagttcaacgctggcgactcagtgcataaccctgaaaagctctacgttgagaagataaccaacaaggattacttctcaaacatcaaagctcagtcgtggtggagtcttgccgacaggttcagaaacacatttaacgctatcaaacgcggtgagccattcaaaccagagaagatgatcagcatttcctctgatatgccatatctcgaaaagctgaagactgaactcagcacacccaagcgcgactttgacaacaacggacgcgtaaaggttgagagcaaaaaggacctggctaagcgtgagataaaatcgccgaacctggctgatgctttcgtcatggcatacgcaccgattaaccgctctctcctcgttggcaaaaactcaggctggtaa

SEQ ID NO: 153879 - DNA, 1488 bp, Enterobacter cloacae
atgtcaaaacgaaacacaagcgcagcacagaagccgcgcaagcttgctgtgggtcagtcatgggcatctgacagcgagtatcaaaagcaaaaaatagacaagcactttgcaggtttgaagcacgcagcatataagccaccaaaaggcgttgtgcctgatactgcagtagtgggtgacagcgtcgattacggcatgctgaacagcgtgtttgtctcgtctgattctgtgttcatgggctacccattactggctacccttgcgcagaaatcagagaaccgtgtcgcatgtgagcagtctgtgaatgaggtattccgcaaaggcttcaaggttaagtccaacgataccaataatgaccgctcagacatcatcggccagcttgaggacgcgtttgagaagtacgcggtagagaaacaccttaagctgctcggattcaacgccgaggcgttcggtaactcattcctgttcgtgaaaatgaagggtgatgagaacgagcgcgataaagagcttctacttgacccaacgaagattaagaaaggcgatctggaagggtttcgcgttatcgagccaatgtggacctatccgcaggcctacaatgcaatcgacccaatcagccctaagttcttcgtgccacagcaatggtatgtgatggggcgcattgttagcgccagccgtatgaagtctctggtgctttattcggtgccggacatgctgaagccgtcctataactttggcggcctgtcactaattcagatgatgcttccctatgtaacgaattgggagagcgtgcgcgacgacataccgaggatcatcacttccttcagaacgtatatctggtctacggatatggaaacgtatcttcaggaccgcaatgaattcgaaaagcgtcttgataccctggtgtatgggaaggacaaccacggcgttctggcgattgataagagccaggaaactctggaacaaatgaacacatcgcttacagggcttcaggagttacaggccgagatgctgaggcttatctgcgtaccttcacgtcttagtgtcacaagccttacaggaagccagccaagcggcatgaacgccagtggcgagggtgagagggaatcacagcacgagaacatctccaacaagcagaagaacagttacaagccggtgcttgactgggtgctgaaaatcctttgcctgaatgagtttggggagttctatgaagacctgtacatcgacttcaaccctctggatgagctgagcgacctggaaattgccgatatcaacaataagaaagctgacacctacgtcaagctgattgatgctgaggtggtaactcctgagcaggtctgcaaggtgatcgcagctgatgatgattcggagttcaacggtattaagtatgaggtcgtgagcatttaccctgaggatgagactgatgaagataaagacccttcgcagggttcactacaacgcgacgatagcaaatcaatacgcgatgtcgcttaa

SEQ ID NO: 153880 - DNA, 615 bp, Enterobacter cloacae
atgaatgatatcgccgaccgcctgattgacctcagggagcgatgggtcgccactttctcagatgcggccgtaacaatcgcacctaagtttgtgaatgcggtagacagcacagcgacaaaatcactcaagcgctcaatcggtgaaaaagacctgccaaaggtgaaattcacaatgacgcctgagatgaagcaggctgttgatggcatcgtcgccgaaaacgtaaacctaattaaatccattcctgagaagtacttcacacaggtgcagacaatcactctccagtcgattacgcgaggacgtgacctgcagtacatgacagaagagctgcagaaacaattcggcgtgacgaggcgcagggcagagcgcattgctatcgaccagaacaacaaagccacggctgagttggctaaggtcaggcagcaatcgctgggtatcactaaaggaatctggatacattcaggtggtggtagtcatccacgacccaagcatgtgaaggcgaacggtcaggagttcgacctggataaaggattgccggttggtgataacggtgaatacgtgttgccgggacaagagataaattgcggttgcagctggaagccggtgcttccgttctaa

SEQ ID NO: 153881 - DNA, 1230 bp, Enterobacter cloacae
atgccagtcgaagagaaaaatggctcctggtggtggggctcaaaaggtccgttcccatcaaaggaaaaagccgaagaggtagagagagcggcatacgccaatggctaccgaggcgactcctacgacatgggctcatcagtccgcacgtatgacgattacggccggatgaacatcacccagtgcaacatcagcaaagaatgtgtgagtccgtacaggggctcaagtttgccgggatggagagatttaggccttaatcctgagcgcctctattacatctaccgtcccgcagaagagcttatccgcgccgctgactcgttcaataacgtgccggtgaccattgagcaccccaaccagttagacacgcctgacactccgcaggagcgcgtaggcacaaccgggacagatacgcgtttcgaagccccttatctcgttaccagcatgaagctgtgggataaggcggccatcgaaggtgtggagaactccacgcggcgcgagctttccatcttcccttcattcttcgacctggatatgaccccaggcgagttcatgggtcaggcgtatgacggcgttgccagaaacatttcgggtaactctgtcgcgctgaccattaaaggccgtgttggcgctgaatgcgccgtaggcgattcacaagaccaagaggaaactttgatggaaggcttgaccgacctgattaaaaccaagtttgccacagcatccgattcggacgctgatgaactggcaaagggcatcatggagcttatggctcagcatgagcagagcgaaatcaataaagacaagccgggtgataacgacgacccggacaacgataaaccaggcgataacgatgatccggaaaaggacaaagaaaagcctggtgacaacgatgacccagaaaaagaaaaggataaagagccaatgggtgatagcgccattcgcgacctggtagccaaagccaaatcagaagcgctggcagaagcgcgccgagagttctcagcaactcgtgaggccatgcgcacagttgagccagtgtatgggcatgtatcaggcgactctgcagatgacatctacaaagcagtgctaaagcaggagaaggtaaacatcgacggtgttcacccatcagcctacaaagcgctggttcagatggctattcatggcaagaccagcaaacaaccagtcggtgactctgctgagaagcaggcaagcgctgctgacttcaaagaatatttctaa

SEQ ID NO: 153882 - DNA, 489 bp, Enterobacter cloacae
atgacttttcagcaaaccgtaactttgtacccagctcagggtaaagagggcgacctggcatcactcaaccctaccgctgtggccctgccgcctgaaggttcctataaggctggcgcaagtggtgtctatcaggctcgatgggtgtgggtagatggcactgacccgactctggtgaataacacaggcacaggacttccactaggcttcgtaatgaataccggcaagggagttatccctctgggttcgaccggctccatgcaggtagagccaggcactgaccttggcgtattcacagtaggtgacttctgggtgcgcactgctaccgcagcaactgtcgggcagaaaatcttcgcagtcctggctgatggcaccaccaaaactggcgctgccggtgcaaccatttctggcgcagtagaaacttcttactgggtagcgtctgcagcagatgcaaactcaattattaaaatgaccaagcagggggttctgtaa

SEQ ID NO: 153883 - DNA, 1032 bp, Enterobacter cloacae
atggagcttaatcaatccactctgccgcagtacctgaaagtactggcagacaagggcgtaatcttcgagaaaaccccttcttatctttccatggaaggcgtagtaggtgactcagcagtagatatggctaccgtggcgaacggtggcattccggctgctgcagctcaggtcatcgacccgatgatcatcaaacaactcttcgcacctaccgttgctacccaaatttaccctgaagtgaaaaaggggacatgggcaaaggaagatgttctttttccacgcactgaagaagcgtacgaaatcgtagcctatgacgatcgctctcgtgctggttctacccatgtaaatgccaactgggaaaaccgtcgacagatgcgcttccagggaatgaacgaatggggcgatctggagcaagagcgatatgggatggcgctgattccttacgttgccatgaagcaggctgctggcgtcgatgccattaaccgtttcttcaacaagtcctacatgtacggcatctctggtgcgcctaacttcggcatcatgaacgacccggccctccctgcagctctgacaccaatcactacagctgacggtaaagtgaaatgggctgacaaagacgcggttggtatcttcaatgatgtgaagaaaatgttcactaatcttaccgcgaaaaaccaaggcctcgtgcaagaaactagcgcgatgaagttggtagttggtccaagcgatagcggctcactggctgcaatcaacgcattgggtaccgcttcagcaatcgacctgatcaagaggacatacaccaagctcactgttgtggttgttcctgagtttgaaactccttcaggtggcctgattcagctgatcgccgaaagcctgggtggcactcctgtcggtaacaccgtctacaccgaaaaaatgcgtgcattcccggtattcgttgagcactccatgaccagccagaaactggcggccggtactctcggcaccgttatctaccgcccatccggcgttgttcaaatgacagggactctctaa

SEQ ID NO: 153884 - DNA, 321 bp, Enterobacter cloacae
atggctaacgtagtagtaagtagcaagctcattcacggcaccgtttttgaagtgaacggtaaagatatcgtgttgaacggccagaacagcagcgagctcgttgctgttcgcggttatgaaggtgtatgcgggctgacccatatgcctgaagagctgtggcaggccattgagagtaagtacgctgatatgaccgctatcaaggatggttttatcttcgctcagaaaaatgaggctaacgccaaagctgcagcagaagacaagaaagatctgaaaactggcggtgagcaacacgtactgaaaaaaggcgagaaagaggaataa

SEQ ID NO: 153885 - DNA, 402 bp, Enterobacter cloacae
atgggcgtcgtaactctggatgtggccgagtggaagtcgaaatatccgcaatataacgcgcttacagaccagcaggttgaagacctgttttacgccgcaactacctatctggagaacgcgccgcaatccgttattactgacgaagagaagaggaaatacttcctctatcttctgacggcgcaccttgcttacttattctacgttgatgcgaatggcaatggcggcgtgaccggaatggttggccgcctttcttctgcatcagagggtagcgtaagtgtaggttcggcaatgtctaatgttccattcaatgctgagttttttcttcagtcgccatatggattcaccttctggcaggccacaaagatttatcggatgggcttttacaggggtagatgcagatga

SEQ ID NO: 153886 - DNA, 471 bp, Enterobacter cloacae
atgcagatgagtgacaagatactcgatgcgctgaataacatcgccaacaacctctcagacaagcaactgaaggttggatttatagacggggcaacatatccggacggaactcctgtggctatggtcgcagcaacaaacgaatatggaaatccagccaacaatcaacctccgagaccatttttccgaaatgccattgctgagcatgaaagcgaatggctggatgccatatcaagaggcctgcagaaaggtgtgccgcttgatgatgttcttgctgtggttggtgaaagggctgtgggtgatgtcgttcagtcgattgccacgttaatggatcctccgctttcccctgcaactattgcatcacgcaagtcgaaaggtaatgcctcaacaaaacctctcgttgacaccaaagtcatgattcgtgatgtgcattatgaggtaggagaaattgaaccttcacaagatagccaataa

SEQ ID NO: 153887 - DNA, 492 bp, Enterobacter cloacae
atgccgaattacaacgaatatttttcatatgatccgcatcttggcactcttacctggattaaaactaattctccgcgagctaaggcaggaagcgttgtctcctacaccagtaagcagagtggatatgtccaggtaagattaaatggtcgacttaccatggttcatagaatcgtatgggaaatgcatttcggacctattccatccggaatggaaattgatcacataaacaggattaagaacgacaatagattgcaaaatcttaggcttgtaacaccatcagataattgcaaaaacagaggcattcgaattgataacaaaacaggttatcctggtgttaaattccataagaaaaacaataattggaatgcaaggattacccacaacggaattcaggttcatttgggttgctttgatacctttgaaaaagccaagcaagcaagaattaatgctgaaaagcgtaagggggttgttgacccaattaattctaattaa

SEQ ID NO: 153888 - DNA, 489 bp, Enterobacter cloacae
atgattgattacaattctttattcacatactgccaatccaccgggcagctttattggaaagtaagccggggatgtatcaaagaaggaactctagttaaaagtatcaatgaccacggatactcaagagttatgattaacaaagtatcatatcgcacgcataggattatctgggagatgcataaaggggcaatacccagcggaatgtttattgatcatatagacggaaacttcacaaacaacagaatagaaaaccttcggttggttagcagagaaggaaacgccatgaatatgcctgcaaggagcgacagcaaaaccgggatcacaggggtgtgctggagtcgtcgtcacaacctatggcaggcatatataaacattaatcgcaagcgcaaacacttgggctggtactcagacttcattaaagcttgtgaagcacgaatcatagccgaaatatcttcagggtttcatgtaaatcatggcagggcggcttaa

SEQ ID NO: 153889 - DNA, 879 bp, Enterobacter cloacae
atgaaccgcactgactcaccagcgaagcagcccaaaccctttggtattaatggaccaagagagcctattcttgcaacaactcccgctggagataacactgcatcttacgatgcaggttttcctccaataacaatgacattaaaatctgcaggtggcttgcctccaaaggggcaagacatgaatcagatattattcgagctatctgcgctttccagatggtcaagcgcaggagctctaaactcctttgattcaacctttgcagcatctataggcggatacccaaaaggaagcatccttgtcagcgatgacaatacaaatatttacctcagtactattgatgcaaataacaataacccaaactcggtctctaccggatggcttaatttgctatcctttttaggtggggcaccaatatcaagccctactttcactggcactcctgctgcgcctacggccgcggcaggaacgaatacaactcagctagctacaacggcatttattcaggcggcaatctctgcgctttcgcttggcactgcttcgcaaagaaacgttggcacaggtacaaaccagattcctgatatgtcgaaatttaacgccggaacgctcagtgcatttaaattacctacagggcatattgttcagtttgatagtggctcaacgtcaacaggcacaggaggtggcggttttacaaaatcctacccaaccccattccctaattcgtgtctggttctgcttggtattgtttataactcactcggaatacgagtctccgtcactgcaaatacatctgatcgaactgctgctaatcttaatttcgttgaccagaacggaaacgggctcgccggtgttttagttggctatcttgctataggttactga

SEQ ID NO: 153890 - DNA, 1101 bp, Enterobacter cloacae
atgaaaaagaataatgacatagaagtcttaagggctgtgggtataatttatgtaattatttctcatcttccagtgtttatgacctggaggccttcatggcacggatggctgtttaatcacacctatttctggagtggagtagatttattctttgccgtatctggctttgtaataatgaaaaacatttctccatgggtttttacttctggtaaagatgaatacatatcctccactatctctttttgggtgaagagattttaccgtttaataccagcatcatggtttttcttgttattaacatatttggcttctgttttctacaattctatgggcaccataggtgtgccatctaacaacttagctgatgctataggccaatttttttatctttctaactggcggtcatactactgcagtgctggtaaggcatactgtggattaaataatcactactggtcgctttcattagaagagcaattttattttattttgcctattgcaattttcctattaagaaagcgtgtagtatggctgtttgcagcactgataataatacagttcccgctttccaggagtcctggtgattggctatggctgaatagaattgactctatgatgtggggatgtttaatcgcaatgctgacagagacaaaatactatcaaatgttaaaacctacctcaatgaggtcgcctatttacaaaataataatttcctccgcacttctctactcacttgcgttttacgcccgtggagaaatagtaagttttaatatgggtgttgtcgcgcttgtctctgcggctatggtatggatttcttcatacgacgaggggttgttgtttggtaagtttatagcaaacaacaaggtagtactgtggattgcctctcgatcttatagcatctacctaagccatccgatatcatatattttaatgatggagtattgcaaacagacaagcggcccgttgaatagtgacgacatgtttacaattatgttttttgggactcttctaactatagcgctttctgagttttcatatagatttgttgagtcaccgttaagaaaacgaggcgcgaagatagttcagcagcaggccgcctaa

SEQ ID NO: 153891 - DNA, 777 bp, Enterobacter cloacae
atgaattcgtttattaatgagataattgagtatcgacaggttttaagacaacttattcatcaacagattactatgaggtacagaagaactttctttggtttcctctggaccttactgaatccattattgaatatggcgattatcgctgtagtgttttcgctagtaatgaagtttcaggttaatgaatacgctatatttttatttgctgcaatgataccttggtcggttttttccaactctcttaaccagggcggcggggcattactggcaaatgaatctttgttcaaaaaaatatatcttccaaaacaattgtttgtaatatccgtcgttatctcgacgttggtggattcattacttagcactgcctgtttgtttattatagccttaatccttggcgctaaaatttctgctgcacttttatttctacctgttgcatttctgctgttggtaatgttttcccttggggttacattcatactttcaattgtgactgtgtattatcgtgacgttcaatatcttattggggtggtattacaagcattatattttgccacaccaatcatctatccgataacggctataccggaaaagttccatgcgatattcacctggaatccgcttgtatattatattgatctctttcgctctccaatttattttgggacattacctgacgctcactcgctaataatatgttctgtttgttcactgctgagtattgtctgtggtgtaatctattttagacgcaatgacgcaaaagtgatatttaggttgtaa

SEQ ID NO: 153892 - DNA, 864 bp, Enterobacter cloacae
atgagagtattgctaaccggagctaaaggtcagttaggacagagtctttgcagacatatcccgaaagactgggttatactggcggcagataaaatattcctggatattgctaacgaaagcaatgtttatgatattatttccgattttaagcctgatgtcgttatcaatacagcagccttcacttctgtagatgatgccgaaacgaatgttgaattttctgaaagcgtaaataatttgggcgcaaaatatgtcgcccaagcatcatcgagatatggggctaaacttatccatgtatccacagattatgttttcgacggtactagcactgtaccgtatatcgaagaagatatcgtaaaatcccttaatgtatatggcagtacaaaacgtaagggagaactagaggtacttaaacatcatgctgaagcgattataataagaacatcctgggtatacagcgaatatggcaaaaattttttaaaaactatttataatttagttgagaacaataaagatatcaaagtcgtatcagaccaggttggtgcacctacgtatgcgccagatattgcacatttgattgttaatataatcaaagaaggaacacttttacctggcctctatcattacagtggtgatactgtaatgagttggtatgattttgccagtaaaatagcagcagcggtggcatcgtcaggatcaaaagttgagccaattagttctgaagaatataaagctatcgccaggagaccaaaatatagtgttttaaattgcgataaaatagaaaagtttggttacaaacgttcctgtttttcacaaggctttgaacagagtgttcgtgctcttattgatgaaagtaaaaaaatatga

SEQ ID NO: 153893 - DNA, 537 bp, Enterobacter cloacae
gtgaaagtcattgatacagccatacacgatgtaaaaattatcgagccaaaagtttttggggacgaacgcggatttttccttgaaacctttgagaagaaacgttatcaagaaatgctcaatatcagtcttgactttgtgcaggacaaccattcccgttccactaaagatgtgttgcgtggcctgcatttccaaaaaattaatccacagggtaaattagttcgcgttgtcagcggtgcagtatttgatgttgctgttgatatccgcccggattcaaagacctatggcaaatgggtcggtgtagaactttctgccgagaataagaatcaactttggatcccacctggacttgcacatggtttttgcgttctcacagataccgcagattttgaatataaatgtactgattactattatccggaacatgaaggatgtttgctttggaatgatgaaacggtcggtattgaatggcccgtgatcaatccaaaattatctgaaaaggataaaaaaggtcttactttggcgaatctttataaatga

SEQ ID NO: 153894 - DNA, 240 bp, Enterobacter cloacae
atggcaatactagaagatcaacaaaaaaaggatgacatcaaagatttcttcattaagtataaaaaagggtcagatttaaatgaacgcgacatcgaattaattaaaattatatgcgtatctcgttctgagcgagaaaaaactgctaaacatccttatgaaataatactaaaaaacatctctggtagcagtttaagctttggaaatagcaagttaaaagtaagtgatgaagaaaaaaaatga

SEQ ID NO: 153895 - DNA, 540 bp, Enterobacter cloacae
atgagttcctacgctcagaggggggtagcgctgacggaggtaggaataccgtgcataaagaaaaacggccagcctttcgactgctccgtcagcgccaccgtgattctaacgggatatgcgctgtcgcgacaaaaaatatcgctttatgctaacgggttcctacgcccggttacggatgggccgcaacgcaggcactttacggcggtgaaaaatggatggaaaggggataaccctgaattacataaggttgcttgcaggtttgcgaggcggcttccagaagggcattgccgggtggcggctacgccttacccggcctacaaaaaccaccaaccaaaccggccgctacccctcgctcatcatcgccagaaaccgcttcaccgtccgcgagcgttcaaagcgccgccagcagagcgcgatatcggtgtaaagctccggcgagctcagcgcgtggtaggtgacatttggcggagaaatggccgccatggatttcggcaccagcgcaaacccgccgcccgcggaaaccatgctcagggaggatga

SEQ ID NO: 153896 - DNA, 1356 bp, Enterobacter cloacae
atggcggcggcgctgaaggccgtcgagcaaggcgcgacggtcacgctgatcgaacgcggcaccatcggcggcacctgcgtcaatatcggctgtgtgccgtccaagatcatgatccgcgctgcccatattgcccatctgcgccgggaaagtccgttcgacggcggtattgcggcaactgtgcctgcgattgaccgcagcaaactgctggcccagcagcaggcccgtgtcgatgaactgcggcacgccaaatacgaaggcatcctggacggcaatccagccatcaccgttttgcacggtgaagcgcgtttcaaggacgaccagagcctggtcgtccgtttgaacgagggtggcgagcgcgaggtaacgttcgaccgctgcctggtcgccaccggtgccagtccggccgtgccgccgattccgggcctgaaagagtcaccctactggacttccaccgaagcgcttgtcagcgacaccattcccgcacgcctggccgtgatcggttcgtcggtggtggcgttggaactggcgcaagcctttgcccggctcggcagccaggtcacgatcctggcacgcagcaccttgttcttccgggaagacccggccatcggcgaggccgtgacagccgctttccgcgccgagggcatcgaggtgctggagcacacgcaagccagccaggtcgcccatgtgaacggcgaattcgtgctgaccaccggacacggtgaattgcgcgctgacaagttgctggttgccaccggtcgggcaccgaatacgcgcagcctcgcgctggacgcggcgggggtcactgtcaatgcgcaaggggccatcgttatcgaccaaggcatgcgcacgagcaacccgaacatctacgcggccggcgactgcaccgaccagccgcagttcgtctacgtggcagcggccgccggcacccgtgccgcgatcaacatgaccggcggcgacgcagccctcaatctgaccgcgatgccggcagtggtgttcaccgacccgcaagtcgccaccgtgggctacagcgaggcggaagcgcaccacgatggcatcgagaccgacagtcgcacgctgacactcgacaacgttccgcgagcgcttgccaacttcgacacacgcggcttcatcaagctggtcatcgaggaaggtagcggacggctcatcggcgtgcaggcggtggccccggaagcgggcgaactgatccagacggcggtgctcgccatccgcaaccgcatgacggtgcaggaactggccgaccagttgttcccctacctgacaatggtcgaggggttgaagcttgcggcgcagaccttcaacaaggacgtgaagcagctttcctgctgcgctggataa

SEQ ID NO: 153897 - DNA, 534 bp, Enterobacter cloacae
atgacccaaatcgcccccctgaccatcgacaccgctgacgccgctaccgctgccacactcaaggccgtcaaagccaagcttggcatggtgccgaacctgttcgccacgctggcccacgcgccggcggcgctcaatggctacctcggcttgtccgaaacgctgggcaccggccgcctgaatgcctcccagggcgagatcgttgcgctcgctgccggtcaagccaatcgctgccagtattgcctgagcgcacacaccctgatcggcaaaggtgccggactgtcggcagaggccatcgccgcggcccgcaccggccaggcggccaacgcacttgacgatgcaatcgccggctttgcccgcgcgctggtcgagcaacgcggcgtggtgtcggccgacgccatggccaactaccgccgcgcggggctcgacgacggcctgatactggaagtgatcgccaacgtcgcgctgaacacgctcaccaactacaccaaccacatcgccgaccccacggtggatttccccgtggtcgccgtctga

SEQ ID NO: 153898 - DNA, 843 bp, Enterobacter cloacae
atggcggatcgactggccggcttgctccggcactactcgctttcggcgcgcgtttttcacagcggcgccttctgtgggcagcatcattacgcggcgccgcatggctatatccatctggtgcggcgcggcccgattacggcgcgttcgcccgtgcatgaagatctgctggttaccgagccgagcctgctgttttatccgcgcgtggcgtcgcatcgttttgtcgccgcccccggcgataccgctgagcagttgtgtgcggaggtcgacctgggcgcttcgacgggcaatccgttggccatggccttgccgtcgatgctgctgattccgttggcggacttgcccggcctcgggccgacgctagagttgctgtttgccgaagccgagcgcgaccagtgcggtcggcaggccgccatcgaccgcttgtgcgagttgctactgatccagttgctgcgttatctgatggatgggcggcttggcgccaccggactgctggcgggcctggccgacccgaaactcgcgcgcgccataaccgccatgcacgatgcgccgcagaccgcgtggtcgctcgaggcgctggcggcgaaggcgggcatgtcacgcgcgcgcttcgccgccgcgttcaaggacgcggtgggcgtcacgccgggcgactatctggccgactggcggatgaacgtcagttgcaccctgctcaagcaggggcggccggtggcggtggtggccgaccgcgtcggctacggcagcccgaacgctctggcgcgcgccttccgcgtgcgcatgggctgcgccccgcgcgactggctggcgcagcagcgcggtgacgcggcgctcagcggttcgtga

SEQ ID NO: 153899 - DNA, 237 bp, Enterobacter cloacae
atggccgacagcggggcttcgcattccggggcgcgatcaatttgtcgcgaaattcctgatttttgcgacaaaatcgccggcgctgattttgcagggaaaaatctgtcgcaaaaatcaggtgcgaaagtcaaacttgtgcgactgactttcgcgacacgtcgcggcccggattccgcgccgctgctgtcgttttcagaagacggctgcactgaacgtcagaagccgactgcactatag

SEQ ID NO: 153900 - DNA, 1512 bp, Enterobacter cloacae
atgcctgccgcccactcgaaccgctgggttcttctggtgaccgtcgccgccggtctcctgcttatcgttctggacaattcggtcctctacacggccctgcctaccctgacgcgcgagcttggcgcgacggcaacgcaagggttgtggatcatcaacgcataccccctcgtcatggccggcctgctgctcggcaccgggacgctgggtgacaggatcggtcaccggcgcatgttcctcatcggcctcgtgctgttcggtgtcgcgtcgattgtggcggcctattcgcctacagcggaaatcctgatcggggcgcgggcctttctggcggtcggcgcggcggcgatgatgcccgcgacactcgccctcatccgcgtcaccttcgaggatgaccgggaacgcaacatcgccattgcgatctgggggtcgttgtcggtcgtcggcgctgcgctcggaccgatcatcggcggttttctgctcggccatttctggtgggggtcggtgttcctcatcaatgtgccggtagtggtcgctgccttcatttcggcgctgatcgttgcgccgaaggtggccggcgatgcgaccaagccttgggacgtggtgtcgtcgtttcaggcattggtggcgctgtcggcttttgtgatcgcgatcaaggaatctgcccatgccgggcagtcgtgggccgtccccgctatttcgctgctggttgccatcctcgccggagcgctgttcgtccgccggcaactgcgcctgccgttcccgctgctcgacttctcgatcttccgcaatgccgcgttcacatcgggcgttctagcggccgcgttctccctgttcgccatcggcggtgttgagcttgctacgacgcaacgcttccagctcgttgcgggcttcacgccgctggaagccgggatgctggtttcggcggcggcgctcggatcattgccgactgcgctgctcggtggtgcattcctgcatcgtattggcctacgtatccttatagctggcgggcttgcggcgggatcgctggcggtcctgcttgcgacatggggcatcactcatggccttggctggctgatcgccggtctggcgctgaccggtgccggcgtaggtgcaacaatgtcggtggcatcaacggctattgtgggcaatgtgcctgtgcatcgcgccggcatggcgtcgtcggtcgaggaagtgtcctacgagtttggcagtctgttcgctgtcacaattctcggaagtcttttggcctacctctatacggtcaacgtcgtgttccccgccggaacctcggaagcggcccgcgacagcatggcgtcggcgctggtctttgccaacgaggcgggggccgatggtgttgtcgtgcgtcaagcggcaggaatcgcattcgaccacgcctatacggtcgtcatgtacgtggcggcgggtgttctggccgtgggtgccctgatcaccggcatcctgttgcggcgctacggtcccggctcgcaatcgtcagcctatcccacacaacactaa

SEQ ID NO: 153901 - DNA, 567 bp, Enterobacter cloacae
atggcgagagccagcaagcgcctcgaagtgcttgaagccattgtgagcatcatcgagcgtgacggcctcaccgccgtcaccctcgacgccgtagcgctcgaaaccggcatgacacgcgccggccttctgtatcatttcccgtcgcgcgaagccctgatcctcgccacccatgagcatctgactcgctcatgggaacaggagctggaagcgagcgccggcaacacctcggacagggcgacagacgccgaacgacacgccgcctacatcaacacctgcgcaagagctgcccggcgggtcgaactgctgctcatactggaaagctccgacaatcggcagcttggcgatctgtggcaacaggtcatcgaccgctgggcacctcctgcgccgattggaaacgacgctgccgagttggacaggttcatttcgcgccttgccgccgatgggctgtggattcacgaggcgctgtcgtcgcgcccgctccccgagcaactgcgcaagcgtatcgcggcgcgcctcgtcgcgatggccgccggacctgttgaggcggaagaaaacctcccgaaataa

SEQ ID NO: 153902 - DNA, 759 bp, Enterobacter cloacae
atggcggagctggacgacgacagggaaggaatcgagccggaagcactggacgaggacgccggcgacccggccgccgcgttcgacgcgctccggcgcacgatcgagacgcagggcgcgcagatcggcgcggaaatgaccgtgatgcggcgcgggctggaagcggctttcgaccagctcgaaaagatcgagccggcgcaggactacaagccccagctcgcccagctcgtgcaggcgctcgacaatgttgcggagcggctgcacggcgtagagcaatcgcctattctccggcagggtgcgacacactatgcggcgctcctcgagcgcagcggcgaggccctgatacgcaccgccgcgcagcagctcgagcggcaggcgtccgacctcgagcgcgccggccggaacctcgccgctcatacgaaaagcgcctacgaccggaaaagtcaggatttccgcatatggatggccggccttgtcgggctgttcgtcggcatattcctgattttgctgttgccgcgtttcctgcccttctcggccgacacccatgttgcggcgaccgtcataggtcaggaccgatggaacgccggcgtcaccatgatgcgggtggccgatccccgaagctggcgcggcgtggccgattcctcgcagctcgtgcgcgacaatgccgaggcgatcgggcaatgcgccgaggccgcgcgcacggccggttcagatcagcaatgcaccatcaccgtgaaagcgccggcagcaccggcgcagtag

SEQ ID NO: 153903 - DNA, 696 bp, Enterobacter cloacae
atgttcgccggcctcaagctcaatgcgcgtcctgccccctcacaggagcgcacagagcggccggaaagggaagggagcttgcggcaggcgcctgcgcccgaccggctggccgagcgggcgcgggggcagtcgccgcttgaggccgccgttgaccgctattcgcgggcctatcagtcgatcgaccagcaccggcgcgagggcttgccggtcctcgacatgcagcggcaggaaataggcgatgccggccggcagctcgaccaggtgcagggcggcatgaaagatttgctgcgctcgacgttgcaaaacgacccggcgacggtgcgcgccatgaccgagctttccggccgggagcgtgtcgcgcaggttatcgacgggatgaagcgcgaaaacgcggcgctgcaagacccgaatatcagggccgagcggttcgttgaacgctggcaggagctacagggccagcgccgggagcttcgcggctggcagcacgacgatgcccgcgccaaggtcgaaagccagatgaacggcatgaccaagagccttgagcgtgacccgcaggtagattccatcctgcgcaatcgccgtcaggaactcggaatcgggcagcagcagcgccgggggcagagcatcgcccacgagctgcaagaggaaatgtcacgcagccggcaacttagccggggcatcggtttgggaaggtag

SEQ ID NO: 153904 - DNA, 303 bp, Enterobacter cloacae
ttggacggcgccacgctggtgaaagagatccgcaagctcgaaaccagcgccatgaccactggcaaccctgtggtctggggttccgatgcggccgtgtggttcgtgatggtcaaggacgccaaaggccgtttcgccagcaaccccttgtggggcgacggctggggctgggcgctgttcaaggccgacgcccccgccaagaatgtcgccgtcagctacgaagccgactgcatgggctgccatgtgccggcggccaagaccgaccgcgtattcatccagggctatccgacactgacccagcactga

SEQ ID NO: 153905 - DNA, 534 bp, Enterobacter cloacae
atgacccaaatcgcccccctgaccatcgacaccgctgacgccgctaccgctgccacactcaaggccgtcaaagccaagcttggcatggtgccgaacctgttcgccacgctggcccacgcgccggcggcgctcaatggctacctcggcttgtccgaaacgctgggcaccggccgcctgaatgcctcccagcgcgagatcgttgcgctcgctgccggtcaagccaatcgctgccagtattgcctgagcgcacacaccctgatcggcaaaggtgccggactgtcggcagaggccatcgccgcggcccgcaccggccaggcggccaacgcacttgacgatgcaatcgccggctttgcccgcgcgctggtcgagcaacgcggcgtggtgtcggccgacgccatggccaactaccgccgcgcggggctcgacgacggcctgatactggaagtgatcgccaacgtcgcgctgaacacgctcaccaactacaccaaccacatcgccgaccccacggtggatttccccgtggtcgccgtctga

SEQ ID NO: 153906 - DNA, 843 bp, Enterobacter cloacae; identical to SEQ ID NO: 153898

SEQ ID NO: 153907 - DNA, 492 bp, Enterobacter cloacae
atggcagaggataaaccgcttactaagcaacaaaagaaaacggtcgaagcatcggcactgataaggcaagacccgccaaaaggaaacgacctggcctttacccattcaattttatgccaggttgggctaccgagatctaaacctgaaggccgtgaatttatgcgccgctccggggatgcctggttagtagttcaagccggatggcttgatgaaggcaatgggccagtagagcagtgcttaccatacgggccaatgccgcgccttgctatggcctgggtgtcatcatttgcattacgaaacaaaacccgtgaaattaagataggcagtagtgctaatgaatttctgaagatattagggatggaaccgcaaggcgccagacataaaacactcagaacgcagatgcacgcgctggccgcttgcaggcttcagctcggttttcgtggccggacgtataaggggtcagtttggatatcgaaaattattgtacgttaa

SEQ ID NO: 153908 - DNA, 852 bp, Enterobacter cloacae
atgaacatgaataaattattcgctgccgtagtactgagtgcaacattaatgtcctctgcttttgccgccgatcattatcagcaaattcgcaatgcaaccggcagaatagaaattgcgggtaaaacatttcttatcgatccaatgctgggtaaaaaagatgcttatcccggttttgagaatacacacaacagccagctgcgattccctctcgttgaactgccggtaagcattgaggatacctataagggtgtggaagggatcattgtcacccatacgcaccttgaccactgggatccggaagcccagaaaaagttgcctaaagatattctcatcatcgcccagcatgaagatgatgcaaaattaatccggagtcagggttttaaaaacgtcaaagtcctgaatggtacaatgcagttcggcgatgttacggtggttaaaacgcacggtgctcacggtactgacgaaatgtttgcctcgtcactcagcgagatcctcggcgaagccatgggcgtcgttttcacggcaaaaggtcataaaaccgtctatgttgccggcgataccctgtggaatgccgacgtgaacaaggcaatcgtgaaatacaaaccggatgtgttagtgctgaataccggtgatgcccgcaacctgaatttccctgacgcaggcattattatgggcacaaaagatgtccgtcacgcctatgagatgttgccgcaggcaaaaatcattacggtgcatatggatgctgtaaaccacacaaccgtcagccgcgcagatatgcgtgcctatatcaaagaaaacaagattgatgaccgtgtagttgttccgaatgatggcgagaccgtaaacctttaa

SEQ ID NO: 153909 - DNA, 1191 bp, Enterobacter cloacae
atgagaaatatgcgtcagcaggtcctgatacttgcgggatcacaggctatctttcagtcgatatcggtactgataatgacaataggcggactggcgggggccctcctgacgccaaatccttcactggtgacggtccccatttcaatggcaagcctgggcaccgtactggtgatgtttcccgcctctttatggatggatcgggcaggcagaaaaacaggattcattaccggtaccctgagcgggattatggccgccgtcatttccatggtggccatgatccaggattcattcatcctgctgtgcctggggatgttttttctgggaatataccaggcctttgcgcagtttttccgttttgctgcgggtgaagttgcgctgccggcattccgcacccgggccatttcgctggttctggctggcggtgttgttgctgccctgttaggcccgttcctggccagctacggaagcacactgttcagcgtgacctatatggggtcattcctctttatggccgtgctggcttcgctggggttacttctgctgtcgcgtttacacatgcctacacagaccgctgacccgtcagcacagaccggtccccgtccgtggttcagggtcatatcccagccgtcttatcttgtggcgcttttttccggtgcttcagggtttggcattatggtgctgggactgaccaccacccccattgccatgaaacactatgggtttgaactcccacagatcgctgtggttatccagcttcacattctggggcgtttcgttccctcctttttcaccggaagactcatcgaccggttcggtgtcactaccattatgctggcggggatcctgctcctgcttgcgtatattgcgctggtgctgtccggcgtcacgtggggattttttgccagtgcgttgatcctgatggggataggctggaattttctttacgtcggagggaccagcctgctggcaacgacctactcggcagcagaaaaaggcgtggctcaggcggcaaatgacatgagtgtctttatcttcagtctgatttgttccctgggtgccggcccactgttcaacgcatttggctggaaaaccatgcacctcatcctggttccctggatcatcagcctgattgcaccggtgctgtggctgatctggcataagaggcgtgcggtcagaccggctctgaaataa

SEQ ID NO: 153910 - DNA, 780 bp, Enterobacter cloacae
atgaagttaacgcaagtccgtaatgccaccctcatgctggaatacgccggaaagaaattccttatcgacccgatgctggcagaaaaagacgcctgggatggttttgccggaaatgcgcgtccgcacctccgcaaccctatggtaccgctgcctgtggcggttgaaacgctgctgaacgttgatgcggtgatcctgacgcacacgcatactgaccactgggacgaagcggcacagaaggcggtgccgaaagacatgcttatctatacccaggacgaaaatgatgctgcactgatccgctctcagggatttgttaatatccgtgtactgaaagatgaaaaccatttcgtagatggcctgacaatttacaaaactgacggccagcatggcagcaatgaactctacgcagataccgtctggggggaattactcggcgatgcctgcggactggtattcacgcaccacgatgaaaaaacgctttatatcgcaggggataccgtctgggtgaaaccgtatgtaaaaagcctgcagcgtttccgcccggacgttgtggtgctgaataccggctatgcggttaacgatctttacggaccaatcatcatgggtaaggaggacacgctgcgcaccctggcgatgctgcctgagacaaccatcgttgcttcgcacatggaggcgattaaccactgtctgctcacccgcgccgagctgcgtgaattcacccttgagcacggcattgaaaaacaggtacggatcccggctgacggagagatcctcacgttctga

SEQ ID NO: 153911 - DNA, 981 bp, Enterobacter cloacae
atgtctgctttgacagttgccgtcattgtcactgacggtttcagcccgtttcacttttctgtaccctgcatcattttcggcgcctcaatgccggaaccggagctgttccgtgtcgaaatctgtgcccgggagccgggtatggtgcagtctgatatcggactgtccatcaacgttgagcatgggctggaacgtcttgatgctgccgatattatcatcgtcccttactggcataatcctgatgagaaaccagaccaggcactgctcgataagctgatcagcgcgtggcagcgtggcgcacaggtggtggggctatgcctgggtacctacgtgctggcttatactgggctgctcgacggacaccgtgctgccacacactgggagtatgaacaggatttcacagcccgctttcctgacgttcacctagacagcaattcgctgtatacccgcgacgaacggctgattacctctgccggcactgctgcgggtatcgactgctgtctgagtattatccgggaccattacggttcggccgttgccaaccgggtggcccggaggatggtcgttccgccttaccgggaaggcggccaggctcagtttatagaacgtcctgtcccggaaacaacacgggacaacaaaatgaatgaattaatggattatctgcgccgcaatctggacaaacctcatgacctggattcactggccggatttgtcagcatgagccggagaacgctgacccgtcactttctgaaggccaccggtacaacactggcagactggatcaacgcggaacgacttcagcgaagccaggagctgctggagacgaccagccacagtattgaaaaggtcgccgaaatggccggatttcagtcacccgtttcattccgtcagagttttaagtcaaaattcagtgtgagtcccagcgaatggcgccgcgcattccgggggcctgatctggttgaccgacaaaatgaccaggcatga

SEQ ID NO: 153912 - DNA, 579 bp, Enterobacter cloacae
atgctggagcagttcgtccaggaacgggggcataaaatcgccagctattaccgggaaaatatcagtggcacaaaacttgagcgcccggaactgggacgcttactgatggacagtcaccacaatgatattttactggtcgagcagatagaccgtctgacacgtctcagcaacagcgactggatgacgctaaaaaaacagatagaacaacatgagctgcgaattgtcagtcttgatgtgcccacatcatggcaggcactgtcagataaggatccttctcaggccgatccgatcacccgcgcagtaataaccgccatcaataacatgcttatcgatctgatggccgcaatgtcacataaggactggctgagccgccgccagcggcaaaaacagggaatcgagcgggctcatacaattggaaagtaccggggtaagcaagccgatcaggaacggcatcagaaagtcctgtactaccggcaggtaaagaaactgagtatccgggaaacggcggatgctacaggctacagtgcttcacaggtttgccggatacaagcgcttcataaaaataatgaaactgcctga

SEQ ID NO: 153913 - DNA, 1341 bp, Enterobacter cloacae
atgtatcctatttcagagatcttggaagtaaggaaaaataatccacagcctagctatcttcctatacgaaataaaaataataatattaactggcaaatagtgaccggtttggtacttagttattccttgaaacataaaatcgaagagtcttacgggattgaacaattcagagatgattgcaaagcccattttgaaaaaataattgatgaaccagatttctgggccgtcttggaacgaatgtatttttcgaaccacgatatttttcgtgtttctcctatgtttttattgtttcaatcccagtttaacaatgaaagaataaactctggttctgcagccgataagcgtcttggagctctcttcgctaatttgatgggggattttaatctcaactatccaatgccggataagctgaattttatcgaaaagcaacttttgaataagcttgatgaaaaagtatatgagttttctggtgaaagtccatttaccaaagaacaatcttatcttccctttattgcgaaatgttttcagtccgatttggcatttctagcggaatatccacaatatcttctacaggaactagccaatactttgcgattgtatgcttttagctggtgcgctcaacttgcgctcaatctagacaattggcaaaaaggggaaccgcaaagcaaatccctttttttcatccttgactcggaaaaagccagtgcagaacgggaaggtgtgcaaacctatggttacaagctttttgctcggcatagtaaaaatcttttcccgatgctctctgcgctggaagttttacagtggaatgataaaaagcacaaagggcaacccaaacgcccgctatggcaggtttatcaagattgtctcaattactcagattcaacaaaggtactaaattcgcttaacaattacttgcaggagtttattgtcgagcgcgaacttcaggtttgcgaacgagctgcaaacttggatgaggcctttaagcagctaaagtcagttgctgttggacagtttcagaataaaagatctgatagagcaagagtgaaccgagactacattaatgagcttgagagccagatttgcactgactttattcaggttcgtggtcgtgcagggaaagtgctggtgctgaatcaggatcgtcttctgttactgaccaatctcaccataggcaaaaatgacaaactccgcctgcacgaactgctgcgtggttttgaacagcgcggtttttatctggataaccagtcggcgcaaacgttggtggcgttttatgaacgcatgggaaatgtagagcgaatgagtgatagtggagacgccgtgtatgtccgtaaaacagtatga

SEQ ID NO: 153914 - DNA, 543 bp, Enterobacter cloacae
atgagtgattcaacacctcaaaatatctgcacgctttttagcgagctttggcgtagactgaaattggtattcagtaatcattactttttgggtttttttatattaattgtggtgattataggtagtataagtatttggtttactgctgtctttaacaattcaccaggaagacttgaccgattgatagtaaacatgaatacgcttaattttctcgcgttttctgctccgctattagctactactatttttgaaaaggcagtcaatattattataaatcgtaatgaagtcgatgctagtaatattgcagttcttctttggttgctatttggtacagtgtttacaatttcagccattatcgtactgtatagtattggttccggtaatggaagttatttttcatggtgttcattattcgcatggattatatctttaatgtattgggctgttgctaacatcgagaaccctagttactcaatgaatgttgattcaaagtctgcatctggtggtgctgaagttggttcagctagttctttgaataggtga

SEQ ID NO: 153915 - DNA, 1164 bp, Enterobacter cloacae
atgccattttatgaaggtcaaacaataaaagtcaaacagccttttggcgacttttatataatttcgattccggctaaattattagttcaagtttgttattcttttgcggctagatatggtgacgatgtcttatcgggagtgcaacgaggaattaatgaaaatagagttaaagcgatagcacaattctgtgcgacaagtgatgcaatgtttccaacgtcagtaattttatcggtcaaccttgatgagaatggagaatcaccattacatccttggtatattaatgatgattctaaattagttatcccaacttcagatgagattgcatctattgtagatggtcagcacagagttgaaggacttaaaaaagcattagaaaaaaatgaattatctgctgactttgatattgtttgtgccatttacttcgaattaccagcaccgaaacaagctgaagtattcgcaacaattaattttaatcaacagaaagttgataaaagtttagcttatcagttgtttggctacgatttggattctgttgaaagcaagtattggtcccctgatacactcgctatttatttaactaggctgctagacaaagaagatgattccccatttaaagggcatgtcgattttggaatgaaaaaaatggacctagccattcaatatgaagggggggaagattcttttgataaatggtatgtatctacatcaactatggtgcagggtatttcatcgttgataactactaatccgtctaaggatagatattttttgcataaaaaaagaataataagaagaagtcgtgaagttctgagtgatatagaaatgaaaataactccaccattaagggggtattatattgaaaataaagatggtcaagtttatgatttagtaaaagattatttcacttgctgtgatgaaatgttttggagacgaagtgatatttcttttatgagaaaaacaataggtattcaagcattgtttgattttttgaaatatgttcttaattatattaataaacatggccaaaaaatttcatctgaacaggttgaattatatttgaaaagaatagatcctgataagctaattggttttaatattaactactcaggggtggggcgtacccaaattagagactttttaaaatctgaatgcggtattaattaa

SEQ ID NO: 153916 - DNA, 2010 bp, Enterobacter cloacae
gtgctcattaagcaactagtattacataattttcgcgtattttgcggcacacacaccatcgatctggctcccagaaagcgcccgcatgaagtaaaccctcgcccgattgtgctatttggtggtttaaatggtgcagggaaaacatctattttgtcggcaattcgactggcactgtatgggcgtttagcgtttggctcggcaatgcagcagcaggagtatgttgaacaactcggagcactggtgcacaacgggacgtatacagcagagcgtccggatgaagccgcagtagaactgacctttacctacaaccaaaacggtcatgagactgaattcaccgtcacgcgtagctggaagaaaggaaagaaagatcgtctctctttgcagcaggatggacaaccgcgtagtgaactcagttatgaccagtgccaggggtttttgaatgaattaattcctcacggtgttgccgatcttttcttttttgatggagagaagattgcagagttggcggaagatgaatccggcaatattctgcgtacagcggtgcgtcgtttgttgggactggatctgattgccagactgcaaaatgacctgatgatttttgtcaaacgccagcaaaccgcgcagttaggtggctcccagcaacagcaggtcgaagcgcttgagacaaagattaaaacgcttgccggtcaggcagagaaattgctggaagaggccgatttcgtcaactcgcggatcgaatttttatcccaggacattattcgccatgagggattgttaaatgcgcagggcggcgcatttgcccagaccaaagcacaggaaaaacagaaagttgaaacgctgttaaaagaaaaagagcgtctggaaaaagcgttacgacaggaatgcgatggatcgttgccctatgcattagcgcctaatacgttgtcgcggttgctggaaaaaattgccaatgaagcgcagatcaagcaggcgaaaatttttgagacagagttaaatcaatttttaactcaactcaaaaatgatatcgcgttccgttccagcagtgagagtagtaccagagccattgctaccgaagcgattaccaataatttggacgcatatatggcagccaaaccaaaaggtgatttgctgtttgatatttctgaacgtgaagccggtatgctccagcaatccattgagcaggacagcaaaaaagcatggcagcgttttgatatgtaccgccatcaattagcggatattgaacaacaactggagcaggccgctgccaatattgctcgcgccccggaagacgagcagttaatggatatctttgcagcattacgcgatctcgatcataagcgtgaaaaacagcggcaaaaataccgctctctactggaagaggctaaacggacgaaacagcagcaactggactgtgttcgtcaggtacagaaagcacatgacatcacccgtagccagcatggtttgagcagcgcatttaaaaatgcacaagagaccattaacctgctcgattattacagcaatgtactaacgcaggcgcgagtgaaaaagttatctgctaactttgaaattgcctaccacaagctggcccgtaaagaggatttacagcttaatgcgcacataaatccacagacatttgatgttgaactggtggatgaaaaagggtcggtgattaatcgtaagctgctttctgcgggtgaaaagcagatttatgcgattgccattcttgaggcgctggcaaaaacctctgggcgtgatttcccggtgattattgatacaccgttagggcgtctggactctcagcaccgggataagttgattaatcattatttcccggaggccagccatcaggttgtgctgctatccaccgatactgaagtggacgagcgttatttcgtcgatcgactgcgtgatgatatttctcatgcttatgagattgtgtttaacgcgcataccaaatcatctgcgctgaaacccggttatttctgggaactaactaaggaggctgtctga

SEQ ID NO: 153917 - DNA, 1086 bp, Enterobacter cloacae
atggctagtattgatgcagattactgctattcgtttccagctatacgtggcatccaggctggtcgtcctttctacatcgccacatgcccgatgcgcatcatacccaaaatcttcagctttgatgaaaatgacgtccctcctgagctacgcgcacaacgcacgctgaataaatcacgcatccccgaaatggtgcgttatctgctggaaaatccaaaagattatgtgttttcagcattgacagcgtccattgccgttgacgttcagtttgatgagttccctaactccaacaacttggggacgttatgcgtgccaatggatgcacaaattctgatcaacgacggtcagcatcgccgtaaagcgattgaagacgctttggatgctcgcccggagctgggccaggataatattccggtgttgttctttgttgatgaaggcttaaaacgtagccagcagatgttcgccgatctgaataaatacgccattcgccccagcccgtcgctggcgtctctatacgatcatcgcgatgccagttcaaatctggcacgttacctggcgatgtccatagagccgtttgttgggatgactgaactggaaaaatctggcatcagtcagcggtcaaataagttatttacgttgagcagcatcaagcaggctacccgcgcattgttgggtaaagatcccaaagagaacaactttgaggaatgcacccaaattgctacccaatattggcaagctatttttagcgtgatgccggattggcagctagcggctaaaaaagaggtttcaccggttcagttacgacaagattatgttcacgctcatggcattggattgcaggcacttgggcaactgggatataccctgctaacggattatcctgagcaatggccggagaaaatagctgcacttaaaacttttaactggcgcagaaacaacccggatctcgtcaaacgtgcgatgcagcacggcaaactgagtaaaaccagtaccgcgatccagctcacctgtaatgcgctaaaaaccgcgctctcaatccccctcactcctgaagaacaggagcttgaagctcaaatggttgtctcatga

SEQ ID NO: 153918 - DNA, 588 bp, Enterobacter cloacae
atgcaaaaatattacccccatctaaagaaaatcacccctaatgacttcctgctgaatttgattaatcaccatcttaatcagatcctggaatgtcactccaaaatactggcctttcgaatggattttgattaccagcgaggtactaaccgattcattcgtaattcctccgccgaaatacaggacgaccttagagaactctctcaggcgatgatgaaccttccaggcgtcactggtattttttgggtactggaatggacttcagaaggtgcggtgcatgcccatgcgattttctatgttaatgctcaggtacatcagaagtcatttccattcattttacaggccgaagaaatgtggctaaagattacccatggtgaaggcaagtctcagcgatgcaagccaaatgaacatcatcgtgacaatattaacaacgttgttgaatatcataataatgaagccttaaacagcttgagacgtatagctagttatctgacaaaagaagaccagaaatatggttattcgatctggggatgcaatgaggttccaccacctgcaagacagggaaggcccagaaaatatataccaagctaa

SEQ ID NO: 153919 - DNA, 864 bp, Enterobacter cloacae
atgaaacaatttgacggtctgcactcactgcagcaaccgctttccggcctgccccaatgggtcactgaacgcattctgcagcagataaatcagcttactcactatgagccggtgataggcattatgggcaaaaccgggacaggaaagagcagcctgtgcaataccctgtttgctggggatatatcaccggtcagtaatgtggcggcatgtactcgaaaaccactgcagtttcgcctgcagctcggcaaacacactatgattattatggacctacccggtgttggggagtccgaactacgggatgctgaatatgccgcactctaccgtgaacaacttcctcggctcgacctggtgctgtggttgatcaaggccgatgatcgagcgctggcggtggatgaacatttttaccgggaggtgattggtgaggcataccggcataaggtgttgtttgttatcagtcagtccgacaaggttgaacccacctgcggtggtgaaaagttgtctacagagcagaaacaaaatatcagccgcaaaatctgtttattgcatgagttattccaacctgtaaaccctgtctgtgcggtgtcgatacgtttgcagtgggggctgcaggtgatggctgaacggatgattcgttgcctgccacgggaggccagtagtccggtggcagtacagcttagtgctacacttcgtaccgttgttgtaaataaaaaagcccgtgatgattttggtgaaacggtcggctcggtactggatgcagtaagttccatgtccctgataccggccccggttcggacagtcatccagtctgtacgcgacatcgtggtatcggtcgcccgtgctgtctggagttttttcttctga

SEQ ID NO: 153920 - DNA, 198 bp, Enterobacter cloacae
atgaaacctcaacctgcaacaacttcgcgggcggtaaagccctgtctgtcgcccgtggctgtctggaaaatgttactgacacgcctgctggaacagcactatggcctgaaaatgaacgacacgccgttcagtgatgtaactgttattaaggaacatattgatgccggaattaccctggccgatgcagtcaacttctag

SEQ ID NO: 153921 - DNA, 1059 bp, Enterobacter cloacae
ttgactagagcacgcagtaataaagttggtagcatctcaattaagctgataatcggatgcttaattatcaccgcagtaaatatagttacatttaaaagttcatcgataactcagttgatgtcaaagcttatttttttaattggatctgtatggatatccttccccttacttaatgcagccaaggctttactcccaagcgcactaaaatcctttaagatgaagttatggaggatggtagtaaacaccagaaagtattataaactaactaaaataaataatttcctgttgcatgttggtgcattaggaatctttatagtaggagcattaaaagtagtatttaacttagagatatctgttttaatttacttcacaattatattgctaagtttctcttttattctagacatttaccatagagttaaattcatcgtttccaaaatttggaaagggattatcggaaaagttggactggcattatacgtaactttggcatatataatctcaaattatctcgcaagacattgggtgacatatacgacaggattagatcctaaatattacacagaatttataaattcgtttagtatttttttcaccccaatagcatacttgttgatcaccataattctttgcatgattattattctacctgaatgtttgggccttttctttttgatgtttttcaatccatttaacgagagtttcatcaagaaaaaattcccttcattaacgacgttgtcagtaaggatgagaactgggaagcgacctaataacctgacacatctcgaacttgtactactaagttctaaagctatggtgtttcgagtctttggtgctccatttttcttgatctcaattggttatttaatgactcaagtagatcatttatcaggggatttttttgataaagcagggcgtctatggctggtaaattactattataacactgagcacaacggtaaagtgagcactatgagatactatgatattgaaagttcgaaaacgtcagtagcaattctaaaagatggtaaatgggaattttttactatagatatttaa

SEQ ID NO: 153922 - DNA, 168 bp, Enterobacter cloacae
atgatctcccccatgaaaattgaaaccgcactccccacacacttcgagcgtctggtcgcgatttgggaatcctccgtccgcgccacccatcacttttacaggaaagcgatattgcggcgctgcgcccgctattgctcaacgcgtatttgccaaacctcaccgtcatga

SEQ ID NO: 153923 - DNA, 213 bp, Enterobacter cloacae
gtggcgacggttgaggcgctgttgaaaaaaaagcaggtgaaatccgtaaaatggataagcgctggtggatttatcgcctgtcagattaggaataatctggatgaatgtaacggcgcagacgcgcactatgcgcatttagtagtgaaaattgcatgtgatttgaaagagatagcttacgctggaaacgttctgttacaggaaaggcttcattag

SEQ ID NO: 153924 - DNA, 609 bp, Enterobacter cloacae
atgccgcaactttatagctacataaggtggtcaagtgatcgccaggagaaagggactacaaggaacaggcagatagaggcggcaaaggcgtatgcggctgaagctggccttgaaatggttgaaattatcgagcctggcgtaagtgcgttccgtgggaagaacagggcggggaagttgggtgacttcatcgatgccgtaaaaagtaatgctataccttctgattcgtggctttactgcgaaaaccttgaccgtctatcacgtgatcaagtggacgaggctctacgtttattccttgaattgatagggttagggctgacgatagtcacaggaatggatcggaaggtttataacagggaatcgatccgtcaaaaccctactgacttgatgatttccattctaatgttcatccgtggcaatgaagaatcagaaacgaaatcaaacaggactataggcaatgttgttgcgttggtcgaccgccataaagcagggatgccagtaaacattaagtcagttggtcgccatccgttttggatagatgattctggttcgcaatatgaagcagtcaaagtgaatcgccacgggtttaacagacacctcagagtcatttaa

SEQ ID NO: 153925 - DNA, 1509 bp, Enterobacter cloacae
atgtctaatgaaccactaaaaattgcattcactggcgtttatgatattgcaaattatggagatcatttatttcctattattttcgataaaatcatgaaaatgaaaggtctgaatatcaaactttatcttttctcaccggtggggggaacacaaagcctatcattaaatgagattgtctacccattaaatgagatggaatcattgcatctaaaacataattttgatgcaattattgttggtggcggtggaatattccactatgcaagtgggcaacaaaaaataaaaagagactcggacgagttcgtagactatccagtgtttgaaacatgggttattccttcgattgttgcatacaaacacaacataaaactaatctggaatctacttggcggctaccatgatttctcatcattttatcagaaacttactcaggccttatgcgaccctattgactatatatcagtccgggacaactatactaaaaaaatcctgacagatagtggcatagaggatacattaattaacgtatttcctgattctgcatttatgatgacagaatgcattccttatgaaatcattgaaaaatcgttaaataatttaagaaacagcgataaagaatacattgtttatcacgcgaatagattcctacccaaaagtgcaatccctgatgttgtaaagtcattagattatttttacaacttaggctttgaaatcatactgctaccactagcatatactcatgatgatgaaagcattcttagagagataaatcaaaacgcagattcccgatatactctttatgaaaaagaactcaatatctacgaaattatgagcatgctagcaggttgccacgcttatattggtgtgagtttccatggcgcaattaccgcagcctgtcatgggaaaaaagttttggcctttgattatatgctgaacgggaaaactaaagatctcttcaagacgttagaacttcaggattattacataactgattctaattgcctatacgagcgtacagtacaatgtcacaaaaacatgtctccagttattttagatgataaaatagcatctctgcataagcactttgacactattattgacttactcgtttcaactagaacgagagagaaaggaagtgataatttccttattaacttttctaataccatatccaatataaacaaatctttcagtacattacaatccgagttcagtcaactggataatctcagtagagacacccacataaagtatgtagagctacaggataaacacgccgaattatgtaagttgaatattgagttgaaggataatctcaatacctttagtagagccaacaatgaattgcaggatacattcaacgcccttcaactgcaaaacaaagaattatttaaacaaaaatccgatgctgaaaaatggattgatgaaatgaaaaaatcaaggacctataatttgattaaaaccattaataacataaaattaaaaatcaaaaatgcactcataaaataa

SEQ ID NO: 153926 - DNA, 771 bp, Enterobacter cloacae
atgtctaatcaaacaaaatttattctgctttccctggtgttgtttactgtggcgggttgcagtatgagccaggctgttaacaagatgttatctccaccgccagatacaaaatgggttaattttgaagtaaaaaacccttctcagtacacgaaaccgattccacttgaggtcagatacatctcgcatgaatgtatgaaaaaaagaatcagtggatttgatggctcagttatcacagagccaagctataacgttattgggatccccatgcagcaaggtagcggggatatctggaaagcaaaagttgctatgactggtggcggttcatgtaaatggaagttgagtgcggtcaatttaggtatcaagtatatagacgctatacatcttggcaaagatcttgttcctggaacgacggtaggtgtagccctcgcctttgataatgatgcttctcgtaatggacaatttacctttgtcactggagatgtagaactatctcctaaatattacccttatataagagagaagaaaatggggggggtagagaatagcttatctctatttggtgagaaagacttcctgtcattgcgtgtaggtgagattagttctgtaaaattttcaccagaaatagatgaggggaaagtaacaagatttgtcgggttagaaaaaaagataaaaggtaaatatccaaagattatttatccggacggaagtgttgctcctgaaagaacattattcccgaattttgataaggtcgacaaaatgagtattaaatga

SEQ ID NO: 153927 - DNA, 549 bp, Enterobacter cloacae
atggatatatctaagcgccctgatacagtgatggctaaagacttcgaaaatgtaacattatcaagcggtataattcataatttcactgaaattgattatgatagaatgagctcatttcctttgggtaaagttagtaatggatgtgacatttttatatgcagtgtcacatgcccggattccgcaaatacctttatgagagatatagtgccacgattaaagagcggcgaagcattgattatggctaattacgtgcgtagcgatgaagatctgaacatttggactagaatttttaaacttaaagctatctacaggcctgaggccattaatcagatatatcaggctgcttatcacggtaaaataaaaagtcataatgatgttcataaattcctggattcatacctttctaacgttcccctggaacgggtatattcaagctataacgtaaaactggctgcactttcggcgttatttactacggcaactttatataagaatttcaatgtcatacaaactcctgcaacggtaaaatctaaagagggaagcatatga

SEQ ID NO: 153928 - DNA, 144 bp, Enterobacter cloacae
atgagcagggagcggacgttgtatttgatacttacacgctctgtgcctcaggtgttccctgatggaataccaatttccattgcccgttttcagatacttcccagcatgaagaacgaagggatgcacgactaccatctggattga

SEQ ID NO: 153929 - DNA, 369 bp, Enterobacter cloacae
atgttcccctttctgaacacatttaagcgattaataagcaaacagcaagaaacacataccgctcctcagaaatattcaaatgaacagcttatccagtgggctaccggttgcatgctggaagggctcccggatgacttctaccaggccagactgctatgcactcgccaatccgatcctgaaaaccccgatggatggatagtcaacgttaatcatgatgtgatgcttaaccctgactccgaatatgagcggttccagccagccgatgacctctaccctacccagtgtgtggaaatgttacttgatggcaaggaatggagtaatgcatcaataacattcaataacgaaaacgcatcgtttaaatggagttag

SEQ ID NO: 153930 - DNA, 201 bp, Enterobacter cloacae
atgactgatgatcggacactgcaattacgcttaaccggattccgcaaagccgaggcatctctccggcttgaaggtctggatccgtccggaaccccgctttatgagttagttaagtcgcggattctttccggtgatattaccttcgacgagggccgtgctgagatacgggctcattaccagaggcgtgcttacagcaactaa

SEQ ID NO: 153931 - DNA, 384 bp, Enterobacter cloacae
atgaacgaagatgaagttgaagtgtatgtagtgaacgcttttagcgagaaggctcaaaaagaggccgtgtccgatgactcccttcgcaaagcagcagaagagatcgttaatggcctaattgacgctaatctctcaggaagtcttgttaaaaagcgtatcgccagtgggaataggaacactggaagaagcgatggcaaccgtgccattgtttcgattaaaagaggtaagaagttgttttacctctatcttttttcaaaaaaggaaaaagacaacattaacaaaaaagagttgaaggccttaaaagagttcggagaacttatgttctcttactcagacgagcaactcaacgatatggtatccaaaggggtactaaggaagttgtaa

SEQ ID NO: 153932 - DNA, 603 bp, Enterobacter cloacae
atgaaaaccttaccttggaacaaagaccgtatcatcggtcagaaaagtccacttcagatatctcatatctgggggatccggattagacttgaactggaagttaaaacacgcgatctagctctgtttaacatggctttggacagtaagccatggggccgtgatctggtcaaactcaaagtatcagatgttgcatatgccggttctgtttcaagcagagcaacggtattgcaacagaaaaccggtaggcctgtccaatttgagataaccaatgggacacgagaagctgttactaatttgataaagcttggccatttgcgcagtaaagacttcctgttccggtcttgggtcggtatatgccaacacatatcaacccggccatacaaccaaattattcatgggtggatagcaaagcttgatctcgaagactcactttacagcacgcattctatgagaagaacaaaaccatacctgctctacaagaaaacaaagaatctcagagtgatccaaatccttctgggccacaagaaactgaaaagtacggttcgttatctgggcattgaactcgatgatgcgctggagctatctgaatcgatcaaggtttga

SEQ ID NO: 153933 - DNA, 1443 bp, Enterobacter cloacae
atgactcaacatatcaaaggtcaaggcagacatcaggtgacgttgctccctgaagtgctggatgattttgtcacagaagacaaccctgtcagagttattgacgtctttgttgatgaactacagcttgatacacttggctttgagcgcgttaatgcaaagcaaaccgggcggcctggatatcatcccgcaaccatgctgaagctttacatttatggatacctgaaccgcatccagtcatcccgccggttagagaaagaagcccatcgtaacgttgaattgatgtggttacttgaacgattaacacctgattttaaaaccattgcagacttcagaaaaaacaatggtaaaggcatcaaaaatgcttgccgcactttcattgatctgtgtcggcagatgcagatgttcaccgatgtggtggttgccattgatggtagtaagttcaaggcggtaaacagcaaatcgaacaatttcacgccccagaaaacaaaaggccacattgaaagggttgagcaaagtattgctctttacctgaataagctcgatgaagctgacaaggctgcggagcccgaaaaaaatgcatgtttaacaactgcgaaactggcatggctgcaaaagcgtctgaaagaactcaagaaaattcagcaggccgttgtgcagcaccctgataagcagctgtcactgacagatcctgattcccggttaatgaagataaacaatgttaaccgccaggtgagctataacgttcagactgccgttgatgctaaatatcacctgattgttgcgcatgaagtaacgaatacaccagaccgtggtcagctaacagcggtgaccaaattagcgcaggaagcagttggcaaagcggatattaccgtactggctgataaaggttattacagccggggagatattaaagcaacgcaggacttaggtgccgtagccttagtaccaaaaggcgatacctctggcgctgaccgtaaaggtcttttcaatcgttcattgttcaaatatgaccaggaaaaagatatttatatttgcccgatgggtgaagaacttcagaaccgatttacgatggttgaggatggtttagaacagcaaatgtactttaacaatattgcctgtcgcgattgcagtcagcggtcaaggtgcaccacatcaaaacgcgatccgaggcgtataaggcgctgggttcatgaagcagaaatggaagacatgcaagccaggcttaatgcatcgccacaaacagctgtcgtgcgaaagcaaacggtagagcatccgttcgggacaattaagatgtggatgggagcgactcacttcctgacgcaacggtttaaaaacgtcagcacagaaatcagtctgcatgtactggcttataacctgaagaggatgatgtccatctggggggccgaaggattggccattaagctgcgagaacgatgcagctag

SEQ ID NO: 153934 - DNA, 645 bp, Enterobacter cloacae
gtgttaggaactgtggccgctggtgacgattctcgctttgacagcataaatggaaaaacaggcggggttatttcaggacaggttaaagccggcggtgcatctccagctagcaccccgccagcaggaacagtaacaaacgctgaacttattggctccagattcagatcaggagtttataacgggattgatttctcattatatgctcaggttgtacagggaacgggaaccttcggctatcttcagcttgcgttcggtggcactccggcctattggtcattcagacaagatggagtggcccagggggtagcatggtcaccgacttgtgacgaacgacttaaagatattgatggcccaattagtgagccgcttgaaaaaatgcgtctaatacgcgggcaaacctggaaatggaaatcaaccggctcatttgggatcggatttacagctcaggaagtacaaaaagtatttcctgaggctgtttctaaggggctgaacgttactctttcagatggctctgtagtcgaaggtgttctttcaccagatacgtacggagttgctgcagcgcttcaccatgaagcgatccttgctctcattgacgaagtaaacgaactgaaaaggatgctcagtgttgagatgaaagggagctga

SEQ ID NO: 153935 - DNA, 924 bp, Enterobacter cloacae
atgcaaaattccccagtaatacagctaagacagatgatacacgccgactcttatggtatgtcttcgatattaatgcaatctattattattgctaggaaaatcggggacaaagagttcggcgattggctcgaatacgagtacaggggatacccatctaaagctctcacaccagtttataggctttttgatcttccccattacgcccagctacacgatggcagttggcagccaatgaacctagatcgaacttttttaaaagatatacttgagcacgataactttaacctttttaagatgtgcgcggttcaaaaccctatagctgatattgaacgaatggcctcttctgacgaaccaataacagctttcttatctgaaaagcaaaagcagttcttttctaatctctttggaaattttaaaaactatgctcaattccctcatcgttcacatatggtgaagatcattttagatgtaaaaatgatgatacttaattgggccttagaattagaagaaaaaggagtgctttgcgaaaacttatcaattactcaacagcaaagggagatcatgaccgtgactgtgaacaataacactaataatttccacgcacctgtcaataacgctggaacgatagttgcgggtagtacaggaaatattgagcaagcaaataaaataacagcgggggacttcaactctctcaaagaacagctcaaacaatggggtgcaactgacgaagatattggggcattacaccaagcgatacaggaatcgacgccccccaccagttcagacgcgtttggaggaaagattagtaaatgggtcggtgacatgatcggtaaagcatatgctggtacattaaacattgctgcctccgctgctcccgcgctactgactaacgccatttgccattactacaacattcctgtttga

SEQ ID NO: 153936 - DNA, 603 bp, Enterobacter cloacae
atgaccactgagaagtaccacgccgttgagcgtgtcgctgacgtgcgcctggagtttgcccttccgctgaattctgagcgtcgtgaggccgagctagtcaacatttcattcgggtatgcacaggaagttatgagtgctcctgagcaatatcatcctgcactggttgccgcttgtgaagaggttgaccgtgacgccgctcgccagtacgtggccgcagcgggttatgttgacccgttcccgtggagagcatatgagatccttctcgcgccagattgtcatcctgcaaacaacgtgaaagctgcgcaacgtctggctgacatgctggccgggaatgttccgtctgtggagcaactggaagtgctgttgcgcgtggctaagtccaaagggtacaaaccaaaggctggtgctggcgacgcacgcgaggcttttcttcgagccaaggagaagcgcgaaagtgctgcacgtaaagctaaggctgagctgaccgaggctgtcaaagacgaggtgcgtgagcgcctgctgaaaggccagacccagcgctatatcatggataagctgggagtggctaaaggcactgtccagcgtatcaaagcatccctgtaa

SEQ ID NO: 153937 - DNA, 240 bp, Enterobacter cloacae
atgagcaaaactatcgtattgctgccgccccgcaagaatacagactgggctgcacaattaaagctgatttctgaatcgcttgaggtgagtcaggcagacctcgcccacgcctatcaggttgatcgtcgagatatgggtaaagcgtatcacggtgtgcgcaaactgccggaacgttgtgtgcctgttcatatgctgttgttagcgcaggtacacgactttagagcattatcaggagagtaa

SEQ ID NO: 153938 - DNA, 564 bp, Enterobacter cloacae
atgactttgagtattaccgatatccagcgcattaacgcgctggctcataagcacctaaagaacaatgaagagattgcagcggagacaggtcataccctgaccgatattgatgctgtaatccgtggcgtctatgtcgatgacttggccgaacattggaaagacgatgctgatattactctggcggagtacaacgccatccgcagccgctataagcccggcaagttgcaccgcgatacagagtttatgattgcccgcgatatgctgattcgccctgagactgtgctggctatcgcccattcccgctttagcaacgtccacacgcacccagtgccgaaagccgtcaaagcaaagccggagaaagcgaaagtagtgcgcaagttagtgcttactgatttagatgaaatccacaagttagagcgcttcggttggcctgctgcggagatcgccgggaagctgggcgtccctgttgaggtcgtcgcgcatgtgcaacgctgcctgagaaatcgttggtcgtacccggatactctggagtctgttaactccaaattcagcgaggctgaatga

SEQ ID NO: 153939 - DNA, 177 bp, Enterobacter cloacae
atgacccctgaacaattcagacaatggttcgccacgctgccaccgaactatcagagcgccgcacgcaccatgtacgacaacgcccgcaagtcgggcatacataccgcgtcaagccttgcgctgattcacacgttggttactgaccagatcaaatttgattcggagtttaatttatga

SEQ ID NO: 153940 - DNA, 210 bp, Enterobacter cloacae
atgacgaaatctgaatttgaaaatgaaacatggcgaatgaagggcttgcttcttggggcgctgattcgccgccttgaggaagataaggctggcgagtcgcgcatggtcgcagcggagttatccagtgcggtcaacttccttaaggccaacgccgtagaagcgccggacacatcattcaacaacgtgttcccggaggatgacgaacaatga

SEQ ID NO: 153941 - DNA, 1845 bp, Enterobacter cloacae
atgccaacaaacctacgccgcctgcttgcgcaggctgccgacgctgacccgctcaatactgcggacgcagatgtacagcaaatgatcgctgacgggattgttattcgacgttccaagatatgccctgtaaagcgtaaacccgttaaggcggcatacaacacaaagaccgaagagttttattacaatgcagatggctccgcgatgaccttgcgggagtggcgaacgctgcacggtgttcaaccgaagaaacaaaaacagcgctctgacgctgggttgcggcaagtcatccagcccggcgacgcgattcactgccgacgcgctgagattgagcaatggcttaataagaagcccgctcgttatgttgacccgctgccgccagattttcccggtgttcgcgtagacgatgccgcattgaaaccgcgcgagcacgccgtgccggaagcgacaaccggacagaatgcttttctcaaagcctgccgcgagttcctgatttgcgatgagaagaccatgcgccgtatcagtcggggcatgaaccaaatggaagctatgcgcaacgcagatttcaaacgctacggagactcaggggagtttcgtcaattgtggtgtggagagtcgaagcctaccgaagatagatttaatagttctaatcatcattgtgacccgaacggcttggctgcttcgccgtctgtgccgtcactgaatacagcctcttatgagttccgcccgctggttcgctgtgaccgaaacgcacgcgttagcctgttgccacccgatgggctggagtggaggccggggcagttgtctgttgctgatgcgatcttctcccgtggtagtgatgtgctggccgttctgcctacgggttatggcaagaccgccgccttcgcttatccattgatttatgagtcccgcgctggcgttggcctgtctgtaatcgtggttcccactaataccctaaagcgccagattctccgccagttgcgggatgctggcgttcacgctgtggcattcggtgacaagttgccgaggcaccgcaacgctcaacaactggcgggactagcagccggggcgttccgtgttgctgtcgtttcacctgagcatcttgttccgtcgagtcaggtctttgcggcgctgatggcttacggcgttgatcgttttattatcgatgaggcacacacggtcaaagactgggatttccgcccagcttacgacgcaatgcagcacacactacagaatgcttttccctcggctcaacgctgcgtgtttacggctactctactacgtgaaaatgagcgcggtttaatggaggcgctgggatgccgtggcaattacgtcacattccgtgctgatgttgctcgcgagaatatacagttgattccggtcaggcagtgccgccagcgataccgtgcggctgttggtctggccgaggctctgccggatgaagagaagacgctcattctcgtcaatgaccttaagacgttgcgggcgtacctgaaactcttcggcgaccgggcgcgcccatatcactcgaagacgatgcacctgagcaacgaggaacgccacgcaaacgctgagtggtttgcctctgcgccgggcgcgattctggttgctactaaagccttcgggctgggtgctgatgttcctgatatccgtaacgttgtcgtgacatacgttcccgatgacttgcctgatctcgttcagatgattggacgtgccgggcgcgacggtcaaccagcccgcgcgtttatgctgtggtcatcgctggcgctggatgctgcgcctgatgagcttgcttacttctaccgccctgaaaactgcaactggcagtgcatcgctaaatacctctga

SEQ ID NO: 153942 - DNA, 375 bp, Enterobacter cloacae
atgtatcagaaaatagagggagaacactggcgtcatgtctgggttgtcagcgatattcatggttgctatcagtggcttatggatgagcttaaacgacggcattttaatcctgatgcggatctgcttatctcggtgggggatattatcgaccgcggtcccgacagcgtgaaatgtttacagttgatgcaggaaaagtggttttatgcggtacgcggtaatcacgagcaaatggcgttagatgcgcttgaaaataatgattttagtctctggtcgataaatggcggtaactggtttaccggcttacggtcgctcaacaaaagcaggcgaaggatttactcgacgcgtgtcgggacttaccgcacattattgaaataa

SEQ ID NO: 153943 - DNA, 144 bp, Enterobacter cloacae
atggcgttcctgttgtcagtaaatttaaagttgattatgatgaaatgtggaaagcaaatatatcagaaagtacacttcttgaatggtttgaaaaaccagctgcatttacagatagaaggcaaagaattaagggcgaaaaaataa

SEQ ID NO: 153944 - DNA, 795 bp, Enterobacter cloacae
atggatcgaatttcagcgccgggaactgttgtaacagctacgtgtattgggcaggttggcacaaccattcctgctgacagcacggcaatagacactaatggttatatttatcagtctattgattcagcaataatccccgcgggtggctccattgatgttcagtttgttaacacaacaacggggccgatatcttgtgcatctggcgcactgaatcagatttatcgagcagtacctggctgggatgcgatcacaaacgcaaaccctggagtagtaggcgttgatgttgagtctcgaattgcatttgagacgcgcagacagcaaccagtagcaagaaacagccgcaatcaggatgcctctgtgttatccgctgttcttgcaaccaatggagtgcttgatgcttatgtctggtcaaaccggactgcagcaaccgtaaacaaaagagcgactagctaccctgttgttgcccactctatttttatatccgtatatggcggtacggatgcggatgtggccgaggccatattcagcacatataaccctggcgcgaatcttaacgggacaacgcattacaccgtttacgataatgttaactatctcccgccatatccttcatacgatatgcagtggctcaaggcatcacctacaagggtttattttaatgttcaaattgatagctccctaaaccctccgagtgacatcactcagcaagttaagaacatgattatgtctgtttttaatggtgaatatgaaggaataggtaaagcaagaataggtgcaactatcaatgctggttaa

SEQ ID NO: 153945 - DNA, 639 bp, Enterobacter cloacae
atgtggcaggacacgatcctaacgcagtattccgccagccaaaaattactttcaattattgatacattcaatcaggcggtaagcctagatgatttcactgatgagtttatagagaaagtatgggatttgacaacgtgcgaaaccttcggactggacatgtggggagccattgtaggtgtaagtcgatacgtaatcgctccaatagacaatgagtcttttgggttttctgaggcaaatgattatgaccccgaatacccaaccccatttaacgatgcaccattttttggcgggatgcaggaaacaacaaatatcaggcttggtgatgatgcgtatcgaactttaatcatgtgcaaagcctttacaaacatcagtatcgcaaccactccagacatcaataaatttctcaaaatcatgttttacaagcgaggtcgtgcatattgcattaactacagagacatgaccatggggataacttttgaattcgagctggcaccatacgaagaatccattctgactaattatgaggttgcaccggtaccaagcggggtgcttgtgaatatcaggcaagtggtcagcccttactttggattctcctctgactcatatccatttaatgatggaacattctatagagattaa

SEQ ID NO: 153946 - DNA, 1026 bp, Enterobacter cloacae
atgaatcgttcagatgcacccacgaaacaaccaactccttttgctgtaaatggtccacgagagcctattctgccgacaactccggcaggagataatacggcatcttatgattcaggcttcccgccaattaccatggcccttaaatcagcaggcggcctgcctccaaagggacaggatatgaaccaaatcctgtttgagctatcaagcctctccagatggttcagcaccggcgctatcaactcatatgactctgtattcgcaacctctattggtggctacccaaaaggttcagtagtcctaggtagtgacggacagaccagatatatcagcactacaaataacaacctcaccaacccaaacactggcggggctggatggactaacctcagtacagcatatcttgccagaagcaatccatttggggatatcaaggctgatggcacagttactacagctaaaactaacttaggcattcaggccttcaatagctctggagcaacaaccaccgtttctgcgccaacatctggcgtattcttctatgttactgactctggtaactggggtgtccaggattcagttggaaacccgcttccattgcctattgcaggtggcggaactggggcaaacacactattgggtgcgcgggtgaatttgggtgtatctagcttctcttctgacacatccacaagttatgtatcagccccaacctctggtgtcgcattttacgtgtcaaactcaggaaactggggggtgcaggattctggtgggaatccattgccactaacaattcaaggtggcggcacgggcgcaaacaccctgacaggggcgagagtaaacctgggcgtgtcacaatttggtgtttccggttcagtgacagcaatgtcttcacctgactcttcccggtctgtgattattgataacgctggaacatgggggctcagacaagcgctggtactgttatccctctttcgattgctcgtggtggcactggtgcaaccgatgcgtcgacagcaagatcaaatttag

SEQ ID NO: 153947 - DNA, 420 bp, Enterobacter cloacae
atgtcagaatatattttcagtgcaaaaaacaatgcattttatccggtagatatgatggatgattatgtggcagcaggctcatggccggacgatggtgtggatgtaactaaagagattttcctggaattcgctggagtgccaccggctgggaaagagagaggtgttggtgaggatgccatgcctgtatgggttgatattccaccaattcctaactcagtattaaggaaaattgcccttgctacattaagtagtgcatatcaggacgatattgaaaaacttaacagagcatggcttgcggccgctgtaaatgatggcgtcaatgagactgcaaagaaagatgtcgttttggctcagattaacacccgtaaaacacaatatgcaagcgacagggcagcaattattgcccaatatcctgattga

SEQ ID NO: 153948 - DNA, 1467 bp, Enterobacter cloacae
atgtttaaaaaagatgagaagatatttctaatctctctgtctattatgattttgctgtacatttcacctatcatccttgctgaccgtctttacatagatgatatattgagatcgcagtatggatataagaattggggtcttaatggaagaccccttgcagatgcagtaatggcaatggttaatatgacgtctggagagatcgttgatatttctccactacccttgctgattgcttgtggggcatatgttgtttgctcgttggcgtactataaaacagctattaactttattggtcctttcaaggccggtttgcttttcttctttgtaatagcaaacccatttctgctggagaacctttcttataagtttgatgtcctcccaatgattttgtcggtagcggtcttgctgcttcctttttgcggaataagaaatttatacttaaaaatcgtggcaggagtcctgtgcgttgcggcatcgctaagcctttaccaagcttcaattggcttcttttgtgcgctggcactgattgagctcgctatagcttatagtagaaacaatgctacagattgtatccttctgaaggatttgtgcttaagggcagcgtcattgctcattggctatttagcgtacagcatcattgccaagcatttcatacaaggggattacaacgaaacacactctcaaatgattggtctcaattttgaaggcctccagtcagttattgatacatcaagaggaatgaattatcagttaatgagaacgattggtgaaatgccaattgttgtatatgctgctgcctttcttgccgttttgttttcgatttattctgtttactcaagaaaggccgcatggtctggatccagatttatcgtttcccttgtgataatcacatccccagcaacaatatatttactatcatttattcacctaagcttgttaaagaatcctatctttgtgcacagggttttagtatccttctgcggaatcataatgtacgttattttgatgacgctaatgaatattaagagaaaaacgttcctggcaatacttttagcaccgttgtttttatttacaaactattactcatttgcatatgggaatgcacttaagtatcagaaagaatatgatgtcaaactatcaagtgagttagctcagattgtatccagtgacgatcctgatggtattaaacaggtaagaatatttgggacgcaaggctcatcaattcagagattaaatgccatcaagaggcttccttctctggagccgctcattcctctttattacacaggaggttggtggggaactcatctcattaagatgtatgacataaagaacgaaatcacaggagaaagcgatttaaatagagcttgctccatgcgagagattgagtctaatcagaggtatagagtttactccgatcaaaacagaatactgattgcgtttgataaaccaaattgcagatcgtga

SEQ ID NO: 153949 - DNA, 837 bp, Enterobacter cloacae
atggcattcgtaacaacgaaagatggtgtcagtatttattacaaagactggggtccgaaggatgcgcagccgatcgttttccatcacggctggccgctgagcgccgatgactgggataaccagatgctctttttccttgcagaaggcttccgcgtcatcgccctcgaccgtcgtggtcatggtcgttccgatcaggtgagtgaaggtcatgatatggatcattatgcctccgacgcatcagccgtggtcgaaagccttgatttgcgtaatgccgtgcacgtcggccactccaccggcggaggccaggtcgccagatacgttgcgaagtacggccagcctcaggggcgagtggccaaagcggtacttgtcagcgccgttcctccgctgatggtaaaatcagacacgaaccccggcggtacgcccattgaagtgttcgacggcttccgccaggcgctggccgctaaccgcgcccagttttacctcgacgtcgccagcggtcctttctatggatttaaccgagacggagcagaggtttcgcagggaacaatccagaactggtggcgtcagggtatgatcggtagcgccaaagcccactatgatggcattaaggcattttcagaaaccgaccagacggacgatctcaaagctatcaccgttcccgtgcttgtgttgcagggtgatgacgatcaggtcgtcccgtataaaaatgcctcccttcttcaggataagctgctcgcaaacagcgagcttaaaatctatccaggcttcccgcatgggatgcataccacgcatgcagataccataaatgccgatatcctgacgtttattcgcccataa

SEQ ID NO: 153950 - DNA, 384 bp, Enterobacter cloacae
atgttaaagatgcagatgatccagaagtgcgggctgacgaacagctcgcgccgcgcggcacgccgctcgtcctgtgacgcctgcgaagtgccgggtttagcctccagacggatcccgcgcaggccgatgcgtacaaagataagcaccggcacggtaagcatggccatgacaaagaaggtgctctgccagccgaaggtgttcagcagccagagggagagcgggaagccaattgccgcccctaccggtgtgcccagcagccacagcatggtggcgcgcgcctgcagatgctgcgggaagttgtggcgcacgatggcgaaagccagcgggaacagcggcccttccgccacgcccagcaggatgcgcaggacgatcatcagcgtgtag

SEQ ID NO: 153951 - DNA, 549 bp, Enterobacter cloacae
atgaatatcattaaaacagaaatacccgatgtgctaatttttgagccgaaagtttttggtgatgatcgtggtttctttatggaaagtttcaatcagcgaattttcaacgaagctgttggtaaagaagttaattttattcaggataatcactctaaatccagcaaaaatgtacttcgtggtttgcactaccaactacagccctatgctcaaggtaaattagtccgttgtgtcgtcggcgaagtttttgatgtcgctgtcgatattcgtaaagactcacccaattatgggaaatgggttggcgtacatttatctgcagaaaataaaaagcaattatggatccctgagggatttgctcatggattttatgttctgagcgatacagcagaatttgtgtataaaacaactaattattattctcctgaacatgagcgttcaatcttatggtcagacagcgaactgaatattgaatggcctgtcagccccgattgttcaccgagtttgtcttcgaaagatcttgctggtaaagcatttaaagattcagactattaa

SEQ ID NO: 153952 - DNA, 834 bp, Enterobacter cloacae
atgaccaaaataaaatacatcgatactaacgatttcgattatgttccatctgaaacagcatttctcgaatgcaccaggatcaccaatctgaaatcaggcattacagagtcactcacaaacaatgacaaagatttttacgtcaggatgcggcatcgctactattacttcgtgaaagagttgggcggtacttattacgataacgtcgatcagcttggtcaaagtattggtgtcagcccagcaacggcaacacgtattgttgcaaagctgagaaagatcggtcttatttccagtgataatccaaagcgatccaatcaatggactgttacaccgctcacgccggaaaacttcctcttagaacgtgatcgtaacgcgctggaagataaagccgatcctgattgggtggattgtctgaaacatccagtttttggcaatgccaaagaagacgtagcgccagaggtgcaggaagaaaagcaacctgttccagaagccgatccgatgtgcgagtttgacgatatgccggaagaagaagcgccagcgccggaaaaagtggagccaacaccgaagccaaagcccacgaagaaaccaacgccaaagaaagcaccagccaatcagcaagccatttccccattcgagtttaaaacgccacgagacgaacgttttgatgggttagcctttgaaaggttaaacgacgcatctgatcgcttcttagttttccaggattacgatctgccatacctcgtgttattcgaaagtcaggggaaactaaccaacccagccgcaatagaacatttgaaaatgaagaggaatctcttcgaaataacagggcgcttgtag

SEQ ID NO: 153953 - DNA, 453 bp, Enterobacter cloacae
atggaaattgcatatttgtgggtcgaaagatttaaacaatttaaagattatggtttgaatttatcaagcaaatacttttttaagtataaaaaagaatcatctgaacttcttgtggaaatgaaagaaacatatccagaagactttttcggaggcagcgtaagcgatattaccgcattgttagggattaatggggcgggaaaaacaacatctttagaattaatctgtagacttataacagaaagttttagagtaagaagtgatttcatcattatttacaagaaaaacacacaatattatattgtgaataggatggaaagtgatttgacttaccctgagtcattaatattacctggagatattaatgacttaaaaaaattagagttatgtttttctcgaatgtcttcgatgcaaattacattgactttcctgatgaagttgttgatatatctttga

SEQ ID NO: 153954 - DNA, 219 bp, Enterobacter cloacae
atgaacacgtcaccgtggaacaaagaccaaatggtccgtttaagcgggatacttacaatccaacttctgttggatcataagaaacaggaaagcatagtccgttatctgggcattaaagtcgattatgcgttagagaactctaaggttgtcagggctgcaacagcaaccctgtgccagaaactgatgttgataacgccgccagcatgcgcggctttgtag

SEQ ID NO: 153955 - DNA, 783 bp, Enterobacter cloacae
atggatttaggtgaaattgcgataaaaaattctggctggatttggagtacattaagagaggcaaaaaaactaagctatcaaattggagaggagtcaataactgactttcttgtgcttaatataaaaaaatggggcaggggaaaaattattattaatacgtttacccgccacaaagaatcagtgaatggctccgactgggagtggtggtttacaggtcgaagtggtaaatggttaggcatgcgtattcaagcaaaagttctcaacttaaattctgagaaatatgaacaccttcatcacacaaataaaaatgggcatcaagttgatcttctcattgcggatgccaagaaatatgaccttattcccttgtattgcatgtatacaaactggaaatcggggagttataaagttaattgggagtgtaaaacctacaaacgtagtatccttcattatggggcagcaattcttaatcctcttaaagtaaaacatctccagcaaaatagagcaaaccatttaactgatgttattgatgatttaaggccgatgcattgtttgttctgctgcaaaggcttctcgcaaggggatcttcctgaaagagctctggaatggttaagtggcgttggtctcctaattgagcaagacgctccttcacttgaatattttataaaggatgcaccaccatactatgtcactcaaatgttagagggaggtatacaagaagatgttatcgatttacatgatgataggctcaagcgtgtgacaattttcaacttagtaggtgaataa

SEQ ID NO: 153956 - DNA, 1977 bp, Enterobacter cloacae
atgcgaaatataaattcaataatgatgaggcttgctaagagggcagagaaacttcagccagaccatctgatcagatcctttgttgacgttggccccacatataccctattgtccagtaatgacaatcagataatgttcggtagaagaggtacggggaaaacgcacttcttggctgttctttccaacaatattcaacaaagtgggatcatttgtgttcctatagacatgaggttgataggatctactggagggattttttctgaccccaatatttcattaagtgaaagggccaccagattactttctgacacgttatgtaatatacatgaaataattctagactatatttttgaaaaggatcttgaaaatacgactgaaatagcgcaattacttaatgattttattgataaggcaacctcattaaatatagaaggtaccacggaggaggaaaattgttcggtaagccataattctatgaattcttcgataggtttaatggtaactaataccaacatatctgccaatttttcacgcttagataaaatatcatcagataatacggaaagaaaaaaagtatctggaaagaaaacattaaggattcacttcggagaaatcactaagctactcagcaatatagtttcaaaattaccaaaaaaagaattatgggtactgattgatgaatggtctgaggtaccaatggatcttcaaccttatcttgcagaacttcttcgtagaattctatatcccatctctggtattacagtaaaaatagcagcaatagcccatcgatgtaattttttactacatgatcaagacactggtgttcgtgtaggaattgaacttggttctgacgcctcttccgttattaatttagatgagtatatggtttttgataacgatcgtgatgctgctaagacttttttcaaaaatctgcttcataaacatgcccaagcaatagataaaaattcaatatgtgatgttgaggcaaacttgtttattaatgatgtgtttactcaaccatcagcgttcgatgagtatgtccgtgcggtagaaggggttcctcgagatgctataaatatcatttcacttgcggcacagtcagcactggagaacaaaatatcaattgtacatgtccgtaaatctgcgcagaaatggtttcaggtaaataaacatgcggccctaaatagcaaacctgaagcagttgttttacttgataaaataataaacgaagtcattggacatagaaaaacacgtggttttttaataagtaatgaaaacaataatcctttgattgattatctttatgatatgcgggttattcacgttttaaaacaaggagtttcagctcgaaacgctataggaaaaaaatatacactctatactcttgattatggttgttatgtagaacttatgtcctcaagttctgctccattaggcttaataatcgaatcagatgaaaatgatgagttaaagtacattgagattccgaagtcagattatagatcagttaaaaattcaattttagattttgaaagttgtcaacaattaagattaaatttagtgacatcgacagagcatctgcaacttcctattaataatggtaaacataaacacgtagagaagccaattgatagtaaaataataaattcaattccaaaaaatattggttcattgaaaatagcaggaacaatttatattcctataattatggtggcattggcattaagaaaagcaagaggttttgataaaagccatgctgtggagttgacgaaaataataaatgagcacattgttattgatgtaaatagaccaaaaatagcaaccaacaatatgtcaagagaacttagaaaggataatatattggatcttccttggctagagttccatgaaaatggtagaaatccacaattttctttgcgctctaactggaaagattactggtatcagtattttgggaaaaaagctccagcattttga

SEQ ID NO: 153957 - DNA, 1983 bp, Enterobacter cloacae
atgtctggatattgcttttatacacatgatgcagaagctttagctgaaagagctaatataaaagaacagatagaagaatatgcaaacaaaaggaaaaaacaaacatatgttctttgtaaacccttatcgaaggaagatataacctacgattatgaagatgcgatagcaatattttcatcaggaatgaaaccttgcttagtgaacattggtgaagacactgatctttttgaagattttgttgaggattttaaagaggatgtttcattcttagccgagaagtttaaatatagggagaaaattggcagaaaaaaatcttggcaatctttatttattgaaacagatgcaaaaaacttaagctttgaagattatcaagttgataaggcagaggctagggtcgttgatttgctgacttccttaatggtcggaagcattaatgatgtatctaaaataaagatggatactgataatctccttgacagtgtaaaatcaaaaattatattgtttgatactgatcagactagctttgtatttaaaagtggtcataataaaaaatatgtaattcagggtttggccggttctggaaaaacagagctacttttacataaattaaaagaaatatattctcaggatttagaagcaaaaattgcttttacctgtttcaataaaatccttgcttcttcaatgaaaagcagaattcctgattttttcgattttatgcgagttgagagacaaatagactggaataataagcttttttgttttcactcatggggaagcgggaaggatccattctctggtatgtatagatatatctgctatttttatgagatatcttttggaagcttagccgccggtacttttgatgatttatgtaagaaagctattttagatattaaaagtcaagggggtgatataaaaaaagcttttgattatgtatttatagatgaaggacaagatttctcttcaagctttgtagagttatgtgaactagttacagagaaaaaagtgtttgtggctggagacgtttttcaaaatattttcaggccaatagatgaaaatgtaaatagagccgatatgcttttgaaaaaatgctatcgtactgatcctaaaaatttaatgttttctcatgctcttggtatgggactttttgagcaaccggtgctgagatggttgaaaccaaatgaatgggatgcgtgtggttataactatgatgaaaatgatggtaaggcattgttaagtagagatcctttaaggcgtttcgaagatattcctgctgattataaaagcacacacattcactcattagatgaaagtgacactatttctggaagaataatttcagtaattaataatatacgtaatagacatccttcaaccgagcaaggtgatattgcaataattttcattgatcgtggccaatacatttatgaggcaatttcgcgattgcgattggatattaaacagcaattgaattgggactcaaatgtctcatttgaatcaaagtctcggcaaatggataagctatttatatctaatataaacaatgcaaaaggtttagagtttccttttgttatatgttttgctagaaaacttcaaagacatccctcatttagaaatgcactttatacgatgatggctcgctcctttttagagagccatcttatgttaagtcattttgctgaaaaagaaataacaacacaagttactaatggattaaccggtcttactcaaaataataatttatgtgtaaggattccaacaccagaagaaatcaacaatcaaaacgattttattgttctggaagatggtttttctattgagaaaattgttaaagattattgcattcctcgctctgcatcaccaaggttgattgcaaaggtgattagtagtgttacaaaaataattgaggatattgatgattattctgaatcatacttaatgaagcttattgagttagaatatgaaaggaataaaatattatga

SEQ ID NO: 153958 - DNA, 639 bp, Enterobacter cloacae
atgagtgtatttcttttctctgatatacccgattatcatacaagtaaatttgtatcagtacgtgacacctttgacaatttaaccaatttattgttggttgtcgaaataattaatttatgtggtcattgccgaacagttaaccataatgatttcgatttcgcagtatattctggagcatatgctaggatattggttaagaaatctgatggtttttttacaatgtcattaccttttaaagtaattgactatggtggtaatgttgtttttaactacgaagactataataaagttgttaatgctgagttcatatcaatgatgagaaacgctattggtgcttgtcgagattatgggtattcgcatgaagaggtaatattttctcttacagaaaatttcaaccttgagtatcgtgaagctgctaattattgcgatatttttacttctctaataacagatgatcacggatactttagatttgatgatgatcctgataatgaaaatggaagaattcatcctcgatatcattttgatcttttttataaaaattctacaacaattaagattggtgttagtcaaaatataacagcaccatattttctcaacttattcgataaatcggtaagtaagtactatcttgtatag

SEQ ID NO: 153959 - DNA, 240 bp, Enterobacter cloacae
atgtcccaatcagttttactgccaccgggacccttcacccggatacaagcagaagcggtcactaccacgtacagcgatatcactatcgaagacgaccagggcagtcacttccgcctggtggttcgcgacgccgaaggccggatggtctggcgggcatggaactttgaaccgtatgccggtgaaggtcttaaccgctatatccgcaggtcaggcatccgcactgacacttttacccgctga

SEQ ID NO: 153960 - DNA, 165 bp, Enterobacter cloacae
atggtgatatttcgtgcggaaaaacgggccgaatttccgttacataaaaatagtaagattagattttctaatgcgaaaaatgacgtgaaattagattatttcaaacgaggagatttccccggcgcgaaggccgggaaaataaagtgtgacggggatcgagattaa

SEQ ID NO: 153961 - DNA, 846 bp, Enterobacter cloacae
atggcaaacgactggcttgagctgcgtcagcatgcagaaacaggtattgagacaattaaggcgcatttcgaaggacacgcctttgatccccactggcatgatagctatctggtcggaataaccctttccggtacgcagcagttccactgtcgccgtgaacgccaccgtagccagccgggcgatgcttttttacttgagcctggtgaaattcatgacggtgatgcgccggtagagggtggctttacttatctgaccttttatctggatgaacactggctcacccgtacgcttcaagggctgtatgactctactcccgggagttacaccctccactttgcccaaacgctgacgcgagagcctcagctggtgcgcgctatcggtgatacatttgcctcgctgcataacgatgagatgaagatcgtacaacagagcacaatggataacctgctcactaagattacagcccactgccactggcggaagaaactcccgtcgcagttacaaagctccgctgtggcgcatcgtgcccgcgactatctctatgcgcatatcggcgagaacgtggggctgtcagaccttgcgcgggagacggggacggatcgctttacgctcacctgctgctttaagcgcgaatttcaccttgcgccgcacgcctggcttatccagctgcgcctggcaaaggcccgacagatgctggcgtatggggaactgcctgttgatgtggcgacggcagtaggttttgccgatcaaagccatcttggtcgctggttccagcgggcgtaccgtatttctccggcacactaccgtcggttgtgcacaaaccttccagacgtttccagaaaataa

SEQ ID NO: 153962 - DNA, 438 bp, Enterobacter cloacae
atgagtagattccagaaagcatctcacgtgctctggtgttgtcaatatcatatcgtatggacacccaagtaccgatttcgcatcctcaggaacaatgttggcaaagaggtctataagcagataaggatctcaagtgagcagctcgggatagaagtggtagagctgaatgttcagatagatcatgtccatttgctggtaaaagtcccgccacgtctttctatttcacatgtaataggtcatttgaaaggtaaaacagcccttaggttgttcagcaaatttccctacctgcggaagaacaagctgtggggaaatcacttttgggcacggggttactgcgtagataccgtaggtataaatgaagaaatgataagaaagtacgtgaagtatcaggaaaagcatgaagttgaagagagccagcttccactaaaagaggtgtga

SEQ ID NO: 153963 - DNA, 300 bp, Enterobacter cloacae; identical to SEQ ID NO: 77551

SEQ ID NO: 153964 - DNA, 1815 bp, Enterobacter cloacae
atgccgttaatcgccgggattgatatcggcaacgccaccaccgaagtggcgttggcacagcatgggcagtttatcgccagcgggattgtcgccaccacgggcatgaaagggacgcgggacaacattgccggggtggtcgcttctctgcagcaggcactggataaaacaccgtggtcgcttcaggccgtggcgaaaatctgcatcaatgaggccgcgccggtgattggcgatgtggcgatggaaaccatcactgaaaccatcattactgaatcgacaatgattggccataacccgcaaacgccgggtggcgtcggtgtggggatgggaaccaccatcagcgtggataagctggcatcactgagcgaggattgctttgcacagggctggatcccgctggtgggcgaagagatcgatttcctcgaagcggtctggcttatcaatacggcgctcgatcgtgggatcaacgtggtggcggcgatcctgaaaaaagatgatggcgtactggtcaacaatcgcctgcgtcgggcaatgccggtggtcgatgaagtcacgctactggagaaggttccggaaggtgtgctggcagcggtggaagtggcggccgccgggcaggtggttcgggtattgtcgaatccttacggcatcgcgaccttttttgccctgacgccggaggaaacgcaaaccatcgtccctatcgccagagcgctgattggcaaccgttccgccgtggtgctgaaaacgccgcagggtgatgtgcagtcgcgaacgatcccggcgggtaagatctttattcgtggcgaaaagcgcggtggggaagctgacgtagcgcaaggcgcgcaggccattatgcaggcgatgagcgcctgcgcgcccgtgtgcgatattcgcggtgaagcaggtacgcacgcgggcgggatgcttgagcgggtgcgtaaggtgatggcctcgctgaccggtcatgacatgaacgccgtgcatattcaggatcttctggcggtggatacgtttattccccgcgcggtgcaggggggcattgccggggaatgttcaatggagaacgccgttggcattgcggcgatggtgaaatccgatcgcttacagatgcaggctatcgccagcgagctgagtgcgcggctaaacacgcccgtcgaagtcggtggcgtggaagccaacatggctgtggctggcgcgttaacgacgccgggatgcgccgctccgctggcgatcctcgatttaggcgcaggatccaccgatgccgccattatcaataacgatggcgtagtgaaggcggtacaccttgccggggcggggaatatggtcagcctgttgattcaaacggagctcggcttaagcgatccgtttttggcagaggaaattaaaaaatacccgctggccaaagtggagagtctgttcagcattcgccatgagaacggcgtggtggagttttttcgcgagccgctcagcccgtcggtgtttgccaaagtggtgtatctgaaagacggggagctgatcccggtagataaccaaatctcgctggaaaaaattcgtctggtgcgccgtcaggccaaagagaaagtctttgtgaccaactgtctgcgcgcgttacgtcaggtttcgcccggcggctcgattcgcgatatcacttttgtggtgctggtaggtggctcatcgctggattttgaaattccgcagatgatcaccgatgcgctggcgcattacggcgttgtcgccgggcagggcaacatccgtggcactgaaggcccgcgcaatgcggtggcgaccgggctggttttagccggagaagcaaaaaaatag

SEQ ID NO: 153965 - DNA, 183 bp, Enterobacter cloacae
atgcgctgcttccatctgcctgaatcgacgctgattatgctggtctccgcgtttgcggggtatcagcatacgatgaacgcctacaagtctgcggtagaacaaaaatatcgcttttttagctacggtgacgcgatgtttatcacgtacaatccgcaggctttgaatgagcgtgtcggggaataa

SEQ ID NO: 153966 - DNA, 1170 bp, Enterobacter cloacae
atgattacgggaatggatattcaggccggggcaaaaattgccccggcgtttatgctcaagcttgataacgacgatattacgcaggattttagtgaccgccttatcagcctgaccatgaccgacaatcgcggattcgaggccgaccagctcgatatcgagctcgatgatactgacggccagatagctttgccgccgcgcggcgcaacgttgaccctgtggttaggctggcagggtgccgcgctgataaaaaaaggaacattcacggtcgacgaaatcgagcacaggggcgcgcctgatacgctgaccatcagggggcgcagcgctgattttcgcgggtcgctgaactcgcgccgggagcagtcatggcatgacaccacgctcgggcaaattgtggagacgattgcggcacgcaataagctgacggccagcgtggccgacacgctgaaagccgtcgcagtgcctcacattgaccaatcgcaggaatccgacgcggtgtttctatcccgcctggctgaccggaacggtgcggcggtttcggttaaagcggggaaattattattcctgaaagcagggagtggtaagacggccagcgggaagcccattccgcagatgacgcttgagcgcggggacggagatcgtcatcagtttgccattgctgaccgggaagcctacaccggcgtgtcggcaaaatggctgcacaccaaagacccgaagccgcaaaagcaaaaggtgaagctcaagcgtaagcctaaagagaagcacctccgcgcgctgcagcacccgaaagcgaccaaagccccgacaaagactaaacacaaaaaagagcaggaagcgcgtgagggtgagtatatggccggtgaggctgacaacgtgctggagcttacaaccatctacgcgacaaaggcgcaggccatgcgcgccgctcaggcgaagtgggacaagctgcagcgaggcgttgcggagttttcaatctcgctggcgattggccgggcagatttatttcctgaaacgccaatcgcggtgaaagggtttaagcgcgtcatagacgatcaggcgtggataatcagccgggtggtgcataacctcaatgggaacggctacacgacgggcttagagcttgaggttaaggtttcggatgtggagtacgaaagcgaagaattaacgcagtga

SEQ ID NO: 153967 - DNA, 357 bp, Enterobacter cloacae
atgactaaagaaatggaagcatttactcaacatataaatgatggcttggaccagcttcctgcttttagtggagagacataccgcgggatgaacagcttaccttcacacatattggaaggatatactccgggcaaaacagttatcgatccagcctttgttagtactgatgttaatcaaggcttcagcggtcctatccaaatgcgtattgaaggtttttccggtcggaaaattgacttcctttcagaattcaatgcaacagagactgaagtgctatttaagcctaatacatcgtttgaggttatcagcaggtcagatgagcttgggataacaaatatagaattaagggaaataccatga

SEQ ID NO: 153968 - DNA, 282 bp, Enterobacter cloacae; identical to SEQ ID NO: 25837

SEQ ID NO: 153969 - DNA, 1101 bp, Enterobacter cloacae
atgcataaaaattggaattattcaaataaaccacttgctaatttagagtctctattcaaaatgctggaaacgaatgaagagaggctcacttatcttttaaaaaacaaaagaaaatatttcaaaacggtgcctgtaataagaaaaggtaaaaaaagaacgacgtataaagtggttggtgaattattaaaggtacatgagcttattaaacagcgtattttttctaagatatcactcccagagtatattactggaggtaggaaaggagtcagctatattgatgattgtaaatcccatcttaataagtcaattatcattcaagaagatatgaaggatttctttccttctataaaagaagatctgatagctaaagcttttcaatattacatgaacttctctcctgaagtttcgttattaatagcgaatctgtcaacacttgaaggctcacttgttcaagggactaagttaagtactgacattgccaacttaatatttttagaagaagaggctctcctcagtgaggaagttagaaaattaggtggaatttacacgagatatgtcgatgacataactattagtttcgaatctgaagttaataatgatgatatttcaaaaataaaattaatgatattgtcaatggcgctcaaaagtggggttagattaaataggaagaaatcaagggttttgaggaatggtcagtctaaaattgtacatggtgtaaaagtaatcaaagagcttagaccaacacaaaaaagaaaagataatataagggtgtgtctttttaatttgaagaaaaaagtgattgaaaaagaaagtgttatggatgtccttacgttgtattttaaaattagaggattaataaatacattaaagcagcaaggtgataagaatcatgcagagtatataaaacaagctaatcagttagtagctggtgttgataaaaaggaggcaataaaatcaatcaggaaaatgagaaaggttaaagatatcaggaaattaagatcgttatattcaaagttaaaaccattagggtatacatctaaaagtgtttctgctattttggatgttgaatataaaacatgtaaatgtaaaattaataactaa

SEQ ID NO: 153970 - DNA, 795 bp, Enterobacter cloacae
atgcagaaaagcttagcagaacgatttgactcatttgaagaggactttcaagacgttttatcgaccaaatcgatgcaatacaactcgttgttgaacgcaaacaaaatgtatgtggatgcagcaaaatataaaatatggatcggacgggtcaaaaagttactggaagacagttatggacaggattctgaattttacaaagactttatcaaagctcaaaaaggattttatgcctcaaattatgaaattctcaccacacaattaaaaccggtttttgatgccgcaaaagctgatctagattatgccctccctctgaatactagcccagtattgaaagaaactgacagattagatctgataattaacgtgcttgaaaggtttccgtcgttctgtcgccagctgaaaaaaagatataacaacagagatagcattgaggtaaccgacgagtatgacgttcaggatctggttcatgctcttctcacccttcatttcgatgatgtcaggccggaagaggcttcgccgagttatgcaggctcgtcctccagacaggattttttgctcaagaaagaaaaaatagtaatcgaggtcaagaaaacacgtaagtctctgggagcgggaaaaatcggagaagaattaattattgatatggcccgttaccgcgcccacccggactgtgacacgctggtctgttttgtctatgacccggatggatgggtgaataacccgaaaggtgtggttgccgatctggaggggggcgattcagaaggcaagaccagagtggtgatagcgcagttctga

SEQ ID NO: 153971 - DNA, 609 bp, Enterobacter cloacae
atgttttttgataaagctacttgtgtatattgtaatgctgactctgctttaattatcagtcagaaggaaggagggttaaataataaacaggctttattcgaattggatcatttttatccgaaagctaagtatccttatttagctttgtctttttacaatcatataccatcatgttctaattgtaatggaaagttgaagcgttcacgggatttcactgtcgaaactcatatacatccgtatgttcgttgtttcgatgatgagtacgatttcgttccaaatatggatgtttttactggaggaccattgaatcttgttaagatgagaattaaaaacggtcaaactgattcattagttaaagatttaaaacttgaatcaagatattcaaagcttttatctgtgtcttctgctaatgtatttattgaaatgttgcataagtatgaagatgtaattagagacggctcagcagatcctagatatgaagatatgttgctcgatttaattaagagtcatgtatcccttgaaaaaaataatgttttaaagagaagttacagtaagcttaagttagacttgctacgagcctttgacatcaattcaagaatagtaaaatga

SEQ ID NO: 153972 - DNA, 204 bp, Enterobacter cloacae
atggcggagtctgaaaaatcgcgattaatcgactttgctaacgccagtatcaatgcgaagcaatggccgggaaaggccgcgatcggacggcttaaaggtcaagagctggcggagtacaatttgtggctggattatctcgatgcattgcaggcagtagatacgtcgaaagccccggagattaactggcctgaattagccgcctga

SEQ ID NO: 153973 - DNA, 1248 bp, Enterobacter cloacae
atggctatttttcatcttgattttaaaattgtgaaacgttcagaaggcaggtcttccgttgcgaaggctgcctatcatgctcgtacacgcataacagatgaaagaacaggtgatacgtatgattacagtcgccgtactgatttatatgggcatttcatattagctccagctaacgcaccagaacacatcgtaaaagactctacagcattgtggaatgaagttgaaagagttgagcgccagaacaatggtcaaacatcccgttatttcgatgttgctattcctgccgagttaaacaatgacgacaagaaaagacttgtccttgagtattgtcagaaaaatttcgttgataaaggcatgattgctgacatcgctttccatgatcttgatagtgataaccctcatgctcacgttatgttaaccttaaaaaccataggcccggaaggttttggcaaaaaggaaagaagctggaacgacagaaaaatgtctattttttggcgtgaatcatgggcatctatggctaacagcttcctcgctgctgctggttcatcagaacgtatcgatcatcgttctctccaagtccagcacgaggaagcgttagaaaaagcagcagtagctttagataatgaagaacaagcactatggcttgctaaagccgctgaaacaaatcgtcctgcaatgaagcgtatccacagtgccaaatggcgtaataaagctgctcaggaacaaagagccgcagaacaggctgttcgtgatgctgccaagcaggaagcagttgaagtctacaaaacattcagcgaacttgaccttgaaatcgtcgttgatgtcagaagctttacgattacacatcttgctgaaccagaagaaattgttttaccagaaacgcgatccagctcttctacaaatgaagaacaaaatcaagaaaaacgtaatctctccgagatttcgtcagaaaaacaaagacctttactggtagcaccagctcctgatactcgtatgcgtggcgttaaatcttaccgtgataaaacaaaagtcagtaaggtcgttgcaggtaagaaaccatcagtcagtatttctggttctggaacaaatactatcctgaaaatatcctcctctcaaaacccaaacagggcatccagaagcgcccctgaacgtgttaagagaaaacaggctattccacgtcaggataatatttttaaacgcttcacaactctgatcttacccacgaatagtggacacacgactaagtga

SEQ ID NO: 153974 - DNA, 1095 bp, Enterobacter cloacae
atgcgtaaagatacccgctttaaatttaatgcctacctgtcccgcgtcgcggagctgaacggcgtttccaccgatgatgtagcgaagaaattcaccgtcgagccgtcggtcacgcaaaccctgatgaccaccctgcagatgtcatccgcgtttctgaccaaaatcaacatcgtgccggtcgacgagctgaaaggcgaaaaagtcggcgtcggcgttaacggcacaattgcgagcactaccgacaccaccggtgatgatgagcgtaagaccgctgactttaccgcgctggagtcgaataagtacgagtgcgcccagattaacttcgacttccatatccgctacaaacagctcgacctgtgggcgcgattccaggacttccagacccgtatccgtgacgccatcatcaaacgtcagtccctcgatttcatcatggccggtttcaacggcatcgagcgcgcggcgacgtccgaccgcaaaaacaatccgctgctgcaggatgtggccgtgggatggctacagaagtaccgcaatgaagcgccagcgcgcgtgatgtcgaaagtcaccgacgaggacggcacagtcatttccgacgtgatccgcgtgggtaaaaacggcgactatgcgaacctcgacgcgctggtcatggatgccaccagtaacctgattgacgagatttatcaggatgacccggagctcgtcgtcatcaccgggcgtaagctgatggcggataagtatttccctatcgtcaatcaggagcaggcaaacaccgaatcgctggccgctgacatcatcatcagccagaagcgaatcggtaacctgccagccgtgcgcgtgccttacttcccggctgatgggctgatggtgacgcgtctcgacaacctgtcgatttacttcatggatgacgcgcaccgtcgcgccatcattgaagaaccgaaaaaagaccgcgtagaaaactacgagtcgatgaatattgactatgtggtcgaggcttacgccgccggttgcctgattgaaaacatcaagctcggtgactttaccccaccggcagcgccggaaagcgcttccgcgcctgcagcaccggaaagcggagagtaa

SEQ ID NO: 153975 - DNA, 231 bp, Enterobacter cloacae
atgttcgaggttaatgcggcagccgtagacgcgcgggtcgaacgtgtcggccatatcctgaatatcatcgccgctgatgacacggccatcgcaggtgtcaccctcgacgccgatacgaaaccatttagaaactttctttgccattgttcaggtgtcctgatgttgggttttcgggtcgggtttagtttcctgactctgacccgtatcagccaccgcttacgatctgattag

SEQ ID NO: 153976 - DNA, 279 bp, Enterobacter cloacae
atgcccgacatcgtgcgcgcgaagctgcacaaaatcaccggctacgtgctgcgtgatgcggagcaactgccggaggcgctggcgcacctgcagcgtgcgatccagttagagagcaccatcggcgtgaaaaaggacattgagcagctagagcgccagctcaggccaaaacccgaaccgacaccgaaaaccaaaacgactaaaccgcgcacgcgcaaagtcgccgctaaaccggcggcacggcgcgggcgtccaccaaaggcggcaaaagccgcaggttaa

SEQ ID NO: 153977 - DNA, 276 bp, Enterobacter cloacae
gtgcgccgcgtggtcgagccgctcggctacctgataaacgtgtcagagtggtgggagaccaacgacccgcccggcacttttcgactcgatatcggtgtgctggagaccggcatcaccgaggaaatgtatcacgagatggaaaggctcattgctgatgcaaagccagccagccgccatcttattggcctcaacattattcaggacgtgccgggctatcagtacaccggcgcgctgacgtatgacggcgacaccatcacggtttacccggataagtga

SEQ ID NO: 153978 - DNA, 273 bp, Enterobacter cloacae
gtggcgggatatgcgctggtctgtggcgcgcatccaggacaaagcgcgctgcattgtggggcaaatctgatgaaagcctatgcgctgcagggcgacaccctcgacgcgatttgcgcccggtattacgggcgcactgagggcgtggtcgaaaccgtcttagaggcaaatcccggcctgtctgagctcggcgtgatcctgccacacggcacggcagtagagctgcccgagaccgagagcgcggccagaaccgaaacggtgaatctatgggactga

SEQ ID NO: 153979 - DNA, 273 bp, Enterobacter cloacae
gtggcgggatatgcgctggtctgtggcgcgcatccaggacaaagcgcgctgcatcgtggggcaaatctgatgaaagcatacgcgctgcagggcgacaccctcgacgcgatttgcgcccggtactacgggcgcactgagggcgtggtagaaaccgtcttagaagctaatcccggcctgtccgagctcggcgcgatcctgccgcacggcacggctgtagagctgcctgagaccgagagcgcggccagaaccgaaacggtgaatctatgggactga

SEQ ID NO: 153980 - DNA, 339 bp, Enterobacter cloacae
atgattaatatctcaacaaacaacgcaatcgaccaagcagagaaaatcatcactgatattttcgaaaatggcgagcatgataaacagactggcgaaggtctttttcgtgttatgacactgctagctgatgcccgctcaacgataggcgacattgacgatcttttctttgatgttgctattacggcaagaaagttagaggcacttactgccgtttattgtgagcaatatttcactgatgaagataatgaacgacaagaaacatatttggccgctacgattcgtgactacgcgtctaaatcttgcaatgaattaaaaagcatccaagaaaaacttaattaa

SEQ ID NO: 153981 - DNA, 282 bp, Enterobacter cloacae
atgagcgtgaatagcataatccagttaatcgaaattgacttaaccagagacattaatgtaactgaactcgccagtgaggcagaaaacaaaacaacttcattacttgaagcaataaattttattagcttaaaaattatggaaatgagcgaaggctcaaaagaaagtaatgacaaaattaattccttgtcgggtgtcattgctgaattagctgacttagccatggtgactaataagatttcaaatgaatctcactatcacagcggaatgcgggaaagcaaatga

SEQ ID NO: 153982 - DNA, 675 bp, Enterobacter cloacae
atgaaaactgttcatgaaatcaggcgtctaaacgccagaaaattacgagatggtgttggtggaaactcattttttgccaacatgatcgatcgtgagcctactcaaaccagtcggtttatgagcgatggtgcaaccaaaaacattggtgatgctatggcaagacacattgaaaaatgtttcgacttgcctcttggatggctagatcaagagcaccaaacaacgaatgttgcaaaaaatccagatgtttcagatactaatagaaatattcggatggtccccgtcatctcgtgggtacaagctggcgcgtggacaaaggtggatgaacaagaggttgatttgtacagcactgaaacctatccatgccctgtgccatgtgggccgatgacttatatcctcagggttataggtgattctatgattgaggaataccgcccgggagatatgatatttgttgatcctgaggtaccttctgttcatggtgatgatgtagttgccttgatgcatgatagcggtgaaacgactttcaaaagacttatagaagatggtggcagtaggtacctcaaggcactcaatcaaaattggcctgagccatatataaaaattgatggaaactgttcaatcattggaactgttatattttcaggaaaaccaagaagatacagaaacaaaccataa

SEQ ID NO: 153983 - DNA, 219 bp, Enterobacter cloacae
atgaaagcgtactggaactcattaaccaaagagcagcagacccatctagctgaaagtgttggctccacgcgggactatttacgcttagtttttaacgggcataaaaacgcaggattcaacctcgcaatacggcttgagcaagagactgctggggtgattacaagatcagaactgcgcccagatatttatcaatcctccgcgaacaagtttggagcgtga

SEQ ID NO: 153984 - DNA, 258 bp, Enterobacter cloacae
atgtcaccggaagaatttatcaaaaagcacatcacggatgcgctggtaggtgaaggctttccggcggagatcgccagggggggggctgaatatggcgctgattattatcggcgctgttctcaggccagccggaagggaagcatgttcgctgattgtcttttccgtgcccggcagtgggcccttggacagacaacactggctgaacgtagcgcaggaaagaagcgcgtctcccgtaagggacagaacagtctgttttaa

SEQ ID NO: 153985 - DNA, 246 bp, Enterobacter cloacae
atgatccggaccgtagaaaatccgctttgtctggcgcatatctggcggcaggtgaaaagtggcctgcgtccggtactcgtttttgcgctgcgtcctgagcgttgtaaagctgcgaacgggcagaacgggcaaatcttcatacagttcaggccaggcggtccgaatataactaccggcaggcaactgcttaacgaaagcacgctggtagatgttgtcacccatgcccagcatgccatcaatgaatag

SEQ ID NO: 153986 - DNA, 462 bp, Enterobacter cloacae
gtgaaaaggttcgtagtattaattttaacaatgctgattactgcaacttcttatgctgaacctgggaagtttgaatataaagctgctgatttgatggagcagcaaaaatttactgagtggcagcattatgcatctgcgaaacctttttttgcgatgaatggccgaccctttgctatgaccatagatgattttgctgacatcattaggcgtacatttcaacaatgcaatgatttggatgcttataccaaccgtaagggaacaagagatgactgccaagaatatatttataatggaatgaaagagtgggtaatactttcaaaagatcctaacgtcagtcagcaggcatggaaaatgggaacgagctatgcctttaatacaaacaaccctattcccagcaataatatatttgattttaatgggtgggctggcgggattagagtcgccaagtctcagggatattaa

SEQ ID NO: 153987 - DNA, 402 bp, Enterobacter cloacae
atgatgtctatttatgcactgattaaggacgggcaggtcgtaaatactgtcgtgtgggatggcgagggaaatatttttgaagggtatgagactgtaaacattgatgggctcggcgttggtatcggctggagttatgacggcaaagagtttaaagctccgcctgagccagaacctacgcatgaagagcttgttgagcaggcagaaaaccaaaagcagtcattaatcaatgatgccaataactatatcgatagcaaccagtggccttcgaaattggcacttggacgcctgtctgatgaggataagcagtcatttaatgaatggctggactatatggatgcactggaggctgttgatacatcaactgcgccagatattacatggcccgaaattcctgccacttaa

SEQ ID NO: 153988 - DNA, 1155 bp, Enterobacter cloacae
atgaatgtttttgttgaatatgcgattttgtttactttcttaatagggtgcggattaatattttccttacctaagtttggttttgtggatgacaaagaaatttccaatacaaatcataacaccccaatggatgcattaagattttttcttgcgtcttttgtattcatcagtcatgagataggtttcttttattattttactgatggtaaattcacacatccatttgttggcattagtatgctttcgcatgttggtgtggctttatttttctctattacagggtatctattctggggtaaaattaagcgaggcagtgtaaattggatttctttgtataaagggagattctttagaatagttcctttagtatggtttaattcattacttattattttaattgtttgctttctctctagagaaatgccaagcatgaatgcattacactggtttgactttataaataatcaccgccctgattttacatcatataaagaaacatttatgttcacggctggtgtattttggactcttgcttttgagtggggtttttacatagctcttcctgccttatcgttgattgtaaaaagatcttttgaattcagcatgttctttgtgttcgttctcgtttacgcttctccttacataacattaaaagttccttttaacttttttttgttttttgctataggaatgcttgcgtcagacgttgcggaaaaaattaacttacaacaaaaacactttaattttatattcatttcctctttgattgctttgttattttgcgatgacagaatttaccgagttgactctttctcgaatgttcttttgtttttaatcatacttagcgtagctaaaggggcagatttatttggattgcttagaataagaggattcaggcggttgggtgtcgcaagttatagcatttatgtaatgcatgctttcgttataatgtgtgtgttcaagctatttaactcgctaggtatcttaaaaaacaatccaattacaataatgctacctctaagtatttccgtactgtatatttcattaataacataccatttaattgagaaaagattcatgacccttggtcgaggggttaaatttaacgcccccgcacttacagataaaaatgctaaccaaatagaaaagccataa

SEQ ID NO: 153989 - DNA, 423 bp, Enterobacter cloacae
atggactttgccgcgcaggccgaggccatccgggcgctgaccgagaaatacaccgtcgactatatcggcatcgatgcgaccggcatcggccagggtgtttaccagctcgtgcgctcattcttcccggcggcgcgcgccatccgctacacgccggaaatgaaaaccgcaatggtgctgaaagcaaaagacaccattcgccgcgggtgtctggaatacgacgccggtgcaaccgacatcacgcagtcatttatggctatccgcaaaaccatgaccagcagcggccgcagcgccacctatgaagccagccgcagcgaagaagccagccacgcggatatcgcgtgggcgaccatgcacgccctgctaaacgagccgctttccgccggtagcggtatgcaatcagcctccattctggatattaactaa

SEQ ID NO: 153990 - DNA, 474 bp, Enterobacter cloacae
gtggcctgtacccgccagcctgccgcggataatggccataccgcgctggcgtggtttgcgctgcagacggcgcggctggagcatctgcgcgcgctggaggagacaatcatcgccgatctgatggtcgcggtggatgagcggattcagcgtgacgaggtctatctgcatcctgcagatgaactggaggacccgctggcgcattacccggataaacccctgctgcctctggttcgccagcaggcgcgcgagattgagcagctctcccgtcagcttgcgtcgctgcgcgatacgcttgaggagcgaaaaaccattgataaagcaaaaagcgtgctgatgacccaccagaatatgagtgaggagcaggcctggacaacgctgcgcaaaatggcgatggacaagaatcagcgcatggtggatatcgcccgggcgctgcttacggtgaaaagcgtgtggcagataaccccaaaggagtag

SEQ ID NO: 153991 - DNA, 459 bp, Enterobacter cloacae
atgaatcaggggattgcgacacgtgcgttatccgagcgggtaaaagttgctgatgagctggggatcgatctgcgtggaagcgatgagggtgtggatcttttattgaatggcctgggatgtcgatcgcaggagccgcctacagatattgaattgcgctttataaaaaagcaaaaacgatttggccggacaccaaaggcttgtgcggatttttctcattgtgtcgaatgttcaaaaagttgcgttgtggaaacgctggagtctgtatggctcctgctgtcattcaggcatgctatcgagtatggaaaaccgttgtacatcggttcggtcaatgctgtggagcgttatgaaacgttactcctgaagattgatttacggcttgggctggtagatgaggcgaccctgaaaaaagcgcgcgttaaacttcagcgagaaggtgtggctccggtatggcagatttga

SEQ ID NO: 153992 - DNA, 282 bp, Enterobacter cloacae; identical to SEQ ID NO: 5229

SEQ ID NO: 153993 - DNA, 222 bp, Enterobacter cloacae; identical to SEQ ID NO: 8585

SEQ ID NO: 153994 - DNA, 435 bp, Enterobacter cloacae; identical to SEQ ID NO: 19248

SEQ ID NO: 153995 - DNA, 384 bp, Enterobacter cloacae; identical to SEQ ID NO: 7741

SEQ ID NO: 153996 - DNA, 687 bp, Enterobacter cloacae; identical to SEQ ID NO: 5771

SEQ ID NO: 153997 - DNA, 363 bp, Enterobacter cloacae
atgaatactgttttaagtgttcagggtgcttctgcgcccgtcaaaaagaaatcgtttttttctaaattcactcgtctgaatatgcttcgcctggctcgcgctgtgatccctgctgctgttctgatgatgttcttcccgcaactggcaatggcagcacagggccaggacctgatggcaagcggtaacaccacggttaaggcgaccttcggtaaggactccagtgttgttaaatgggttgttctggctgaagttctggtcggtgcggtcatgtacatgatgaccaaaaacgtcaagttcctggccggttttgccatcatctctgtatttattgctgtgggtatggccgtcgttggcctgaaataa

SEQ ID NO: 153998 - DNA, 339 bp, Enterobacter cloacae
atgagtgaagattatttgaaaatgtttacaggtgttgttctgttaatatttgtcattattgccggttatttcttttctgagcgtaatgacaggaaaatgtttctcctgagctcactggttttccttgttattaatatcgcgtgtttatatgtgcttaccgccagtctctggtttctgtgtggtgcaattatgaatcagggcgcagcaatggttgttccaatggttattggctcattaccgaacgttacgagcttcgacaggttcagaagaatatttatctgtattatgttgtcatcagcatggtccggagtgatgtggttttttataaggggcttatga

SEQ ID NO: 153999 - DNA, 288 bp, Enterobacter cloacae
gtgcgaaataagcaggtggtgttactcattgccggaatatccggcatcgcgacgggaataatcgtcagcctgaatatcccctttatccgtcaggggcttttttatcccgccagccctgtggaaattgtcgtttcgctgtgtcttaccttttctgtttctgttgtgttttttgtgggggcaattgtgggatggatttcggtgtctgaaatatattacagccgcatgacctgtctgcatgaatcatcagaaatatcagagagaacttatgatgaaagaaaaaataaatga

SEQ ID NO: 154000 - DNA, 384 bp, Enterobacter cloacae
atgatgaaagaaaaaataaatgatacagaaccgggaatcaaacaaattgaaagggagattgaacgtggttgtgataatgcaaaaaaatacttctggctttttgtggttttctttgctgccggattgattgtaaggaacgttatgcatgattttttcagtgccggtattgattcgtggaaagctgacccggaattaaataattttcgttatatgtggaacaccctgatgtatgtcattccgattatgttatatgcgcttgcagctggttttcttgctgcggcttctctgtcgccgttgtgcgaaataatatttgggggtgtccggatattcctgctgaaacgccgtatgcgcccgggagaacacattaagggagggcagcaataa

SEQ ID NO: 154001 - DNA, 498 bp, Enterobacter cloacae
atgaaaaatttagctcatattgctctggtgacggtgatacagttcattgcctgttatctggctgattgggggagtgccgaaacagtttttatcctgtgctttattgtactatggcagggattgtttatatggttgttttctcaaatacgaaaaaaacggcatgtgtcggatgagtttaaattcagtaaaggcgtttggtatatactgatgccattatcttccttactctctccgttattaagcctgatggtttttatcattggtacactatacgaattaaggcgaattagtggttgtgtaagtgtaagagaatggatgcaatctcaggtaaatgaacaaactaatgaagatttgcatctggattttgatgatgtgaattttgattatgtggatttttatcgtactaatccggcaacaggattagctatgcatggaggatttgattcagcaggaaatacttttgggacttgttggcaggactatgatgacaggcgataa

SEQ ID NO: 154002 - DNA, 678 bp, Enterobacter cloacae
atggaagaaaataatacgagtacagataaaaacaccctgacagcccttattgattatgaaaactgtggcagcctgaaaaatatttcccttgagcagtatggggaactgattatttttgtcgggccacagcagaacgtcgttgttcttcctgcagactcttttcctgaaggtgcgagaatcactatcaggcaggtgagtggtgtgtccaggaataatgtcgattttcatcttgttctggagctggggcggataagctgttgtgcagcagggaaagataaaacataccacatcatttcatcggataagggatatgacggtgttatcaggacgctgaaagaagccggtattacctgcatccgtcgtgatgtaccggaaagtattgctgctgccggtgagtctggtgcagacaaaagtaactgcctgaaacaaccttctgttcctgaaagtgatatcgtcagccgttgggcaggaaagctgcagcagatagccggcagcggagccggtaatatgcctgtgtccgtcgaaacatttaataattatttaaagtcacacatgcgtgacgaatggaacaaaacccgggcagtggcgataaggaatgaactggttcgtcggggagtcacagaagtcagggagaaaaagataatctggaaaaaggcgaaaaaggagaataaagcatga

SEQ ID NO: 154003 - DNA, 123 bp, Enterobacter cloacae
atgattgttattatggtgaaccagaaggttatccctgtctgtaagctgaatcggactaaacgacataatacctgtaacaatacctgtaacatattttcctggcaggacaagcaggaacaataa

SEQ ID NO: 154004 - DNA, 234 bp, Enterobacter cloacae
atggattcagaaacagttcacggaacggtcaggtctggcgttaccagagtgccggaagccgggccgttattctggaagcggcagaagcatggcgacgggctgccggtgttgcgccccggacagactggcagcagtttgcccgaaaaagggctgaacaatgccaccggcgctgccggggaagggtgtaacgaaaaagcagccttcattactccagggattcagaaggctgaataa

SEQ ID NO: 154005 - DNA, 258 bp, Enterobacter cloacae; identical to SEQ ID NO: 7766

SEQ ID NO: 154006 - DNA, 654 bp, Enterobacter cloacae; identical to SEQ ID NO: 7676

SEQ ID NO: 154007 - DNA, 192 bp, Enterobacter cloacae; identical to SEQ ID NO: 99236

SEQ ID NO: 154008 - DNA, 558 bp, Enterobacter cloacae
gtggctaaatatcacattgattctgttcagagttggccatccttcgagcatggtgggaacacgttttctctgtctcatctggatgcgcacgaaatcaccttcaaaggtgaaaaagccacttacaagttcgttgtaacttatggacttcactgctttgcaaaagagcagactgcattcaacattcctgttctctacaaagatggtcgggaagagaagaatatctgcatggaacgttatgaagcctctaagcaaatccgcaacatcctcgttaaccttccatcaatgtcgctttatcacacagatgctgaaaaatatttcacgctgcatatgatgaatagtgccaccaaacagatagaaccctataaaatttgtgtggcattttttaaagagaaccgcttgctacgaatgcatatcttgtctgccttcttcgttcgtacaggtcctggcgctccgggtgtagctatacctaacaagccattaagcttgtttaaagtagcaatggatacagacagaaaaccacgaaactccgggaagccaaaagaagcaaacaacagatag

SEQ ID NO: 154009 - DNA, 789 bp, Enterobacter cloacae
atgaaagtaaacacaatagcggcattaatagttacaacatacattggctttggttttaccgcccacgcctcagatcctcagccggtattcagcccggagcaggaagccaggatcggggaaatagcggcaaattacttggtggctcacccggaaatactggtcacggttagccaaaaacttcaggctcagcagcaggaacggaagcagaagatgtttgcactcagcgtgatggataatcagaccactctgttgcaggaccctgataccccggccttcggcccggaaaaggcgaaagtggcagtcatcgagttttttgattaccagtgcgtgttctgcaaccgcttcgcgccggagctggaaaaagtcatgaaagcacaaccggatgtccgctatgtctttaaggaatggcctatctttggcagccgctggccagaatctcttcaggccgcacagcaggggctgtctgtctggaaacagaaaggagcacaggcgtatgtgacctaccataacgccctttacgccactggccacaacgagggcgccctgacagagagcgatatcagggcggcggcgtcaaaagccggactggcaacgccagcgcaggacgataataccgcatcccttgagaaaaacagcagcctggcagaatcgctcggcctcaccggaacacccgggattatcgtgatgccggtcagtggtgccacacccgacaccattactgttttcccggaagccgtaaccgctgacagactgcaggctgccatgcgtaaagccgcagccgcgaagtaa

SEQ ID NO: 154010 - DNA, 2406 bp, Enterobacter cloacae
gtggtgagcgaggggaaaaacacgcagcagccgctgctggaacagatccctgacgcggtgctgaacggtctgaccggcggccagaaagcggccacaacccttgttctgggaaccactgaccggtttatcgggattcagggatacgcgggggtggggaaaaccacgcaaatgaaggccgtgaagggggcgctggagacgctcccctctgatgtgcgaccggaactgacggggcttgccccgacgcaccaggccgtaaaagagatgaatgatgtgggtgtccgggcacagaccataaaatcctttatcgtggagcatgatcaggcaacggctgcgggtgagaaacccgactacagagggcagctgtttcttattgatgagtcctcgatggcaggtaaccaggacacggcggccctgttccaggcgatagcgaacggcagtggccgcgcggtatcaatgggagacatcgaccagttcgaatctgtggatgtgggtgcgccctttaagctgatgcaggagcgcagtccgatggacgtggccatcatgaaacagattgtccgtcagaaggatgtgcagctgcgtggtgccgtccacgacatcattgataaccggatcgatgccgccctgacgcgtattgaggcgcagccggctgaccgcgtggccagaacggaaggggcaacgctgcctgccagcccctttcaggaaacggaaacgccagtggccgatattgtggcggactggattggccgcacgccagctgcccgggcacagacgcttatcatcaccgagctgaacgccgaccgtcaggccgtaaatgccggtatccattcacagatggccagccggggtgaactgggtgagcaggccatcaccgttccggtgctgaacaaaatcacccatacccgtcatgagtttaacaagacagcggcatggcagaccggcatggtggtgaaacgcggcgaccgctaccaggatgtggtggccgttgaccgcaacggcaacacggtcactgtccgtgacgaagagggcaaaatcgggctgtattcgccaaaacaactcattacgggcgatgtgcagctgttcagccgcagcgagatggaggtccgcgccggcgacctgcttaaatacacggcgaccgacaaggagctgggtcagatggccaatcagcgctacacggtggaatcggtcagtgagacagggcatatcagtctcagaggcgataacgggcgcgtcaccatcaacccgcagaatgtccgggcgcagcagcatatcgactacggctgggcagtcaccggatatggggcacagggggcgagcaccgattacgtcatcgcacttgaggggacagaagaggggcgtaaggcgctggccacccgccgcgcgttctatatctccacttcacgtgtgaaggagcacgtccagatttacaccgacggaaaagagaagtgggttaaggcggtcaaatcaccagagcgcgatatcaaaacggcccacgatgcgctggcacccgaaacgcagcgtaagcaggcaaaagccatctgggcaatggggcagccagtcagtaaaactgcaattggtcgagcctgggtgcggcatcaggggatgcaggaggcgtccctgacggcgaaagttatcccggcaacccggcgattcccggagcctgcactggcgctgccggtgtatgacaacaatggcaaaagtgccggtcttgccctggtttctctggttcccggtccggaaggtcgtatgacgcagggcgacacccgcatgatagccacagaacaggcccggggggccgtgttacagcgaagtcagtccggaaacacgattgtggtcagtgacctgactgccgcgctcgatgctgtccgcaaccatccaaaggacggtgtggtattgcagaccagcgatgaagcaccgtcctcatggctgctcagggtcagcggtggtgttccgcaggataccgtttcagaaagcaaactgatccgtggccaggaggaaacaacgcatctggcagagaaagaactgctgagtaaggccgccagaatcgacagtgaggtgaaagagatgccggaacgtattgttctgcctgctgaggaggcgcttcgcctcacaccggagatgctgtctgttgaggaacgaaatgaaccggatgtccctgacagaagcttgctaaggagggtcgtcagtgccgacagcatcagcaaagatgaaacagaccgtcaggccagggctgacaatgaaccactgctcgggaagactgcgacagaacgggcagtggcaaatcgtattgtgaatgaactggccaacagtgagcgggatattattcgccagccggatatcggcgaacgtgggcgtatgccggaacatgacgaacagaccctcagtcgtaccattcagaaagaacgttaa

SEQ ID NO: 154011 - DNA, 486 bp, Enterobacter cloacae
atgggatggctgccggacattacaattatgagcttcgcaggaaaaaacctcacccagggcgggcagatgaccgcctatcgctggcgcatgttcattcaggtgaacaactggataggcttctggatcttcatcctgtttgccgtagtgaccagtgccatctttctctggcgtatcccgcaggaagccctcgataacggctctctgtggtggtttgccagcatcaacagcagttttatcgatctgatgccggccacgggcacgccgaaaatctatgacgtgcactactggtatgccccgacctcgacggcaatggttctcaaaatgaccctgccgcagatttacaccgatccgtacatgcaggctatgggtgaacaggtcctgaatgaactggagtgcccgcgcgacctgggagatggaaaaggccattctgcgcgtggtgagcgaggggaaaaacacgcagcagccgctgctggaacagatccctga

SEQ ID NO: 154012 - DNA, 249 bp, Enterobacter cloacae
atgaataccactccgcgcccacgcaagaagagcactaatatttcgctggatgtatcacttgttgaagaagcgaagacattaaacatcaacctttcatccacgcttaattcagcgctggaagatgtcgtacggcttaaacgccaggcgatgtggcgagaggaaaacaaaacggccatcgaagccagtaatcgctttgtggaggaacatctcataccccggagcagtgacgggttgagggttataaaatga

SEQ ID NO: 154013 - DNA, 312 bp, Enterobacter cloacae
atgaatcagggaacaatttttcgcagaccggataaccctgactatccctattttgtcattgctcagtcagaaccactggaaagcctgaatacgcgggttatcatcccgtttgtacgctggcgaccagcactcccgggcatgagcaaaatcaatccgattgttgttatcggagatgagaaatacattctgatgacacacctcatccagaccgtttatctgcacgaactgaacgaagaagacattcacagttaccgcgcggagctacgcgatactctcgtcaacgcggtggattttctggtaaccgggagttga

SEQ ID NO: 154014 - DNA, 333 bp, Enterobacter cloacae
atgaaaaaaataagccagttcatcatgacagtagggctgagtttggtggttgtaggatgttcttcccaaaagaatacagaaaatcctgataagcaggtggctgaggagtgtgtgaataaaattgattccatcgcaaaagggaaatccggcacggttaatcacctgggaattcgtaaagaagacggggtggttgcccgcgctggcggagtggcgttaaaagaaggtaagcaaacttggcttccttacgtggaagctacccttcttgataatggtgtgccgggcagcgcatggcgtaactgtatgcagcagcatggtgtcgatatcggctcctga

SEQ ID NO: 154015 - DNA, 732 bp, Enterobacter cloacae
atgaaattaaaacaattagccgttgttggcctgatcgcttctgcactggcgctttctggttgtggtgccatgtccaccgcagtgaaaaagcgtaacctcgatgtgaaaacacagatgagtgaaaccatctggctggagccatcatcagagaaaacagtctatcttcagatccgtaatacttccgacaaggacatgtctggtcttcagacgaagatcaccagtgagcttgctgccaaaggctaccgcgtgtccagctctccggacacagcctactactggattcaggctaacgtgctgaaagccgagaaaatggacctgcgtgaatcgcagggattcctgaaaacgggttatgaaggtgcggcaatgggtgcggcactgggcgcgggcattacggcgtataactcgacgtcagccggcgcaaccctgggtgtgggactggccagtggcctgattggtatggcggcggatgcgatggtcgaagacatcaactatacgatggtgacagacctgcaaatttccgaacacagcaaggcaacggttactacagacaatatcgcggctctgaagcagggaacgtcaggcgttaaggtccagaccagcaccgagcagggcaaccgcgccaaataccagacccgtgtggtgtccaacgccaacaaggtgaacctcaagtttgaagaggcgcagcccgttctggaagctcagctggcaaaatctattgccgggattatgtaa

SEQ ID NO: 154016 - DNA, 702 bp, Enterobacter cloacae
atgataaaaggtaatttaagtaaaattgcttattttcctgtcttaatgatctatgcaggcttaccgttagtgcatgatgtaataccctatcacagggtttataacagcgaagattggttcgcattggctggtatgtatgtattaggtactttgatagcatttccgcttctttatcttctacgtaaatctgacaagaatggatatggtaattcggtaaattcaataatcccgcgcgtttttattaccgtattaatgcagttagtatgcctatatctcttatggaacgagccagcatatctttatctatcaatggcagtaattatgggggcgtccgcagtgatctttggttacggtaagaaaggacttaacctactaagagataaagataccggccatttatacgaaattcgtggggctaaagcatacagattgaatgactttgatgctgccaggttccaatcaatttcgatgagtaagggccttcagttcgctgaattttcatccagtgatgttactggatttgatgtaagttcatcagtccaatctgttaaccattcttttagtaatacagatttaattataaatcctacatcaggaatgccgatggttggtggtatctctggtctggatgtacacggaaacagttggggtacaaacttcaacgaaccatcaagcacatatgaccctaatcggggttactga

SEQ ID NO: 154017 - DNA, 3126 bp, Enterobacter cloacae
gtggcggccattgcctcactgaccaccagtatcgggtacaagatggcgtcgacgtatgacatgctgatggccagacccgattcggtgacctacagcaagagcgggatgctgtttggctcacagatagtggcggaaaccagtgacttcaccacgcagaacccggagctggcccagatgttgccggattacgtggagaactgcgtgattggcgacattttgctgaatcacaaatacaccgtgaaccagctgctgaactccactgatccgctggggcttatcaccagtaacccgagtccgctgcgcgggatattcaaaaccactgattcgacccgtcagtttctgacctgccagcaggcggctgcacagataaactcgctggccaatacggaaggaaatccggccagtgccacctttaccatgctgaccaataaaattttcggcaacaaggtaaacggggcgacccttctggctaacgcgatgggtgaaagctacgggtatttctatgccggcgggatgagtgcggcgcaaatcatgaaaaacaacatcaccaacagcgcggtccggcagggggtgaaagggtttgcggcacggtcttccgatacggcgaacctgctgaatctggcgaccgagaacgcggcaacgaagcaacgtctcagctgggccgccggtaatgagctggcgacccgcacactgccgtttgcccagtcgcttctgatgcttatcctggtgtgtctgttcccgctgatgatagcgctggcggcgtccaaccatagtctgtttggcctgaacacgcttaagctgtatgtctgtggttttatctatttccagatgtggccgatcatgtttgccattctgaactatgccgcaaatttctggttgcagaccaaaaccggtggcacggcactggtgctggccaatacggatgtggtggcattgcagcactctgatgtggcgaacctagccggatatctctcactgtcaatccccttgctttcgttctacctgacgaaaggggcagcggcgatgggttcacaggtggcaggcagcgtactcagttcggccgccttcacctccgccggcgtgtcggcaaccacggcagatggcaactggtcgtttaacaacatgtcgatggataacgtcaatcagaacaagatggacaccaacctgatgcagcgtcagggccagcagacatggcaggcggataatggttcgactcagacccagactgccggtggccatacggtaatcgatggttccggtgcgatgtcaaacctgccggtgaacatgaaactcagccaactggcgagcagcggattccaggagtcggcgcggcagtcgcaggtacaggcccagacggcactcgacggttacaaccacagcgtcaccagcgggtggtcacagctttcgcaactgtcccatcagaccggtagcagcgacagcattagccagggcagtgaaaacagcaaggcgaccaatgcttcgcgcggtgccagcatgatgatgtccgcagcggaaaactatgcgaaagcgaacaacgtctcaacgcaggaagcctataacaagctgatggatatcagtaatcagggttccctttctgcgggcgtaaaaactacgcttggtggtggcataaatattggtgtggctaaatggggggctgaagggaatctttcagcggatgcacgccatacaacggggagttcacgcggggttcaggattcaggctcacatacccaggatatgcgacatgaccagaacagccaggcggttaatgatttccgtcagggtatggatatggttaccagcagtcgggtaagcgatggttcgaatcatacggagaatgcggcaaacagtaacgttcaacaatttgccgctacgctcaacgatgctcaaagtcagtaccatcagtacactaccagttcaacgcagagtaatgagttcagccgtatggccacgatggcgcagaaccagagtgccagcctcgatacgaactacaatcaggagttcgttgactgggcggctaataagtatggtgacaaggctcagtccatgctgaccagtgcgccgacagcgcgtgaagcagcgatggagtttgtaaacgaacgactgaaacctgaaatcagcggtgattatcagcaggcgcgctcagacctcgccagtggtactgaacatgcggcattcagtggtgagcatattgtccacagtgggtctggtgggcaacaggattcaggctcagtacggaatgatgatggcgtccggtacagctcagcaaatagtgaaactgaacgtactgcggctataaggagtggtagctcttccggtaatcatcaggttacagaggaaagtagccttccagccggacgaggcatatcaaccggtcaggagactacgggttcagtgcatactgaaagcggacaaacctatcgtggtgagcaatcaacgatcgctgaaaggcgcgttgtcagtcaaccaggcacttcttatcgcgatgagaacatcccagacagctctgttgaatacactcgtcaggatgcaaaccattcaggactgagccgtgaacacgaggctgtgacgattcagaaaactggaacagggaacaacgcttcgtcagccagcggtattgaacatggcagacattcagcggctgcggaacacactggttcggctggaacctcacatcggacattcagtcattctgggcaggagctggagtcacaaacgattcagcatagcggaagccgaatgactgaaaccgggacccctggcgccgtggacggaaatcgggtatcgggttcgactatgcaggatgcattcgaagaaaatcagtcaaaactgcacgagcagtcagggcggagttttgaaccgcaaaatgatatacagcgccgggttgcggaacaaagatctgaaaatgagcataaaatcaacgaatctgctggtgaaattggtaaaaaacaatccactgttcagacatccagtgatatcctgaaaggagagagtttaaatgcgaacagcactttccaaattcataggaaagaggcagagatcgatcagcaaatgccagtagttgatggtgaagaaaaaagaaaacttgaaggtcaattgctggaattaaggaaaagaactgggtag

SEQ ID NO: 154018 - DNA, 381 bp, Enterobacter cloacae
atgagcattaaatccggactcaccgccctgctgattgccatgccgctgctcgcacaagccggaattcgtgaagaactggcgttgctggaagcggcgaagacgacagcaccggctcacgatgctgccatgaccgcatcggccatcccggcacctgcaccggtgaacctgatgtcactgccggacggtcgccaggcaaacatgaaggattatgcggtggtgctctttatgcaggcccactgccagtacagcgcgaagtttgacccgttactgaagggctgggccgatcagcacgatatccgggtgtacccctacaccctggacggtggcggccattgcctcactgaccaccagtatcgggtacaagatggcgtcgacgtatga

SEQ ID NO: 154019 - DNA, 219 bp, Enterobacter cloacae
atgaacgttaatcttttcgcaggactgtttttctggggcacgatggcgcgcgtactgagtgagctgatgaccctgtcagttgaacatacccagcaggggttgctctggttatgcaacggactctggatgggagcggccgggatgctgatgtatgccggatatcgctggttccgtcatgacgcaaagcaggatcacaaggaggccgatcatgagcattaa

SEQ ID NO: 154020 - DNA, 735 bp, Enterobacter cloacae
atggccatcggcaaggcgaaagccaagaagattaccgtcagtgtgggtgaccgctgcgatcgtcaggttgccggcgtatgtctccagaccagccatgtttactgcgtctttgacggcaaactcgcccgcatcattcaggagcaggggcgtcgtgaccagctgggcgtgaagtttggcagcggcagcagtcctgactgccgggggatcacggtgccggaactgcagagcatcgacttcgacaaaatcaacttcgcggacttctacgaagatttgatgaacaaccagaaagtgcctgacaccagtacgcacccggatctcgactacaacctggagtacccgcactacaacagcatggcgccgtttgtgcagacgcgtgaccagcagtcgcggcagaacgcggtgacgcagctggcgcatcagtacggtctgttttatttctaccggggcagtgacccgattgatgtgcagatggccggcgtggtggccgactttgcaaaaaccaacggtatttcgcttatcccggtttcggtcgacgggcaggtggcggccagtctgccacagagtcgtccggacaccggacagtcacgttcgatgaatatctcgcacttcccggcactcttcctggtcgacccgaccagcaaaaactaccgtgccctgtcctacggcttcatgacccaggatgatctgtcgaagcgattcctgaacgtggccaccggctttaaaccgaattcataa

SEQ ID NO: 154021 - DNA, 639 bp, Enterobacter cloacae
atgaaacgttttttatgtgttgccagcgcatttctttttagttcgacggtgtttgcctcgaacgaacttgagataaatggattgcccttaacactagtattgaatgataacaatattgcaaaggtttcttcatgttctgatttcatctcattacgcaaatcaggtgaaacagtaaaaaacatccttgatatttctgaaccagattatgaccaggcaaaagctgccctaactgattgttatataaatgcctatgcaatccaaaacggactggttaaaaaagacgcacctgcaccatcgttaagtgacttattgaagcatttcccagcttctgaaaaattgattgtcagtgataatgaaaaagaagaggtgcaaaaaaaattcaatggtaaaagcatatgggatacctcaccggactttatgatgaaaggtgatgttttacaatctcagagtgacgatacaggatacaggttaatatcctacagtacatattcaaatagagatggaaaagattttaatattgtaaccatagctgcgtttacgttacacgggacatacgggatcagaaatagctacatcattaaatataaagaggaaaagatatgggaaatacaaaaggttgatgaaaatagcccactttaa

SEQ ID NO: 154022 - DNA, 753 bp, Enterobacter cloacae
atgagcagtatagaaacttcaaaccagggtcctggctggaacgaccatgataccccatacggtacaattcatagctacgatggagacaattctagcggcggaactggtggtaatgctggcaatggtcacgatgggattggcgatagcgcgaaaatcgatattcccacaacaaaggaatacaacggtgttctgatgagtatgtgtgtcaataatcttaaaaaacatgagggttttaagaataaaatgtataaggataccggtggtaatattaccgtcggcgttggtcatttattagctactgctgagatggctgctgcattaccatttaagaagaccgctactattaatcaggggcatgggaatgccgaagatattgataaagctgtctctgctggagatatcaaagccgcatttaataaatatgcaacggattcttctgcaattccaaatatccatcttacaaatgatgctgtcatatcggagtgtatcaaagatgtccagataacagagactggactacgtagtctttatacaggttatgatgcattttctaatgacagaaaagtagctctagtcgacatgggatttaacattggcattccaaaattaaaatcaaacttccctaatttcaacgctgctgtaaaccgtggtgattggcctactgctgcggttgagtcccacagaactggtttagatgacagtcgaaatccgcgtaataaagatacgcatgaccagcttctttctgataagtaa

SEQ ID NO: 154023 - DNA, 411 bp, Enterobacter cloacae
atgattggtacagcaagagaaatcgcccttgaaatgttccggtgttccgaccttgatggcgagaaatacgttttcgcaagctggaaccgaaatgatatccgcagcatgtgcgttgactgggatctgaacaatgaggatctggatgaagtcatgcgccggctgagttcctgtctcgaaagtggcgtggacattggccagatacacgcaatcgttgaaaccatgctcgacgagcgccgcgcaaagcgcaccgtgactgttccggcggcctctctcgaaatggtgatgaagctggctggcagtgaactgaagcgcatcgccgatagcgcggggcagggaggggtgtcttcagaggtcaccctgaaagaagaaattaagatcatgcaaagcctgtgcgccgcgcttgaggcctga

SEQ ID NO: 154024 - DNA, 741 bp, Enterobacter cloacae
atgaacaacgtcattcccctgccgaattcaccagaacgcgtttcgttattgcccatcgccccgggcgttgattttgcgaccgcggtagccatgcgtcgtctggccaccgcgaacggggtgacaccggcgtatctgctggcgccggaagtgagcgccctcctcttctatatgccggacctgcgtcattacatgctgttctcgacgttctggaacaccggcgtgaggatcggcgaatcccggacgctgaccccggaatcttttgatctcgacgggatgcgcccgttcgtaaaggtgctgtcagaaaaagtacgggcccgccgtggtcgtccgccgaaagacgaagtgcgcctggtacccctcaccgataagagctacgtgcaccagatgaagagctggatggtaaccacccgcccccgccgccgggagccgctgtgggacgtcaccgatgaaacgatgcgcaactggctgaaacaggccgtcagtcgtgctgccgctgacggggtgtatttttccatcccggtgacgccgcacacatttcgccacagctatattatgcacatgctgtatcaccgccagccgaagaaagtgattcaggcgctggctggccataaggatccgcgttcgatggaagtgtataccagagtgtttgcgctggagctggccgcaacaattgccgttccgtttaccagtgatggtcgtgatgccgctgatatcctgcgttcattgcccccgggcaaatag

SEQ ID NO: 154025 - DNA, 159 bp, Enterobacter cloacae
atgatcctttacgtatttggttttacccacaataatgcggaagaagacaataaaaggatccgcgcgctgcgaattattgtcatggcgggatcggtctgtcaggtgcaaaatacctgtattcatacacagtgcgtgcgctacgtgaaaaataacagatga

SEQ ID NO: 154026 - DNA, 465 bp, Enterobacter cloacae
atgaccaaaatacatgatttaaaaatcgcaccagaacactttgcatctgtgcagtcaggagaaaaacgcgctgaatttcgtatcaacgaccgagattattctcgtggtgatgttctcaggttgcatgagtgggagcctgagaacggctataccgggaaacgtgtatcagtaagggttacagacgtaactggtttaacggcttgggtgggaaactatgtgatgttgagcttccagctacttgttcaggatgaaccatgcgggatgaccatgttgaactggaaagaacttagcgaaaaggggctggttttcagaattaatcatgaaattttgcatccattgggtctggctattgggtatgaaacacttaatggggtttcgggtggggctttcgtcgctgatgatggtgtctggcaatattctgacgaactggtcgcagaagcgaaaaaaaacgggtggttaaaatga

SEQ ID NO: 154027 - DNA, 252 bp, Enterobacter cloacae
atgcgcgccgctcaggcaaagtgggacaagctgcagcgaggcgttgcggagttttcaatctcgctggcgattggacgggcagatttatttcctgaaacacccatcgaggtgaaagggtttaagcgcgtcatagacgatcaggcgtggattatcagccgtgtggtgcataacctcaacgggaacggctacaccacggatttagagcttgaggtcaagatttcggatgttgagtacgagcaagtcaacgattga

SEQ ID NO: 154028 - DNA, 333 bp, Enterobacter cloacae
atggatatcgaatcggctgcatccgcactaaaagaactcggtcatcagactcggctggcaatctataaacaactcgtcaaagccgggtcaacagggatgtcagtaggtgaactacagaaaagaattgagatccctgcatctacgctaagtcatcacctgtcagctctgatgtccgtcggcctgattaagcaggaaagacagggtagaacgcttttctgccattctcgctacgagaaactagaagaactcatggctttcttgattgaggagtgctgtgctggcgtatcttgccctcgttttgaggaaaacctgactcaagggaatagcaaatga

SEQ ID NO: 154029 - DNA, 480 bp, Enterobacter cloacae
atgaacgtattgtttctgtgtaccggtaattcttgtcgatccattctcgccgaagcgatattcaaccatctggcaccagaaggctggcatggtatgagtgccggaagtcatccgacgggtcaggtgcatccccgctcacttgctttactggctcgtgaaggtatcgccaccgagggttattacagtaagtcgtgggaaaatctaccccaggtgccggatatcgtcatcagcgtctgtggcaatgctgccaatgaaacctgcccgacctatttgggacctgtgttacgaacccattggggtgtagaggaccctgctcatgccacagggacggacgaggagatcgatgtggcatttgtcacggcatataccattctgcgttcgcgtatcgaggcattttttgctcttccattggcaaaattgcagcaggataaaaccctattgaaagccgaactggaccgtatcggtaatctggtgggttaa

SEQ ID NO: 154030 - DNA, 357 bp, Enterobacter cloacae
atgacaatcaaaaatttgaccgaggaaagccgtttaaccaaagagcagttaatagcgcacatcacccaaaggctggcgcggattaagccacattcacaggttaacgataacctccgcaatgaagcactgatgaataagcgcgtattggaaatcgcactggcagcactgaccgcgccggactacattccgcctcacgtactggaagcgatgagcaatatgtgtgacgggggctttaacgcgaaaggaatttgggatttatgccgggagtcaattttgccccctgagccttgccctcgttgtgggacagtatcaagcagaccagacggtgctcattattgccatgccgctgatgcataa

SEQ ID NO: 154031 - DNA, 639 bp, Enterobacter cloacae; identical to SEQ ID NO: 152722

SEQ ID NO: 154032 - DNA, 291 bp, Enterobacter cloacae
gtgaaactgacacagagccggatagatagcctgattgacaccctgaatgacctgatttgcgatgaaagaagtctgacacgggaacaccgcgagaatatggtcaggacggttgcaatactcggaggactgggggagcgtcagcggctgatcgcagctgaagatgaagccctggaagtaccggttcaggaaaaaaggcagagaaggccaaaaaaccgcgtgaaccgaatgccgtctttccccgcaccgggaaaccctggcaacaggacgacctcgaacttatccattcaatag

SEQ ID NO: 154033 - DNA, 267 bp, Enterobacter cloacae
atgacagaacattcaccctttccgcacagagttgtctgtgtgacacagagcctggcagatttcggcctgaaagccggtgataacggcaaactggtacgtcttgacggtagccgtatcaaaactcacgcggcattcagggactggctctacagactcagaccgggtgaacgcctgcctcgcggccgctattttcgcaataaaacccccgggcgcccgtggctgatgatggatgagcttcacatgatgctgaagccaattaaaccgtga

SEQ ID NO: 154034 - DNA, 441 bp, Enterobacter cloacae
atgtcagaaatgaacataattaaagccagcgtcagctatcaggccaccgtcgactctgtcatctggaagggatacgatgccctgacccgcgaatatagcctgaaagacacggtggatgtagagatccccgccggtagccatcctcattacgccctggtgctgattgctgacagtatcagtaaacagcatcagatggagatcagcggaaaactgatttccccggttcctggatctgacgcccgcgcaaggttacaggacggccggattcagatggggactcacgaaattatggtcaggggttatatgacgctgaaaatcaagttcagtgagaatgaagcctggctgaactcactggcagcctccacaatgagcggaaagaacgtcctgcaactgaaggccagaaaataccattccatcatgttcaggaagtattgctcatga

SEQ ID NO: 154035 - DNA, 219 bp, Enterobacter cloacae
atgggggaagggcagaacacggttgcgatcgcccgtgaatgcgtggcacaggccacctcgctgaaagcgggcgtgactgtcacgctgtcagacgtgaaccgctacggagatattcaggtggagatccgcactcacggactgctcaactggcgcgcgtggtcgtttgaaccggattttgtgtttgatctgaaacgtaacctgaaagacgtgcagctgtaa

SEQ ID NO: 154036 - DNA, 159 bp, Enterobacter cloacae; identical to SEQ ID NO: 25286

SEQ ID NO: 154037 - DNA, 234 bp, Enterobacter cloacae
atgagcgaatatttcagaatacttcagggactgccggacggtccttttacccgcaaacaggccgaagccgttgccgcacagtaccggaatgtctttatcgaggatgatcagggaacgcattttcgcctggttgtccgtcaggatggcacgttgatctggcgctcctggaattttgaggactgtgccgggtactggatgaaccggtacatcagggatttcgggattcttaagtaa

SEQ ID NO: 154038 - DNA, 1014 bp, Enterobacter cloacae
gtgaatgacaaacagatttctgtccactggtctgaactgccggcagatgacttaacccgtttctggcaggatgttgatgccggaacacaggacaatttcctcgtcgcaccggttaaaaaacggacccgccgcacacgcggtgaacattccacaaaagccaaatgtgaaaacccgtcctggttccgtcctgagcattataaaaagctctccggggaactgggtcatgcctacaaccggcttgtgatgtttgacaaggcgaccggacagcccgggctgcgtactcacatctcgcgtcatcccctttatgtggccggccgccggaaggcaggacgtaagtatggcttccgtccggagcgccagcgcctgaacgatgccctctggcccctgctcgtcagcttctgcgatggcggaaagcactctgtcggcctgtgtgtctcgcgtctggcagaagaactcagtccaaaagacgcccagggcaacatcattccggaaacggaggtgacagcgtcacgcctttctcgtcttatcgaggagcaggtacggtttggcgttctgggatatacggaagaacgcacctgggatcgtgaaacccgctcctggctcccgatgtacgtctatatcacgcccgctggttttcagatgctgggtgttgatatggacaagctgctgaaagagcaggagaagaaactgcgcctcagcgccgagcgtgaacggctcatccgggaaggggcgatgagtgagcatgatgacattaccccgcataaggcccgtcagtgctggtccggtcagaaacggcgtgatgccctggcttaccgccggaagaaaggggcggagcgcaagcgtgccaacaacctgattaagctgccggcagacgaacgtcttcacgtcatggaaaaatgggtgttcaggaccctgtctcatgatgaggcgtactggtgtacacctgaacgactgacacagctggcggttcagcatctgtaccagctggacctggcactttcaccgccggaatag

SEQ ID NO: 154039 - DNA, 153 bp, Enterobacter cloacae; identical to SEQ ID NO: 129935

SEQ ID NO: 154040 - DNA, 213 bp, Enterobacter cloacae
atgcctactaacaaaacaaaaccaaagaaaatgcagggaagacctgaaggaagtaaatattcttatctaattcagaatgagaaggctaagcattactctcaatccaaggtggcaaagatcttaggaataagcatttccacggtaaaaagatactgggataatggtatctttgtgaatcgccacgcgtttaacagacacctcagagtcatttaa

SEQ ID NO: 154041 - DNA, 507 bp, Enterobacter cloacae
atgaagacgctgattattgagccaaaaaaagagccgcaggatgtgccgggcgtggtgataccgccaccgggcgtgagcgagccggtaatcaaaaacaccccgttttttcctgatgttgatccgaagcgcgtgcgggaagaaatgcgtttagagcagaccgtttcccccgtgcgcctgcgccgggcgattaagaccgcgatcgcggagactaacgcggagctgagcgactggcgcgaaattcagctcgatgccggttacgccacgctggcggatgtcccgaccgacaagctcgacggcgagagcgtgcgcgttttccactatttcaacgccgtgtgctcgatgacgacggccacgctttatgagcgttttcgcggcgtggatgcgactgccaaaggcgacaaaaaggccgacagcatcgacagcactatcgatgaaatgtggcgggatatgcgctggtctgtggcgcgcatccaggacaaagcgcgctgcattgtggggcaaatctga

SEQ ID NO: 154042 - DNA, 642 bp, Enterobacter cloacae
atgaataatttaaattctctgcaggaaatcgcacgcgcgatccgcaaccttatccgcaccggcatcgtgaccgacgtcgaccatgacgaggggctttgtcgtgtccagaccggcggcatggaaaccacctggctgaactggctgacctgtcgcgccggtcgctcgcgcgtatggtgggctccgtccattggcgagcaggtgcttttgctggcgatcggcggcgaactcgatacggcctttgtgctgccgggcattttctctgacgaccaccccgcgccgtcgtcctcccctgatgcgcttcacgtgtcctttcctgacggggcagttatcgagtatgagcccgaaaacggcgcgctcaccgtgtcaggcattaagaccgccgacgtcaccgcgtcggattccattacggccaccgtgccggtggtactggtgaaagcggaaacccgcatcacgctcgatacacccgaggtggtatgcaccaacaagctgacgaccggcacgctcgaagtgcagaaaggcgggaagatgaccgggaacattgagcacaccggcgggaaatttatctcaaacggcgtgcaggtggatgaccacgaccacggtggcgtgaagcgtggcgatgacagaacggtggggacgcaatga

SEQ ID NO: 154043 - DNA, 429 bp, Enterobacter cloacae
atgaataagtttttatgtgcactgttgcttaatatcgtgattgcgatcctgcttgtgctaggcctgactaacccggcaagtgtcgctgtgaactttattgctgcgtgggcggcttttggctgtgtggttttggttgtcgcaaccctgctgatggttatcagctatgaggactggctcgcgagtttttttgattcgtcacgtaagacaaagcacattgcgctattccgcgcgctgattggcaaagatgtcccgcgctggcgtcggctgtggtcattgattctttttgtcggaaccgtgctgtgtctgctgtttgccgggtgggtattcctgtcgctggtgtattccctgtgtgtcctggtatttaacgtgaaccgccgtatttaccgtgagcgcatcagggaggcaggcctgtgtccaaattcattgtga

SEQ ID NO: 154044 - DNA, 390 bp, Enterobacter cloacae
gtgaagggtatgcggaagatcaagaggggtaagaactttgctggtgtggtccaatatgcattgcagccgggagctcatcataaaagcgatccagtcgtaatcgggggcaatatgctgggtggctccgctcttgaactgattgctgaatttgatggcaccaaacagcttcggccagatgtccagaaaccggtttggcacaactcgctacgattgcctgacggagaaacattatcgaatgaccaatggataaacatagctgacgactacatgaagatgatggggttcagtgatacccatctccgttgctatgtcttacatgacgacgaaggccagcatatacacattattgccagtagaatcgacatagctgaatcgccacggataatctag

SEQ ID NO: 154045 - DNA, 198 bp, Enterobacter cloacae
atgaaaacagtttatttatttggggtggtttttttaataattgatttgttgcttggtttttatatttttgataaaggcggtaccgatgcagctattaaatccgggttaatgggaaatctgtcggtatgtattatttttatgactgttggagtgtatgtgccggtacttatctggtcacttgcagaaaggaaaaaatag

SEQ ID NO: 154046 - DNA, 210 bp, Enterobacter cloacae
gtgaagaatgctcttaccatagcttcggagaagctctgcaagccttctaagaaatggaagccagccgataagcctgagatgcttttgctggttaacctcattcttttggagaatcttttctacaatctcgtttcgtttgtcttctctgagttgcagttcgagttcagcaagtttttcactgatactttcctttctcttagtggttcttaa

SEQ ID NO: 154047 - DNA, 291 bp, Enterobacter cloacae
gtgcagtcggcgaacattgtcgactataaaatcaccgcatccctttacctttatcccggacccgaaagcgagccggtgctcagtgcggcgaaaactaagctgcaggcgtatatcaccgcgcagcaccggctcgggcgcgatatccgcaaatctgcgatttatgccgcgctccacgtcgaaggtgtgcagcgcgtcgagctggccgaaccggtggccgacatcgtgctcgatgacacgcaggcgtcatggtgcagcgagtacagcgtgactatcgggggcaacgatgaatga

SEQ ID NO: 154048 - DNA, 297 bp, Enterobacter cloacae
atgaataatacccgactgttgccggtgggctcgtcgccgcttgaggtggcggcggcgcgcgcctgcgctgaaatcgaaaatactcccgtccccctgcgccgactctggagtcctgacgactgcccggcaaatctgctgccatggctggcgtgggcgttttccgttgaccgctgggatgagagctggccggaggctacaaaaagggacgtgatccgcgcggcgtggtacatccacgcacacaaggggacgattggcgcagtgcgccgcgtggtggagccgctcggctaccggcgttaa

SEQ ID NO: 154049 - DNA, 351 bp, Enterobacter cloacae; identical to SEQ ID NO: 121795

SEQ ID NO: 154050 - DNA, 369 bp, Enterobacter cloacae
gtggcctcgctggctgagctggaatttgaggacgtccccgacagcatgctcaacagcctgacagataaggtcagagccatttttggccgtaagcaggccagcgatgacgcgcgtctcgccgatgtgcatgaggcggtgaccactgtcaccgagctggtgcagaccaacctcaccgccaccgatcagcgcgtcaccgagctggaaaccgaactggcgcagcttaagcaggacgtgaccagcaaggcggaagaaagcgcgcaggcttttaacgacctcaaaagctccctcgataacaccgaaagtcagcgccagccgcgccgcgagctttcaaaaggcggtacgggcgacgagctgctgaccaactgctga

SEQ ID NO: 154051 - DNA, 768 bp, Enterobacter cloacae
gtgcgcgtcatccatgaagtagatagacaggttgtcgagacgcgtcaccatcagcccatcagccgggaagtaaggcactcgtacggctggcaggttgccgattcgcttctggctgatgatgatgtcagcggccagcgattcggtgtttgcctgctcctgattgacgatagggaaatatttatccgccatcagcttacgcccggtgatgacgacgagctccgggtcatcctgataaatctcatcaatcaggttgccggtggcatccatgaccagcgcgtcgaggttcgcatagtcaccgtttttacccacgcggatcacgtcggaaatgactgtgccgtcctcgtcggtgactttcgacatcacgcgcgctggcgcttcattacggtacttctgcagccaaccaacggccacgtcctgcagcatcggattctttttacggtcggacgtcgccgcacgctcgatgccgttgaaaccggccatgatgaaatcgagggactgacgtttgatgatggcgtcacggatacgggtctggaagtcctggaatcgcgcccacaggtcgagctgtttgtagcggatatggaagtcaaagttaatctgggcgcactcgtacttattcgactccagcgcggtaaagtcagcggtcttacgctcatcatcgccggcggtgtcggtagtactcgcaattgtgccgttaacaccgaccccgaccttttcgcccttcagctcgtcgaccggcacgatgttgattttggtcagaaacgcggatga

SEQ ID NO: 154052 - DNA, 495 bp, Enterobacter cloacae
atgctgtggcgtctcgatgctgacgatatcgccggggcgctggagattgcccgttatgcgatgacctacggcctcaccatgccggtcggtcggcgtccgacgccgtgcctgctggccgaagaagtggcgctggccgcgcagcgcctgcttacggcaaaacagccggtcagtctggcgaacctgctcgacactatcgcgctgaccgaacgcgcggatatgcccgatatcgtgcgtgcgaagctgcacaaaatcaccggctacgtgctgcgtgatgcaaagcaactgccggaggcgctggcgcacctgcagcgtgcgatccagttagaaagcactatcggggtgaaaaaggatatcgagcagttagagcgccagctcaggccaaaacccgaaccggcaccgaaaaccaaaacgactcaaccgcgcacgcgcaaacctgcagctaaacaggcggcacggcgcgggcgtccaccaaaggcggcaaaagccgcaggttaa

SEQ ID NO: 154053 - DNA, 507 bp, Enterobacter cloacae
atgacgacgctgattattgagcaaaacaaagagccgcaggatgtgccgggggtggtgataccgccaccgggcgtgagcgagccggtaatcaaaaacaccccgttttttcctgacgttgatccgaagcgcgtacgggaagaaatgcgactggagcagaccgtttcccccgttcgcctgcgccgggcgattaagaccgccattgcggagactaacgcggagctgagcgaatggcgcgagcgccaactcgaagccggtcacgccacgctggcggatgtcccgaccgacaagctcgacggcgagagcgtgcgcgttttccattatttcaacgccgtgtgctcgatgacgacggccacgctttatgagcgttttcgcggcgtggatgcgaccgccaaaggcgacaaaaaggccgacagcattgacagcaccatcgatgaaatgtggcgggatatgcgctggtctgtcgcgcgcatccaggacaaggcgcgctgtattgtggggcaaatctga

SEQ ID NO: 154054 - DNA, 642 bp, Enterobacter cloacae
atgaataatctaaattctctgcaggaaatcgcacgcgcgatccgcaacctcatccgcaccggtatcgtgacagacgtcgacctcgacgagggactttgtcgcgtccagaccggcggcatggaaaccacctggctcaactggctgacctgccgcgccggtcgctcgcgcgtatggtgggctccatccgttggcgagcaggtgcttttgctggcgatcggcggcgagctcgatacggcatttgcgctgcccggtattttctctgatgaccatcccgcgccgtctgcctcccctgatgcgcttcacgtgtcctttcctgacggggcggttatcgagtatgagccagaaagcggcgcgctcaccgtgtccggcatcaaaaccgcagacgtcaccgcgtctaagtccattacggccaccgtgccggtggtgctggtgaaagcgtcgagccgcatcacgctcgatacgccggaggtggtttgcaccaacaagctgacaaccggcacgctcgaagtgaagaacggcgggaagatgagcgggaacatcgagcacaccggcgggacactgaaatcaaacggcgtgcaggtggataaccacgcgcacggcaacgtacagagcggcggaagctggactaaggggacgcaatga

SEQ ID NO: 154055 - DNA, 207 bp, Enterobacter cloacae
atgaaagccactggccgtgaaaacagcgcggtggtggaatttaccggcaaggtgcagcgcatcgcgcgtgtccatcagctcgggctaaaagaccgccctaacccgcacagccgcgacgtacagtatgcagcgcgccagctactcggattcagccgggaagataaacagctcgtcgagactctgataattaaacacctttctctctga

SEQ ID NO: 154056 - DNA, 642 bp, Enterobacter cloacae; identical to SEQ ID NO: 154054

SEQ ID NO: 154057 - DNA, 123 bp, Enterobacter cloacae
atgatcagcaagtttatttatttgctgatccttatacatttctatattgtcaagttcaggacagatttcactgaacgcaaagattggaaagaactgggaactctgtatcttctgtttatttaa

SEQ ID NO: 154058 - DNA, 912 bp, Enterobacter cloacae
atgatcaccggtgctgcgcagatggacggcgcgatcctggttgttgctgcgactgacggcccaatgcctcagactcgtgagcacatcctgctgggtcgtcaggtaggcgttccttacatcatcgtgttcctgaacaagtgcgacatggttgatgacgaagagctgctggaactggtagagatggaagttcgtgaactgctgtctcagtacgatttcccaggcgacgacaccccaatcgttcgtggttccgcgctgaaagcgctggaaggcgacgctgagtgggaagcgaaaatcatcgaactggctggctacctggattcttacatcccagaaccagagcgtgcgattgacaagccattcctgctgccaatcgaagacgtattctccatctccggtcgtggtaccgttgttaccggtcgtgtagagcgcggtatcatcaaagtgggtgaagaagttgaaatcgttggtatcaaagagactgcgaagtctacctgtactggcgttgaaatgttccgcaaactgctggacgaaggccgtgctggtgagaacgttggtgttctgctgcgtggtatcaaacgtgaagaaatcgaacgtggtcaggttctggcgaagccaggctcaatcaagccacacaccaagttcgaatctgaagtgtacatcctgtccaaagacgaaggcggccgtcatactccgttcttcaaaggctaccgtccacagttctacttccgtacaactgacgtgaccggtaccatcgaactgccagaaggcgttgagatggtaatgccaggcgacaacatcaagatggttgtgactctgatccacccaatcgcgatggacgacggtctgcgtttcgcaatccgtgaaggcggccgtaccgttggcgcgggcgttgttgctaaagttctgggctaa

SEQ ID NO: 154059 - DNA, 396 bp, Enterobacter cloacae
atggcgcatgggctcatccgggcgacctgcgcgccagccaatctggcgaccagtattctggtcgtactggcaatgaatcagctcagaagccttattcgcaaccgggccatgaataccctcggcgctcattctgaaaaaaccattaaaattgatattattagcatcagtcaggccgacgccttccaccgcacccacaccaaaatcacccaccttcaagacccgcccgccagtggtatcggtgctggaagtggtcacatcttttgtggccgccgtgcccgcatcatccagattcgaggttttcagggtgatatctttggtgccgtcaaaatccacacctgcaatttttcgcgcggtggcgagtttctttgcggcttccgctgtacctttggccggtaa

SEQ ID NO: 154060 - DNA, 210 bp, Enterobacter cloacae
atggaaaaaatcaccacgcttatcgcctactggctggccgtggggctggcgtatatcggggcgatgtcacccgaaaagatggcgctttacgtgggcggaggatgcgccatttttaccgcgctgacgaactactggtttaagcgcaaaacctatctctatctgacgtctctcggactcgataagggggctattcgtgaaatcaatcgttaa

SEQ ID NO: 154061 - DNA, 405 bp, Enterobacter cloacae
atgaattattatttttcggaatcagagctgggattctattgtgatgaagtgaatgaatccattccggctgatgcagtagaaatcagtgaagaattatatttttctctgcttgaagggcaatccaccggaaaagtgatcgccgcaaataaggcgggcaccccgattttaaccgacccaccggagccaactgccgaggagttagtcgcgctggcggaagaaacgaaagcagtgctgatgacggaaactaacgccagaatactccccctgcaggatgctttcgatttggggctggagactgaggaagaaaaacagctattgctcgcgtggaaaaaataccgcgtgttgttaagccggattgataccgaaacagccccggacattgaatggcctgaaaaaccagcctga

SEQ ID NO: 154062 - DNA, 798 bp, Enterobacter cloacae
atgcaaaatattcagaaaaaaatgttttatatccctttcttatattttattaatactcgatccaaaaatattataaaaagcttatcttgggtatgtatttatattataccaatattattatttttgatgatatataagtttgaattcttctcgattgcagatttttataagtttttattatcgttaatactagtttatacactttacgagatcggttatatttataacgatactgaaactataaagcatgaaaaaaaaccaaccataagattgaatagcgaacagtttgttttctatgaaactaacaaaacaaatatttatgcgtgtaggtgcatattagcggttttattgactgcaattattattgttatgggaagccctgttctgttggctttattgccttgggcaataatatttgtttatacactatataactattttcgtagtagaataaacttattgttacatttcatattggttgtattacgttatggctcaccattgcttattgttttaggattcgattcaaatattattttaattaccatttttattttcccgatgattaatttattagaacgatgcggggaaaagagatttgatcttgttttttttcaaagtaagtggtttaagaaacataattatttgagggtgttctattattttatttgtactttgattggttctttgtgctacctattatatggcggagttacattaaggacttttatgctaatatcaatatattacctgctatatcgcagtttatctgctgtgtatattaataaacagggctaa

SEQ ID NO: 154063 - DNA, 123 bp, Enterobacter cloacae
atgacaacggttatcccaatttgctgtctcggtactttcgccgatcacatccctgcgcaattaaatagcgtgcgattttgttttgccagccagttattaagggacggggaggggaaattatga

SEQ ID NO: 154064 - DNA, 198 bp, Enterobacter cloacae
atgatgcagataatcgccgagacgggagaaaagggcgcccttttcaacgctttccagcgtaaccaatggccagtgcgcgaccaccttgtcacgatcgtacagctggatctcccctacccgctgatgcgcggcgatcggcgcttccagctcttttttatccatcacgtggctttgttgaataaatcgaacttttgctga

SEQ ID NO: 154065 - DNA, 276 bp, Enterobacter cloacae; identical to SEQ ID NO: 129452

SEQ ID NO: 154066 - DNA, 291 bp, Enterobacter cloacae
atgtcatttgagtctttcgaccgctgtcttcgccctgtggcaaggcttgcaaaggctttcgagattggacaggtcatcggtccccccatttgctttggcggtgatgtggtctaccgtctcagcgggcgtataccttccatttcgaaggcattcctgacagaggtgtttgtccctgtcgagaacgattgggcgcagcctgtcccacttactgccataaccgcgctgatgcctgctctgtccccgctgatgctgctgccagccttcgttaaggtgcttggggcaatagcctga

SEQ ID NO: 154067 - DNA, 825 bp, Enterobacter cloacae
atgaaatatttatcgctacagcaagcgatgctcggcatgcgaataatcatgaccgacgatggcctcattttgaaaagtccggcaggtagcgcacattacgatttgaaaggacgtcgccatacagtatggggtgatgcttctttcttccctgaacatctacgcgttaaagataagcgcaaaccgaaatgtggccacgtcagtttcggcaatggcgaaatcgttgctcatcgggctgatggttctgtggcctggcgaatggggaagatcggagaacctgccaaaacgcctgatgatgcattaggtgagctgtcggctgtttacacccttccacgttacaaaattagtagctacatgaagagacaggagctgattgctaatgctcttgatgaagccaggcaaagatttagtgaagagtttggaggggttccagccgataaaacagcggtagtattcctggctgatcgctgggttgctgttgaggggggatatactccagacgaaatacgtgatgctgcggaatacatcaagcggaaaaggaagcagaaagccgacgaaaaggcgatggcagaatcatctccatttgtcatgaaggacggacaggtgtttatcaagaatgccgtcatcccgaaggttcagctgagccgtactgaaacggacccgcgaaaaggttatgccataaatgttggcatcggtcccgaaattaagaccagcgtgaagctatctccagagatggaaaaagcgatttctgatgttgtgtcagcggaactgaaaaagaatcttaagcccggcggcacagtctgggaatggtcacgacgtggattctga

SEQ ID NO: 154068 - DNA, 738 bp, Enterobacter cloacae
atgagggattatgccgcacagctgggcggtgaactgcccaaatacctgctcgccccggaagtggccgtactgctttcttatctgcccgatcttaatcagcgtatgtactttgatacgctctggaacaccggcgcacgtcccggtgaaggaatggcattaaggccagttgattttgtgctggaaccgacgcgccagcatccacagccactggccgtggtgaagacgctgaagcaacgcgaacgggaatccaaccgcccccccggaaggccacgtaaggaaacgcagcagctggagcaccctgattcgcgctaccggaaaccgcctgagccagtaacgcgcctagttcccttacttgatgccggatatgcgttacgaatgagggaatttctagcgacgtggcgcaagcgtgtgaagcatcaacctgtgtggccgatcacctcccggcaaacgccagttaactggctcaacgctgccctgttacgtgcggccagtgacggtgtaacatttccgataaccgtcacaccacatacctttcggcacagcttcgcgatgcatttgctcatgaatggagtaccgcagaaggtcttacagggattgctcggccaccgttacagccgcagcacagaggcttacacgcgtgtctttgcaatggatgtactggctttgaagggtcttaatttttcaatggatttatccattgcacgtactttcatttactcaaatagcaaaaccgcctga

SEQ ID NO: 154069 - DNA, 201 bp, Enterobacter cloacae
atgagcgtaaaacaagaaaacgtaactattgccgttgagttagacagttcagtagcatgggcgcttgcgcagttctgtaagcgcacaactcactatgattgtgtggaacgatctcaatcagaagatgaagcctatctcatgatggatggagtaaatgctgtaatgcgtgcgctaagcgaagctggattcagcccacgatag

SEQ ID NO: 154070 - DNA, 285 bp, Enterobacter cloacae
atgtccattattttgaagaaacctagcgccaatgtagatcaggttgcaactcccacagcgcacgaggttgccagatttatagctgatggcgacaagcgcccagcaaagggaagggcagtatcgagaacataccggctgaatcaggtctttatagatgtaatggaagctgacgcaaaactaatggggcaagggaataccgacattttaaaagcggctcttgctgcctggcaaagtctggacgaaaacacaaaaaagcactggatactggaaagtgccaaaatgtaa

SEQ ID NO: 154071 - DNA, 663 bp, Enterobacter cloacae
atgggtaaatcagcggtcttcggttcagacaagggcggcgttggtaaaacaacgacggtagccaacgttgcctctgctcttgtaagcaaaggaaaatctgtgggtattcttaaatcggataaaaacccagacttaatcaactggaacacaaaacgtcagcaaaatggactaccggcagttcctgtgtatgaagcctatggtgatataagtaaagaaattaaacgcctgtcagatttgcatggggtcttgcttgttgactgcgcagggcatgatagccaggagtttcgtagtgctcttactgtggcggatattcttgttacgctggtaaaaccatcgtctgggtttgagcgtgacactctaacagatgtaaccgataaggtacgcaaagctcagtcggtaaacacgcgattgcagccgtgggtactgtttacccgaattgaggcaaacaagcccagcaaagtaaaggatgctatcgaacttgataagttgctgcgttcagatcctgtatggattcaaccgttaagaactcgtatttcagctttagatattttcgaaagcgcatgtaacgagggtgccggtgtacacgatgtagctcgtggaaacagtctaggaaaagcgaaagggcaaatagagctgttcgctcaggaaattggaatactttag

SEQ ID NO: 154072 - DNA, 768 bp, Enterobacter cloacae
atggacaaagcacagggattcactgagcgttttgacttcctcatgcacgttgctttttcgcgttcgttaggtaaacgtcaccgcaagccagctcctttacgctgtaaagccattgatgccttacttcaggctatgagttttcattacgatccgctggctggcgaatatggacgtgtccagtgttctgttacgacattagcgattgaatgtgacctggcgacggaatccaagcgtggcaatctgtctattacccgtgtcactcgtgcgcttgagtccttagataaggattttggcctgatcacatatgacactgagtttgtcgctgaactcggttgtaatgccccctctaacatccagttcactccagcattgttcgaagcgctagacgtatcaatgctatcgcttgaggcagtacgccaaagtcgcgccgaatggcagaataagcaacgtgagaaaaaaggactgccacggctcgatctggaagagctggctaaccgcgctttcagctatgtacgcaataaattccgtgagtatcacagagaacggcgcgaacatggccttaaaagagccagagcgaagcgtgatgctgagcgcagccgcaaagatattgaacttctggttaaacgtgaattgacccgagaaatcgcagatggtcggttcccggcagataaattggctgtgttcaatgaagtgcagcgacgcacaagcgaaagaactatcatggcgagaggcaattacagccgcctcgctccaccaagctatgcctga

SEQ ID NO: 154073 - DNA, 198 bp, Enterobacter cloacae
atgacccaagttatccatagccgtagggttatcagtatcactgagttccggaagaacccagttgagtgtgtcaattctggtaagggcgctctggcgattatgagccgcaaccatccagccttttactgtgtaccagcagaagagtatggaaaacttttagagctggccgaaataggtaaaaagcatcaatctaactaa

SEQ ID NO: 154074 - DNA, 1053 bp, Enterobacter cloacae
atggggagtaaagatattcgccaaatgatgaataataacaggaaaaacctatccggttttacgattagcgcacctgaacctgaaaaagaacaacccgccgaaagtcgcttttctcgggttatggataagcttcgtaaccctgtcaattattcaaaagtggccgatgattcacgtaagtcagtagaacatcatctggatgcgagcaatctgtacaccaagcgcacccggaaaggccacgttcattatctcgataagaccagtgataaaacattgttcgttgataacggccagctgatcaccatgcgtaaaaatggtcttagcaaagacagtgttgctgttgcgctcgaacttgcacaaggtcgttttggtagcactctcaatatcaaagggtcaaagcagttcaaagaaatggtgattgacgtagttgctgagcgaggtatggacattcacttcacggataagcgaatgaatgaagcgttgcagctgcgtcgtcaggagctggagaaagctaaagaacagcgggatagcagcagccgggattccgcattcacgattgagggggcggagctggaaacaggtagggaatctgccggcagtgaagatctccacgataaagcagagagcacagcccaggatgttgaaggtgaacactccccactttatcgatctgtatccaccctgcaaggtaaaatcattaagcatggggaagcaccgtatttagataaggaaggtaacagtgcaagttactatgttaccctcaagggcaaggacggtcaggaaacgacacagtggggagtcggcctaaaagatgcgctcaaaggattccgccgtggtcatgaagtctctttggagctgaaagagtccaagccggttcaagtgcgtgtgcgtgatgaaaatgggcatttctccactcgtgaagctgttcgtaacgtatgggaagcgaccaggcttgatggtccacaaccgaaaaagacaactgaagcatccaaaagcgatgttgttaaaggttttcgtacggtcaataccggtgatacaagccctgatttagcttag

SEQ ID NO: 154075 - DNA, 351 bp, Enterobacter cloacae
atgagttacgaagtcaacggcagagaaataatcagcaacgttctcctgaatctgaaagaggaattgctcccccatttgccgatcgcctgcaaaacctgcccgatggctatgtggcaggtacacaatcagggcaaggaaataaagagttattgccgggtaatgcacgcttacacctggcaaaccagcaaaccaacggaaattctggattgcgacgcgctgtacgaggaaccagaggaggaggaggaacttctccagctccaaaacaacaacgtgaatctgcaacagcctccagtggaagctcgctacgagccgtggggcgatatgcacgaagacgatcaaaattacagctga

SEQ ID NO: 154076 - DNA, 153 bp, Enterobacter cloacae
atgaatatgcggtttacgatctaccagctctccagattttttatcttccatagtttttatcttcggaagatgagcctcagcatagaaattaaattcatcagtatcataggcagtcatgagaaaggatttaaattcttgtgtgatttcgattaa

SEQ ID NO: 154077 - DNA, 342 bp, Enterobacter cloacae
atggctgctaagcagaataaagatattgtcgtgtcatttcgcttgatgcgcgatgagttctctccgttcgaacaacagataaaaaaatcacaactcagccgttcagctttttttagaaagctggcgttgagtaaaggtgattcgattaatattgaggttaaagacaccagtaaattattatacctctttaacaagtctagcaataatattaatcagctggctttaaaaattaactcggcacataaaaatggtacaatatcagagaggaagtacactcttcttttaaatgctcttatcaatattgaatcactgatgaaaaaggcggttgaggatgctgattag

SEQ ID NO: 154078 - DNA, 702 bp, Enterobacter cloacae
atgaaagtagcaattcttaactataccggtactgttggcaaaacaaccgttgcagcacatttattagcaccacgcatgaatggcgcaacaatattcgctattgaatccattaatgaaacagctcaaggcttaggaattgatgtagaaaaaatgaatggcgataaattccgtgagctgtttaaaaagataatgctagaagatgatgcgattattgacattggagcctctaatattgaagacttcatgactaatatgatcaagtttgatgattctcatgaagaattcgattactttgttgtacctgtcacttctggtacaaaagagcagaaagaaacaattcaaatgctggacacactagcaagtatcggcataccggcggataaagtgaaggttgttttcaatcgtgttgatgttgatgttgatgatgaatttccattcatcattgcacgctataaaaaagaaaaatcattctccttaaacaaagaatgtgcaatctatgaaaacgaattgtttgatgcgttatcaatcaaggggctaactgttgatgctctacttgcagatgataccgattacaaagccctccttaaaaacaaagaagcaagtgcaaaagatagaaatacatgggcagatatgtttggccttaagtcactcgccaaaagcgtcaaacgcaatcttgatgatgtatatgccaaccttttttaa

SEQ ID NO: 154079 - DNA, 501 bp, Enterobacter cloacae
atgcaagaagaagccagagcacctaagacggcgcgtgatgctctactgattgaattaatcggtgatctaggggttcttcacgaccaaataaaatcacttcctgaagagatcaatcaggcaacagcaggttcaatcgaaattattgcaaatgcagttgaagaggcggagaagaccgcctcaaaactgagcgaaaatattgaccagaaaaaggaggccgttttagctgacctaaaagcatcagtaaaacaaactctggatgaacacgctgttaacatgtttgccgaacttgaaggtaaagttaacaccttacaaaagagaatttcatccttcgagctttctgatcctaaaagccgaagactaaatattgttctcgcatgtacgcttgcattttctttgatattgtcagcttctgctattttcgctgtctatagcgcggcaaaatctacaatatccgatctcaatatgatcattagttcgcaagaaaagccgtcctccaaatga

SEQ ID NO: 154080 - DNA, 435 bp, Enterobacter cloacae
atgtttttttctgtcggagttgaatctcctaaagatgctgatacagcgttcggtataagcgtaccggcttttgatcagtttgattatgggtgtgtatcagctgcggatgaacaatctgatatacccgtaatggcgcgagaggctattttaagtatcgtggaagaaatgttgcttagcggagcgcattctgtcgaagatattaaagatgctggctttatggtttattcggctaatgctgaatacgcgcattgtgactcttggtttatgattgacgtggatctgtccgaatttgaaggtaaacagcaacgcgtgaatattacattgccagatgtgctgataaagcgaatcgatggatttatccaggggaatcgttcagcgtataaagatcggagccattttttggctcaggcagcgcggcatgaactggcaaaataa

SEQ ID NO: 154081 - DNA, 246 bp, Enterobacter cloacae
atgggaaattatacaatcagaactagcgaaaaagatgatgcaattataaaagatgcccaggagtatttaggtgtctcaactgccagcaaagcatttctggtttctatcagcaaggttaaagagcaaaacgaaatgatcctgaagctacaacgtgagctggcgcaggaacgcaagcgatctcaaagtatgtctgccggtattgctgattttgaagtcagtatggctcgcctcttcacgctgaaatga

SEQ ID NO: 154082 - DNA, 147 bp, Enterobacter cloacae
atgtcaacggaagagatcatagcgttagcaaattcgattgtaaaggcactcgctaacggtgaacggatgaaagcgccccagcttaatccttgggagctggatgaagtgatgtggtgggctgataatctgggaggagatctgctctaa

SEQ ID NO: 154083 - DNA, 273 bp, Enterobacter cloacae
atgaaattcaccaccttcctcgctaaatccttcgatatcgaaacctgcaacagagtaattcctgacgaaaatgggaaaaacatcactgaattatgggtttatgaaaaaggagaggattgcgaaccactattaattttacgtgccacagagggcgtttctggctggattgtggcaaatgtttattccgaattaccggatggattacaggtgaatgaagaacaattcaagaaaatgataaaaaacggggaggtgaaatcaaaattcgagaagtaa

SEQ ID NO: 154084 - DNA, 486 bp, Enterobacter cloacae
atgacgggctataaaccagattaccgtggcgaacttgcacagcgagtcaggaaaggcactggacgcactcaaaaagaaatggctgcgctattcgggatctcgcttcgttcctggcaagataaagagcaaaatgaaagccgggttaatgtcgctgaattgttgatgtttcaattattgctcggtgagcacccggattacatgctgataccacggcagggggaaaagcactccccggcgcataatgccgctgaaagcgcctttaaactggctcagtaccttttaagcgatttacccctgccatcacaggctgacttgctacagcgcgatctggatgcggctatgagcgcctttaagggtgactggctggctgatgtcgataatgccattggaagcgccctccctgatgaagcaaccgtgctccgcgcaaagctggctgatgctcaggaagagatcgcatcattgaaaaggcgactgttgcaaaaatag

SEQ ID NO: 154085 - DNA, 294 bp, Enterobacter cloacae
atgatgaaagaattgttctttgttcgaagtaagggggaaaggcctcaaattcgccagatactggcggtatacacggacggtaagcaataccggctgcattatctggtattagaccgaaccgacccgacccgcagcgaaaaagcagcaggtgcaaaagcagagcgattcgaaacgctgaatcaggaatttttcatcgactgcggcgctttcatccgtgtcagtgattaccctttgccaaaactgactcgtaaatttctccagttcctgaaagagagcgacaatgacgggctataa

SEQ ID NO: 154086 - DNA, 558 bp, Enterobacter cloacae
atgaacaacacattctttacgcgttatgaaactacttttatgcgtgtttgcgcattgctgggtgatggctggcgtattgatcggcgtacagaggattgctatcgaatacgtttgattaacccggattatcgccattacgcaatcattgcccggatggagaaagaccgcatttttttgattggtagcgtgtccggctctcagcgcggaaattcttatgactcctgcactgtatcgcctgttcgtgctattactggcattgcagacgatataaaacgtaaaattctgatcaatgccagaaagcatatagaacatttcgaaacggatcgggcaggtgctaaagcccaaagggatgaaaagcaaattatggtgcatttgctctctaaccttctcgatgttcagcagtatacaggctattacggcgggttatgccatataaaaagcgccagcggtctaagcgggaaaattgacgatgagctaagcgccggttacaggcttgccatcggcggtttagataaaacgcagctaatcaagctggctggatttatatcaacactgtag

SEQ ID NO: 154087 - DNA, 525 bp, Enterobacter cloacae
atgaatattcagcaagcgttaaacatttttggtttgtccggtgaattgaccaaagaagacataaaaaaagcgtataaaagagcgtccctcaaaaaccatcctgatcgcaacaaagacaacccggttgccgaagaattgatgaaggccatcaatacggctttcgatttcctgatggcaaacttcgaaaaaattaatcagtatcagtctgccgacgaaagcgcccgttataactacggtgatgaacttgaaaaggtgctgaatgagttaaacggcatggctgggattatttttgaagtattgggtaactgggtctggatttctggcgacactaaaacgcataaagatgcattaaaggtgctgggctgcaaatgggcttcacagaagaaaaaatggttctatcgcccggaagaacataaatcactcaggaatcgcaaagaacactcaatggaagagattcgcgcgatgtacggcactgacggtaagcgtaatgcatggggtcgcaaatccgtagagcatcgcgcctga

SEQ ID NO: 154088 - DNA, 312 bp, Enterobacter cloacae
atgaagagcgactataatccggggcaacgggaaggtttaaatagcttcaaatggcatggcgaagacgttttgattgttcaccctggcgcatatccgcaatttatagcgaacggccagattgtaatgttcaggcgttatgacgggttggtttggtgcggccgtgtttgggagtatccaaaaccttcttggtatgaattagaaattgataaacctgtggactcattcgaggctcttcagtggctaagcgagaagcgtcgcatgtggttggctaatgagaatgatttctcagggcaggaagaattgcctttctga

SEQ ID NO: 154089 - DNA, 456 bp, Enterobacter cloacae
atggcatctcgcggtgtaaacaaggtaattctggtaggcaatttgggggcagatcctgaagttcgttacatgccaaacggtggcgcagttgctaatatctccctggcaacgtctgaaacgtggcgtgataaaacttccggtgaaatgaaagagcaaacggagtggcatcgggtagtgctgtttggcaagctggcagaggttgccggagagtatttgcgtaaagggtcacaggtttatatcgagggacaattacgtactcggaaatggacagaccaggctggcatcgaaaaatacacaacggaagttgttgtgaacgtgggcggtacgatgcaaatgctaggtggacgaccggcaaccagtgggaacgggcagcaatcaacgcctcaaccatcgccacaaacaccaccgggatcgaatgaacctcctatggatttcgatgatgatatcccattctga

SEQ ID NO: 154090 - DNA, 2265 bp, Enterobacter cloacae
atgaagcgtttatttatcgcggaaaaacctaatcttgctcaggtgatcgcgcaagcgttaggaaatcctcaatataaagatggatacatagtttgtggcgatgacgttgtttcttattgcgttggtcatttactaaaaattgcgcctccagaacattacaatcctgaatataaaagatggagtaaggatactcttcacatgaagttacggccagttcagcaccttgtcattgaacgtactgccgaacagtttgaaattttggcaaaacttatttctcaggctgaagaaattgttcacgctggcgatccggatgaagaagggcaattactcgtcgatgaagtgctgcaatattgctgctgtactgcgcctgttaaacgcgtactgataaacgatctgaaccctgaagtagctcgccgggctttattaaatctacgtgataatgctgaatttaaaggcctgtctaaccgtgcttttgctcgtagcgtaggggactttatttatggtattccggtaacgcgtgcttgcaccgttgccgctcgtgatttgggacatactgaagttatctctgttggtcgagttcagacccctgttttgggaatgatcgttcgtcgtttccttgccaaccagaatcataaagaatcatggtactggcaggttagagcgcatttaggcagtgcggacaccccaattattgcagggctggtaattcctgaagacgcgccggttgacgataaaggcaaaattaataatgaggcttacgctacggagctggcttctgcttgcacaggcaaaaacgccatcgtgactgctgcctcggtagagtcaaaagcaaaagcaccaccattgccatttgccttgcttgatcttcaggtaaaaatgagccgtcttcatgacattagctcagaggaaactttggcgatcactcaggccttgcgcgaaaagcaccatgcaataacgtacaaccgttctgactgccgttatctgaatgaagagcaattcgcagatgcacccggtaccctgcgcgcaatttcgagcacttttccggagcttgcaccattttttgccaaagcagacagtagccgtaaaagcagggcgtttaatgaaagtaaaacgacagcacatacagggataatcccaacgcagacaaccatcaatgccagcgttcttacagttaatgagaggaaggtgtatctggcgattgtcgaacaataccttgtgcaattcctcgaagaaaaagaatttaaatcagcactggctgaattcggaatagataaatatacattccgactcagggctacccgctgtactaatgcaggttggtctgccttgcttaaagagaaagacggggatcaggaaaataacaccttgtttgatgcactttcagcactgaaagaaggtgatacggctgagtgtcataaggttgacgtagttcgtgataaaacaacgccgccgcctctgtatacagaggcttcacttctggaagatttacgccgggtggcgcggtatgtggaagatccaaagattaagcaactgcttctcgaccgtgataccgaaaaagacgatcaggaacagggcggtatcggcaccccggccacgcgtggagcaatactcaagctattacttgagcgtggattctacagcatatccaaaaagcaaattgtgccaactgagctgggtatctcccttatccaggcgttgccgacgatcatgactactcctgacatgacagcgttgtggcacgagcaacaaaaaatgattgagtcaggcgaactgacggttgatagctttcttgacgagcttgaaacctttgtcgctttccaggtggacaacgtagacctttcccggcttaaggtcactatttatccgtgcgattgcggtgggcgctatgttcgacgtaaaaacgataagggcgcgttctggggatgtaacaactatccagagtgcagaaatgctgttccggatcgtaacggacaacctgactttacggcgatgaattttgacgcaaattgcccacgctgcaaagccaagatgaagtatcaccctaaagcctgtaactgtacgaatgaagcgtgcaagtttgtattgtgggggactcagttcggtaaggctctcacgatcacccaaatttctgaccttctctctaaaggaaaaactcgcgaaataaaaggctttaaatccgccaagacaggcaaaaagtatgatgcggcgctgcaattgcaggctgatggcagcgtttcactgatgtttaataacaagaggaaataa

SEQ ID NO: 154091 - DNA, 312 bp, Enterobacter cloacae
atgaagataaacatgattggcggtgtcactgttttactctgttctttattttcaacctcagcactggcagatgaaccctgcaatatgactctatgtatgtgggggaaggttaagggggaaagtagtagtgaatgtcaggggcagattaaaaagttttttaaaaagcaggtgaaaaagaaaggctcttttttgcctaatcatacagctgatgctcgtaaaggaatgttgcagaacgagtgcccatcaagtatggctccagctcagttcatcgatgaggtgataaaaaaattcgggcggattaaaaacggttaa

SEQ ID NO: 154092 - DNA, 933 bp, Enterobacter cloacae
atgctgattcacctaacccctcgatattatgcaaaatatagcgatgtacaagttgatattatagatgtggagataccacagcttaaattggtattgaaagcgaacattgatattgtcattcgtaccccattcccaaataaaaactataaggtggtgtgcagaaagaaaggtcgcaaggcaattaatggaattctgattgaagttgagggaatgtttaaagactttactgtgattactagatgggctattaatggtgaaatttcaagacatgaaacgtactatcacgttagcgacgatgaattcgatactgtaacagaagaggattttctatggagtggttttttcaatacgccataccgcgcacgttgtaaagaaattgaaaaggggggcactttagtaaaaagacagtcagcgatggttacgttgattaatgatcttaattctaatgatgatgataactactggacatataataaagtagatagtgaagggattgttcgatttagagctgagtacataaaccttcccacagtagaacgagaaagaataacaacatctttttttgggaacaagcgtttgcctttatacgctgataagtttgatgctcaatttaatccgtataagttaactgtagtaccgaccgggatgaaagaattgggtgtctatattgttcctctccgggattggattaaggagctaaaagaagattgtgagcaagagtgtttgtataaaatactcgaagaaataaatgcaaaaaatgaatttttcttttccaacactaatcatcttaaaattcttgctgatgcatattcagctacctataaccagcttagcgaacaaagcaagatgtatgttgatgattgtcttagtcagcctgttttccatcttgtgattagcgatttagatgaaggttttaaacctgaagatgtgtaa

SEQ ID NO: 154093 - DNA, 495 bp, Enterobacter cloacae
atgcggcgactaaaaacgataaaactgtttgtgtatgcagccttactatacccctttaccctacaggcaaccgagctgaagggaagagtaatacgcgtactggatggagacactattgaggtattgcaggatgaacagcctgtaaggattcgcctggcaaacatcgatgctcctgaaaagaaacaggcgtttggtaactggtcagcgaatcagcttaaaagtctgattgccggaaagcctgtaaccgtgtcatacagtcaggaagaccaatacgggcgtattatcgggcgagtgttcacagcgactggaacggaggccaatttaatcatggttagaatcggcgcagcatgggtttacgagcgctataacacagattataccttgccagacatccaaactcaggcaagaaaagatagacgcggtttatgggtagaaaatcaacccatagaaccgtggatatggaggaaaaatcagaagatgaaagataacaactaa

SEQ ID NO: 154094 - DNA, 486 bp, Enterobacter cloacae
atgcatactcttaggaattatttaatctttttgctggttatccctttttttagctttgcaacaactcaaccaatagacgtgaatctcagtcactgttttaatcaagcttcagagcgcttccaaatcgatcaccgattgcttattgctattgctcaagtagaaagcggtatgaattcgaaagcaattggcttaaacaagcgtggaggaaaagtaattagtgaggatgttggcttaatgcaaatcaattcttcatggttcccaacgctggcaggaatgggtatcacacgtaatgatttactaaataatccctgccaaaacatttatgttggagcgtggatacttgcaaagaacatttcttctaatggtgtgaattgggaatcagtaggtgcatataatgctggatttaaaggagctaatgcaccattccgtatgaaatacgcaaagaaggtatatgcaaagtatcttgctttaacaggtgagggttaa

SEQ ID NO: 154095 - DNA, 615 bp, Enterobacter cloacae
atgatcttttatttaatcgtgcttagcactttcgcatatgttctttctaaaaccttcccggcgatatacttaaatgaaaagaaaaatgcaatagagcaaggggagcaactactaaccgaaaatgaagaagtgggacgatttccaattttggcaattgtgatgttcacaatgccggtgctgatattttttctttcagaaaatatgctgttatcttcattctgtttcattttgtcagtggtagcatacacagatttaagtgctcgatggatacctgatttcacaatttatctgttgctggttgtagcaatgttgtctttgcgaacaactgatttgatactttcatgttgggcagtgctgttttatttgatgccagcattattatttagcgcttatggttatgtattgaagaaagagaaatggatcgcatccggagattactacattttcccagctataggacttatgattactcctgagtacgcggcatctttaatgctgattaatttactattggtactattgtcctcccgatgggttaaaaaaatccctcttgtaacggttgcttacttcaccttcacaggatgtcaaacatgcatactcttaggaattatttaa

SEQ ID NO: 154096 - DNA, 420 bp, Enterobacter cloacae
atgaaatcattacttatagttgcgatttgtgttctagtagttgcaatctatcaaaattcattcgaaggtaatggctcttacaatgaaactttaaagttaaataaggcgtctttgtttctgaactatactgccgcattcgatgcttattacttagcaaacggtagcgcaaatggtgatgtgacaaataaggtcacgttaccagtatggctaccaaaggatacgacgataaagatgtatgtgaatggtggttacggttatgttttcatgccctccgcgagtggtgtgctctcggaggtcatgcgagcaaccaattacagcgcgttaattgggtttacagatagcacctcaattatttcgcttgtgggaaaaaaaccgaaaccgaattttataccagcgggctatattgtctatgtgagataa

SEQ ID NO: 154097 - DNA, 1260 bp, Enterobacter cloacae
atgaaaaaaggtgttgcacaaataagtgatgcagtatgggcaattggcatctttcttatatttttaacgtttatcattattcccatgagtaattggtttgtagatcagtatagagctactgttgctgcaactcaggccaagcgtgtacagcaggcagtaaatacctatatcaaagataaccacgatacaatcgcggcaacggcaacagcaacaactccatttatctttggtgtttctcaacttattagcggtggttatctgccagctgggttttcatcacagaatggtttttcagctacctatcaaactcgtgtattcgaaccgactaccaataaacttaattcaatgacctttttgaatggcggggtaaaactttccaaaagcttggctagaaagatcgctatcggaatcggggcagatggtgggattattgataatggagttgcgaagggagcgttgggcagctggactatgaacctctcttcattcggtggttataacccaggtgaaggaagcgtagtgatcgctggattttacgagaacgggattaatatcagcgattatctataccgtaaggctgttcccggccacccagaactcaacacgatgagtacggcgttaaatatggggggaaacaacattactaatgcggcgacaacgacaacaacgaccttgaacgccacaaacgcaaatgcaaccacagttaccgctactaacgtcaattctactaacgtcaactctactaacgttactgcaaccaatgttaacgcccagactactcgtactgcgggagaaacgtacacagggggttggttccgcactacaggcgatacaggatggtataacgagaagtggggcggcggtttcaatatgaccgacagtacctggattcgcgcttacaacaataaatcaatctataccggaggccagattaagggggggacaattcaatctgatggacgtatgacagccaatgagtttctgcaactgaatggtgttgccagtgcaggaatggcctgctctcctaacggattagtgggaagagatagtaatggcgcgttattgtcatgcgaatctggtatttggcagaaaccaaaaagcggtaagcagggctattattgtcgatatacttcaatgagtgcaagaaagtctgaggattatgtaggatttgtaccacgcactgatcgtaattgccctgtgatttcacccggtcagattcagggtgaatgtgcatgcatgaagataatgctcgattactag

SEQ ID NO: 154098 - DNA, 954 bp, Enterobacter cloacae
atggatacgttaaataacttaagcttcatagatttaattttaggccgtgattatgccgagattaaagggctaaagggtgcaacttcatttctttctgatcttcccgatatttatagtattgatgcacaaaacctaaaaaatgaatgtgagaaaatatacaaagaatcgggtaagacagaattttcattgagatacgataaccgaatttacagaattacagttttgagtagcgtttttgatggtgttagctttgttattcgacaaacacctgagaatattgtcgatttcagcgaaatatcgttctctaccgatttacgccgctccattgaactgaaaggtgcaacagggttgtgccttatagccggtgaaatgggttgtggtaaaacaacaacggctgcatctgtcctcaaacgccgtatcgaaacaacgggaggtttgggagtctcgattgaagatcctattgaaacacttcttaatggccgtcatgggcatgggcgatgtatgcagatggaagttggtcagtatgaaacatacgcctccgctacgaaaaaagcctggcgaacaggagcttcatgcttgcttctgggggagatccgagacagccatactgcgcatgaggtacttaaagcctccctaacgatgtttgtcgtttctaccattcatgcctcgtcggtttttgatgctatcgacagatacgttatgttctgtgaagaagtaaatcctaatgcaaaacaaaacatcgcaaatacactttttataattgcgcaccagaaaatgagttctgttatcaggaatggcgaaatcacaggtcgaaatattgacattagcggatataaccttgtccattgcagccaatccaactcaatcaaatcaaaaataatccagggtaattacaatgcactggcagatgaatttagtggcatggtttatacatttaaaggagctacctcatga

SEQ ID NO: 154099 - DNA, 510 bp, Enterobacter cloacae
atgaaaactgtaactatgaaacgtgggattgcgaacattactgactccgtaacttctatcggtattatgttagtgatgattgctgctgttatggcgttagcgtatttgggctactctaaattttatgcaacgaatgaggtgacgataatcagtaacctaatcaacgaaactaaaaacatgcgagcaagtagtgggtatggtacttctgactataatcaggcgcttattaatgcaggagcgctgcctagtagcgtggcttactcagggagcacaattagcaaccgctcaggcggtacaattacggttaaaggcgcgggggtaggttttactgtgactgatactatgctttcaaacaaagattgtattaaccttgcacagaaattgggtacttccgaaatggcatcaaccaaaattaactctcaatctttcaccggtgaagttactgctgtaatggcaacgtcagcctgtaccaccgataaaaacaccgttgcgtttactactaaatcctaa

SEQ ID NO: 154100 - DNA, 978 bp, Enterobacter cloacae
atgataaataaaaaggtattcatagtcgccctagccgccaatgcaattacagcatgtagttcgccgccaaaattaactgagccagatggcgactggattagttttgatgtacctcaatctcaacaagccacacctcagccagttaagattagaaatccctttgctgaggacatgactaatccaaaaatttcagccgtaagtgataaaaatgaaattaggcctttgctaacttcttcaacgaacacattaccaatgctcgttaagtccgacggtaaaaatgttcctctatataaagctctcaaagcaatagtacctgactccatgacggtaaggcttgcaccagatgtagcgcaaaacttccgttcctctgtttcatggagtggcggcgatcagtggcctcatgttttacaaaaaatgctcgttgctaatggccttaaggctgatgtgaacagttcccgaggagaagttattgttcagtatgctcagaaggtcagccaacctgtaaaagctcctcctcatgggataccagtgcaaccgaccagtacaacagcagctgttaaagctaatacagccactgttcttaaaacgccgcttatcccgaaagtaacagaagggactaagccagcgatgtcggataaatcaactcaacaggggaaacatgatcctgttatcaaggttgcgccattagctaaacctgcgccgatttttaaaccgtggacaatagaaaaaggaacaacgcttaaagcaggttatatggcatggacttcaaaagaaaattgtccagtaggtaaaggtaaatggtctgtgcgctgggagactgatacagattatccgattgattacccactttcatttagtgcctcaaattttgaagacgcaaccagccaattatttaatttgtacaggaaagcacaagcgccgctttatgtaagcggatatcgaaatcaatgcttaattattattagcgacagaaagtga

SEQ ID NO: 154101 - DNA, 1515 bp, Enterobacter cloacae
atgaaaaaagcgaagcaaaagaaataccccggcattatcttaggaaagcatcccactaaaaatatatttttaaccagttacggtcagacttttgtgcttcttgcagcgtcaccggggagcggtaaaggggttagctttattatcccaaatcttctttcgtttcccgattctgtcgcagtcaatgacccaaaattcgaaaactggaatatcacttctggtttccgagctgcatgtggacatgagtgttaccggttctctccagaactactcgaaacacatcgttggaatcctttaagcttcctggcaacagatgaactggatcgttttggagacattaaatccttatcctccacattgttcgttgacccggatggaaaaaatcagtccttctataacaacgcgggtaaaatctgttcagcaataatcctgtatctcatggagacacctgaactgccattaacgcttccacaagtgtatgaaataaccagcttgggggatgaactgcctggctggattacagataccattgaggcgcgtgagaatgcaaacagacctctttcagacgagactattcgtgagctgatgattgtcgttgcaatgtcagcgaatgaaaaatcgtgggggatttatacagatattctttctgaaattctcggcgtttatggtgagaaaaaagttgcctgggcagtttctggaaacgatatagatttctcaaaaatgcgcgaaaaaagaatgagtgtttatttctctgttaccgaaggggcattagaaaagtttggtacactcatgaatttattcttcactcaacttatgcgagctaattcaaaagttcttcctgaagatggaggcgttgatgaaaatggagagcctatactgaaatatcagataggcatgtttatggatgaaacaaaagtgatggggcgtataaaagcatttgagaatggtcccgcactgcttcgcggatacggattcagatttaattttattttccagaataaagaccaactccgcgcacgtaatatgtatggtactgaaacagccaatgccatgatgaatgcatttcacgtagaaattgtgtatgcgccaccaaagcaggatgtaaaatcagcggaggaatacagtaaatctcttggtactactactgtcgatgttgtcaatcattctgataattttggacataagcaacgtagtcggactaaaagcaggtctaaacagtctaggccgttgatgcttccgcaagaaattcaggaaatgccttatgacgaagagttgatatttgttcaggggacaaggaaatcaaggccgttaaatattaaagccagaaaaatattctggtatgaagaagaggtgtttactgcccgtgcaaacatgccgaagcctaatattccacttgcttctccagcgcaactttctggtcttgttgtttctatgcggaaaaaagagctggcgattaatgctgactttaatgaagatttttccgcattgattaatgaggaacaaaataaaaggctctga

SEQ ID NO: 154102 - DNA, 354 bp, Enterobacter cloacae
atgaaaaagtatctaatatggacagtgatatttattttcgctgtaatcctctctgtcattatcggtaattattcaggcggtgctttatatctttacttggctggagcgccagcaggcaatgtaacatgggatacgttatataatggtgtccatctgccttataaacatcctgacttttcaagtgctatatgggggagtgttttagccgcatggattgtattcattcccgtcttaattaccgttgtgactatctggttatttttgcttcctaaaaacaaatctctttacggaaatgcaaggtttgctaccaataaggaaatggaagtattccactataaaggtgattataattaa

SEQ ID NO: 154103 - DNA, 1008 bp, Enterobacter cloacae
atgagttttgataatgcaacgcttgctcgtgactttcttaaacaaagtggtgtgcatgagtgccttaatcgtgaaggggtcagggatgttgccattaaccggcctggcgagatatggcttgaaaatgagaatggctgggtcagggaggaaagacctacgctcgatttgtctatgtgcagccgcctcgctaacgcgctcgctgcatataacaatcagagcctaaccgtcaaatcgccaatcaaaacagttgagttgccagataacgagcgtggactgatcgtaatggctccagcatgtgagccaggtacgttatcgatgacgttccgtaagccctccaataaccgttatacgcttcagggatatatcgatagcggccgttttaatgaggctttagcccttactggacgcggaacggaactggaggaatggcaaatttctctaaagcgcttccatgcacaaaaagactggctcaattttttcatgctggcgatagaacgccgccttaatatcattatctttggtggcacaggctcaggtaagacgaccttcgcgaaatcacttgtagatttgttccctgtacaccggcgtatgttgactattgaggcagtgaacgagctgaagatgccttatcatccaaatcatgtgcatttgatttatggcgatatcatcaccccgaaagaattggtttcctgctcgttacgaatgaagccagatcatatatttcttgcagaattaaccggtgatgaagcatgggatttcatggagcttttgaacaccggccatccgggaacgatcactacagcacatgccaatgacactctttcaggttacggccgcgtatgcggaatgattaaacaatcccctgtggggatggggcttgattatgagtacatagagcgtcgtgttcgtacatctttcgatattgtgctttatatggagcatacccgtattttagaagttcattatgaaccagaaactaaacttcgattgcttaatgccgcgaggtga

SEQ ID NO: 154104 - DNA, 1221 bp, Enterobacter cloacae
atgacagaaaataaggagtctgatgatctgtttaaaaacttacctcgcggtgatttcaatttattaggagtcaaaaaagataagaaacctaaaacaaagataattttggtcattggcggaggtgttctttttctgttcattgctatcagctctatcttcttttttgcataccgggctatgcaggcgaataaccctaatcccgtcgatgaaacgaacgtcaaagcagatgcggcattgaattcaaaacccatttcagatgatgagcttcaaaaacgtagagctgaaattttaaggagaaagaaagaagaggaggccaaaactccccctcagccagtgcagactactcccgccattgttactgccacgggtaagcaagagccaccaccaccgagtgcggcttatttacgtaaacttagcggcggaatcacggtacaggaaacggggggcggccagtcagcttcttcaagcggagatagcagcgagcagcagtcagctaacacagctgttgtcgcgcctgaagcagctgcggcgttgaatcaagacagtgatagcgttggtttgggaactccagtggataacagcaggggaaatctttctaatttaagaggaaccagctatgcatcaacaagcgcttacatgtcacctgatcgtaaattcctcttaaagagaaaatctaatctgcgctgtgcgctttatacgggcgttaaaacggatcatccgggctttgttaaatgcattttgactcagccgctgtactcgtctgatggcagcgttattctggccgaagctggagctgagcttgacggggagcagaaggtcgaaatcaagccggggcaatccagtgtgtttacaacatggacggatcttgaaacgtctgtaggtgtgagggcgagcctcaacgcgctaggaactggtgctatgggcgaaagcggtaccaatgcctatgttgataatcactatggccaacgttttggcggcgcagtaatgctctccttcattcaggatgcttttgcttcagctgcgaatgcaacgaaaaataataattccacctattcattcgataacagtgaaagtaatgctgaaagtatggcaacaaaagcgctcgacagtagcattaacattcctcctacgggatatgtattaccgggaacggttattaatgtgatcgtcgctcaggatgtggatttttcttcagtgtttaagacacgccctcagcgataa

SEQ ID NO: 154105 - DNA, 798 bp, Enterobacter cloacae
atgaaaattcaactactggcgttctttgttatttcagccatcgtttcttcagcacaggctgaaacgtccggcagaggaacccagcttgacaggcgcatccaaacagccacctattcaccagacaacgtttttcgaattaatgcttcagttgggcgagcaaccattgtccagtttgaagatggcgaaaccattcgccgcgataacggtattatggctatgggtgatccaagcgcgtgggaagttggtcctaataagtcaggcgatgcggtgacagttaaacctaaaacggatcaggagccagataccaactttataattaagactaataagcgaacctatgttctggagctgaaattagttacggatatttcaaaaacaacctatcttctgaggtttaattatccgaaaccgcctgcgccggttgaaagtccttttgttggtcgtgacctgaatcaaaatccatgttccggtaatcagaacagacgttatgagaaaaaaggcgaccttgctatttctccttcggaagtttgggataatggtactttcacatgtatgcgattcccgacaaattctcctcgcccggttgtctatgaagttttaccggatggaactgaaacattggtaaactcgcataccgttaacgatatactggtaattcatagtgtcagtaccatgtataaattacgtctgaataaactagttcttgctgtcagaactcgcgtgaacaataccgggtattacaactacaacgggactactacaggcgagataagagaggtgaagaatgacagaaaataa

SEQ ID NO: 154106 - DNA, 777 bp, Enterobacter cloacae
atgttcaaaaggaaaaagaaagacgtaattgaacagtcctacaacattgaaaaatacaaggatagtttcacccccgaagaagctaaagaaattagtctggcagttcgaagctatacgtatgccgctcagttttttgaaaagcatattgctgaggaagaaaaggctaaagtaaaacagtttaaacggctttgcatttttttcggtggtcttgcgttcatgtcggttgcggctgttttgttactcactccactaaaaacagtggttccctatgtaatccgtgtcgataataattccggctataccgatatagtacgtactggtgccgaccagagtatagctaaaacagatgatgcttattggtctatgacatatatcctaaaccgagaaagttatgatttctccaatcaggatttacggtcaaaatttgttgagcttacttcatatgctgacgtatttactgagtataagaacttccagttatccaagaagggttatcttgaggttttaggtgataaacagcaaatcagggtcagtatacgtaatatcagtgagcctgtgccaagtgtagatggaaaaacaacatctattcagattcgctttgataaaaatgttctggataatgtggggcagcctgttgggagcatcccaccgacaacctggcttgcaactattgtctttgattacaacaagccaccaaaaattaaaaaggaagagtggatgaatcctcgcgggtttgctgtacgttcttaccagctgaatcaggaggttggatattag

SEQ ID NO: 154107 - DNA, 927 bp, Enterobacter cloacae
atggctatagagttagaaattgcacaaactctataccgggctatcgatgatgcattatcaggaataattacaaccggcaccgcaaatctcatgatcggtgtcggttctctttttggtgctttctggcttatcgacagaacggtaaattcaatcaactggtattttcagggttttaatgggatattgcagaatgagataatgaatgcaataaaatctgcttttattatctatagtgcttttcacgttggatggtacatgaaggtcgttgttcccttcgtcagtgatatgcctacatggacaatacaacaattatcaggagtaccaataggaaccaatcaggtagatgctttaataaatacctaccttaatggattgtgggaatttatcaagaatattgattttgaccctatcttcaactttaaagaaagcattgctagtgtcctcgtattgatttgtttcttgcttggcggaatcccgttcctcggagtttgtgttgccaccttaatgacacttaaagtcgctacatcgctttttttggttgtcggtccattattcattgcgttcggactgtttgatcagacgaggcaatatttttgggggtgggtgtctcttatggggggattcatgttaacgcaaattattttcggtattgcaatcacactggaaataagtttccttaattcctttgttttaacctcagatccaaacggagctatgagcggttcgtttaaaggagcatttgccttactactctatttcggcacattcaccgccatcgcaacagagatacccaactacgcagcttctgttatgggaggcgcgccaagcggtgcacatggacttaaaaagctattcctcaaaggcacaggtttaggagctgctcagcgttttgcaggctcatttagaaaccgtatccgttcggcttaa

SEQ ID NO: 154108 - DNA, 360 bp, Enterobacter cloacae
atgaaaaaatttatttgtgcatttgctgttattgtgtctgcggtagtaatttcgggttgtgatgatcaacaaaaggtgactgatggcttttctggtcaatggaaagctgtcagtaaggcagatggtagcgcattacatccaaaatacagctctgttatgaatataacttgcagtgaagccgcatgtcatatcataaacaaaaagaaaagtgtgttgagcgatgatgaattagttagcaataccgactggaacatcaaagatagttcaactttgatgaaaggcaacggtattgcttctatttacatcaaagacaataaactcattgcaaatgatgttatgtatgaacgtcagaaggagtag

SEQ ID NO: 154109 - DNA, 657 bp, Enterobacter cloacae
atgaaaattaaggttatttcaacatgcctgtcagtccttttatatgcagcgccgtattatagctatgcttcgggtatcccaacggttgatgtggcaaatatagctcaattggtttccaacgcacagcaacaagctcagcaggcgctggatcaactgaatgaaacgaaagcagctatccagcaggcgaaaagccaatacgaccactataaaaacttagttacaggtaataacaaacttggtgatttcttaaatgatccacttataaacaaagtattaccactcaatgactggaatgatatttatagcgatacaaaaaatcttgctgatttgcgcagccgctatggattaacttccagtgacccgaaagtacagcaggcgttcgataagttgctgcaacaagctggcgctctggaagatacctacaatgcctcttcgcagcgtgtagataatgctgagcaattacgtcagcgattaaatacggttcagactccgcaggagcgcgaagagttggcattacgcttacagcaagagcagctggagctgcaaaaccaacaaataaagttgcaaaatatacaaatgctgatggatcaaaaagagaaaattgaagataaaaaaagggcgcaggcattttggaataaacttgaaggaaatccttga

SEQ ID NO: 154110 - DNA, 873 bp, Enterobacter cloacae; identical to SEQ ID NO: 31763

SEQ ID NO: 154111 - DNA, 345 bp, Enterobacter cloacae
atgttaaaagttaactatatgaataagtcaacattgagaaattaccttttggtaattctgatgttggctttttcaccttatgcattagctgccggtgatactggttggttggatactcttaatcagtatgcaaagaatattcagattggcctctacacactggcgggtacgatagttttgtgctgtgtaattgtttctggtattcgtttagctatttcccgcatggctgggaatcacgataaaactttctgggattatatcggtgatttaagcatggcaatctggattggcggtgcgattgtgttcttcacggcaatgtggcaggtattcggcactacttcctga

SEQ ID NO: 154112 - DNA, 672 bp, Enterobacter cloacae
atgatctctacagcgacttttctggcgctggcgattcagtgcgctcctgatgttgcccctgatactttagcccggatagtaaaaactgagtctggttttaatccgtgggcaattggagttgtaggtaagtcgcttaaacgccaaccacaaacgaaagaagaagcgttagcagctgtcaaacagcttgttaaggagaaagctaatttcagtatcggtctggggcagatcaaccgccagtattttgatgccgataatgctgaagtagtattttctccatgtacaaatttgaaaatgagttcggatttattaaaagattgttacgccagagccttaaaaggttcgagtgatgaacaacaggctcttttgaagacattttcatgttactacagcggtaattatacaagggggtttgtaaaggaaaataacggtactagttacgttgatagagtggtagccgtgaatacaaccggtatcaaggttcccgctttaaatgataatgaaatgcctgatcagtctcccagacaagaacggccaacgtacgatgcctgggatgttttacagcaatatccaaaatacagcgcaccaacgcaaagcaatagcgcaccaacgcaaggcataagcgaaccgtctgctgatacaactcaagaggaacaaacggatgttaaaagttaa

SEQ ID NO: 154113 - DNA, 216 bp, Enterobacter cloacae
atgcctagtaaagcgcaaaacaaagataaaccggaagcaaaatactcaaataacgtttatatcgcagcggagccgcgacagaagctagaggagctatgcaccgaaatcggctacgagcgtagaaaaaacatgccagcgtcagcattcgtaagataccttattgaaaattttggtgaacaggcaaaaaagaaaatccttaaaaacagcgacaattaa

SEQ ID NO: 154114 - DNA, 477 bp, Enterobacter cloacae
atgcaggacacatttaccgatgcctggtatcttctgcgctgccgtcagaattattggaaaaccatacagcagaaccttaatgaagcagggcttaaaacttgctgcccattaattttagaacgtagacgacggagcgataaaaaaaatgcctacagactcataaactcaccggcgtttcccggttatatctttgtaagattcaaccctgccaatatccataccaccgcaattaaacgcatacccggtgcgatggattttgtcagatttgggaacgaaatcgctacgatatcacaagccgaaatagaagccttaaagcttgtccattttgaacgcccacaagagaaaattaatctacccagcgagttaaaaaagaagatagaaaaaattacgtcagcagaagaacccgctgttcgcattgacattttattttcgatgctggagttacctacacgtatatcacggagcaataatgcctag

SEQ ID NO: 154115 - DNA, 393 bp, Enterobacter cloacae
atgattggtaagcgattgaaggccgcacgtaaagcggcgcacatgacccagacagagctggcgaaacgtgctggtatcgatgaactgaccgtcagtagaatctcgcactatgagacagatacgcacagtcccaactttcaacaagcttgtcgctttgctgaagttttggatgttcctgagtgctatctttactgccgcgatgatgtgttagctgatcaactgttggcaatacataaaaggtacaaaaaataccggcttaatccatctgaaatcagcgaattagagagagcagagaaggaacttaaaattgcactcgaaacagtatcctctctcttaaacaagaggattgatattatgattaacgatgaacttccagcctctttgaaaccctag

SEQ ID NO: 154116 - DNA, 582 bp, Enterobacter cloacae
atgattgaaaacagcatatattcaaacaactctcaaaaagatgcacttgttcactttaaagaatgcttgaggttggaagttattaaccgaaatggtaaaaagaagttttcatggtttaaagttttacatcgcgttatttttagccataagaaaagattttatttttggtggaggctggctaattacatgaataaaacaccatccaaacgataccagaagtgggcgagaaagataaatgctaatcttcgttgcaaatatggagctgacattagcatagaagctcatattggagaaggaatgaaactcaatcattatataggcattgttatccgttctgaatgcataatcggcaaaaattcaaatatccggcagaatacaactatcggaagaaaaacatcaaatggtgttattggcatgactgtaattggtgacaatgtagatattggagcacattcttgtatcataggtgatatcaatatcggtcataatgtcacaatcggtgccatgtcttttgtaaataaagacattcctgataactctattgtctataatcctgttacatctgttatcaaaagcaagtga

SEQ ID NO: 154117 - DNA, 228 bp, Enterobacter cloacae
atgcttggtaaactgttctatcggtgtggtttggcgctgatcactgcctccggtgtgatcagcggagctatttcagcatccttctttgtattgctggtcatgcttctgggtaagtccgggtataactcggtcgttcctatgttagttgttgttactgcggggttcgctggcacctcttactggttcctacaggactatcgtaatttccgtaaccgtaaggccgcataa

SEQ ID NO: 154118 - DNA, 282 bp, Enterobacter cloacae
atgctgaacatgtttatggatatttccagccttaaacagttacgagtcatcagcaatgatactgaaaaactagaagcgccagatgttgatacccgctcaatacagcagcgggtatggatgaaaccagggcagactcttatcatgtcaggatttgaacagaacattaataactcaaatcggcagggcgtaggttcgcctaacaatatattgtttggcggagcattgtccggggcgaaaacaaaacagagcttcgttattacggtgacaccttatgtacgctaa

SEQ ID NO: 154119 - DNA, 1383 bp, Enterobacter cloacae
atgtacgctaaatcaaagattaggagatccaaaccggaaaacatagtcagtgatactggcatacgtgttctaaatattaataaccatcgctttgtagtagggcttgaatgggaaactattaaggctcaccgcaaggtaatgcaagaagttcgcaagattgggaaaacgcgaaatcttgatgtggtagctattcgaaaagctgaagctattcaggctgggtttgcgcctaaatcccgtcaaaagttgcgtggtgcttattcactaattgtctcgcttgcttccctccttgagggaagctgtattgcagtaattccggtaggaactaacgagaatggcgaaagtgaatacactatcgttggtcgcacagaaaaaggtgccattcatcctatttctgatgttatttatcctgagactgaaattaaacaagttgttctggacttaaagcaggatttgcgaggcaatcaacagaatactgaaattccagtttatggggagctggataaatttacttgggtaacggagtctctggatttagagaatattctgaaacccggaaatatcaggaaagattttcgtcttaaaccccttcgttggggtatgacaaagaatcagctattcggttttacagctgcgctgctgatgtcgggcgtggctgtactttttattctgaatcatcttgatgaacaggatcgcattaaaatggcagctgttcaggcaatgatgaggcaacaagaggatataaacaaaaaagccagatatcaggccgcacttgataagttaaaacatccgtggattacaacatcatcaatccctgtgtttttacaggggtgcaatgaagggttaaaaaaactcaacctttcaattaagggatggcaacttgcaacaataaaatgtagccaggagggtatgaccgccaactacaataggcctgataattcctcggcaactgctgatagttttgtcgctgcggttagggatgtttacggaacagacccggcattcaacataactcaaacttctatggcggtatttttcattgagcataacttaccgccaaatggtgatgatccttttcaaaacatgggtgatcagcgcctgaaaatcatttcgctgtttcagggggtaaatatacctgcctcattaactgaggttgcaattaaggatgtcaaaaaaaatgatgaaggagaggatttaccattacaggattgggaggaaaatacattcgatgtacaaacaactgttccgcctcagcttgtttttaaaaatgatgaatttattgggatgaggattaacagtgttatctatgaattcggacaggatgaaggttctgttacatataaaatcacggggtcagtatatggtaaacgcattctcaaaccataa

SEQ ID NO: 154120 - DNA, 849 bp, Enterobacter cloacae
  misc_feature (819)..(828): n is a, c, g, or t
atggattactctgaacgtactcacagccttgttaatattgctaaatatttaccaggcattaaaatcccaagcgaaatagttgataatgtacgccttttaaaaaacaacgaaggtaatgattatcagcttatagttatggataagttagataatgacccgctatattttgacttcaagacgcaattgataaagaaatctatcaggccgatcgtgaagtgggtcggtagggaagagcttgccgaaatatctagcgcatttgatatttcggtatcaacatcatcagattcgcaaagtgatgctcaaaataaagttattagcattatcaaacatgctgttgatcagagagcgtcagatattcatttccgaattgatactacttatttccaagtggcattcagagttgacggtatcaaaaggaatatcaaaaaatttgaagactctgctgagaacggtcggcaactagtaaatgccctgtttaactcgatgtgtactgaacaaagcactagcacactgagttccactgaagctagtgatgctaggattaaggaagagtttgtatcagagttcggactcagtacagggcgatttgccagccgtccaggaaattcgggtacattactggcggttgttcgtctgatctcaaaacgtaaacagcagctggagcttgaacatctgggattgacgcagaaacaggcctcagcaatacgcagaacgctttcaaaaccttccggagcgatcttctccagtggaccaaccggacacggtaaatcaacgttatcgcaatgtatggccgaattcatagataacactgttaatccnnnnnnnnnngtaataacacaacaccgatag

SEQ ID NO: 154121 - DNA, 741 bp, Enterobacter cloacae
atgactaatggcatgattgaccttctgactgttgaagacccgattgaatcgcctattcgtggggctgttcaaaccccactcattctagctgaccgtagcgatcgtgagttgatggggaaagcatggggcaaagctatctcaaacctgatgcgtcttgaccctgactttatttatattggagaggtcagggatagcacgtctgccacaggagtaatagaagctgcgcagacaggccacaatgttataactaccatccatacaagccatccgatagatatcatccagcgtttgcgtcgttttggtgtggatcaggatttactgaccgatgcaacgttgattacctgtctgatagggctgcggcttacaccattgctttgcccaaactgcaaacgaccatacacttcgcacaaaagcgaaattgaacacgagctgcaagagcttatcgaaaaacatactgattcacacaatgcgtacctcattaatgaatcaggctgtgagcagtgcgaaggtacaggtattaaaggacgtactggtgtatttgaagttatagagactgattatacatttatgtcgctttacgagcgggaaggtaagttcgcagcatggaaatattggcgaaataagggaggcgaaacactttgcggaaatatcactatgctaataaatcaggggaaagttgaccccgtaatagcgcataagaaaatatgcaatctggatcgggacgagaaatttaatgaataa

SEQ ID NO: 154122 - DNA, 783 bp, Enterobacter cloacae
  misc_feature (165)..(174): n is a, c, g, or t
  misc_feature (705)..(714): n is a, c, g, or t
atgaataactttgagcgttatatatatcaaaggacgttcagtgcggcagatcgaatagaactatatgatgactttaggcaatatcttctcgatggattaagcgcacaagatacgtttgcagtttgggcaaagcaatggtgtaagccgcagccctatcagacaggnnnnnnnnnntcattatcagaatcgttgcgagaatggattccggatcaggaactaagcattattgaatcctgcgacactgccggtagagtcgcggatggatttcttaatgctatgttcattgccgaaggtacagagaaaatattgagttctatcaaatcttcattaatgattatgacgtatatgttttccttgtcttttggtgttgtcgccatgttttgtatattgcttgtacctacactcaaacaaaatgttccattagaaaagtggaatgccttgcaattatgtgtgtggtacttctatgtaatagttacagaatattggtatgtgataattgctgcaattgggatagtaagctttgctgcttttaagtcactttcccgctggacaggagatatacgcttttactttgacaggctacctccatattcaatttataagcgcttaaacggggctacgtttatcctgaatgtcaatgcaatgctttcagctggcattcctatggaaacagccataaataacatggtcgattcatgtgaatcnnnnnnnnnnaatctccgtggatgcttgaaagacttgaagcccttcatggcgcaattgaatccggtgtggaaaatttag

SEQ ID NO: 154123 - DNA, 228 bp, Enterobacter cloacae
atgagacacaccaccattaccgcccacgacctcgaatgccttgagcacatgcgcaacgtcggccagctcgtcaacgagctgatgcaggtgcaggactgcgcgaccgttcgtcgtgaccctgcacagcagtcacagctcacctccgtgatttaccttatgaccgcccagctcgacggcgtggtagagcgctgcaatcaacgctggctgaccggggagggcaacatatga

SEQ ID NO: 154124 - DNA, 321 bp, Enterobacter cloacae; identical to SEQ ID NO: 153323

SEQ ID NO: 154125 - DNA, 675 bp, Enterobacter cloacae
  misc_feature (643)..(652): n is a, c, g, or t
atggcactcactgatgttttgcctatcatgtcggatgccaaacgtaacgaatgggataagcagtttacggccgaccgctatattatgccgcctcaggtgatccctgatttcacagctgacgctgtagtaggcacagtcgttgctttgcttaatgaccgcaatcaatttattaaagaaagggtttacgacgtcttccagtctctgagccgcagtcataagacaaacaaagcttttgggttctccacccgcatgatcactaccggagtttgcgagccgtctaaatacccctggcagaaattaagggtggattttaaagagtctggcatttcaccactgagcgagctccgcgttatatgcgcattcttccgtggcgaacaggtgaaggcgatccataacaccaaatcattggttgaggcgttggtcgaacatgaggggttcagaaaatggatctgcatcgatggcaacagtattcgtttcagggtttacaaaaatggatcaatgcatattgacgtccaccctgatatcgccgagcggcttaacaatattttatcagctatcgtaccgctggcattacctgccgaccgcatggctcatagcaagaaatctttggaggcattccctgtacttaagcagtgcatcgacnnnnnnnnnnccggatgcagctttctgaactaa

SEQ ID NO: 154126 - DNA, 231 bp, Enterobacter cloacae
atgaacattatcaacatctttttgagaaagaagatgaagagcatgagatcattgattataccgatttctcacagcttagtgtttctcggccagaagtcggtagttgtgcaacaagctcttcggtccataatgaaaagcttctctccgagccgtcagaattaccagaacttaaccgagaacagaacgctgatccccagggtacgaatgaacgctctatggatgtttctgtag

SEQ ID NO: 154127 - DNA, 816 bp, Enterobacter cloacae
atggcgaatacggtcacttatgcttcagagcaggtcctaactaatagtgatgctgctgcgttaatggcaaaggcaaaggaaggtggcgtttcacccagtcagatctcgggtgtgttatcaaaaatgaaaggatataaacctaaggatgccatatacattccttctggtgggctatacctctttcaggacgaacgttcgcagctaatggcagtaacgaccgatggccgatactcccttactgggggaagccttgttgatgtaattaaacgtaaacctgttctgactgtagaagaaatcaggaattcctattttattagtcttgatgaggcccccttccctctggaaactgtagcgtccattcctctgggaaattcaaagcttaaaagacaagcagccattttcataacacttgattgtgacggttgcatggaacttgttaagaaattctatgcagatcgggacaagtatcggatagatattgttttagttccctcacccggtgagccaaaagaagagcttagaaggctctggtgtagtaaagaaaaaggaaaaataaacaacctcgatattcttcgttggctaatgggaagcaaatccgacattgaaaaaagattgctctctcaaaaagaagcagaagaatgtccggcggaacctttggtagcgtcattgatgctcgcaggaatttataaattgcagggtgtaccttcagttgtcagacaggatggtttggctggtaatggcattccaaaagatttcgactactggttgaaccaaagcgttgaacctctcttaaaaaatccatttgagacaaattaa

SEQ ID NO: 154128 - DNA, 927 bp, Enterobacter cloacae
atgagcctgttaatgccatcccgcccgatagtgattaaccctgaccttgcgtacagcattgggctgaacgaggccattgcgttgcagcaggttaattactggctgaaagaaaccacctccggactggagcgtgacggcgtgcgctggatttacaacaccaatgagcagtggctggagcagttcccgttctggtctgaatccactctgaagcgcacattcacccgcctgaaaaaccttggcgtactcaaagttgagcagctgaacaagtctcagcgcgacatgacgaactattacacgatcaactacgaaagtgagcttttagatgaggtcaaagtgaccaaatcgaagagttcaaaatgcactcttccatcaggtcaaaatgaacagatggaagaggtcaaagtggaacgttccatagggtcaaaacgaaccgctctcatcaggtcaaattgcactgatgttcttacagagaatacaacagagaatactacagatattaaaaaccctatttgtccggttgcgccgcaaccagacggtgatgtgttgatcaccgatcaggctaaacaggttttaacccatctgaaccaggtgaccagttcgcgttatcaggtttcaacaacctcgctgcaaaacattcgcgcccgaatcggggagggcttcaccgttgaagagctgtcgctggtggtggactactgcaacgccaagtggagcgacgatttaacaatggcggcctacctgcgcccacaaacgcttttccagccaaccaagtttccaggctacctgaaatcagcgaacagctgggcgaatgccggaaggccagcgcgagttaacggcaagtgggagcgtgaggatggaatcttcaaatccagcttcaagaacaccgactacagcaaagtcccggcgggcttcagaggagcgaactcatga

SEQ ID NO: 154129 - DNA, 1287 bp, Enterobacter cloacae
atgaatttccctaccggcgtcgagttacataacggaaagatccgcataactttttactatcgaggggtgcgttgtcgtgaggtccttcgcggctggctggtgaacaacagcaatataaagaaagctggcaatctgagggcaatgattgtcagtgaaattcagatgggcactttcgattacgcaacccgcttccctgaatcaaaggcattgagcaagttcggtaccacaaagcggataaacacttttgctgaattatgcgagctctttactgactcaaaggccctagaggtatctcatgctaccatgctcacgatccgatcaacggtaaacaccctcaggcgcgttgttggcgacatgacagccttaactgacatacagaacgccgacatactttcatatcgccgcgagctgttgtttggtgaggtggtgaatcccggtttaccaaattttaagaagcagggccgatcaccagcacgcgtaaatactctaatgagcgtactcaaagagatgctcagaatagcccatcgcagccagttcatttctcatacgccatacgaaggtatatcgaatttaaaggtatcgaaacgaactcctgatcctctgacatttgacgaatatcaggcattcatcgctaacctttctaaacagcactcgcttttatggattgtggctattcataccggtctgaggcacggtgaactctgcgctctcgcatgggaagatgttgacctgttaaatggagagattcatgtctcacggaacctgacccggaaaggcttattcgtaccgcctaagacggatgccgggatcaggacaattaccctgctccagcctgctctggatgctctgaaaaaacagtttgagcttactggccatctgccgcagcacgagatcgtctatcatcatcgtgagcatggtaaaactgaaatgcaggttatcaggccagtattcgttccatcgagtcgatcgacaagaaaggtcgggtactattcgaaaaattctatatcctatggatggaagaatggcttacgtcgtgctggcgttcgtaaccggcatccgtaccagtccagacacacctacgcatgctggtcgctttctgctggggcaaacccttcctttattgcaactcagatgggccatgaggattcaaggatggtttatgaggtttacgcgaagtggatcggtgatatggacaaggaccaggttgccatcataaacaagagaattcttgccaatatgcccccgttacgcccccaaggcgatttgaaatcaaagaaaatgctttga

SEQ ID NO: 154130 - DNA, 213 bp, Enterobacter cloacae
atggctacctataagcagatccaggaatacgtcaaagctaaccatggtgtcagtgttaagacatgccatatcgctcatgttaagcacatgcatgggttcaagatgaagaaggcgccgaaccgtatctctcctgactcaagagtgtatgaatgccctgttaattacgttactttcatcgagcaagcgatgaagcatttcggaatgattgcttaa

SEQ ID NO: 154131 - DNA, 798 bp, Enterobacter cloacae
atggaaattgttccgaggataacttcatttaacatatttaatactaatgtttatttacttcagcaatacgaagaaattgcgattaagattaaaaatggtgcaatagacaaggattatgatcaacttgatcgctatggcaacccaaaagaaacaatagttttaaaagatgagaacatattcagaaatctcacgttaataagtctgaatgctgcgattgttgaaggtattttgaggcaggttttcaccgctgctgtatcgaaagatcaccatgcaatgggggaacttgcagcaacggaaccaaataaagaaaacgcaagaactattttccgatcgtataacaagattttcaatttgcatatagagttagaagcaaatgggagctgggataatcttaaaaaggcgattaaagattatactggcttgaaggttgaagatatgatgtccgataaaaatgcgttcactgctatgttccaccttcggaacgctatagcacatggaacagcactggttttgccaagccaagaaatattaaacaatgaaggtgatgactatttagttaagtggcaaaataaattacaaagcgcctctatgtttgcaaaaacaaatttttccgcaacactctttgaagcgctaaaacatccttcatttgcagagaagtttatggatgagacaaaaacattcatggaaaagctgtctcaattgaatatatttaataacgagcaggcttttttgtttgataatattaaaagatatacttttggatttagacttggaggctcctatagacatagaaattaa

SEQ ID NO: 154132 - DNA, 171 bp, Enterobacter cloacae
atgagtgatgttattaaccccagaaatagcgcggaagcagcagcccaacaggtcatacttgaattaataaaagctggaaatttaggtgctgtggggaacggaaaggctataactgatgtttatgaaaaccttgtaaaagaatacaaacgattaaataaacaaagtcagtaa

SEQ ID NO: 154133 - DNA, 855 bp, Enterobacter cloacae
atgacgctggatgaaaaaatcacgcaactcgagaaaagcctcgaagagctgagcaagccgccagttgagattgaagatactcacgtcgctatcgctacagaaacttgcgagaagcatggccagtatgagtgcagaacccggacttaccctaactcactcatcaagattccgcctcgttcaagcatctgccctggctgccttagcgacgagttgatccgccttcagggtgaaaaaattcgtaacgacgaagccgcgcgcaaaagaaatatcgatcttctgctggacggcctgaacataccggcgcgcttcgaaaactgcacgctgcagaactatgagccagtgaacgacgacgcaaaacgcgcacttaaggtgtgccaggcgtatgcgagccgttggccagagcgcttgcaaaaaggtggcggtcttgtgatgtgcggcaaaccaggtaccggaaagaaccaccttgcactggctatcgcacggcatgcgatcacagaacaccagagctctgcagtgtttaccacggcgctgaaaattgcccgtgagtacaagtcaacctggtcgaaaggttcaagccgtactgaggatgaggttatccgttacttcacgaaacccgatctgctgattatcgacgaggtcggtgtgcagttcggaagcgacgccgagaagctgatcatgttcgaaatcatcaacacccgatatgagcgtatgaagccgaccattctgataagcaaccagacccgggaagaactggctgcattcatcggcgagcgcgttcttgatcgcatgagcgacggcggcggatgcactctctcattcacctgggattcataccgttctaagggggcagcatga

SEQ ID NO: 154134 - DNA, 288 bp, Enterobacter cloacae
atggttaaggtattggtttatggtggtggccataacggcattgttcgtgaagttgagttcgcaagttcacccgtaagaatcacccgcggcgactggattcgggatcgtgatgctcatcatgtaggcgggaaggtagatccagtcaactacgatgaagagttctctctgcgtgagtttgaatatgctgaaggccagatttatttaatcgccgagtatggcgtaaccattccaaatgaagagatcaggaagcgtattgacgttatgcgtagcttaaagtcgctgccatga

SEQ ID NO: 154135 - DNA, 243 bp, Enterobacter cloacae
atgagtgaattcaatattgcagccaaaggccatgaagagcgcgacaaggtcaacgttgaccttgcggcctccggggtggcgtataaagaacgcctgaacatgccggttatcgctgaagtggtgatgcgtgaacagccagagcatctgcgggattacttccttgagcgcctgaagttttatcgagagaagtcgataagtttaccaaaggcaactgatccgctttattcaaacaaagaggagtga

SEQ ID NO: 154136 - DNA, 195 bp, Enterobacter cloacae
atggatgagttcgagtcatatgtaaaatattgggaaagtagaaaaattgaagatcacgagcgtcaactaaacgatcttctaagaagagaaacagccatctcccaaggagatactgggcaagaacgattgggtatcattggcaaacaaataaattaccatagtgaaattattaataaatcacgcttcaataactaa

SEQ ID NO: 154137 - DNA, 684 bp, Enterobacter cloacae
atgtctgcttgggagtgtcctttttgcggtaggttggctgtttatgattcaatgcagaaaaaacgtgatagcttctcagtttctggggataccaagtttggagtcctcgttttcgagtctttcgtaaacatctgcccaaacccagaatgcaaagaatttacatacattacaacggtgtctacaggaaggtatgaggccggttactataaacctgatgatctcctagagacgtgggttaacaggcccaacggaatttataaacagtttcctgattatgtgccgaagccgattttagatgactataaagaggcggtgttaatcaaaaacctttcacctaaagcttctgcaactttgtcacgcaggtgtcttcaagggatgattaggaacgtctggaatgttaagcccgcgagacttgttgacgaaataaaagccatcgaggggcagattgaatcgaatgtttggaaagcaatcgatgctgtaaggaatattggcaacattggtgctcacatggaaaatgatatcaatgtcattgttgatgtcgatccagacgaagctgagatgctgataggccttctcgagcttctaattcaagagtggtatgttgaaaagcatgaaaggcaactacgaattgacgccattaccgctttagcggctgagaaaaaagcattaaaacaaacaaaataa

SEQ ID NO: 154138 - DNA, 306 bp, Enterobacter cloacae
atgactgttatacaagattggtatgtgctttcaaaatcagacaagattgaatttctgagatttttggccgaattcccaacctataaatttgttcagcatggaaatcactctgatttagtgatcaattcgttaccaacctacagaaatgcaaaagctggtgatgtctactgcgagttgaaggatggcattgatgaccaagaaaacaatttcattgtctatgtaaacttcaagcaaggcgtgtacgacgaaagtttcggtggggttattaggaacaacttcactgttctcaaatcctcagaggattga

SEQ ID NO: 154139 - DNA, 351 bp, Enterobacter cloacae
atgtcaaatcatcgcttatccgcatcccacacagcaaaactgattgttctcaatgcctatttttatgggcaggaaaaagataaacatatttcgcgatacaagatctcgaaaaatactcttcgcgctatgtctggccggagctctatccgtgcttctttcctttctgagcttgactatgagctcgcagaattaggttggatgcttgttgaaaaccatgatgacgatttatgtttcatggttatggctacaacaggcaactgggcaaagctgagttctcggagattgagcaccctgatagatgaaggtgcggatagtattgatgaagcctatgaaaatcatatagagctttaa

SEQ ID NO: 154140 - DNA, 288 bp, Enterobacter cloacae
atgggctttcaattttggttcacggtgtgcgcaatttttctgacatgcccctttatgtttgttcagtcgataatctttttgcgacgaggtgtctacaccaaaacctttaaggggacgatgcggaaggagtatatccgcaaagacactaaacctattgaattctggttcagcgttattgctcaaatgatgatgagcgctgcagtgcttggattaggcttctggttcttagatgatctacctgcctttcatagtttgtacactgaaatccgcgcaatgctccctttttga

SEQ ID NO: 154141 - DNA, 1974 bp, Enterobacter cloacae
atggctacgcaacctaccaatttgcctgtcccaagcgaatcaccgcgcgatctgaagtttaacgctggtaaaattgacgagttcgttacgtcattttcacagtggtatgtcgatcgcttcggtgtacagcactatacgattgaagggctgaaacagcttgttctgcagcagatctataaccttggatggaaccttaaaggtacattccaggggggcggaacggtgacggctgccggtgaccttttgcaggatacaactacattaatctggtaccggtgggatgatctttctactctcccaaaaaatgttccagcagggtcaacgccgtcatctactggtggaactggccccggaaagtggcagcctgtcgatgtagcagatgtgctgaggaaagatctggcaaaaccttctggtgctggattatctgggtatgatgcgacagtttcatatcctgccaatactgttggtgccgaattaaacaatcgcagaaaaaatatggtgtttgctactgcggatgccggaataccaaacgatggctctgacgtatcaattcaggtttcaaccttcctgaacgccaacaaaggcaaattcattgtattcgactccggaacctacatgtttgccggtgtcgttctttctggtactggctgggaagggacaaccataatcttcaaagggtatcatttaatgagccctaatacggatggttcaaacaaccttgcaggaagctggagtgggcttattctcggtagtaatgtcaacgatgtcactctttattaccgtggtgatggaaacaaagcgaatcagtataaccgagagcatatctttaatgttatcgtacatggagctcagaacataaagatcccattcgctgacattaaagagatacgaggagatggaatctacatcaccagggatgtcgtaagctacgtaaacgctaaaaatttgtatattggctacgtcaatatctacaacagcacaaaagatggtcgtaatggagtatctatcaccagttgtgatggtggacatatagattacttccgttctgaaaatgtaggtggtgttgttggtggcgttcagcagcctggcggccttgatcttgagccaaacgctgacgctggtaacactttccttattcgtgattttacagtcgattcagcggtggcaatcaacgcaggaagtgttggggttggcttggttgggcaatcagatatgatgcgaataaggaactgccacataaaacaggcttatgttaagactatgggatccataaggatgactggctgtcaggatagctcacttacaggaatggtggatactgtaggtactggtgcagccagcattatgcactcagccgacaggtgcaattttaatgttaatgttactggagcaggatttgccgcacagattggaattttggggaatgttaaagattctaatataaccgttagaggcagtgccattaataactctggagttattgttactgctgctgaacggtgcgcatttgatatcgatattcctaattttgataaatcagcaggagcaaataactacatagggctttggttcaggaaccctaacaataatgtgtcacctgtagtcagagattgcacattcaaattagtatgcccagcaagctctggtgctaaccaggctgttaactggctaagcaccgacacaacacctgttacattcgccaatagcaacaaacttctttcagatagtaactttgtaggttatgcgaacttcacatctgttgttggtagcgccggtgataagatcactaaagaaccagggattccaggtttgacaagtgtatcatccattccagcaaatggtgccttcagggctggagatattgtttacagctcctctccaggcacattaacattcggctggataaggttgacaactggtgcatctcacatactcggcactgactggggaaggctaacttactcaaatacgtaa

SEQ ID NO: 154142 - DNA, 1014 bp, Enterobacter cloacae
atgattaggtctgtgcaatacctgcgaggaatcgcggctttgatggttcttttacatcatgtctacagaacaatgttaataaacagaggatatcttccagattggctgcacaatgcggttgcagggagtttttcgtctggggtagatatcttcttcgttatcagcggttttgtaatctatttatcaatatctgagcgaccaaaatcacctcttcagtttttatcagacagaattgcaagaatagcgcctgcatactggttgtactccggaacttttgcattaatcataatttactatccttggacacatccatccagcgcttttgaattatcacattttataaagtcaatgtttttcattcctgcaagaaatccagcagacatgaattattaccctacgcttatagttggatggactctaaactttgaaatggcattctatctagtaatgtcaatatctttgattttcgggactaaatatttgcattattttaccttggcctttttagtggttattaacttagtcgccacaaagtcacctttaacagagttttatggaaccacacgtatttttgagtttgcattaggtgtaataattggaagattatacttgaccaaaattagtatttttaacattaacgaaagcataagcgtgctaattctaattcttgcattttatattcttcttttcgttaatggagacatagtcctaacgagtggcatcccttctgcgctaatagtgttcagcgctatatgtttgaataaaaatattaaacgaattgactttatggaaaagcttggtgactcatcatacacgatctatttgtcacataagatttttatctgtcttactgtaatagtttgcaagaatttcaattatggatttgagttgatggcaatacctgtcattatcataagtttgatttactcattttcaacatataaatatgttgaaataataccttcgaaggcaattaaaaataaaatacatactcttagccataaatcaatttaa

SEQ ID NO: 154143 - DNA, 309 bp, Enterobacter cloacae
atgccacgcacagaagacatacctaacgcatttgttacagctccggagtcgttcctacctgcttcagcgataatcgttgaaacgcaggaaggctatgatgtcattgagaacgcatcggcattcaagtgcggagacacattgctcatatggttctgtggccgccagcagcatgcgtactgggccggtgacgcgctcattactgatgatggtgaagccattgatggcgaggcgcttgatgacgttcgccttgtaggcgtggttacacataccattcacccggtttattcagatgaaaaccccttcatgtag

SEQ ID NO: 154144 - DNA, 975 bp, Enterobacter cloacae
atggcggggtatcttgacagtattgctcatccttggacaatttgcgatattcagatggcaataatgtctgatttcacaacagtacaaaaatcgattgataataccgatggcggaaaactgtggaggagtataaaagaacttgatgatgcgatttgggtattcactaaaagtacctctgagttattagacaaaattaatgaatttggtgaaaaaagtaagagtgtggagttctggcaccgttcaaatgaaaaaaaatcagaagaatatgttcgtgaagtgaaacgttatctatattattgcacgtcttctttgatgactgttgttgatatcgcaagatctctcaataaaaattggccactagaagacattatcgaacatcgtaataaatttttttctacgccaggcttgcacgattttttacaaaaattacgcaacttcagttctcattggcgtatggctcaggccaattgggtaattaaaagagattttcaaagcaaaacaatggttgccagttttgtggtgagcaaagaggagttgtttgaatggggggactgggggagtaaagctaaaaaattcatagaggatggaggggattatattgatttatatacagtatttactgaatacaagaagcaggttctgcagtactatgaatggcagaaaggggctttaattgaagtttattctccaatattgcaaccattctttaattacaaaaaaatgcatgaagggttacatcagaaaatgatgtggaatatgattatttcaagtattcctgatgggttgaatccttatcaatatttgtctagatatctttcaaatgctcatgttgaatatattttgtcttttgagaatcacagtgaacaacaggtagatgctttaataaaaattttaggcatggaagatttttgtgattctcatctcaaggctaaggttatgaaagttttcaaagtatcaccaaaacttgctgattag

SEQ ID NO: 154145 - DNA, 1446 bp, Enterobacter cloacae
atgaatgatcatttccaaagagaatgtagaatagaaattccacaaagaggatatggaagagttgatagtatattgtttcaagatgaaagtgactatgttactttggtaattgatttgattggtgctgattggttagataatcataaaaaaaatttctctaaattgcttagcaataaaataaatccgctaaatgatgcgccattatttaggttggaagttaatttatcagctacggggccttggtttggagaaaatattcaaagcgggaagcgtgtaaaactaccgaaaaggctgttatcaaaaacggaaggtcgttgggttgaattgcagttggaggaagtcgtaggaattggagaaagcaatgctttaatatataaatctctctactcggcaccccttcctgtaatcagtactggtacttttgtatcctcaactaaagctaaagaattatcgaaaacattttcacttaaaaacctgccaaaaattgatgaaaatgaaattataaagtatgttgagatggttaatgcagaatatcttgcagtctacgatgtagggcagggtaatgctaatgcattattaaatgaatatttaatccccgaaatgtattttgatctcggtgcggctgtttatggtaatcaaaaaacagcacccaaaaatttggtattttgttttactaataaccctgcaatcattctttctcattgggatgcggatcactgggctggtacttacgcaactatggtgggtaaaacataccctgcaatgaataggacatggattgcaccattgcaaaaggttggagctatacagttagctttcgcatgggatgtgattacaaatggtggggcttttttaatatacgctccttctccaggtagcgttaattcctttgcactaagcacaacaagaattatgaaggttggtatcggtgctggctccgatcgtaataatacaggaattgtggtcactgttgaaaatgaaatacagccacagaactttcgtagttggttacttactggagactgtgaatataagtatttctatacgcgtttttgtttggctccgcctattggaatagttgctccgcaccatggtgcaaaacttcacggtggatctgtagccccacaaccgataaagacagatgtttacaagcgtctagtctattcatttggtcctaacaaccgacacggttgtacaggagtcaggcatcctacgttagagggtatcaatgcgcatacaggctgggatcatggcaaatggggatctgttagtattggtgatgttcagcctggtggtgatgttatagcgacatcggaacatagttccacttctcgtggaagcgttttagtgggttgggggcctattaagtggagtggcccaattattcctccatgtgtaaagacaggacatataaacacgtgtagctcattattcaattatttttag

SEQ ID NO: 154146 - DNA, 468 bp, Enterobacter cloacae
atgacagtaaatgtagaagcacttatccataatctgggcaaaagctataaagagttagttgataatgggttaatcacctacaaaagtgatcctaaaggggcagcaggcgaccccgtgttacttttaccaatggtgaacgaaggtgtttatttagcctttaatcgagaagggagaatacttaaagaaattacgttgtctattcagcgcgatgacgtaaaaggatgggttttcccaaatgtactcccttcaccgttgcagcaaaacatgtctcgtgcatggattcatcaggtgtttggtgagcccgaaggcacgattgccccaagaatgataatgaatcgctctttcggttgggttgaaaaatttaccgttgaagatgttcacacacccaccacaatgcagatagattacgatcttaacgagatagttaaagaagtcgcttttattctcacttctgacattcgctggtaa

SEQ ID NO: 154147 - DNA, 1350 bp, Enterobacter cloacae
atgaaacttaggaaaataaaatggagaaaccatccagtacttggtgaacttagtttggattttataaacaatcaaacaggtaaaccgtacaataccattcttttggctggagaaaatggaacaggaaaatcgacaatcttggaggctcttagtgcttttttaaatcttgggccatatgaaaattttgattacattgaatacgaggttgaagataatatatataaaactgcagagacgacagacgggaatactcacctgtcattctttgatattatagacagtaatggtaatatcataaaaatcagaagtgataaatataataaccctcaacaattaaacacagaaaaaagagacttgcgccattacggttgtgtttattctagagctagatccgattataaaactcagaaaataacttcaactaccgtaagtactcttgacaaagaaaaacacgacgctgatgtaaaagacgatttcacctcactaaaacagttgattgttgatgtggttaatcaggataatgctgcttatacagaaggaaataaaactctggggagtaatccaaaaacatgggatgaattttatcaaacatcaaagttatttagatttaaaaactcatttgataatttttttgaaaagataaagtatgacagaacagatgatttagatgatgagaaaaccatacttttctcgaaaaatggcactcttattccagttgataagttgagtacaggagagaaacaaattgtatttcgagggattttcttactgcgaaatacaagtgtattggatggtgcaataatactgatagatgaacctgaactaagcatgcatccaaaatgggaaagaaaaatactagaatattacaagaagttattttccatgagtggacaacaaaatgctcaaattatatttgcgacgcattcagatcatttacttaaagaggccttgggtgataaggtggatagtattgttgtcacgttagaagaaaataacggagtaattacctctcgaaatatagatgcaccatctgttttgccttcaatcactacagcagagacgacttatttagcttttgatgtaatatcaaatgattatcatattgagctttatggttggttgcaagacaaagaaaacctgggaacagttaaatcatgtgatgatttcataaagtcacatcctaagtatgaatcttcaaaatatgccaagccttcagcatttgggagaacgacgtatgacacactttgtacttatattagaaatgctattcatcatcctgattcaggaaacacttttacggaaatggaattaaggagttcaatagagttgctgattgaactgtgcaaatag

SEQ ID NO: 154148 - DNA, 1608 bp, Enterobacter cloacae
atgaaaaaggtcgttgatatgcaatactcattccctgatgctgagaattatcgacgcagggagtttaaagaaacatttaataaaacatttctcacggatgattatattgatgagcttttaaagccagaaaaatgctttttaatgggtgagaaaggaacaggaaaaactgcctatgctgtttatcttagtaatggcaaatataaaaataatgactctgagcttagatttataagagaaacagaataccaaaaatttgtgtctttaaaaaaagataagcatttagacttatcagactataccaatatttggcgagtgatacttttattacttcttgctaagcagatagcgaccaatgagtccgcgattataccaaggtttataaagtttcgttcaataaatgcagcaatagaccattattacatgaatgcctttagtccggaaattattcacgctttgaattttgtacaagaagccaaagttgcggctgaaataatgagtgactttgctaaagctggtggtgagtctaaagaaacgttttcttttacagaaagcagatttcaaaccaacttgctttatatacaaaaaaagttcgaaagtgccttcgaagaaataaaattagtagacaatcatatattatttattgatggtatcgatatcaggcctcatgggattgattatgaagaatatcttgattgtgttaaaggtctggccaatgctgtttggcagttaaataacgatttcttcccttcaattcgcgattctaaagggagaatgaaagttgtgcttttaataaggcctgacattttctcttcaacaggattacaaaaccaaaatacaaaattacgaactaatacagtaatgcttgattggcgaactacatatgaaaattatgaaagctcgaagttatataaactagcaggcaaactattgcattcgcaacaagaaccgtcaatagccaagtcgaagacatttggtgaagtatgggaatattatttcccataccaacttgaatctaacagggagtataaggataaggcatttattggtttccttaaaaattctttctaccgacctcgtgacattgttatgatgctttttttcttacaggaaaactgcagggaaaaggagctttatgataaggattcatttactcttgctgatttcgataatagtgattttaaaagaaagcttgcagattatctgttatctgaaataaaggatcagatttcattttattacaatgaaaatgattatgaactcttcttaaaatttttcgagtaccttaagggttctgtctcctttgattataaaaactatttaaaatcttatagagaattcatggagcacgcgaagatatctgaatatgtcgttcctcaattcatggatactgcaaataaattccttcaatttttgtatgagttaaacattatatgttttattgaggatgtcgaagagcataaaccaatgattcattggtgcttcagggaacgcagtttttctaatatagccccaaaagttaagacaaacgttcgatatgaagtcttttatggtttggcaagggccgttaacactgggaagaaacgtattgatagacgtaaaagaaattaa

SEQ ID NO: 154149 - DNA, 1569 bp, Enterobacter cloacae
atggttttagcgtggactattgctgattttcggtatcgctttagaattaaaactgcgccaataccccttgagaaaattaccttttgggtggttttggtagtaggattcatgacaattctaacagatctttggagggctaatggtcttcctgtcataagaggtaatttaataagcccagctggatggcaagcatctttagcaggagtgttttttattactttcattgggtgggtttggtttgcattcattaaaccgtcaaaatatggaaagctaacaagcaaaagatacatagcggtagtttatcaatgtatattgcggggctcaaaaactgaactcgctattcttgcagatgagctggctagatcctctaaaaaattagtcttttacgccacagatttcaaaggtgaagttactgatgaacatttagacagtctccctgatgtagaagctattgcaaatgatatgctttctctcatatcggacaagaggttttgtaaggcggtaatagagtcctcacagaatttagctttgatattatttacagaggtcgaaagatcaaataagtatggtattcttcttggtgttttttctaagaaccttcttatcgaagctataaaatatgaagattcttttttatatcatgagtctgatttctacgaatcaggatttttaggttcatataggccgctcagcagagctatgttcggaaactctaggatggttgaaaaacttgaggtcacatttgatgttggttggaatttcgaaaaaaaatggaccacaaaagaattacaagcctacataagagctttctcggtttttgttaaggcttacatcaaagacggggttccacgtcattcatttgtaatgaatagaaccttaagaagtatatccgaaaagtctaatgagttacataaagtcaatggtgttgcgaatagctgggataccgaaccggttcaaaatcttagtgttattgtaagtttttttaaagaacttattacggaattagataaaagagaaaaacctttccattacactttacgtattaaggataaaaaaacaaatcctaatcacagcatctatgacacgttagcaaaacaaatgtatgcagtgattcataatgcatcctacataaataatccttggtgggattgttggtccattcatcataatacgctccttgattctttctttgatgtttacgaggtaactggcgctgctggcaaaataattcagcataaattgcggcgcgagatatatgatcaaataaaaagaatggagacttttccaaactttcaaggggcaagaatactaggtttttgcttgtttgctatgggatttaaagctagcaaggaactttccggcaagaatacatatgctttacataaagtaattctcaattgggtaaggattaatttcaaaacattacatgagcgcaatgcaaaggtaagttcagcatgtttgtttacatctatttcatacaatgtggaaactaattcgcttgttcgtgttcatgaagcaagaggacttagtgataaagatcaatatgagtattttgtattagatgattaa

SEQ ID NO: 154150 - DNA, 228 bp, Enterobacter cloacae
atggattggctgggaattccttttcaattaaacggtaatgacgtgttttaccatggcgatttcgttcttaagcagatacccaagatcgtggttgaaagcgatagtggctggatcatctttgccagcctagtgtccgcacttttggctggcggtttaccagcaattatggcgtgggaggcattaagatctactgcagaatcactgcaaaagcaaatggctcatcaatag

SEQ ID NO: 154151 - DNA, 795 bp, Enterobacter cloacae
ttggaaattagaaaagatctcgcacaagtaactgcagaaatatccagactcgtctctattggagaagaatttcattcctttgataaagattggagccatctaaaaaataaagaagacttccgttatattgctaaaattccccatacaaaaagaggcaaagtcgaagccctttatagcgatggacgcagcatggctatgttcatagcaggagttttatgtaatatcaatagtgacttcagctcataccccaccctaacttcaatcattaatgttttgaagaattcatgggcctttggtagatatgacccgaacgttccggatgttgcaaaagcagtttgtgaagaatgcaatgtcgatctgtggtctgtaaatcaaatgattgcactttttaaaaaacaagagcaaattctcgctgcaattcgtgtaaccgttaatatgctcgaacaaagtgacctctataaaatggaaaacggcatccctattatgaaacaagaatcatccattaacgtaagcggcatttctggatctagtataaatatcaattctgcaggcgctacagcttcagtggcaacaaattataacgaaccaacaattttcgctgacatgatagaggccatcaaatcgaatcaactggacgaagaaactgaaagaacattaatagataacgtacaagctcttgcttcgagtcatcagagcggtggtttcaaggaagcttacaaagatttcatgcaaaatgtatctgcgcacattactgttttcgcgccattcatttctgcgctatcaactttgttataa

SEQ ID NO: 154152 - DNA, 405 bp, Enterobacter cloacae
atggagtgttattttgttttagcggtgttccttggttacagttcctgcgtactggcagaagagtatatggataatgcaaatataaattctttaagagaaatctttgaggaaaacaataaaaagttgctgattggaatgtcttcacaagaagtaagtcattatattgaaagtgatttattgatcaaaaatgaatacagtacacttgttaatatatctgaggtttactatggttggggtgttgaccaaaaaacaaagtatccagttaacacatcggcagtttacccaaaagaaaaagtgtgtgtatggaatatatcttttgcgctaccggaatatatgagaaaaaatgtgatgatgatggtgcttatggatattttattgaatttaagaaagttaatgggaaaatag

SEQ ID NO: 154153 - DNA, 603 bp, Enterobacter cloacae
atgaaaaatgcaattatattgctgagcttagctggtgtgattaatttttattcaccaggtgtgcttgcgaatgctgcggatgtatcagctgcagtaaaaaactatacttttaaagaaggggagccttacggcttatctcaagtatacaaggttaatgctccagatgttgggtttcctccttattatatttttatgaaattaggtgttgagtatgcatatccttttgtttttaaccgcgagggtgtaccagggaaagatgagccttatagccggtgcaatgtagtacttaactttaatgcccaatatcttataccggacaggaaatataattcaggatatgcggaagattctgaacaatgtctcggcatggaaaaattgtggattattaaaggtagtaaagatattaaatggtttgtgactgatactttatacaaatctgaaggtgatactccggagaaaacagaagaggtttacttttatacaaatggtaatttttgcttctctcaagaggcaagtgtaaagctagcagcgaataaaattactatggaagacctaaaaaatctagccttagataagaaagatttcgagcaatgcgcaaagtaa

SEQ ID NO: 154154 - DNA, 1071 bp, Enterobacter cloacae
atgatcgacctacatgtcgaagattcaataattaatcattatgccgatcgctatcgttgctatatgcccgtaaatgtccgtaaggctgtaaaacgtgacagtgatgaatctgtttcttccattcatgcatgggatcaaacattaccattaatttcgtcggtagagatttcccgcaataaagcgcttggagcatttgttggtttggctgttggagatgcagtcggaacaacccttgagtttaaaaaaagagacagtgaatatgtacatgatatgctgggcggtggaccttttcagttaaatcctggggagtggacagatgatacctcaatggcattatgtgtggcagaaacatatctttccgaaaaaagaatgcatactgatgtactgagacagtatcttttgaactggtatttaaaaggagaaaatagcagtaatggacgctgtttcgacattggaaatacaacacgctttgctctagaacagtatatgcgcgttggaccatcttggtatggtaatacagaaaaacatactgcgggtaatgcggcagtgattcgtcaggcaccggtgtcgatctttcgtcgaaaatcgttgcgcgccatttattttgaatctcaggctcagagtcgggctacccatggcgcggtggaatctattaatgcatgccagtttctggggttgatactgcattatttgataaatggttattcaaaagaacaaactttttcacctcatgttttccctctctgcgcgcgtgtaatggttatcaacgcaggtgaatacaaaaataaaagccgtgaccaaatccgctcaagtggttacgtaatcgatacgcttgaggccgcgatgtggtccgtatggaatactgataattttcgggatgcgattctgctggctgccaatcttgccgatgacgctgacagcgttgcggcgacggcaggacaaatagcaggcgcgttgtatggttattccggtattccgctggagtggaaaaacaagctggtccagcacgatagaattttccaaatggcaggtgatttgttcgatagggcacccgaggatacttttttataa

SEQ ID NO: 154155 - DNA, 2046 bp, Enterobacter cloacae
atgtcacaatcacacagtgaaaatatatttaaagctttagaagttgactattacaaattcaaacccaggaaaattgttaaggagttaaaacaaaaccacagcgataaattagtacgttttcttcttgcaatgtttaaaaaaaacataaacatccagccccataatactaatgaacgcacaaaaagagactcgttcctttctgaaataaaggcagcatcgagtgatcaaaaaataagagaaaagatagacaaactacaaaaattatgtgtttgcgcagaaaaaatttatgatgccattaaattaaatctatccaatcttgcaatcagtaaaaaatcgcctgaaatacaatgctgggcagtaataagacgagctcagaatgaaatactatttttaaaagatgaaacaaaaaaacatcttgaaaatattaatcaaggctcaagaatatatgatgtatcatcagcattcttgcagaactctgaaggagaatcttattctccagacgctgtaataacgaaaactgtagattatttatcacttactctgaaaatgtttagcttcaatcataaactaaacaatggaaacttaactatcatccccgacgcggttgaagtagaagaggaggatcttgaagacgctggaagaatatttagcaattcaattctatggtttgctctcgaaagcgccgtcgaaacatgcttgcttttcgaatatgaattaaatgaatataactctacaaatttaccagagggattggaagactctggcctagacgtattttatgcgtttgaactgactaaagacatgtttattcgtgcagattttatttcgaatgaaagactttactcaaagctttctcaaaatttcatcgaagcaatgtacaaatataacatccataaaactgttgatgacagcatgctttatctctcgacattagataatggccgttctgtcacggtctcagagtttccggcatacgtagctcttcttgaaacactatgtttatcagatgagaatatgttaatttcagggctaacattaagagaatgggttagatgttactctacgcttgaaaaactagccaaactatctgaaaagaaagagatatacacattttctgaactaaatgcaatattccttttggtcggtatatcaagtgataagtcaaaaacattcattgatcacgtaagcttcaatatagaatctcgagacctttatgattcaccactactaaaattgaagtcaggaaattatttattctgcagcgttggatattttagcccggggataagcaatataattttatctcagttctcatcgctgaaagtagatctttctaaaaaagggtttggttttgaaaaggaaatgcatgatatgctctctgatttgaaaatgaattatcaacattttaagttcaagcgtggaaccgaagagtacgaatacgatgcaatcgttgttttagatgacaaagttttcgttttagaatgtaaaaacactaatttgtctggtgggtctgtaaataaggcatacaagaaaaaagtattctttattgagactgcacagcaagtaaaaagacttgtacaaggtttaaaagattatcccgacgtatttcaagataagttcaatttagatatcagagcttttgaagtcatccctgtaatagttaacaaccttccattttcattaccaggaaaattcaacgacgtttatataacagatttttccgcacttagtaaaatattgcataacagtcatatcggcggtattagaattcaaaataataatggggagttagaatcttcaaacacgccactacatcgactatgggaaagtgaaactcttcaagcttcagatttaataaatcaatttgaaagaccaattcaattaagcgagttctttaatagcacagtagtagctagacatagccttcctatcagtcataatactgccttcgggatttcctcttttgaaggcgatatagatcgactaaaagaatatcgcagagaaagaattgattctatatacgaaacaatttcagtaacagaataa

SEQ ID NO: 154156 - DNA, 1146 bp, Enterobacter cloacae
atgattaataatgagcgaaggacgttgttgtatttcgtgaacgttgattggttttttatttcacatcgtttgccaatagcgttgaaagcacttcagcagggtttccacgttgtaatagcatgtcgttttactactcaccgtgagcaactggagtctatgggattcgagacttatgaaatccctttcagtcgaagcggtgttgggctattttcagaaatgaaaactcttctcaatgtgcggcaagttattagtttgacacgtcctgatattattcattcaattactataaaaccagttatatattcaggtttaatgcggaagacgctctttagaaagagtgcaatggtatccgcaatatcaggactgggatatgtttttacgtccccaaccttgcgcgcaagattaataaagttgactgtttcattgctttataaaatctcgttgagcgggaaacggaaaattgttattttccaaaatagttctgatgaaaacattcttagtaatatagttggtttgactcgcgatgataaagttttgattaaaggttctggtgctgacctgaacgtctataattataagcctgaaatggaagagtgctcagttaaggtttcaatggcatgtcgcttgttaaaagataaaggtgtttatgaatatatcgaagctgccaagctagttaaggaaaaataccctgacgttgattttttacttattggtacccctgatatcgaaaatccaaattcagtcatgattcatgaaattgaaaaatgggcaaatgatggagtggtaaaatatttaggccaccgaacagatattgctgagatttttagtcaatctaatattgtttgcctcccttctttttatggtgaaggggttccaaaggttcttattgaagcggcagcatgtggtagagctattgtcactacaaataaccccggttgcagagatgcgattattcatggccaaacaggtctctgtgtccctataaaaaattcacaggctctggctggcgctattataagtttaatcgagcaacctgaacttagacgcaaaatgggaattgctgcgagagattttgctgaacaagaattcgatgtcaactcggtggttgataaacacatgagtatttacaatcgacttattacataa

SEQ ID NO: 154157 - DNA, 966 bp, Enterobacter cloacae
ttggctatcaaacattttagaatatacatgctttttctttgcatggtggcaatatcattattctttggcttacggatgttagggcaggatagcgattttatatcttacgaaactttttacgatagtattaatgataactttgctttttcagatacaaggtttgaatttggctttgtattgataagttatttttttaaacaggtcctcaatactgacattcatgtgctactggtcttcatagcatttatctcattaacgattaaacaataccttttttctaaatcaaataatagattcctcattgcaattatttatttgatgggaatagggcttctgcatgaaatgacgcagattcgtgtagctatagctataagctttgttctcttaagtctttactttaaatcgaacgaacgaactaaattgtcatttttgttttttatactttcaatattgttccattactccatggcattctttattatgggcctgataatacccaacgcatggttggcgaacaacaaactaaaaatacctgtaatttttctttatgcagtgatagcagcagttattttgtatttcatacagggtattctaatttctaattttagcatgataagattatatgccagtcgggctgataacgagagttttaattttgcatctataagatttatggggctgctattaccactgataattggtgttttttcttttaacaatctttcagtctttcaaaaaagatgttttataatttctatggcggcatatgcgatttcaatacctgcatcactaattcctacgattgcaagcagaatattcgagttaggatggacttgcttttatttttgggttccaggagttaccaataagtggaataaaacaattgcattgttctttctaatttttgtaagtgtgtattttgcggttagaaatatctaccttgagccaatttttggcacgcaataa

SEQ ID NO: 154158 - DNA, 732 bp, Enterobacter cloacae
atgaaaagtaagacagccgcgatagttattctatttaaccctacaaaagaaaatacagagaaattattaattgagcttaagcagcaatgtgactttgtcgtacttgttgataatacacctgaaaatattcccagaacgttaggtccgaatttgaagttcgaaaatgtaatctacgacgatctaaagatgaatatggggatagcttacgctcaaaaccatggcttcctcaaagctgttaatctaggttgcgatatctttttcacttttgaccaagattcaacaattgggaaaaattatatttctgaaatgtataatgaatatattaaatgtgcaaaaataaataaacaagtagctgcattaggccctttaataataaatgagaggaataaatctcagtacgatcgtgaaattaatattggtaaagagttcgctgagggtgtttattctgtagaaagtattatttcctcaggcgcactgattcccttaaatgctcttacatatgtagggttaaacaaatcggaatggtttatcgatctggtagatatcgaatggtgttatcgagcccgacatcttggttgggaagttctttcaaccaaaaatattacgctacaacataatattggtatgcaggatgttaacattttaggagtacgcagtttcgctaaatgtagtccttttagattatattatgtttatagaaattggctattggcaaaccatgcaaatttataa

SEQ ID NO: 154159 - DNA, 507 bp, Enterobacter cloacae
atgattattaaaaaattccgtctttctggcacagaacaaattcagggttacagtatagctaatcttatttcagaggatgcccaggattggtatgaggcacaatctttatttgaaaaggataaattaaagttcgaatttgacgaaaacggcattattacgcgtttttcatatgatgtttctatgctttggccgattggaaaatcggttgctgatatcagcaaaaatctagttcctgatggtctaagagataatggagaatggatgtttgatggtgaaaaaatcattcctgcgcccatcgattacgtttctctggctgaatcaaaaaaacagatccttatgagtgcggcaacagcaactattgatccgctggaggatgcgtctgggctaggaattgctacaaaagaagaggccgaattgctagtagaatggaaaaaatacagagttctcctcaaccgtgttgataccagcaaagcgccagacattgaatggcctgaaaaaccgcaataa

SEQ ID NO: 154160 - DNA, 267 bp, Enterobacter cloacae
atgaatgatcgctttttatataaccaagttaaggctgttttattacatgagtgggatcctttaggtatcagcgacctcattgaggccgatgatgaatatgatgcatatgtgcagcctatctgtgatatgttatatgtgggaaaagaaatcgaagacatttttcactatctacattgggttgctactgattatatgtgcctgaatggaaatagtgatttagagcgtagagttgccgaaaagttattttatttgccaaaagttcactaa

SEQ ID NO: 154161 - DNA, 366 bp, Enterobacter cloacae
atggattggtatttaaacgtactgcgcaattattttggttttggtggccgcgcccgccgcaaagagtactggatgttcattctggtgaactccgttcttattatggtgctggggattgtggataaaattcttggctgggagggctctagcggtgaagggattcttacagccatttatagcgtgctggttttgataccgtcatgggctgtgctattccgacgcctgcacgacaccgatcgttccgcctggtggttactgctgctgttgatcccgattattggctggctcattattttaatcttcaactgtcagagcgggacgccgggtgaaaaccgctttggtccgaatccgaagatcggcgagtaa

SEQ ID NO: 154162 - DNA, 765 bp, Enterobacter cloacae
atgaataactatattttcgaagcatttggtgagtacaaaatttatatagcgttctttttggcgatattattttttatgaaatcaccaagcatcagtttctttactggactcattctaaaattattccgcattaaatactctgataaagaatatgtcgagtacgacgagatgctttataatcagcaattattcaggttaaagaatggcgtgagagttgcctctgctgatgatgcaaaattaatttctaaggctctaagcgaaggaataattgaacgttcaacattgcgttttacagggtggtttggcgcagtgggagtcaagagaacgatgcgtctggagtctgttagcacgacttttttcggtgttctgttcatttttaccgcttgtagcatcctctacgatgcgccgtacatgaaagcaggttatgtaacatacaatgtcagcgatacagaaaaattatatatttctaaacaccgggtatatgataaaaagaataataactcctggaacaaacttcaatgtcttaaaatcatccaagatgaaaaatccattcagcatcttaaagatgcatgtatttatatcacaactgatgaccttgacctacgaacagaattgcaggatgcaattgaatctgaatcaactggaaaaaaagttctcgctgcgctcgtagtcgcactgacagcaataggtggcttgataatagtaggtatcactaacttcgttaaattaaataaaatcgtatgtgatttaaaaggtattaaatag

SEQ ID NO: 154163 - DNA, 555 bp, Enterobacter cloacae
atgaatgttgtaaagacagatattcgagatgtgatgatttttgagccgaaggtttttggtgatgaacgagggtttttctttgaaagctttaataagaaaagctttgaagagttaacaggacgtgaaatagaatttgtgcaagataaccattctaaatcctgtaaaaacgtactacgtggtcttcattaccagcaagcaccttatgcacaaggaaaattagttcgctgcatagctggtgaagtttttgacgtagctgtggatatacgtagagaatcggaaacatttggtaaatgggttggggtatatctttctgctgagaataaacggcagttatggatacctgaaggttttgctcatggttttgttgttcttagtgaagttgctgagtttcaatataaaacaacaaattattacaaccccagtagtgaacgatgtattgcatggaatgaccctgtgctaaatgtacattggccgatttctgagaatgaagtcattctctctgagaaagataaattagctccagattttatagaacatattaaggatgaacaatga

SEQ ID NO: 154164 - DNA, 153 bp, Enterobacter cloacae
atggaaggaatcaatagcttgcgcagcatcttcaatgacaggaatattatattccttagaaatggacataatttcatccatatcacacgctacaccagcgtaatgaacaacaataatagctttcgttttatcagttatactagctcggattga

SEQ ID NO: 154165 - DNA, 330 bp, Enterobacter cloacae
atgcaaactttatcattacacccgactcgggcgactccgctctgtttgtcacccgttgaaacctggcaacggctactggctcatctgttctcgcagcactatggcctgacgctgaatgacacaccattcagtaatgaaaccaccatccgggaacatattgatgccggagtatcgctcagcgatgcggtgaactttctggtagaaaaatacggacttgttcgtatcgaccgggagggattttcatggcaagagcaaactccgtatatttccgcagtagatattctgcgagcaaggcgctctaccggcttgctaaaaactgacgtgaaataa

SEQ ID NO: 154166 - DNA, 366 bp, Enterobacter cloacae
atgaacaatcactccgaatccggaactaagccggagaatcccgcctgcaagcagtggggactaaggtgcacgatcacaccctgttttggcgctcgcctagtgcaggagggcaaccgggtgcattttctcgctgatcgggccggattcaacggtgctttcagtgacgaggatgtgttacgcctagaccaagctttttcactgatactcaagcaactggagctaatgctcaccagcggcgagctaaatcccctctatcagcactgcgtcacgctttaccacaacgggctcacctgcgaagccgatacactgggctcctttggttatgtctacattgctatttatcctgaccagcctgaaccgcagtaa

SEQ ID NO: 154167 - DNA, 222 bp, Enterobacter cloacae
atgaaaattatcagtaaaggtcaggctatggcgatttaccgtcaacatacgaattcccggttgcttcgcttcagtacgggcaaatataaaaggttaggcagtatctgccattatgctggccgcgaggtggaagacatatgcggcgttctggccgtctttgctaagcgccgtcaggatcgcaatggtccctatgtcattcttcgcagtgtcactctcaattaa

SEQ ID NO: 154168 - DNA, 468 bp, Enterobacter cloacae
atgaataacactacaaatctgcagactctttcagacaccgaaaataccaacaccctcaccgccacattgttgcccgatgaacagcgtatcgacttctggccacaatacttcggcaacataccgcaatggataaccctcgagccgcatatcttcgcctggatggaccgcttctgcacgggctactgcggggggatctggcagttttacacgctgagcaacggcggtgcctttatggtcccggaagcgaataatgaggataccgatgaaaaatggacgctgttcaacccgatgaatggcaatggcacggaaatgagcgcagaggccgcaggcatatcggcctgtctgatggcttacagccaccacgccatgcacaccgaatgcgacgccatgacagagcactattatcgtctgcgggattacgcgctgaatcaccctgaatgcagcgccatcatgtatatcattgactga

SEQ ID NO: 154169 - DNA, 261 bp, Enterobacter cloacae
atgctgatgcagcacattcctgagaatgcctgccatacagcggtctggcctgtctctctgcaaaacgagcccggctgtcgttctgtatccgacgatgacctctgcgcctggtgcaggtatctctgctaccagcctggtgaactcagcctgtgcctgctgtcagtggctgacggcatctggccctcactggttgatgtcgatggctatgcacaatcctgcccacctgtacacctgaacataccacctgctgaactccggtaa

SEQ ID NO: 154170 - DNA, 819 bp, Enterobacter cloacae
atgcgattagccagccgctttggccgtattaatcagatacgccgtgaccgcccactgacccacgatgaattacaccagcatgtccccagcgtttttggcgcggacaagcacgaatcccgctcagcgcgctacacccatattccgacaattactctgctggaaaacctgaaacgggaaggttttgagccgttcttcgcctgccagacccgtgtcagagaccagagtcgtcgtgagcataccagacacatggtgcgcctgcgacgcatagggcagatagccgacaaacaggtaccggaaatcatcctgctcaacagccatgacggcagctccagctaccagatgatcccgggtctttttcgtgctgtctgcgccaacggtctggtctgcggtcagtcgtttggtgaagtgcgtgtgccgcataaaggtaatgttgtggaaaaagtgattgagggggcgtacgaagtacttggggtgtttgaccgggtggaggagcaacgtgatgccatgcagtcactgctgttaccgccaccagcccaacaggcgtttgcgaaagcggcgctggcctaccggtttggtgaagaacatcagccggtgaccgaaacccaggcactgactgcacgtcgctggcaggatgagagcagtgacctgtggaccgtctacaaccgcctgcaggagaacctgagcaagggcggactggccgggcgttctgcgcagggtaaacgcagccgtacgcgcgcggtgaacgctatcgacggcgatatcaaactgaaccgtgccttgtgggtaatggcagaagaactgcagcaggcgctatgctga

SEQ ID NO: 154171 - DNA, 234 bp, Enterobacter cloacae
atgcctgaatctacagccctacccgaaggaacgttcactcgtgaacaggccactgtcgtggctgccgcatacaccaatgttgccatcgaagacgaccagggctctcattttcgtctggttatccgcgataccgacggcatacttatctggcgtgactggaactttgcgcccggtgccggagtgatgctcaatagatatatcgcgagcgacggtatacgcaagctcctggtgtga

SEQ ID NO: 154172 - DNA, 831 bp, Enterobacter cloacae
atgaattgtgatcctgatgcaggtgataatgacatcggatacggttcctgcccctttctcggcagcatttacgatactgacccggcatttaagaaagaccttgatgacgcgctgaagtcagcaggacttaccgggttaacggggaaacaaggttcattgaacggtccagacagcggattaattccggtggatgttggtggcgagaagtggttgcagggctctgtctgtgaacggggtaactgcggtgaccattatctgaaaattctgtatatcccctcagagcatgttgttgcgggtttttattacaacagtggtgaggaaaagatgtttggtgacgccggagatgcagaagcacgaatattacgccgtgatgtacctgacgttacgctggtgcagcaggctccggcagtgacggcaatgcctgcagacggcgcaccagctgatactatctggccctttaagggagacggaggtaaatcgttatggcaggtctgcggcgggcagaacagcagttgcaccattatcgccaacactaaatattacgttgccattctgaaccgaaaatccgcgcacggttgcgcttttggcgacttctatgtggccgcgagggattcgtcatcatggcgacagtatgacacgggtacctgcagcccggatgcgtggatacgtaaaggctccatcaataacgggcaatacctgtcggttgatatcggtgtgaacaaccaggttgtacaacagtaccccatcggctactggtcaatgaagaaggagttttccggcagccgccgaccttcatggtcaaaggttaaagagaaaaatcagcagcattaa

SEQ ID NO: 154173 - DNA, 411 bp, Enterobacter cloacae
atgaaaacatttatattgtcattaatggtttctggttttttattaagtgcctcagccagtgctgctgcggttaaattgccccggacagtggctgatgtgaaaggcggcagtgagctgatgtgcggaagtgaagatgtgaaagacgggacctgcagcctcattagtgtctctgatgacagtcaatatgccctgctgagcagccctggcggttcggcctgttatgacccttatctcatcgttgtcaaccttgccaccagcaagggtaaaatgatggattataaccgtcatgcgacatgtagcggcgcggcaaccgcgaagtttgtccgttcacccgataaaggccatcttaccgttgttattttcgaccctaccatcaaaaagaatgtcggtcttaataccattgacttttaa

SEQ ID NO: 154174 - DNA, 216 bp, Enterobacter cloacae; identical to SEQ ID NO: 110691

SEQ ID NO: 154175 - DNA, 876 bp, Enterobacter cloacae
atgcataaatctgaaggccttcagtccattgaaaaaccgctggcattattgcctctcgctattggcgaacaaatccttaagcacatccacaagctggcaaaccacgaaccggtaattgggattatggggaaaacaggcgcaggcaaatcatcgctctgtaacgaactttttcagggggaggtgtccccggtcagtgatgtaaacgcctgcacccgtgacgtactgcgatttcgtcttcgcagcggtgatcgcagcctcgttatcgtggatttacctggcgtgggggaaagcgggcaacgggatcatgaatatattgcgctatacaaccgtattctgccggagatggatctgatcctgtgggtcatcaaagccgacgatcgcgcattgtccgtcgatgagttgttctggcacagggtgatgaaaaatcaccgccagcaggtactgttcgtcatcaatcaggcggacaaaatggaacccagccatgaatgggatgccgctaccggtacaccttccgtgctgcaacgggcaaatctcagtgttaaacaggccacggtgacggcgatgtttaaaccgtatcatccagtatgcattgtgtctgctctcactggctggggcattgaggaaatggtggagacgatgatgcgctgcctacctgaccacgccaccagcccgctggcaactcaactacatgacaggctctgcacggagccggtaaaaaaacagtccagggacagcttcagctatgccgtgggaagggggtttgatagcgtggagtcatcccttcagcttccggcaccggttcgggcgctcattcgtaccgtacgggaaaccgtggtgtcagccgcacgggccgtctgggactggatatttttctga

SEQ ID NO: 154176 - DNA, 1932 bp, Enterobacter cloacae
atgtttttaaacgatcaagaaacgtccactgacctgctgtactacaccgctatcgccagcacagtggttaggcttgttgatgaaacgtcagatgcacccattacgattggtgtgcatggtgattggggggcgggaaaatcaagcgtactaaaaatgcttgaggctgcctgcgagaaaaaggataaaacgcactgtatctggtttaacggatggacgtttgagggattcgaagatgctaaaactgtaatcatcgaaaccatcgtcgaggatcttgttgcctcgcgcccgatgagcaccaaggtggcagaagcagcaaaaaaggttcttcgtcgaattgactggttgaaaatggccaagaaagcggggggactggcgtttaccgcatttactggcatacccacatttgatcagattaaggggatgtacgaactggcatccgactttctaagtgctccgcaggacaagctttctgctgcagatttcaaagcgtttgctgaaaaagcaggaggcttcatcaaagaggccgatactgatagtaatacgctacccaaacatattcatgctttccgtgaggagttcagggcgctgcttgatgctgctgaaattgaaaagctagtggtgatcgttgacgatcttgatcgctgcctgcctaaaaccgcgattgaaacgctcgaagctattcgccttttcttgtttgtagagaaaactgcatttgttatcggtgcagatgaagccatgatcgaatatgcggtaaaagaccatttccccgacctgcctcaaagcaccgggccggtaagttatgcacgcaactatcttgaaaagctcatacaggttccatttcgaatccccgcactgggaactgcagaaacgcgtatatataccacgttgttgcttgcagaaaatgcgttgggttcggaggacgacaattttaaagcattgctcaataaagcacgggaagagatgaagcgtccttggatcagccgcgggcttgacagagaggcagtgatggcagcgttaaatggaaagattccggaggttgtggaaaacgcgctgctattcagcctacacgttacccctatgcttagttcggggacacatggtaatccaaggcagattaaacgctttttgaactcaatgatgttacgccaggcgattgctgatgaacgcgggttcggtagtgacattaagcgtcctgtactggcaaaaattatgcttgctgagcgtttttaccccagcgtatacggaaagcttgttcagcttgtatctaatcatccagagggaaaaccggaagctttggcggagtttgaagccttggtcagaggggggaaaactgctccgaagagtcgcgctgacagcaaagagaattcctcagagtctgaagacgtccaaaactggctgaagattgattgggcgatcggttgggcaaaagcagagcccgcactttctggagaggatcttcgtccatatgtgtttgtcactcgtgacaaacacagtactttgagtaatctggtcgtatcaagccatctcattcctataatggagaaacttcttggtccgaaaattgggatggtgaaaatcaaaggggatttagagaaactgagtccaccggatgctgatgaattattcgaaatgcttagcgataagcttttccaagaagacagtttcaatcgaaaaccaagaggatttgacggcctcgaatatctcgtagaaacacaacctcaccttcaaaggagattgattgattttgcacggcgcattcctgtaaaaaaagcagggggatggcttgctacccgtattgcgcaaagcctagtggaccctacgttaatagaagaatatacaaaactgatccaagaatgggcgagtcaggacgaaaatctgtccctctctaaatcagcaaaagcaaccctccagttatcgggatatcaacattaa

SEQ ID NO: 154177 - DNA, 825 bp, Enterobacter cloacae
atgggaacctcaaaagcttacggggggcctgttcatggcctaatccccgatttcgtggagaatccatctccaccgaccctgccgcctgttgaccctgcggatgatagcacgctggatacgccgctcattccaccggattcgagtggctcagggccacttagcacaccgaaagcaaactttactcgatactcccgttcaggaagtcgtagttctctgggtaaggcggtcgctggatatgtccgcaatggagtggggggcgcaggcagggccagccgccgtatgggggcctcacgcgctgcagcagggggactgctcggtctcatcagcgactatcagcagggaggtgctactcaggcacttgagcgcttcaatcttggtaatttggcagggcagtctgcatcgactgctcttctctcccttgttgaatttttatgccctccaggtggttctgttgacgagggggttgcgcggcaggctatgctagagaccatcgccgatatgtctgatgtaggagaggagaattttgatgagctcactcccgatcaattaaaagaagtctttattggtttcgtggttcactccattgaagggaggctcatggcggatattggtaaaaatgggatcaagttaccagacgacatagacgctatcgtcagtatccaggaggacctgcatgattttgttgatggagctactcgtacacagctccgtgaggagctgaggaatcttacagggctttcaggggatgctatagacagaaaagtggaggagatttacaccgtggcatttgaattacttgcccgagaaggggagagattggaatga

SEQ ID NO: 154178 - DNA, 1374 bp, Enterobacter cloacae
atgagccatcataccttagttgcccgtttgggcactgacgataactccgatttacagctcagccgccaaagcacgcatctgacagaaattaattttctcaaagagaacggtaaactggatttcggtctcgggcaggcgctgaatggtttgagtgatcttggtttaacgccaatggatgtctccgtggatctggcactactggccgcaacggtgactgcggcggacacccgaatctcacgtgggcataacgctcaagatctgtggacgcgcgaaattgcactttatatcccggtagcttccccgacattatggaatagtcagactggattgctcagcaggatgttgaattttcttaccggcgaccgttggacaattcatttccgctcgcgccctgttattgagcacgggctcattcagcgatcctctaaggaacgttcggtgaaccctacttctgtttgcttgttttccggggggctcgacagcttcatcggtgccattgatttattatctaatgggggaaccccccttctgatcagccactactgggatacgactaccagcgtttatcagcagaagtgtgctcagctgctgtcggagcgatatggacaatcgttcagccatgtgcgagctcgtgttgggtttgaaaaaacaacgattgagggagaagatggagaaaacacccttcgtggccgctctttcatgtttttctcgctcgcgacaatggccgcagacgccctcggcgggccggtcacgataaacgtccctgaaaatggtttgatctctctcaacgttcccctcgatccgcttcgtgtcggagcgctaagtactcggacaacccatccgttttacatggcgcgttttaatgagctgctgggcaaccttggcatcagtgcacatctggaaaatccctacgcctacaaaaccaaaggtgagatggctatccattgccatgaccatgcttttctaaggcaacacgcggctgacaccatgtcatgttcgtctccgcaaagtacgcgttggaaccctgcgctgaatgagcagcaatcaacacactgtggccgatgtgttccatgcttaatcaggcgagcatcattgtttacagctttcggcacggacgatacgatttaccgtatcccggatctccgtagccgggtactggacagctctaagcctgaaggtgaacacgttcgggcatttcaatttgctctggcaagattggcgcgatcaccgagtcgagcaaaatttgatattcacaaaccagggccgctcagcgactatcccgactgcttagctgagtatgaaggtgtttatctgagaggaatgaaagaagttgaacgcctgctgagtggagtcataacgaggccccttacatga

SEQ ID NO: 154179 - DNA, 792 bp, Enterobacter cloacae
atgaaattagcaggacagaagcccgctccacaatgggtcgattttcactgtcatctggatctataccccaatcactctgcactcatccgtgaatgtgatatttcacgtgttgccacgctagcggtgacgacaacccccaaggcatggatgcgtaaccgggagttaacttccgattctccttatgttcgtgtcgcacttggtctacatccccagctgattgcggaacgtgagcatgagatagcgttactggagcactatctcccttctgcacgttacgttggggagatagggcttgatgccagcccgcgcttttatcgcagctttgaagcacaggagcggattttttcccgtattctgaatgcctgtttcgagcagggggataagattctcagcatccacagcgttcgcgctgcagccaaagtgttgggacatttggaaaacaccagacttactgaaaattgcaaggctgtcctacactggttcactgggagtatctccgaggctcgacgagctgttgaacttggatgctatttctctattaatgaagagatgctacgttctcctaaacatcgaaagctggtgtcctttttgcctttcgaacgtatcttgacggagaccgatggaccttttgtgtttcacgaagaaaaagcgatacaccctcgtgatgtgcagcgtacggttcatgaaatcgcgcagatccaccacgtatcggacacagatgctgctatgagaatactttataatcttcgaaatttagtcaccaatagttctcacagtgagaatagttcatga

SEQ ID NO: 154180 - DNA, 1977 bp, Enterobacter cloacae
atgtttgatggccttattcgcgaacaggatattgcttgggcagcagcactgatgggagttggagacgatggttttgctccggtcggtgatgatgatagtcggcttaaagcaatgctaaatctcggcacgaccgatttcgaggcatgtcccggaagtgggaaaacaacattgcttgttgccaagctagcgatattagcaatgcgttggccataccgccagcagggtatttgtgtactttcacacaccaatgcagctcgtaacgagattaatgctaaactcagcaactcagctgcagggatcgcactctcacgctacccacactttgttggaacaatccattcgttcgtcaatgagtttctggccctgccatggctacgctcgaagggtatagctgtgagctgtatcgacacgcaaatcgccctaatgaaacgttggaatattcttcctaataatacgcgttgggcgttacagcagaatcgattaacagaagcatgtctaatctacactcaacccgactactctggtggcaatactggcagattcgggccacagaccccgacttatcaggcgatactcgaggctcgtcgcacgattagcgagcaaggttatttctgtttcgatgagatgtttgtctgggctaatgagttactgaacaagaatcctgaggcagcaatggatctacgtcggcgcttccccttagtattcatcgatgaagcacaggacaatagcgaggaacaatcggcactgttgcatcgaatcttctgcgctggcgattcaccgtcgcggcggcaacgattcggcgattcgaatcaagcaatctattcacggaccggactcaaaggtgcaagtaccgatccattcccaggttccgtagtccatgttcttccgcgaagctatcgcttttcccaagatatagccgataaagtaaagggcctcggcgtcgcgccacaagcattaattggtgccggtccaccagcccgaataaataccgaaccaaaagctccaacaatctttctcttcgacgatgcctcagtgcaatcagtccttccccgctatggcgattatcttattgaatcctttgatgcagcaactttaaagtgtggcgtgtttaccgcaatcgctggagtccacgagctaaaagaagatggcctcgtcccccatgctatagggcattacgtacccacctatgaccccagtaccgcacgaaaggaagcaactccgaacagtttcgcgcaatatctggctcgcgcatatattgagattatgggcagcaacaactgcgaaaaactggtgaatgcaacagcctcagcattgctggccgcaagtgagttatcaggtagcatacatagcagagtatcgcgaaaatcaccgcatcgtcgagttgttgaacttttggacgagacagaggcaattacaagctatagggcgctacaagagaaactcttggcaactcgtggaaatattacacaagatgattggaacacagaattgctcccattaattgtgtcatgcgttaagcagttgagcggctcttcagtaattggcaatagcgtcacggctttcctcgcctggccacaggttaatacgtttcaaggagaggaagtgactctcacacagagttctaattttgtatcttatccaaaaacttctcccctggtccaaatccggctagggtcaatccattccgttaaaggcgagacgcacactgctacacttgtacttgatagcttctacttcaatcatcatctttgcgaactaaagccttggttactcggaacgaagactggtggttcgacagttaataaaaaagggagaccagtatttgagggttcacgtatgcttggccgattgaagctacattatgtagctatgacacgtccaactcacctcttatgccttgcgatgcgcaaagacgcatttgtagatgatgaaattaacgtgctcgaagatcgtggatggaaaattattgattgctga

SEQ ID NO: 154181 - DNA, 2022 bp, Enterobacter cloacae
atgtacatatcagaaattcgaattgagaactttcggttgtttggagccgccgaaaacgcctttgtgctaacactaaatccagggctaaccgcattggttggagagaatgatgcgggaaagaccactgtgattgatgctatccggttagtgctaggtacacgtgaccaagattttatgcgcattgacaccagtgattttcaccaagccactccgcactctgaacgcgcggatcagatagtaatccgactgacatttagtgggcttacggcggcagatcgtggtgccttttcagaatttctgacctatgaaacgattggggaagcagtcgaaaccgtactcatcatcacttgggtggcaaaacgcaatactaaagaaggaagctcacgccgggtgcttccacccgaatggcgtactggcgctataggggatggaccattgcttgatcttggagcgagatcgctattgacggcggcttatctacgtccccttcgcgatgccgaacgtgcgatgagcgcaggccgaggatcaagattatcgcaaatcctacagcacacaaaggaaatacgtgagacaggaaatgctttcgacagacatatcgatccgccagtcgatccgaaaactttgagtattctcggacttggagattatgccagctatttatttggtgagagtgaaggtattaaacaagcacgcaagcgtctcaatgaagaatatcttgctccactgtcattcgccaacgatatgctgctagcacggataggcgtcgccagcacacaggaagataacctccgattacgccaactactcgaaaaacttgaacttaccttgactggttcggccgaagtcgataatcatcatagtaggggacttggctctaacaatctgctattcatggcttgtgagttacttctgcttgcagccgaaagcgacggttttccattactattgattgaagaaccagaggctcatctccatcctcagcgccagcttcgtcttatgtcattcttgcaagaacaagcaaaaaaagaacgcactgaccatcaacatatccaaattatcgtcacgacacatagccctagccttgcctcagaactgcatcttgacaatatagctttagttgagggtggccgagcctttccactatgtaaaggtaaaactcagcttagcccatcggactatcgcttccttgaacgcttcctcgatgtgaccaaggctaatctattatttgctcgggccgtaatgattgttgaaggcgatgccgaaaatattctattgccagtgttagcaaaacttctcggccgcgatttccatcatcatggcgtgtcagttgtaaatgttggtggcgtcggtcttggtcgctatgcacgaatcttcatgcggcaagatcctgagaaggacggaatgattaatattccggtagcatgcatcactgacatggacgtaatgcctgatttagcaccatggatcgtcggcaagctcgaggaaggtcaacaagtaccagttataccgccatcgaaacgacaatggcgaattaaggcagattttcccggtaatgcactagagcagcgccgcattattcgacgagctaaagcgtcgggtcagaatgtcgaaaccttcgtagcggatgaatggacactcgaatatgatctcgcttttcatggcctcggtaagcaaatgtatcaggctgcgtcgctcgcactcgctgatgaccgactcaacgctggtacagccatcaaagccgacattatcactgctgctgatgcagcttatgaagctatcatggatagtactactgacctagagatgctcagttcgcatgtctacgcgttattcgagtcgaatggagcatcaaaggcaatcgctgcgcagtatatggcagagctattagaaaatgacattgagtcaggtaaaatggattcgaacgctctgcttaatcaattacctccttatatcattgcagctatttcacatgtaactacaccattcgatatagcgatcaatgacactgtgactgaggaatga

SEQ ID NO: 154182 - DNA, 162 bp, Enterobacter cloacae
atgacgccctgtctgcaaggtataaagattatcattagcctctacagccagtgttttcgtgctgctcagccctttctcacgaaacgctgtacggacccactcaccaacgcgcaccggcaggaaaagtcttttcccctcttattcaagaacgtgttaatatag

SEQ ID NO: 154183 - DNA, 1731 bp, Enterobacter cloacae
atgaaactatctaatgagcagatagatattattgatgcgccattaggatctattgctgtaactgcatgcgcgggaagcggaaagacggctacagctattcgtcgactgatctccattcgacaaaagatgcaagacagtcgcggccgcgttgtgttgttatctttctctaatatagctgtaaatacctttaataaaggttatacagagctcgcatctgctctgccggacgatataaatcgtcgacgtgtagaggtcgatacactcgatggattttttaccaaacatattttacgtccccatgcttataggactatgcacgcgactcagtctgcatacctagtgtccggaacggagccttttctaaccaagtttcaatattggcgtgaaggcagccatccactgccattgaaagacataaaagtaggtatgctaaataaagacttcttctttgttacaagcaaaggagataagctggaacaacttgataaaatagaaattttaaagatcatcaataggcttggaaagacaggtgcctacactcatgatctgggccggtattgggtttatcaaactctggtttcacaaccagccatactgcgtgcgctggcagcccgctatccgcaaatccttgtcgatgaatcacaggatttaggtacagtgcaccaagaaatcctagaattacttattaatgcaggggttcaggtaactcttattggtgatgtaaaccaaggaatttatggcttcgcaggggctgacggagagtttttgaagaattatgatactcgtgctgaggtaacgggctacatgcttactcgcaactatcgttcactgccaccaataattaaaatcgccaattctctctgcggtcgtaatgacgagtccgaccgacagaatgaaaaaggtggcgcatttttcattagatataaagaatctgaactaggtaaattaactggagcattcaaggctcatattaatgagttgggtatacaacttcaggattcagtgattctttgtcgcggggccgagagagccgaaaaaattgcgggtagagcgtcctcggtaggacaaggtatggttaaaattttagcagaagcatcgttgttacgagatctacatggtaactaccatggttgctttaaattggtctgcagggcaatcattggcttactggacaatgcgccccatggattaagttccggacttcaaagcctgtcaaatgcagacggaatgagcgggctgaggcgtcttttatggagtttcagtcgaagtacagatctgggactcccttcttctacacttacagcgaaaacagactggcacaacaagctattaactaatgtcaaagcgcttcttacagagattgaaaaacaatacggatataaaatttctggcgcggttggcacaaaattgaaaaaaacatcactaccagaccttccattggccagtgcaacaatcactcaagcacctgggatcagggtagagactgtacaccaggtgaagggggagtctattggcgcggtaatgtacctagcaaagaaacccaatattgaagctttgctttcaggcacaggtgatgaagaaggccggatcggatatgttgcaatcacgagggccaaaaacctattttggctagctgtgcccgactcatgtctaaaagagttaaaggagaaacttattaacgctggttttcaggaatatgtcacacctgttgaaatagctgcacatgactaa

SEQ ID NO: 154184 - DNA, 1458 bp, Enterobacter cloacae
atgatggagaatctccgcggggtctatctcccacctctccgcgatgccgcgcagggccttcgtcctaaccgtaacagtcagttggctcgattgcttcatttactcactgatgaagcaggccgtgacgctataaacaccgctttaaaaactcttgacgaaacacttaaacaagacaaatccattcagagcacccatacagcgatttcagacagacataattccatgatgggggttcaattagcgcaggaacttgccgttgggcttagcgtgactgattttcagcgtctatcttcccgcctgactctgacggctgaagccatggaaattgaaaagaatgggttgggcttcaataatctgatctttatggcggtcgttctcagtgaattggctaaaaacacagattctgctttcaggagtttgataattgaggaaccagaagcgcatttgcatcctcaactgcagcgcgtgctgctgaagtaccttgcaggaattccaacgggtgaaggtgaaaagcctgtacaactgtttgttacaagccattccccaaattttgctagtaattcaaagttggattctcttgtctgcttgattgagaatgaggcgggtatacaaaccttctttccacgtgatattaaatttgaaaagggaaaacgtgaaaagctagagcgatatttggacgtaactagggcagaactgtttttcgctcgccgggtaattttcgttgagggtacagcagaacttatgctgattgacgcgcttgctaagaagatggacttcgatctcagggaatatggggtcagcctgattagtgttgaaggacttaattttgactcatttctccctctctttggagaacatgggctgcgaatccctgtcgctgtagtgaccgatgcagatccatttgaagaagaagagattgaaatagaatgtgaaaagggcgaggaagaaatcgatgacataattgctgaagcagcctacagggaagaaacaaacgctcttgaggaagaagaacccgctggcaatgctgagaaaaagaaaaaagtaaaaaggaaagaggtatatccagcattgggagatgtggtgcaattgtctgctaatacgatgaagatgaagaatcttgaggataacttcgtgaaggtattccatggattgaaaacattggaatacgatttggcactcatcgaggcgaaccgaaatccaatgcttaccgcattagccgacccgcatccaaagatttctacagctctgaaaaagatagttgatgcccagcctgacaatacaacaaaagccaaggccttgttctgtggtatgtttgagcgaaaaggcagcgtcaatattcagaaaggtagatttgcccaagcattagctgaacagattttaaaagagccagaattcgaagctcctgaatatcttttaaatgctatcaagcatgtctgtcatggagtggctaagccatga

SEQ ID NO: 154185 - DNA, 315 bp, Enterobacter cloacae
gtgatcgccgcaccagcgacgaactttgaatcgtcccgttttatccatatctgtatactgtacatggatatgcgcctccatttttttgtccccatttggcttgagtgcagctataaaatccgcttcatcttcaacactgagatccctaaatacaaaatggaagctgatatcaccagatggttcgccctcattcggtcggtgcctgtcagaatcatcgagtctaggataagtctcatcctgaccggcaagaagagtgcggagcgcatcgactactgcactttttcctacgttatttgggcctacaagtacatttaa

SEQ ID NO: 154186 - DNA, 267 bp, Enterobacter cloacae
atgcgtgataaaaactggcatcctgccgatatcattgccgagctaaagaaacacggaacaagcctggcagccttgtcacgtaaggctggattatcatcatctacactggcaaatgcgctttcccggccatggcctaaaggagaatggctaatcgctcaggcgctcaacatctcgccagaagtgatatggccggaaaggtattttgatgaaaaggggacacccatttttcgtcagagaagggcgacaagaaaacgcccccatctttaa

SEQ ID NO: 154187 - DNA, 726 bp, Enterobacter cloacae
atgtcttcaaaatcaaatcgtacatacaagtatggcgaccaaccgataagaatcactactgtgcaagtggttgaagaacagttcggaggggcggcaactgctaagcaagtggatgactatcttagaaagcgatttccgcattataaagacgatacttggcttaatctcgtagttaacactgtcaactgtaaccgcagctactggagtttcaacaaaacagccaggcgaactgatgatgtaacccatcggcatcatgagtatgaccgactattcaagcgcgggaatatttttgaaatttatgaaccctctattcatggcgtttgggagttatatcaggatcagaatgggaaatggtgttaccgccaagtgaagtccgagtttgaaaaggctgttgatgctgctttagaactttccccacaagaacgcaaagagcttttaaaaaacgagaataaaacccctgagctaatcgcagtaacaacacgaatttataagcgaagcccgtatgtagtagccgaggttctttcaagggctaatggtaagtgccaaagctgtaacagtgacgctccttttctcaaagtagacggcacaccatttcttgaggttcatcacattgagtggctttcgaatggtggggaggattccgttaaaaatgcgattgcattgtgcccgaactgtcacagacaggcacattatggcgttttagatttagtaccagttaacaaataa

SEQ ID NO: 154188 - DNA, 147 bp, Enterobacter cloacae
atggctatcggggacagacagattcaagttgaatcacctgaggaaaagtttgagcgcttgctggaagaacttgcactgacgcatgagcaacgagagtttattgagttcatgatacaagaggacggggatagtaccaatagggagtag

SEQ ID NO: 154189 - DNA, 210 bp, Enterobacter cloacae
atgtattgtacaaagttaatcattgaacgattcaaatatttcaaagactgtttcctcatcgaatcaaatgagagaataaaaaccatcacaggtgataatatttttgctagtagtgatcgttacgattctcaactggagaatctattttatggggttaaagttatactggtgaaacataaaaatcagaagcatcagcatattataatttaa

SEQ ID NO: 154190 - DNA, 990 bp, Enterobacter cloacae
atgaatgaaaaccttttccgcttaattggcgattttcaagataaagtccatcttgctttaaaaattatgtacagatctggtattgagatgccatcaagccgttctaaatggattgaatcgtgtatacccaattctggtgagttagatggaggttttaaatactataaacatggagctggctgtcaggttgagttaaattcaggaagcatagattttgattttggagagaatggggaggtgggagggtttaactgttggtggctagcatgttttgctggggagaatataaaatcttacggttttgaaaatatggttgatattgctgagcatctcgagaaggctctggattatggagaactaatcttcccataccgagatctttattacattgctaatgttccatttacctatgctatagatatagatagccgaaatgctggggatctacttccaagtcgcaatcacgaccgtgtgctaactcttcatattcattatttcgaaacggctgagcttatgtataaaaattacgataagattaaacagaaaaagaaacgtaatggctatttaaatcggcaggataatactgacatgagaatttatctttcaacatggctgggttttttaggggtaacttgtgagggcttccgaaagttaaatatgcgagtgctaattaacaatgagcgtccagaaagctttaaagaattattatcactctcagatagtattgggaaaataatgaagcaacatgcgaattcactcagaatatttagaaataatgtatttcatctaagagaaaacactgagtttgcctatcatttttttgatgggcgagctgaacgtctctgctgggcacgtgaattacatgtggttcttacagagtttttctcacagtacagggtttgttgcgaggtgcattatgtaattaatggacggaaaggtgagagtgatttgataaagaaaaagggtaaacgtgcaaggaaattaccttga

SEQ ID NO: 154191 - DNA, 777 bp, Enterobacter cloacae
atgaagatgccctcaatcaaagtcatttcacttatattaatagctattgtatggtatttttacttttctcatttcaatcattgggatagcccgttagatatctttaagactagcaaatggatggggttttccaatgataaaggtgattggggcactttcggggattttgtaggaggtgtgcttaatcctatcctaaccttcattacaattgttatgctcattaattccttgaaacttcaacgagaagcaaacgagcaactaattaaagacgaaagaagacaagagaaagacgttcttctaaaacggtttgaagacggtttttataaccttatctcttcagaaagagaggagtttagttgttttactattaacattaacggaaaagaataccgctcatctgctgctgtaagtgtactggaagaagcaatttgggcctttattgagaaacaaatagatgaaaaaggagcttgcgaaattgaggatgttaaaaatcacataaataaaattgatgaggattcatccatggcaatattttctatggtgcgatgtgtatatgttgtttttaaagttgttaaggataaatgccctgaagaacatcaagattactacttggatatctttatgaatatgttaccagttaaactggtaaatttagtggctattatttctgtgtacatggactggaaaaacgtaaaatatatcgttgatggtggaaaaggattttcggataatgaagcagtgaaaaaatatataaatacctggaagggtcttcattaa

SEQ ID NO: 154192 - DNA, 828 bp, Enterobacter cloacae
atgataaacttagatatggatgttgtggttgggcatgggcagaacgattttgaagaattagaaatgaattccggcataaaggtttttgctggagcttctgacatcacccaaattacaacaagcactattttagatgattcagtcccaaaaaaatcaacatctatacatgggcttaggaatatgttcaaacatacatttgatgggtcgtttggacaaaattttaatcttagaatcgatgatcctgaaaagataaaaagatttaacgaaattggccgggttgttttttttgatgttatgtcatattacatctctaaaggaatggggatagctcataatcttaagagcaagaaagcaatcgacttagtagaacgtcttaaaccgcttgaaaaacaacttttgataagaattcaggaacctatacagaatttacataaaacagttgagaaacaaaaatataatgtacttctgagaaggagaacagcaaataaagaattagttgttgctaaaatggatgcgcagacgcttttcaatataaatgtagagcatgaatctgctcaaccagtagaagaagatgttattataactaggttcaatatgttaacaggaactggtcggctgttattagatagacaggcagattcagtagcctttaggcaccatcttaattgggagcatgtgttacagtctcagaaaaataaattttccaggaatcttgataggaataacagaggtggtaaagacgcttttatacctataaccatttctgcttatgagttacgcgatcatattggagagcttaaggcttatataattagagaaatattgtag

SEQ ID NO: 154193 - DNA, 1746 bp, Enterobacter cloacae
atggaaaaggcacagcagattcagacggctctgggtacgcaggcgggtggtaaatcgctggtgagcaatgacttcaaccagttccagctgactttgaaaggggccattaaagcggctggcgtgaagctggatgcgaaagagaacaagcagtttatctatgccatcaccaccaaaaacccggatgccgaaccggtggtgaagaaggtgctgaaagaagctgctcagccgttgtacggtgcgtttgaatacaaaggcaaggttgttgagtttgaacaggacggcgagctgcgcgataacgaaaacgttccgctgaacccggcggtatccaccagcgacctgattgaaaactacttcaaagctgaagtgctgccactggtagctgattcttggattaatgctgaaaagcaagataataaagataataatatcggaatagttggttatgagatcaattttcattcctgtttccaaagaaaacactacagagataagcttcttcaaggaaaatcggttcgtttaaaagaaatagtgaaaataaacaattctgggttttatgtattggatcaattaactggaaggataaatgaattttcttccttaagtgaaaagagaattgctctcaatccaattcgctttgattttcacaatgaaactctcatccctgagttctataatatatttttacaacaggaagaaggtgtggattggcttaaaaataattttaaagcaccttctatatattcaaggaatatatcaatgtcagcatggttgaatgcgaagttctcgcttccaaccgtaggtaatcagtcagggttaatagaggtttggaatgagtgtgaggcagtgttatctcgagtctcgttacttaaaaaatctgttttttcaaatttcatctcggcacaagaacaattactaccatatcaaagtgttgcgcatagatatgaacaagaattctcagcgatgttgcctactcctttagccatcctgtgggagttagcagagtcaaaatttaataatagagaacgatgtgagtctcttattaaattttttgaatatcttggcttgtattttgtttcatttatttttgggcataaaaagccgtcaaaagaatgcttttgtaaaaagaagaaagacttgccagatattacaatggcctttagtcataatcgaattaaagactataagaatctatttgatttaagtgatggtaatgtcagtctaatatgtagtgacgaaattgtaaacattctccgtgaagccactgagctaagaaatgatatttctcatagaggattaccctctgctacagctgtaagttcaacaaaagaggttattgagcgtttagttaatcgtatgcaacttgaatgtcgagagttttttgaaatgaccactcttataaaaccaattcaagcaaaattcgatggaagtgggtttttgaatgaagttgagattcttaaagggttagggattaatccgagtaaaactacgcaattcaagacttctgaacctatgatatccggagaactatatcttgcacatggtgatttagcagttaatgaaaatataagcgtaaccaaaatgtttcctttaatggtcatgagagaaattttacctgaaagtgatataatgggtttttacttctatagtgacatttttgacgataatattcgttttgtttgtccttatcctaacgtgacaacttacacatttctcgaacaaaatattattacggatagcctagggtga

SEQ ID NO: 154194 - DNA, 1077 bp, Enterobacter cloacae
atgatttacggattgcagtacctgcgcgggatagctgccctgcttgtcgttctccttcatgccaaagtagctgttaaccatttcgttccatcctcaaaacttttgcttccagacgaagggtttattgagtttggtaagtatggggtagacatatttttcgtgatctccggcatggttatgtacttgaccatgggcaaaagcatgaagagcgacaggggcattggtaactttattattaagcgacttataagagtggttcctgcgttctggatggcgctgggactttacggcgcggcgatgctgtttgccggaaaaattccagatgacgctttcaggaagtaccttacaagcgctctgtttatgttttaccccaacgcttcaggaaaaccagaaactgtttatgcgataagctggacattgaattttgaggtctatttctatatgtcccttgcgttaatgtgttgcatatttggtcgatatggaagagtcgccactggattattattcgccgtgtatgcatttactttttacaactggggtagcctcaatttccttcagcgctcagtttttagcccaatataccttgagtttatacttgggatgatatgcggttatatcgcaagaaaatcattgttaaacagtctatggttatcagctcttatttttttacttggctctataatgatagtctgcacaaacgtgtggggagaaggagatggcggactcggtcgcgttatctttgctggaattcctgcaatgctatgcgtgattggagcaaccaacctatcatttggtgaaaaatcagtggtgcacaaagtgctcttgaagataggggatgcttcttattctgtatatctaattcattcaatatcctttgttgtgctttcttatttgctgaaatattcagggtatatgatgaaggattatggcgaaagcattatcttgtatattggcatgatcgccttcgccatgattacatcgattgcttttagttcttttatggaaaaacctgtgataaaaatcctgaataacatcatattcactaagaaaaataaaactgaaaagattcttgcgtga

SEQ ID NO: 154195 - DNA, 2058 bp, Enterobacter cloacae
atgactactacacctaccaataatccagttcctagcgaatcaccagctgacttgaagtacaacgccgggaaaatcgacgagttcgctacctctatgggatggacttataccgatcgcttcggcaataagcattatacgattgagggcctgcgctggctggcacagcaggctatctcccagttcgggtatatcacactggacagcttcgaggacggaaatatcctcacactgccaaatcaagttctacgacttgaagctaccggcgaatattatcgttgggacggtcccttcccgaaggaggtgcctgctgactccactccagaatctacaggcggcatcggtccaggggcatggttaagtattggcgatgcatctcttagaacacaattgggaaataatgatgggttcagattgcttggtgagtgcccagatgtagccaccctccgtcaaactgaacccaagagcattggccagttgatccgggtaaaaaattactactcagacaaatttggtggtggaggagtcttccgcagcgttaatcccggatcgctggtagatgatggtgggctgtatttcaagacatccggcggagctgtgtggcgtagatgcgtgaaaaacaaacaggtcagcaccgaggagtatggatgctgggatgggaatacaggatctgacaattctgctcgactgatgaaagcatgcgcctctggtcttgacgtgaaaatgatgggggagaattacaatgtagttagcatcccttcagatcgcttcagccttactgggagaatgaaagcctctactgctgatttttctacggcatatggccgtacgcttctgacactgacaggcgctaatgtcacctatgacattgatatcgacatgcagaactttggggctggtggatttctaaatctggggaccgatactgttggtctaatcaaagtatcaaatatttacggcgcgaatcgcacgacatatggcctacaaaatgctgtatcagatggtggtatacgcaataatatgtcagttattgtgcgtaacattaaaaaaggagatagcggagttgatccgcaacctgcggcatttacgacttatggttctaagggtttttatccatatgtagatatttacgacagccagggcggaatcattggtaactctacagatgaatcggtttttggggaagtaattgcccgttacgtacacgataacggattttatgcccttgaaaatagccgtcaaacaattgggacgatggtttgtgataacgtgcttggcgagccatttgttaacgccggtggtatttgtactgtaggaactatgaaacttaaagaatgccagggattcggcataacctattcttacagtgggcgcctgcgtatagaccacctagtgctggaacaaacgcttgtcagctctgcaatgcctctgcttcgttctcggccagataacgttaatagcgttgtcagcattggtaagattgagggtagttttgttcttggcggggttacagcatctatctctaactcaatgtttgccattacccaaggtattacagacctgagcattggtgacatgaacgtcactctgaactacgtgacaggctcgtacttaggacttggagatttttctgcttgttctcgaattgcattgggcaactggaacataactttcgtcgaccagacaggtaccttaacggcatcaaacattgcctatttttcccttccaactaatgcgcagtcgacaggaagcaaaataggattacagcgttatagctcgtcctccgccactgtaaggatgacaaacctaagcaactccaccattgaggtggcatctggtcaggcagttcaggttaatgtgtcgggcgcaccgctcataacttccgcaattagtacgccatcaagggtcttccgggtaactgcgctaccaactgctggtaaatggacaagcggtgatattctcatcctcataagtccaggaacaaccatcaagtatggttggtcatgttcgcagtcaggggactttgccggaacgccgccaacattccaggttatagcgtga

SEQ ID NO: 154196 - DNA, 228 bp, Enterobacter cloacae
atgaaacgagagacattccaccattttgcagacggccgcggtcgtcgccagattttcgttaatgaaaatagaattagccgcgtaatttgggctgacgaagagaagggggtgttgtgttttcatccttatccgctaaggcgtcatcgtaaagaacctttcagtgtttactcccggaagctgcgcgggaaaatcactgttctctttgaaaaagagggcttgaaagcatga

SEQ ID NO: 154197 - DNA, 183 bp, Enterobacter cloacae
atgagaactattcaagaaatccttgactctatgagccctgaactgcgaaaaaacgctattcaggctgtagaggaatcgcgcatttttgcggcatcattggctcatatcccttccccttctgcgttaaatggtaaggcagaaacgtttgacagcttatcggaaatgcctatttcctttgcttga

SEQ ID NO: 154198 - DNA, 570 bp, Enterobacter cloacae
atgaataggcaagaaatcgacctcgttaatgagcttgctttggttgcaactcagcaagaacttgataaacttgaaataaaattatccctcaatttcttaagtcctgctgaagcgctacagattgaaagcattcgtgggaaagtgctcgattggaatgattggtttaaaaatgaacatgatggtctgaccaataagtttacattgtcggtatcctctaagggtaggccaccgattacaatcggagccgctgttttctcttatgatatggaaaaccatttagtaaacattcatatggttgagcactttaagcaaatcgtatttgatgatcaccttgttaagagaatgggttttgtagcattaaatgttgctcttgtgtttgctagaactgctaaagcaaatgttattcgcgtagttaatcctttgccagacgcggtcccttactacaaatatctctcatttgactttgtagacatgaacttgatggagtcatcgctccaaagaattgatgaaactcttggccgcttgaaagcatctggtgggcaacatgattacgaggctgatgaagattaa

SEQ ID NO: 154199 - DNA, 813 bp, Enterobacter cloacae
atgatttttattagtcataattataaagacaaagctttcgttggacatattgcagataaaattgcagatatatatgggaggggtaacgtattttatgattcatggtcaattcagcccggtgaagggattattgaacgcatgaatgacggaattgaatccgttaaaattttctttttctttgtaacagaaaatagtcttaaaagtaagatggtgtctttagagtggcaaaacgcacttatgaaagccgttacgggagatgttaaattcattgctatccgttgcgatgaatcacctatgcctgcacttcttactcaaaaggtatatttggatctttatacaaatggcttagatgtagtcatagctcaaatgaacgatattatctctggcaaaagcacttataaacctcaggatgaattattctccaatctttcatatgactttaaaacagaatccaataaagttattgtcagggtttccgctgatcatttcagcgaggttaccgctgactttgtattcttatttgctaataaattaaaggaaaatgagttaagatataatgtattgggagagagtggttttatccaagggttccgttcagactataaactaaacacgggtgaagaatttagtgcgcaaatggtagcattaatgcatggacttaaaccaaaaattcatttaactgtagagttttggcttgattctgaagatgaacttaatctcgcacatgttatgagcaaaacatccacagaacaatacacaaccataccatataagaaaaaaacagattttagcggctttaacatgaaattctag

SEQ ID NO: 154200 - DNA, 345 bp, Enterobacter cloacae
atgacgacaacaattcgtgagcaattgctggcagcactgcgtaacaaccctggcctgaacacagtgacgttatccagcatgctcaatatgaccaccaaaaagatttccgggccgctaagcacactgctggctgacaacctgatcgagttcgaaggcaagcacggccagcggctttatcgtctgaccagctacggcatgaaatacgcaccggaaaccataccggccatgccgaagggtaattcgaagctggtgaagcgtacagatacgaacgtgatctgccaggagtgccgcaacagcgctgttatgaaacgaattttaatggtttgggggagggtaggcgtatga

SEQ ID NO: 154201 - DNA, 1275 bp, Enterobacter cloacae
atggttgattacaaaaacattgattcgacagaaaaaaatatcatggagtcaatgggttatcactggaatggtcatggttggcagcgagctctacagggcggcggagaggacatgatcgtggaagggtggattggcactacacctaagaatcctaccagcgttacccgtatttgggatcagaaaattggcgaaatgaacaaatataaaagtccatatgacgaagacgaagactatatcgagcctatgcccgatgggatgaaaaatatttatagaaaagaaagtgatgataaaattaagtatgctttaacattgaaagatgatttagcaaggcagatacagcagattgataaagatatagcaagtcttaccagtcaagcatcacaactttcaccatatgtatcagagttgcagaacgctatcatgcaactttctttaagtaaattgagatatcagaagaataatgctgatctgcttcataaggaagctacaaagcgacatattcatgagcaatatctgaagcagaataaggaaagttggttcctttctcttgagaaaccgacaagttctgttcgggctaagaggagagaaattagtactgaaatgggtaagcttttggataaagaaaaacaaattgcagccgaaatcgaacagataaataaaaacataacggcagcccaaaaagatgtagagagtaaacagaaaaaagttaatgatgctacgattaaagaaaatgcatctatcaaagatgcactgaagctgacatcagatttttataaaacaacattcgaaaagcttgggcaaaatgcatcaaatgtggccaaggagatggctgaagcatcgaaaggaaagcaaattcaaagcgtagatgcagcactaaaagcctttgataaattcaaaaataatctgaacaaaaaatatagcctgaaagatcgtaaggctatctcaaatgcgcttgaatcagttagccgcgccgagatggccaggaaccttgaactctttggaaaagcatttggctatgtaagtaaaactatcgaccgatatgacattgttgttgagttgaaaaactcgttggagactgataactggcgaccattctttgtcaaaatggagtcaatcgcagctggaagagctgcctcagctattactgcatggacatttgcggtattgctgggaacttcagttggcattcttggttttgcaattatcatggccgccatgggggcactagtgaatgataagtttattgagcagatcaataaacttattggcatctaa

SEQ ID NO: 154202 - DNA, 1125 bp, Enterobacter cloacae
atgaataagataaaacaaaaagcaatgatcctggtcgccttcatcgttgtgggatatgggttgtatcagtattctcgcccttacaatccatcaccgcagacactgacgtcatcacagcaggtagccatgaacaagataaacgctgaaatgaaaccttattgcgtcgggcgctatatgctcgacctgccatcatcctttacggcttataatgacgctgcaccgctggatgacaatatctgggcggcggtgatttcaaggcccgaggatacgtataaaacctacctggcgacaaagaaaatgtaccacccagcttttgtgcagttaatcgcattacgtgaaaaggctctgcgagaaagtaaaactattgacgctcaggatatgccgtttttaaaaaaagtctggccgttacccactggtatggatggtgtgatttttgaacggaatgaaaacgagagtgttgcggacgcaatgcgcatactggaaggctatttatatactaatggcgtagttattaaatttcagaaacagaccattaatgattcgagctctatatataatgagcaacgaagaggacgcccagccagaaattatgtcgcaaatgatatcagccagatgcagtcgctgatggcaagaattagcggaagggataatgacgtcattccgacgaaaccaggctcctgtatcacccatgcatttattgccaccgacccgacggcaagggaacgggaagatatctccgttgggcttgaaagtaagtcactggaacatatcagagttattctttctactgataatttcacccgagaaaaagacacggtgctggagagagcaggtgagatagagagtaacttgtaccgtggccatgtggaaagaaaaggggccttcagtgttaacgggcttcaggcccaggagtttctggcaacgggtttacaggcatctcaggacgagccgcgttacggctttgatatgttcatcaatgaaatgacagccagctacaagactcccaattttattctgaccctggagaatgattccatgccgccaacgtcctacagcaaggaggaaattattgccttctgggacacgatcagccgtagcgtacgcgtgcgccccggcgcattttga

SEQ ID NO: 154203 - DNA, 258 bp, Enterobacter cloacae
atgggattaagattaagattacagtggtatgataaagaaactgagttaggtgaaggaaatgaattttcttcagattttggcgatgatgctcagatcatgacaaaagatcttggcctaccaaccaaggggaatgttaataatggtttttttgatgttgaacccgaatggatacccattcttcaaccccacttcctacataaaataaccccctctatttatgactatcaggtttcttttgactacagggataaatggtga

SEQ ID NO: 154204 - DNA, 249 bp, Enterobacter cloacae
atgaaaagcatcggtgattatacagaaaatgaatttttagacttagtaagaaaaatttgtactgccgcaagtgatactgaagaagaaggaagtttattggttttagagtttgaacgtctttctgaataccctaaaggttctgatgtcatattttatccagagaaaggtaaagattacagtccggaaggtattgttagagaagtgaaggaatggcgcagagaaaatggcaaatccggatttaaggaataa

SEQ ID NO: 154205 - DNA, 183 bp, Enterobacter cloacae
atgaggctgacaccactcttttacttcctggacaacgccttccgggctatcatcttttccattttcgggataaaaaataagatctgcaccagagggatgctctgcaagccgtttgaactctctaacctgacgattaccatcttcctctgtttcaaaatcggcagagcatattttttgaactaa

SEQ ID NO: 154206 - DNA, 252 bp, Enterobacter cloacae
atgatcgtttactctatagatgtatacagtaaaacagatgaacttttactttatgaaatcataatctctcagcgaaatgtagctgcgctgtatgacattatgggtatttcagatgaagatgaagccgacttcacgtatggcataggtgtttataatataaatgaaaaacaggcacatcttttagaaaaactcataggtaaaacattctactcggacgatttaatttttcagctttcaggaggagatctttaa

SEQ ID NO: 154207 - DNA, 168 bp, Enterobacter cloacae
atggagcaagacctgaacctagaaatttatggtctgccggaatatttgtccgctattccttcagcccggctgaacgagtcctccaccatgttacgccgcaagtattacaccaacggcagcaatgcgggcttaatcatgtacatgaccgacgccacgcaaaaacagtag

SEQ ID NO: 154208 - DNA, 519 bp, Enterobacter cloacae
atgagctatcttttgaggaagatatctataacgaagtggcagccaaaccttagcttggagcctcagcattataccgcagatgctattaccggatgtactagaacaacaagaaatactctttccgtttggcattctgaaacaatggatttcgcttcagaggatgttgagaaactaattgttgctttagcaaccaccatgcagactcctgatacaatagaccttatttggctcgagccagaatggttaaatcgagccggagtaatcatcgaagcgacaatgggtagtagtaaatttaccgatataaatcatgagcatagagacttagttgggattgaccactcactattggctaaagttgggcaacatatagttcaacaatacaatcgcgatcgcataatttattataagcgtatatctagacctaacctgattacccttatgaataaatgggtaaatgaaagaaatgttgttaaaattgatgagttaaatgagaagtggcaaaaagtattagctgcttaa

SEQ ID NO: 154209 - DNA, 660 bp, Enterobacter cloacae
atggattttatgattggaaattacatcatccctacggatgataaacaaaaattgctttatgattcttcagataatgaagttttattacgtagctttgatgcgtttaagttttattctaatcgaaaggatgggataaacacagggaatactcgtcttcagtatttaaaaaattatattggttctaataaattaagtgccactgaagtttcttatgatcccgataatgctgcgtttgaacgagatgtgaagttaaatataaacatgacattagatcttattaagtcagaggactatatagaaggtgaggtcacaaaaagccaaatatttttagaatctttatttagtaaaagcgctaacttgtttggtgaagtttttcagaatgtatggctaaagttatatggcaataattatgaattgcggaaatatttgtgcatagcctcttgtatggattatcaaatgcttaaggataaagcagatgtactcgtgctcgggggagcgtcccatgctgatccttttgtcaatgaagcagctttaagagcagcagaggcctggtctgatccgaagtttttaatatattttgagaaactcagagaattcgaatttgattggttaaatgactataaaaaaagcgtcattcaatatttggagcatttgaaatga

SEQ ID NO: 154210 - DNA, 696 bp, Enterobacter cloacae
atgaaaaaaatattaaataacttacaagtaaactactttacaaataataatgatgttacagctacacctcccattttaggtatgctgttagggaaattatcatctttatcgttattacccatgtttgctcatgaaataaatgctcttactggagaaagaagacaagtagtaataatgactgactctgatcaacattttagaatagaattccctatacatagtatagtttttacgggaaataatattgagaatagtgattttttcaataaagttgaatcagcaatagaagcattaaagagtatttttcctgataaaaaatctaatcgattagctattgttaactcatcattttacagagcaagtgagtcgtcatatagtgaactttataaaaaaatgtttacctatcaccaagttgacccgattgaatgggaaaatagaattgtcgaaagaaaagtgttcggttcatttggtgaaatagcgaatatggttagcagtgctaaaagatgtactgtacaacatccaatgctagataatggtaatcttgttgacgttatcaactttgaagttgataccaatactatcccagaaaatgtcaataatagatttgatttcaattcatcaatatctgtctttagggaattatatagtaaaaacaatgagttagttaatggtttctctcgatacataaatatttaa

SEQ ID NO: 154211 - DNA, 1680 bp, Enterobacter cloacae
atggataatattgatattagtttcaacgcaggaaggttgtgcgaagctattgcaaggattggatatgagcctgattccgctatcatggatattgtagataattctgtatcggctagggcaagtaatgtttatattacattgtttctccgagaagggaaaacaataaaatctcgaagtgcagtagagaaatatcagattgttgatgatggtcgtggtatggatgaaaagggcatccaggatgcctttgctttaggttccaaaagagattatgaaagtaacagtctttcaaaatatggattgggtttaaaatcggcaggtctttcgttagggacaaaaatatcaattatcagcaagcaaaataatcgcttaacaaataaatttgtttttgacaaagaaattattgaaaaagaaaataagtttgttattgaaatcgaggggagtgagaaaattaaccatgcctctcctgatgcaacaaggaataaacttaaaaaaagattaggggttgtatattattcatttctaaaaaatagtgattttgatcttaacttatttgttaaaatacaacctcattcagaaatttgtgaatttgaaaaaatcggtcctaaagatattctgcatacagataatgaattatttaagaaacattggtcgccggatacttatgattatgttagcccttatttagcacttgatgaatcatgggttttacatgatgttgatggagtaaaactccctgaaatcaatgttcaggctgtagtatttccacaaagtgctatgggtaaaattcattctcccttagataaagaacagaagaaaatagttaatagctatgagattacaaaagaaaatagcgggttctttatatatcgaaatggacgcttgattcgatggggtgatgaattagatggattaatctctaaagatgattttaatatcagaatacgtcttgatttaaaatccgaacatgatgatgtattacatgtcgatgttaccaagcagcgcttagaaatagatgatgaacataaaaataggctagagaaaattatctctaaatcaaagcgaacagcgaaagatataagagagttatgtcttaaacttatcaaggaagccaaagtcggcgatgaaggtgttgcattttcagagactttgcaaggggtaactgaagacgatccggatgaaattaccggagctctcccttcaaacgaggtagtagaaaggaaaaaacaaagttctcaagagagcaaggctgttattgaggaaattaataaagaaagacatcaagttgagattagtaaaaatgaggaagatagcgagcaagagctaataaatgctacatcagacgatgactcttcttttagaaaaataaattattcggcaaatgttgaatatggctatgtttggaaaccatatcatgatgcaatagaaggtacgtttgtaaatgtcagcaagattcatccttactattcacaatttttaagccgttatccagagaatagtattgccaggatttctcttgaagcactcattttctcagtcgctaatgctgaaaataatgttaagcataattatgaaaacattgatattaaaacactagaggaaatatttagaaaattccataaaaatattagtgcttggttagctgaatggtcatctgagaactatgatatgagtgacgagtaa

SEQ ID NO: 154212 - DNA, 378 bp, Enterobacter cloacae
atgataatagaatatgttagattatcagaaaaagctaagcaacagttgattacgctaaaacgtagaacgggaattgacaattggaatattctttgccgttgggcattttgtttatcacttaaggaaacatcagtaccaccacatgaagatattataactgacagctcaattgagatgtcctggaaagtattctccggtgagtatagtgaactttatgaaaatatttttaaaatgaggatctatagagactatggagatgtagataataagcagttaagttattatttccgcctgcacctacatcgtggaatttcttatctattaaatcaagtgaatacacttgatgatttggtaaaaatagcctctaagtgttactag

SEQ ID NO: 154213 - DNA, 264 bp, Enterobacter cloacae
gtgcggggcgtagatgcccacaactctctctatatcctcttcgtaggcgttgacctcatcagtcacgttacgagccacacggacggtctggctatcgcgtggaacattcgccccaccctgcgctgcgatatactggtcaaattcaccttcatcagttgcagctctggccgcctcgacacgctcatcaaattcatcagcaatacttaccccgcgaggcagtttgcgcagttcgcggtatgcgcccatcgtcggcaggccaattga

SEQ ID NO: 154214 - DNA, 930 bp, Enterobacter cloacae
atgagtgttgcaagacatcatcattttttatctcaatgttatttgaaaggctttacaagcaacggggggaaaaaatcaaaattaactgtaatagatttaaaggagcgcaaaacttttgaaagtaatacacgtaatgtcgggggtgtgagagattttaaccgattagaattagatggagttgatccaaactatctcgaaagttctattgcagagttcgaaggcagtgtcgccactcatctaaggaaacttgaggagggcaaggatttttcaggcgaaacaaaagatatcattctagagtttatttccttacttgcgatacgcacgcctgctcagcgggagcatttatcatcgccattgaaacaaatagcaaagttcataatgaaatcttctgttagttcggctgagcgttgggaagattgcaaattagcttatgagaaagaaaagggagagtctttgccatatgatctcgcttacgagaaaattaaagattatgttgatggtgataatttcgaaatcaatgtaatcagagagttcatgataggcatggaaatgcaatgtgtacctgtaatcgctgagctgttgcaccaacgcgactggtcacttatgaccatatctgatgggcaaggaacatttataacttcagataacccagtttgcttaatgtggactaatcctgaattatcacaaggtccttattccccggggtttggtctaaaagacactttagttttgtttccagtatcaaaaaatcttcttttggcaggcgagtttgatggtcatgagggggtatttagttgtaatgacgagcaggttgccatctttaacacttcagtcatccggcataccgcaggaagaattttttcagccaatggaaatttccattttttagacgcagctaaaagaatgaagcaaggtaaaagcctggtttga

SEQ ID NO: 154215 - DNA, 231 bp, Enterobacter cloacae
atgaaatctttaattggatggataataaaaaatggttggaatctttttagttgtgtaggggtgatagcaacattttatttctctctaatatatgtacccggttatgtggaggaaattaattctgcaaaatcaactgtgactaaagagagtttagtggataacgtacaagaattgcttttttatgataaaaaattatcgattaacgatgttgattcattcatcaaaggttaa

SEQ ID NO: 154216 - DNA, 639 bp, Enterobacter cloacae
atgagcaataagtttattccgcttgaaaaaagagagtcgcttaaagaaacgatcaaagctattcgttcaacttacatcaaaccaacgggtccaaaagagaatagttttagctatgtcacactaatgcctgcgctattttcattgctagggacgatagcggcagcatttggcacgctaagtcttataaagaaaattaaaattgataaggaaactgaagtcgatatagtgtcttcagatataagctatcaaaataataattcagctaacacttcattagcatttgaatttgaaaaaacagtgggtgaagtattgagtgagcttggtgttttggtagatagtcagaatgtgtctcgagatgttggttatgattttgaagtaaaagcaaaaggacgtaattatattgttgaggtgaaatattttagaaaattacttggtttaggtactgctagagatttcatatatcaggtgaatagttcaggaaaaggagggatattaattgtcagttcaggtgtaacggagagaacaagacaattcataaatgaacataataatttgtcagatagtcaaaaagtatatcttgtcatagctgatgcaaaacaaaagcttagagaaaaattgcaagaaattcttgtgagctaa

SEQ ID NO: 154217 - DNA, 180 bp, Enterobacter cloacae
atgagaaaccagctaagctggctgccctgcagtctctggtatcacggcttggtggcaggaaagatgaggatattccgtctgctaaaggcgtgtgtatcccaaatgggtttatccgggatgatggtagtcagcatgttgaaaaaattactttccagtatgaaaatgatgattttattttag

SEQ ID NO: 154218 - DNA, 297 bp, Enterobacter cloacae
atgcaatgtatctgtaaatatatggccttatcatcactggctgccgttttgctttttattgcccagactacggcatccacgccagtgcagaaggacgttccagtgataaatagtttgtttgcgcagacaaaaccgcagtgcatcggacgctatgtgattgacgttcccgagtcattcaacaaccagcttcacgatatgatttttattgatgattttaaaattgaaagtaaacctctctatccaccctcatttaatacactatggaagatgtcgacagtaaaatactgtactcattaa

SEQ ID NO: 154219 - DNA, 282 bp, Enterobacter cloacae
atgaacccgatgctgggtgatacaggctacgcgctgatggtacccacatcggtttcctgtattccttatggtgcgttaatgcattacatgaaactgcaacatgatgcgacggtgctggggattagccactgtaaaaatggtcgtggtatggagcttaaccctgtgatctccacagaggtaagaggaggaatgtggttgcatttaatcggcaatagtcgcatttcgtcgaatgaggtgtgctggcagaacatagggaaaagtcatgcggaacttattttttaa

SEQ ID NO: 154220 - DNA, 1974 bp, Enterobacter cloacae
atgaacaacaccacaatgcacaaaacgctgctggcgattgccatcggcgcggtaacccactccgcttttgcggcggatgagaaaaaagaggacaccattgtcgtccagtccaccgcggggagtgatttcaaacccggcggcgaccagctggtgcccgccttccttgacgggcaggtggcgaacggcggacgaatggggatgctcggtcagcagaacgccatggacgtgccgttcaacatcatcagctacacctcgaagctggtggaagatcagcaggcgaaaaccattgctgacgtggtcgctaacgacgcgggcgtgcagttcgttcaggggtacggcaacagcgcggaaaccttccgcattcgcggcctgaagtttgacggcgacgatatgacctttggcggattgtccggcgtgctgccgcgtcaggtggtggatgcccagatggttgaccgcatcgagatcttcaaaggggccaactcgctgatgaacggcgccgcaagctccggcgtgggcgggatgatcaaccttgagcctaaacacgcgggcgacaccccgcaggcgaaagtgggcgtcgactacacctcggattcccagattggcaccacgctggatgcgggtcgtcgctttggtgataacgaccagtttggcgcgcgcgtgaacctcgtgcatcgcgaaggcgaaaccggcgtgccgaacgaccgccgccgcaccacgctgctctccaccggtctggattacaaaggcgaccgcttccgcacctcgctggacctgggctaccagaaaaaaactttccacggcagcccgaccagcgtcaacatctcggcggtggactttgtgcctgaaccgccgaagaacgatcgcaacttctcgcagaaatgggcctacagcgatatcgaaaacgagttcgggatgtggcgcagcgagtatgacatcaccgatagctggacggcgtataccggtctcggcgcgcagcacgcgcacgaagaagggatctacagcgcgccgaagctcctcgataagagcggtaatgcgacggtcagccgccttgataccaaccgcatcagcgattccgtcagcggcatggcgggcattcgcggtaacttcactaccggcttcgtctcgcataaggtgaacgtcgggtattcggcgatgaccaaaaacgaaaaaatcgcgtggaagatgtcggccgcggcggataacccgaccaccaatatctaccacaacaccggcgtggcgtccagcgtcaccatcttccaggtggcggcgataagctccgtgctgctggcgatctacagcctgacgctgccgcacacgcccgccccggcgaaaggcctgccggtgaaggtgcgcgatctcttctgcgcggatgcctttgcgctgctcaaaacccgccacttcttcgtcttctccgtctgcgcgatgctgatttccgtcccgctcggcacctactacgcctacaccgcctcgtatctggcggatgccgggattgccgacgtcagcaccgccatgtccttcgggcagatgtctgagatcgtcttcatgctggttatccctctgctgttccgccgcctgggcgtgaaatatatgctgctgatcggcatgctggcatggttcgtgcgttatgccatgttcgcgctgggcgtcagcgaggaggggcgcattctgctgtatctcggcattctgctccacggcgtctgctacgatttcttctttgtcgtcggctttatctacaccgaccgcgtggcgggcgaaaaggtgaaaggccaggcgcagagcatgatcgtgatgttcacctacggcatcggcatgctgctcggctcgcagatttccggcgcgctctacaaccgtctggtggcagggcagaccgtgccgcaggcgtgggtcacattctggtggatcccggcggtggctgccgcggcgatcgcgctgattttccttctcacgtttaagtatgacgatgacaaggcgtaa

SEQ ID NO: 154221 - DNA, 390 bp, Enterobacter cloacae
atgaagaaactcttacttctttttccgctggtgtttactgcgccagtacaggcttctgaagtcacggtaggtcaggtttgcaaggctgcttctgctgcgatgtttggccgtgaccataagatcatgcagctggataaaatagaatcaggtattgcttacgtacattatatccgacagaacgatggcacccgttgggcaatcaagtgcaaacttataggtgatcaagttatgtgggcatctgacaatcctgacagcaccggtcgctggcgggatgatcctgcagacggtacagtcaaatatgctgttgatggtagaaaaataattattaccgagctctacagtgacggttccagtacctcgaactcttatcccttgaagcagctaaaatga

SEQ ID NO: 154222 - DNA, 285 bp, Enterobacter cloacae
atgccaggcgccctggcccatcgcgcttacgccgggcatgatgcgtggggtgactttcgcggcaatacgcacttcgccgcggtcgttgaagacgcgcaccatatccccgtttttgataccacgttgctccgcatccacagggttaagccacacctcctggcgacaggcggcctggagcacatccacgttgccgtagcgggagtgggtacgggctttaaagtggaaaccgaacagttgcagcgggaacttgctgcgctcgggcgcgtcccagccttcgaaggttga

SEQ ID NO: 154223 - DNA, 588 bp, Enterobacter cloacae
gtggctgaagaatttaagttctgtgtaatcggccatcacgcccggcggcggcaggctgaagcgttggccatgagtattggcgcccatctcctcctcgatgaagagaataatggggcgaactggaatcatcggcgcgcgcttgagtggtctgctgagcaaccttgccgggtagtcgtgctggaagacgacgcgctgcctgttccagattttgttgaacgggttggtgaatggcttaactatttcccggaatcgttggtgagtttctacttgggcactggccgcccacctcagtatcaaatgcagatagccgaacggctgattgttgctgataagactcaggctgactacatcacactgccgcggctgatacacggcgtttgttatagcgtatctcctcagtatattgaacgagtcctttctcgatgggacagaagcaagcctgccgattatgccgttggtgatgcctatggcggggctgtggtttatccgtgttactcgctggtggatcatgctgatggtgagtctgttgagcgtcaccctgactcagcgccacgtacagaacgccgccgggcgtggaggctggcgtga

SEQ ID NO: 154224 - DNA, 309 bp, Enterobacter cloacae
atgaatattgaaaatatgcttggctctttaactgcaaagcgtgaacacgtagaactgaaaggttttaaattctatgctcgtcctatgtctgttctcgaatacggtatgtattttgcatcaaatgaaaaagaatctgataaagatgatcagatgattctacgctgcattgaaaatgaatcaggtgaaccagttttcacagatatcaaacaagttcagagtctttatacaaacgttcgttttgctctgaccgctctgatttcaaaggttagctttactcaactgaccgcagaagaaacagaaaagaaataa

SEQ ID NO: 154225 - DNA, 240 bp, Enterobacter cloacae
atgactgtgccgtacaacgttgaagatatcaaagagaaacgttttaaaaagaaacttctgaatgaaaatcaagttttcattctatcaactcgcaaaattaagccagttcatcacttcaaagaaaagcagaaagtcagcattcaaggaccattcttagaagatacagcccaatgtttcatgaacttcgaatttatgcacaaaggacatcgtatgttaggctatgcttttcaattcatctaa

SEQ ID NO: 154226 - DNA, 468 bp, Enterobacter cloacae
atgcttccttcccccttctatccacaaagccagctaaccatgctggcttttacattttctccggagttcacgatgaattacttcgttttagccactcatgctgtcagcgcaaagggtgaatgggttacaccagaatctgttcaacaggttgattttgattcattgcattgcatttactgcaaactgcagatcggtgttcagtttgaccctctgactgcaacaagaacatttgtgcacctgccgggacatatcaacaatgtcgctcgacttaaagcatgtcgatttaacaagctccaggcagtgcaagggcaaaccacctcatcacaaactataccgccatcagaaaatcgctttccacctactaacaccgctatacggcaatggcgatgttgctggtgccatgtctgctggcatggggagaagagatgtcctcaatgtgctgactggttttattcaactgatgcgtaa

SEQ ID NO: 154227 - DNA, 1584 bp, Enterobacter cloacae
atgacactcatctctcttttaaagcgcgaaggtccctgcctgagttcaacgctggcggatctgctgattcaaagcaaaaaaatctctgctgaaaatgcgaggaaggttatctcacgggctgtcctatctggtgagataagcagcattaaaaacgtatttccgaagagggtgcagtttgtatatctcagggactcctatggtagcgatgagttctggcagatactaaccgataagctgatagagagtggttcagcattgggccttgcactgagcgccctgctggccagaggcggaatcattcctaaacgtgattttggcgctgcaagtggttcacctgtagccatgaagaaaaaaactccgttcactgtagtatggcaaaggctggtgaaaatcggtttatgcactgaaattatcctgcctgaaattggagaatgcatcgctctcagagaaaaagatgaaaggcggtacgattccgtatcgagacagatacacgcgcgtctggtgacagagagcattttcatcgcgacgatggttcagtggagtcagaacctcaatctcatcagctataacctggcaaggacaaggcaggatgaagaagggaagccacctgctatttcaaactatctgttcgatttaacaggtcccagctatttgtctcctcttgttacaccaggaagcgatgtaaacaagcccggtttttttgcctgtgacgttctgctggggaccaaagtcactctggcccaggtacagccctttatagctaaatgtaaatcgctaaggagcataagaaacgtaggtaaaagtctttttatgctggccgccagtcagttcgacaaagatgcgtttcatgctctaaagaaggaaggcgttatccctgctacaccagaaaatctgttcggtgaagagtttgcaaagtcactgcgcgagctgaacgattttctgttctatttcttcacaaatgccagctcgaacctggaaaaaattgattctataatggttgcgctagcgaatgttaaaggtgccgcggcgcagctgcagggggcgctcttcgaatatcttgttgctgaagtgatgaaacatgaaggtgcggttgagataggaaaagttttccgttctgctgacggtaaaaaagcagaaagtgatgtgttcatcgctaagggatatcaggaggtaaggtttattgaatgcaaaggctacaaaccctattcctttgtcaagcatgaagacgttaaacactggataggagatcaggtacctgtatttttcgatgccgcaaaaaaagagaagccagaagccgacattcatgtcgaattctggaccacggggaagctgggcgtagacagccagttatcgcttgaaaaatttcgtgataacaactcagtcaggaaacgctataaaatacacgtgctggaagctcatgatgtaaaaaaaagattccatgcgaccagaaataaaaacctgattaacgtttatgaaaaacatttcgcagaacctttctataaagaaaaaaatttggatgacctcagggaaagttaccgtctggcaggagggccgcaatcatacttcgaagatgaagaaaaatga

SEQ ID NO: 154228 - DNA, 762 bp, Enterobacter cloacae
atggggtttgtgctcaactgctcaggacgggataacactcttattaccctcagtaaaggttttcgttgcacggttcctgaacttaaaatggtactgcttgatattgatcttgaaaaggtctttacagcggacccgcatattccgaaaacagctaatcagcttctgtttgaatacaccatcaacaatcttaccgagcctgacgaattgatttcagcattctggtttcatggcacccgtaccgttgctgataaccatttcccggacggtattcttccacttaaccgatcattcgcagctgttatcagaatgctggcagatgcagcgcccagtagccaggttcggacgcggctcagtgactgggaaaaaagcggagtgcctgacagaatgttcatggagcgtcacggaaactctatacactggggaccttatgcatcccttatcagggaagctcagctgaataatgaggttacagggcaccgtaactatacgaagatgccggagctggtagaagacgtctgtaatgcctacatgaaacagtatggctccgacattaaagcgcattacgctgctattctgaagccgaaattaatatggttctccgcgccgcctaacgacagtcggcgatgcattgaagcggccctcgcttatgcttatacaacagtgcgtcatcagcctccggatagctgtgcaaactggggaatcgaccgggagggggttgctgttccccctgagaacatcatacggattgaaaaaatcatctga

SEQ ID NO: 154229 - DNA, 1410 bp, Enterobacter cloacae
atgctcaatgatgaacatgaagggaagcccgtgataaatctgataatgaaagtgagtgatgaagactggaacgttcccgtgggccagcttgccaaaagctcgatgcccctgagtcgttatctggaatacacgaatgacagactctcgctcatttacagagaagtgaataaatcggtcctcgataaccttaagctcattccctgcctgcttatgaccgagttcgtgaatgaaaagcacctggatgggcggtcacgccaggtatccaatatccgggtgggtatgcttgagagcgtggcagtcaacgggaaaaatttagagtatgcagtccgcatcgattatgacttcgggaaagtgatagttgataacttcagagtgctgggcgatcgattcttttttcacctgtttgaaacatcgaggacccactgggctatcaaggaagtcagccttcctgaagtcatgactgcttttgggttacaagttccagctcccccgccagtcaacgttcctccaccaccgcagccaggattgtatgaacgcgagcagagcgtgacgtcggtagaagcgtttctacagaaaataaatgaatttcaggcccaagaagggcaggaaatcttttaccgcggacacagcgactacaagtacaaattggagccttccctcttccgtgaagaggaggccgtgccgctgtacaggcataaagaaaggaacatgattaacgagatcctgacggcccatccggctgaattttatcaggaccatttcatgatagataagctggtccgcatgcagcattacggcctgcctacgcgcctgctggacgtcacggctaatccgctggtcgccctctatttctgctgcgcagacatgctcgataaaaacgcggaggaagaaaaaataggggatgtgaaaatttttaccgtccagacggatgacataaagttttataactctgacactgtaagctgtatcacaaacctgtctttgcttaacattgaagataaaaataagctcattcctgcaactgacattccccctcctctccgagacaaagaaaatccggaaatgaagaagctgcttcattttatccgctctgaaaaaccgtacttcgaaaacgcaatacatccgggcgacttaagccgcatcctttttgtccgtgggagaattgccaaccagaggatctcatcccagtccggtgcatttctactattcggacatgaggctgtcttgccagataccggccacagcggtctcaaagtagaccgaatttatgtcagcaacaagaaagcgatcctgcaggagctcagcagacttaatatcaaacctagcaccatttaccccggcattgaagagacggcgagagaaattgcccgcagaacgaagggtgaagagacccttaaccggctgaaatga

SEQ ID NO: 154230 - DNA, 714 bp, Enterobacter cloacae
atgtccgaagatacaaagaaaaaaggagtttatgacagttttttccgacctgtattgaagttgtttcttcaatcatgcttatttgttttactcatcgggtttgtttctttcctgtttatttatttctttaaaggtccgatcaaagaatttgttaatacctttagttggtatgtttcagctaattccgtttcggatatgactgctaaggaaactaaggcgctagctcatttgatgagtaaaaattatatattaagtaccaatgatttgctttctcaaattggtagtttttattcatatacaataacaatattaatatttttttgcacgttctctgcattttttgctgtattggtgataaaaatcaatgcggatgacaaatttgatatcactatagctgaaaaagttagatatttttttgcaaatgataaaggttttgacagcgatgtaaaatctaaagtttctgatatctttgcagaagaaggagaacaattatcagggatagataaaaatgaagataatgatactgttatccagctcaggcatgaaattaaattacttaagatggatttttataagctgaaaaataagctggctcctgatgatgagtcagaggttaataccgatgactattttaagaatatgatagatactttgcaagacaaagggcagatagtaattagtgagaaagaggatgttgaccatggcaatccttaa

SEQ ID NO: 154231 - DNA, 546 bp, Enterobacter cloacae
atggcaatccttaaaagaaaagtaagcagtacctctgcctttttgcctgtggatatgatggatttaaataatccacaagacgtacttgattacgccattacacttaatgttaaaccaacaccatttgatctagatgattttataaataaaattggaattgagttaagacgtgttgtgatggctgatgatatttctggccaacttcaaaagaatgccaatggaaaatgggttatatcagttaattctttacatcatcaaaaaaggcaacgtttcactttggctcatgagcttggtcattattttttacatagaaatagagccatagagtttattgataaggctttatatcgtagttcgcagatggactcaatggaatacgaagctaacaattttgctggagctttgctaatgcctaaaaagatactcattgagtttattaaaatgaaaggggctaatgccgaaataatttctgattactttgatgtctctgtccttgctgcaaaaataagagtggagactttacagaggaagttatatgaatattaa

SEQ ID NO: 154232 - DNA, 168 bp, Enterobacter cloacae
atgaaaaccagtattatcaacggctcggaagtgtctagattatccgtggcgattcacttccttttcgtcatgcctgtcagagtatgtccgaactgggagaacttgcttctgccggtactgagaatacgatacttatacgtatgtgctattcaggcatcattactgtga

SEQ ID NO: 154233 - DNA, 255 bp, Enterobacter cloacae
atggaggcctatctggcagatatctttatacgtgcagtgaagcagccatcgattcagcgtaggtttgtagaaaaatacgaaaagtaccgtaaaggcgataaattcacattatcggagctgtacacagtactggagaacctggataaaacaatcgaggaggagctcaacaagctgacttttcataacatcgcaaccgtcactcagctatggaaggtgcgaataagcaggtcatgtcttcccaagctgactcgttga

SEQ ID NO: 154234 - DNA, 156 bp, Enterobacter cloacae
atgttgaggcttcaaaaaactatcattcccaatacacgagagcacagccgtgaccgggatcagaaagaagcagccaccacaaagcctcttaaagaggcttttttattgctggcgttcaccttcaaccgtattaaccgacagttccgggagcattga

SEQ ID NO: 154235 - DNA, 501 bp, Enterobacter cloacae
atgactctatctcttaataggctgaaagagttgcttttatatgatcctgatactggaatcttcacatggatttcttctacaaaaaactacagacgtcccattggagcggttgctggatacataaattcccttgggtatgtgcaaatcggtatagattgcgttgcttatggcgcacatcggctagcttggatgtatgtgcatggcaatcttcctgagatggacgtggaccatataaacgggaacccatcagacaaccgaatcgaaaatctgagactagctactcaccagcaaaacatgtgcaacaggaagaagagaagagataacacatccggatatcctggcgtgtacttcaataaagccgctaataaatggcgtgcgtgtatacgggttgaaggaaggcgcatccaccttgggtattttgaaacagcacaagaggcacatgacaaatatgttgaggcttcaaaaaactatcattcccaatacacgagagcacagccgtga

SEQ ID NO: 154236 - DNA, 924 bp, Enterobacter cloacae
atgctaaatcggggattgactgtgctaaaaagtagcagcactgagaaaaaattagataaaaaaaataaagataagattgttcaaacttactttcaagaaaagactgcaaacctgtatataaagaaaatccttaatgatcctaacaaagaatttttaacaaatagagatttagacgcattaaaagaatcatatgataaagcgcatgatattcgtaaattcgaaatagagctttattggaagagaacagcttatgtatggactcttatagcgtcccttataactgtaactggtgtgttgcttgcagcatattacagactacccaccgactcaggcggaagcaatgctcttttggggttggttgctagtgttgccatattaggcgtacttataacaataatttcatctaaaattattagaggcggtgaatattggcaaaagaattgggaatatcatgtaagcttattagagcctcttttctctggtagaatttacagtacattagtaaataaaaaattaaaacgacactccatatctaagctaaacagtatactttacttcttgtttttaggcgtatggctattattagctgaaggaatatactttgttgtttttcccgatactaataaaaataattttttcattttgctagcttccttctcaactttagtttatataacatcatatttgattgatttatggacatatagaaaacctgagaaaacacaactttcaattgctcattggcaagttgagcttcaggaaaaaaccaaagcaatttccgttgaatcaaacaaaaaaaatacatccttaaataataccatccgcaaaatatatttccacaccagctctattttgaagttaacgctattattaatttggataatgatttcaataagttttctttattacattcactacaaatag

SEQ ID NO: 154237 - DNA, 828 bp, Enterobacter cloacae
atgaataaaaaagtaaaagttgttgaacttaaaagcctcgatcggttccgtaatgatgtgttaagcacacaaaaaccagacaaaatagaagaattactaagctggtacttgggtgtttacggtgggattaattttacatttggctatgacaggccaatattcagggcaaggaaatgctatgaccgcaatggattcagtaatattagtgaaatatatcctcctccgccagaaaaatgtcaaattgggcgaatgaatgaaaaaggaaaagcgattttttacggttcatatagtctagggactgcacttgcggaaattaatgccaaagaaggcgactatattcaagtggcccattttaacttaccagaaaaagcagatcatggtataagatgctttgcaataggtgaaatttacaattcctaccatgggaatagtaccatttcatcggcgttatctgatgaaattagaaaactaactggccgattaggtaagaatgatatacatgccttgttatcatttttgtatatggatgcattttctgctgaactgttgaatagcatcaatgcaagcagtataaattacatatactcaagaatctttagccggttacttctaaacaaacacccagatattgatgggcttatttatccaagtgctaaaataaaaggttcagccaatattgtattgcgcacaaaaacagcagaggaaaagttaaatttaagtttgaatgttgtattggaaattataaaagtttatccctatggcatagtcgattttaatcttattagaagcgctaaaggtcacacctccagtggcgacatcatttggtaa

SEQ ID NO: 154238 - DNA, 213 bp, Enterobacter cloacae
atgtcttattcattaattagatttgcagaagtacagaaacgaacaggctatagcaaagcgtggatctatcgtctccttaaagaaaatcgctttccacaatcagttaaaattggagcccgatctatcgcatttgttgaaagtgaaattgacgaatggataagccagaggatcgaagagcgtgatgcgttaatttccacaaagccacaactgtaa

SEQ ID NO: 154239 - DNA, 684 bp, Enterobacter cloacae
atgaattcatttgattttataggatttaatcgttcagagattgagaaaacgttaggccttaatctgcatgataatttattggaatataacattggtttaaagaaaaatttaccaagttggcttgttccatatctttcaagagatagcatctctcttagtgactcagcacgtttaattgttggcgcaaatccaagagaaaatattattggtgaaaaatctcacgaatatgaagcttataaagaatctctctgggatgcgattgataattcaaaactaaccgcaagggatatttcccactacgataacatggatcatgatcggcgtgattgtatgctcgtgcgtagtgaggttgaaaaatgggttacagaacataatttcaactggcctttacccttacagcaaccaactgtaaatgaacaaacaaatcaggtctatctagatcaatggggggagttccccggtaaaaacactgcattgatgatgattgcaggtatggctatcgccctcgaaaaatcaagtaagagctatcgaaatggtgagcgcctgaacaaactggcaattgctcgtgcggttgcacagaacctggctactctgggatatcaagggatggtagtgacggaaaaacagatgacaaacctcataaaggaggctttggaagtcacatttccagaaagcgatggttag

SEQ ID NO: 154240 - DNA, 960 bp, Enterobacter cloacae
ttggttgctggcggcataaatcccagcgatgtacgcaaagaagataagctggcgaagctgagtcgcaatcaaaataccttcgaggcaattgcccatgaatggtacgccaagcgcatagaccgttggtctgaatcctacggcgaagaaatgatgaaaaccttcgaggctgatgtatttccgtttatcgggcagcgtcctattgccgatatcaaaccgatggagctcatgtcagttctttctaagctggatgaaagaggagcgacagaaaagttgagaaaggttaggcagcgttgcggagaggtgtggagatacgcgattgttactggtcgagctgattataacccggcaccggatctggccagcgcgttcgcccctcataagaaagagcattacgcttttctcaccagtgacgaacttcccgaattcttccgtacgctgaacacgtacagcggcagttcggttgtaaagttggcgatgcgcttgcagattcttaccggcctacgccctggcgaattacgccagggagagtggattgaaatcgattttgataaacgtctatgggaagtaccacctgcgcgcatgaaaaagcgtcgacctcactgcgtccctttatccgaccaagcgatcgctatcttggagcagttacgcctcgtcaccggcaattatcggttcattttccctggtaggattcagcacagtaaaccaatgagcgaaatggcgatgaacgtcttgatacgtcgaattggatatgcgggaagagtaaccgggcacggttaccggcacaccatgagtaccatcctgcacgaacagggctacaacaccgcgtggatagaaacgcagctggcacacgtcgacaaaaactctattcgaggaacgtacaaccacgcccagtatctggatggccgccgcgaaatgctccagtggtatgccgactatatggaggccttggaaaacggctaa

SEQ ID NO: 154241 - DNA, 231 bp, Enterobacter cloacae
atggttaacaacgcaatcaattcagcaattgggattgttggaagccagcagaagctcgcggatgcatgtgaagtaagtcagccaaccgtatgggcatggcttcacggtcgcaaaaaagcatcggcacagaacgctgtgcgtattgaaaaagcgactaacgggaaaatccaggcttatcaagttcgacctgatttaaccgaactgtttccgcatccaaattctgccgcctga

SEQ ID NO: 154242 - DNA, 567 bp, Enterobacter cloacae
atgcaatcacttacgtatcaacagagtaccaatctttataggccatgtctgatttccaaatctcaggaagtcaacaaagaaaccaaacagctaatgcatatccgtgaagctgttcgggcctggcaaaaatctacgccgggccagtctcaggttcacatttcgcagttggttgcgaaagagtggctggcgcgcggcgggaaggggttgttactggcaggttctgaacacaacacgaagcagaacttcttccggatgattaacgatccgggcccgaagaacgacaaggggttgatgctactgatccccgtcattatcgacgtgatggcgcgggataacgagaaagtggcgagagagttcggtctggtcgcaaagactgaggccgaactgatagccgaggccatgaaagagtgcactgaagcgcatcaggcgaaattacttggtcagccgatacaacgccttgagaaagaggtgagggaagctgcagaggcactgctgcgcttcctgccaactgaatcaatcgccggggtggtgacaagtctggccgctatggcgccgggagttatgtga

SEQ ID NO: 154243 - DNA, 264 bp, Enterobacter cloacae
atgacctacagcggtgattttgaaagtaatctcacgactcagaccatttgcttggttcattctgaaatcatagatgaaactcaggtctttagttctgtacgaaacagttttcttaccagtgatttcaatcagataatattgaaatacttcgctgaaagtctgctgtgtattgttaacagtgaatttccgagcgctctggtcgtcccaggcgaattcaaactgattagcagtagtggtcgttgcattttcaacagcgttcactag

SEQ ID NO: 154244 - DNA, 417 bp, Enterobacter cloacae
atgttcaaattccaatctgacttatcaaaattattaaatcgatatatcaacaagaaacaccagttcggtcaaaacgactgcaatattctggttgctgattatatcgatatgctttacggaacagactatgtttcgaaaatgaaagaccaatacagcgatatcgttgaaggtctaagactttgtaaaaaacttgtaggattcaataacgttctcgaagcgtgtgaaaaacatcttgagcaatcagaaacgattgaaacaggctcagttattcttatcaaacagaaacacggcagacgtatctattattcagcaagtattgttattaacgaaaaagtaatcacggttcatgatgatgtctatcaagtaatgaatataaaagacgtcgattatgaattaatttataataggagaaaataa

SEQ ID NO: 154245 - DNA, 480 bp, Enterobacter cloacae
atgcaaaaagatattttcgctggctcatacgttagcgtttattacaactctgatatcaccaactctgatatcaattctcaggactttgttgaaattcctgaaactggtgcattccctcagactggtatcgagcgtgaagtaattactgctcctaactatactcacaaatatagtcgtaaactgctaggtcgtggctctgttcctgatatcgacttaaccgttaactatattccaggctctattcatgatcagcttttccagcttgcagaagatggcaaacgtggtcagttcaagattgtctattggatggatgctggtcgtgaagttggtgttgcgactgtttacaacggattcttggcttctgcaactcgttcaggtggtgagaccgaagttactgcacagcaaatgactctgagtgttgatggtggtccagttgcttctggtattgtcgataagacttcaactggttcagaagaataa

SEQ ID NO: 154246 - DNA, 786 bp, Enterobacter cloacae
atggcagtagttaatgctcctggttggattggtgaatctgctgctcaggaaactgggcagcgttggatgaaagaagctggtgctgcattacgcatcagtgttcctttctggatgtcacagatggccggacaatcaaaagaaattacaatcacgttgggtgccaatcacaactatgaccgaaacgacctgattaataaacttcgtgctttgggtgcaactccagcagtcgttgtcatttctggtgatctggttgcccagaatacgggagttccttgtttagaatttccatcaaatcttccaaatgcatatgtaacgcttcgagttaacgcgacaatttacggtcgaggaggagctggtattagtaatggccagacttcgggtcaagctggcggaccttgtattctgaacagtatcggaacaaaacttcgcatcgaaaacaacggagcaatatgtggtggaggcggtggtggaggtggcgcacgtccgggacagaatatggtatctgccggttctggtggtcgtccatttggtccggctggtatagctggaggtcgagattcaaaagacggttatgcagctacattgacagcgcctggtgcaactccaccaaaaactcgttacggaactactggcggggctggcggtgacgtaggacgtcctggtgcttctggcactaatgacggtggtaaaattacaaattatcccggtggtgcagcaggtgcagcactatatggttctgctccaacttggacaaaactcggtaatatctacgggtcacgtttataa

SEQ ID NO: 154247 - DNA, 1794 bp, Enterobacter cloacae
atgacaggtctgttaacagcgaatcagggtgtttctgtgaattcatccggaaacaccaaaacgaacggtatctatccaggtaacggtgacggttcgacatgggaaacatgcaacgttgacatcaaatcatggtatggagtaggaattcgctccgatctcggagacgggaaaagaactgtagttattaatgcccgaacgggtgacgttagcacaaaaggaacattcgcatccgatactagtgttaggtctcctcgcgctgacattgacgtaatttatcgcagaaacggaacaacgtttgttgctaatgacggtaacttgaatcttgcattttctggcggatcacatccttcgggatttaaaaatggatatcttcttgaacaaatcaagggattcttggatacgaaaccgacgttcaagcaaagtttgggtgctaatagacagttaaacgatgtaagggagccaggattctattatcaagacgcaaacgtaaatacgtccgcagcgctgaattatcccgaaaataacgcaggatcattagaagtttatcaggcagcgggtattattcagatttatcgagtatataacaccggacgaagttatcagagagcgttttatagtaacggtccttggactgcatggacgagaaacttttcttatggtgatccagctcttgctgtaggatatacaggcgtttcgggactgggtaataactctattgcaatcggtgacaacgatacaggattcagacaagtcagcgacggtgttcttgaagttgtttctaatagtcaacgtgttggacaattcacaactggtcatgcatattttgataaagatgtaacaggtcctgcgattattgctagaaacggatcaatttattcaagaggtgacggaaacagtcatttttggttacagacaagtaatggaacagagaaaggcgttatctacgcaggtgcagataaagttattcattatcgctgtaatggtggtcgtcacgaatttgaaaacacgattcaagcaaacggtggtgttacagttcctaacaacggttcgattaactttaacaaagcgggtgcaaacccaagaaatatgagaatatttcatgctggtgatgcatcaagaggtggtcgtttggaaatttcaggcgaatcgtcttacattgcatatttcgaagaacgtcctaacaactctcatgttatatcatttaatggtgatgttacagtgggcggcggagtgactgttcctagaatgacatctaacgggcaagttctatcaaacgcgaatggtgccgcggttagaataaactcaagcgctgctaatcaggcgatttatcttcacggaacaagagccggtgttaacgcattctatgtcggttgtggtggttctgataacacggtgactttccataactatgtatggaacacgacaattcttcttcgtcagaatgacatttatttcaacagagatgtctacggtgaaggaaacggcaactttaacaacgtttatattcgttcagacgaaagactgaaaaagaatttcagaacgattgaaaacgcagttgataaagtttctaaacttactggttatgtctatgacaagaagaaatcattaaccgattctgaatattcatcaacagaagctggtgttatcgctcaagaactccagaaagttcttcctgaagctgtaatagaaaacaatgatattctgaatgtttcttccgctggtgttaacgctttgttaatcaacgcaatcaacgaactttcggctcgactgaaaaaacttgagggagaaaaataa

SEQ ID NO: 154248 - DNA, 882 bp, Enterobacter cloacae
atggctaataataaagtcaaacactatagaacaaaagttgcaggacgtaagcctgatcctgcaaaacttgaagaaggtgaaatcgctattaacttaactgataagaaagttttcacgaaagtgggaacttctatcgttaatattgcaaacggtgcagatgctatcgtcgaaggcggtcagactttcacaggcaaagtaacagcaaaagaaacaaacaccgaaaacgctactctgaaaagttccgatgaatctgcaattcgattttttgacgaattcgataaagagaaagctactatcaaagctcctaaacaaacagacggttcaggctctttaggaatcacggtaaagaacggttcagcaagtgacactaagaacacgtttattctaaacggtgacgggacaatcgatctccctgcttctcctagtaagaaatcaaacgctactcgtaaagactatgttgattcagaagttaagaaagtttctgataaagttgacagtgttaataaaactctgaatacaaagattgacgctaacgataaaaaagctacagacaatcttaatactgcaaaaactgaaattaacgcaagaattgattcattaggcgatggaaataccgaacttgcaaaaaataaagtaagcaaagctggcgacacaatgaccggaaatcttactattgcaactcctggtgatacgattcttaaattgaaacaaactgagattcgttcaaacgctgataacgatttggttatcggtgctcctaagcgaggaattttctttagaccggatatttcaagcgataatcaacagatggttcttgatactgcgggaacactgcaagttgacctgacctgctccccgttgattagtacaccccgatgttag

SEQ ID NO: 154249 - DNA, 1032 bp, Enterobacter cloacae
atgaaacaaaaagatatgtttcttggcaattacgtaaaagttgccgttaacaaaacaaccgatgttgagaatccgagctattacgatcctggatatatcgaagctgggtctattgcttcttttcctcaaatcggaattaaaaaagctgtagtccaaatggaagattacagagaagattttacgaataaactttcaagtgatgttcaaattgacgatgttaatattgccgtctatgaaacggatgatgaatttgttcaaactcttgaagatgctttgttgaataagtccgtagttcgtttacgagcgctttacgttgttgacgaagatgaatatgccgaacgttctcatgctggtttatatcatatcttcgacacttacgttacaaaaaaacaagtatcaggcggtgataactctgctgttgttaaaacctttactctaagtcctgaaggtaaattaacaactggttatgcagaattcggacgtcctctatatcttggtgaattcggtgttggtgcaggaacagaagatattccgggtgtgggtgattttggtaaattatccggtaacagatggataactgttgatgctgataacactggaaacccattctctcaagatacagcttctatggctattcagcatccaactggacaaggttgggaactgatcggaacgtctgtcggtgattcagctctgagagtaagaaacaaacagtttaatcctgatggttcgattaaacaaagcaagtggataaaagtctatacagaatctgaaaagccaacaacgaaagaaatcggtgcattgtctatcgaaggtgggacaatcacaggttcacttacgattaataataaactgactgttaaagaaatctccgctacaactgcaacaattaaaactctaaatacaacagtaatcaattctgattcggtaaaagtcaaaggtgcagaagtctattcaccgagcaacaaaccgaaaccgattgatattaattgcgttgcattaggtgaaatcctcgacgcaggagaattctga

SEQ ID NO: 154250 - DNA, 396 bp, Enterobacter cloacae
atgtctaatatgccaagactcggtattaaacgctctttagagaaatatcttcaaagtcaaaatatcaaatacgttcaagacgctttcacgacaggagttaaaaaagaagttcaagttatgattcctgagatgcaagaagaatatactcgaattggtcttaattcgaaacttgcttgtgttttaaatatcacatttgatgttttctcggagattaatgaaactggtgttcatgaagcagtttataaaattgttactctgagtcccgactctgcttatctgagagaatttaaaatcaataaaatttacccaagttcgagtttcacaagttattcaaatgaaagttccgacggtaacgtaagtgctcaagttgttttaactctcgaatatttcatgtga

SEQ ID NO: 154251 - DNA, 294 bp, Enterobacter cloacae
atgattttcccatacacagaaaaacagaaaaaagcttttctgactcgatttggtcagaaagttacgattaatcaaactgaaagacttgctatcgtagaaactcagattctaaacgaaaacggtcaagtcagtgaaactttatacataacgaccgacgctctctggatcacacaggatgacattgtagaactttttgataatacgtatcgagttgcttatgtcgtcagggacggctctggtttagtcgatggatatctatcattaacaaacgacgaaggaagtaaatatgtctaa

SEQ ID NO: 154252 - DNA, 1434 bp, Enterobacter cloacae
atgaaacgttttgaagaaatgaccgcagaagacatcgttgaaatggcgattgaagaactgactgatatgtctatcgacgaaatcgaatctctgactgatgaagctcgtgctaaacgcgaagaaattcttgaagaagacaaagttgaagctgaaaacgctggtgatgatgctgtaaatgcaactgacgattctcctgaagctgttcctgctcttgatgaactgacagaagaagaacgcgaagaagaaacagaagaaattctggaagtagcagaacgctataaagttccgcagaaagatgttgcaaaagcaattgctaaaggcatgaccgctcgcgcatttaaacgctctattaaacctaacaaagctcctacggtgattcgtaaaatgactaaagatactaaagtaaatctggaaaataaatttgaccttggtgatgctgttcgctctatgatggctggtaaagctgttcgcggtgctgctgctgaatatactcaggaaatgactcgtaagcgtctgcaacgtggtcagaacgtttcaaccggtatctatctgccagttaatgctctgtctcagaaacgcgctattaacactgtttctactgtatcaagcgtacaacaagaagttcagcgttatgattcattcgttgaaatgcttctgaaagataccgtagctgataagctgggaatgaacttcctgactggtctgactactccgatttctgttcctaagcagactaaatcctctgttgaagcattcggtttcgttgacgaaaacggtgaatctccagaaggtgaaagcactttcaccaacattcagttcatgcctaagacatttactggtggtaacccgatttctcgtcaagctctgctgactatgcctaatctgggaagcttcatctctgatcacatcgttaagcactcacgcgctaaactggaaggtctgatgttcggttctattaccgattctaaagctcctgagtcaatcgttgctcagttagtcgctcagaaaatgggaatgacctacaaagaattcatcgttgaagctgcaaaagctaaaggcaacggcgtttcaatggacgttttcaaatatctgatttctgctgctcttgaaggtgatctgaaaaccactctgcgtgatgcaaacgttgctggttatatcatcgacgacatgaacaaaatcggtggacaggacgttatcggatccggtctggtgaaagatggtcaggttatcgctggtgacttctccgctgttactgttgctgagtgggaaggtcttgcacttgacctggacgacacaacttaccgtaacaaaggtgctgttgttccacgtgtttgggctgacatcgactggaaagtttgtgctgatgatcgtctgttcctttacgaaaaaggtactccagcagaagttaaagctgctcagaaagcatctgcttaa

SEQ ID NO: 154253 - DNA, 285 bp, Enterobacter cloacae
atgaacgcatacctcacttacgaccgcatcgaagatcggcggtgggttgagcagcagctcaccgacgagaaagagaagtggatcgacgaccgggcgcagcaaatcatcgacatgatgccaaaagagccgcccggcctcttccacttctccgtaccgattgacgccagtccatacgaaggacttcgcagcgataaagctggcgaggcctacaacgatttcatttcggcagttgcttacgcccaggcggaatacgactgggaacaccgcaccggctgcccgttttaa

SEQ ID NO: 154254 - DNA, 207 bp, Enterobacter cloacae
atgattggaatgcactacggcaccgcatcagtgccacgtagcgaggttttacctggcacaatgctgcaacaccacggcaaaacttatcgcgcctctgcgaacgttgagaaaggcctgtacgccttcaacatcttcgaaaaaaccatcatcaaaagtgattccgtcgttgtgctgctgaatgagcgcggcgagccgatggttcactga

SEQ ID NO: 154255 - DNA, 606 bp, Enterobacter cloacae
atgaatgaacttgattttaaaatacctttaactacttattttgcgggagataaatctgcagccctaaattttgaatttccgtttgatttcaatagacgtagatgtgacctacttgtttcgacatgcgattcacttataggagtcgaaataaaaagtgatttagataatcttgatagactagaggatcaactgaattcgtattataaatgtttcaatcaaatttacgttgcatgtggtacgaaacattataagaaaattagacagatgaaaggacgattcggaattatactcatctctgatggtacattaacagttaagagaaaagctaaaataataaaatctctagcattgatgcccattttagatatgtgtgataaaatatctttggaaaagttaagcaatttaaaatatcagaataaatctgatttaatcatgtctataatcaataattttagtaaggaggagatttatagaatttatcacttatctattcacgaaaaggtatcgcgagtatataatgcgtttctttcagaaaaaggagatgtaataaccagcgaagatatcactctcctgagtctgaaatcaatgaatctaggtgcattttaa

SEQ ID NO: 154256 - DNA, 873 bp, Enterobacter cloacae
atggtgcataacaacaaggtttatctgcaagatgcaatgattcgtgatgcttctatcggatctgcgaaaattgctgatgcgtcgattaataacgcgaagattgcaaacgcaagtattaacgatgcgaagattcaaaacgcaagtatcacaggagccaagattgttaacggttctatcgataacgcgaaaatcggtaatcagattaactccgacacatggaatggttcaactgctggttggatgattaacaaaaacggacaagcaacgtttaataacgtaactgttcgaggacgtgttgaagctaatgaaggttatttcaaaggtcgtatcgaagctaacgatggttatttcagaggaactgtttacgctgaacatatcgaaggtgatgtgatgatggctgagggcgacaccttcagcatggtttatcaaccagtttcaggaaatagagccgatgcaggagatcaccacgtattctggatcacaggtgaaaactacgacagaattatggacacgaacttaacattgttcattcagtgtgcggaacgaaacagatttagtcttgttgttaaaactcctggcaaagcagaccttgtttatttcttcaaagatactggaaacaacggtggaaactggacaaatggacttcgaggaataactattcctgctgctggtaaaggacaacgaaatcaaattgttgttcgaatcgatgcgaatcgtgcggcatcaagatttattgttgctcctcagttcgtaacacctttgactaacgatagacaagttcccgactattcaacgtcaggtgctgctaacgctgctcgtgaaaaatcatatatcgcattcttcagaaaaggtgcaaatctgattcagatgtaa

SEQ ID NO: 154257 - DNA, 321 bp, Enterobacter cloacae
atgtttgctactgacatctcactgaaatacggcactcatcagccagagacgattctggaaacaatgccgattgaagaagcctccgaaatcatcaaggagaagcttcgtgatgaagttcgccaagaactcgagtgcgagtatggcgatcgcctttatgaggctgaagaagaggcatcaaactgggaaagcagagctgatgactatgaaagcgatgcgacttgcctggctaaggccataagagaggcttttgaatctgccagctttgaagatgcaaaggtgatcctccagcgagcgatgcacgaccacaaagactatttctga

SEQ ID NO: 154258 - DNA, 351 bp, Enterobacter cloacae
atgcgtaagtacctcaaacattgggctaccggttttaataattcggtccgctgggaggccttcagcaagaaggtattcacgtgcaatatcgctgtaggtcatattgatgtcagcggtatggtctacaatgcgccgattggtctcttccgggacgcgctgatcgaaacaacgattgccagcttccatatggaagataggcactttacggcgcttggctggaattgcagaaatacaggagtttgtatcacccagcaccaacattgcttcaggcttttcggattcaagtacctcatcaactttgatgataacctgaccgatagtttctgcagcatttttcccagcagcatttaa

SEQ ID NO: 154259 - DNA, 399 bp, Enterobacter cloacae
atgcgactcattgatactcaccagcttgaagctttatacgaacaagccggaaaatctgcacgcttgcgcgctcatctcttattgcacaattcgcaccaggagaaagtgcaacgtctgctcattgccttggttcagggcagctatgtcgatccgcatttccatgaacttcctcatcaatgggagatgtttgtcgttatgcaggggcaggttcaagtctgtttgtacggcaaagatggcgaaatcactaatcaatttgtcgctggagagaatactgcaataagcgtagtcgagttttctccgggtgatatacacagtgtcgaatgtctctctccgagagcattaatgatggaagtgaaagaagggccttttgatccttcctttgccaaggcgttcatctaa

SEQ ID NO: 154260 - DNA, 126 bp, Enterobacter cloacae
atgaaagtaggggattattgcccggtggcgctgcgcttaccgggcctacagtcccgtaggctgggtaaggcgaagccgccacccggcagttttccagaacgcacaaaagtaaaaagcctgctttaa

SEQ ID NO: 154261 - DNA, 216 bp, Enterobacter cloacae
atgaaatcgttatatcagtactcttaccttcgccgggcgatccttgtcgcgctgcttggcacgtccggtgcaacttatgccgccaccctcatcgataaagacacgctgattgatagcaactcccccgtcaatgaagactatcaggtcgaaaatggcgcgacgcttaccgcaaagggggccgttgccggtcaggtgaccatttctgacggccattaa

SEQ ID NO: 154262 - DNA, 894 bp, Enterobacter cloacae
atggcagttatcaatactaacctgttgtccctgactactcagaacaacctgaacaaatctcagtcttccctgggtactgcgatcgagcgtctgtcctctggtctgcgtatcaacagtgcaaaagatgacgctgctggccaggcaattgctaaccgtatgactgcacaggttaaaggactgactcaggctgcacgtaacgctaacgacggtatctctgttgcacagactaccgaaggcgcactgaacgaaatcaacaccaacttacagcgtattcgtgaactgaccgtacaggctcagaacggtactaactctgctgatgacctggtttccatcaacaacgaagttgttgatcgtatgaaagagatcaaccgtgttgctagccagactagctttaacggtgtgaaagtcctgtctactgctcagaccctgaacatccaggttggcgcgaacgattccgaaactatcggcatttccctgaagaaaattgactcttctactctgttcgccggcaacgccaaaatgtctggtatcaccgaaggttctaccggtaaagcttccgttggtatcctggcaacttactcccctgctagcggtgctaccgctgcaactgcgaccgttgcttcaggtctgctggctgaaattgacaaagcgatctctgacgttgactcactgcgttcaagcctgggtgcgagccagaaccgtttcgaatctaccgttaacaacctgaacagcaccgtgaccaacatcaccgctgcgaagagccgcattgaagatgctgactacgcgaccgaagtatccaacatgagccgcgcgcagatcctgcagcaggctggtacttctgtactgtctcaggctaaccaggttcctcagaccgttctgtccctgctgcgttaa

SEQ ID NO: 154263 - DNA, 4173 bp, Enterobacter cloacae
atgaaaaaatcacccgccacgtctttcccaaatagtaaacaggctattaataatttgcttaatgagaagatgcgtcttgctgtggactggttaactaccagcccacaagattctcttgctctggtaaatgagctaatggtgaacaataaggataatatcctactactggtcatcgctggacgcgctcatcagagactggggcagtttttccaggcgggtgaatgtattgataatgcattgaaaattgacagaactaatgtcgaagccatctatgctaaatcagatttattataccgcagcgatcgtttgtcggaagcagaagaatatctaacggatgcgatttctcgtatagacaacagtgccgccaggccgctgcgtctgcttcacgctaccgttctgcagaaagcaaaaaagtatgaagaggcgcaggcgctttataagcagttaaccgctgaaatgccagctaactggctctattggaataatctcgggatggtccaacaagacttgagccagttcaacgagatggatgaggcgtaccagcacagctgtgaagtctcaaaagacaaccctacgccctattttaaccgtatcgttggtgcccactataatccggagcgcagtgccgaagacattcttgaattgtgtaaaaactggcaggaaaagttccccccgcgctcggctaagcgtgcggttgccaaaaataaagcattagataaatgcctgcgtattggtcttgtttcggatggtctgcgcttacatccggtcgggcagatgattgtgatggggttagagcacgttcctgcctcccagattgaattctacgcctacagcaccaactaccaggaagatcacctgacccatcgcctgaagcgcatgtgcgcgaactggcgggtcgttgagcatattggcgccaccgaacttgataagattatccgcgaagacgagattgatattctgtttgacctatgcggatacaacgctaacagccgtatgcaaaccttccagctgcagcctgcgcctattcaaatcaagtgggtaggagggttaatcagcagcactgggctggtcggcatggactatctgcttagcgacgccatcgaaacgccggagtgggcggattcactgtataccgaaaagttgatccgtatgccggatgactatatctgctacgatccgccgttctacctcccggcggtcagcgaaatgcctgttaaaaccaaaggctacttcacctttggctgttttaataacgcctctaaaatcaatgcgtttttattaaaccagtgggcggtgcttttgcactgcgtgccggattctaggcttttcctgaaaagctttaactttgataacgagaacttaaaagagcgtgtattaacgacccttgaaggtcacggcatcgcgcgcaaacgcgtgcgtatcgaagggatggcaccgcatcaggagctactggcctgctataacgaggtagatattgccctcgatccctggccgtactccggtgggctgaccacctgtgaagctctggcgatgggggtgcctgtcgtgaccttgccgggcccgacctttgccggtcgtcactccgcctctcacttggttaacgcgggcctgcaggagctggtggcaagagactggcagaactttatcgatattaccgtcggcctgacccaggacttaaaaagcctggagattattcgcggcaatatgcgcgagattttactggcctcgccggtatgcgacggccagcgctttgcaaaacatttctcgcaggctatgcgcgccgtctggcagcgttattgtgaaggtaaaatgcccgaggcactgaccctgcgccacgacgcggcaccttatttcctggatgatacccagccggtcgaactgaagatgccggcagaggttgacgttgcagcgaaacgaatcgaaagtgaaggcttctccttcgagctggcgggtaaggtcatcaccatggactttggaggcagcttcacaacgggtaaaaaatttgtcagcctgaccgagttggactcattctactttatcattatggataccctcgggatcgtcgaagataaacatctgccgccgcgcaaaaaatcaatgcagcacatcaaactgcacaccttaggcaacggcgaactcacgccggtgtatatgtgtatggataatcagctaagcagtacgctaaaacctctgaatacaatgaacgccgctggtgcagaagttctcgtcgagctgaaatcacagtcatctcagcttgataatatacatgggctggaaaaggtcgatctgctggtgctggataataaatttgatctggcacccgtcttccagtatgggtcgcgcattctgcaggagtgtctgaccgttgaagtcaaaattacctttgcgaatacccatcagggccagatgtccttggacgcgattggcagcgtactcgcgcactctggctttatcttccacagctttacggacgttgagtacggtgcgccaaaagttattgctaacgctgagcctatggcctcaacacacatggtgtcggcgaaagcgatatttattccgggcgagcacaagctgtgcaatctcagtagtgcgcagcatgaaaaattagcctttattatgcatgtggtttatggcctgcatgacgttgcggccacactgttgcaggcacattcgtctgggcgtgcagaggcctatattaatgagattctattaccccaccagcaaactactgcaaaacaacggaaacacggtttaccgcaaaagcttgttatcagcttaacttcctggcataagcgttttgctacgctgcattacacactgcaatgtttattgaaacaaaccgttaaagcggatcgtattattttgtggcttgccgagtcggagcgccatctcgttccacaaagcgtactagcctttgctgcgaagggcatagagataaagttttgcgaagatattcgctcttacaagaaaattgtcccgacgttaatcgaggaaccgaatgctttcatcgtgacagccgatgatgacttagcctatcagccggaatggctggaaaaacttatagctggttgggacggggattataaaacggtggttgcgcaccgggcacataaaatccgccttggtagcgataaaacccccgttccttacaaagagtggaaatggaattactcagtcaccacagatctttctaatcttattttcccgaccacaggcttcggcgcactttatccgccgaagtgtttccacgctgatgtgcttaaaaaagagatttttgaacatttatcaccaggagctgatgatgtctggctgttctggatgtgtcgtatgaacggggtaaaatttaatgttgttcctgagcatatgatatctgaggaatggaacggaacctcggaagttggcctgtggcagaataacttgctgcaaggtgagaacgacaagtatattaaaaacatgattgcccattatggatttgcgccggaagcaaaagcggttattgatcgtctggtgactaaggctgcccctaacagcgcctctcagaatgaatctctggccttccgccagtcgggccagtactgggacgatcgttaccgcttaaaaggcaactccggagcgggctcttacggtcgactggctgactttaaggccgaggttattaatgcgttcgtgaaagaggagaaggtgaagtctgtgatggagttcggttgcggtgatggtaaccagttatccctcgctgactatcctcgctatactggcttcgatatctctgaccatgggatacaactctgccagaacaggttttgcaatgacccgacaaaagatttttatccggtagattactggacagggcagcaggcggaattaaccctctccttggacgtgatatatcatcttattgaagatgaaatctttgaaaaatatatgcagatgcttttctctgccgcatcgaaatttgtcatcgtttatgcttcgaataatgaggaattcaacgtgtccatctcgagatatgccccgcacgtctatcatcgaaaattcacggattgggtcgtaaaaaacagaggcgaatcttgggttttacataagtacatacccaataaatatcagtttgacgctaacgatcaaaacaacacgtcgtttgctgatttttatattttctgtagagttgatagctga

SEQ ID NO: 154264 - DNA, 159 bp, Enterobacter cloacae
atggaaaaaaaactgtccgatggcctgcctttaccccagcggtatggcgctatcgctacgattatcatcggtatttcaatggccgtactcgacggcgcgattgccaatgttgccctgcctaccattgccagcgatctgcatgcctcacccgccagctaa

SEQ ID NO: 154265 - DNA, 990 bp, Enterobacter cloacae
atggcgattcagtcgagagttgttccaggttactgcgttgtacaacagccaggtacacttgattttcaggcaaggcagctatttggtggttcacaaaatgaaactacagaatactttatgcaactgaacagagatacgtcctggttaaagcccggacagatattgatagttgccgatccaaataatgataaccaatcttatatgatcaacagtttgcttaatgcaaagaaaaagatcaataatgcattagcaactatcgatgcctctgctgcagagtttttaaaaaataattatgaaaaaattaagtccataactttctggggcgagacggcagtcggaaatgctagcggtactatagagtcatatttcaagcagattgagagcattttggtcaaaattgaaggcacatatcaaaatcagtttcgcacgcaaggcactttgatcagtcagcagttttatcatgaacggaacgctctctttgcccaactaaaaccgctcttaaataacattaccaggaaacaattgaagtttaaagactatactgaccttaaaagagctttagggttatcgactaaatcaattgttcatgaatggagcacggtaggtgtgggtgcaatccccggttattcaacctatattgacagaacgtcaaaaattacggcatatatgaaagcgggcggatgggttgctcttggtttttcttttatgaatacctctaatgaagtttatcatgcatgtacggttgacagggaagatgaatgtgggaaagttgcagtgactgaatatagcaaatttggtggaggggttgctggtgccgcattaggctccacttttgcagcaccgatttgccttgcactgggggtacctacagccggggcaggaacacttgtttgcgggttaattgtaggtgctgttggcgctgcaggtggcacacaagtgggtggatttgttggcgagcaaatgggcaatttgatattcagtggagattaa

SEQ ID NO: 154266 - DNA, 210 bp, Enterobacter cloacae
atggggcaaaacgacgggggcgaaattgcgtggagttatggaaagcgcagtgatgtttactatcaaagtgtcccctgcatacatcgaattggcatggcaggggattgtatagaaagggaattttcagaagtggattttattttacccgcagttttacccatcgtggcggttcaggagcttttctttgaatgcgcaatgctcactatataa

SEQ ID NO: 154267 - DNA, 201 bp, Enterobacter cloacae
atgcaacaccaattacaacccgactcactggttgatctgaaattcatcatggcagatactggtttcggaaagaccttcatctatgaccgcatcaaagatggcactctgccaaaaagcagactcatccacggtcgagcccgctggttatatagtgagcattgcgcattcaaagaaaagctcctgaaccgccacgatgggtaa

SEQ ID NO: 154268 - DNA, 222 bp, Enterobacter cloacae
atgacagattttgcagacgacgcatcagccgtcgaagagttgcagcgtaatgctgcgttgagtgctcaccggattaaccgtgatgcggtatcggcggttaagtgcgaggaatgcggcgataagttgccggaggctcgccggaaagcgtatccgggatgcacgatgtgcgttgattgccatggtgttatcgaattgaggaataagcagagggggatccagtga

SEQ ID NO: 154269 - DNA, 177 bp, Enterobacter cloacae
atggaagacaaaaggaactggaggtgctttttcggcatgcatcagtggtctgtaatcagctcaaatgaaaggcattactacaagtcatctacagatagcaggcctaacaggatagcgactcttcatacgctccagtgtgtgcactgcgggaaacttaattccaaagagataggttaa

SEQ ID NO: 154270 - DNA, 483 bp, Enterobacter cloacae
atgaaaaactcagttttcttatcgctactgctttgctcaacatctctatatgcccaagacacggccttggctgatcaagcaaaaaccgccgttatcgatagcttgaagtctcgtgaagcgacgaacaagtgcgcagaatttatgagggtagcagcagctgatgagtcaaagaaaccatttgccatagccacttgtgacaacacctttgtagttgcaaacggacttacctttagtgatgtcaaagcagtcgaatcagaaagtggtaaagctgtctgtggtgtagtctctgggaaaacacacataagcaaaattggcgcaaggttcgtatacgttgaaaaaagcaacaccgtaacaatcaaaccttctaagcagccggtaatgacaagctctgcagctggggattttgggcgcaaccaggtaaaaattgaaaacaaacagtatgatctggtatctaccgcgtattgccagtctccagcaagctaa

SEQ ID NO: 154271 - DNA, 561 bp, Enterobacter cloacae
atgagggtaaggcaatgtcggctctctggccgaagggtcccaggtagtaggttctggtgtgtggcgatcggactcgaaccgatactcaggttcagcattagcatcatgcctgccctgctggctatgccagttgatgcattactctacccatctaacccgcaagcgggaattgagttacaccacaacggacagagcactgagcacttcgcgccaactccatgctgctgcgtgggttgggttatgagcccttcacgccaatgctctttcctgttgtgcaggtacgaaaaagcccaaggcgttaacctcgggcttgaattctttgtgtcgacaatcaaagctatggcgacgatatcagatttacatgaaatatatgcgtttcaatccagttttgcaagacttctatcgaaatttgtcgccttttgttgtgaacgtgatcgcgttacctgcaataaagctccgctatccaggcgaagaaagatacgtctcatctccacccagcggtccgtaaacgtttctgaccagttctttggcgttacgcccaccagttccgcgagcagctga

SEQ ID NO: 154272 - DNA, 357 bp, Enterobacter cloacae
atgtcatcggtagcgaactggagctatacagccacggcgaccatctggcgaaaacagaacggtggcaccgatgaatacggcgatccaatcaatgggtacgccgcaccggaagtaatcatgtgcgattacgaaggcggtttgtcaaagcgtatcggcagccttggcgctgaaatagtcgttaagaataccgtctggacagagttttcgctggcggccgccggtgattacctgctgattggcgcgtcgacagagctagacccggttgtggccggtgccgacgaggtgcggcaggttatccgctatgccgacacattcgaacgcctagcggatgattacgccatcctgacgggagagtag

SEQ ID NO: 154273 - DNA, 2502 bp, Enterobacter cloacae
atgccggtaatcgagattcagcgcgttccggggatgccgaaggaccgggcgatagttaacgctggcacggtattttcggaatggcttgaacaggaaagttttcaccgcgatatccgcattaacctaaacggcaaagagctgcagccagacgatgaacttgctttccagcttcaggataatgaccgggtaatcattttcgaccagccaaaaagtggcgacctggttgggactctgcttaacccactcgaacacctgaacccgatcaagttcacccaaaaagtgttgtcgtctttcatgccgaaaccaaacgccagcgcggcgtctggtaacagcaaaacatcaccaaacaacagcctgaaagggcagaccaacatcgcgcgtaatggcgaagcgaagccggataacttcgggcaagtcagatcgtttccggacctaacccaggaatcagtattcgaatacgttcccggcggcgcggataacacctggcttaagtacgtaacggagattatgtgttttgggcttgggaaatatgacatatcgtcagttcgattctccgaaactaatctcggctccatggcgggggcgagctacaccatctatcaaccaggtgaagtgattcctcaggtcattgagggttatcagtttgatgatgtcgacgggcaggaactgctgggcccgaacgagaaagaagggacgccgattgaaagcgcgacggccaataccgtcgttagcggcgtttacgctggtggtgaaattgcgattaaaatcgtgcagcaggcagatttcgactatttccttggacttattcttccgcaccccgtgacgttcacgattaacgttaccagaccggtgcctggcggttctgtcacagaagatgtccaactttccgggtcgatgataagtattgttgaaagcgacgacggaagcgtcgttgacccggttgagtattacaccttcacgttcaataaaatatcagcaccaggctttgatttatctggtgtcaccatcaacacaacaaaattcatccttgccgataacggcactcttgtggttgggccgtttatttcgccagttcagtcaactcagctatggatccacgtgattgccggttatgccggacagcacaacgactctttcaaaattaaatggtggaaggtcgatgatgacaacaatcagatccccggcacagaggagacggtgacttatgcgattgtggaagggattaagggcgtttcaaagacttactaccggacgtataagcagacaccttcagccggttatggccgctatgccgtctcgcttgagcgcataacaaacagtgccagtgacagcaaaatacagcttgaagaaatccacgccatcaacgtcaggactaatgttgtccaccctgatgacacactggtgaaaattgttgtccgggcgacagagaacgccactggtagccgcgacaggaagtacaacgcgctgatcacccggcacgtcatcagctacaacatggcgacgcaacaggtcgattacacgctgaggccatcacgtaagttcgctgatatcgcgctgtttaactggcttgtcgttggccagcagccggagtcgagcatcgacatttacggcctgtaccagatacaggcggaaatcgacgcaatcgaccagcgcctggggtatttcgattacacctttgacgatgaggatgtgtcgcttggatcgcgcatggaaagcatctgtgatgccgccagcgtgctggtctatgacgataacggcgtgctgtctttcacgcgggacagcaagaaaacatcggcggccacaattttcaaccggtcaaatacgaagcctgatggttattcgctttcgtacgatatgacgcttccaggcggctatgacggcgtagaaattcagttccgcaacccggacaccaataaacaggactttatcaggtaccggatcaccggaagcgctatcgttgaaggtgcaccgacaaagccgaagaagttcgaaatgctctatatcaggaacagattccaggctgacgaacgtgcgctgcgcgagtgtaagcggcttatctattcccgcatgaccatgtctgtaactgcaatggcagatggtgaatgggtaaacatcggtgacatggttcaggttcctgatacctacgacaccaaccagcaggctggctatatcgtctctcgcgtgggtaatgacttcgaaaccagtgagcgcatcaacttttcagggacgatgtatgtgcaggttacggattcatccggtgctaccacggcgcgctatctggccacaccaaggacagatactgccttcggttttacagctgctattcctgacattgagctcaacctttttgatggggtagatgtccagtcaccgtcccggtacgcaatcgcgacatcagaagaactcgatgcaggcagatggacgattactgcaaaacagccagatggaaagggcaacacagctttaacgctcgcagagtacagcgacgcgatctactcataa

SEQ ID NO: 154274 - DNA, 2583 bp, Enterobacter cloacae
atggctactacaccaacaactaatccagtaccaagcgaaaagccgcaagacctgaaattcaacgcgggtaaaattgacgagtttgttacttcactgcagcgcgaatatgaagacagatttggcaataaacattacaccattgaagggctgcgctgggtggctcagcaggcgatctcagcttttgggtacattacactcgacagttttgaagacggcaacagtctcactcttcctaaccaggttcttcgtctaaaggcgacaggtgagtattatcgttgggatggagacctacccaaagtagtttcccctgactctacacctgatagtgcaggtggaataggtaaaggcaaatggataggtgttggcgatgccagtttgcgtagcgctattaatgaaacgactaaaaaatacactgcatttattgacgccattaactctactattgatccagttatcgggtgcgttattactggtggtaggttttccgtagatgacggtggtgatggcatatacgtcaggagcggaactggaacgccaggagatacagatggtggtggttattttgtctcacaggatggttctcgttttgaattgatatcaaccgcttcaatagctacttttgggggggtgccaggtcatgactaccgcgctgctcttgacagtctaaaaacgtatgtttcaacaaaagataaagtaattagaattaattctaatactgttgttagtatggtgtttacaccagagattcctgctggatactggaacggatttactcttgacgttgatgataacgttacaattaataccgcaagcgatgaagctgttaaatcaccactggtaaagcttgtcagaccagttaagttcttttttactggcaatagcaccagttatttattgcgctcaagtgttggtattacaaaaggtgaatatactccgcttgttcctggaacattgccgaccccgccgatcataaaaaatgcaaactacacagacaacaaaacgttattttgtgatattccggataaagaaactccagccttgacggtctttacctctggatggtcttttctgtcaggcacctggcctatgggagtagttgcggatactcctgctgcgtcactcactggtgatgcggtgtccattccagcccctacaggaaatcttgtttttgctgcatacagcagagtgaaaccgtgctctgaatatttcgtttctatgtatgagggcgacaatacaggtggcctgccatgcgttgtagttgaagctgagagtatgcgttggatctattacgaggatcattttggacatggtaatttaattgaagggacaattggcggcgcgtacaccacaaaaagtatttcttatgctggttcggatactcacgcatctcagtggttgaaaaacagcattgcttccgtgcgtgttgatacactgaaggcttttaccatccttgttaacggaatagagcgagtaacaatcagacaaactggcagaattattggtcgtgtagggtttggttcgcttggtgatggtggaaagtatatgtctgttttctacccatacattatcgaaaatcggcaataccgttctgccaagccgataaatgtcgctattgtaggtgattcaatcactgatgcgtctatgggtaatggatgggcgcagttcgcacaacaggcgctggaaggaactcatggtatacgagtcgggcgcatgcagacaattgcgataaatgggtatgcgtcaggagacatagccaatatttttaacatcacatcattggatgatatagatgtggtgcttttccaaatcggtgttaatgatattcaaagacaatctggtcgagaggcattgcgtaataatgttaagcagatgatgttgactgcaaacaacattgggatcccctgcattgtttctttgcctacacagttctacacaagagaccaaagcgttacgttaacaggaatttcaggttatggtcagccttcgttaaattacgagttaggggctctttacagagcgatacttgccagcactgtagccgttcgtaatacagaggttaatcagccgcttaatgctcttaacactggtactcttgacgatctcggcccaattgttgctgagtatctcctgacaaatcaggatccgatggtaatggataatatccaccctacaacttatgggcgaatcctccttggtttatcaaatgcaagggctattgcgtctcatatgttcggaagaagaaaagacccaattataaaccactggatgccagctgcgtggggggcaaataactggtcagtaacttcactggttcgtgctgctgtaacatcatatcccgatggtaaaattgcattaactggcactatcgctaacatcggaacaggtataaccgccgacggtacgacagtatgcaaccttccgttgagcatctcgccagttaggaaaatggcattttctgttacaaaacttgatgcaagtggcctccctattggacagggtaatattgttattgatacaaatggaactgttaaaatatacggatttcaaacggggaatgtgtcactagacggggtgttatattga

SEQ ID NO: 154275 - DNA, 999 bp, Enterobacter cloacae
atgtatggaataaggatgtcaggccttggtggtataggtgttgatatattttttataattagtgggtttataatgccttttattgcttatggaggtaaaaaagctgatgggccatttaatatttcagcggcaaagttctttttaagaagattggttaggatacttcctttatatattatccttacggcatgtgctgtttatgtctcttatttggtttcataccaaatcacctccccagcaagaccgttacttttttggtttccatctgataaaatagatttagtgtatttttttaggagcataacgttcacccattgggataagggaccaatactaggtgttgggtggactcttcagtttgaatttttcttttatgctatcttcgctatttttattgcaattggcgtttcaaaaatagagaaaatagaaatttcatttgtgacaatagttatcgtttgtaacattttagttaaaaacgagcatgccgcaaattttattaaagcgtatttccctccaattgaggtaatctctcagccagtaatgattgagtttgctttgggtatgtttatgtacagactgtacatatcaaaaatatttcttaacgccaaacttgctactgctatattgatttgttcgttgcctttattttatatccttgaaaaatatttaataactacgtatgtagggaacttatggcacagacctcttatatggggagcgttttctttttacatcgtatgggcaacaattagccttgagggtaaagtaaagactccgaatatattagtttacttaggtaatgcttcgtactgcatatacctcatacatggcttatttacatcattgcttgcgcactggtgggagcgactggaactacatctgcataccagtgtatttatgtaccttgctttttatgtgttatttagcattattacagggtgcttagttcactcgttgattgagaaaaaaatagcaaaatttacaaggcgttttatttag

SEQ ID NO: 154276 - DNA, 372 bp, Enterobacter cloacae
atggagtcccaattccccgcagcagattatgcagtagagcgtatctcactggacggcaggatcattacaagcccagcgtcgacatatttgatgctggcagcagagactatctggcgcgcaggcattatgaaagatgcaatgcttgtcgtggacagcgctgtacatcccattgatggttctattatcgtatgccagttcaacggtgaacttcgtcttaagcgcttgaggttagctcctgctcgatgccttgaagatcttaactatccagaccggcatcagatgctgacgtctgaaactctcattatgggagttgtgacatatatcatcaacgatgctcgttcaggtgagtttgacgactgcccagtaatgtga

SEQ ID NO: 154277 - DNA, 1158 bp, Enterobacter cloacae
atgctcaccatcaagcagatcgacgcggcaaagccgaaagataaaccgtaccggctgctcgacagcaatggcctttacctttatgtgccggttaccggaaagaaagtctggcaacttcgttacaggatcgatggtaaagagaaggtgatgacaataggtaaatatcctttcatgtcattgcaggaagccagagacaaggcatggcttgcgaaaaaggatgtgtctgtcggtgtcgatccggtaaaggctaaaaaactgtcagtcaaagacaactcgttcggctctatatacaaggaatggtacgagcataaaaaacaggtatggtcagaggtatacagcacagaattgtcacgcatgttccaggatgacattctgccattgattggcgggatggagattaacgagatagaaccgatgcagatactggaagtgatccgcaggtttgaagaccgaggggcaatggagagggccaataaggcaaggaggcgctgcggggaagtgttcaggtacgccattgtcaccggcagggccaaatataaccccgctcctgatctggctgatgcaatgaagggatatcgcaagaagaactatcctttccttccggcagaccagataccggcattcaataaggcactggcaggattctccggaagtatcgtctcacgcatagcaactcaagttctgcaatatacggtactgaggactaaagagctccggtccatgcaatggtcgaacgtcgactttgaaaccaggacgataactatcgccgaagaggtgatgaaggggcgtcgagttcaccttgtacccatgtcagaacaggtaatttctttgcttgaaacactgaagcctgtaactcagccgatatcaagtttcgttttcgccggacgcaatgacaaaacaaagccgattagcgagaacgccgtgctgctggttattcggcagattggatatgaagggttggcaagtggccacggcttcaggcatcagttcagcacaatcatgaatgaacatgaatggccggctgatgccatagaaaagcaactggcacacgcaaacagcggatcaatacgtggcatttacaaccatgctcagtatctcgataagcgtcgtgaaatgatgcagtggtgggctgactacatagacggaaatgccgggtaa

SEQ ID NO: 154278 - DNA, 1098 bp, Enterobacter cloacae
atgagtgttaatcatctctggcgctggcgggcgctatccagtgaaggcgaatctctgtgtggggtgctgtgggcgccagatcgcgaaacggccttcgtcaggctgatgcgtaaagagttacacccactttcgctcacccgatgctcgctgacgcaccgctggcgaccccatcattgctatgagatgtttcgccagcttgccacgctgttgcaggctggcctgacgttatcgcaaagtctgcaaatgctggccgagcagcatcctgtcaaacactggcaggcgctgctggaaaatatgaatgatgatctgagcgagggacgcgccttttcagaggcgctgaagcgatggcctgcggtatttagcccgctgtatgtctcgatggtaaaaacaggggagctaacaggaaagctggaaacgtgctgccgccagctcgctcagcagcaacaatcccagcagcaactcacggcaaaagtgaagaaggcgttgcgctatccgacgatcatcctggcgctggccgttctggtcgttctgaccatggtcaccctggtcttgccggagttcgcggccatctacaaaacgtttaatactcccctgccgctgctgacacagatggtcatgggcctgtcggcgtttatccagacatacgcaatcgccctgttcatgctgctgcttattcccgtggccatcgcctgggcgctgcgacgggatccgcgctggcaacacatcctgatgcatattcccgtgacgggcaggctggtaagagggcaaaaactggggcagatctttaccgtactgtcactcacgcagcaggcgggcatcccctttttacagggattacagagcgcggaagagactgttgatagccggtactggcaaggcaattgcgcagcgttcgtggggacattgaacaaggctttaccgtctggtcttcatttcagaaagcggccgtttttaccccgctgtgcattcaactcatacgcaccggagaagtctctgggtcactcgacattatgctggaaaaccttgcccgccatcatacggagcaaacctttcaactggcagataatctggccgcgcttctggagccagtgctgctga

SEQ ID NO: 154279 - DNA, 219 bp, Enterobacter cloacae
atgtttctgctggcgtatgtccgtacgccagcgttatcccgcgctcattgcatccccgagatggaaaatgggcagatacatcgccaccaccagcgtaccgataatcacccctgtcacaatcagcagcactggctccagaagcgcggccagattatctgccagttgaaaggtttgctccgtatgatggcgggcaaggttttccagcataatgtcgagtga

SEQ ID NO: 154280 - DNA, 522 bp, Enterobacter cloacae
atgataaaatatataatttatgtgcttatagcagccttgatggccattatatttagaggccgaataacaacgcttggctataatgattacaaggacacgctaggtgccctgcttaatatttcatctataatatttgccattataggcgcctggatagcaattatttatccaagggcgatggcgagaatattaaataagagggactcacctcaatcaaataaagccgaggggaaggaatcacataaggatgctaattatttaagcgaattagttgagatcgtcatggtatcagctgttgtattaatggctgttcttcttatacaattcttcgcccctttacttaaaggcctggtggatgttaactatatcccttatgttaaataccttaattttacatttgtagctttcttggctatagcgcaatttgcagcgatatttagggtgatacttgttaattattttttcttgaatgagttaaggaaaaaaaacgtcagcgacaaaattaatgaattacatcgttaa

SEQ ID NO: 154281 - DNA, 1035 bp, Enterobacter cloacae
atgctaactgcaaaactgaagttttttgatatcaatagatgcggatattacaagcacggctctaaaaaaccagacttaggcaacaccactgatacattgcttaaactgaaaggttgggcttctgatggaagagagttcatcaatactcttacctaccaagccgaaaaggaagaggacatccgcaatacctatttttgtggtttggcgtcagacaggcagtacggagaccaccttttaactctttgggcagaggttcccaatgatagtggggtgatatatggtatgccaccgctagctaaacccggtaaagtggatatgttaaccactggatttgatgtcgataaggctattccaggatttccttgttacttttggttcattcctgatgaaaatgcttttgcttcaatcaaatttgaacactctctaatgggaaagggtaatcttgataactatctcaatggatatcttgcaaacaaatccccatatcgcgtgctcgataatgatgataaagtaattggcttttccgctgatgctaagaaaaactctgattcagaaaaattaaaccctaaattttatgctgtaggaatgaaatatgatgaggttcaggcagagttaattaataatattcacagaatcacaaagatattaaaaagagaaaaaataacttatttagccccagatgatagaaaaataattgaaagagttttttctggcctgttaaaaaacacaccagcaaacacacaggaaagaacgatctttcacgagatggaattcaaaccaacagaatcacagctaaaattaattattaaaaactataatgagttaggtaatagctcacctataaggaatgttggcttcaaatatagtgacgggaaatctatctggcttagcggtgcaaatgttgcttttgaaaccgagctaaatgttcggcgaaaagataaccacataatagctccagaaagactgttatctgctataataaaacgcagagcagagttgttaaacaaaatgaagacaccaccagcaggggggtga

SEQ ID NO: 154282 - DNA, 141 bp, Enterobacter cloacae
atggctgtggatttatccagaaccaacatcgaacgaaactggaaagcgccttgcaaaattcctctgcggcatgatgccctctcccaccgggagagggagaaaagcaggcataaaaaaaccgggctgatgcccggtttttaa

SEQ ID NO: 154283 - DNA, 228 bp, Enterobacter cloacae
atgtttgttgccgaatcccgccagggaacaggagttgcgcttttaaaagaacttgaaaaacaggcccgcgctatgcattacaaaaaaatcatcctggaaacgagatgtgtaaacaaaattgccgtcaatttctatctgaagaatggttatcaatacattgaaaactatggtgtttataaggggagagaagatgcagtttgttttgcaaaagccctgacctctatctga

SEQ ID NO: 154284 - DNA, 501 bp, Enterobacter cloacae
atgaaaaccattaataagattataaatgaccccaacccacgaatgaaactcagtaatgccgacaaggctagcgtgatcaaagcattaaagtcatttaatctaaacaccttcgccagtaattttaaaaaccttgggacgtcctttaaagttgcggatattgtaatgaaaggtcagactataattgataaaacgattataggttttgaaaccggaaactggtctcctcttatgctggagattgaaactatggctattggcagcgtatttagcagcgctactataggaatagttggtgctataatcacagcatatctggcaccctcatccttgttagcatcggcattaactattgctgccgttattgcatttagtattttagcatcttacatagatacaagtttaatagaaaaaattaatacttatttagttccgaggacggggacaaaaattccttcaaagcttcccgctaacgatattagtaggcatttaaatagtaagtaa

SEQ ID NO: 154285 - DNA, 672 bp, Enterobacter cloacae
atggcttggactggatttggtggtggttggtctaatggtgttcatagtggcggtgatgattcaggtagtattggagggggaggtattcaactcgatggaaaaggtaatccagtaaatacaagagcgccaaatgcaaatgatattgtctcgcaatttaatagctatggagggacacagatcacttctagtcaagtatcaaatataagaagtgatgggtatggagggtatgctgctgatattgctggacagacgcatacggtttcatcagaaacaggctcagaaacctcaaatacagtttctggatttacaggtgtatctacaagttcaaatggaaatgctaatggttggaataatgttacatatcagattcaacaggggaggatcccttccgatttttcactgaaacatggtaaggtcggtatcatagtggatgaaaaattcatagagattccttctttaacttcggcatacaatcaaggtaaggcgcaaagaaaatctgcagatgaaaagaaggtattagaaaaaacaagtgaaattattgtcggctcaggggaaaagattagtcataaacttaatgtgcattttgctacaatatcgaaagaacttgcagatgaaattaagcgttttcagggaaagaaaatcagaaaatcagaaaatcagctgatgctatga

SEQ ID NO: 154286 - DNA, 579 bp, Enterobacter cloacae
gtgcccgaaatcaatcaacatggtcaaaccgttaacgatatcgtcccggactggaaatgcgcccgggtcttaacccgcacccagcctgaaagcgtggaagccaccgtgcactgggtgctcggcaagataatggatgacgatctggttccgtttgcggtaatcgatttacgcactgaaaaagctgtagggctggtgagctacatggcgattgagcggtttcaggactcggtggagatcggccgcgtcacctggtcgcacaggatgaaagtcacccgcatcggcaccgaagcggtgtggctggtgttgaaaaatgcctttgatcacaagtaccgtcggctggagtggaagtgcgattcgatgaacaccacctcacgtagtgcggcggagcggctggggtttgtctgggaagggtgcctgcgtcagaaactggtgcgtaaagggcgtaaccgcgacagcgatatgctttcaattattgacggcgaatggccgcaaagggatgcggagctgcgcgcctggctggcggcggagaattttgacggggaagggcggcagattaagcggttagagtcgtttcgctag

SEQ ID NO: 154287 - DNA, 663 bp, Enterobacter cloacae
atgaaaaaagtcattctggctacggccatcgcaattagcacctcatcagtttttgcatccggaacggctgttatgcaggttaaaggtacattaaccaactcagcatgtactgctgagctgggtaacggcggtgttctcgattacggctttattcgcctgggcgagttatccgaaacatccaataataaaatcggtcagaaacagatacctgtatccattaactgcaccgcgccaacaaaagtaggttttaccatcaccgataaccgcggcgacagcaacgcacaacttcctgttgatattgggaagaataagaatattacaaataaatattatacttatggcgtcggtttcacgaacgacgggaaaaagatcggtaactacggcatgtggatgaccggtaccaccgcagacggtaaaactgtggactctattgcgaataaccacgactggtccgcaacaagctggaaatattccggtattccacgcagcgatgccttccagaccatcgcctttgctcaaaccggcaccaccaccccattggctatcaccacggctaactttaacttcgtgaccaacctggtgatttgggatacctctaccctggccattaccgacgataccccactggacggccagaacaccatgacgctggtttatctgtaa

SEQ ID NO: 154288 - DNA, 1827 bp, Enterobacter cloacae
atgagcgataattatttgcagcttagaaaaattttgttccgtggccaaaccaaagaatccgttttatctttttcatccggtattaatgtgatttgtggggcttccgataccggcaaatcatttctagcagaaactctggattttatgctgggtggaacggaactcagggtaattacagaattagctgcttatgcagaaataactctcgattttgtcaccagtgatggtcgaagttggcgtctacaacgtgcagttactggcgggaatttcaagttaactgatttggatgagccagactcgaaacctatcgtgctaaaacagaagtacgtccggggtaaaacggataatatctccagttttttacttgaacagattggcttgccgaataaggagattttgaaaagtagtaccaaagctacgactcagggactgagcttccgcaatctggcgaggcttgctctggttcaggaagatgaaattcagcataaaggctctcccttttggagtgggcagttcacaaccaaaaccgctgaactagcaacggtcaaacttctgctgacaggggttgatgattctgcggtcgttgcagtaagtggcgatggtgtaagcaatacgtctcagattatgttgattgatgagttaattgcggagttagccattgaaattaaggatatgggagaagagcgtgatgatctggcctcccaactgactcgccttgaacaatctattgagagtcaacgtgaatcgcttactgccgcacagcagcaactagagcggttattacagcaaaggggactggcctttgatgagcgaaacaaaatccagggacgactggatgagatatccgaactacttgccagatttacacttctgaatgagcattatgttatagatatcaaccgtctgaaatccattcaggagagtgggttaatcttcatgcatattaacgtggttccttgccctcattgtggagcgagtcctgctcaccaacacctggaacaaatatgtgatggagatgtagattcaatcattacttcagcaactgccgagatgcaaaagaccgaacgacttttggctgagctgaattgtacagtcagagatcttgtcagcgaaaagcaacgccttgagaagcaatgcattgtccatgaagaggattatttgcgtctggataaagccattcgggaaactattgctcctgaagttgacagtttcaggcattcgtatgctgaactgatcgacgaacgggccattgtccagcaatctattgatttgttctcaagattggaccggctggaaagcaggaaagtgaaattacaaagtgatactccggtaaaaaaagaaaaaagtgcggtgcaaaacggcattccagagtctgttgcccatagtctgtcgttaaaaatctcctctatattaaaagactggcattttcccggagcatgccaggtattttttgacaaaaatacttcggattttgtaattgatggaaaacctcgcggtagccggggaaaggggctacgagcaattacccatgcggcagtcagtgtcggactacttgagttttgccaggaaaatgggctatcgcatccgggattcctagttctggattcccctctactggcttactacaaaccagaaggtgaagatgatgtggctttgcaaggtactgacttgaaagagaaattctatgattatcttgtgaagcaccataatgaagatagtcagatcattattatagaaaatccgcatccaccgcaaagcatgaataaacagattactatgacggtattcactggtaatcctagggttggccgtttcgggttgctttga

SEQ ID NO: 154289 - DNA, 486 bp, Enterobacter cloacae
atgaatcataaaaaacatccagagcccttcaatagtcctttcgaaaccggaatacgttcgcttgcgattctggttgcagccttccctgagtcttatgatttgcaacggctggttgaaatggattatctcgttgtgcattccggtgatgctgatggtcctgacagtttgcatgccccactaccgatgcgtgcgggcgaactactagtcaggcatggtttgattgaaaagggattgatgctcatgatgagcagggggctcgtgcaacgtgtttcaaccagtgatgggttcaactatcttgctggcgagctcgcggcaccttttatctcttctcttacgactgaatattcatgtcgactaaaagtttgtgctgaatgggtaattggtgaatttaaagacctgcctacgcaggaaatacggaacattacacatcgcttgtttcagcagtggtcgagtcagttccaaagtattcagtcatctggaggatga

SEQ ID NO: 154290 - DNA, 1101 bp, Enterobacter cloacae
atgattcctgatattgaacttagagatattcagccaaagggaaacagtgatgtcccgtcgtcttcgcacatccagactggattaccgattccaaaaacagtgcgggttcagttctttagccctgacgaatgggagtcgtttacagaggaatgggcaagttatctcaaaaatgaatatgttgcagccagacgctttgggggttctggtgatcttgggatagatattgctggtttctgttctgacaagggattcgaggcggtatgggataactatcaatgcaagcggtatggacatcctcttcggcctggtgatatttgggttgaaattggcaagattatttattactcatatcttggcaaatatacccctccacgaaagcatttttttgtttgctctcagggaatcggaaccagtcttgaacagttgttgaacaagcctactgagttgaaagaaaaatcgattgaaaactgggataattactgtctaaagggtatcacttctactgctgaaattccgttgactggtgcattaagagcttaccttgacgcatttgatttcactattttttcatcaaaatcgatagttgagcttatcgaaagtcatgccagaacgggttttcactcggttcgctttggtggcgggttgccgtatcggcctaacccatcttctccaccaaccataccgacggaaaatgaaagccgatacattcgccagttgcttgatgcctatggagaccatttaggcacaaatttaccagacgctgcttcgttggcgtcacacaatcaatttcgtagtgactatcttcgccagcgcgaacgtttttatcacgcagaatcgctaaagaattttgcgcgagatactgttcctgcggggacatttgatgccttacaggatgaaatctaccatggtgtaattgatgtctgcgaagattatcacttgagtgggtttgcgagaatgaaagaaactatgaagcacgctaccactatcgcggtcacatcgaatccgttggtcacttcaattaaaacacaagatcgccaaggcatatgccatcagttggctaatgacgatcgcctgatttgggtgccagataatgaatcataa

SEQ ID NO: 154291 - DNA, 912 bp, Enterobacter cloacae
atgacgccattttcagacctggatattgacctgatattgacgttggatgcactgctcaccgaccggaacatcacgcacgccgccgcacgtctgggggtcagccagcccgcgctgtcagcccgtctttcgcgcctgcgtgccatttttggcgagccgttgtttatcccttccccacatggacgtggggtgttgcccacaccccgagccgaggcgctgaggcctcaggtcgcggccgttctgcgtggcatcagcgcgatgcttgcccccatcgggtttaacccccgcgagagtaatcgcacgttcgtcattgccctgcatgaaaacccggccctgatgcttggggctgaactgctgaatcacatcagacgtgaagcgccggggattcgcctgcgtttcgccctgccggagtgggtgaacctgccccagcagctggaaagcggagacgttgatatttacatcggcgtgagtgcgggcgcgcacgacggctgggtcagacgcaaactgtttgaagacgcatttgccaccgcccagcgcaaagggcatcctcgcggtacggggccgctggatctgacgcagtattgcgccctctctcatctggtggtctcctcccagggcgatccatttaccggctttgtcgaccagacgctggccgggctgggatatcagcgcaacgtggtgatgtccacgcaaagctatgccatggcaccacctctggtggcggggactgacctgatttgcaccttaccgggacgcatgttgcagcagttcgccaccacgctcgatattttcccgcccccgctgccgctccagccgatcgccatcagcatgttctggcatcctaaaaacagtcaggacacggcgaacgcctggctgcgcgaacaactgctgctggccgccgggcgtcaaccctga

SEQ ID NO: 154292 - DNA, 1491 bp, Enterobacter cloacae
atgcaaaaccccatcaacgatctcagaagcgccatcgcgttgctgcaacgccatccaggtcactatatcgaaaccgatcacccggtagatcccaatgctgaactggcgggcgtctaccgccatatcggcgcgggcggtaccgtaaaacgccccacccgcacgggcccggccatgatgttcaatagcgtgaagggctaccccggctcccgcatcctggtaggtatgcacgccagccgggaaagagcggcgcttctgctgggttgtgaaccctcgaagctggcgcagcacgttggtcaggcggtgaaaaacccggttgcaccggtggtggttccggcctcgcaggcaccgtgccaggagcagatcttttacgccgacgatccggactttgacctgcgtaagctgcttccggccccgaccaacacgccaattgatgcaggcccgttcttctgtctggggctggtactggcaagcgatccggaagatacctcgctgaccgatgtgaccattcaccgtctctgtgtgcaggagcgagatgaactctctatgttccttgccgccggtcgccatatcgaagtttttcgcaagaaggccgaagaggtgggcaaaccgctgccggtaaccatcaatatgggacttgacccggctatctacattggggcctgtttcgaagcgccaaccacgcccttcggttacaacgagcttggcgtcgccggggcattacgccagcaaccggtggagctggtacagggcgtggcggtaaaagagaaagcgatcgcgcgggcggaaatcatcatcgagggcgaactgcttcccggcgtgcgcgtaagagaagatcagcacaccaacaccggccacgccatgccggagttcccgggctactgcggcgaggcgaatccgtctctgccggtgatcaaagtgaaagccgtgacgatgcgaaaccacgcgatcctgcagacgctggtgggcccgggcgaagagcacaccacgcttgccggtttgccgaccgaggccagtattcgcaacgcggtcgaagaggccattcccggctttctgcaaaacgtttacgcccacaccgccggaggcggtaaatttctcggcattttacaggtgaaaaaacgccagccgtcagacgaaggacgtcagggccaggcggcacttatcgccctggccacctattccgagctgaaaaacattatcctcgtggatgaagacgtggatatcttcgacagcgacgatatcctgtgggcaatgaccacccgcatgcagggcgatgtgagcattaccacgcttccggggatccgcggccaccagctggatccgtcgcagtcgccggactacagcacctcgatccgtggaaacggcatttcctgcaagactatcttcgactgcacggtgccgtgggcgctgaaggcgcggtttgaacgtgcgccgttcatggaggttgatcccacaccgtgggcgccggagctgtttgcgacgaataagcaatag

SEQ ID NO: 154293 - DNA, 426 bp, Enterobacter cloacae
atgcagacgccggagcaggcagaatttccggcggtgctcggctcgctgacgccgctggcaagctggctggaagagaggctatgcgcgcttaccgttgatgatgaatggcgtttcgcgctcgatctcgccgtctgtgaagtggcgacgaatatcatccggcatgcgttgcatgaggatccctcaagcgcattccgcgtgcggttcgacatccgcgacagcgacgtctgccttatctttaccgacgcaggtgaggcgttcccgcaggagcggcttgatgccgccagacgagaccgattttgtgaaacatcgccattgctggagagcggcagagggttgatgctgattttgctgagcgtcgatcgttttacggtggagcgcgtggcgggtgagaatatcgccacgcttgaaaagaaaataagcgtatga

SEQ ID NO: 154294 - DNA, 2172 bp, Enterobacter cloacae
atgattcgtaactgcacgctgctttttgcattgttgaccccctcggtgatggcaacttcagtaccgataagctggtctcttgcgggtgtatggcaggttcaggacgccaacgataacccccggcctgccggggcaggctggcgtaaactgaacgtacctgccaactggtatagcgccgggtacgatcatcagggggcgttgtggtatcgccacgcttttaccctccccgctcaaccgcccgatatcatgaccaccctggtgtttgacggtgtcgactacctggccgatgtcacattaaacggccagtcactgggccagcatgagggttatttccagcgcttttcgctggatgccaccggcgcgttacaacgtcacaaccagcttataattagggttgatagccccttcgaagatccgcagacggtctggcctctgcataaaaccgccatgaaggggattcttaatcagcatgacactcgtccaggcggggcgtggtcacctgaaggtcaggatgcgaactctggcggcatctgggcaccggtcagactgcatcttagccggggagccaccattgatgacattattctgcgccccgactggacgcagggactgacgcatccggcgttaaaggctgagatacgctatcgcgccctccagtcggaacgcgctaccgtgcggcttaccgcaacccccgccaacttcaacggcaaacgctttgaggctgactttccagtcaccctcaaaagcaacgcccattccgtgcaggttacgctgcccatgacgggggcaaaactctggtggccggtcggcacagggaagccacacctgtatacggttcgcgcctcattacgcgataaaaccgggttaatggatacggctgtcacccgcaccggactgcgcaagatagtagaacagccgggtaacacaggctggcttattaacgataaacgcctgtttattaagggcagcaattacatcggctccccgtggctcagcaccatgacgcgcgagaaataccgtcgcgatcttcgtctggttaaggccatgaacgccaacgccatacgcgtacacggacacgtggcgggtcgcgcgctttatgaggttgccgatgagatgggaatgctaatctggcaggatgttccgctgcagtggggctacgacaacagcgaggcctttacgaaaaatgcggttcgccagactcgcgagatgatcgaacagttcggtaattcccccgccatcatcgtctggggcggtcataacgaaccgccctggaattcaccctggatggaaaaacgcttcccggactggaataaaaaccttaatcgcgacctcacgcaaaaagtcgcggatacgcttgccgaagatacctcccgcattgtgcatcgtttttccgccgtggaggagcattactgggcgggatggtatttcggtaccgtacgcgatctgcttgccccggccaaaacgggtatcattaccgagttcggtgcacaggcccttccccgcctgtccacgctaaaaaccattatcccggcatcacatctgtggcctaaaacgaccgccgccgacgaccccggctggacgctctggaaataccataattttcagccgttccagacctttaagtttgccggcatcgcgcgcggcaataacattaaacagatgatccgcaatacgcaggcctatcagtcacaactggtggccacggcggcagagagctatcgcagacagcgataccagccggtaacggcactgttccaattcatgtttgtagaaacctggcactctatcaactggggggtggtggactatttgcgcaaacctaaagccgggtatttcgcattaaaacgcgcgtatcagcccatcctgccctccattgagccggtcactgcgcagtggatgtccggcgcagcggcgaccctgcgtctttgggcaatcaatgacacctggaaaccgtgcaatgaatgccgtctgatatggcgtgttacccagcgcgataaggtgctggcaaagggcacgatgacaatgacgatcgccgcagactccggaacaatggtaaaagcgcttacggtcacacccgtgggtcaggacgcggtgttgatcagattcgcgatcaaaaacaaagcggggaaaaccgtcggagataatcagagaacagaatccgtcataaaatga

SEQ ID NO: 154295 - DNA, 735 bp, Enterobacter cloacae
atgaaatattcagctctgactattggctgtatgatgatgttttctggttttagttcactttccatggctgaagatgcaaaaaatgttgatgcagtacccgcaccaagacacggcacatcagaaatgccgccttcccggcagtattattgttacagtcaacaagattacggcgggggtagcggaggcataaaaaatgctgcatgcaaggcggcatacgaggccgcaggcagtgaaaactgggagagggagcgattatttaataactggaatgcttactctcaaaatgcccctaaagatcaatggcaaacaaaggtacctgacgagcaattatgttcagcgggcattgaaaattataatagtattaatctgcccagtgcggattggtacacaacggaactggaagtaaaagagggtcgcgtcgcgctagattataaagccagccagatgcacgaccccagtgaatttacagtttatttaagcaaacctgattttgatcccgccaccagtaagctgaaatggtcggacttgcaggaatcccccgaggtgaaatttgtgggtattccagatggtacgaaagccgtgcccggtcactacaaactcgatgtcaaattaccggaaggttataccaccggtaagaaagccattatttatatcgcctgggcacgtcatgaagatcccgcgcgcgagaccttcttcagttgcagtgatgtgatcctcaaaaatacagcaggctaa

SEQ ID NO: 154296 - DNA, 336 bp, Enterobacter cloacae
atgcagatagaacaaaacttccgggacgacaaaagtccacgcttcgggttcggtctgaggctgagccggagtcagggaaaagggcgactggaagtgctgaatatggtcgcggcaatggcaagcctggtgatgtggctggcaggttacagggcagaaaggcagtgtttacactggcactatcaggcaagcagcatcaggcacagacgggttctgtcatacctgagtctggcagaagaagtcatccggcatgagcccgggaaagtgagacggctgaatatagttaacgagatgaaaaagctgggaaaagagtacagtaatatggtcatggttgcatga

SEQ ID NO: 154297 - DNA, 1902 bp, Enterobacter cloacae
atgtctgttgagttaaaagtatttggtggtgcttacttcccaaaagataaagcattaaaaaaacatcccgatttaaaaccacttgcaaccgcagttaattcggccacaaaagccatcgctgaggccgttattttcggtaagcttgcggctgaacatcctgaacatattgatgattattttaaggtgaaaatctgggagcaccatgatgatctcccctgccctgagcttgatgtgtttagctctgatttctttggtgagcacgttgtctggaataccaaccgcggtgaaccagctgctgcaccacaggcagagactgaagcaaaggaagaatgggaggacaacaagactcaggaagaaattaaaatcgttgcgcagctcgaccaggcatcccgcgcagcttgtctggcactgtttggcccgatccctggaatcacttcagcgcagtatggccagatcgtcgatttgaagaatgacgatgaacccagctttgcccgcgagcttgcagaagcactggcaaaagagcgacgcgcgcttgaactggtgccggaacgccaggcgcaattactctcctggttacgtgagaacaccaaagaatctgcacagtggccggacattaaaaagcagatcgctaaatggatcgatacaccagttgataagcgtcctctgtctaccaccaccacagaagaaaaccgtacagacaccggctccacgctgggtggtggaaacaagacagaccgtagcccggatctggttcataacctctctacgctgcgtatcgaagtggctattgccattctgagtatgtacgacgagatcgacatttactggatcccgaataaatacatgattccagcgaaagcaatggcggaagccgcacaggatcctcgttttactgcatggtgggcacagctacgcggtacccctggaattttggactattcgcgtgcgtccatcatcgccctgatcaagtcagcaccagaagacatctggctcaatccgatcaaattacgggagtacatcaatcgcgagttggttgaatctgaccacgcgcaccctgaccagaaaacaattgatacggcctgccgcccaaaacctcgcaccaaagctgagaaaaaagaaaatgatgaaaccgaatcgactgtaccgggcgaaactgagctaccagcagtttgcccgggcaaagctgcgcaactcgaaaaagaactcaacgagacattcgctcagagctccgcgccagaacagcagaccactgaccagccacgggtggagaacctgggcggcggcgtcttctctgtcgatgcattgttgaacacagccccctcaaatgagggcgaaaaacaggaagcaccaccagctctaaatgatcgcgagattgaaatcgcccatgcattaaacgaactgatgtctggccggacaaatatcgttgacaatgacgatattgaatacctcatcgccaccacgggtaaagagatcgagcagattatcccgttactgattgcagatatcaccgcgacagaattctgcctgtcgcctgatttcagtgatgaagaagtacaggatgttgccactacgattcttgaaaagtggtcagacgatatcagcgttcgccagaaaatagcgcttgatgcgatcgtggaataccgccgtccggaaccaccaaaatctgtcgtgctcgatccgccagtagttactgcaaaaccgattgccaccccagaaccagcagctgtaacaaacgcgccactttcgcctgttacctacctgcaacagcttaccattgcagcgctgcagggcttatgttccaacccagcatattgcaatcagtatgaggaattaccggctatggccgccgggcttgcccgcagcgttatcaatcatcaggaaggctccagtgcgtctgattaa

SEQ ID NO: 154298 - DNA, 420 bp, Enterobacter cloacae
atgaaaacgatcggtcagcgtataaaagagcggcgctctgctttgaaatatacccagcgcagcctaggcaaacaggctggggttgctcatgtcacaatctctcagtgggaacgtgatgaaacctcaccaaggggcgataatctcttcaagttagctgcggctctgggcgttgaacctggctggatcattaaaggcgatgacggatacgaacccgccccagcagaatcgcatcggttgctgtcaccgcaacagattcagcttctggaactgtttgaaaaactcccgaattcagagaaagagcaacacatcatcaacttgcgggacaaggtcaaagactacgatgaaacgttcaatgacctgataaaaaccaaaagcaaagaagaaatcctgcagatcctcaaaaatctcgacatcaaataa

SEQ ID NO: 154299 - DNA, 213 bp, Enterobacter cloacae
atgaaaaccgaagatgtaatcaaacactttgggaaaaaagccaacgtggcgagggctctcaacatcgctcgatcctctgtgagtgagtggggggagttagtacctgaacgtcgtgccgctcgactggaaaaattaacgggtggtgcattgaagtacgactcagttttgtatgaacacaaggttaaccccaaagcccctaaggagtctgactga

SEQ ID NO: 154300 - DNA, 717 bp, Enterobacter cloacae
atggaatctgtaatcgacgcactgaaagccatgaaaaaagcgacatatcgtgaggtcgccgcccgtcttgatattgagcccgtagaagcgctgaacatgctgcgcgagcacaaacagcagggtttgtgtgatttcttcgatgggtcatggtcagtcggtaccgcgaaagagcaggccagggaactggcaaaagcaccagctgtgacgccagtgcatcaggcaccgcgtctgaaaggtgaggaaccaccaccggttgatgctgaggccgtccgccaggtgctcgtcaaaaacggagctatgaccaccgcggcactggccgcagctgttaaccgtaatgcccgcggcatggtatcagtgatgctggcgtttgagcgccagggtgtagttatcaaaaacggccaggggaagggcgtgacatggtctctccctgtaaccggccagactgaaacagacagcaccgaatcggtacaacctcagtcaggcacgctggataacgagttagcttcatcgccagataccaaatccctgaatgaaattattggggatattcctgcgttcaccgcccgacctgatgacctgattattccgtcatcgcgctttatttcgaacgaaattcgccgcacaaaagcgaagctgtcaaacctgcagcgtcttcagggtgccgttcgggagctgcgtcgccataaacacctgctggcaggtatcagcgatgagtga

SEQ ID NO: 154301 - DNA, 261 bp, Enterobacter cloacae
atgccaagaccaaaaacgcatgacgagcgcaccaggattatcaaccggattatcgaactggtgaaagagtatgggcgcatcacgacgaaagatgtcgttgcgatgttcaacctgcatcgcacaacagctgagaaatatctccgcaccgctgttgagcagggcggcctggttcgtcacggccgttgcggtattttccgcgatcagcgcgcaaccatcgattttgacctgaaacgtttctcgaataataaggcggcagcatga

SEQ ID NO: 154302 - DNA, 213 bp, Enterobacter cloacae
atgagcaagattaaaacccataccggaacggtgatcaccaaagacggagagaaaagagttctgctgtgtgaaacagcaacagcttggtgtgtcgagcgaaaagaaacctattgcaaagatgacggccgtcgatgtggcgcgcctcttagaaagcgacgccagattctgagtagtattaaacttattagaggcgaccacatggcgatactttaa

SEQ ID NO: 154303 - DNA, 303 bp, Enterobacter cloacae
atgggtaaaatgaaagaattcgctttggaacaactacaacgcaaagcggaaatccaatggcttgaagccgaaaaagatcatgagatcaccgaaaagcaggcagaaattgacgctttaaaagaagggatgccaaaaaccttagaagagtgtcacgaaaacattattcttcttttggagcaaaatcgtattcttaacgggaaagttatgaaaatgagttcgcgaaaagaactgcttaaaaatcagtgcattggtttcggactgggtatcttggcatccatcatcgcatcgctacttcttgggtaa

SEQ ID NO: 154304 - DNA, 417 bp, Enterobacter cloacae
gtgaaaaaatttttacttttgggcttggtgttaccagttctttctggttgcgtgatcaaagaacaaacaagatatatcgaaactcccgccgctgccaaccttaacaatatggttaatagtcagactggtgcaattacaaaaaaatgtagcataaccaattataaagaagccaaactggatagccaatcgccttcgggaactgtgattatcgattacgggaatcgtttcgacattatgttcgaaaactatggaaatggtgaagtattccacagcccagtattgaatcgtgctaaagaaaatatgattattggattttccggaagcatgatgtatagcaaaggcataggaaagatggctgggttttacggaacctataacacgcaaacaaagtttaatacagtcttccaatgctattga

SEQ ID NO: 154305 - DNA, 324 bp, Enterobacter cloacae
atgggttttccatcaccagcagcagactacgcagaacaaactctctcaattaccagtatctgcggttatgacagcaactgccgaaccatcgaaacctcttccggttacgcaatcatcaacattgccagaaaggcgaagattggcgacacggtgctcatttccttctgtggaaagctggacttcgcctccgttcaggggaaagcactcatcacgcctgacggagaggcgattgaaggtgatgcgctggacgatgcgaccgttcttggtgttgttacataccttctgaacagcgttaccgacacagatgacaggccagtgatatag

SEQ ID NO: 154306 - DNA, 219 bp, Enterobacter cloacae
atgaaattgaatgaatttgccgcaggtcttactaaagacggactgcttgttttgtgtctgtctgacggtgaaataaccgactatgtcgtcagcaacaatgctgctcgcacactgataaggcgtaaaggtaaccggctgtctgcccaggttattagtgatgatgagcggattgtaaaccttaactccctgccggatgcacttaaggttctcaagcagtaa

SEQ ID NO: 154307 - DNA, 1299 bp, Enterobacter cloacae
atgacagcagaaatcgcggtttataataaacttgcagtatcgttagcagccgattcagcagtaacgattactggcggtaatactgtaaaaatcaataatggcgctgagaaattatttgcattaagtaagcatcaccctgttggtctaatggtttatggtgcagggagtttgtgcggcgtaccttgggaaatgattataaaggaatatagaaggcaacttggcgatatctgttacgatactgtcgagcaatatgcagagaaattctgggctttcttatgcgatagtaatcacataataccagacgacattaaaaacaatcatttagaggagatgcttctctataatgttctcccgggattgatgcaacacattcaagattttccagtaaaaatgtttattgaagaaaatcagcgtcaccctaacacacttgaaacctataatattattgaatttgcctgtaaggaattcgttaataattttaatggaagtgaattctacaaaggatttgatgatagcgatcttagtaaggccatagctttttcaaacccaattgccaaagaagcatgtgagtcaattttatatcgtgaagaagggataaccattccacatagtttgattgatgcgcttgcgacaatgtttgcccacataatatgcagaaaatcaccatttggaacaaatactggactcgtaatagcaggttatggtgacaaagagtatttcccaagtattttagcttatgatgtcataggttttttcggtgaaaagctaagatactcaccaaatatggacaaaagtacaagtggtggcgagagtggcgtcactgcctatgcacaggaagatgaagtaagtgcattcatgaccggcatcagtggagaacttcaagaatatatgttcccccaaattgaaaagggagcggaaaaaatattgagtgaagtggccgataaaatcaaagcatcctcattacctgccgaagagtgcgagtcgctgataacgagtatttatgattttgctacatctaattgggcaacaactactagtgacatccgagattatattattaacaaccacttaggtaaggttgttgaaatgattgagttcttaccaaaacaagacttgggctacatggctgaatccttagtcaacctaacagcgttcaagagaaagatctcaaatgacagtgaaactgttggtggtccgatagatgttgctataatatcaaaaggagatggctttgtttgggtgaaacgaaagcactactttgataaagaacttaattatcagtactttaaaagaaactaa

SEQ ID NO: 154308 - DNA, 960 bp, Enterobacter cloacae
atgaaactgtcacgcgtgagtgcgattaactggaaccacattcaggatgataaggacctggaggtgtggaaccgcctgaccagcaacttctggctgccggaaaaagtgccgctttctaacgatattccggcctggcaaaccctgagtcatgccgagcagcagctgacaattcgcgtctttaccggtctgacgctgctggacaccatccagaataccgttggcgcccccgcgctgatggccgatgcgctgacgccgcacgaagaggcggtgatgtcgaacatcagctttatggaagcggtgcacgcccgctcctacagttcgatcttctcgacgctgtgccagaccaaagatgtggatgcggcctacagctggagtgaagagagcgagtcactgcagcgcaaggccaacctggtgctggattattatcaggccgatgagccgctgaagaagaaaatcgccagcgtgtttctggaatcattcctcttctactctggcttctggctgccgatgtactggtcgagccgcggcaaactcaccaacaccgccgatctcattcgcctcattatccgggatgaagcggtgcacgggtattacatcggctataagtaccagaaagggctggagaaagtcagtgatgccagacgcgaggagctaaaaggatttgcccttgatttgctgatggatctctatgataacgaactgagctataccgaagagctctacgccggaaccggctgggaagaggaggtaaaagccttcctctgttacaacgccaataaggcgctgatgaacctcggctacgaggcgttgttcccgccggaaatggccgacgtgaacccggcaattctggcggcgctctcccccaacgctgatgaaaaccacgacttcttttccgggtccggctcatcgtatgtgatgggcaaagcggtggaaacagaagatgaggactgggatttttaa

SEQ ID NO: 154309 - DNA, 2118 bp, Enterobacter cloacae
atgcaggcgacaccggactaccacgccttaaacgcgatgcttaacctctacgatcgcgaggggcgcatccagtttggtaaagatcatgacgccgtggacgccttttttgccgcccacgtccgtccaaacagcgtgacgttcgccagccaggatgagcgtctcgactacctggtcaacgaagggtattacgaagaacgcgtgctctcccgttacgaccgcgcctttgtggtcaggttatttgagcgggcccacgccagcggttttcggttccagacgtttctgggcgcctggaagtattacaccagctacaccctgaaaacctttgacggcaaacgctaccttgaaagctttgaggatcgcgtagtgatggtggcgctgaccctggcccagggcgatgaagccctggctgaacagctgatggaagagatcctctccggacgcttccagccggccactccgaccttccttaactgcggcaaggcccagcgcggcgagctggtctcctgtttcctgctgcgtatagaagacaatatggagtcgattggccgcgcggtaaattcggcgctgcagctgtccaaacgcggcggcggcgtggcgtttttactgtctaacctgcgtgaagcgggtgcgccaattaagcgcattgagaaccagtcatccggcgtgatcccggtgatgaagatgctggaagatgccttctcctacgccaaccagcttggcgcgcgtcagggggccggggcggtctacctgcacgcccaccacccggacattctgcgttttctggataccaaacgcgaaaacgccgacgaaaaaatccgtatcaaaaccctgtcgctcggggtggtgatcccggatatcacctttaagctcgccaaagagaatgccgacatggcgctgttctcgccgtatgacatcgagcgaatttacggcaaagcgtttggcgacgtggcgataagcgagctttacgacgagctggttgccgacgatcgcattcgcaaaaaatacatcaacgcccgcgatttcttccagcggcttgccgaaattcagtttgagtccggctacccgtatatcatgtatgaagacacggtaaaccgtgcgaacccgattgccgggcgcatcaacatgagcaacctctgttcggagattttgcaggtcaacagcgcgtccacttatgacgagaatctggactacgccgacatcggcaaagatatctcctgcaacctcgggtcgctgaatatcgcccacaccatggattcccccgattttggccgtacggtcgacacggcggttcgcggcctgacggcagtatcagacatgagtcatatccgcagcgtgccgtccattgaggcaggcaacgccgcgtcgcacgccatcggtctggggcagatgaacctgcacggctatctggcgcgggaaggcatcgcctacggcagcccggaagggctggatttcaccaacctctatttttacaccatcacctggcatgcgctgcacacctcaatgatgctggcgcgcgagcgcaaccagcgcttcgcgggctttgagcagtcgcgctatgccagcggggaatatttcagtcagtacctggagggcgactggcagccgaaaacggagaaagtgcgcgcgttatttgcccgcgccgggatcgttctgcccacgcgcgaaatgtggcagcagctgcgtgacgatgtgatgcgccacggcatctataaccagaacctgcaggcggtgccgcccaccggctctatctcctatatcaatcacgccacgtcgagcattcacccgattgtgtcgaaaattgaaattcgtaaggaaggtaaaaccgggcgcgtctactaccccgccccgtttatgaccaatgagaacctggcgctgtatcaggacgcgtatgaaattggcccggaaaaaatcatcgatacctatgccgaagcaacccgacacgtggatcagggcctgtcgctgacgctcttcttcccggacacggccaccacgcgggatatcaacaaagcacagatttatgcctggaagaaaggcattaaaacgctctattacattcgcctgcgccagcttgcgctggaaggcaccgaaatcgaaggctgcgtgtcctgcgcgctgtaa

SEQ ID NO: 154310 - DNA, 1050 bp, Enterobacter cloacae
atgttactttctagcggttggtgtttagccaactcgaatggattgcttggtatctcgacacaagttagccttgtgtcatttatagacaccaggctaacttgtgtctcgggaactcttgtatgggcaataatcatgtggtttaaacacccaagatatttacgtgcaaaagaaaatttcatttcaagtttttttcccagcaacttgaactcgttcaactatatcttacccaaagtattatttatttgcggtggggatgaggctttttgctcaaatagagggttgcttgaaaaatatatcactaaacatcataaagagtttataacttttagagcagaattagcatgggaagtaattagtaatttaggcactcatcgtaatgtgaatgcattatcgctagaagagtggcttgctgatttttcagatgttgtaattattctcgtagaaagttatggcactgtagctgagttgggtgcattttcattaagcccagtattgcggaagaaacttcttccaatcttggataaaaaatttgaaagtcataagtcattcattaacacaggcccagtaacttgggttaatagtgaatcaaaatttggtcctacgatctatactgaattcgaaacgattttaacttgcgtgcctaaaataaatgaaaggcttaacaggaaaattcaatcaagtatagcggattcaaatttgattggtgactataaatactctccgaaaatatttctattctttgtattagttgttgtatcatctttagggccaataacgatacctgagataatcaacatcacagggcgattgataaattataagaacaataaaaatatctcttttgttgtgtctatcggtgttgctctgggcatttttaaggaaagtaagtttgaaggtgtgactcattattcctgtgtcgattatgttaagttgttcaatcatgaaacgatgaaaggtttaattgaaagtattcagcgcagcagagctagatcattatccgatttaataatgatatcgaaatttaaagcagagttagaaaggattatgtaa

SEQ ID NO: 154311 - DNA, 930 bp, Enterobacter cloacae
atgctaattgaatatctagcgaaggtattgctgttagaagccgattttatttttaaagtagcaaatgaggctgactcccattatggaaagttctctattcctaagaaaaatggtgggactagaatagtttatcaaccttcaaaagaattaaaagtgttacagagattgcttcatgataatgtattgtcgaaattaccgattcatcctaatgctgtagcgtatcaaaaaggatcgtcagtttacaggcatgcaagtattcacaaagcgaagcgtttcatgctcaagcttgattttgaagctttttttgattcgataacgaaaaatgatattgaagaatacataaatgataacaaacacattttcggtgacaaatggtcaaaacatgatacagatttgctaataaaattagtatgcttcaacggaaggttgactatgggggcggttagttctcctgtaatgagtaatgctatatgctataaactggatcatttattgactgagtattgtctttcaaagggtgtgacatattcgcgttacgctgatgatatgtatttctcaactaatgaagagaatgtattgaagcttatacctccctttttaagattaaatttaaaaactcttagatatccatcaaagttatggatcaatagaaaaaaaactttgcatatgtcaaagaaaaataaaatgatggtcactggtgtaactttgacaactgatggtggggtatcattaggaagggataaaaaaagaatggttaaggctctcattttcaaatggacgaatctttctgaggaaaagcgtcttttccttaaaggatatttatcgtattgtaaaagtgttgagccattatttataaataggctgtgtgctaaatattcttcagagttgatcgatgaaatacagcggtatcaacccgtagtatcaaaataa

SEQ ID NO: 154312 - DNA, 948 bp, Enterobacter cloacae
atgaaaaaggtttcgattactcaggaagaaattaatcaaggcgagggtaattttcacgattacatgagctacgtgagagatcgcttgtccgccaagtttgttgaaccaagttattcactttttgctgcagcacaccttatttctgcagatggatacaaaatagttttagggtctaatccggatgatgctgggctatcagtgacaaattggttggcaaatttttatggagataggcagcatatttcctattgttttcctcctattgcctatcaaatcaatgggattttatattgtgtcagaatgcctattgaaagaataaaagaaattcctttactggaggccgtggtcggtctgactgaagaagctgtaatgagaattaccagtagtaaactagaaaaacttcaggctgactataacgaattttatacgatgttctatgacattagccgttttgatgtcactactataattcatttagaatcagctgcagatcggctactcgcaggagctgcccattatgcgctttcccgatgggaaagccttcacttcatcgaacgtgcaatgaaagaggttttggaacagaaaggtgtaaggttgtcgggtagtaacggtcatgacattagtggcgcacttcatcgtgagtggattaaggctggatttcctgctctccctattgaattacttcagaaggttatgtgcactcccgctattcggtatcagagaactccgtatccctttattgcttctgttgctgctcaccatgcttcgattcgcttggccgcgattatagcaagggaaatacctcaagagcctaaattaaaagataaaatgattattaacagctcagtcttgtttcgtgagggggcattggctatcgctcgcttatataaatcgatggatcctacatcagaaacatgggaacccgtaaggctaatatctccctcttga

SEQ ID NO: 154313 - DNA, 579 bp, Enterobacter cloacae
atgactactcagctttcatttcacgatcataatttttcggttgtaactcataagaaccagatctggctaaccgcttctgatatagctgccgcacttcaatatgctgatgataaatccgtgctccgtatacacacgcgtcatgctgatgaatttacggacggcatggcttcggtggtcaatttgaccaccagaggcgtacagcgtgaaaatcgtgttttctccctgcgaggggctcatctgatcgccatgtttgccagaacgccggtcgcaaaagaattccgtaaatgggtattagacatcctcgataaagaagttgtggagcctctccaacaagtgagtcaggcttcggttagtcaaaattatgctgtgatcacctacttcgaaaacagcctgccggtggcgtgccaccctcttatgcctggtgaagtagttatgaaccccgattcatgcctggaacatgtgatccgttccggctatgtggtaatgccgtgtgatgaagcggaaaaattcacgctcggcgagatacagaaaatgatcgccatagcacggcgagcacgtgatcgctggatacaaccgtaa

SEQ ID NO: 154314 - DNA, 702 bp, Enterobacter cloacae
ttgccggctgatgcgcgtaaaaacctctcagcagcttcatcaggaaacaacaatgatataacggggttgacgggtatatcgaccatactggctcctgctgcgggcaatcccagcggcggaatcatcactaccaaagcgaccaacagcacatctaccagctttgtgaccaagggttttacccagcgttatgggacagattcgtggactatgaacgcttcctttggcgcttacatcaatggaagtggctcggcggcagcttgcggtccgtacattggcacctttgattcaggttcttttggttcgttctggtatttcatccagggtgggagtgttattcaaaccaataacgggaatatcacccccgtagcgtctgatgagcgggttaaaaacattgtgcgcgagattaccgaagatgaagcagtagccttcataaccgggctgaaacccatccgctattcgtacaagtggacaccagaccaggtgcgtgttggttacagcgctcagaacgttgaagctttagatcgtgagttggtccaggtgtctcaactgtcagtatgggatgaagaaaccgaagaaaacattatttatgaagatggtaaaattattgatccaggagaaataggtgctgcttatttagtacccgttgttcagcagcttcttcgacgcataagcaaattagaagagcaaataaaggcattataa

SEQ ID NO: 154315 - DNA, 267 bp, Enterobacter cloacae
atgaagaaatatttaagattgaccatttcaggcctgcatcgtgttgatgaaggaatcctaatcggcggaaatgcgacagtaatagtaaaccgtggcggagaggttatttgtcgcgagaagttttctggcaaagtttctgataaatattcaaagctatatgaagttgaagacaccggtattccagtatcagtaacgtcttccagtgattgtcagtttttcaaggcagaagttgattttgtaaacccatttagcgaaacaaatatctaa

SEQ ID NO: 154316 - DNA, 237 bp, Enterobacter cloacae
atgtttgaaaaatatgcgaatgttgtgtatttggctttattcactttcgttatggctagggtgcttaatgtagaagattttggaataataagtaatgcagaagctattgtggcgattatttctatattttctttccagggacttgagcaactcgttcagcgcgaaattgttaataaaggagaagatgaagggaaaattctaggtgcggctatactcttcaaaggctttgttgaataa

SEQ ID NO: 154317 - DNA, 648 bp, Enterobacter cloacae
atgccggagtcgcgtaagaagcaggtgctggccctggcccagcggcacgatatcgtgatcgtcgaggatgatatctacggcgagctggcggcggaatacccgcgcccgcggaccattcactccatggatattgatggccgcgtgatcctctgcagttcgtttaccaaaaccgtggcgccagggttacgcgtcggctggattgtgccgggacgctactacgaccgggtgatgcacatgaaatacgccgcgggcgggtttaacgtgccgggcacgcagatggcggtggcggcgtttatccgcgacggccattatcatcgccacgtgcgccgtatgcgccagatttatcagcagaatatggaaacctatacctgctgggtacggcaatattttccggcagacatatgcgtgacgcgcccgcagggcagttttttgctgtgggtggagctaccggagaaggtcgacatggtgtgcgtcagcaagcagctgtgccgcctgaagatccaggccgcggccgggtcgctgttttccgcctccggaaagtaccgcaactgcctgcggattaacgtggcattaccgccgacggataagcatcgcgaggcattgaagaagatgggtgaagcgattgtgattgcgatggaggagggctag

SEQ ID NO: 154318 - DNA, 1017 bp, Enterobacter cloacae
atgatgaatccgactactcttaatttaaacgaatctttattgaacttgcaaatattggattttaatttagatacagaagtccattactctgcagtagtttatggcgttgatggcaattttttgatgcactgtgggatttcgttgttatctatagttcaaaatacaccggaaaaaacgttacattttttcattattactgatcaaaaaaatgaggttgaatttgccaggttgcaatccgtcatagaaaatacgcagcatgcgcttacgattattatcatctctgctgaaacgctgactattttgcctaagacatcagtttttcctgttgcaatttattttcgtcttttagctccatatttaattaaagattatcgtcatttattatatattgacgctgatattgtagcattgaatagcatttctgatttaatagaggattataaacctcgagatcatatttgttgcgcagtcaaggaaccagagcagcaattgcttttatcaaagtctattaatatttcggatggcgattatttcaactctggtatgctctatatcaatgctctgaattggaatgaaaacaatatttcgcaaaaagttattgaatgtttattggaaagaagaactgaatttaagtattttgatcaggatgccctaaatgttgttctacataaaagagttatgtttgttgatgaaaaatataatcggcaaattaagacggggcataagagtgcagattttatgtgtgaaccacctcaagaaacaatttttctgcattatgttggtagtgataaaccatggcagctttggaatcaacagaatattagtgctcactatcgcaagtataaaaaattatccccctggtgtgatgttgcggatgttgaaccacgttgtgctaaagaattaaagaaatactataaaatgctccttatcaaaaaacagtttgttgaggctttctatatttttattaaatatcattttgtacgtctccttgaaaagaaggcaaaaaagtcatgttaa

SEQ ID NO: 154319 - DNA, 1269 bp, Enterobacter cloacae
atgttaagtcgtgcgtatattaaaaagttaaatgtaaatcttattttcattcttattgtgttttctattggtagcgatcttttcatggaggcatatccaagaaaactattctatatgagttgctatctttctattttgggacttgttttattggagagttggaacaactttcgtcagtggctgtttgataataggatagctatgacttttatattaagtattgtacttcttggggccagtaagttgatatggtctataagtttttcgtcagcgcatttgcaagatataaaggataattactatgctggtggaaagttgcttatcctggctggtctaatagctttttatttgcttaaatctgttagcgagataactgatcaaacctggaaatttgctgcttgcattagcctcgtgttaggtataattacagtttggttcggttatcaacaacaagatataggtgtaaatagaatcaaacttttggcagatgcggcaacaacagctgcttatataatggttattcagtcaatagtttgtatgtctttattaaaaaaaactatcgcaaatccgtcgtggcggatgttaagttttgcggtaacatttattgtgttttcttatttgttattaatgactgaaacccgtggtgccataggtactttttttattgtatgctgcgttttagcctgtattgagcttagaaacgtaaaatttcgatattggtgtctggctgtattgacgatatcggttattggatgcggcatagcctataagatgcaaaagagaattttggaggcatatgataatatacagcaacttcaaaacgataatgctaatacatcattgggagcacgttttgtaatgctcgatgcaggatttcatgtagcaagcgtttctctttttggtcaggatgctgaagatcgttataataaagcaaagctatatatttcggaaaattacaaaagtcgagaggcaatcagagttattaagtatcattttcataatgaaataatagaaagctttagtttgcaaggggtttttggagttgtttctctggttttattctatattagttgtgtcatggcatcatttgtaaaaaataaccgattaaattctgggttgctgctttatattacagcgctactcttgatgggactcactgatgtcctgctcattcaacgaaatacggctatggtgattggtgcttgtgcagtagtcttacttctctgccagagtgcgaagaataaaaattttgcaaaccttgatcgttag

SEQ ID NO: 154320 - DNA, 699 bp, Enterobacter cloacae
atgaacgcactgatcaaaaaaggaatgctggttacagcgttagccttgtcggttaatacagttatggctgcacaaggcattgatattaaagtaacaggtaaaatccttccatcctcatgcaccccagccttcccaagcggcggcggtgtggctgacttcggtaccatgaaagtggcctccctcaactcgacaactgtaaccccgctgacggatatgaaagaaattcctgttgccattacctgtgaagaagccacgcgtgttgcggtgaagtttaccgattcgcgcgacgactcttccccaacagaaagtatcaaaatgggtaatggtttttcaggtacaccagcttatgtgtttggcttgggaatgtataacgataaaaaaattggtgcctatacattagcgataccccgcacgcaaggtgttaacaccaacgctaatggcgattcactttacccgatgtcgagcgtagacgctggtaaaacctggggcactaaaggtatcgactatttgcaaatttccagcaataactctgaaatatatggatttagtacggagagatcgggtaccgagctttctgctcaaagcaagatcaactttaaggttgctgtgagcgccacaatcaacccaaccaacgatttaaacgtcacggatgaagtgacgctggacggtttaaccaacgttgagctggtttatctctga

SEQ ID NO: 154321 - DNA, 318 bp, Enterobacter cloacae
atgagcgctctaatcaaaaaaacaatgctggttacagcgttagccatgtcggttaatacagctatggctgcacaaagcattgatattaaagtaacaggaaaaatccttccatcatcatgcaccccagccttcccaagcggtggcggtattgctgactttggcaccatgaaagtggcctccctcaactcgacaagtgtaaccccgttgacggaaacgaaagaaatacccgttaccattacctgtgaagaagctacgcgtgttgcggtgaagtttaccgatgcgcgtgacgactcttccccaacagatcggctttgttga

SEQ ID NO: 154322 - DNA, 879 bp, Enterobacter cloacae
atgaaagataagattgaagatattgatttttcatttggtaaatattcctctacatctttgcataaggagtatgaggatttcttacactttcatgaacatatagaatccctacccgctgacttgaagagaagcaaaggaataacaggaagaaatagaaattttgaaaatatttctgaactatttacgtcattttgcagtaataaaggaaagggaagtgctttattcagaaagggtacttcagcagacgaattgctagtaagcacatggctctcttttgtttatgaaaaagagcgaattatatcttctgtttctgaaataccaacatataacaaactaaaaaaagaatatctttctgaatttgcaaaatatagcgtagatgaagattttcctcttagcgcacccaaattactattaagtttagggataattttgatttatcaggaagcaattccttcagcaaaagttgacggtgttgtttatgtaaatgaatacggtaatcctgtaattgctatgagtctaagatatagtagattggataatttctggtttacattgctccatgaactttcacatgttgtacttcattacgagcagttagaagcaccaataattgaagaccttgatataaatgaccctgataacttagttgagtctcaagctgatagattagcattggactcctttattccgcgtaacctgtggagagggtgtgctgtaaaagaatccttaaaagatgatgacttatttgcttttgcaaaggagattggaattcacccagcaattatagccggacgagttagaaatgaaagaaaggcatataagcatttttctaaaatcatcaatgctgtaaacttcagggagttggtattcaatgtataa

SEQ ID NO: 154323 - DNA, 492 bp, Enterobacter cloacae
atgtataattacgtcccatttttaaagctcaaggttagcgaaataggagcattaaaagaattaaaagataataaaaagaaagggttagtaccattcttcgacttccctagaaaaaaacctaaaaagagtcgatatggaactacaacccttaaagacaaaaaggagttattttataatgatctggcccgcttagagtcaaaatttaatctcaacctcacatggatcaacgagttttatttagacaactatgatgttgaggatggaatatcaattgatggtagatataattatttcaatatcattgagaaattctctaaatttggaatgattccagtcatctcgcttgatagaagtatcgagcatatgcaagccataaaatatggttttgccgaaaaattatttaaacaaaaaaggatagccataaggttaacaagagaatatttttcaaactaccttctttttgaagatgaattattagatttaatattatag

SEQ ID NO: 154324 - DNA, 567 bp, Enterobacter cloacae
atgttgaatgataaggagttaagagcagcactcatacagtggttaaatagaaagtcagtgaaacctaaaaaaatagtcgaagagctttcggtaaataatggttttgcaattgcggatgtcgtggctatctataaggaaatgcactgttttgagataaagggggatcatgacaaaattgaaagaattataaaacaagggatatcatataacttgtcctttagaaaaataactctagtaactacgctgaaacatagagataaagctttattattatcaccttctcattggggaattattattgccaaagatgtaaacggcgaagtaaaattcagctatgagagaaaatgtaaggataatgtaggctatagtccaattgtggcattaacaaccctttggaaaagtgaaatgttggaaattttggataaagagaaaatacatcttctcaataaagaaaaaactagagatatgatttcactgcggatatctaatgctcttgataaattaagtatcagcagcgaaatcagtgacaaacttcttcatcgttctaggatcatatatgacaaatga

SEQ ID NO: 154325 - DNA, 144 bp, Enterobacter cloacae
atgcagatgcatgaccggcctcagggcacgccagtgctggcgctgccgggggagccagtgtcggcaaaacgcatgcaaaaccatgcatcttatgcatgcatggcttttttaggggaaaaaggcgggattttcgggaatttttaa

SEQ ID NO: 154326 - DNA, 492 bp, Enterobacter cloacae
atggacgacagcgtgtcagccagagaacgatttttcagaaaagtgcagcagaataacgacagtaccccgcccggtcccacatcagcggaagcggaaatccgggcattccgccagcggatggatgcactgacgcagcagatttgcgggtggtttgagggcagcgggattgaagtcatcaccgcgacaaaacacatccacgacctgagcactattggattcagcctcagcagtggcatatgccggtacgacatcgccacccttcgcctggtgaacggagaccgcagcgtcagtattattccggagcaactctgtcgtggtgcggagaggggctgtgtgacaatgcgggttgatgcgcccggtatccgccaggtgttttacctgagcatggcgccggaagagggctggtttatccggcgtgagtaccagggggtaaaggagaatactttcatgacggaagagcattttttccgggcagttgactgcctggcctga

SEQ ID NO: 154327 - DNA, 642 bp, Enterobacter cloacae
atgaatcattcccgctaccgcaaccaccggacaccctggaccctgcgtgaactggactttgtggaaaaacactacggcagcatggcgaccgtggtgatagcagaacggctcgggcgctcgcccgcctccgtcagggcggcggcgcgtttgatggggtgttcgtccggtaataaacccatcgaaacctggagcgatgaagaaaaagagattgtccgtgtgcattatgcgaaggggtatgcgcatgtcatgacgctgctgccgggccgcaaccgggggacgattcagtggatggcgaacaggctgggcgtggtgtttgcccggacctggatccgggaagaggagcagattctggcgacctggtatccggaggaaggggttgcggtggcagaccgcctgtcggggcgcacggcagatgcggtgaaattaaaggcctgtgatatgggcatccggtatcaggggggcgaaagcgccggacagcggaaatggagtgaaaaagagcggatgctccttgccagaaatgaccatctgctgttgccggacctgctgaaactgttcccgcaccggagccgattgtcagtaaagaaggcgcgtgagcggctgagaagaaaaaagaaaatggcaggtcagcgcatggcgcgctga

SEQ ID NO: 154328 - DNA, 537 bp, Enterobacter cloacae
atggcaattaccgttggtaataccacaatgacgttgctggcattagcactcgcgacagccttaaccggttgtggcctgacgcagaccgtcaaggacgggacgatttcagtaacgaagtccattttttacaaacagataaaaaccctgcatctggatattcaggcgcgatcaggtgtgaataacaacgcgaaaggggcatcgcttgcgacagtcgtgcgtatttatcagttgaaagatcgtaaggccttcgacagtacggactatccgtcactgtttgctgatgacagccaggccgtcagagctgatcttgtggacgaaaaagatattcgtctgagaccgggagaaccagtctcgctggatatgccactggatgagtcgacgcagtttgtcgccgtagcggggatgtttatggcgccggatcagacgaatgatacctggcgtctggttctcacccgggacgatctcgacccggacaaaccacgcatcatcgaagccagtaataaccgcctgatccttcagcccctgaaggcggactga

SEQ ID NO: 154329 - DNA, 1059 bp, Enterobacter cloacae
atgctaaaccgggttcggcatcagttgccgtacatgaatttttaccgtttctgccagctgctggagcagagtctgccggaggcgccgctgcccggcagcgactggcgggtcggcctggagccggtgcgctttcgaccgcatccggggatgggctttcctgctggagaaatcaggggcatggaagacccggaaccggagcacccgcatctgccgccgtcggtccgcatcacctttatagggctgtacggcgtggagtcgccgttgccgacgcattatgttgacgatatcgcgcagcgccgtgaagggtatgaagcgacgcgggattttctcgatatctttaaccaccggctgattacccagtattaccgtatctggcgcaagtattcatatcctgcaacctataaagtgggtgggaccgataacacctcgcaatacctgctggggctggccgggctggggatagccggttgtgcggaaaatatcgccgcgccgctgtcacgttttctggcgctgctgccggtcatgctattacccggacgaacggcagaggggatggaggcgctggtgcagttactggcgccggatacccgcgctcaggtgtatcaccatgaccgttgccgcattccgctgaaacaccagcttgccatgcgtacgcagcacccggtcaacctgcaccaccgccccgtgatgggcacgtacggaacagatgttaacggccaggtgctgctgcgtctgtccacctgtaatcccgaagaagtgcgtggctggctgcctggcggagaactgcacggcgatttaatggcgctgttgcatgtatttctcggttcacatctcgacgtgcggttacagctgtgcgtggcgaggaacctgctgccggatgcccggctggcctgcgacgaaaatcaggccgtacagatcgggcgcacggcagtgctccggccactcagttcgcaacaaaacagacatgacattatcaccattaacctgggacgttatcagcgcgttcaggaaaatattcaccgaagggagagcgatgaagatggcaattaccgttggtaa

SEQ ID NO: 154330 - DNA, 1578 bp, Enterobacter cloacae
atggcaacggttcagacactgataaacgcctgccaggctattgaggctgacgtggttaccaggacgcaacagcgtctggcgttatgggaaaactggttacagccgctgtcagctgataatccgaccggggacgaaccgggctatgatgacgatttccagcaaatgcgggaggaggtgagtaaattctccggcccggatgcggacctggtgtgtcggctgggcgaaaagctgctgctcaccaccacgaaagatatccgcgtggcttcttattacgcctgggcgcgcctgcatcgtgatggtgaggcaggcctggcggatggtcttgagttgatggctgctttgatgttgcgttttgacacacaactgcatccacagcgtgaacgcagccgtcagggggcgctggagtggcttgccagttccagaatgctcaacagtctgtcgcgttatccggaagtcaacaattccgacaatgaacgtattgcgggggcgttgatgctgctggagcagggcgcggaaacgcctttacccgctgcgctttatactgcgctggaagcccggctgcaaaaatccggtggtccgcaggctgtggttccgcaaaacgtcagcgacacttgccatactgccgccacagaggccagcgtgcccttgctgagtggcattgtgtcaggccaggagcttctggcacaggcccgtgtgctggctgattacctgaaaaaccagccggacggctggctggccgctcaccgcctgataaaaaacctgcgtcacgataccctgcgccagttgccaccgctcctggcggacggtcggacccgcattgaaccgccaaaacccgaccagcgggcgctgctgaaacgtctgtatctgcagcagagctggcgggagttgatcgaagaggcagacagcctgttgtcgcgaggggctaatcacctgtggctggatgtgcagtggtacctgcatcaggcgctggtgaaatccggttatgaaaacgaggcggccattattcagtccgacctgaaggggctcctctcacgcctggctgggctggagacgctggcctttaatgacggcacgccgtttgccgacgaggtgacgctgaactggatacagcagcaggtactggataacccggcaggctggacggagaaccatacgttcagttctgcggtcgttccgggtgatgacgacattctgcaactggagccggaggctctggcgcttgcggatagcgaaggagcagaggttgcgcttgcgtggctgcagaaccgtccgggtatcacatcgacccgcaaccgttggctgctgcgcctgctgatggcgcgcgtagcggaacagaccgggaaaaatgaactggcgctgcacctgttgggtgaactggacggcggggcgaccgccgtcacgctcacgcagtgggagcccgggttgctgtttgaggtgaaagcccgccgtctgaagctgctgcgcatgaaggccgggcgcagtgaggctgaaagggcacgcctgagccccttaatggaacagttgctggccggattggttgcgacagacccggtgaaagctgcagtactgtgcggctga

SEQ ID NO: 154331 - DNA, 3417 bp, Enterobacter cloacae
gtgaaaaagaaaaaacgcctcagtacatggttaattatcctgctgattgcggctgtgggcgggttcctcatctgggctgaaaatcccctcgttcaactgcgtactacagagaaaaaacagacagtatcgctggcagtggtcgggttttgcctgtttattctgctctgtgatgatttatttttccggttgtggcagtggctcatctcactgaattttatccggcaacttcgtgaattatcggatacaggtcatcaacaggaagaagcaaagcgtgcagataaagaaaaacatagcgaaacgctcaaaaatatacgcctgtatcttcgccatacatacggtcgtcgctggcgccgcaagctccgcatcctgttgataaccggcagcgcttcagacgtcgaacagctcaccccaaaactcacgcaggaactctggcaggaagaccaggggacgctgttgctgtggggcggtgacccggcagcaccggcggatgccgactggcttactgcgctgcgtaaactgcgccaccgcccggcggatggcatggtgtgggtgacctccgcgtttgaccgcctcgcgggttcagatgctgaaccggcagcgccgctgactcctgaatccatagacgccctggctcacgccctgaaggggcgctatgacgcgctgggctggaaactgccgctgtatgtctggtcgctgcatccgcgagccggagagcagcaggggcggattacccagccggtggggtgccagctgtcagcggcctccaaacctgaagcactggcccgccaactgagcaacctgataccggccctcactgtgcagggtattcagcagatttgcgacaaaccgctccaggtttttttgctcgccctggccgaccaactgacccgtgagccggaaacgctgactggccccttatccgtgctgctcaacccgtaccgcccgctgccgctggccggcctggtgttcagcccggccacggtcggcggcgtgcgcagcgttgcccatcactggggcaaagacaaccgctgggatgccatcccggcgtcggcacaggccttaccggcaggtcttcgaccgcgtaaacccggcgtcagctggacgcagatggtgggtgtgagcgtggcggcactgatatttatgtggggcgtattcatggccgtctcttttgtcgccaaccgtaacctggtggcgacggcacaggagcaggtccggcagtccgttgcagagaaacagccgctgaccgagcgtctgcacgccctgtctgacctgcagaaaacccttgctcgtttacagtaccgtgcgcaacacggcgtgccctggtatgcgcgcggcggcttaaaccagaacgatgccctgctggcggcgctgtttccacgctacggcgaaagcgccctgccgctgctgcgcgatgcggctgcaaaccatcttcgccaggcgctgaacgcattcgtggagctcccgccggacagtccgctgcgtgaacggctggcaaaatcagcttacgaccagttaaaactttatctgatgctcgcgcgtccgaaaaaaatggacgccgcgtggttctccgctacgctgatgcacgactggccgcagcgttcaggcgtgacagaaagcgtctggcagggccgtgggccttcgctgctggccttttacggcgccagcctcatgtcacatcctcagtggcgtctgcatgccgacgacatgctggtcagccaggcccgaactttgttaatacgccagatggggaggcgcaatagcgagtccacgctctaccagaagatgctcgcgcaggtggcgaaccagtatgccgatatgcgtctggcggacatgaccggcgacacggaggcgtcgcgcctgttcaccaccgatggggtcgtgccggggatgtttaccagacaggcctgggacgaagcggtacagcccgccatcgataatgtagtaaaggaacgtcgcgaagaaatggactgggtgctgagtgacagccagcaacacatgatgcagcaggtctcgccggaggcgctgaaacaacgcctgacggcacgctatttcgcggattacagcggcgcctggctggattttctcaacagcctgcggcttcgaaaaaccgccaccctgtcagatgccattgaccaactcaccctgatagcggatgtccgtcagtcgcctctggtggcgctgatgaacaccctcagtgtgcagggtcgcaccggtgagactggtgaagcgatagcggattcactggttaaatctgcaagaaacctgctcggcagtaataaacagccggtcattgaccagagcggggggacacacggtccgctggatgccaccttcggcccggtgctggcgctgatggacaatcgcgaggggggaacacagaccagcagtctgaacctgcagaccttcctcacccgcgtaactcaggtgcgcctgcgcctgcaacaggtgaccaatgccaccgacccacaggcaatgacccaggcgctggcgcagacggtgttccagggtaaggcggtggatttaaccgaaacccgcgattacggcagcctggtagcggcgggactggggcaggagtggggcggtttcgggcagacggtctttgtgcgcccgatggagcaggcctggcaacaggtcctgacgcctgcggcagaaagcctaaatgcgcaatggcagagcgcggtggttgacgactggaacacggcctttgccggacggtatccctttaaggatgccagcagcgacgtttccctgccactactggcgaagtacctcaatgctgattccggtcgtatcacccgtttcttacagacccggctgaatggtgtgttgcataaggaaggaagtcactgggtgccggacagcatcaatgctcagggcctgacctttaataccaaattcttacaggcggtggatacactgagccacatttcggatgtggtgtttactcgtggggaggccgggctgtcgtttgagcttcgccccggtacggctgatggcattatgcagacccagcttgtgattgacagccagaggcttacctatatgaatcagatgcctgcctggaagcgaatatcctggcctgcggacacggaagcaccgggcgcagccctgagctggataagtacccaggccggtacgcggcaatatgccgacatgtccggtgcatggggctggatacgcctgttggataaggctgcggttagcgcgtatccagggtcaggcagtagctggagtctgagctggaaggctccggacggcaggccgctgaactacaccctgcgcaccgaagcgggagaagggccgctggcgttactgaaactacgtaacttcacccttccgaaaaccatattcagcgtcagcgcaccggcaaatgaacacctggcagaggacgaagacacgacagaggagacgtactga

SEQ ID NO: 154332 - DNA, 1182 bp, Enterobacter cloacae
atgccagttgatcttaaacagatcccgaaggaggaaccattacccgttcctccggataaaacccgttggctggtcgtcattgttctgtgcgtgattgcaggggcggttctggttctttccttctggcctgccgggttatccacacactctgcctggttctggttttgtacgcttatcatgccttttttgactggtctgtcaggttttattatccgcaggcggagttatgagaatgagcgcgatcgtgtgctctggtggaaccatttacaccgggagcaatatgaagaacggatattactgggacggcaggctgttggtgttctggggatgagttacatcacgccggttgccagcaataaacttgccgcagcgcttttacagggaggaaatgcgcgccagacaaaatattccccggtcctccagtctgtgttgactacggcctcactctctccgccattaaaaacattcagtaaaacagggtatcggtcacggttggaatcgaagctgaccagcgtcatctggcaactgcataccgagctggcgcagttcaccggtaaactctctgttcgtcttcatcatgatggcacactggaaaatgagcagattatcatggcctggcaggctgtttttcctgcgtcatattctgtcagtgacgtcagtgccaatactgaaaatgacggcctgatgtggattgatgaatggctcgaccagcaggatgaaacgctgtttctctgtgtagaaatcaacttatttttgcaggcccgtgaccagcagactgaatctgtatctgctcttttgctggcctcttctgcgtggctggagcgccagcatgtaaaaccgcaaatgtggatacaccgtccggttgtgttaaaggacgcggatgaatcggtcgcagatgtggcttgctggggagatatcacacccggattgccctggtatttctggcgtacgcaggtaaaaagcgatgcgctggcaactgttcttcaggcgatggataaatcaggacacatatccgcaagaaaaggagaacacgttctggatgactctcttggcatgccaggggctgcggtgggcaatatcaccctgatttgtgcctgtgaacatgcggttgcttcagggctggctcagtggctacttgttggcgataaaaccacgcaaatggctgttgtccgtccggcataa

SEQ ID NO: 154333 - DNA, 258 bp, Enterobacter cloacae
atgcagggtgtaattcgcattaatgataaaaccactcatggtggcactgtgcttgaaggtagctccggtgtgaaatttatggggctggaagttgcctgtctgatggataaagtcttctgtcctgttcatggcaaaacatatattgcagaaggtgatgaaggatcgaaaattaatggcaaacccattgctcttcacggacatcgttgcggctgcggttgcacgctgatttcttcattacccaatgcagggaaacgctga

SEQ ID NO: 154334 - DNA, 534 bp, Enterobacter cloacae
atgaatagtgaacaaccagtttccttatctgaactaaaattccggcttctggagctgaactacaatgccgacatcccattttctgtgattgagaaaaaagataagctaattgcttcatggaaaattgtggatgcgaaatggattgagttatttggcattggcggactaaaaaaacaatatgagttgacattacggtttgatgaggaaaagagcctggtgagttaccgggagaaatcaatcgatatagaaacggagataaacgcagaaagatgtggtttcaaaaaggaagttcggtggggtagccgtaaagagtttagttttggaaaatcatatgggttaaaaacaaatggtactattggagagcagtactcttataaattcagtacggcagatataaaaaatcctgttttcggtattgtggaacaatccggatggatactcaaaaaaagccttgttgataaatatgggacccgtttagtctggttaattattgttgcagtgatgttgctcgtggcagtgtattatttgatttga

SEQ ID NO: 154335 - DNA, 537 bp, Enterobacter cloacae
atgaaagttaaaacgaaacgtttatatcttcgccctgtaagagagtcagatgtcgttgcacttttcaaaatttatggcgatccagcgactaatacctttaatcctgccgggccctacccggacattgactacgcgcaatcggtcatgaatcgatggatcggtcactggaatatccatggttttggaaactgggctatctcacttcacaataatatagatagcatcatcggttttggcgggctgggaattcgtgactttgcagatagccgtcttaataatctgggttatcgattttgcactgatgcatggggaaaaggtttcgcgacggaatttgcaaactctgcgatcaaatacggttttgaagtaatcgacttaacagaaatatcagcggtcgtgagaaggaaccatcacgcatcacaaaacgttcttgaaaaagcgggattaaattatatcaaagagattctggatgttgagaatgccccgccgagtctactctattcgctgaccaaaaatgagtggctacgaaaaacagagtag

SEQ ID NO: 154336 - DNA, 381 bp, Enterobacter cloacae
atgaagacgttatatggctccccagcgtttacctttggtctgggaatgtataacggtaaaaaaattggtgcctatgcattagcgttatttaacactaaaggtgctaataccaacgatgcgggtgactcactttatccaatatttagtttagatggcggtaacggctggtcatataaaggttatgagtatatgcaaatcaccagtgataatcgtgaaatttatggatttggtacggatcgttctagtggtgtgctttcagcacaaagtaagatcaactttaaggttgctgttgaagccacaattaacccaaccaacgatttaaatatcacggatgaagtgacgctggacggtttaaccaacgttgagctggtttacctctga

SEQ ID NO: 154337 - DNA, 213 bp, Enterobacter cloacae
atgacccgaattttcgatgttgtacaacttaaccacgacacttcaagttgtacaatatattctgttacgataccgttacaaaccccatcaataacccccctgaaatgtaaaaagattataaaatatatcataaaaaatttaaaaatctgtacatttttaatgtacagatttgggatttgtgtataccttaaatgtaacgttagtgattactaa

SEQ ID NO: 154338 - DNA, 489 bp, Enterobacter cloacae
atggcacgaagctggggaatttgtcgggccacctgttcgggttcaaaatctttcatatctgaaaagcgcagcgtcacattctcttccgtacgctcacccgccagcgtattcggaaccgtcatgttgacctccgggttaaattccgaaagtacactgttgaggttatttttgttgacgttaattttctttctttcagataatggccggctctctttaccgttactgaaatcaccgacagtgagtaatttaaggggtagctcaactttcttctgcgcccctccggtatgcaatgcaagttttaaattaatgcgtgccttaggcacttcgttctggaacgtatcagccatagcagtccctttccttaaggaatgtttgttgaagttaacgacgtttctgaataaatcgatattagaacaaaacaccacaatagatcaactatctggaatcaaagcacaatttaagacattccttaagaattttactctatag

SEQ ID NO: 154339 - DNA, 150 bp, Enterobacter cloacae
atgagcgttgatttaaatcaattgataaagttaggtgtcattgattcattagagaatgaagtagtttttgaagagggatccatcaaaaaaggtgatggctcgctggagccttattccatttcatatggatggaatttgaggctttgttga

SEQ ID NO: 154340 - DNA, 810 bp, Enterobacter cloacae
atgactatcgaaaaaagccgatttaattcggaggccgccccacaatccaacgccagcctgggcgaacttaacaataatgactttgccgctattgttcccgttatttccggtcaaattggcggacgtgataccaacattgcgagcgccaaagcattacaccgcgcgatgggtgtgggccgtgacttcaccacctggattaaagggcgcattagtcaatatggttttgccgctggtgtggattacatcaccgttgaaaatttgacctcccccgttccggggagcgcaaaaacccgccagcagattgagcatgattatctgctatctctggatatggctaaagaagttgcgatggtcgagcgaaacgaacaaggtcgcgccgttcgccgttactttattcagtgtgaagaagccctacagcgcagcgtgccagagattgccgctcagtatcgccgccagctcaaagcccgtatcggtgccgccaacctgtttaaaccgatgtgcgtagcactggaaagcgcccgcgcagaacagggtaaacagacgcaggctcgccactacagcaacgagagcaacatgatcgcccgcattgttttgggtggcatgacggcgaagcagtgggcgcaggcgaatagcattactggcgaaccacgcgacagcatgaacgccgggcaactggaacacctcacctacctggagagtaccaacattacgctgattgatatgggtatgggatatgaccagcgtaaagccgagctaatccgcctctctcagcgctggttagctaaacatctgggggctaatcatgcttaa

SEQ ID NO: 154341 - DNA, 669 bp, Enterobacter cloacae
atgcaggaagaggtgtcagactttgttaaagggttaggcgatagggttgccaagatttcaagaaagataaaagatgaggacagcgcaatatatcagtctgaatcctatatcgagcttatcaaagacatggttacatccattgccgcagattttaatgaggaaatgtcacaaattgagtttgaagataataatttggcaagtctaacgcttgaagatggaattgattattttatgcagggaaagagagagaatactgcttgcagttaccttgtatgctccgcagaaaaaatgtgcaaccacgttggggcatcatttcacttgcatgggattagcgcattttgtgccatcttttttattgctaaacatgatttggtaaaagctagccagttcttgaatttgcttatgcaaccaacgatggccgcatttagaatagacgatgtaccaagagatgcaggaagaaaaggaggacgacctgaacatccgagaaaagctgaggcgcttaaaatcggtaaggccaagtgggaacaagttgaatacgcttctgtaaacgttgtagctactaccgtaaaacatcagttagataagaaatacacagactcgccgagtgtagcagccattaaaaagtggctaaattcggccgggatagcaccaaagagatcggctagataa

SEQ ID NO: 154342 - DNA, 303 bp, Enterobacter cloacae
atggaaacaaataagaaagatgtcatttgtgaatatgcgcttaattcgttaggcgacatagctagtttcgcaaggtttgtcagctatgcggaagatctctcccaactagatgaattgtttgaaaataataaggataaagaggattacgaacaaatatggttcgagttagaaatcattaacgcacttgctttatctcaatgggaaaccgaaggatgtccttcggactggaaaaaacagtgggaatttggttataagcaagatgcgtcccatatcatggatgaactacttaacttgttgaagtaa

SEQ ID NO: 154343 - DNA, 183 bp, Enterobacter cloacae
atgagtaaagcaatcactgagcagggcaattttatggtcccgggctgtacgggaagcggtaagacggttttctgcgctcagatggtaaaggcgcttctgtcaggacagcgttctgacggcgggcgcaaaggcattgagaaaaatgacaacgattcaggagagcgccatgacaaccagggataa

SEQ ID NO: 154344 - DNA, 984 bp, Enterobacter cloacae; identical to SEQ ID NO: 100229

SEQ ID NO: 154345 - DNA, 1014 bp, Enterobacter cloacae
atgaaagctcatattaaagtcgacttaccacagcaacttattgattataaaccagtgactggaggcccgaaaaagggtaaaagccctgtaaatagaaatgcccactttgcaaaagtgaggcatagtttagagactgctgtaaatatatataatgaaagaaagaaaacagtggaaatgttattaggtaaaggaaatgaacctcaaaaggtcgtaataacattcctcgaaaatccagaaatcaaagatcggattgttttaaagagtttggatgcgaacggcatgagaataatgtctgttaatactattgatggtatgacaatggcaaatgtttctgtgcccgttgagggtttttctaaacttgataaaatattgcaagaatatgcaactgaaaataccaaaaaaggtaatccaaagaatcagccattcatagaatccatatctaatatcgaatatggtaatttccgagctttatggtttagtcaagacgaatttccaaaagatatctataaagtccaggatgttgaattatggttagactcaagtgatttagatgaaagtttacttgtagaaaaatttgaaaaaatatgtggtcagttgggaataatcgttaagcagggcactcttacttttaaagataggattgtgaaaattgtctgtgcttctatgcatgacttaatgttagttcaacaacttactgagctaatttcagaaattagaccatcgaaagctgtgagtgtggattttcttgatttgaaaccagctgaagcctttcagtggattaatggtttatcctatagagaattaaaaacattaattccaatttgtatacttgatactggtattaactcacaacacccactgcttaataactttgtaaatgaaaatgccttaatcgtagtagagcctcattgggcgaatggcgatttaaaaggccatggaactggtattgctggactggcattgtttggtgatcttaaacacgcaatacaatctaatgaaggctttgttgaataa

SEQ ID NO: 154346 - DNA, 657 bp, Enterobacter cloacae
ttgtggcaggtctaccgcctgctgcaggagagggagctgtgcagcacctatatttacgatccgactgacgcctggagcccgctggcgcgggtggatcaccttcgtgaccagaacagcggtgagatttactggttcaaccccgacctgaacggcgcgccgctggaagtgaccgacgagcgtggtgcggtacgctggagcggccagtacggcagctttggcgaggtacgccatcagagcgaaggattctcacgggttgtgaatcgcacggcgatggcacaccagccgcttcgctatgcagggcagtacgctgacggtgaaacgggactgcactataacctgttccgctactacgacccgccggtcgggcggtttattgtgcaggatccgattgggttgaatggcgggtggaacctttatcagtatgcgccgaatccgttggggtggattgatccgctgggtttaataaatgaatttggaatcgcaggctatggaagccccgtccatgcaaaagatggtttaactgcacatgaattattacaaaatgcatggctaagaaataatggcataataaaaggtagaatgtctggtatcgcaactaccaacccagcgatagctttacaagaaaatgctatgcataaaactatatctaaattatag

SEQ ID NO: 154347 - DNA, 297 bp, Enterobacter cloacae
atggataaggaagttgacttggccaatgagaatgctgaaaaaaagagaaaagctatagagatgaatgctgaagttgatgccagtgttggcgatttgatatgtcgagaggattacgaggcgaaaccttatcaatatccaggggttgcatactacaaggcatacgtggaaaaaaaagagaaaaataaactacagttgcggttggtttggcacggtggtgatgggtttgtagttaacgatataaccaatgtgaataacataatctggttaagccctaaagggtggcgtcattgcaattga

SEQ ID NO: 154348 - DNA, 252 bp, Enterobacter cloacae
atgtcgcaggtcggaaatgcagtaacttcctcatcgaaacgcgcttacagaaagggtaatccccttagtgaagctgagcgacagaaaattgcttcggccaaaaaaagggctacgcataaagaactgaaggtatttattaagcccgaaatcaaagagtatctttctaacctctgtgaagaagatggtgttactcaagctgaagtgttagaaaagttgattgaaagagaagcttttagtcgaaaagcatcgtga

SEQ ID NO: 154349 - DNA, 597 bp, Enterobacter cloacae
gtgacattaactataaaatcgggtcatctggcatggtgcgccctggtggcgcttgcgctggccagacagaacggagatgtgctgtcaccggcacaggaaaatctctttctcacccgctggctggcgaccgcgctgaagcaacgacgtttttcgcgtgatgtggcgcccgatatcgagtggcttctgaaacagggacgccagctgggcgtcagtgcaaagctggccagcaagctgaattacctctggcgctcctgcaccggcgaactgtctgagcaaaacgacctgttccggctgacgtatgccctggaaactgcgaaagacatgagctggaattaccgcctgttgaacgatcgggaatggtcaggccggtatgccgttgcgctgaacgccggcgtgaacggcatttatctctcgcggactaacctcgacgcggcgtttgacgacgatgggcgacagatcaatccgctgctgacgcgtctgaccggtaatattgggggcgtggtaaagctgtttaaccggtgtggctggcaggcagagccagaacaggatactaccctgccccaccagtttatgttggtagccagtcgggttgcctga

SEQ ID NO: 154350 - DNA, 291 bp, Enterobacter cloacae
atgacctttaatgttgaatttgacgaaagggcatttaaggaatggaacaagctcgaaaagacgatccgcgagcaattcaaaaagaagctaaaaaagcttcagcaaaacccttatgtggaatcagcccgactgcatggtgatctggcaggctgctttaaaataaagctgagagcatctggttttcgattgatttacaaggttatcgatgacgagattgttatatgggtggtcgcagtaggtaaacgggaagacgaaaaagcctatgaaacggcccgaaagcgtcttttataa

SEQ ID NO: 154351 - DNA, 255 bp, Enterobacter cloacae
atgagcacaattcagatccgcgttgatgacgagctgaaaaaagaggcctatcaggcctttgaaaaactgaatctgtcaccttcagacgcacttcgtctgttcctgcggtatgtcgctgagaacgaaaaactcccctttgctgaagtctcagtgatggtaagcgatgatgatgaagacgctgatattctggctgtcgttcgggagagactgaaaaatccggccagacggatcagggttaacgttgatgacctttaa

SEQ ID NO: 154352 - DNA, 711 bp, Enterobacter cloacae
atgctgatgattgcgggcgacagccctgtccctgcgacgaactatgagacagccatcgcgctgcgtggtatggcgctgctgcagccatatctccctaaatatctgctggcgcccgaagttgccgtattgctgcattatctgccggatgagcgccagcgtatgctgtttgccacactgtggaataccggagcccgcattactgaagccctgaccatcacaccggaggatttgcaacttgatggtccacgcccctgcatccggttacgcacactgaaacaacgccagcggggaaggggacgaccgtcagcggatgaaaagatagcccgcatagtgccgctgctcgatgccgcatatgtcgatcagcttcgccgctatctggccacgtttagaaccggccgtcgacgccccctgtttgcagtcagcaggaaaacagcatggctgtggatgcaacaggcgatcgacagggccagggaagaggggattgaatttgcgctcccggccatcaatccaaagacgctgcggcacagttttgccatgcatctgtttttcaaccacgtaccgccgaaagtcgtccaggcctatatggggcatgaacgctatgaaagcacggaggtgtatctgaaggtttttgcgctggacgtggcgccacagctgggtgtcacattttcgctggatcaccgtgattacagccatcttctgacacgaaaatag

SEQ ID NO: 154353 - DNA, 591 bp, Enterobacter cloacae
atgttccagttcctgccgggccgtgtttttgttgttattaagcaaccggagtgcagaatgaaggttaacatcagcctggaagacctgttcggcgacaaaatcagagagatgcgggagcgggataaagtgtttttgcccaaaccagagtggttctccaggatcgagacagacctggacacctttatgcagacttatatgacgaagtatccctttacgtcctttgaggagatcccccgggatgagtcggacctcacgtttccggcttttgaggacctgcagttttatcttccccggtcgcttcgtcatgagccagtgaggatagttgaggtcgacggactggcctttctcagcgttcttggtgacggagcattctgcatcgacccgcgccggtggcacaggatcaaaacctacatcgcgaaaggtactgttgaatacccgcaggtttcagtcagggactctggcgtatcagacggtcgccatcgcacgttgttgctgatgcaactgtacaaccgcagaacaatcccggtcgtcgtccctgaaagccattatgagacgtttatggctgaggcgaaaaacatgggtgcgatttaa

SEQ ID NO: 154354 - DNA, 861 bp, Enterobacter cloacae
atgacgacaagagaaccgcagtcagctgctgattacgaagaccggacaaccgccgcagttaaatctgttctagttgagatagggcagattctcgggagttttagaggaaagtttactgttattggaggcgcagttccgtggttacttctgaataatgatgacatgccccacgtaggaacgttggatgttgatttagatttggattcagctgcattaggtgatggtgaatacgctactcttgttgaaagcttgcagggctgcgggtatgaacaacgggaaggtgtaactcgcgcatttcaattggtgcgtactattcccgcttctgatggtggcccagcaattgatgtcattatcgattttcttaggcccaaagatgctgagctcgtaaaaaatgccccacccatcattagtaatttcgcggtgcagcgtgcagatggggctgagcttgccctaaaattctacgaaatggtagctatcacaggtgacatgcctgaaggtggaaataacacagtagagattgccgtttgttcaataccggcgttgctggccatgaaagggtatgcactcaatggcaggcataagcaaaaagattcgtatgatatttattactgtgtgcgtaattatgaggatggaccagaggcgctagccaaggcctgcctcccgatactggacgaaagcagcggggccgctggttatggatatatagaacaaaaattcaataatgttgacggttatggaccaacttctgtcagaaaatttattgaagagacaaacttgcttggggagcgaacgccagaacagtggcaacaggatgcgtttggtcaggtagatatctggttacgtgcgctcggaatgagataa

SEQ ID NO: 154355 - DNA, 1065 bp, Enterobacter cloacae
atgaaaaagagtgaaagtcccagcgacttatttatcgataacctactgttaatactgaataaaatccctattcttgaacaggtttcaatcgttggcggagggggcagtatggatgccggtatcgactaccttattcaagtgcgtacaagtaaggagagttacattcttgcctgtgagataaaggataatggacaacctagatatgtacgttctgcaataaaaagccttcttgcttacatgtatggtagagaaagtgttatgacacccgtacttctcgccccgtaccttggccaagattctcgtgagctctgtagtgaaaataatatttcattcctggatatggaaggtaatgccctactcaagtttgggggggtttacattgatcaccgcgtgcccggtaagcccgctcctgagaagcgaggattacgttctatatttagccctaaatcagctcaagtactgcgcatgatgctcaatgatcccttgcgctcttggaaggttaccgagctctctgaagaagggaaagttagtattggtcacgcgagtaatgtgcgcaaaaatttgttggatagggagtgggctgtcagtaacgatgagggacttaccctagagaatccaggtgcactgttgaacgagtggcgggataactaccgacaaatctcgggtacaaagagaatgttctatacacctctgcatggaaatggtctagagtctcaattgcgcaaaatactgtgttgtgatgaagttcaaggagtggcaattctggcctcattttctgctgctcagtggatatctccctatggacgtaccgggatgaattttttctatgctgatgagaaaggtatagagaaactaatatctggcctcaaactgagcacaacttcaaaaggagccaatgttactattactgttcccaatgatcagggaatatttcttgataccatggaaccggcacctggaattttaaccactggtgttgtgcagacttacctggacctttcaatccaaggggaaagagggcaggaagctgctgaacacctccgcaatgaatggatgacttggtaa

SEQ ID NO: 154356 - DNA, 1056 bp, Enterobacter cloacae
atgcaaaacgaccacaaatcttctgaaagcgtgatcctgggggttgatacacaccttgatattcatgtcggtgctgttatcagtcaggcaggtaaactgcttggcactcacattattcaaacaaatcaaactggttatctggaactacttgattgggctcgttcttttgggtgtctcgaacgagctggcattgaaggaaccggaacgtatggtgccgcattaacacgttatctcattaagaatggcatttatgtggttgaagttaatcggccagatcgctcaaaacgtcgccttgaagggaagtcagatcccctggatgcagaaaatgcagcccggtcagttctttcagggagcagcaaggccatacccaaaatgcagtccggcgcgtgtgaagctctccggattatcagtgttgcccgacgcagtgcagtaaaagcccgcacgcaggcgattaatcagcttcgtgcgctgctggttagtgccccgcaggatgtccgcgacaaactctggaaatcgaaaccacacgaatgtgttaccgcctgcattaacagcgaggtatcagagtattctccattgcggatagccctgtgcaacactcttcgaagccttgcgaaacgatggatggccctgactgaagagctgaatgaactggacgaatcactggataaactgacccgtaaatatgccagtcatcttcgtagccagtttggggtaggaccacagacggccgttgcaggtgataaccccgaacgtttaaaaaatgaagcggctctggcatcgctctgtggcgtaaatccgttgccagcatcatcgggaaaaactgtcaggcacagattaaaccgcggcggctcacgcgaagctaataacgccctgtggacaatagcccttgtgcgtatgcgtagtgatccgcgcacaagaatctatgtcgacagaagaactggtgaagggctgtcgaccaaagagatcctgagatgcctgaagcgctacatcgtccgtgaactctatccattgattttatcagatctcgcctatgccaatcgcccgctcttgacatag

SEQ ID NO: 154357 - DNA, 1782 bp, Enterobacter cloacae
atgtctgaccgccgcgcactttcagaggctctgaatgagctattgccgaacagagagcagtacgctgcggccacataccccggccactgcgtagttattgctgggccaggcagcgggaaaaccaaaacacttacgactgccatggcacgtgccctgattgaagaggtcgctgacccccgaggcgtggcctgtattacctacaacaatgaatgcgtttctgaacttgaaggacgtctggcatgctttaacgtcagtggcgatgagcggaactttattggcaccgtgcatagctttgcattaaatcaggttttaatcccctactcacgatgtataccgggtttgctgccggatgattttcgtgtggcgaccagagatgagagtcgcgcggctgttgaagtggcttaccaagctagattcggatccgtcggagatcctcatgcacggtggaaatttgcagaagagaaacgacgccgggatgtgaaccgactcctaccggcttggcggaataacaatccggagctggcagattttattgaaggttatgaggcagaacttcggcgcttaggactgattgactttgatgatatgccactcatcgcttttcgtattattagcgagcatgaatgggtacgtaatgctatccgatcgcgctatcctgttttgtttgtagatgaatatcaggatcttgggcacgctcttcatgagctggttctgctgctgtgctttaacggtggaatacgattatttgcggtcggtgatgcagatcagtccatttacggatttaatggtgcaaatccagggctactggatagtcttgtttcacgggcagatgtaagaccgttccgtcttcgcttcaactatcgatctggcgcgaaaattatcagggcatcactaggggcgctgggagaagaccgcgattatgttggccccgatggtaatccagagggggagttaggattccatgggattaatggcgattatgacgcacaggcgcattttatcgctcatgatctaattccttcgttgtttgaaagagggtttcaccctgaacgcatcggggttctttaccgggcagcctggcttggcgataaagttgcggatgagttcaaggccagaaatattgccataatacgtgctgacagtaatgctctcattaagcgcaattctcgtcttgcccgtttcatcgaagcctgcagtcagtgggtaactgggggatggaaagaagcctctccactatttaacctcttactgggtcaggcgctctttcttgtttatggccgccgcgcaagccgtgctgaagaacaattactgaccgtacagctcatcacttttttacgaaacggaattgataaagcggaaagtgctcacgagtggctgagacgtttaaatgatgagctcatcaccggctggatggctatctcacagaacactcagcaggaatgggatgtcatctctgagttactgaaacgaaccgatcccctcaggggactggatgtggctctggatatattcgctgggaaagtagaaggaactggacgcatcacccttagcactcttcatagtgcaaaaggccgagaatttgatgtagccataatgtttggggtaaataaatatgacttcccgagtaagcgagatctaacttcagataatgcccttcgcgaggcccgtcgcctcttttatgtaggcgttactcgtccccgaaaagagctgcacatggtttatgaaaagggtaaacattcaccttggattgccgaactgtattatcgcagccagcagacatag

SEQ ID NO: 154358 - DNA, 1785 bp, Enterobacter cloacae
atgtatttatcaaaactcggaatccgcaactttagaaattttgaggcggctgatattcccctagcaggtaatgttgtgttattgggggaaaatcgtgtcggtaaaagtaatctgcttttcgcaattcgactggttattgatcccactctgcctgattcagccaggcagcttaagctgtcagatttctgggatggctgcgaccttgaatcaaaccctcaaattgaggtgcaccttgaattcgccgatttcgacagtgacccttccctctcagctctgttgaccgattttcgcatcgcagaggatcctgccgtagcaaggttgagctacatttttcgtaaaaaggaagaagtcgatggggctccacgttcgggtgaggactgtgagtttattgtttttggcggaggtcaggaatcgcgagccattcctggacgcgtcaggcggcggatctccattgatatgctggacgcgttacgcgatgcagaagcacaacttgcttcttggcgaaactctccgctacgccccttattggaaaatgcattctcttcactgagccgagccgatttggatcgcgtagcaactgagcttcaggcagcaacggaaaccatggagaagttcccatcaattaaggatctcgaagattctcttcgtggtggcattcttgacctggctggaactgctcacgatttagatgtccgcctccgttttgcgcctgctgacccgctcagattgatgcgttctatctctatgttcattgatgatggaaagagaggcattattgaagcgagcctaggttctgcgaacgtggctctgatatcactcaagctagcagagtttgcatggcgacgtgaaaagaatgaacgtaatttctccctgctttgtattgaagaacccgaagcacaccttcacccacagcttcagcgcgctgtttttgataaactcttcaataatgccgacaaagatcagtctttgattgtaacgagccattctcccacgctggcaaccattgctcctcttcgttctgttgttcgcatttgcagggatcctgaagggcgatctcgagctttttctctagccgatctgccagtaaccagtgaagaactcgacgacattgaacgatatttaacagcaaccagatcggagctgctttttgctaacggggtaatatttgttgaaggcgatgctgaggaggttttacttccaggtttagcacaggccatggggatcaatctcgaccagctagggatcacggtatgtaacgtagcgggagttaattttgaaccatacgtgaagctggcagccagcctcggactacctttttccgtcgtaaccgactgggacccactggatggtacgaaacaaccgatgggtaaaacccgttcaattggtatctggcaagcatatagtgatgtatcggaaaaactgggaaaactaaccccagaaaatattaattggttcaataacagttcttatgaagtctgtaagcctgtatttgaaaggattggcatttttttaaacgatcagacatttgaagtcgctgtagccaatactacaggcctcaaagaagcgctgcttgatatcctcgatgaacagggatttggtgtgttacgttcatcaaggattgcttcatggcgtgccggtatagctccagacccgacgcaacttctcgcgatgatatctgacataggtaaaggacggttggctgccaagctgaagcaaaaagcacctgggcttgcgccgccggagtatattgcttcagctattcaatatgtggtgtcgaatgtctga

SEQ ID NO: 154359 - DNA, 840 bp, Enterobacter cloacae
atggcgacgttcatttcacgcctagtcttactctgcaccctttcgctcccggcattcagctctgccatcaccattcagggcaacattcatcctgagcgctataccttctttctgacagaaaaaggcggtgaaatgctgcgggacatgaacaacgaggccgtgaacgtaaaacatagcggaaaggccagtgcttcggttgatgcacaaaataaggctgcggctgcaaacatatcgcccctgctgtacccgggtgcaccgctggagcaaaactttatccgctacgacggtaagccagtgaaagctctgacctgccttattaccgcccgcaccatgccgggccagaataaagactatgcatgggaggaaacctactgcctagatgaaactggtgcagcctacattggcactaaaggctggccgtctcgtactattttcagtaagagctgtgcagtgggcgctgctgactgccctgtttacctgagcatgaacaacgacccgccaaccatgcggaacgactctgttcaatatgttccttacagccgcgagcgcgtaagtgggcagacaggacgtaaccctgagccaaaactaacgacgactgaaaccgtcgctgagcaggacggttatgtagtgagttttgttaaagccagcaactgtgcagacaataaactgattgtgaaaaataaaaactcagggaaaactgctgcaattgcaggattaaatggttgcacttttgatccgaagaataatgcagtaattatcttccctctaaatgaatacgtcggcgtttacagtggccccacaaacgcttctgaggaaatagcctccgtcgatctcccctaa

SEQ ID NO: 154360 - DNA, 207 bp, Enterobacter cloacae
atgctaaaaaatattagtgtcagaaccttcattgtctatttccttttgtctctttttttgctaaacgcagctgtcgtctttctatttaccggcgcatcgtcgctcttaataacgctcaatgtaataaatgtgattgctctttttttactctggatttacatgacccaatatcttgtgacaccgatcaatactggctttgttgaataa

SEQ ID NO: 154361 - DNA, 1602 bp, Enterobacter cloacae
atggatattttgcagaatctggttgccgcctgtcaggtggatgaaaccctgttgcgacagcaggcgcagactcgtacggaacgctggctgcgctggcttgctccggtcagcgtgacctgtccgacgggagaagacccgggatatgacgatgatttccagcgcattcgcgaggaggtcaataagctttccggcatcgataccgggctgatttgcacgcttgccgaaaaactgatgaccaccacggcaaaagatatccgggttgcgacttattactgctgggcgcgcctgcatcaggatggcgaagctggcttcgccgaagggcttgaactggtggcaggattactgcagcgctacggcatgcagcttcacccccggcgggaccgcagccgcaaggccgcgctggaatggctcggcggtacccgtgtactggacagtttgtcactgtacccggaggtcgtacgcgaggatgcacagcgtaccgccggggcgctactgctcattgctgacagcctggagacagagcctgaagcgttacgggcggagctgaatgctctgtacagcgctcttgagtcccgcctgatgaaaggcgggggcgtggatgccgtggtaccgcagaacgcaagcaatcagacacgtagtcagcagccatctcacacgacagaacaggacgcgccagtgctgagccgcatcacctcgggtcaggacttactggctcaggctcgcaccctgacggggtacctgcgtgagcaacccggtggctggcttgcggcgcaccggctgatgaaaagcctgcgtcatgacacgctgagtgctattccggcaccggatgctgaagggaaaacgcgcatcgagccgccgcgagctgaccagcgggcgatgctcaagcgactctatctgcaacagagctggctggaaatactggagcaggcggacaataccttctcgcgcggtgccaatcacctctggctggatttgcagtggtatacccatcaggccctgatgaagtcggggcaggatgtgctggccgacatgatcacagccgacctgaaagggctgctgcgccgtctaaccgggcttgaaaccctggccttcaacgacgggacaccgtttgccgatgaggtcacgctgaactggataaaccagagcgtgctggacgatatgtccggctggcgggatgaacctgtcagcgctatcagcacgggtgacaacgatattctggcgcttgaacctgaagcactggaaaaagcagacagcgaaggactggatgccacactccactggcttcagacacgcccgggtaccgacaccacaaaagacagatggttactgcgtctgctgatggcccgtgtggccgagcagaaaggtaagaatgaactggccctgcatctgctgggtgaactcgacaatgccgcacagtccatcaccctcgcacagtggacgccggcgctgttgtttgaagtgaaatcgcgccgcttccgactgctgcgcataaaagccacacgcagtgaagccgataagtcacggtttcagccggagatggaccagcttctggccggtctgattgcacttgacccggcaggaagtgcggtgctttgtgggtaa

SEQ ID NO: 154362 - DNA, 483 bp, Enterobacter cloacae
atgcagacgctgcttgttattactctgaatcttacagaaaaaataatagatggtaccggggaagcggcggcagcactattgatgagttcacctgaaagacccgaggtaagccggaacgttgtggctcaggtccatcgacctgaacagatgaagactacgcaggagatgagtagcgcgcttatgcaggcgttacactggggagagtctgctccagaagagataaaacatatctggttaacgggtacaggtgtcagcaataaagcaacagccttgctctcaacctctggtgttcgatttcctgttgcgggacaaccttgtgatattgatttaaaaacaggactaacgaggagtgtttcaccttggcttgcgatagctgttgccgctgaccaggctggacagtctgaatcatcacagcttgttgtgtacgttccagacgaaagtatatttccctggtttataattgtttgtcctgtagcgaaataa

SEQ ID NO: 154363 - DNA, 600 bp, Enterobacter cloacae
atgctgcgatattcttcgggtcaggcttggccggcggtaatgaaagagtggtcggtcaccggaggatttatagactcgcactccatcaacaaaacctgcgagctgtgtgacaacgaaggactgcgctatcagtttcagataaccaacgtgctcacacattactcactctgggtgggttctacctgtattaacaagttcgtccctgtttttgccggcggcagagagctgctcggagaagaaaaagaagccgaagtacgtaaaattatggcggccgccagggcaacctcaaggcaggaacgcgcaaaatcggttctggcacagctaaaaatcaaagcacctgacaggttcagcgatccgaaatgggtggctaatcttgatgtcgggtactccgccagtcagctaaagatgattgcggtgctttgtaaaagccaccggatcacctttaattccggagattttaaaatcaacacccgcaaggctaacgttgttgatcaaatacggcttctggaaccctggcagtatttcaatatgagggacgctatccctaaaagccggcataagcagtttgatgcgtggtttgctgcgaaaagaatacaataa

SEQ ID NO: 154364 - DNA, 189 bp, Enterobacter cloacae
atgcccactgttaccgtgaccactgagttaactgacagccaggcaatggcgctggcacaatttgttaagcgcttaacctggtcagaaatgcgggcctgtgccgtcgacgatgatgaaacctgggtgatgaaagatgccatccagtcactgcagaaatcactcactgacgccggtttcagtcctcgctga

SEQ ID NO: 154365 - DNA, 294 bp, Enterobacter cloacae
atggctaaaggccctctcgcgcgtcccgcaatggtcaaacctgaaaccacacagggagaggcgaaaacccgcctttctaacgttaaggtcaaccgcaacagaacgaccagcgaaaaccccaaaaccatccgtatgacaccagcggaaaaagtgatgtgcagcgaactggttgatgaaattcaggatctcacgacaaaaactatcaccgactcaaccgtgctgcgtgcagctctgtacctggcccgggaagccggaccggaaaaaatgctggagatgattaaggaatatttgtaa

SEQ ID NO: 154366 - DNA, 852 bp, Enterobacter cloacae
atgtctgaaattccagtgcaatctcagctgacaccgctggttaacaccgtggcccgcatcattgccatcatgaataacaagggtggtgccggtaaaacctccacgatcaccaacctcgccatgagcctcgcacatgccgggcgtcgggtattgcttatcgacggagaccagcaggccaactcgactgaggtgatggctaacgggaaaaaatactacgcgcagtatggccacaccatctgcgatttatataacaacccgcgcttcagtatttttgatgcaattatcccggccgtcagtggtgaagaggtgatcgataacctttatatcattccgtcagatccgtcgtttgaacgcgtcatggaaaactgcctgacccggcaccatcgggaaaaaatactgtcccgccatctgcagtcggtgatggataaattcgattatatcctcatcgactgttctccaggtctgaacctgtccaccacgaacgctgcctataccgcggaccatgtacttattcccgttgatggcggcagctttgctctgaccgggctggatgttgtactggactatctcgatgagatccgtgaaacccgctttacccggttcagcgtattccgcaatgagtacaatggtgccaagaagaagatgaacacctatcttcatgagcaactggcttccaacgagcgaacccgtgataactacctggaaacccgtatccgggctgatgagaacatctcccaggcacaggttgcctgcgtcccgctctggtattacaacaaagggtccctcgccctgaacgattaccgtgcgctgatgcgtgaacttgaaactctcttatcaaacgaggctgcataa

SEQ ID NO: 154367 - DNA, 225 bp, Enterobacter cloacae
atgaccaattatcagggacatgaacaactgcgtgacgacatggccgcgctatccaacgccatgagcgacctgcgcctgcatatccgggcgctggaagtgaagtatcacgacggatgccccgcgctggttgatgcgctggccgctgatttcttgcgcaatctcaacgagcagtatctgaccgtttacatgcgcgtactggcgttcagcgactgttttcacgactga

SEQ ID NO: 154368 - DNA, 417 bp, Enterobacter cloacae
atgcacggaacccgtgaagcgctttgtaccgaactggcgcggatgtttacccatgatgaacctctggccctgctggtctggacggaggaggggattcattccgcgtgccgggaattgcgccctacagacgacgaggttacggccctgctggaaacggtcggcaacagcgacatgaaggtgtatcgccgggaaggcgtcacggatgcgtcggtgtgcgatctgctgacccgccatcgtgaagcgattaaccggcaggtgatggtcccggcgcaggtgctttcgcgcctggtgcatgacgtagaacgcgagctggttcaccaggaggggctggcatgggaggcgggcgggccgacacccgcgcgtatccgtcagggaatggcggacgtggaggtgctgaaggcgctgctggcagcgtga

SEQ ID NO: 154369 - DNA, 480 bp, Enterobacter cloacae; identical to SEQ ID NO: 78701

SEQ ID NO: 154370 - DNA, 276 bp, Enterobacter cloacae
atgaaactgaatcctgagaaatacaatagaaatatcaccctgctatgtcctgtgtgcggaaatacagagatggaacacgaggaagagtctgaagtcgtcagatgtgtaggctgcgggaaagaattcactaatgatgatttaatccaagaaaacggggtgagtattgacgcccatgtggatgagataaaagaagagttaacaaatgatattcaaaaacagtttaatgatatgctcaaaaaggcatttaaaggaagtaaaaatataaggattaaataa

SEQ ID NO: 154371 - DNA, 1998 bp, Enterobacter cloacae
atgagtgaaaatgatactatcccaaagaagtctacaagccagattaacaaagcggtattcttcacatctgctttgttaattttccttcttgtcgcctttgccgcagtattcccggatctggccgacaaaaaattcaaactcctgcagcaacagatattcaccaatgccagctggttctacattcttgctgtcgccctgattttactgagtgttaccttcctcggtctttcgcgttacggtgatatcaaactggggccggatcatgcccagcctgatttcagctaccattcctggtttgcgatgctgttttcggcagggatggggatcggcctgatgttctttggcgttgccgaaccggtaatgcattacctttcgccacccgtcggcacccctgaaaccgtagccgcagcgaaagaagccatgcgcctgacgttcttccactggggactgcatgcatgggccatctatgccattgtggcgctgattctggcattcttcagctaccgtcacggtttgcctttaacgctgcgttccgcactctatcccatcatcggcgatcgcatctacggtcctgtcggccatgcagtcgatatttttgcggtgatagggacggtctttggcgttgccacatcgctgggttacggtgttttgcaggttaatgccggtctgaaccatctttttggggtgcccatcaatgaaacggtgcaggtcattctgattgtggtcatcacggggttagcgacgatttcagtggtgtccggtctggacaagggaatacgtatcctctctgaactcaatctgggtctggctgttttacttctggcgcttgtgctgtgtcttggaccaaccgtacttttactgaaatcttttgtcgaaaataccggcggttatctttcggaattagtgagtaaaacctttaacctttacgcctacgaaccgaaatcaagcaactggcttggtggctggacgctgttgtactggggatggtggctttcctggtcgccgtttgtcggtatgttcatcgcgcgcgtatcccgtggcaggacaattcgtgagtttgttacgggcgtgctgtttgttcccgcaggttttaccctcatgtggatgacggtgtttggtaacagcgccatttatctcatcatgaatcagggagcaacagacctggcaaataccgtccagcaggatgtcgcgttggccctgtttaatttccttgaacatttcccgttttcctcagtgttgtcatttattgcaatggccatggtcattgtcttctttgtcacctcggctgactccggggcgatggttgtggatacgctggcatcgggtggcgtcgctaacacgcctgtatggcagcgaattttctgggcctcgctcatggggattgtggccattgcactgctgattgcgggtgggctaagcgcgctgcaaaccgtgacaatagcgagcgcattaccattctccgtgatcttattgatctcaatatacggactgttaaaagccctgcgtcgggatttgaccaaacgtgaaagtctgagcatggcgacgattgcgccgactgccgcacgtaaccctattccgtggcagagaaggttgcgcaatattgcctatctgccgaaacgttctctggtgaaacggtttatggacgacgttatccagcctgccatgacgttggttcaggaagaactgaacaagcaggggacgttgagtcatatcaatgatgcggctgacgatcgtctccggcttgaagttgatttaggcaatgagctgaactttatttatgaagtgaggctacgtggctataattcgccaacttttgctcttgccgctatggataatgacgagcaacaggcagagcaacaccgctattatcgcgctgaagtgtatctgaaagagggcggtcagaactatgatgtgatgggctggaatcaggaacagcttatcaatgacatactggaccagtacgaaaaacatctgcacttcctgcatctggttcgttaa

SEQ ID NO: 154372 - DNA, 2004 bp, Enterobacter cloacae
atgaaaaaaaatatagagaactttgagacttttatcatagaacagaaagcttggttcgaagagaatctgacagcagattttgcagaatcatgggatagctttgtctggatatgtgggatcaaaggctccggctggttacgtggcaatggggctaatttattacgttttgatgaggttaaccggctcaaagggatcgatgatcgccatacggtctccgagccttatcagttgttcatgaaagcgatgctggtactcgtctatcgagggagaaatcgcagtatttcctctgcggttgctgtcgcaacgctgattattttgaaacgatggtactgcgctctcattaagttaactgggcaaacacatcccatctatctgactacagatgtcgtacgtagcgcaatggatactctgagtgcagcttcccggccaggtgataccaacctagccaactacaaggggcgttgtgttaagattcagaaattagtaaaccatcacgccttcacattagtaacattgcaatatgtttccgatgattgttataccaatcagactaatttgacccggaaagcccgggaaacaatctcactaaaagaaaaagacaagctggatgatacttccactgatggtgaagatacactgattaccattaaaggtttcctcaatatcgtgtcgttaatccagcgagttgaaagcggtactgaaaagattgccctcaattgtcttctgttactgatcgtcactggattccgttctgttgaggcattcagtctcagacaggatgccttggtcaaacgacatatagataactctgacctcagcaaacgtctgcggaataaaggattgccagattattttcttggcatacgctatgttggtgttaagggggctggcgaacgaacgcattgggtcgagcctttagctgtacctctggtcgaaaatatatttaagtcggtgaagttactaacagctgagtttcgcaaacatatcgaatatttacgatcaaaaaaattttctgattatttaccaaagccaatcagtgatattaccggtgaactcgttgagcttgatgatattgtaaaatacatggtccagtcctcatcagagcttcgggggcgtgcaggcttacgtgataaagcttcgaaagcattagagaaacgtggctttataccggcaaaagtcatccttaaatcaggtaatgaaaaagaaaaatattttacaaagtctgatcttagtcattttcttaaaagtgaattcggtgataacagtgcaaatactccctgtactcatgcatgggcagaaaatggcaaaagatatgagattaaatatgaagagctattgttccttttccccaaaggatcactgactctaaagagagtattgcaactaaaagccacgccactaccactaaataataacggtctaaacaaatttctaggtaacgttgctggctatgtatctgttttcagcaaatacaggttgcttgaagatgacggccgccctactcagctccgcacgcatatccctcgacacaacattaatacttttctcgcaattgcagagatctcagaccacttacaagcgatgttgatggggcgtgttgatattactcaaaatcagcattatcagcacctggctctcaaggaacggcgaaaagcagcttctctaacccctttagttccaaccgtaccggagcagtcagcatttactgctgttgacgttgattcaccgctcgatatggtaaagcaaagcggtttaatgacgtttaatagtacccaaagtctggaaaccaacataaaggcaaacctgcatacctttgatgatcgtaacgatgttgctagtttcattgaagcgtcgtcaggggatggattattcgaagacatagccgctgcgttcgaggaaatcagtaaaaatgaagggccattacaagcgtctgagatggtacaaaggcatgcggtattgcatccattaaaactgggctcctgcatgagagacgggctttgttga

SEQ ID NO: 154373 - DNA, 195 bp, Enterobacter cloacae
atgaaagaaggtttctactggatacagcacaacggcagagtacaggttgcttacttcagtaatggtgttactgaagaccttgagacgggacttaccattaagggtatctggcatttgactctgggtgacgacatctgcgacaacggagaagcggaagttctcgcgggtccgctttctccaccaattagcaactaa

SEQ ID NO: 154374 - DNA, 327 bp, Enterobacter cloacae
atggctaagaactatgcgcaggacgggaaaacaatccctctggtaaacagtggtgcaaccgatgttcacagcggcgacccggttgttgttggaaaacttatcgcggtggcaattaccgatatcccggctggcgataccggggacggttttactgagggtgttttcctcctgccaaaagtatccgcagatgcggttactgccggggcgcaggtgtatctgaaggacggcaaaatcacgatcgaagaaacggacgccgttgccgcgggcatcgcctgggaagatgcaggggcaaacaccaccgttgttgaagtgaagattaatgtctaa

SEQ ID NO: 154375 - DNA, 801 bp, Enterobacter cloacae
ttggcagagagaaaaattatcaatggggatgtatacaaatacgcttcaatcgaagaagcattattatcatcaacccgaattacaaacctcaaaactggtgagtcagtaaagctaatcggtaacgccaaattagcatatatgatcctccggaagaggttccatttattcaccgaccaatcaacagacaataagtattatacaactggtaagcactacgacaccattgaaagcatcgctgaggcaatcggtgtttctgacgttggtacagtgagcagtgcaattggcagaatggaagcagccggactgctaaccaaaaagaaatttggaaaaacttacgaatggactgttatcgatctctccccagaattattccttctcgaacgtaacaccgggacgacaaaaaagcctgtctgggtggactgcctgaaacatccagtattcggtaacgccaaagaagacatgccagccgtacagcaggaggaacagggcgaagaggccaacgccgatccgatgtgcgagcttgacgaagcaccgaaagaagaagcgcaaacgccggaaaaggtgaagccaacaccgaagccaaagataaagaaacctgtaacaccgtcaaccgcaccaagcgacgataaggaatattctaccaaattgcatcaattcgagagtgctggacattggtatcaattttctgagtatcagttaccagatttggagcgctttaaatgtgacgggaaactaacgaacgaatacgccttggcctatcttgataaacacacgtcacagcaaactatgaatacccaataa

SEQ ID NO: 154376 - DNA, 336 bp, Enterobacter cloacae
atgcagatagaacaaaacttccgggacgacaaaagtccacgcttcgggttcggtctgaggctgagccggagtcagggaaaagggcgactggaagtgctgaatatggtcgcggcaatggcaagcctggtgatgtggctggcaggttacagggcagaaaggcagtgtttacactggcactatcaggcaagcagcatcaggcacagacgggttctgtcatacctgagtctggcagaagaagtcatccggcatgagcccgggaaagtgagacggctgaatatagttaacgagatgaaaaagctgggaaaagagtacagtaatatggtcatggtggcatga

SEQ ID NO: 154377 - DNA, 867 bp, Enterobacter cloacae; identical to SEQ ID NO: 23218

SEQ ID NO: 154378 - DNA, 531 bp, Enterobacter cloacae; identical to SEQ ID NO: 23219

SEQ ID NO: 154379 - DNA, 1092 bp, Enterobacter cloacae; identical to SEQ ID NO: 23220

SEQ ID NO: 154380 - DNA, 972 bp, Enterobacter cloacae; identical to SEQ ID NO: 23221

SEQ ID NO: 154381 - DNA, 1257 bp, Enterobacter cloacae; identical to SEQ ID NO: 23222

SEQ ID NO: 154382 - DNA, 999 bp, Enterobacter cloacae
atggggtacaaaaatacagtattgtttatttctcccaagttttttaattatgaaaaagaaatagtcaaagaattagaattaactaatgacgttatctattgggatgagcggccgagcaataatgctatttataaatcattgctaaggttaggttgtagtattttgattaaaaagtataactcaagttattataaaaaattactacggcaaattgtcaacaaaaaaatcgataatgtatttattttaaatcctgaagcaattgatcatgaaattttacaggccataaaaaaaaccgttaaagtaaaaaatgaacactgtaaattcattatgtatttgtgggattcggtcaataacaaacccaaagttaaaagaataataaatcagtttgattcggttttcacctttgaacgtgatgatgctgaaaaatggggagtaacatttcttccgctgttttattcgccgcgttttgacaataagcatgagcattcgctaaaatacgatctttgttttatcggtacagctcattcagatcgcgttgatttggtcaattgcattactgctgaagtaagaaatattaaagacattaatgcttatacattcttttattttcagaatgaaattatttttaaactgaagaatttattaagcggaaaaaaaataaatacagacgtagaatttgaaccattatcacaatctgaagttgttgaaatgatgaagtgctctgaaattatcatcgatattcatcatccaaggcagcgcggtctgacaatgcgaacaatagaatgcatcgggttaaataaaaaaattattaccacgaatgaagacataaaaaagtacaatttttatgaccctaatatgatctgcgtagtaaaaagacatcaggtcatagtacctgagaattttattaacgcaccgaatgttaattacaaaaatagagaacaatattctttacagcaatgggtgaaaaaaataatctcaccggaaggtgttcgtgaataa

SEQ ID NO: 154383 - DNA, 816 bp, Enterobacter cloacae; identical to SEQ ID NO: 23203

SEQ ID NO: 154384 - DNA, 543 bp, Enterobacter cloacae; identical to SEQ ID NO: 23204

SEQ ID NO: 154385 - DNA, 852 bp, Enterobacter cloacae
atgcatcttgctgctgagagccatgtggatcgttctattacaggccctgctgcatttattgaaacgaatattgtgggtacttatgttcttttagaaacagcccgtcaatactggtcctcactggatagtgcgcgaaaggcgacattccgcttccatcacatctctactgatgaagtttatggggatttaccgcatccggatgaggttgcgcaggggagtattcttcctctcttcacggaacaaaccgcctatgcgccgagtagtccttattcggcttcaaaagcctccagcgaccatctcgttcgtgcctggctgcgtacatacggtcttccaacaatggtgaccaactgttcgaataactatggcccataccatttccctgaaaagttgattcccttggttattctcaatgctctcgaagggaaatcgttacccatttatggtaaaggcgatcagattcgcgactggctctatgttgaagaccatgcccgtgcgttatataccgtggtgacgaaaggaatccctggtgagacctacaacatcggtggccataacgagaagaaaaatctcgatgttgtacataccatctgcgacctgctggatgagatcgtacctaaagcagtgtcataccgtgaacaaatcacctatgttgccgatcgtccaggccatgaccgtcgatacgcgatcgatgcggataaaatcagccgtgagctcggttggaaaccgcaagagacgttcgaaagtgggattcgcaaaacggttgaatggtatctggcaaacacctcatgggttgaaaatatcaaaagtggggcgtaccaaacctggattgagcagaactacaagatgcgttag

SEQ ID NO: 154386 - DNA, 327 bp, Enterobacter cloacae
atgactaaaaatactcgtttttcccccgaagtccgtcaacgggcagtccgtatggttctggaaagtcaggatgaatatgactcacagtgggcggcaatttgttccattgccccaaagattggctgtacgccggagactctgcgtgtctgggttcgccagcatgagcgggataccgggggcggtgatggtgggctcaccagcgctgaacgtcagcgtctgaaagagctggaacgtgaaaatcgtgaactgcgccgcagtaacgatatccttcgccaggcttccgcttattttgcgaaggcggagttcgaccgcctctggaaaaaatga

SEQ ID NO: 154387 - DNA, 717 bp, Enterobacter cloacae
gtggaacaaatgacattttggcagctcatcagttttggtgagaatggctggggaagattgctgctgatggggacaggaatgaccctggcattggcagtaggcggttttttattgggcgcactcatcggcacaatcggtgcctggtcaaaaatagcgggcaatcgaccacttcgttttgtggcggaatgctacaccaccgtcactcgcggtattcctgacctgctgattatcttcctgctctactttggcggtagctctgcactgacgctgctggcaggcctgtttgggcacaacggttttatcggttttcccggttatatcgccggggtgattgccgtgggtatctcctcgggcgcacagcaaacggaagtgttccgcggcgccttctacgccgtcgccaaaggtgaaatagaagcggccaaagcctgcggtatgcctaccctgctgcgcttgcgccgcattattgttccgttgctgctgcgccatgccattcctgcactcggcaacgtctggcaactggtgctgaaagcctcggcgctggtgtcggtaaccggcgtggcagaactgctgacccagtcacagaccggcgcaggctctaccggcaaaccctttgatttctacatggctgccgccatgatttatctggtgatttcgattttttccggctggctgatgcgccgcgcggaggcacactattcgcgaggtgttagacggtaa

SEQ ID NO: 154388 - DNA, 729 bp, Enterobacter cloacae
atggacgttaattttttctatgaaaccttcctggaaattattcctggcgtaccgctcacactccaactcgcggtaggttcagtgctgctcggcttctttttagccttggcgctggccgcgatgcagctttctggcagtcggctgctgcaatcagttgcacgtctgtatgtactgttcttccgtggcacgccgctactggtgcagctgttccttatctactacgggttggggcaattcagttgggtgcgtgaaagcgtcctgtggccgatactgcgtgaaccttactggtgtgcgctgctgtcgttaacgctgtgcaccggcgcttacgccagcgaaatcattcgcggtggtttgcaatcggtgcccgccggacagatcgaagccgcgcgcgcctgtggcatgccatcctggaaaatatttacccgcatcgtgtttccgctcgccattcgtcaggctctgcctgcctatggcaacgagttgatctccatgatcaaatccacctcgctggcgtccatcatcacgctgatggaaatcaccggcatcgcagcccgtttgattgcggaaacctaccgcgcgctggaggtgtttttggtggcgggggcgatttatctgctgatcaatctggtgctcacccgcctgctggcttttgtcgaacaccgtatgacgccgtatctgcgcacaccgcagtcactggctgaagttaagaatatgaaaggaaatccatcatga

SEQ ID NO: 154389 - DNA, 765 bp, Enterobacter cloacae
atgagtaccgccgctattagcctgcgcaacattcacaagcgtttcggctcactggaagtcctgaaagggatctcgtttgaagccagtcagggcgaggtcgtctcgattctgggttcctccggctctggcaaatccaccctgctgcgctgcaccaacctgctcgagatccccgatcagggcgaaattattgtcggtggcgaaaccatcgcgatgaaagtgaatcgccaagggcaaaatcgtccggccagcccgaaacaaatcgatcgtatccgaacccagcttggcatggtgtttcaaaacttcaatctgtggtcacacaaaaccgtgctggaaaacgtgattgaagcgcctatccatgtgctcaaacgcgccccgcaggacgccaaggagcatgcggagcagttgcttgagaaggtcgggctggcggataaacgccattactacccttcccacctttctggcgggcagcagcagcgtgccgcgattgcgcgtgcgctcgccatgtcgcccaaagtgatgctgtttgatgagcccacgtcggcgctggacccagaattagtcggggaagtactgcgcgtgatgcgccagttggccgatgaaggcatgaccatgttggtcgtcacccatgaaatggactttgcgcgtgaggtgtctaaccgcgtggtgttcctgcatcagggtgagatcgaagagcaaggtacgccggaacagatgtttacggcgagccagtccgcccgtttccgccagtttattgccagttggtaa

SEQ ID NO: 154390 - DNA, 867 bp, Enterobacter cloacae
atgataaaaaccaaactcgctgccgccgcctatgcgctttgtctggctggcgcactctccacgtcattcaatgcagcggcagaagccggtaaaacctggagcaccgtgcgcatcgccactgaaggcgcataccacccgtacaacttcaccaagccggatggcacgttggatggtatggagattgagctgtacaaagtgctgtgcgacaacatgaaggtaaagtgcgagatcatggtgcagccgtttgccagcagcatcccggcgctgaacgccggtaagtttgatgccatcatctccggcatgtccgccacgccgaaacgccgtgaagtgatcgatttcagccagccctacacgcaggcgggccaaacctttgccgtgctgaaatccagcccgctggcatcgctgccggatctgggcacccgtttttccctcaatgagaaagatgaagctacggccatcgctgaagtggaaaaattgcgcccgctgctgaaaggcaaaaccattggcgttcagtctgcctcgatcgccagcacgctgttggataaatatttcaaaggcatgatgaccgtgcgcgaatacaaaaccatgcaagagcacgatctggatctgaaagccggtcgcgtcgatctggttatcggttctgcgccttacatgaaaaatactgctgacaaatcaaacggcgaaatcgtgatggcgggcccgcagttcatcggcggcattttgggcagcggttcctccatcggcctgcgtaaaagcgatcctgagctgaaggccatgtttgataaagccatcgaccaggctaaaacagacggcactatcaaaaagctgagtgaaaaatggttcggcatggacaccaccccgctctga

SEQ ID NO: 154391 - DNA, 1458 bp, Enterobacter cloacae
atgacgtcgccatcagagcaacacaccttgcccgccatagatacccatatcgttagcgccctgcgcgaactgattgccgcgaaaaatccgcagttcaccgcacttagcgacagcatctgggatgtaccggaactcaactatgaagaagtccgttctgcggcgctgcatgaagccgtgctcaggcaggaaggttttcgcctgacaaccggtattgccggaatgccaaccgccttgctgggcgaatatggttccgggaaacccgttattgccttgctgggtgaatacgatgcgctgccgtgtctgagccagcaagcgggcgtggcggagccttgccctatcgatgcggggggtaacggtcacggctgcggccacaatttgctcggcaccgccgcattgcaggccgccactgcggtaaaagattatctgcaacagcaccagttacccggcaccgtgcgcttttacggttgcccagcggaagagggcggctcctctaaaggctttatggtcaaagagggggtgtttgacgatgtggatattgcaatctgctggcacccggccacctttaccggtgttaacagcccggattctctggcctgcaacgagctgaatttttactttaaaggccgcgcgtcgcacgccgccagcagcccacatctggggcgcagtgcgctcgatgccgtagaattgatgaacgttggcgtcaactacatgcgcgaacacatgccgtcctcggcgcgcgtacactacgccatcaccgacagcggtggtcatgcgccgaacgtggttcaggccaacgcaacggtacgctatctggtgcgggcacgtcagttgcctgaactgcaccagttggtgaaacgcgtgaagaaaatcgcacagggtgccgcgctgatgaccgaaacagaagtgagttgggaagtgatcagcggcgatgccaacttgctgggtaacgcaccgctggaacagcgcatgcatgaacatctgctggcgcttggccccattcagttcgatgatgcggatcgcgcatttgccgccacattccaaaccgccatgagtgcagaagatattgccaactcctacgcacgttttggcgtgaaacctaaagcgggtgaatcgctgcatgagggtatctatccgctttacagcccggacgacagctttatcggctccaccgacgtcggcacggtaagctgggtagttccaaccgtacaaattcgtgccgccacctacgccatcggcacccccgcccactcctggcaactggtagcacagggcaaggcacctgcggcgcacaaaggcaccgcctatgcggccgaagccatggcgtcattaacggtggatttgctcctgaacccggcgctggtggcacaggcaaaagcggaattggccgagaaactgagcgttacaccgtttgaaaacccgatccccgacggcgtggttccgcccattcctcaagcataa

SEQ ID NO: 154392 - DNA, 129 bp, Enterobacter cloacae
atgctggcgaacgtcatgctcgccggtgaggtctgtcagaagttatctggaccagctgacgggaatatctgctctgtattcctcatactgctcatagatcgcatgctgaagcatcgtaatacgttctga

SEQ ID NO: 154393 - DNA, 2091 bp, Enterobacter cloacae
atgacaactgatttttcacaagatcataaagacgaaaaaaatcagatgcctacatctgaaacaaaaggcgccgacttagacgcattgctcaaccaatattttaaaggccgtgtcgttcgaaaagatctgacaaagcaattgaaagaaggcgctaacgtccctgtctatgtgctggagtatttactagggatgtattgtgcgtccgatgacgacgaagttgtaatgcaaggccttgagaatgtgaaaaaaatcttggctgagaactatgtccgacctgatgaagcggagaaagtgaagtcactgatccgtgaacgcggcacgtttaaaatcatcgacaaagtaagcgttaagctcaatcagaaaaaagacgtctatgaagctgcgttgtcgaacctgggtatcaaggatgcccttgtaccgaccaaaatagtacaagacaacgaaaaattattaactggcggtatctggtgcattattaccgtgcagtatttctttgaggaaggtcagaagacatcacctttctccattatgagtttaaaaccgatacaaatgccgtccatgaacatggatgaggtgttttcaaccagaagacattttagtaccgatcagtggatggatgtgttgcttcgttccgtgggtatggagccaaccaatttagagcatcgggtgaagtggcatcttattactcgcatgatcccattcgttgaaaacaactacaacgtttgtgagctcggaccaagagggacaggtaaaagccatgtttacaaagagtgctcaccaaactcattgcttatctcgggtggacaaacaactgtggcgaacttgttctataacatgagctcgcgccaagttgggttggtcggaatgtgggatgttgtcgcctttgatgaagtagcgggtattaactttaaagacaaagacggcgtccaaataatgaaagattatatggcgtcagggtcttttgcccgtggtcgtgattcaatcgaagcgaaggcttccatggtattcgtcggtaacatcaatcaaagcgttgagacactggtgaagaccagtcatctattggcaccttttcctgatgccatgattgacactgctttttttgaccgtttccattcctatattcctggatgggaaataccgaagatgcgtcctgagtttttcaccaatagttacggattaatcacagactatcttgctgaatacatgcgtgaaatgcgcaaacgaagttttgcggatgcgatcgataagttcttcaaactcggtaataaccttaatcagcgtgatgtcattgctgtacgcagaacggtttcgggcttgttaaagctactacaccccgacgcacagtacacaaaagatgatgtaagagcctgcctgacctatgcgctggaaactagacgtagggtcaaagagcaattgaaaaagcttggcggaatggaattttttgatgtgcactttagctacatcgataacgagtcattagaagagttcttcgtcaatgtaccggaacaaggtggcagcaagctaattcctgagggcttacctcgcgctggtgtcgtacacttagttactcagggaagcactgggcagcttgggttatatcgctatgaaacccagatgatggctggttctggtaaacactcagtgtctggccttggttcgaataccgcagcgaaagaagctgtgcgtgttggctttgattatttcaaaggtaacctgaatagaatcagtgcgtcggcgaagttttctgatcatgagtatcacctccatgttgttgagctccacaatacggggccaagtacaaagtcatcgctcgctgcattaattgcgttctgttcaattctgatgaaccgaccgattcaagagcagatggttgttttgggtgagatgactttaggtggtgtcgtcaatcctgttcaagatcttgcaggcagtcttcagttagctatggacagtggcgcaaagcgtattttgctcccaatggcctcagcctcagatattccaacggttcctgctgagttgttctcaaaattccagatcagcttttatgcagaccccgtcgatgccgtgtttaaggcgcttggggttaattga

SEQ ID NO: 154394 - DNA, 546 bp, Enterobacter cloacae
gtgtggcgttgcccctatactcgacgtgcgttagacgtcacgttgctgggatactctccgtatttgccgggtagcaaagaaattgcacctgaaaaagccgtgttgattgaaatgcctgagcttcctgtacgtcactggcgtttgtctggtggtggagaaatcgcccgaaaagaacgtctggagtggctggaaagtaatgcgctgattcaacatgcccgcgaggaaggattatggtctactcgcagcgaccgactggccctgaaagatagctggtatcgtctggaggaacactctgcgcagagaacgcctgagcagaaccagtttaatgaaaaacaatttaagtcaggcaaagttaatgtgctgaactgctccacgaccatggagatgggggtggacattggtggtatgagtttggtggcaatgaataacgttcctccagctccggcaaattatttgcagcgtgcaggtcgcgcggggcgtcgtggagagagtgcatctgctgccattacgttatgtaaaaacacggtgacctgcccccacgattag

SEQ ID NO: 154395 - DNA, 303 bp, Enterobacter cloacae; identical to SEQ ID NO: 96991

SEQ ID NO: 154396 - DNA, 1167 bp, Enterobacter cloacae
atgaaaatcaccatctccggtaccgggtatgttgggctgtccaacggtctgctaatcgcacagcaccatgacgtagttgcgttagacatcattccttctcgtgtcgaaatgttgaatgatcggacatctccgattgtcgataaagaaattcaacagttcttaaagttggagacaattaagtttaaggctacattagataaacatgaagcctatagaaatgctgattacgttattattgcgacgccaaccgattatgatccgaagactaattatttcaatacttccagtgtagagtcagtcattcaggatgtgacagcgattaatccaaatgcggtgatgataattaaatctaccgtaccggttggatttaccgccacgatggggaagaagtttaattcgcaaaatatcattttttctcccgagtttttgcgtgaaggtaaggcgctttatgacaacctacatccgtctcgtattgtcattggagaacgttccgaaagggctgcgcgttttgctgctttgcttcaggaaggggcagtgaagcaagacatcccaacgctgtttacagattctactgaagcggaagcaatcaagctttttgccaacacttatctggcaatgcgcgttgcttattttaacgaactcgatagctacgctgaaagtttaggtttaaatagccggcagattatcgaaggcgtttgcctggatccacgcataggtaaccactataacaatccctcgtttggctatggtggctattgtttgccaaaagataccaagcagcttttggctaattatcagtcagtcccgaataacattatttccgcgattgttgatgccaaccgtacccgcaaagattttatcgccgatgccattctcgccagaaaaccaaaggttgtggggatatatcgtctgatcatgaaaagcggctcggataacttccgcgcatcatccattcaggggatcatgaagcgcattaaagccaaaggtgtagaagtggtgatttatgaaccagtcatgcaggacgaaatgtttttcaattcgcgtattgagcgtgatttgacacagtttaaacaacaggctgacgtgatcatctcgaaccgtatggctgaggaactaaaagacgtgttcgagaaagtctatacccgcgatctctttggtagcgattga

SEQ ID NO: 154397 - DNA, 2211 bp, Enterobacter cloacae
atgatcaattactttattttaacttttatattactcgtaaccctttgtgcaacagagaaacgttatttaaagctaacggttactaacgttatcattttgctatacggtttttggtgtgtcagtgatatgttcactggtcgtgggatcaccgagtcagtttattatcatctttcagtaacgaatactggcgtttccctggatgagttatggccaaaaataatcatctcaatactatatgttttgatgattttaggtttaagtgcatatgtaatatactctagaaaaactaataagcatatttatgtattgaaacaagaaaataaaatttatcttttttctgtcgtaatcgcactagcatcacctgcgatgttgaatttctataactcgcttagttacttttcatacaatgatggttcttctgtagcatcagagtatagttttctgcaaaaagatatagcgagtaaaaagtataattatatttttatctatgcagaaagtctggagcggacatttagaaatctggatggtataaactatcttcctggtatttcaaaaattgccaaaaactatctggaatttagtaatataaaacaaattccgggtacaggttggacgatggctggtatcgtcaacactcagtgcgcaataccctttgtactgtcgcagggaaatggtggcgcaaactttgataaattcctccctaatgccaaatgtattggtgaatggttccagtcacaaggatacaccaccacatttatccgtggtagcgcaaaagagtttgctggtggagaccgattcctggaacagcatggctgggaaaatcaacatgataagcagtactttattgaaaatggtttagcttcggaaaaacagataagtggctggggaattcatgatgatgccatgttggatcatgcctggtctgaatttgttgagctctctcaaaaagaaaagccatttatattgtcttttcttacggtcaacacccatccacctgcggggacgattttagatgaatgcaaaggggttatccccgcagaaattagtaatgagatgttacgttcagtagtctgctctgattacttgttatcaacatttatcaataaagtcatccaaacaaagtactttgataatacaattatagttctggtctctgatcacttgatgatgaatagtgatgcttcttctgaattaaataaagtcgcagatgagagaaggaatgattttatagttataaaaaaagatgtacaccccaaaataattaatacggaagggagtttaatcgatgtctggccaactgttctgaatgttgccggtgttaagtctgcacaattaggctttggtcgtgatttaatgtcggaggaaaatggcagcctggcgcaacgtctgagtcaaaataagagtcttgataattatcttggctatgcggctagtttgtgggattatccaaatattcacgacaaaatgtcgttccgggatggccaatttttaattggtaataaaaaatataaaatgcctctttacggagaggttgagccaaatgggcgattatctagtatttggtttgaggcatttgcaaaaagcagtgctgaaaaagcagttaatagcaagcgctttttatatgcagactattgttcgaatacaaatgtacacttagaaggtgtctgtgcattcgtgatatcaagagatgaaactattcgatttaatatcaatggtgataaagtcctctctgagacactaggcaaacgtacaaaactattcagacccggaataattggggtttctgccgatgtctatctacatgaaactggaatctctaattatcagaaatatgtgaatcgaggcatatcatttttagctatgcaaaataataaggttactgattctatcagttttgatacttgcttgggcgaatcagtagataaagagaagttggcacaattcttaaagcagcataattcgaatggcattcttttcatgtcaaatgatagtctttactgtgattcacgtgaagcatcggatagcgtgattgaaatgattcatgatcagcgtttaagtaatatccaggtaagacaacagataattggtacttacactgaaggacaaaaaccggaattcatattaggtgagccagacaaagtattagacgcattttatgatggaaaacacaatcaagtttatactatttgtgatgttttaccctgtaactag

SEQ ID NO: 154398 - DNA, 315 bp, Enterobacter cloacae
atgaaagttaaaaatagaaaaagagaacttactgcaaaagagtatgctgaacagtatgagattagcgttagaacagtaaaaagatatttctctcaagatcgtgaagactatgagaaagaagcaaaacaaagacgattaaaagcctttgtattacgtgaaagcgggatgaaatgggcagaggttggtattgctcttggaactacaaaacatggtgctatagctctttataaacgttatcaacaaatagacgcaccaacacaactacagcaggaagacgatcagcatttaaaaccaagaggttttaaaccgcgataa

SEQ ID NO: 154399 - DNA, 852 bp, Enterobacter cloacae
atgttcaatatagaaaataacagagagatattaaaaagtcaaatacctttaaagccatatgctacaaatgatttagagtttggattgactattcaaaataagaataaagctttagatatgctttatttacaagtaaatcacccgttgtatcttcatacaatgatatttgatttagacaaagaaaactgcttttatgagtttgaaaatgctcatttgcccatcccgtcttttataacaaaatcaccagactctggtagatgtcattacggttatatgcttaatgctccgatctcatcaacagagaaaagcagacagaagcctgtcaagtttgccagagcattatattacaatatggctactcgtcttggtgctgatcttggctatgcgggactgattactaaaaacccactgcatagccattggtcgccgttctggtctggtgctgatttatacgaacttaatgatttagctgattgttttgatgatttagaagaccccaaaaaacgagaaaatacggggcttgcttttggtcgtaatgttgaaatgttcgacacaataaggcagtgggcttataaaaatgtgctaaaatatcagagtgaaagctcatttaatgatttccacaatgaactattgctaaagtgtcaaatgcataatgcatatttaaatgctgatgatttattgccatataatgagataaaagccacagcaaaaagcattgcaaagttttgttggaaagaattcagcgaagaaaaactcaacaagatacagagtaaaaaacagtcttaccgtggaaagaaaaacaaaggaatagtaaaaagtaaaactcgtaagtttttggaggccataaaatga

SEQ ID NO: 154400 - DNA, 261 bp, Enterobacter cloacae
atgaatgagaatgatatagatcagtccttgctagaactattagcaagatatttttattatatagacccaaatgaagaaaatacagcatttcttgaagcaaataaagatgaacaagatttatgttattttgtagcttatcgctatattaaagaaaataaaactcaagatcttattgatgctttgaaaaatcaaaaagatgaagattatatcaaagcaatgaaagattatgtttatggaggtggtaaatatggatacagatag

SEQ ID NO: 154401 - DNA, 372 bp, Enterobacter cloacae
atggatacagatagaaaaagaggccgcaagggtttaaatcacgaagtacgtagagatatatctatacagtttagagtaaacaaagcagagtttgactatttaaaagaacttgtggaagcctccggccttgagagaggccattacattagaaaagagattttaaactctgaacctattgttaaaagaaaaatgccggattttgaacaatccttgtttaaggaaatacagcatcaaggtaataatataaatcagattgctaaaaaactaaataccaacgaagactttaaacaatctttagcagcagaagctaactttgccataaagcaacttatgaaaagaatattaaaagcttgcgaggtttatacagtatga

SEQ ID NO: 154402 - DNA, 1485 bp, Enterobacter cloacae
atgaaaggaaacgtagctaaaacaggtagatcatttaaaaatagagttgagtatatattaaaagatgatcacgatttcatatgtagcaacatggcaagtgattataataatgttagtgatttaactgatgagtttaaaactgtaagcagctttagacaagatataaaaaaaccagtttttcacgcttttttatctcttcccaagaatgaacatttaacagatgaacaatggcaagagatagcaaaagactatttgaaagaaatgaatattaatatagaaaaacatcaatatatttgtgtgcgtcataacgatacagatcaagaccatatccatatagtagcaaatagagtcggtttagacggttcagtatggcttgggcagcactcagcatttaacacaatagcagcttgtgaacgtttggagataaagcacggcttaaccatcacggatggcttaaaaggccaaaaatcagacgtatcagcaccaaccaaagcagagatcgagcaagccttgaggacaggtgagaaaccagcccgtttagtgctacagaacgcactacaagcagctttagtcggtaagcctgatttgtctacgttcgtagaacgtctgcaggccgtaggcattgaaccaaggttcaatgttgccagcactggcaacgtggcgggggtttcattcagtgtgggagatgtggccttcaaaggttcgcagttaggtaaaaaatacagttggaacactataaaaaacaaggtgatatatgacaaaaatagagatgatgaactcgttagaagattcgcagcaagaaaaacagatgacgaaaatagtattagacgatcacctactgaaccagatttcaatgacagtagagccgttgacagaatcgatgatgatactatcggagtcagtcagcacggcattaaaccagacacaacagacacttacgagggtgaacaactcattagaagcaacaacaacagctttaaactcagcgaaaaatataatagaccagcaagccataaagttagaagaacaacacaaaaagctgcacaaatactcaacagagttaaaaaacaatacaataaagaaccaatcaaaacttataataaaaatggcctcaatagttggcgtgataaatctgatagcggttctattggtaggatacttgatcatgcagaaacagcaaacgcagccacctattcatttagactcaagagcggtagccgtttcaatagtcgagcaactaagatcgaagagataagagataaacttggaataaaaaaacctgttattcagccaaagaataaagaaaaaatagttaaagaagaaataaagaaaaaacctttaggtttgagtatgaatgaaaatagatttaaatcgaagttaaaagaaacccttaaaaaagaaaaaccaagaaatgaaacaacaccaacacaactacagcaggaagacgatcagcatttaaaaccaagaggttttaaaccgcgataa

SEQ ID NO: 154403 - DNA, 444 bp, Enterobacter cloacae
atgcgtggtaaagaattggatactcagatagagcatgaactccagttgatgttgattgaagggtttgataaatcgcctatttcagctaaaaacttacatgccagacttaaatcaaaaggaatcattaatggtggcttaagtacattaagtaacattgaacgaaggcgtcttattgcagcctatgtcgatcaacaactatcgcctctgaatcttcgtcccaaagaaaaacagcagtatgtgaaccgtaagactcggcaggccttgcttggtcgtaatcagcagttacaggaagagaataaagagcttcgcgaacaactagcacagaataccttgtcattgattgaaattgtcaaagcggtaaaaatcaatacggttataccggtagaaagccttcttgctccgcatttgatcatggaattacacaaaaggaaaaaagatcaatga

SEQ ID NO: 154404 - DNA, 561 bp, Enterobacter cloacae
atgaatagtagagtaaccaaccctgagtcgtacatattttctgcaatcatctatattggcaaagataacttcaccagtaacgaagtagcgaaaattcttatcgagcgattttcacttccgaaaaattatttaaaggcaaaagcttttgcttataaccaaattcaaggtctggttagaaagggattgttaaataaagtaagaaaattaggtgcgtatcaatatttatactcagccacatctgaattcaatgtcgtaaaggaaaacgtagagttaattgaggtacccaaaaagagcccctgtcaacttatttcaagtgctaccagttatgaacatagcaatgtaaacattcaaataagaactcttattgaaaaatacagcagcgagatggaaaaagtatcaggagcaaaggagatttatgaagaattgataattgccgtgccgagcagggaaaatgaattcaggaaactttctctcgaacaagagaaaaagcaaattaagataaatgaaaaaataaacacattgattgggatttttaataaaaccattgcaataaagcaatga

SEQ ID NO: 154405 - DNA, 1059 bp, Enterobacter cloacae
atggaaagtatcgcgctatacaactgggctacaagtgttttgtcttctattacagaagatttgaatgatcattactataaagaaattaatggcagtctcgctttacaatttgaaactacagatattgtgaacgctagagctttagtttactcagagcgtgatgaaccaccaaggcatgctatatcaatcacatataaattaatccgatcattatatgatgatgctgctgcttttgtagattatgttcactcgggtaaagatgatgaagcttatgatatgtggtttaacgggcaaaccaactttaccactttaagagatgagtgggataaaactaatttcactaaaaacatttttctagcaggtttgacatgggttttttttcatgagttaggacacttaactcagggccatttatttataaggaacaggtatagttccgatattaatgtaatgtctgaaattcacttaaataatttatcatcagacaataacgatgcatctgccatttggcacgcaacggaacttgcagccgattatttttccacatgcatgtgtgtagtagaaattgttcgacaacttgccattaatgaaaattgcgaattggcaatttgctttttgacatgtggtatatcattaatgttacatcgttttcaaggcgaaaaattttatgaggttcaaacagaaccagttggtacacatcctaggccattcgtaaggcttgaaatgatcgtacctttaatttttgaattactttctattacaaacacagatcaacgtcgtagttatgtgcttgcaggtggtgaatcggccaacagggttggactgttctggataagaaagactggaataatggagggtattcctgaacattaccttatcgaaggtacattgaaccggcctggagttgttgagtatttgaggcatatcatttttatttgggatagcatttcatctgaaatctctgagatgttcacttttggcacaaaaaaaatgcttctcaacttcacgaatgtacttcggactgcaccagatttgaatgatgatacacaggaaaaataa

SEQ ID NO: 154406 - DNA, 222 bp, Enterobacter cloacae
atgattgtcagtgatgatatttggcaagatatactatttgggaaactacagccattctgccgttatggggatttccctccggaatcgacgtttgtcaatgtattctggtggcagtatgtggctggcggcaatgctggatgggatgactatagaccagcgttagacgtgctggtctatagaggttatctgaaacgaagccctaacggctggtatgtgttttag

SEQ ID NO: 154407 - DNA, 930 bp, Enterobacter cloacae
ttgttactcaaaccagcggcactaagaacagatggccggacatatcaagtattcctgccacatatcatcagcgaactcccagaacggcacagcaaaaggccatcccaatggttcaaggctgcactaacacgccttcagggggccccaaccgaactgcaagaactgtgcacgccaaagcttatttccggcgagtggaatcaccgtacagattggatttcggcatttgacgctctggccttgcttgcctgtagtcctgatagctaccagaacgatgatctcatcaacgaaatcgaagataaaacagggttaaaactccctgtcccgcctggaaaaagtaagcatgaggctttatttggcggtctgctcatagaaacccttaaacgcatttcagaaaccagcggtagacaattcagcgtcatcacgcagaagcatttcaacggcaggagataccgcgtagattttcttgtcacgctccaaggaataaaacgtaacgccccaacaaagacatacatcattgagtttgatgaggcatttcatgcagagaaacggcagcgagaaagggatattgagcgtgacagatggtttaggaagcatgagaaaaccatggagctcatccgagtagagcatgaacaccaagacaactggcttaaatgccttgaaggtatcggggaaccacgcccaatcgagcactattacgctcactgcatccgggttgccagcgagatcaggtcgaaaacggagcgggttattactggggagtcatcaaaagctgcctacgacccggcgagaaattgctgttcctgcctgctaaaacgcggtaaacgccgcctgaatgagctgtcaggcatcatgcaagatctcaacattccattcacggcaaccgaccggctgttcgtaacccgccgcagccccagcaaatacgggctataa

SEQ ID NO: 154408 - DNA, 621 bp, Enterobacter cloacae
atgaggacttacgcttatctgcgggcatccacagccgaacaaaacgctgcccgtgcatcacaatcactgaacgccttcgcagaagaacacggactaaccatcgctgcaaacttcatcgagaacgtatccggtgcatcactacagcgtcctgaacttttccggcttctcgctgtagctcaggcgggtgacattctgctggttgaacaaatcgaccgcctcagccgtctagatgctgacgattgggaacgcctcagaggcgtaatccagaacaagggaatcaggatagtcgctctggatctgccaaccagctacctgcaactgcaatccgggaatgatgagttcatgcgttcgatgatgaatgcaatcaacgggatgatgctcgatatgctcgccgccatagcccgcaaggactatacagaccgccgtcgccgtcaagctcagggcatcgagaaggccaaagaaatgggactctacaaaggccgactgccagatttagaaaagcatgagcacattcggacgctgatcgctcagggaaactcgcagagaaaggtagctaagatgctctcttgtgccgtgggaactgtaagaaatgcacttaatgcggagaaaacaacgggatga

SEQ ID NO: 154409 - DNA, 231 bp, Enterobacter cloacae
atgaaaattagccaggaaaaatacacagcgttgctaccgttgattcgttcaactccaggtttctatgaggaaaaggtactgccaaattcctacacgcagaagttttctttcaagtctggttttgcttgttgtatctcacggaatgacaagaacacagatttatcggtccactttgaaaaagagggggtcgactcagtcgctcatttggcaatcctcactgcgatacagtaa

SEQ ID NO: 154410 - DNA, 186 bp, Enterobacter cloacae
atgcgtcacccgatccctgcgcagcttgctgcttctgaaacactagaatttagtcaaaaaattgttcctaacattcatcccgtattactttacagtacccctttaccggaagcggaagaaatggtctgcttcgtcaatgtcgaacaggctatcgcgaagagtggcggcagggcaatttacggctag

SEQ ID NO: 154411 - DNA, 777 bp, Enterobacter cloacae
atgaattttattactttggtgctttatatagtatctggaagcatgacgtttattgcaagccgagtattgaagtcttataacgctgcagatgatgtggcgcaattagtctacccaataattgcaatgttttcattgtggctttcttctgttactgagcgttataataaaaataaggaaattaatgaacgtgtaaatcttgaggcaaataaatggcaggaggttgtcagaaaattaaatcaagtaaagctggatatgttatatagagttatacatatctataaaaatgaaagggctcaaaacgaggaatactttaatactaaaattactaaaaccattgaaagtcagttggcttttaaaacagacttaattaaattggaggcaaaaacaacagcgctagttctcaaaaatagagaactaatattacaagataggcggcaagaggaacaaattgataacatcctcattgcaaaaggacgacttgagaggaaggtcactagcttcattcagcttttacgtcaattccataataatataaatatgcatttgcgaactctggatgataaagagtctcgactgtggggaggtattgagaaactcggagatgaaatatttagacaaataaatgaattcgacgcatacatgtccttaagtttgattgaggaaaaggaaaattcagcacctataaatagaaaaggtgttgtgcaggaaacggatgtgagatttgatgctcaatctattgaaattgattttagtgatatggatagtaagaaaaagtag

SEQ ID NO: 154412 - DNA, 513 bp, Enterobacter cloacae
atgtctgaacgctctgatctttataatgtattgaaaacaatcgatggtgttactgatattgacgaaggcaggcttttaaagaaggatgagttgggttatacagccgttgggaattttgattactcttccgatccaaatgatggaacatactcaataaactactttacttctaagcgtgctgtttcctattccattagtctggctattcattttatttatgaaaaagttgaaagctctattgatgaatgcgatttgttaaaattaattgatgcttataatagaacggttattgggataaaagttactaacctgccccaagaaagggatgatgaactgaggatttctttaaagactgagttttatacccctgctgaaaattgttctcttgaagatttcaaacctagcctatggataatgttgagatttttagagaatgcaccaactgcatttagtcgatatttaagaaagcatgatatcaaacatgattatttatttgaagatgcaatgaactaa

SEQ ID NO: 154413 - DNA, 888 bp, Enterobacter cloacae
ttgcgggcaaagcgtggtgataccggctatctgctgctgccagaggttatccgcagtggcggcgaccggtgtcagacagataccagtcgcgcaaagattcagctgcggaagctcaccctgccggacgctgagtggccgggtgagatggtgtgccgtcagcgccagtatgctctccagccacagcgtgtcatgcaggcgcgaagcgcggctgccgctctcccgctgccagtccgtcaccggcagggcgacatgaccgttctgccgcacccgcacgcccggcaaccccggtgtgacggtaaaccactgcgcctctcctttatggtgaagtgcaggcggcgatacccaggccacactccataccggtggcacaccgttcagccagctccggcactgcgcaatgctgcgtcgccagccacgcagagactgcgccagcgcctcttccgaggtctgctgttccggtatcagcaccagcaacaccgagacctgcgacaccagagccgggcggacggctgccagatgctgcgccagcagcggcagctgttctgcgttttgcgcgtgcagataccagccctgacgggtttcacgataagcggtatcgggggaaaacaggggggccgtgtcgccgcagaccagcaccaccgccccctgaaaatcttccggcggcaggctgtgctccgttaccggtatgctgacgaactggcgacgccgccaccggtgccagagcgccgcgccgcagaccagcagaatacagacgctgagcacagaacggctgacggtggacaacggccagaaacccacgaccagccacagggcaagagcagcagcaaacagtgtgagaagcgttcgggagagttcacgcatctgttatccctgccccgcaatctgtga

SEQ ID NO: 154414 - DNA, 453 bp, Enterobacter cloacae
atgacggctctcgcagcggagtttttcactttggatgaagttaaccgactcaagatcattcaggacgtcatcgaccggcgtctgacaacaaaaatggcagctcagcggcttggtatctccgaccgtcagtgccgccgcctgcttgcgcgttatcgtgaagatggtccgcttggcatgaccagccgccgtcgtggtaaatccagcaacaatcagctgcctcagggactggccgcatacgcgctgagtattattcgagaacgctataacgatttcggcccgacgctggcctgtgaaaagctgtctgagattcatggcgtacatctttctaaagaaactgtgcgtaagctgatgactcaggccagtctgtgggtcccacgtaagcaacgtgcgccaaaaattcagcagcctcgttaccgtcgtgcctgtgccggtgaactcggctttgttgaataa

SEQ ID NO: 154415 - DNA, 294 bp, Enterobacter cloacae
atgactgcaaaaacagctttaatggatcgtcttgcaaaagtggctaaaggcgcaccacttcaggaagctaccggtgaggaaataccagcaaaagcctccacgcataatgtcggtgatgaaccgaagacaaaagctaaagttgggcgcaaacctaagaacctacaaatcccacaagacctgtgggaagcctacgaacatttgaaaaataacaatacaaccagcttactcatgactccatatatacttgaagcattcagagaaaaactggcgagagatggcgcgtttaataaataa

SEQ ID NO: 154416 - DNA, 579 bp, Enterobacter cloacae
gtggtctggtacgggggctgggtcgagctggtggtgaccggcccggtatcgtccggcgccttaacgccaggccccataggggcggtgacgctgcagggcagcgacggtatctaccgcgacgggttaaccgtgcagctgaccggcggcacaatcaacgcgctggcctgcaccatcaccacgccgcagctgacgttcccgattggtgatatttcggccgcagcatttggctcagtggtgggcaccacgccagcggttgcgcagaatacgcaaaatctcgggttgaactgcagcgccggcaccaatatttcggtttccctgagcggaatacagaacccggacagtgcgaataccagcgtaatggcattaacagggcagggaaacagcggcaccgcaaaaggcgttggcgtacagcttctttataatggctcgccgctgacgttaaacagccgtcttttattaaaacagtcagcaggcgggcaggagacgctcccgttaacggcacgctattaccagacattaacatccgttgagtccggctcggcaaatgcctccgccacccttaatttgacctaccagtaa

SEQ ID NO: 154417 - DNA, 453 bp, Enterobacter cloacae
atggtagatattcaggcgcaaacggacgccatgcgcctccagtcggataagaccatgaacattaacagcgtcagtggtgaaattgtgctgaatgccgctcaggggatcacgctgaccagcaaaggtggggcgtatataaaaattaaagatggttcggtggaaattggtgcaccagggaaaatagatttaaaaagtgcaaatattttgtggggtggaagtgcttccctggagcaggcactttctcctgtatctgtgagcgaccctaaatttcataatccgatgaacggtggttttcaggtgctggatcaatcgagtaatcagccgaaaccctacatcccatatcgcattgaaaccgaagatgggcagattattcgcggtgtgacggatgagaatggttatacacaggcgcattatggtattgatccaaaaggaatcaaactattttttgaataa

SEQ ID NO: 154418 - DNA, 2319 bp, Enterobacter cloacae
atgagtggacaggaaactccagctgcggaacattcgctgaacaaagtagataaaaatgtcaaagttgttcttcacaaatcatgccagtgttatttcagaatagaaacgcttgagcttatttttattgatgagtctgatgccgctgagtttgaaaagtgtatgagtaaactcagtgaattaatagataaacaccataaagccaatgctgattattcagatgccgtagaaaagtacggcaacgccatgaaggatattgcaaacaaaaataagttatcgggctatgaggatgcaatcacttcaactgaaatagcgcttgaaaaagcgactaaggatcttcaggcagagcttggtgaattcaacgaacaatctggttataaacctttaattgagttgatccccattcagcctttaaataaaggtatttatgggcgttgctactcatatgttaaacaatccgattatgactcgtttgagagtaagttcaccattatttcggttgatacttttagcggtgatgcaatttttaagaaagatgataaaggaaatatcattggaattaatatcagctcgttaaagacgaaactggcatcagtgaaaaataccatcaaacagatgatggacagtaccatgacggtcagcgctgatattaattatgaagccacgctgactgactgggctaatgcatggaatgaacagtgtgaggaatacagcaaagaggggaattatattgatgtttccgccggggcgcagtttctgcgttttaccgcaaatgcctccacgctgaacacctggaacccggataccggtgaagcccggataaaaggggaaacgtgtgcagaattaatgctatttaccgggaaagtaaattcgacgatttacactccggatcgggttggctggccgcttagatttacggtcaacgacactaacgaagttaatcttggtgtcctgcgggcaagaattgacggtgaactgacaggatacgttggcgcatcagcacaggtggagggtaacctgcaatttgtaacgtacaataataagcagttgctgatgggaaatcgcacgccaggttcacgttttgccgaacggaaaaaaggcgtaaagatcaaggacagcaaagaacaaacccatgccctggaggtaaagggagaagcatttggtggagcgagagctggaggcagtctggggggcgcattgcagtggctgaagccttttgattcactggtggatgaacttcccaatatgctgcgtacctttggtctggtggactcccccgcacaggcacgaattattcttgcggttcagcagtcggaaaaggaaaaagaaaaagatacgcaactgggagagtttcaggattttgcctctttgaaggtagggggagatgctgagctgggtgtggggctgagcggtgagttcagagtccggtttgtaaaggggcgattcagatttcatattaaaggcggcgtttgtctggcggttggagctaaaggtgaggttgaaggggaaatctcaccagaattgtttggtgagtttgctatctgggtgatttatcagttgtatgggattgattataagcatttggcgattattgctgatgatgcatttatggcattggcttatatgctgattatgggaggcaaagaaatatatgaaagctattataatgaaatgattgcagagtttcttgtcgtaaaagatgactttaatgactttattgaaaaagtaactaacgaagttgttgaggcgaagagccaatcaactgaacgaaataaactcgctgatgtaattaatgcagatcctagcagtgtgtatcttttttctcctgaggcaaaggggattgcactctatttactgatcggggatgggacatatgaccgtatagatattaataatcagggggatggatttcttcctgatacaaacaaacatcgtaaagcggcagtgttatatattttatccagtattcagacaaagcgagaatggaagaaagtgctgactcgaataactaaagatggcaccgtttttcccggaaatgaagatgcaatggttgagttggttcagaaaaaattaaaaatttttttacaaataggttttaatcgagatgaagaactggaagagattattgacaggctaaatctacgggattttgaagaggtagttaaacgtctgaagactaatccaacctggggttatgcgttttcaccaaactgtagtaaacaatatgcattacactgtgatgataatccattttatacatcgttatgttattttgaaccggtgaatcctcaatataaacaaaagtgggaagggaataaataa

SEQ ID NO: 154419 - DNA, 1305 bp, Enterobacter cloacae
atggctgtttcctccccaaatactttaagaggaatgccgacgagttggtcagcatcagtcgacagacttgcgtcaggtagtcctgacgatccagaaaaaagattgtttatattatcagcaggtaatcttcctcctaatctaatttctgattaccctgaagcaaatattacttattcaattgaagatcccgctaactcatataatgctctaacaattggatattgggcaagcgaagacaatattataacgcccggatatgatgttatagctgaattaactgatctaggtccttcatctacaacatcaagaatatggaaaaatacctcaccttataagcctgatgtcgtttttgagggaggtaattttggttatgataaagatctcaattttacggcaaatttagaagagcttagtttattaacgctctctcatgatttcactcgcggagaatattttagtagtttttctgaaacaagcgcggctacaggtatggctgcatttttcatttctaaactatggagtcaatatccaaattattggccagaaacgattcgggcattagttgttcatagtgctacatggccaagaaaattacttgaaagacatgccccattgcgtacaaaacagaatgttgaatcccttttaagaatgtcaggttatggctgtccaaatttagctaaagcagtatcaagtggcgatcagtctgttaatttgatagttgaagatacaattcagccttacacagttgatggcaccttaaataaaatgattctttactctttgccatggccttcttctgaattagaaaaaattggtggagaggatgttaagttaagagtaacgttatcttattttgtcgagcctaatcccggcgagagaggttgggataataaatataaatatggctcttttggtttaagatttgattttaatagtccaggcgaagagtcaggagagtttgtttcaagaataaacaaaaaattcaaagatgataatcaagaatttgatgctggtgaaagtgattctagccaatggttattaggaccaaccctaaggaacagaggttctattcatagcgatatttggagtggaacagcattagaattagctgacaaaaaattcatagctatttatcctgtaagtggatggtggaaggaacttaaaaaagaaaatagacaatctagtattgcaagatttagcttaattatttctattgaaactaaagaaaacaatttagaaatacacaacgaaattagtcagttattaagagtagatacagaaatagagaacgtaattgaactttaa

SEQ ID NO: 154420 - DNA, 255 bp, Enterobacter cloacae
atgcattgcggccacataggccagctcggaacgctggaaacacagaccaccagtcatgtgatctttgccatagaagcagtgggtttcttcatccagccggaagagaatcagcagttattcatcgggctcgtgttcaacatcaaaactcagcccagcggctgcaaactctatccgctggccagcatcaataccagccgacagatctttcccaccgtcatgctcccatacccatacggcggcctgcttatcttctga

SEQ ID NO: 154421 - DNA, 1308 bp, Enterobacter cloacae
atggcgcagcgtgataatctttatcgacgtccaagcggtatctatgttctgcggatcaccgttccggttcgttatcgcgccctgatagggcagcgtgaaattcatgcatctacccgcacaacccaccttgcagatgccagagctattgccgcgcgtttgctggataagtggtatgcgtctctggaagagttcaggcaagtggataaagagaagatcaggggcaatgccccattgttgactggcgcaggcaaaatcagcctggcattgttttgcgattcatttggggttggggttgagactgtcgtccagcatcttctggcagacaatgtgccgctgtatgcccttgtgtcgaaccagcgtggctttctgattgatgatttcagcactcttgagcgtgatcctgatacgcatgggttcgttttgactaacattgcgtatgacggtgctgaggctgcggtgaacggctatatgcagctttaccagcctcagtttgcccttgttgaattgctgaacgggcgagaggttgaggttacggcattcagggctaacaacggcaatcctctttccctctggttgttggatttacccggggtgacgctgaatgcaagttctttgttcatcaacaacgtgcaggctgaaaaactgcgtagcacttgggataaggcgcttacgaaatcggaaccgacatcaaccatcccaccaaaagcttctacagtgccatcaacagcgcttcctgcggccgctaccatgaatccgtattgcaatccgttgtatgcgagtatgacggtttcagcattgctggaagcgtttctggtctacaaaaatacgggtgatatcaagttggccagtgaggggaaaattcgctccagaattgaacacttcacggagatcatgggcgatatgtccttgagtgggctggatcgtgatgtcgtgaaggactacgtcaacagaatgcagaatatgcccggcaatctgtatttaatgcggcgaaaatacaagatttcagatacgcataagctgattgaaatggctttggctgatggtcagccggtcatgagccgaagccgagatgcgattggcaggcatattgaatcactgggatcaatgctcaaatgggctaagagcgaacgttatctttttgataatcctgctgagaatgtgctggctcagcgccgcatgatggtgcgtgagcaggatcgtcgcgacctcttcaccgatgatgaattagtgcaaattttctcggctgactggtttaagaaaggctcgggaacgcccaatcaatatggacgttatggctttgttgaataa

SEQ ID NO: 154422 - DNA, 303 bp, Enterobacter cloacae
atgagttcaatggtttactgccgaggatgcggcaaggaaatacacgaaacagcaaagtcatgcccacactgcggagccacaaacgcctcttcaggttcaggtgaaaaaagtagaatcgcagccgcgctattagcattcttccttggtggatttggcgtacataaattttacttaggtaaaataggacagggattcctgtatctaattttttgctggacattcatacccgcgatcatcgcgtttattgagtttattatttatctatgcgattccgatgaaaaattcgcaagaaaatatggctaa

SEQ ID NO: 154423 - DNA, 633 bp, Enterobacter cloacae
atggtccgcagttcgccgcgggcgagcgccggtttcagcaggttggccgcatccgcgccgcccgcctggttgcctgcgccgataatggtgtgcgcctcgtcgatgaacagcagcaccggggacggagactgctgcaccgcatcaatgacgtttttcaggcgctgttcaaactcccccttcacgcctgcccccgcctgtaacagaccgaggtccagcgtgcgcaggctcaccgttttcagggattccggcacattcccttcggcgatgcgcagcgccagtccttccaccagggcggttttccccacgcccggctccccgaccagaatcgggttgttcttgcgacgccgcgagagaatatccaccatctggcggatttccgtatcacggccgaaaaccgggtcgattttgccctcacgcgcgttagcggtgacatcaagggtgaatttatccagcgcattctgtaacgcaggtgacagttcgccctctttcacctcactgccggacagcggcacgctgccgccctgcgccagttcttcttcctgctgtacctcttcgcgctcatctgactgcgcatccagcagcggtcgcagacgctcaagctggctcaccccccagcgtcagcagcggccataa

SEQ ID NO: 154424 - DNA, 336 bp, Enterobacter cloacae
atgatgcatcaccgtatccagctggcggctgatttggaaatccagctccgcgatatggtggtcaatcagggttttatcgagtttttccactggctggccggatttgcggatgcagtccataaatacctgcattgccgcggtcaggcgctcacctgccggagcatcagacagtgcggcatcgtccagaaacgcattgatatcgcccaggcttgtggccggggtcaggttgattttgtcgaacagggaggcgtagacgctctctttttccagcacagtggtctgcccctgcgcggagccattttcagtattaacagacatcagcattctctcgtttaa

SEQ ID NO: 154425 - DNA, 528 bp, Enterobacter cloacae
atgagaaatttacttgaatattccggtagcttgataagtaacgatagtttgatcgtagcaccttacgattatcagaagcaaagctatgaaaatattttaccattgaacaatggtcttataaaaaactggaatatacaaaaattctcaagtaattactctgaaatagaacacctaaatgtgatcaatggcatgggagtgacattaggtgattctatcgtcgggatttctgtgctgtcagcaatcaaaaaaaagaatcccaagattaaaattaagattattcgaccggagactgcaccgtcatatgttgaggaactgtatgaattagcatcctcggtcatagatgagcttcattacatgccttttcatattcagaaattgccttgtactgcattgaatattgatgtgggaaatcagctatattctccagatttccatattatggaaatgcatgattattttatccaaggtcttggcgtgaaacttgattatgttaaccataatgagttatctaataaatggctttgttga

SEQ ID NO: 154426 - DNA, 147 bp, Enterobacter cloacae
atgacatgctttgtttatatcaaagcaagagcgcaattaaatgatctactggggtttaaaattaaaatcatttactggtcattagcggtgatagttattttgatgacaattattatcatcacgacatatattaaacttgagagttag

SEQ ID NO: 154427 - DNA, 783 bp, Enterobacter cloacae
atgattctggcggccctcgccgccggaaagcatgtgttctgcgaaaaaccggtgggcatgaacagcagcgaactggtggatatcacccgcgccgctgaacaggctacgggtctgctcggcgtgtgttatcagaaccggctcaaccccaccagcctgcgcattcgccaggcgctggacgaaggcgagctgggaaaaatgctcagtatcaaagcggtgctgacgtggtcacgctcgggcgcgtactactcccaaagtccgtggcgtgggcgactggctacggaaggaggcagcctgctgatcaaccaggccattcataccctcgacctgatgcagtggtttgccggcggcgtgacgcgtgtgaaaggcgtggtggatagcggtgaactggcggacgtgacggaaggtgaagacagcgcgatggccacgctgcactttgctaacggcgcgcgcggcctgttttacgccagcaactgcaataccactgattccccgcttctgatggagatccactgcgagcagggctcgctgctgctcaacgacaacacgctctggcgcgtgacgccgggtgagcgcgtcaggctcacctgcgacgactccccggacggttcggtcaaaagctactgggggctgggccaccagcaggcgatccgccgtttttatcaggctatcactcaccccggttacacggattacaccgatatccgtgaagccggtaaatcactcacccttgtggaggctatttatcgatcatctcaattaaggcattggatagaaatcaattaa

SEQ ID NO: 154428 - DNA, 498 bp, Enterobacter cloacae
atggtcaaaccaactgaacgtagagtgggttatggcgtggcgctcggctacggtataaccgatctgtttggcggaggcgctttcgccattatcggcacctggcttttatttttttacaccacctattgcgggctctctgtcgtcgaagcgggttcgatatttgctattgcccgcgtcattgatgcgttattaagcccgattatgggttatatcacggataatttcggtgatacctggctcgggcgtaaatttggccgtcgccgcttctttttattactcagttcgcccttaatgtttctgtatgccctgctgtggcttacggacatggggtactggtattacctgggcacttacctctctattgagctcttgtcggcgatggtgctggtgccctgggaaaccctggccgctgagatgactaaccggtatgaagagcgtagccgtctctccggcgtgcgtatgatctgggctttgttgaataaatcagatttcgggtaa

SEQ ID NO: 154429 - DNA, 144 bp, Enterobacter cloacae
atgatcctgactactataataattcatctaaaaaggacccgaaaggaccgaataaacctgttattaaagatgaagatacggggcaataccgaaaggtacggcgaggggggaataatccagatccaacaggagatgtggggttga

SEQ ID NO: 154430 - DNA, 528 bp, Enterobacter cloacae
atgaaagagataatttatcaatgtagtatttttgtgattttgcttattagtggctgtgataacataactaagccagcacagcatacaccgcatgaaaaggcagtgttacagaaatatataaaccgtgtcaaagccgatcttgtgtatgtaaaaggtggttcgttttggatgggagatttctgcaaaaagatgcgtaacggcggcccttattgttcatcagcgaaagataccaaacctgctcacgaagtagagctcagtagtttttctattggtaaatttaaagtaacacatgaggactacaatttttatctcaagacggcaggtttaccaaagaagtattttaaagagaagagttatgatgaaatactatctattacgaattattttaaaaaaagtcctgccgtagtaacttggactgaagcaaataattactgtgcttggctgaaaaatgagaccgggttacctttttcgcttccaactgaagctcagtgggaatatgctgcacgcggtaggggcagtatattttag

SEQ ID NO: 154431 - DNA, 291 bp, Enterobacter cloacae
atgcttgaccggggcagcaatatcgacataacggattccctgggtgagactctgctgataaatgctttcgattttcattcctacgatcatgttttccttttacttgagcgtggggctgatcctgacattcgtgctgataacgggtgggccttaggaaatcagttgcagcgttttcttgaaagagcgaaaaaagacagtgacgagtataaaaaccttatcgctattaaagaatcacttatccgacatggtggtaagtggccacccgagccggtcaaaagagggattgagtga

SEQ ID NO: 154432 - DNA, 846 bp, Enterobacter cloacae
gtgaacataaacgcaaaaaataaaatactctatttctggggcattatggatgtcatcggcattgtgttttattttgtcggcccataccacttgcttcagtcatggtgggattctaccggtgggaattttggtgttatcatcttcatgctgatagcaggaggggtaaacggtttattgacgggtcttttttacctggtataccttctgtggccggtttcattactcttttctgcctggttttttttcacaactcaccgatatgccgtccggtttgcgctggcgcaggaagtgctacgcctgctcaccctgagttgttcggtgaccttgttcccgatgattattgtcggtctcggaatgagtgttatatctcttaatatcacgctgttcattttgtcggaaatagtaaaaattggctcgctcatatttgtcattaaaaaatgtaatgcgggtgatggggtaaacaaatttttaccgttaactgaacgggactatatcgaaagagccctcagactggcgcaaaaaagatatgcggaaattaatggcaagtaccccagggagccaattttacatatgtatgatgagattgtgcagcagttacgcattctgaaaaagattgtgatcaaaaacaaagctgacaaatccgtattaaagagaatgacttttggcatttatgcggtcagagaatttgaaaactcagatgagctctttttcgagagactgacggaagcatggtatatcgcagatcaacgtctccgtggcgttaaagtgaaattaccgcatgaagtggatcctgactatgttcagaaacaatgcgtactggcggaaaaataccctgacgagttttga

SEQ ID NO: 154433 - DNA, 975 bp, Enterobacter cloacae
gtgacggcggccgggtatcatctggaagagaaccgctatgccagcggtgaaggggagaccatccaccgcatcgatttcacggttatcccggcgtcggtgtcgttccgtccggcgcagtccacggcgtggccgcgcacctacggcccgcagacggcgaaggttgtcgggccgcagggagagagcatctggacggacaaatacggccgcgtgaaggtgaaattccactgggaccgtctggcaaaaggggacgacaccagctcctgctgggtgcgcgtgtcgagcgcctgggcgggccagggttacggcggggtgcagatcccgcgcgtgggcgatgaggtggtggtggactttatcaacggtgatccggaccgtccgattatcaccggacgcgtgtacaacgatgccagcatgccaccgtgggcgctgccggcagcggcgacacagatgggctttatgagccgcacgaaagatggctccgtggataatgccaacgccctgcggtttgaggacaaggcgggtgcggagcaggtgtggatccaggccgagcgaaatatggataccagcatcaagaatgacgaaacacatatcgttggcggcgagcgtagccattacgtaaagaaaaacgaactgcatcgcgtggaagcgaatcagatccaggcggtaaaaggcggaaccgagatcctgaccggcaaaggaaagctggatgcggcggtggagcagtatgtccttgcctccggcaccaaactgcggctggtgtcaggtgaaagtgcgattgaacttaacgctaacggcaaaattagcctgatcggtaaagagtttagcttcttcgttgaaggggatggtcatatcaccacgggcggtaagctgcatctcaatacgtcaggcgctaagccaggcacaacggcgccgggcgcggggcacaaaggagacattgatgcggcggttcaggcgaaattcacgaccaagggtgattaa

SEQ ID NO: 154434 - DNA, 666 bp, Enterobacter cloacae
atgaaacagacaatttatctatatagtatttttttgattttgcttattagtggctgtgataacgctactaagacagtacagcatacaccgcaggaacaggcagaattacagaaatatataaaccgtgtcaaaaccgatcttgtgtatgtaaaaggcggtacattctggatgggagatttctgcaaaaagatgcgtaacggtggcccttattgttcaccggagaaagacaccaggccacttcatgaagtggaacttacaggttattctattagtaaatttaaagtaacccatgaggattacagattttatctcaaaatagcaggtttacctgagcagaatttcaaagaaaaatacgaaaatgaaatgttagctgaaatgacacatcttaaaaatagtccggccatagtgacatggactgaagcagataattattgtacctggctgaaaaaggaaaccgggctccctttttcacttccaacagaagctcaatgggagtacgcagcgcgcagtcggggtcagtatattctggtggcaacggatgatggcacctggcgagaggatgaaaaaagtggtcaaggcgagaattatgctaccgatgaagatcggcaaatagccgaggatactacaggaataaatggctctctaatccatttttggctttgttga

SEQ ID NO: 154435 - DNA, 228 bp, Enterobacter cloacae
atgcagcacgcagtcgtggacagtatattctggtggcaacggatgatggtgtctggcgggaaaatgaaaaaactggttatggtgaaaattatgccaccgacgaagatcgccaagcagttgaggaaaaaacgggaattgatagtacatctgttcattttcctgtcgataaatatccaccgactctgtttggtttgtatggcatggcagaaaatggttatgagtgggtga

SEQ ID NO: 154436 - DNA, 987 bp, Enterobacter cloacae
gtgaatgcggttatcatcagccagcagaaggataaacagcgtgagatcgcccagacgcttttgcactattccgaaggattatccgaaagcatcgcgctggcccttaaagaggtaacaacccgaggctgcgatcaaaccagccttgatcgctacagaaagctaaaactcgacagcccctatttttccgatatcggttttgttgaaaatgggcaagtcgtctgtactgccttttggggtaagctcgccaatccagtccctctaccaacagaactccataaaacaccaagaggctttctgttagcgcagttttcgagaaaagattttttcactggcaacgcggcaatctataataatgtaattattttcacctcgcgttatgcctacgataaattcacgccggttacggcaaactatgcgctgagtaccacgacgaaagatttcgaccgaacatttttctcggttaagccagatgtcataaaacaccactggccagattcagcgctttttaccctgaccctgacgcagtgcagcacgcgatgggacatatgtgttacggtgaagcattacgacgcgggcctggcttcgctccccgttgtggtgtttattcttctgacgactattctgtgttttatctggaccgcaatctcgttgtttttcatgcgtatttacgaagatcgcttctcactggagcgaacgctggttaaggcggtaaaaaacaattccatcagcgttaactaccagccgattatacgtatccaggataaaagcattgtcggagtagaagtgctgtcgagatggcgcgattatcatcgcaccgatgtctctccggaactgtttattcctttaataaagaaaattgggctgtaccgacagtattatattaatattattgaaaaatcgctgtctgagatcgcaccgcttgccattaaacatcagctgatgatttcgctgaacgttgggcgaacagagattgaagatggacagtag

SEQ ID NO: 154437 - DNA, 807 bp, Enterobacter cloacae
atgattgctctggcgctgtgtttgattacggtgcccttttcccgttatatctctccacgcgctatagtaaatggtcatgatgtttatctggcctggctgccattaagcgttatgctggccgtgattttgttatttgggcgccgggcaaccattcccattcttttaagtttcactattgctaacatctacaatattaatttagcaccactacaatatttagtattattgatctgtcagacgttttctgtttttgctgcctgtggcgtcctgcgccttctgctgggcaaacgctggcgccactgcgtgccgaacaaacacattgggcaacgtatattttggctgggctttatggtgccgataggcattaaagtgtcgatgtatctggctggctgcttatttgattttcccgtgactatctcaacattctttggcgaaggcaccgtaatttataacatcgttgatattcaaagcttgatatgcgcagcgttgattttcaccatgatgttctattatccattaagaatgataattaatccccgctatgtcagaaccttctggctgcggagcgtgaagccggtgttttttcacaaaaaatcattgtatgtattcatctggctggcttttttaattttcatccttgccgtgctatgtgcgccatttgagtcttcgattattgctggctatttaatgccagtcatttttattctctttacgctaggcatcagtcgcctcagctatgcgctcatctcgttactgtgggcggcatccgctctgctactgttgacctataacggctttgttgaataa

SEQ ID NO: 154438 - DNA, 345 bp, Enterobacter cloacae
atgtgttttactgtcaacggcgagatgcagcttacgccagatacggcggcgttcctggccatgctttttgactttccactcgccttcaccgaagaccttcagcccggtggaatcaatcaccagatgcgcgatttcaccccgggtgaacgttttgaaactgacattaaccgactttgcgcgcttgctgacactggtgtaatccgggcagcgcaacggaacattcatcagtgtaaaaatggaatcaataaaaccctgtgcagcccgcagggtcaacctgaacacgcgtttaatgaccagcacagtcgtgatggcaaggtcagaatagcgctgaggtctgcctcgtga

SEQ ID NO: 154439 - DNA, 246 bp, Enterobacter cloacae
atgggggatttttgtaaaaaaatgcgcaacggtggcccttattgttcgccggagaaagacactaggccacttcatgaagtggaacttacaggtttttctatcagtaagtttaaagtaacccatgaggattacagattttatctcaagatagcaggtttaccagaacagcattttgataaaaaatggaggaatgatgctttagctgaaatgacccattttaaaaatagtccagctatcgtgacctag

SEQ ID NO: 154440 - DNA, 1332 bp, Enterobacter cloacae
atgcctattgaatatacgtttgattatcgtgatgagttccttcgtaagcctattgctgaaaaattaatagccctactgaactctgatattaacttatctccgctggttatagatggcggatggggcacgggaaaaacagagttttgcaaaaaagttgcaaatctaattgaaaacaataatcaaaaacataaagtagtttacattgatgctttcgctgaagatcataatgatgcccccattttgacgttaatggcaggtgttgctgcacttttgcccgaagacaaacgaaaagagttgataagcaaaacactaccagcaatacgttttggtttgaaaaccattttcaaagctggcactggatgggtgttaaaacaaaatgcagatgacattgttgatggcttcgaagatgctatcaaagaagccacttcgagtgcaatcgacagtacaattgaaacattattagacgatcatatagaagctcagaaaaacatcgagacattgagaaatacaatttcgcaacttacagagaaatttaaaataacgattattatagacgaactggacagatgtaaacctacattcgctctttcaatcatagaaaatattaaacacatttttgaaataaaaaacttgaattttgttttggttgcaaagactcaacaactcaaagcatcaataagccatctgtatggtttatccataaatgcagaacagtatttagacaaattcataaaatttacatttgtattgcccgatacatttaaaccagacaactatacacctgcatacgcatctgtcgctttatgggaaatattaaaaaatgattctcaaagactgcaagaagtaaacgaagaatgcgggcatattataaaaacgataatacaaagagctaggttgtctttacgtgaagtagaaacattatcgcgccattttgaaatatatcaggtgctatctcaatctggaattggtccagaaaaaatatttggttattcattataccgaacgttaggagtgatgctatattctctaaatcgccctttggcattaagctatctagataattctgtggatgcagaaagtactatcaaaacattaggctttgaatatttaagttatgatgaggatatttatagtgtagataatactgaatatgctatttatgggatcgtactagactatattgatgcaacatctccattctttataaaggatgatgaaaccagaaaaaaatggactgaacatgctacctatagtttctttcaaaagggcttaaatactgttcctccccgaaaacttgtttcgtccgccattgaagttttaatgctcaactaa

SEQ ID NO: 154441 - DNA, 576 bp, Enterobacter cloacae; identical to SEQ ID NO: 17505

SEQ ID NO: 154442 - DNA, 915 bp, Enterobacter cloacae
atgccttaccagttggtagtgcttagcccagttgctaacgatctagagcagttaggaaccaaagaaaagttttggttttattactctcatgacactgtaaatttacagttgttcaagtactctaggcccggaacaggtgagcattggtctgaaaaatgcgctgcagagctgtgccatcttttgaacattccgcattcaagctatgatttagctaagtgcaatgatagattcggtgtggtttgccagaacctcatcccagttggttttcgaatggtcatggggaatgaggtcttacacagctcaacggcagattatcctcaacctcttcagcccggggaaaagcctgtaagggttcgagagcatactgtaacaagggttttaggttgccttgataaagagtcaatccagccgcccccaagttcctatgtgcttgatggattgaatgcagctgatgtgttctgtggatacttgatgcttgatgctttaatcagcaaccaagaccgccatcatgaaaattgggcgattatgctcaataatgaaactggtgagcagtttttatgtccaacgtacgatcatgctgccagtttgggaagggagatgttagatgatgaacgtgatgaaagacttacgaccaaagataaaaatcgccaaattccatgctttgtaagtaaagctcgttcagagcttttcaaagcaaaaaccgataaaaaaccgttgtttacagttgaagcatttcagcatgctgttgagggtagacttacagctagcaaccattggctgggtaagctgagagctttaacagaagattccattacggatgtgtttaatcaggtgccgtcatcgtgtatctccgatagcgcacgcaaatttgcaacactcatggtactggaaaatcgtagaaggctattagaatga

SEQ ID NO: 154443 - DNA, 741 bp, Enterobacter cloacae
atgactaacacaaactccgtttatgtcgcatggcaggcaccagatacccgagactggcatgtcgtcggcaatttgcaagagcgcaactcggggtatgtattcaagtacaccaaaggtgctcttaagtcccccaaatttaccaaattcagcggcatgaatgatgtccatgaaacatatgtgtcggaggagttgttccctctctttaaaaacaggcttttatcaccaagacgcccggagttcccgcgtttcattaagtggcttggttttgaagatgatagcgtgaaaccgattgatatcttggctcgttctggcggattgcgaagcactgatcaactgcaaattttcaaaaaaattgaagtcgattcaaacggtaagtttgagcatttcttctttttgcatggattaagctatttgaactctatggctaatgatcgagtgtcagagcttaagccaggtcagactttgcggctttgtttggatcttcaaaacgaatacgacgatgatgctgttgttgttcgcgctgataagccagcagaaattgttggctactgtccaagatatctgagtaacgacatcaagaaaatgctgttgaacgattcgaaatcggtcaaattagcagttgaaaagattagtgatgatgctccacataattatcgtttgctatgcaagttatctggaaccctaaacccagagtgtaagtcctcgttgattctgcaggatgagttcgaagatattgaataa

SEQ ID NO: 154444 - DNA, 1146 bp, Enterobacter cloacae
atgatctttgctgcacgttacttggtcgagttgccttatgtcctcaatattccagatggtgattatgattttctatatgaaaataaccatttacgcttaacagttcacaacgattactatgcactatttaaagatgcaagcttattccctcaaaccctattaatcggtaccagagaacaactactaccacatcacacaaatgaaagagggataatgaaatgccggactattatttctctcgccaactattgggaatgttttgaccttttagaaatatcacatgaagaactaatcaactctataagaaaccaaataaggaaagaagataacttcccatctgtggaagatgctgagatgttcctatccaaaatgagccagcaagatatagataaaaaaatagagttagagagaaaaataaaaactgctagagagatatttccacctaaaagatcagaggaatgcatcggaataataaaccactttataaaacagtatagagttgcctttaaagatcaatttgcagacgagatatctctttatcaagttggctcaggatttaccaacggagtgttacaagagcattattgcgatggtattaagataagtgcaattcctttagttggagtaatcaccccattaatgagagaaagctggtataaacacgatgaaagtctcattgataatttcaaaaaacgtttaatgtcaaataaattcaatgaacatcctgaactattattgattagagcagacaatcttgttcataaaggtgcatttagatcagccgtaattgaagcatcagcaggccttgaaagctatattctcagaaaaattattaatgcctttcatcgcaatggtatcaatgaatgccagacaaaagaaacattaaataaaaactggaagttcgatgatagatgtaaaaaaatattcaaacaactctttaacatctctgtacccgaaattgcgccacttgagtggcagcatgcaaataaaaacaggaaagaattacgtgacaaaatagctcatacatcacatgaaccaacagagaaagaaacaaaagaatttataaaaagcatcaatttattaattgaaaaaatagactcatactttaagaaaattaatgaatctaacgaatcaaaaaatttatga

SEQ ID NO: 154445 - DNA, 177 bp, Enterobacter cloacae
atgataagaaaggcttatgaattaccgccgcgtcatctcacccgaaagactgagatcatgttgcaggatattaccttcggcttgccggataacctcattccactaagcttagtttcacgcggcacagataaaggcgttgtctttgagccgcgaggtgaaagaatcctcttttactga

SEQ ID NO: 154446 - DNA, 954 bp, Enterobacter cloacae
atggctcagaaactatacagttatcagcgttggtctagtgcggtacaggccgatggtacaactaaggcacgacagaccaaagcagcagaagaatacgcacatagaaacggtctagagatcgaagaaattgtcgatgctggggtgagtggtttcaagtcagctaatacagatgaaagcggggcattagggcaatttctacaggcagttgatcaggggttgatagctagtaatgctgtgctatttgtcgaatcgttagaccgtataacacgtgatgaaattgacacggcgttagagttgtttttaggtattttacggcgtgggattactatcgtaacgggaatggataacaaagtttatacacgtgaagcaatcaagggaaatccggttgatctgcttacaagtattctgatgttttcccgtgctcatgaggaatccaagactaaacaaaaccgtactaatggtaatgctcttgcgttgattgaccgctttctaaagcaaggtctaccagtgaacattaaaagtattgggtcacatccatggtggattgatgatagtggttcaatgtatgaatcggtgaaaccacatcctgtaatgtgggcgtgtgctcaactggctatggataacttcatggaaggtgtatccgtattcaaagtaacacaaatgctcgatgaacggtttccgcactactacaaaggtaaggcatgggcgacggcaaatgtgcgtaaactacgtttaaacaaagctgtttatggtgtgcgtgaactctcagtaggtggaaagtcttatgtacttccaaactactatccagcactgataacagaggggcaattcctacgcttacagcagatcaggactactacaaaatacatcggtaaagtaggtgaagggcgtgtagtcactgatgaagtagactggccccatgaatctccagacagttggtatcacttaagttag

SEQ ID NO: 154447 - DNA, 183 bp, Enterobacter cloacae
atgtttaagaacctaatcagactgttattagaaagcgtagtcttccctgcgcttgtcattggttttggcttgctatggcttcatctttttccggagcattgcttgttattgacattgcttacaatcttcattctggtttggttattccctcgattaacttcacgcataacgaaaatgaaataa

SEQ ID NO: 154448 - DNA, 714 bp, Enterobacter cloacae
atgacagcatctgattatttaaggataaaatttcagagtgaccatcatttggccctcactatggagaacgcaattggcggcattttgcagtcggcaaaaggagttgcatccgacatatattccggtattgagcgagtcagttggtattcttcatgttttattcccaggtacaatgatatctgtcaggaattacaagctgaagaaatcagaacgctttactcaatagagtcgatattcaaacacgccgatgttattgctcacgtattttatctgtacctgaaaaccgtatgtgatgacgtaaaggatggcaacccagaaggttcagcccgaaaactcacaaaaagaattgcagaattcagctctcacataaacgtagcgggagctacacgctatgcgtttgctactgccgcctcgatcatgctttctcactccagccttatgtccaaacttgttgttgaacgcctgtctgcgaaattgccacaagggatcttcgtccttcaattttatggcattcaacaaaaatgcgcactcgctgcccgccatttgaaagcgattaactccgattattactggattctgtaccaggcgaaactggagatgctctattatttttgcgaacccattctttcaaaattatttgaaaaaatgaaattgaattccttttcaaatctggatgatttagccgattttatagaaaaggatttaaatgtttaa

SEQ ID NO: 154449 - DNA, 873 bp, Enterobacter cloacae
atggtttcacgccaaggttatagcaaaaatgagtctgataattttgttgaaaggttcaaaaactacgtatcagtgaaaaaactttccagcgatcattttattaaaggcgggattatatcagcagcacgtgaagatttaaatgatgatgactttgtatcctctgctgcgcgcttaataactgctgatttgctatctacagaatccttatctaatgattatttctacaaaatacatccaactggagattccttccaaatctctacaaatatagattttgataaaattaacaaacttaatgcagccaagatatctgaaatgggtgaaacaaatccagcaagcatagcggctggaatattgagcgcgtcatatgcccttatacttgcagctcattacggtggagatttccatacatcaaacacaaattcaaaaatcatacaatataaaaacaagcaaatactatccagaacaaacaaaaatagaaatgaaattagcatttttaatgagatcctattaaaggactgcccaaatatatcctccatcataaatagcaaagaaagaacatttgaggagtttttagaactactttcacaagccaaaaagtttaaagtttggcttaaggggagctcacctgataaaaacttactatcaaattatcttgaagatatagctaagacaggttggcttggcagtggatatgggaaaataattcgctacatcgtaagcactggcgcaggattaattggcccaacaactggtctggcagtatcggctttcgatagttttatattagatagacttagtactggttggaaaccgaatcaatttataacttcaaaactaaagccatttgttgatacttacaatgacttttaa

SEQ ID NO: 154450 - DNA, 318 bp, Enterobacter cloacae
atgtttgactcaatagtgctaaaccgctcaatagatggaccggcattgacgattggtgagattgccgagacgttattattctatcaaaatattcatattgtaatggacacatcaaccgttcttaatcttataagagaaattggtcaccataatgtaattaaacttatatcgttacctgatgttaaaaccacattcattgaagaatttgttggtgtttatggtgaggacacttataatggaaggcagtactctttaataagtgcgtacttttccggcagtgaaaccgatggtgaactgaaaagctggaaaaaagattag

SEQ ID NO: 154451 - DNA, 1239 bp, Enterobacter cloacae
atgcctttagaacgactacatgtgaaaagtttgaaaaaatttcctgaagttaacgtccggtttaatagtaggtttaacttcattacaggtcctaatggttgcggtaaaacctccttgcttgcagctattgctcactgccttgaatggaatggagaatactccaggcatcaggacgagagcgagtactggatagatattagtgagaaagatataaaatatagatttggcttaggccctgggtgtataggaactaaaagatatagacaagaccaacttatgacttgggtatcaccaccagaagaaaaggggcgttatacatttttagcctatcaaacaaaggacaatttggtattacctccacttgtcattggtgcacagaggaaaataaattataaatctgtgtctggagtcactagagagagtgacagtcagcaaagtagaagtatctattgtaataatgcacttagatttctatataataatgattcgcgagatgttaaacaatggttgattaatcgttatttcattatagataaatcatgggccattgaagaaaaattgaattgggagcatttgctatgctctttaccagccattgggccattcgatagcgattttcggtatattgatacagaacgtgatcttgaacctgtattctcaatttacggaaaaaaatgttttttagaagagctttcatcaggctttcaagctgttctatatattataattgctgtgtttgaatggatagaagcatgtttacctgtaggagaaagagatgtaagaaaagcatgcggaactgtgttgatagatgaactagataaccatcttcatcctgagtggcagttcacagtgaggcagggtcttgcaaaaattttccctgaaattcagtttattataactacgcattcgccccatcttttggcttcagctaaagaaaatgaaataatattacttccttcctcatatccggaagaaaaatatgactttgagccttctgataaggcatattctggttggagtacagatctaatccttactgaattgatgggagtggtaagtctcgataacaaggactacgaggtcctcgttacggcatgttacgacaatataaaaaataatgatcttgataaacttaaaattaactatgctcatctcgagtcaatatgtcatccggacgatgaaatattgattatactgaaaactcgcatcgcagggatggaggctaaagttgatgattaa

SEQ ID NO: 154452 - DNA, 180 bp, Enterobacter cloacae
atggtgttaaacgattgctgccttctgagggactatacccggaacagaatcgtttcgactgactcaaagtcccgtcgttacagacaaagcgtccatccgatgtgcagtgcgctatacctccttttgaacctgagcaaggctgccttccgcgtgccgcatcggcctgtgttgtcaaaataa

SEQ ID NO: 154453 - DNA, 192 bp, Enterobacter cloacae
atgtctctcggccaattagcagctgatatatatggtgatgtgagaaaattaaaaggtataagccattttgtcgaaatagatgttactggcttatatgtgattgaaccccgggaaagcacattcctgatcttaaacacgaaagatctcgatgtctctaaaagaattattaaaagtgtgagggattgtggttga

SEQ ID NO: 154454 - DNA, 1065 bp, Enterobacter cloacae
atgaataaagagtctgtcctgagtcgtcagatcttaacgtatatgctattgctgacgtttacgataattgccatcgccatactgggctcctggtttttttactcctttattctggatcatcttcccggcggccctgctgcgggcgatgacgagcagatgacgatgtgggactgggtatggattgggaccgcgacaacgatcagcctgatcattgccgtattctttacggtcaaactttcatcgcgaatactcaccccgctaaacgcggtcgcgtccagcctgaaaaaaatttctcagggcgatctggacgcaagggcattctgtgccagttcccggctgggagagatcaatcacctggttgcggatttcaatgaaatggcagaaaagctgcaaacgctggatatccagcggaaatcctggaatgctgcgattgcgcatgaactgagaaccccggtcaccattttacgcggaagacttcaggggctggttgacggggtgtttaccccggatccggtgctgtttactaacctccttaaacagacggaaggattaacccgtctgattgaagatctccgggttatcagttcggatggcggggcaggatacacgttataccaggccagaacggatctgaaagggacaatacaggacgcgctcgataccttcatgcccgagttcaaccgtaaggcatttaccgtccatactgaactgagggagctgcagtgcgtattcgatcccttacgcatcaatcagtgtctgaccgttttatttgacaatgccttacactattcaacttcgcgcaagctcacggttaaaaatggtgtttcggataaaggcaattttatcctgattcaggatgggggaccgggtattcccagggagtttcatgacttcctgtttcagccctttcagcgcgataacggcgccagacagttgaacccggaaggctgtggtttgggcttgtcggtggtaaaagccatcatgctggcgcatggtggcgatgttacctataccttatcaacgcaaaaccattcgatatttaaactcacctggcccgactcgtga

SEQ ID NO: 154455 - DNA, 1188 bp, Enterobacter cloacae
atgctggcgctaatgcgtgacggtgagcgcatgaaaaagctgctggcgaaatcggatgaatttggtctgactgtggatccggcactgaatcagcaattgagtgaagtgaacggcacgatgaatgagctcagcgcatcctgggatggtctgtggcaacgttcaaaaaacaaggcacttaagaccgttctctcggatggttcagtcaaagacggcctcgaaggtgttaccgatctgttcactaatggtgattttactgggctgtctcatgctctcggttttatcaacagcaatgatgctgcgaagctacgacgaattcagaatgataaggagctttataacagtttgccccgtagcgaacgtggacaggttgacgcgggctttatgactgatgctgtaagaaagcgctacgatgcaaattaccgcgcgaccgattctgcgattcagttgcaagctgacatagctgctatcaaccgccctcagcctggtacaaataggggtaatatcccctataatcaggccaaaaatgatgctatcgggttcaggaatcacaatcccggcaatctgcggagtgcatcaaattcaacgggcaccaatggtggcttcgctacctttgccaatgatgatgatggcctttctgctatggcacggcagttaatgttatatggcgatcgaggcaacaatacgcttgaaagcgtcatacacacctacgcaccccgcagcgagaatgatacccgggcatatatcgattccgtatctggcagcactggctatgctgcgcaggaacgtgtcaatctacatgatacggaaacattaaaatcggtaatggccgccatgatcaagcatgaaaacggtgcgcagccatacagcgatgaagagttgggaaatgcaattcaaacagcaatttctgatgatcgttggtctggtagacgaaatcctgatgcactcgctcagcagcggtatgacattctctcaggtttgcagagtgctaatcgtgaaaccagcattcttagcgctccacaagggaaaagtgatgaaaatgcagtgagtgagaatctggctcgctcgattaaagaagctatgtctgatcagtcactaaaactcgaaatcactatggtaaatgagaaaggcgatcgcaaaacctataatgtcgaaaacaacggaaggattactactcccatgaactattga

SEQ ID NO: 154456 - DNA, 552 bp, Enterobacter cloacae; identical to SEQ ID NO: 35425

SEQ ID NO: 154457 - DNA, 516 bp, Enterobacter cloacae; identical to SEQ ID NO: 35426

SEQ ID NO: 154458 - DNA, 591 bp, Enterobacter cloacae
atgctgacgctaaataaaacaaaggcagctttgcagagctgccaatgccactacgaaaaaatcaagcaaagtcaggataccagggttaatgctggtggtcaaagcctgagcgctcctgtgattacaggaactgcgccattggcgcggttaaggtgtacggcattgccgtataccccattaccccaaatctggggagatctggatcagcgtgcagggtctactgcaatgcagcataccccggagatatcccgcagtttcgaccgttacccagatattgggtatcagcttttcggctcaatacctctttgcttcaactcttttcgcacaattcgtttaagccaagctgaaagagttgcatctccatcctcgtgcatggctgcaaccattgcttcttcaagtgctggttctacgcgaaaagcgatctgcttattgcctctcggcatttttatgtttgacatgtgtctgacactcggcgtaatcttcgttgtgtcaagcaatgtacatcatgtgtctgacatttgtaaagcacgaagcccggcagtgttaccagcactaaccgggcctctgaccacaaaccgttatacgaggtaa

SEQ ID NO: 154459 - DNA, 621 bp, Enterobacter cloacae
atgaatacagcaaaccatgaaacaatgagcaccattcttttgagtggctcgctggctaaactttttggccgtactcaccagcggcttataggtccgacacgtgaggcgtttaccgcgttatctgccaccattcctggttttcagaatttcatgaatgccagcaaagcccgagggctcacgttcgcggtattcgtggataaaaagaacattgttcaggatgatctcgattttccgaactgcggaagaactattcgaatcgttccggttattatggggagtaaacgcgccggtgtactgcaaaccattcttggcgctgtgatggttgtcgttggggctattggtgtttttacaccatgggggcaggcgttaggtggggctgcgtggggtagttatatgatgcaggccgggggagcgcttatagctggcggtgttatccagatgctttctccacaggccgctgggctggccagcaagcaatctgcagataataaggccagttacgctttcggcggtgttactaacactgcggcgcagggttatccagtatcattgctttacggtaagcgccgcattggcggtgcaattatttcagccgggatttatgttgaggatcaacaatga

SEQ ID NO: 154460 - DNA, 816 bp, Enterobacter cloacae
atgagtgatattactaaagaaccaatggagcaggtcaaacaagcatttaaagacagaatttcaagccctttgtggggttatgtgttcttctcatggcttggttttaactggcaaaacatcgcaagattatttatgagtaaaaaacctgttgaggaaaggattgttgacatcacttcacaaagttggttcataccacattacatcatattgccagttgtaatgggggcgattttggctgctctgtcaccatatcttcaagaatggctggcggcagcacacaaaagggctgaggataaaaagaacgaaaaaattttggctgaggagttacgcttgattgatgtggacatgctcaaaaaagaaaagctgactaagctttctaaagtggcagagcataccgaacagagcgaaaaggaaaaacttgagcgccagaacgccagaaatgaaagtaggattgccctgataaaattacgcgagacggccctaactaaatcgactcaaaatatcgagaagctgtatacagaatcccaaatcaagcttaacagtgttttagatgagataaagcaggctgaggaaaaatataaaataaaaattgaagccatcaataatgctgctgaggcgctaaataaaatagctgagctttattataaatatgatagtttaaatactcatgaggacttcgtgaagtttattaaggagattaaaagtaaaaatctctttggttcagcttttttagataatagatttaactctatggttgaaagagaggttatcttcggagctttgaacggtaaaggtctagacaacacaaaaaattaa

SEQ ID NO: 154461 - DNA, 903 bp, Enterobacter cloacae
atgcattctccagttattgagcttcaggctcttgcgagtgacccaaattcagacatcgttgctgttctaatgaaagcaaagatgattgcgattaagttagaccttaaagaccttgttgaatggatagagttagagcttaatggttaccctaatattgcctctgcgcctgactataggtctggacaaggtatattaaaggcatttaatcctgttaatggatggattcccgtagatttggggacatctgacccaaaaataacaaagcagttcacgacatttgcgctcactgaatcagtctcatcaatggctcattcgaaggtcaaagatgcaggaactgtaagtctcactgtaccagctccccttgctgagatgcttttatctggtcagcgctcaagatatgagattcgttggttctttagtgctggtaaaattcagcatataattaccactgtgaggaataaaattcttgattggtcgcttgagttagaaaaaaagggaatcctcggagaagggttaatatttactagagaagaaaaagaggttgcaccaatgacagttaacaatacgaatatctttcatggctcagtgaataacgccggagctatcggggcaggcaataccggtaatatcagtcaacaaaactcaatctcagttggtgacattgcatcccttgagcgtgagctaaagagtcacggtctcgatgataatgatgttgctgaattgaaacagcttgttgagcagtccccgaaaccggcctcaaaagaagaagtcgaaaaaggtttcggctcatggattggtaagatgactggtaaggcttttacaggtgcgttaaaggtcgctggtgcggcggctcctgccgttcttactaacgcaatctgctgctacttcgggatccctgtttaa

SEQ ID NO: 154462 - DNA, 903 bp, Enterobacter cloacae
atgaaaacttcgccagttcatgagttgcagggtttggcttctgacgtcagtaatgacattgttggggttttaataaaagccaaaatgattgcagtgaagttaaacttgcccgaattggccgaatggtttgattatgagcttgatggctatcctgatggggttgccctacctgattatcgtataggtcaaggtgtagtcagaggatggtatccccgtcacggatggataaatgtccaatatcgtaatattgaaccagcaattataacaatgattcaagagtatgggttaagtgactcaatttcagcattgagaaatcttcgtgaagcagatgataacctgcggcttggaatgccagccgaaaaaataaaaatgcttttcccttcaaatagtgctccatcggaagtttgttggtttattaatgcttcaaagttggaatgtatagtaactactgtaaggaataaaatattaacatgggctttggatttagaaacaaaggggatattgggtgaaggtgtagtgtttagtgcaaaagaaaaggaagttgcaccttcaacaacttataacacaaataatttctatggttcagttaacaatttaggggcgataggggcaggtaatcacggtagcatttatcaaaataatataaacttgattaacaactttgagtctctcagtctggtgcttaaaaactatggcttagctgatgagaatattagtgatttagcaagggttattagtgagtcgccacttcctaaaaacaaaaatgaggtgagagaatgctttggagattggattggagttatgacagcaaaagcgttaaagggtggtcttgctatagagggagctaatgtccctaacattttaatgaatgatttgtacagatactttaatctacagagataa

SEQ ID NO: 154463 - DNA, 903 bp, Enterobacter cloacae
atggctgttattaatactaacaccctgtctctgatgactcagaacaacctgagcaaatctcagtcttctctgggcaccgcgatcgagcgtctgtcctccggtctgcgtatcaacagcgcgaaagacgacgctgctggtcaggcgattgctaaccgtttcacctctaacatcaacggtctgaccgttgctgcacgtaacgccaacgacggtatctctctggcgcagacggcagaaggcgcactgagcgaaatcaacaacaacctgcagcgtatccgtgatctgaccgttcaggcacagaacagctctaactctgcttccgacatcgactccatccaggctgaagttaaccagcgtatggaagaagtgaaccgcgtaacgactcagacagacttcaacgggatcaaagtgctgaacaccggttcaggcaccagcagctacagcttccaggtgggttctaaagacagcgaaaccatctctatcggcctgagcagctctgatagctacaacctgttcagcgtcagcactgcgaccggtgctacaggcggcatggtgaacggtaacgcacgtaccacctccgcagaaggtttcgacgttctgagcggtaccgtgacttccggtggtactaccgatggtaacccgctggcagacatcgatgcggcaatcaaatccgtagacaaccagcgtagcctgctgggtgcgtctcagaaccgttttgagtctacaattaccaacctgaacaacaccgtgaacaacctgtctgctgcccgcagccgtattcaggattcagattacgcgaccgaagtgtccaacatgtctcgtgcgcagatcctgcagcaggctggctcttccgtactggctcaggccaatcaggttccgcagaccatgctgtccctgctgcgttaa

SEQ ID NO: 154464 - DNA, 405 bp, Enterobacter cloacae
atgaaacgactgatgctgactcttgccgttgcggcaggctcgtcactttctgcgccagcaatggctgataatattgtttgccgtgatggctggagcgttgagcgacacgttaccggaagtgccgaaagtggatttctgagttacaggaaagatgcgggtatcatcaaactgttccatcggggaaaactgatttccgaaaaacgcattcagaacattcagcagtctgtttatcagaccagcggtgctccacttattaactatgagtttgatgtggacaggaacaacttctacattctcgtactggacatgagcacacaaggagcctcaggtggtgagccagacatcaaactctggggtacagatgcaatgggacttgattgtattttacagggaggtgctgcatga

SEQ ID NO: 154465 - DNA, 360 bp, Enterobacter cloacae
atgaacagctcatttttaacaaagcatctgtcaaaactctctttagtcatcaatcttacaattacaatccttgtctggttgtatatcatcggaacaagtgacccgctcctgattaacctcgttcgaagttatgctctcatcagtatggactctgccaaaattatcattactgttatttgtggcatatgggtaattaaaagcatcacggcttatgaggcaaaagttatccagtttgttcaggctgaccttttgaaatccatactcaaagagttacagtcatcacggaaagcaaaagaaattgataagatggattcactcagggatgacacatcgattgacttaagagatgtgaagttctga

SEQ ID NO: 154466 - DNA, 231 bp, Enterobacter cloacae
atggattccaaaaaaactgtttcgtatcgtgtaaccaactgtgaaaattgcacttttactggaaacatgtcgtatggttcagatgttggttttgaaatcaccgactccaaaggaataatagccaacgaaaatagacattattctgaacaagtattaaatgcttatcatgaaaccatgaagctagggaaggtgcgaataagcaggtcatttcttcccaagctgactcgctga

SEQ ID NO: 154467 - DNA, 159 bp, Enterobacter cloacae
atgcgcatgaaaaaaacagcatctgcgaggcagatcattaactttaaaaatgaagagtcagattctcatggcaaataccgtataattatcgcgggcatattaaaattaaacgtaagggagtttttatggattccaaaaaaactgtttcgtatcgtgtaa

SEQ ID NO: 154468 - DNA, 150 bp, Enterobacter cloacae
atgtttgctgagtatggcgatgatattgaagacgatgaagatgatgatttcgacagagttcctaggggtcaggagtgtgatcattgcgataaagttgcaactcatgctttaggagatcactactactgcgacgatcactatggtgattaa

SEQ ID NO: 154469 - DNA, 402 bp, Enterobacter cloacae
atgatgataaagcggtatgcactggtaaaagatagtgttgttgaaaatctggtttcctggaatggtgaaggggaactcttctctgaatttgtaaccgtagagctgaatgatgattccgttgcaagcgttggctggtcatacgacggaaaagaatttatgccactgcctgaaccagaaaaaacacacgaggaactgatcgcagaagctgatgcggaaaaacagtcccgacttgattatgcctccagtaagatcgtcatatggcaaacgaagttgctcataggccggaagttgacctcggacgaaacggcatcacttaatgcctggatggactatattgatgcagtcactgtgatagatacagaaactgcgccagatatcacctggcctgaaaaacctgcataa

SEQ ID NO: 154470 - DNA, 138 bp, Enterobacter cloacae
atgaagaggcgtttttccgactggcgtaattactgctgcctattatacagaactgaatataaatacagcggttttgcgataggtaaaattgggaaatacgaggaggattcagaaaatgggtttgggggatactggtaa

SEQ ID NO: 154471 - DNA, 975 bp, Enterobacter cloacae
atgaatagtttagcaattgcagatcgtacaatcaacgtgcctttctatggaaattctcttttcgtggtagagcacaacggtgaggcttataccccaatgcgcccaattattgatggcatgggattaacctatcaaggtcaggtcgataagctgaaatcacggtttgctaaaggggtcatggaaatcatgatccctacgaaagggggtaaacaaaccatgctttgccttgcgttacgcaaactgaatggctggctccaaaccatcagccctaacaaagtacggccaggaattcgcgataacgtcattcgctatcaggaggagtgcgacgatgtgctttacgaatactggactaaaggcgaggtcaaaaacccacgcaaggcgaaaaaggcattaccaggtaaaatcactcccgagcagcaggaggcgatcaaacaactggtaatgacccgtggtaaagcactgccgaaagattgtcaggccaaggcaatgatcactatgtggtcatcactgaaatcccactttggttgcagctacaaagaaatcagcgacgaccagtttaccgaagcgctatctattgcggcgcgcgtaccgattgaaggcgagtttcttggaaagcaagaggcgctccctacaccgaagtttgacgtaaaccttcctctccagtggtggattgacaacaatccggtggttcgcagtggcaacctgtcattcggcaagtcaatgtgcgcccctgccctggacgtcactatgcctatgctgtgtggtgataattcaacatcgccagccattcgcttgatcaatatccttgaggatgccggatttgatgtgtcggcacctaaggctgaaatagtagccatgcgcagccatctggcaaatgttgaatatggtatgaaagctatttctgatgcttgccgtcggacaggaaataaaactatctccttccgcggcgctaaagcggaattcgtaattaactaa

SEQ ID NO: 154472 - DNA, 162 bp, Enterobacter cloacae
atgcacaacgcaagaaacatcccgccaacaggcattcggttccctgatgcactgaaggaaatcctgaagaaagcagcaaaagaagaggggcgctcggtaaacagtgaggtgattaaacgtatagaaaggagcttgaaagaagatggatttattaaggcatag

SEQ ID NO: 154473 - DNA, 333 bp, Enterobacter cloacae
atgaaaggtgccagcttgatagccccgctcggggtgaggatccctgaagatttaaaggaaaaaatccaagcccaagcaaaggaaaacggacggtcgactaacgctgaaatcgttcaaatactcgaaagttcgttttcaaagcttgatgaaggtgaaaacaatcgttcgaatgaaacttcaggccattatcaatacttactgagtatgaaggatgaaattattgagacccaaaaagagaccatatctcacatggaaaacactataaacagtctcaacgagcacattaacatcctgaaagaccacgttgagtttttgaagaataaatacaaatag

SEQ ID NO: 154474 - DNA, 705 bp, Enterobacter cloacae
atgctggaagatatcattaaatcatacctgtatacgcagtataacgacgatgatgatctacaggcgttcgtcactgcgtataacaccatggctcaggaaatttattcatggatgattaacgccaatcttccgatctttgtcggcgggtataatgctggtgatcagttaaaatggattgccagggggatttatggcgttaagccaccagtgctggtaagtggaaaacgaaatgtgttcggcccgtacaacgccgttctgtttaaccagttgccattcaacggtcgaaaggtagtcaatcagtccgagcaggttgtcgtttccgatgacctgttcaaacgtataatgacgtggaatttctacaagggtgacggttactacttcaccattccatggatgaagcgccgcatcatgcgattcttgactggtattgatggcgttgacgttgttaacgatcaacgatggagtatttctgttctcttctctgggtctggtgcaagcatatcgatcataaaagggtacagaaagctcactgatacctccatgtttaatagcttttccttcaactcacggtcctacaatcagaagaaaagcctgcttataaagagcgatgattacgaatatgcatccctcttcaagcaggcctttgatagtgggttgctccatatgccattttatcatccggttagcgtgactatcattgggtga

SEQ ID NO: 154475 - DNA, 276 bp, Enterobacter cloacae
atgagtaccgtcaattatccatttaccggaagagaacaacgtagcgtgacgttctcgccaattctggacgggaacgtctatacctgccagatgaggtggaacatcgccgcacagcgctggtatctgctgatcactgacagctctgacaacacggtgctgaatactgccgttgtaggatcgacatccaccgggggaataaacctcctgaatggggtgttcacaacgacaactatgatctggcgtgaaaagaacgggcagattgaggtaacgagctga

SEQ ID NO: 154476 - DNA, 726 bp, Enterobacter cloacae
atggcatttactcgcgagctatatcggcttggcttcgaaatatccccggttatcctctgcaatggagttgcggaggctatccccggcggcatgctgccaatagtggcactaacccagagcgccagctttgtaaccgggctgatcggcggagcaatcaaccttaccgatctggataaatatttctgtcactggcggcctgttcagggcgcaacgatggttgactatgacatcgctcgctatccgttcgctaaccagactgtcgcagctaacgcgcttctggctcagccgttgagggtcagcctgatgatggatgcaccagtgaacgagaatactggcgccatgaccaaactggtaacactgagcgcgctgcaggcggtgcttcaggctcatgccaacctgggcggcacgtacatcgtggccacgccgtcaattatctacaacaactgcatcctgaaaacggttaaggacaactcatccggtaatgatccgcttcctcagcgctcatggctctgggatttcgagcaaccgcttattactaccactgatgctgacagggcagttaccaacttccttaagagaatagatgctggggatccgaataaaacaccttcatggacaaacacggcatcatctcttggtaataccgccttgggtggcgcgatagccagtagtgcggagggtgtaattgggctgataggtaagcttcagggggcattcgggatatga

SEQ ID NO: 154477 - DNA, 342 bp, Enterobacter cloacae
atgaaaatgcataacgatccccaatcctggacggagtttatcgaactactccacagctggtggcgtggcgaaacgccgatgggtgccgtattgctatcggttgccatggccgcattgcgaatcgcttacggcggtggcggctggaagaaaatgctccttgagggggcaatctgtggagctctgacccttactgctgtgtcagctcttgattacttcaaccttccgcagtccctgtcgattgctataggcggcgcactcggttttgttggcgtagagcaggttaaggttgtggcttcccgggtgtttaattctcgctttggaggcggtgatgcaaatcagtga

SEQ ID NO: 154478 - DNA, 204 bp, Enterobacter cloacae
atggctgacaaatgcaagcgctgcacagtaggcatgataggtacaaaaccgattctcaccggggactggcgtgctgccgctactgactttgacaaagttatcgacgactggaacgagaagacaaagcattttgccattccgcaccctggcttcgctcgtaaattcttttactgcccactgtgcggtagcaaggttgaggattaa

SEQ ID NO: 154479 - DNA, 453 bp, Enterobacter cloacae
atgagcaacaaatacgaagatctgattaaaaacgccaggatgaatgccgactgcggtgagcacatgtcgcccgcggaagttacgaccctgcttaatgtggttgaaaccacattcgcggcgctggctgcggagaatgcggggctgaaggagtggagtcctaacccgcatagcgcctcgatgtttgaggctatcgagaaagccgaagagcttatggatgacggaatgccagaactggcgatgatcgaggcctttgaaattctcaagatgaagcgaaccccggccaccgacgctttcctggctgaagtgcgggcgcaggagtctaagcgagtatacgaaagcattttggacaacccagctgtaactgatatggagtcgctcgttgattggctcgaacaaaacgccaatgaatcagtagctttcgccgcccagcttcgcaaaggagtgcactcatga

SEQ ID NO: 154480 - DNA, 624 bp, Enterobacter cloacae
atgtcgctgaaaagcacggtcttcaggccaactttatggctaagccgtagcgagctttccggcagcggtttgcacatccatttcagcctgaacgatagccgtggcgaaaacgtttttgcctcgccggtgaacgcgctgagcagcatgatgcgcttgtgcatcgcgggccagctggcgctcatgcccgcctccgtcgccattcttgcgccgggggtcaacgcgtttcgtcgcctgcgtaaaaacctgacggaacccgtctttaactcctggggctataacacccgctccgccgccttgcgtattccctgctcggatgagagcaaccgtcgtatcgagtaccggctggccggggccgatgcgaatccgtatctggtcacagccactatcctgacaggcatgctgtacgggctggaacatatcgacgagggggatctccctgagccgcagcacgaccaccccgaactgccgctgttccagcaggaggcgattgaggcctttgcccgctgtcagtatctcaccgacagcctgggcgacgccttttccgaacagtgggtcgcctgcaagctttctgaactcgactggtttgagcggattgtgacgcaggaggagtcccatctggcatag

SEQ ID NO: 154481 - DNA, 489 bp, Enterobacter cloacae
atgacgtttatcgcaagtgatcgtagcggtcattatcagacgctggagccggttacccgcgaacagattatccggtttgcccattctttgctgacccgccagtttcgcaatcgccgaaaaatcacctcatctgaagatgtacgtcagtggctggtgatgaagctggcgcttgaaaaccgtgaatcttttggtgtgataatgctttcacagcaacatcatattctcggctaccagacattgtttaccggtacgctgagccagacgatggtttatccccgcgaaatagtcagcctggcactgacgcacaacgctgctgctgtgatactggtgcataaccatcccagtggtgagcctgaaccgagccaggccgataaactcattacccaaaaaattacagacgcactggcgttgctggatatccgcgtgaccgaccatctcattgtgggaggcgacaaagcctggtctttcgctgaacacgggttactgtga

SEQ ID NO: 154482 - DNA, 315 bp, Enterobacter cloacae
atgaagaagcatattattaccgcactgctcatcacaacagtatccgctccggcgctggcagcgtacccggtaagccagcctgctcaggccgcagaagtgatggtcagtatgtgccagcagcagcgttcgggtatggacaagaaccaggccatccgtaaagtctatggcaccgtaagcgactggcccatagcttcaacaactgaagttgctgctgcgatggatgaaggatggaattttgctgtacaaaatccagagataagttgcgacagaatttatcccatgatgattgacatgctggatgggaaaaaggattga

SEQ ID NO: 154483 - DNA, 1638 bp, Enterobacter cloacae
atgagcaacaaacatttcagactcaataaaacgactaaaactctgggaagtctctttcctgccctattgttattcacccccgccgtcgcttttgccagcacgattgaccaatcaacctcaattccacaaaatttctccaccgactctgaatacgtcattaataaagacgttacgataacctcttccgagaatgaagctgccgtgtcggtcaatgggattgatgtttcaaacgttgaaaatatgggaaatatttctggttacgggaatggacttgatattagcactggagcacaacgtttagtagtgaataacgaggaaggggcgacaatttcctctacttcagcgacaggtgttaatattgataccatgcaaggggacctgattaacaaagggaatattactgcggctgaaaatggtgttttcgtcagtaaaaactcatctgctgtcagtatttccaataccgctaccggtcttattaaaggcaaatcaggtcttaatgctgaagtaggtgttgccattaataacgctggcaccatcaagggtacagaagttgacggtattaccctgagcgatggcaatattaagctcacgaacacgggtaccgtagagggccttcagcacggaatcaacgtaacgaataccgctaaagtcgacatcataaacagtggttcaatcggtggcggcaatacggcaatctcctttgccagtaataaaaataatacgctggtactcaataccggctcctcgctcaacggtgatgtgatctctaccggctcaacgggaaatagcctcacgctggttggtgccggaatagaagacagcaattttgttggcctgaataagggagacggttttgcctctgtcaaaatggagggtgaaagctggacgctgacgggcgatctcgacgtgatcggttctggcgattcccttcaggttaacagcggtgatttaacgctggcgggaaccgtctctaatagcggcaatacgctggttactaaagatgcctctctacaattaggcaatggccaaaaaacagcttcgctcagtggcggtctgaaaaacaacggtacggtaatatttaatcagggcaacaattccactttcgccaccgatatgaccggtagcggcaaggttgagaaagtagattcacacaccctgaccctcaccggcaagaacagctacacgggcgatactgttctgcacggcggcaccaccctggtcgctaatggtgctacgctcggcgtaaagaacagtaacgccaccgtcaccgttgaaaatggcgctacgtttgctactgcaggtgaagtgaacaataacattcatgttctggcgggcggtacgctggcggcatggaatgcagtccagggtaacgccacgctcagcgctgccgccgttgatactatcaacggcaacgtggctaatggcggcaaactgttgctcagcgccgccaataacagcgttggcaacaatttcaccattaacggcgactataccggctccgcgggcagccagatcgtgttaagcagtacgctcggtgaggataatgcaccaaccgaccatctcaccatcaccgggagcagctttggccaatccggggtcagcgtcagcaacatggggggctgggcgcgcaaaccgtaa

SEQ ID NO: 154484 - DNA, 1371 bp, Enterobacter cloacae
atgagtgaggggaaattgccggaggggtgggtaaaaagcgagctggataatatacttcttactattattggcggaggtaccccaagcaaagcaatccctgagtattatcaaggggatattccatggatgagtgtcaaggatatgaataaacatacccttacagatactatcgatcatattaccaatgatgcagtagaaaatagcagtacaaatataattcctgcggggacaccaattattgcgactcgtatgagcttggggaaaattgttacagcgtcttttgattcagcaattaaccaagacttaaaggcgttattcctgtctagcggagttgaacgtaatttctttattcactggtaccgttcgcaggcgcagctaatcgaaagtttagggactggtacaacggtaaaaggaatacgtctggaagttttgaaggctctttcaattaatctcccgccatttttcgaacaaaaaatcatcgccgaaaaactcgatacgctgctggcgcaggtagacagcaccaaagcacgtcttgagcaaatcccgcaaatcctgaaacgttttcgccaggcggtgcttgctgcggcaatgagaggaaaactgactgagatatggagagctcataattcatttaatctttcattgaaaaaatattatgaattaacgaaaggacaaaaattaaaagccaaaaacatctctgagccttgtgaggagaagacatggttacgttgtaatatcgggcatatttttaatgttaaatcaggtgatggccttacagctaaagaaatgaatgattcaggagatatccctgtttacggaggcaatggtattacaggttaccatgataagtataacactgaagaaccaactattgttattggtagagtaggatattattgtggttcagttcatttgactcctgaaaaaacgtggataactgataacgcattacttgttgattttaatagtgaattaattacaaaacagttcgcgcactggctacttaaggctacaaatttaagggtagatacatcctcctcagctcaacctgttataagtggagcaaaaatatattctatagaaatagttattcctccgattgaagaacaacacgaaatcgtccgccgcgtcgaacaactcttcgcctacgccgacaccattgaaaagcaggtcaacagcgccctgacccgcgtcaacagcctcacccagtcaatcctggcaaaagccttccgcggcgagcttaccgctcagtggcgggctgaaaacccggatctgatcagcggtgaaaacagcgccgccgccctgctggaaaaaattaaggccgaacgcgccgccagcggcggtaaaaaaacctcgcgtaaaaaagcgtaa

SEQ ID NO: 154485 - DNA, 339 bp, Enterobacter cloacae
atggctgaaacctttattaatcctgataagccgtgtattcattgccgctcacttatccgttatgtgtcgtccggtcgctgtgtagagtgctctaaaacacgcagacagccgcctaaaccaaagccacagattgtacgtgtaaccgcttcagcagcaagagcaccgtttcactctgaaggtggagacaaccgaaataacatcattgtgaagctgtctgaagccgctttagatagccttgaccgtgtaggctatgagttggttcagaaataccgtttggcaggttacacgcaagagagagtaaggatgattgctctgtctcacctgcttgaagccgcttaa

SEQ ID NO: 154486 - DNA, 192 bp, Enterobacter cloacae
atggaagatacgattaacgccccgattaactattacgattctgaaaagcgtctaatcgttggtcacaatctggtaggtaaaattcacccccagctatttggtaagctggttcgccgttcaaacgatggttcaacccgttgccagcaagcccgaatcacagactatttagaggggttactaactaatggctga

SEQ ID NO: 154487 - DNA, 330 bp, Enterobacter cloacae
atgagtttacaggttttgagagattcagttcaaagacgcaaaccaatctcatttcattacaacaagccaggtaaaacaccgggcgagagaattggaaacgttcatgcaatcttcataatgagaaaaaaagatggcaccgaatccactaaattgcacattgtccagacatccggcgtaacagacagcgagcctgatttccctgagttcagaatgtttgatatagagtctctatcaaatatcacaattctcgaaggtgaaccccaattcccaattaatgataaatataaccctgagtacgacggctataagaatgtaattgctaaggtttaa

SEQ ID NO: 154488 - DNA, 1005 bp, Enterobacter cloacae
atgagcctgaatcactctttcctcataggctcagatgaatcaagtgagctgatgctaaacatttctggtcttgatgctaacgctaaagaagtggattccttatgtgccaatttctttgcacactgtgccaagaccggcacacccaaattcacatgtaagctgacaatacaaaatcttcaaaatctctatagccatctatccagctatagcatggtatgtgatagcacttcatcaaagactggaagattcattgaggttagagataattataatgagataatcagcattcttgaacacgctgataataactcattagttatggccttgcagcaccttgtaagcagtaagttaaccaacaatgacatcaatacaatattagggagaaaggaatctctcgagacctatgaaaaaatgctcactgagcctgatagttataaggaggcagactggcaacgtttttttgaaaccaatgaatggatttttggttatggcttaaagtataaattcctaaaaattcttcaaagggaagctcacatatcaagaactgatttaaacggcggaaatgatgtaattgctgattttcttatatctgactcaagattcaccaagattgtggaattaaaaacacccacaacaaaacttttcactaagcgacaagggcgctctgatacatggttcttatccagtgaattaaccgacgctgttagtcagatattggcgcaaaaggcaaattgggaggttgaatctcagtccagaaattacactacagatggtgaacttatacatgaagatacatttgatacagaatgcattttaattataggttcattatcttcaattgagggtaatgagcgagaaaaactaattaaaagaaaaaccctcgagctttataggagaaatttaaaaaatatagatatcttgttttatgatgagttgcttgagaggtcgcgctacattgtcagaagtgctgaagtaatagaagataagcttctctcagccctgtag

SEQ ID NO: 154489 - DNA, 144 bp, Enterobacter cloacae
atgagcaagacaaaagcagtccgaattaaaaagacagataatcaactggtgaaactgaaagcagttaatgctggagcaaccatcagaaagactctggaaaatatgattctaatgtcctatgtgaaacacattaatgttatctga

SEQ ID NO: 154490 - DNA, 585 bp, Enterobacter cloacae
atgtacaaagctaaagtattcaatggagtcaagactccggctggaaagccaatcacaggtaaaggcttcttctcagatgaccacgatttaatagatacccccgaataccgcgaatctcttaaaaacaccctcatcgaattaggttataccagcttcaataaaccattacccgcaagcactaaaccttaccgcagaagaggaacaccccgtaaggctatggagaatacacttcagcaatattttattgataaagactcagtaagtaaccttccttcaaaagttgaggatgtattcacaggttgcgttaatagctgtccagataagctatccccatttttctgctttaatttaatgaagcgattgggcgttattacagcagccgctgtagaggatgaaacaggctttagtaaaagctggtgtaatgatattactcaggcattacagttagcaatcataatgattgaacattgccatgataaaggcgaaattcaggtaatgtttaacagtgactatgaaaacgatgaattagattctgacagggaaatagaagacatccttgatttacacattcaaaaggcagcataa

SEQ ID NO: 154491 - DNA, 321 bp, Enterobacter cloacae
atgaatacacttttaagtaatgggtactttagggtaataatttattcattattcatctttttggttttatcctttcgacatatgtttccctcagtgttgcctggcatgagagcttcatatcatggatggttagccattatcggggtggtaatatattttgattttgtattctggttggtagatgagaaccttaaaattcaactcaaagataagtatagatccggctctcttcttacgaagattaaaatcataagtgtgctcttgatacaattcattgccgcaattaccctcgcgagagggttaatcgtttcgttctactga

SEQ ID NO: 154492 - DNA, 279 bp, Enterobacter cloacae
atgttactagaagcttcacttattactttctttctgattttgtctgctgctgccactggttacatcttctctggatggtttaagcggttccgtatcattcctgtatgcgccgcttcgatagtctttactatcggcctggtcgttgtgatagtcatagatatgaataatataatcatcatgtcggctattgcgttacaggtaatttcacttggcatgatgattgcgagcggttcagctaaattacgtcataagcttcatgtgttatctcaggccgcataa

SEQ ID NO: 154493 - DNA, 288 bp, Enterobacter cloacae
atgaagatttctgatgttgcaactgtaaagactgacttcccggatgctgatttctggattgttcgtcggggctctttaaattccgttggtgaaccctcctatatcttcactaaagaaagcataggggtaaaggtgagcagaagcgatctggtgcttccacgttacctttattattgtttccttcatcttcatatgtctggtgtctggaagcctatagcaacgggtacactgagcctggttaacatcacgactcatgacgttaaaagtatcgtcctgaatccgcattaa

SEQ ID NO: 154494 - DNA, 447 bp, Enterobacter cloacae
atgacaaagaaaacagaaatatctatagaactccctccgctggaagaacagcgtttactggttttaaaggcagatacggagcgcgcaattacaattcttaaagctaacctgaatgccaaatcgtttcctaaagttgaaagtattgattacacgactatcgatccccgtatttttaatacccttgaacagggctggactgcgccgccagcgtatcttatagatgcctggtttaatcagcttaaaacgctttttaaagactatggttcagatgctaagttaggcgttttactcggtctacaaggtcgtagtgctgaccgcaggatcagggcatacagaaacggtgctgaaattatcccgtatggcgtttggcgcacgtttctggagcttacaggacgtgttattgtggatgtaaagcctgttttgggattgtttgactctgaatcctga

SEQ ID NO: 154495 - DNA, 549 bp, Enterobacter cloacae
atgaatgtactaaaatcttctttttttatagctttgcttactacttctttttggagtttcaatgcagtagctgagacattgcctgcatcaaatatagctcaaagtgaaggtgcttatggtggtgcgcattatggtgtgtatgagtatatagatacaaactcactaataaattctttaaagttactaggtaaatttggttttcgttctgatgttgttgctgaaaccttggatctaaattcttatcaaggtagtgttatcatttttaaacctgctgccagcggaaaaatactctcatatgaggatgtgtttgcatccatcaaaaagtatatgactcccctgaaattcaaagacactgacgctatagtcgttaaaaacacgcctttttcagttaatgaaggtggggttacaattaaacagttttacaaagttttatttgacggcagccatgttgaatctttccaaccattccagattcctaaaggtggtttagcgttaacggtggtcaagttaggcggtggaaatcttcttttcataacttcggccccctga

SEQ ID NO: 154496 - DNA, 192 bp, Enterobacter cloacae
atgaatggtatcgagaagttgtgtttagagctggatgatcagcacgctatggcacttgcgcagttcgttaaacgggttagctggagtgatttacgcggctgtgctgccaatgatgacgaagcctggctgatgaaaaatgctatcgacaagctgcaacacgctatgagcgaagaaggttactcacctcgttaa

SEQ ID NO: 154497 - DNA, 483 bp, Enterobacter cloacae
atgaaaccccaacgttaccccgccagtatcatcaaagttggtgcagtgctgtacagagcgtttggctggacagatgatgagggaaaatgccatttagagcttgatgaatggcacgtcagatccatacagaaccggacagtatcaaaacactttggcacaaaaaaggtggtgatcagcctggtacaaaaagccgaagatatcacctggcaaaaggataaatggctgacaaaatttcccgcacactatcgccagaaattttacgaaaatgagccgttacctggtggcttatacaccacacccaatatggcattacgctatgagctggaatccacatatcagagtataaagtggtatgaagatgaaaaagcagcgggaatgtggagcgccgatcatgaaattgaatataacggcgaacttaaacttatcaaactcataaaagctaggatcacgcggcttaaaaacattaaagcgggaaaaagctaa

SEQ ID NO: 154498 - DNA, 894 bp, Enterobacter cloacae
atgaaggtgaaacagctaaatctccggttcccggaaacattgattgaccgcctgaaatctaccgcagatcagcagaacgtttcagtgaataacctggttgaacgttatcttgtcaatggtcttgataatgagagccgcgatcaggctgaatattcacgaatgattgccgacccctttgtgccactgagccaactttatcacctgttgtcagataacatttccgacagcgaatttaactatgatacagcccccctatctcctgctgaaatacgttttgtggcagaaggtgctcttacagaaataaacaggcgcagcgtccagttgccctggtacatcgaaacaaaaacgattgcagacagcgcactcaaacgcgatacaatctctttcgacgatacagacagactatttccgtttgccctgcgtcattatctaaaatatcgcgcagatcgcgccacgttcgccatcaaaaacacgccagataacatccgttccgttacgaaggaatatcagagcggaaacctgagctttcgcctcagcgtggagggaacgatccgtaaccgcatggttccaaaagagcagcgcgtttcaccgctggtacgcctggatattgacggaaactatttcacggtcatgttgggctgggataagtacattaccaccgtgcgcctgttacgctatctggagagtgaaagctggacaaaggaaacccctgttatcgatgggatcggctttacccgcgccgaaaagcctgcgcactggaaaatgcgcaatgacgatatggaaattttactgactgacgatgaattacagtacctttgcaacggtctgctgaatgcacacagcagcatattgaagtctgtcatgaatatcatgatccgtcttaatggcgaataa

SEQ ID NO: 154499 - DNA, 324 bp, Enterobacter cloacae
atgaacgctgaaaatcgccagaaaattgaaaaagagattgctcaggctgctgccagtggcttggtagccgctgggtttaaagtagctgtgtttgacggtgaagaagttacgctcaagcccactactcatgttgagtcaattcttgaagccatgttcacttccgatgaagattatatgtttgtccattcgtctgataccggggaacgtattgggttcgtccggtttatctacggaaatgatgggtgggatgtaattaatgattattcggtctgtttagaacaggctcttgcccaggctgataaactagctgaatcatattcctga

SEQ ID NO: 154500 - DNA, 213 bp, Enterobacter cloacae
atggtttctgagtattcagattcttctttgaactttttaaatgaaaatgagaaacagcctgttatttattatttcaatgatttagtaactcggctgatgagagatgaaagcattgatgatgtgatgcttatcaagcttgcaaataagtatggtgtctctgaaacgcgtgtacctgaaattgctaattacctaagtaactggggaagagattaa

SEQ ID NO: 154501 - DNA, 588 bp, Enterobacter cloacae
atggcgactaaagggattgaaacgcagttgggtgatgaactctgcgataacgagctggagccagagtggttcgctcatgggatcgttaatctaaacagtaaatacatgctcggtgatgatgaaaagaaaagctatcaaagtgctgacattgttaaacacatcatagaattcgattcgtcgattaaatggtctgtggattctatccttgatggaatcgaaaaggccgaaaacagcggctattcttctaccgaactatcagaactaaaggaagcgacaaagcagtatttcaaaaaactgaaagaaattcaggatagagcaacccaacaatgttatgagcttgcagaaaaaacactacatgctcatggaattaagttagatgctgagagtgattttgatgttgacggctatcagtttaaagcaacgcctgttactgataagattaattatatagtatctgatttgttctctcctggtgacatcgctaatattaatatgagtcttgataatgtgattgttacaggtggcaaaaagctacgaaagacacagttaccgacacgactgataatgaatctctggcttaatccttag

SEQ ID NO: 154502 - DNA, 216 bp, Enterobacter cloacae
atgacaaagcttaaaagcggcattaaaaattgtcctcactgtggttatgatgagttctatgtcagggcaacagttagtggctctacttcagtattttataatttcaatggcaaccacggtgataacactcatatgtgggatcccgtcaaaatggttgaaaagaaaactgcttactgcggtaactgccagaaacgtttgggtatagtccaagaataa

SEQ ID NO: 154503 - DNA, 246 bp, Enterobacter cloacae
atgaatataaaacgactgtctcatactacaccgtccgaaactgagaaacacgaaatggcagggcgtatgtatgaagcattagacattgcaagagcaattgaaagtggtcaggttaaaaccatcgatgaagttttatcattagttcaaactagtgctattaatctcggtagggttcttgagtgcaatacttggatttatactgattgtcgcctcgatataaaggcatccattgaaatttccaaataa

SEQ ID NO: 154504 - DNA, 306 bp, Enterobacter cloacae
atgtacaacaaggtaattgcatctttaaatgaagtaaaaaaatcgtctaagcatcttactgatatcacgaagatagtgaatgaaacggaagacgacgagctgataaaactgttaatgccagttcttgtggcgctaagtgagcacagcacaaatgcacccgcagcggttaagaatacaccccgtaattttatcagcggcaagccctttgatgaggtttttaagtattgcctaccatatattaaggccaaaaaacccgaatggcaggtacttgctgaacgccacggttggattcctcctgcaccataa

SEQ ID NO: 154505 - DNA, 318 bp, Enterobacter cloacae
atgactgcttatccctatgatgcgcctgttacgttcacaaccaatcctattgagggtgaggtttctcaggcgcttgcactgtataaaatcgctttaatcaacgcctcttaccgtaatttgtggcatcgcctggcctgtaaaatgggagacaaagaggcgcttgagcatgagtctcggcttgttgcacaagagctacagtgccgtaaggtggtgaatcagtctgaggatcatcaggaaatgctggaatccctgattagccatcagtcagaagaaaaccgactgagggatcagttcattcggttgctgaaccgttcataa

SEQ ID NO: 154506 - DNA, 948 bp, Enterobacter cloacae
gtgtaccacgctctttcaccggaacatttgagccatgataattacacatttgttccgctttgtacaaatcaattttgcaattttgatttagtcaacaatttaagaacatcaccagctcatcggaacaattcgccgctcacctcaccacagccagcgccggaacaaaacgccgctcacctcagcacggccagcgccggaacaaatcgccgctcacctcaccacggccagcgccggaacaaatcgccgctcacctcaccacggacagcgccggaacaaatcaccgctcacctcaccacggccagcaccggaacaaatcaccgctcacctcaccacggccagcaccggaacaaaacgccgctcacctcccccgccccagcgccggaacaaatcaccgctcagcatccccacggccagcgccggaacaaatcgccgctcagcatccccacggccagcaccggaacaaatcaccgctcacctcagcacggccagcatcggaacaaaacgccgctctcatcctcacggccagcgccggaacagaacgccgctcacatccccacggccagtaccggaacaaaacgccgctcagcatccccacggccagcaccggaacaaatcgccgctcagcatccccacggccagcaccggaacaaaacgccgctcacctcaccacggccagcaccggaacaaaacggcgctcagctcccccgcgccagcaccggaacaaaacgccgctcacctccccacggccagcaccggaacaaaccgccgctctcatcctcacggccagcgccggaacaaaccgccgctctcatcctcacggccagcgccggaacaaatcgccgctcacctcaccacggccagcgccggaacagatcgcagctcagtacatcaacatgccacgaggtacaaaccacatcccggagacaagcgaaaccccgcatcaattag

SEQ ID NO: 154507 - DNA, 891 bp, Enterobacter cloacae
atgaaaattttgttgcttggtaaaaatggacaagttggttgggaactgcagcgtgcgttatcaccacttggagaattaattgcgattgattactacgataaagacctgtgtggtgatctcactaatctggaggggatcgcggaaactattcgccgggtaaaacctgaggtagtagttaatgccgcagctcatacagctgtcgataaagcagaaagtgaatcatcactcgcattcctgttgaatgctgaaagtgttgaagttttagcaaaagaaactgcaagaattaatgcgttacttatccattattctaccgattatgtctttgatggaacaggctctcattatcgaactgaagaagaggctactgggccgttaaatgtttatgggcaaagcaagcttgatggtgaactcgctattgctaaatataatccaagacattttattttccgtactagttgggtgtatgctacgcgtggtgcgaattttgctaaaacaatgctacggttggcaaaagagaaagacatgcttgcagttatcaacgatcagcatggcgctccaaccggtgcagaattgcttgctgattgcactggaatagccattcgtaccgaacaaagtaatcattgcaattatggtgtttatcatttggtcgcgagtggtgaaacaacttggtttgattatgctaagtacgttttttctatcgcagaaaacgcaggcgaattattatcaataaaagaggttaatggtgttcctactacctcttatccgactccagccaagcgaccatacaattcacgtttatcaaataaaaaattcgaaaaagtattcgatgtgaaaattcctaattggaaagacggtgttaagcgtgtagtcatggaagtaattaataaataa

SEQ ID NO: 154508 - DNA, 549 bp, Enterobacter cloacae
atgaaaattattaatacaagcattcctgatgttcttatttttgagccaaaagtttttggcgatgagcgtggttatttctttgaaagttttaatcagaagatcttcgaagaagctgtaggaagaaaggtggagtttgttcaagataaccattctcaatcacaaaaaggtgtgttgcgaggcctccactatcaactagagccttatgcgcaagggaaacttgttcggtgtgcagaaggtgaagtctttgatgtagctgttgatattcgtaaaagttcaccaacgtttggcaaatgggtgggggtattacttagtgctgaaaacaaacggcagctatggattccagaaggatttgcccatggctttttgacacttagtgataaagctcagtttttatacaaggcaagcaatttttatgctcctcaagctgaacgtagtatattgtggaatgactctgaaataaatattcaatggcctgatcatgataatattcaactttctgcaaaagatatgaaaggaaaactacttactgaagcggacgtgtattcctga

SEQ ID NO: 154509 - DNA, 177 bp, Enterobacter cloacae
gtgaccttcaaccgctacgtaatcaccgtggtgctgccgaacctgattatctgctcactgctcggtaagcctgcactggcgatcgagaaggctgcacgcaaagttcgactggcatgtggccgtcgcatggagcacgtaatgctggatgcgccgccgaaggagaggcgcgatgcctaa

SEQ ID NO: 154510 - DNA, 180 bp, Enterobacter cloacae
atgaaacttgatgtcactcctgcgcagctcgaagcaattaaacgcctcactgatgattgcgcatcgatggtcggctgtggtgaggaagagtcagacaaggcgtggtcgaaaaatattgacctcattgaccgcatgctcaaaaaaaatggccacgaacgggatttcaaaggtgaggactaa

SEQ ID NO: 154511 - DNA, 375 bp, Enterobacter cloacae
atgagcaacatcgacaaacaggcactgattgcaaaaatcaaaaagcagaccgaaagctttgacacagtggtgctgaaagagggtgaggctaacgcgctgctggatgagctggaagtcgtaaacaggctgaacattcaacttcagcagaaatgtgaaatagacccacgaactcatcagattattgatctggaagagcggattactgagctggaggcgcgggaggtgaagttgcctgagttgaaaatgcttcgtgattacctggccgaagtaactcaccgtgagcgtgaagatattctggttggtgtccgccttgagtttttcagggcgattgaagaagctggcgtaaaggtcgacgcagccggtaaaggagagtga

SEQ ID NO: 154512 - DNA, 144 bp, Enterobacter cloacae
atgagcaagccagccaaagaaaataacaccactcctgcgtggatgaggccaacccgaaaattaacagaagcagagcggaaggaattacgcgatgcaatcagtggttatgttggccgccgtaaagcagaaggaaccgcccaatga

SEQ ID NO: 154513 - DNA, 192 bp, Enterobacter cloacae
atgctcgttatcttttgtgatactccattcccgatatttaggattgtcagagataacaagaagctgatcaggaatcatctggagccgctttacgtatatttttccatcaaaaccaaacacataaataccatctccatcaaattcatttatgtttacgtcaacaaaaatgagatctccaggctcgatggttga

SEQ ID NO: 154514 - DNA, 762 bp, Enterobacter cloacae
gtgagagccatactgacacctgaagtcgcgccattgtccggggtggtgctgtttcgtcctggtaacgaattgttgtggctgtttcgtcgtggccgggtggtgattgaaacgccttccgaagcaatcaagcacctgccatctggactgattcctgaagcgcaccagccactgacggatgatgtcagtgtgcaggagcttttcctgaatgagagagttattcagcgtgctggtggactgagtggtcttgatgcctggctggaacgtaaattcgaatgtcagtggccacacaacgaatggcactcaaaggacttcacactgctacgccacgcccccggcagcattcgcctgtgctggggatgcgataaccaactgcgtgaacaaactactgaaagactggcaggaattgccatgcagaacctggtaaaatggctgctggaaagggtgaatatcatgctgggtttcagcgctgaccacaccctgacgctgccggagttttgctggtggatggtacgtaacgatctggctgacctgattcctgaatcagtagctaatcaggctctccggattaagcctgaatcgcacacctcattgatgcgggaaagcgacattgttccgtcattgccagcgactgaaatcctccaggagaaagttaagaagatagtctcggtgaaggtcgatcctgaatcaccggaatctttcatgctgaggccaaagcgccgccgctgggagaacgagaagtacacccgctgggtgaagtcgtag

SEQ ID NO: 154515 - DNA, 270 bp, Enterobacter cloacae
atgggattagaaacaatcattggtcttgctgccctggtaatggccgctatcgctggtgcctttggcattggtcattcacgcggcaccagcaaagcggaagccaaagcagaccagcagcgcaccgaagaaaaggccgcagccactgaagcagtagccgaacgccgggtagaagcaacgaaagaggccagtaatgtacagcagacggttaaccatatgcttggcgacgatgttgatcgtgagctgcgcacaaactggacccgtaagggttga

SEQ ID NO: 154516 - DNA, 993 bp, Enterobacter cloacae
atgggtatctttaaggcaaaaaacccgtgtaccaaaaatacaatttttacaacctctaatacattgatttatggtggttttatgatttctctgaatgatttttatgaacaaatttgtagaaaacgacgtgatctcgcctatcacatgtccgaatgcgaatgggcggtggatactgatgttctagaggaagatcatccggaaatacggattgagctaggcagaatgcgagagcaattctggagctcagagaaaataggtactcgtgtgaggttatattcctgcgatgtaccatgggaaacaaggcaccacacagtgaatgggcaactggagttaaaggaagaatacactgaattatatgatccagctcaagaatgctggaaaaatctaagttcaaaccttaccaaggaaacgtttttacctcttgttatcgagccattttccattaatgacattttcaaggcacaccttatgttcgcctcaatctcttttttctggggaaaatctatcatgtctgaaaatgaaaacgttgcctttaaagcatttcatcgggctgcggagttatttgataagtgcataggtatgacttggtttaacatctctgtttgtaatcaaaaaaaattatcagaagtcaggcggagtgcaggaaagaagggtggaaaaagcaaagcggaagtgtaccatatcattcaactgaagttggttgagctaattaatgactctgttccgaatgatgggtggaaaaataaggttgtagcagttaatgaacttatcgaaccgctatgggattttattcaaatgtcagagtttgagataaataatcaaaataaaaaatatcgtgtagcaacaatgagtcaagatgctttggttgatactattttaaatcaatggtctttaaaaaatgaagatgtaaaacaagctttcgatagcgctgttcgtagaaaaaaagaagtaaataattactacttgccatatagactaaatagctgcgcctaa

SEQ ID NO: 154517 - DNA, 438 bp, Enterobacter cloacae; identical to SEQ ID NO: 21469

SEQ ID NO: 154518 - DNA, 435 bp, Enterobacter cloacae
atgaaaaaagaccttttactggaacctcgcaatctcgctgcggctgtaagagcgcgtcttgatgagattgaaggtttgttagacaagggtattagtaggcaagaaattgctcaacttcttgatagtgaatacagcttttctgtgactgtgaaagcgttagatatggctttgtaccgggcaagattgaaacgcaaaaaaggtggattgcacaatccagaaagtacggtaaatactggattgcacaatccaaaagagcaggagaaagcggaaccggtggaaactggattgcacaatccagaacccgaaaaattagttgaggatatgggcgggaacaaagaatttttatccgataccgattttaaaaaaattggtgatgaggcaaagaaagtcgcaacctcattcaaaggtagcgtaggtaataagaaaggtttctaa

SEQ ID NO: 154519 - DNA, 981 bp, Enterobacter cloacae
atgccacgccgctcaatcctgtccgccaccgagcgcgaaagcctgctggcactgccagatgccaaagacgaactgatacggcactacacgttcaacgaaaccgacctgtcggtgatccgtcagcgtcgcggcgccgcgaatcgattgggcttcgctgtgcagctttgctacttgcgattccctggcacctttttgggcgtcgatgagcctccgtttccgcccctgttgcgcatggtggccgcgcaactcaagatgccagtggaaagttggagcgagtacggccagcgcgaacagacacggcgggagcacttggtcgagctgcaaacggtttttgggttcaagcccttcaccatgagccactatcggcaagccgtgcatacattgaccgagctggccttgcagaccgacaaaggcatcgtgctggcgagcgcacttgtcgagaatctgcggcggcagagcattatcctgcccgccatgaatgccatcgagcgcgcaagcgccgaggccatcacccgtgccaaccgacgcatttacgcggcgctgaccgattctttgttatcaccccaccgtcagcgcctggacgaacttctcaagcgcaaggacggcagtaaagtgacgtggctggcatggctgcgccagtcgcctgccaaaccgaactctcgccacatgctcgaacatattgagcgcctgaaatcctggcaagcacttgatctgcccgcaggcatcgagcggcaggttcaccagaaccgcctgctcaaaatcgctcgtgaaggtggccagatgacgcctgctgatctggcaaagttcgaggtgcaacgacgctatgccacgctggtagcgctggccatcgaaggcatggctacccgcgccagaacggcttggccgtggcgttgcgcgagctggggcgcatcgagcgcacgctgttcattttggattggctgcaaagcgtggagctgcgccgccgcgtccatgcggggctga

SEQ ID NO: 154520 - DNA, 939 bp, Enterobacter cloacae
gtgtggaagcttcccaaacgcgaacggtttgcccggcttgatcgccagcttccagaaggcgatttcgcccagctcttcaagcagggttttggtgtaatccgcttcgcccacggagacgccgccggagctgatgaccacgtcggcggatttatccgcctcgataaacgccgcgcgcagttgttccgggtcgtctggaatgatgccgaggttaatcacgtcgcagcccagctgctccagcatcaggtgtaccgccaggcggttggtgtcgtaaatctggccgtcctgcagcggctggcccggaagctgcagctcgtcgccggtggagaaaacggcgacgcgcactttgcggataacgtcaacttccgcgatgccgagcgacgccagcaccggcagctccgccaccgtcagcctttgcccggcggcaaaaacggtcgcgccgagggtgatgtcctcgccggtacggcggatgttctggcccgctttgacgctggcggtaaaacgcacgccgtcgtcggtctgttcggtctcttcctgcatgacgacagcgtcgcagccagccggaactggcgcgccggtcatgatgcgcacgcaggtgcccgcaggccattcgccgctaaacggctgacccgcaaaggctttacccgccaccggcagggcgttacccgtctggagatccgccaggcgtaccgcgtaaccgtccatcgcggagttatcaaaccccggcacgttgagcggggagacgatatcgcgtgcggcaatacggccaaaacagcgcacgaggggcagcgtctcaacgtcatgcagcggggaaactcggtcaagcatctgcgtgagtgccgtctcaagcggcatcagtccggcggtaaaatccatggtgggctcctgcggagtaacaacgaaagcgtccattatggcagaaaagtgcggctaactgtatga

SEQ ID NO: 154521 - DNA, 264 bp, Enterobacter cloacae
atgttagcgccttgctttatttttgaatacatctcgctacttttaaagttcaatgacaacaaaatcaacattaagtttggatcgaacttcttcgaactggtaatgataatatcaattaatctttcatatattttaattgagtctctgagatttactttcaaagattggagtatagaggcacagttggatataaaacttgtgaagttgggagcacatggtgtgcaaattacttgcactgatgcgaattgctcaataatattataa

SEQ ID NO: 154522 - DNA, 135 bp, Enterobacter cloacae
atgaacattgcatgggaatgggataatgatgatgaattttttggtgaaaaactaccacccgacaccttagatagaaaaaatatgccaaatatctttacgaaatatgttcagctcgaggtaattcctctaacttag

SEQ ID NO: 154523 - DNA, 138 bp, Enterobacter cloacae
atgagttacagcatcagggagctgagctacgcagcaaagccaaagaattggctttatccgtactctgaactcacccagatggtcaaaaaaacggtaaaggggttaaacaagctgaagtatttcgccttagtggcctag

SEQ ID NO: 154524 - DNA, 780 bp, Enterobacter cloacae
atgacctgcttattcgcaccttccctaggcaatcctcttgcaaccgatctcacctctaaaatgtttgcccactatcgagataaacgcctgacaggcgagatctacttcagcgagaaatggaagaaaggagcaagcccggtcaccattaacctggagcaaagctatctaagtagtgtttttagcgaactatcccgtctgggcgaatggtcgtatccgaacccactggagaatatgcgaaaattcaccatcgcagaaaaagagatggcatggcttacccatgagcagattgttgaattgctggctgattgcaaacgtcaggacccaattctggcactggtagttaagatatgcttaagcacaggcgcacgctggcgtgaagccgtaaatcttacccgctcacaggtgaccaaataccgaattacctttgtaagaacgaaggggaagaaaaacagaagcatccctatcagtaaagagctttacgaagagatcatggcgcttgatgggttcaatttcttcacagactgctattttcaatttttatccgtgatggaaaaaacgtctatcgtgctccctcgcggtcaactgacacacgttctgcgccatacgtttgcggcgcatttcatgatgtcgggtggaaatatccttgctttgcaaaaaatcctcggacatcacgacataaaaatgaccatgcgttacgcacatctggcaccggatcacctggaaactgcattacggtttaatccgctggcaacactaccaacatcaacagcaactgtttga

SEQ ID NO: 154525 - DNA, 831 bp, Enterobacter cloacae
  misc_feature (778)..(787): n is a, c, g, or t
atgcagttacccgggcactttcttgatgctataacgcagaatataattcttaggtcagatactcccattttattcgacgtggagtggaaaaaaaaagaaggcgtcgaattaggttacctactcttccgcggccttttattggtaattaatcaaacaaaaatactgccactaaccagtaacatatatattaaccgtagagaattcattaccacttgtctcaataatatcggcttgaatattactgatgagcagttagatagatataccatacaggaagcacaataccagaatttagtaactggaagagatgttaatattttaaagtattggggccaagagcgactattgagtccgttagaagctgtattaaagacgtattcaactctatactatgcttttgatgatagtgaccttaatcaagaagatacattccaagtcgagttgaggccaggaaataatattatcaaatggcctttgaacgcgttaaataaagactcaaaaatatctcaattaagatttgatcctgtagataaaagttgctggtttgatattgtttctttcactattaaagatagcaatgaagatcttgtgtgggatttttataaccaagaatcacaggctacattagttgacattttaagtttggaactacttcaagacaaaaatgcttatttttcttcttcagatgacccacgaataaatgtacttaatttgccacgatcatccttttttatcgttgagattgaaattgttctgtttgacaaggatgatatatcgnnnnnnnnnnggatgatatatcggtttcattttatgagaatctcaagttattag

SEQ ID NO: 154526 - DNA, 2109 bp, Enterobacter cloacae
atgcaaaaagaagaattgttaaaacataaaaaagaactactggaagatagtgaaaccactatcaataataatttgcaattgttgaatgataccaaaaatcttttggatattacccaaagtaatatgctgtcggcccaggcacgaattaatgcaatagagaattcaaccagttggactgtaactaaacctctacgttactttggcaggattaaacacaaaatgctagtttcgctacctattctgaagggtataataattcagcacggtcttaaaaagagtattatcaaaggtactaaagttctcaaaacacatggtattagaggcttagttaatgcattaagaaggcaaaaaaatattctgccaattgctgtttctccgctttcaggaaatcagatcaaaggtggcatcacttttagttctaaacatggttatgagctcaagactgaagctaaaggttattgctatattccaccagcaaaaccagaaaaattggctcaaataattaatgatcttcatgtaaagcctctattctctatcgtcgttcctgtatacaacacgccaattgggttgttagatgaacttattgattctattaagaatcagtggtatggcaagtgggaattagtattggtcaatgattgtagtactgatggattactgatatcaacgctcaataatattgaagatgataaaataaaagttataaatttggagacgaatcatagaatctccggcgcaacgaacattggcatcgaaaattcacatggtgagtatattgtttttgcagaccacgacgatactctgacaccagattgtctctatgaaatggtattaagcataaataaatctgatccagattttatttatagcgatgaggataaaatttcagaagatggcctgtatgtgcaaccgcattttaaacccgactggtcgccagataccatgatgagtacgatgtacacatgtcatgcatcatgtgtaaaaaaaatattgttatcgcaggtaggtctactccgttcagaatttgatggatgtcaggattgggattttgttcttcgtgtatcagagtatacgtcgaaaatttatcatattccgaaagtactttaccattggcgtattattccacaatcaattgcagctgatattgctgctaaagattacgtgcttactgcatctcaacagacgcgtaaagatgcacttgatcgccgaggcagaaaaggtgaggtggaagctgttgaggggttccctggatatttccgtattaactatattcctgaaaatagcccattagtaagtattattattcccacgcgtgacaatcaacgcgtcttaaaacgttgcattgattcgattcagtcgattacgcaatacaagaattatgaattaatcgtagttgataatggaacaattgatgaagaatctctttcgtatttaaatgagattagctcgcaggaaaatgtcaacgttattcggcatgattatccctttaacttctctgagctaaataatattggagtacaacaatccagaggggatgtgctgttatttttaaatgatgatactgaagtcattaaacctgattggcttgaaagaatgatcggttttgctcaactccctcacgtgggagcagtaggagcaaaactactttatcctaatacacttgcggttcaacatgccggtgttgtcaatctggctgatggtcctggtcatgcatttttaaataataacaggagtaatccaggttatttcatgcgtaacatccttgattataattggttagcggttactggtgcatgtttgatgatggaaaaaaggaagtttttggaagtcggacaatttgatgaatctttccctattgcttacaacgatattgaattgtgcttccggaattatgaagcaggctattacaatgttgtctgcaatgctgttgagttattacaccacgaatcggtcagtcgtggtgttgaccatattgatcctcaaaaagctttaaggcttagtaaagaaaaaaaacgcttatacgaaaagcatccccagtattatcagtatgatccgttcttcaatgttaatcttcatcctaatggtataaattttgaggttccattctaa

SEQ ID NO: 154527 - DNA, 1818 bp, Enterobacter cloacae
atgtcaaattataatgactttgatctcgataatagctctgatatcttttcttattttgatgggttaactgaagataaaattgcacatgctgaagtaatatcctttgatttctttgatacattattctctcggccgctagcagatccggaagacgcttttgatatactaggagaaaaacttaatattaaagatttcagagcaagaaggcaggatgctcaaactaaagcatttcgtacgatgaaaaaaaacaatcgtaaagaaattactattgcagatatatatgccgagttttctgaaaaggaacatgatagtaaagtattatgtgaggctgaatatcagcttgaattaagccttgtagaacccaaccctgtaatattttctttttttaaaagacttatcgcttccggaaaaaaagtagttgtgacttctgatatgtatcttccggctaccttttttaaggatgcccttcaaaaatatggagttacaggaatcgatgtgtttagttccgctgatgagaatgctacaaaaagagacacgggtgaactctttgatattcttattaagaagctaaaagtattgccggataaagtgatacatcttggcgataatcatacttcagattatgttcgtcctaaagaaaagggattagaggcattttattatttatcgcattatgcagacactttatcaaaaggtttaccattatcagtttcaattgctcagggcttagtaaaacaccattctggatgcaatgttcttgatagttataaaagccttggatttatttatggcggtacagttgcagtaggatttctttcctggataatcgggaagattaaagaacatagtattgatcacgtgctatttttatcacgagatggatacatcatgaaaaaaatggtagaacaagatggcagctgtaatttagtaaagtctgattatttttatgggtctcgcacaagtcttacattatcaacaataaatgatgagaattttgtagaatatttaccctttctactttctggagccgaagggttacagcctcgcgaacttcttgagcgtattggcgtaacacccccagatgaaagtgtgatggcatcatttggactctctgctaataaggtactgacccctgagttctttccattaatgtctcagtttttatttgcttaccgttggcaaattttgcaggtttgtcgcagaaatcgacggggattgtattcttatattaaaagtgttggtatcaaagctggtgataaaattgctttggttgacgtcgggtggagtgggactacccaagaagctttttatactgccatcaaagacattattgatgttgaaattcatggttattacttttgcctcgctaatactgaagaaaggaaacgtcgtagccgtttcctaaatatgtatgcgatgtatgaaaatgctaactgtgattcaactattgttgatgcaatctatgagaacagagttgttgttgaattattcttttccgcacctcattcctcgataattggctatgatgtagatccttttgaacctattcaggatgaaggtcgtggattaagcaatacaatgtcacagtgtgttgctgaaatttgcgaaggtagcttgttatttgctcgaaaatataaaaagttttgcgaacaactacagtttaatctgacaccttatgaacttacgaattctatggttgaattagcaacgacgaaaaaatggaacaattttactagtataacaactgtgtcaaatttcgacgcttggggcagctcacgattaaaggcactatgcgctgctgactacctgggtgtttaa

SEQ ID NO: 154528 - DNA, 1023 bp, Enterobacter cloacae
atgaatatcgtatttctgggtattgatctggctaaaaatgtttttcagctctgcgggttaaaccaggccggcaaaccggtttatacgaaacgcactggccgaaaagaattgctccagacgctggcaaatattcctgcatgtctgattgggatcgaagcgtccaccggggcattttactggcagcgtgagtttgagaaactggggcacaaagtaaaggtcatcagtcctcagtatgtaaaaccctttgtccgcgggcaaaaaaatgacggtaatgatgcacaggccatcgcagtggctctgatgcaaccgacaatgcagttcgtgccaccaaaaagcccggaacaacaggatatccaggctttacaccgggcaaggcagcgtattgtcaatcaccgcactgctacagtctgtcaaataagagggctgttacttgaccgggggatccccattggtagtgctgtctccagagctcgccgggctattcccctaatccttgaagatgcagaaaacggtctgagctcccgtatgcgcagagcaattgcagagctctatgatctctttaacgatctcgagcgtcggatccatttttttgataaggaaattgaaacagtattcaggcagtcagaagcctgtcagcgtatagccaaagttaaaggcattggccctaaaacggctacggcagttgttgccgctatcggcaaaggaactgaatttaagaacggccgtcactttgctgcatggcttggcctggttccgcgtcagcactcaagcggcgacaggctggtactgatgaatatgacaaaaaagggcgacaagcatctgcggacactttttattcatggtgcccgcgctgtcgtcagggttgccacgaataacaatgatggttatatgaatcagtgggttaaccagttaaaggaacggcgcggttttaataaaacgaccgtggcggtcgctaataaaaacgcgagaataatctggtcgatgctgagaaatgaaaccgagtatcagatagtgggcagttaa

SEQ ID NO: 154529 - DNA, 135 bp, Enterobacter cloacae
atgaagcacgtacgccagctggaagaggaaaacctgtggctgaagaaactgatggccgatctgagcctcgacaaggtgatactgcaggacgtgctggcaaaaaaaaacctgacgctggcacggctgcgcgaatga

SEQ ID NO: 154530 - DNA, 1785 bp, Enterobacter cloacae
atggatatagaaagcctcatttctgcagcgaaccgtgcccagcaggccgaagacagcgggttacacaattgttcgcgcatctggcatgtaggtttctttttcgatggtattcacaggaacatagaacaggatgcgccagagcaacgactcagtaatattgcccgtttgtttcgtgcatttcctgacgaaagacaaaatacgtcaagagaggcttacgatacggtctacatatctggcctcggcaccccttttaatgaagatctttccaccaaactcactgcattaatggatgggaccagaagtaatgtacaagataatctgaaagctcagcccattgaaatggctaaagacgctggcgaacaattacttaaaggtggcagctggtatgaaatattgaaaagcgaaggtgggaagttacttaagccctcagaatggaaaaaactggcgaaaaatatcactaaagaaacgcttaaaaaagtcagtattgaagccactccctggatccgtgataaccccgccgtcgcagatatgctggtaacaggcgttgatacgcgcatcgcctcggccaaaacacgcttcgaacgattttttgagagagtaaaatcagacagccccattcccgtaaaactcatttctgtctctctgttcggcttcgaccttggtgccaccctggcacgtaaattcctcgacaccctgctggacgaactctgccagaaacagggtgacaaatacacttatttgggcattcccgtcgatatcgtctttaccggcctgtttgactgctcgcgacacacagcagccagcaacaacaatggcgtggattatttcatctctgcttttggtgggccggtaaaaggcatcagcgtattgctgggggataaatccattgaacaggagacctctcttccaggggcagtaaagaaaagcctgcatctggttgccgcccatgaaacccgcgtctggcgctgcctgtaccgcaccggcgataacccggtgcataaggaagagctctatccgggatgcgctgaagatatcggtggtggcttgaaaccggacgaacagaaacccagtgcggagctttgtcgcgttgcgctacacaggatgtactgtgaggcgaccatggcgggtgtgccttttccagatttccagaccttaaacgaaaacaaccccgtgattgccgaatatttcatcatcaaggacaacatcaaaaaccagtccgtcctgcaatgggcgaaagcgtaccagagcgcggtacctttttcttcattaagcacgggaaaccagaactgccacctcgacagctatatcgactggctggggcgacagtactacctgtaccgcgttgaatgtatgagatacgaaaaacagcgcggcgatacgctcgcctctgctggcgcatcggcagggtttgttggcattacgcaggaggcgaaagagaccgccgggcagtacgccagtgaactgtctgtattgcagcaaaactggggctggcttgatgaggtgaaagatgccgcgataagaatgcgaaacagtatggaacagaaccccatggacagacgcagggaaatcgttccgaacgtttatggaccggcgctgtggcgtgcgaagcgttttctcgactacttccacgcggcaaatctcggtaaaccccagccgttcccgatcgacactgccccacccgagatgtacgcatggtttgtacacgacctgcaaacggtggacaaaggcgcaggtatctcgcaggacttttttgttatccgctcgatggaaaagcctgaaacctga

SEQ ID NO: 154531 - DNA, 519 bp, Enterobacter cloacae
atgggatttttcagtagattggaaaaaattgacggcggcataaatggcttttatgcccgctggagaaaatggatctggggggcgctgttactgccggtggttatttatcttggctggtcggtgtgggctgcggtttgggggccaccatcggggccggtaacgctgattattcacaatgagctcgacaggccaattttaggatttagcgtgaatggtgttgcaggtgcgaatgcatttgctcatggcggtggaaaagcaacctgctgcggcagcatcagcggggacagggctgaggttatctggacgctggatattactcacgagcaatatcttaaaggcatgaggttagagtcacgtcgtatcgaaatacccatgccggtacgaaagcaaggcgaaaatgatttacacgttcattttttgccgggtgacaaagtcttgttgggatggagcgataacgcatggtcgccttatgaaaaacgtccggaacaaacacaatctaataaaatggaaagtaactaa

SEQ ID NO: 154532 - DNA, 513 bp, Enterobacter cloacae
atgggattcttcagaacgtataagaaaatagacggtgcagttaaccgaggttatgcccgctggggaagatggatctggggggcgttgttactgccggtggttatttatcttggctggtcggtatgggctgcggtctggggaccgccgtcagggccggtcacgctgattatccatagtgaaattgacaggcccataagaggatttagtgtaaatggcgtggcgggggggaatgcatttgctcatggcgggggaaaagccacctgctgcggcagcatcagcggggataaggcggaaattatctggactgtagattacacacttgcgcaatacaaagcgggggtacgaacagaaattcaccgaataacaatgcctatgccagaacgaaagaaaggagaaaatgatttacacgttcatttcctgccgggtgacaaagtcctgctgggatggagtgacaatgcatggtcaccttatgaatcacgcccagagcatagcaattacaaggaaactgaataa

SEQ ID NO: 154533 - DNA, 519 bp, Enterobacter cloacae
atgttcagaatcctcccctcggcttcactcctgctgtttccaataatttgctttgcggcctcgcatgaagaggtattgcgtttaaatgcagagcaaaaggctggtagtgaggttgtttgtcatgttccactgaatattattgtggatcagaagcccgtcacacttgattttaaaaacagtatgactgtgatttcaaatcaaggtaacaatcgaacgtaccaggtcatcacaacatttgtaccctatggcacagccacagctttgatcacacaacgctatcgcctcaacgtcataactgatgaaacaggccaaacacataaaatcgatccgaacagtgttagcgtaaccagtccatactctgcggagatggctcaaaaaaatgagacccagcttcgcagtgccccagagagttatcaatctgacagcatggtgacagtgaccgatttcccgaactacaccattcaaggttatgaaaatggtcctgtcactcggtgtgctattttgtctaaacacgagtag

SEQ ID NO: 154534 - DNA, 1434 bp, Enterobacter cloacae
atgcgtcaccatcatcacatcaagtcagcactgagggctatccatgccgataacccattattgacttatgaagacatgcgcggtcatcttcgagagatggctgagatggagctatcgttaggtcgttcagatattttcgaaccggatatgatggatatttaccgtgatcagtatggagaacttggggagagtcttgttgacgctattgctagtgaaccattaactgttgaccagcatcgttacattaacgaggcgcaagatgtaatcaaggcctgcatggcgagggtagagggaaacagccagccactgattgattatattgacgggtttgatggaggagtgaggcagtcggctaagcaggaggtagaaagcgtagagccacgcccagcggtcacattaagattcctcgttgagcagtacgaaaaggagaatgttcagaactggaagccagcgactttaaaagagaaccaggcgtcgcacagtacactcattgagatttttgattatctggggctgacggacctgactgcaattacccgagcgaacatgcttgaggttcgtgatgtgctccagaagataccgaagaaccgtaagcaacgcttcaaggatgtctcattggttgacctgctggctactggagaagcctacgagtacatggatgtggtgacaatcaataataaatatctggtcaagatggcagccttgtttaagtgggctgtacgcaatgacctgttaatcaagaacctgaccgaaggtttagagctaaaagtgccaccaaaaaaggcctcagaagcccgtaaagcgttctcagtgggacaagtgtgtcagcttattgatgccgctaagagatacgctcagaagccttctggtaaaccatatcattactttgttgttacgctggcagccattaccggggcaagactgaatgaagtcgctcagattcaggttagagatgtcaggatcaccgaggccgggaccgcttatattcatatcaatgaagacactagcactctgcccggtaagagcatcaagaacccatatagtgagcgccgtgtgcctctggtcgatggagcctatggtttcgcattgactgactttatggcgcttgtagaggcccgtagaagcgctggaggtgaggacgctatggtgttcgatggtctgaagctaatgaagaatggttatggcgagcaggttagcaaatggtttaaccggacgttattacctaaggtcgtggctgaccgtgacggattggcgttccattcattcagacatacagttgcgactcagttaaaacaacaaggtgtcgaattggcatatgctcaggcgattctgggacatagctctgggtcaattacttatgaccgatacgctaaagagattgaggtggataggttggttaaggtgatggtaggtatttataaggagataaagtaa

SEQ ID NO: 154535 - DNA, 630 bp, Enterobacter cloacae
atggcagttccatatgaaccagcggagttcaagaaagaagcttttaactgtccgtattgtcaggcgtatgctaagcaaaagtgggaccaattatttccctactatgatgaaacggctttccctatgcatgtgtcacaatgtgagcgatgtgaggagtactcatattggtttgaggagtccctcctaattcctgcatctgcgaatgttgaaatgccgaacccagacatgccggatgactgtaaagccgactatatggaagccagaagcattgtcaacctgtctcctaaaggagccgcagcgcttctccgtctgtgcctgcagaaactgatggtccacttaggtgaaccagggaaaaacattaacgacgacattaagtctctcgtggagaaaggcttacctcctcgcattcagcaagcagcggacatctgtcgtattgttggcaatcaagcagtccaccccggtgagattagtcttgatgatgacccacagttaacgcacggtctctttaaactgttgaatataattgtcgatgaccgaattacgagaccaaaagaaatcgaagcgatgttccagagtatgcctgaggggccgcgtcagggcatcgaaaagcgcgacaaaaagagcgcataa

SEQ ID NO: 154536 - DNA, 570 bp, Enterobacter cloacae
atgagcaagactttcggttacatccgagtgagcagcaaggaccagaacgaagcacgtcaggtagaagcgcttaagggcctttgcgatgacttgatgattgacaaggtatctggcaagaatgctgaccgtccagaactacaggagctactcaaggtggttcgtcgtggtgatgtggtggtggtcaagagtgtggaccgtttagcccgtaacacaaaggaccttctgaccatccttgagacccttgttgacgctggcgttacggttcgcttcattgataaccagatgatctttgatgatacgcccaccagccgctttatgattaccatgttgggggctgtaggtgagcttgagcgttccttcattcggcagcgtcagagtgagggcgtggcgatagctaaggctcaaggcaagtttaagggccgtcagaaggatgaccagttaaggattgaggtggtgaagctgttggaccgtggagacttgagcgctgaccagattgctaaacttgctggatgtgggagagctacagtgttcagaattaagaaggagttaagtaatgaggttgctaagtaa

SEQ ID NO: 154537 - DNA, 1239 bp, Enterobacter cloacae
atgaagattgtcgcggctgacgtgtttgttacctgcccggggcggaactttgtcacccttaaaatcaccaccgatgaggggattgtcggcctcggtgacgctacgctaaacggacgcgagctctccgtggcctcatacctgaaggatcacctttgcccccagctcattggccgcgatgcgcaccgcatcgaagacatctggcagttcttctacaaaggtgcttactggcgtcgcggtccggttaaccctgaagtggcgacagcaaccccgcttactggctggctcccactcgacagtaatgggtttaccacaaaatcaggcctgaccaatgccaacgtcacgctgacaacgcttgaggcttcacgtgagcgcattgttctgtcgggaacattaacagccaacattaaccttattgttcctgcgtggcgcaagaaatggacggtcgtaaataactgcacgggatctttcacggtcaccattaaaaccaccagtggcactggagtttccattccatcaggaatgacggcttatgtagttggcaatggtactaacatttctcaggactcaaatcttctcggtattacagggcgtttaattggcgctcctctgatatttacatcatcttcctcttacacgccctcggcaggaactaccgcgataattgtacaggtagttggcggcggaggtggaggtgggggtacgccagcaacctcttctacacagaactctgtggggggtggtggtggtggtggtgcaattgctgtgtcatacattccagtttcttcactgacattgccggtatcaatagcagtgggaactgctggatctggcgtcgtaggggcagctggagttaaaggtggagatacttcttttgggtcatatcttactgccggtggaggaagtggaggcctgctaggtacagccgcaacttccggctcaccttacgtattgcagtgtgcggctggcggcgtggccacaggaggcaatatctacaactctggtggctgcccgggtgggcaagcaacatatattactatttctgctggcatatcaggatttggcggttcaagtccattagggggcggtggaggcgtaggtggttcgaccgcctcaggtggctatacaaacggaaagggacctggaggcggcggagccgggtctgcagcaggctctagcgcatcagcacaaatgggtgggtctggagttggtggaatcgtaatgatctgggagctttcataa

SEQ ID NO: 154538 - DNA, 420 bp, Enterobacter cloacae
atgggaaaatacgcactggtcgaaggcggggtagtgaaaaacatcattgaatgggaagggccagacgcctctcccgtagactttgggaatggggtggtagctatagaatatgatgaaaaaaatctggcaggtataggatatacatataaagatggcgttttcactgcgccgccagctacagaagctgagattaaaaatcagaaagaaatggagcggctaaataattctgccgcaaaagaatatttaatgtcagaggcaagtcagaaaatatccgtgttacaggacgcggttaatctatgcatggcaactgatgaggagggagttgcgctcccactctggaaggaatacagagttttgttatcaagaattaacgcagacacttcagggattatcgcattcccccagaagcccggcgcttaa

SEQ ID NO: 154539 - DNA, 1023 bp, Enterobacter cloacae
ttgaccgagaaaaatattaccccagtaaatcattttccggcagccgatgggattcgggggctggctgtaatgattgttatgtttgctcatgctcttgttatgtttttaccagcaacaaggccttttttaggaggtgctggcaaaattggcgtgtggttatttttcgtactcagttcatttcttttaacaaacaaatttatcaaaaatggtttaacgagaaaaagcttgctggaatattctatagggaggtttttccgaataatccctattttcatattggcatgcttattttattattcggctggttattttgatatttatgaccttgcgaaaataactacatttcagcagggttatgggcacttatggactatacccgttgaattcaaattctatttcatccttccattttttattttaatcttaaccccagttcataaaaggcatggtttgctacctgtgatcgtgcttgccattattgctataatcgttttacgagaattttttcctccatcccgtacgcctgacaactctatttatacacattggtatattcctagcttcttggtcgggattatagcatcttacatggctcagaatatcagtggtggtaaaagaagaaacgggcttaagatatccatctgtttttttggagtcgctgtgatcataccagcagtatcatactttcttttcggcagggttatcatagggagtttgccatctagctttttatctttgagcattgtatggggttgcttaatcttactagcggtaagagattgcggtatttatagtaatttcttttcaagcagtgccatgagaaacatagggaataaaagtttttcaatatatctgtttcactggtttttccttactgaaatgtcaaagttatatcctaataacgcattagctatggccgcctctattcttatgtcaacccttgcgggatggttaatctttgctctaattgaaaaacctatcgaaaattacaggcataggttgcaaaagtcgctcataagataa

SEQ ID NO: 154540 - DNA, 1005 bp, Enterobacter cloacae
atggctatggtcaatgcccgcatcgatgacgagctgaaagcccgggtcgatgcagtacttcagcgcaggaatataacggtcacccagaatatgacagatctgtaccgttatattgatcagcatgagcagtcaccctttttgccagcccctcggccgcacactgccggcgatgttgtggcaaagtgctgttctgatttgatgaatatccgcgatgcactgctgcttatccgcggccatgcggagcgccaggctggcaccggggagatggcttcactttatcagttatttacccgttcccgcctggcgtttgccgatgggctgtgctggctgcacagtgccccggcgttgcccttcacagttgaccggctgctgttgcccctggctcaggttcaggcgcagatcgcagagtgtgatattgcgctgggtggcggaagccgcgatgctctggtgctttctgatgatgcgttaagcaagctcgcagccaattttaacgagctcgataaagtggtgataagcctgtgtgaaaaggttggggtgctccgccggcttccgcctgtagtaactgaagaacagcgctttgatggggagttctgtaccgtcttcacgaaagatgtcagctttccgggaaatgttgaagtcattatccacctgcgtcccgatctgctccgcctattaactcctcacctgaaagaagcgatttgctgccctcgaattcctggatggactcctggtgttgatattaatagcggttttaacacatacatcccagcaccggcggattattttcagaagatggactccattacagctgttgcaatggcaccggcaggaggagcgatgggagtatgcggtcttctttttgttcagggtgaaacaaggatccattactggtcggagaaatctgctcaggtcaaccctgtctcccgcgacatgctgtcagaggcagtctgcgtgaaaatcgaaaatcatatccgaaacattcttcagggctctgacactaaatga

SEQ ID NO: 154541 - DNA, 636 bp, Enterobacter cloacae
atggtgttgtttatgtgtctattaaatagattttttgttataacagacacctgttgtccgatatttgatttagggtacatttttatgcgcctttttggttacgcacgggtatcaactagtcagcagtcgctcgatattcagatcagggcgctcaaagaagcaggtgtgaaagcaaatcgtatctttactgataaggcatccggcagttcagttgatcgtccggggcttgatctgctgcgcatgaaggtggaggatggtgacgccattctggtgaagaagctcgaccgtcttggccgtgacactgccgatatgatccagttaattaaagcattcgacgctcagggcgtagctgtccggtttatcgatgacggaatcagtactgatggtgacatgggaaaaatggtggtcactattctatctgctgtagctcaagccgaacgtcaaagaatattagaacgaacaaatgaaggtcgccaagaagcaatggcaaagggagttgtgttcggtagaaaaagaaaaataaacagaggtgcgatattaaatatgtggaaacaaggtttaggagcctcacacatatcaaaaacaatgaatattgctcgttcaacagtatataaagtaataaatgaaagcaactaa

SEQ ID NO: 154542 - DNA, 498 bp, Enterobacter cloacae
atgaaacttaaaattgcattgcttagcgtagctatgtcttcagcatatattttttccggttcagtattcgcagcagagaaatatgaaattgccttggttgcaaaagtcaatggtatcccatggtttaaccggatgggggttggcgtaaaggaagctgccgataaactcaatgttaatgcctatcagacagggccagcaaccccggatccggctcaacaagttaaagtcattgaggaccttattgctaaaaatgttaatgcaattatcgttgtaccaaatgatgcaacggttctggagcctgtattaaaaaaagcccgggataaaggtattgttgtgttgtctcatgagtcccctgataagcagatagctcaatgggatgtggaaactattgatagcgaaaaatatgctcaggccaatatagatgaacttgcaaaagatatgggtggaaaaggtggatatgtgatttacgttggttcactgactgtaccaggggtttga

SEQ ID NO: 154543 - DNA, 201 bp, Enterobacter cloacae; identical to SEQ ID NO: 101187

SEQ ID NO: 154544 - DNA, 894 bp, Enterobacter cloacae
atggttcagttttttgatgataaacatgaagttaatatgttgtattctgccttaaagactttgggtgtagattactcacctgatgcaggggaaattaacgtaaagggttatgaagagagagttcggcagtttttggcacataatgaatttgatgaacaaggcgctgattctttaataaataatgcctatgctatcgtgaaaaactccagccctttaccagacgaattagagtggttcgtttgtgaccctcgagccagttattggtttcttgttaaaactgaattatcagtaagcatgcccaaaacttctagtgatagatttactgaaaatttttgtatttataattttaaagtgtctgggaaattgctacccccagagcataatgccagggttaactacctgaaagaaattgtacgacaacttactcctacactaagcatgagagagtacataattaaatctcatcgtgaatggagcgatatgattgtggggcaaaatatttttaatgatgtcaatggtagtaccggtgtgacccttaagtggctaatcacttacctgcgggaaaataaggtggctctgagcgaatatccaataggggaaagcatggaggagaaactcgcattttgttatgcatcctatttcacttggttctcgtggtatgaaaacagtgacgctgataaaaagcttttcctgacaaggtttaaaagtgcactaagcactcaaaaatcaagggttaagaaaaggacaggaaatctcaaagtgcttaatgttaatgtctctgaagaaactcatgacaaaatacgggatatttccatctctgaggggatatctaactctcgggttattgagcatgctatcaatcttgcatggaaagacaaaaggtttaagaattaa

SEQ ID NO: 154545 - DNA, 894 bp, Enterobacter cloacae
atgaaaatagatcatattacagcaagagatactgaagcgattattgaacaatccaaaaaattaatcaagattggttactgggataatgtaaaagtatcagtactgcaacgctggttagataatttcaaggatgaaaaggaaaaatatcttgcagcctctgtgttaagcgagttgatatatcgtaacagagaaactgttacatctatgggctataatatattctcaattattctcccacagatcttagaggagttagatatttaccatattgaggatattgaaaaatggatgaatgacatcaactcgccaaaacatgcaaggaatcttccgtttcgaacgtccgtaataaataatgtggatagtaaagtcactaaaagtggtgatgtaatacacacattcctacaaagagattttttcgataaaaacttaggggtaaaagttgaaaatatagaaaaattgccaccaagaatcaaagcgatagttttttttgatgatatgcttggttctggcactcaaattgacactttcatgaaagaaacaaatcttgatgaacttggaaagaaaataatattcattccatttgcggctctacgcgattcaacaataaggatacaatctaaatataaaaacctaattattaggcctgttgagtacttggatgaaaatcatagtttctttagagcatccaacaggagaataaatagagaatatttctatacacataatgatttcttaagattgtacattgatatatgtaataagaactcaataagcaatccattagggttcggtaatttggggcttagttatgtcttggcaaactcaactccaaataataatctttcattcctctggtttgaaaatgaaggatggaataggttattcaaaaggtaa

SEQ ID NO: 154546 - DNA, 474 bp, Enterobacter cloacae; identical to SEQ ID NO: 104970

SEQ ID NO: 154547 - DNA, 774 bp, Enterobacter cloacae
atggctaagaatccaaaaacatttcattgtaatgtttcgggcgtaagaactgcttcgagcataaaatccatgcagtttttcgacagcgcatacagtgagccagaacattctcctatagatttgtttcaagataaaaaaaccagtaatatgaaattactaggtgctcatctgaaagaaccgaattctgaagggtatatatctcttgccacaagttcttcacaagaatggaatcaactcgctagcttagttgtcttggggctggtatctgccgtggaaagttattttagatgtataataagaagattgctcaacctagacgaccattcgaggaaaaacagttatagttctacattaacttatggcgcagctttacatcatcataaaaacctttttcctgaagctttattagaaaatgcttcctttacgtcttcttcaaatataattaaaagtataaattcctttttagatgtaaatattggtggttttgcaaaatttccttcgcttgcttcagctttgactgattatgatatagtttgtcatcttcgtcattgcgttgttcaccgcgcaggtcttctgggatctaataatgcacttgcattgggcatagatgaatactctgaattattagaaaaaccattatctataaattttttaaccgttcaacaaatagcagttgtatgtgacaatttagtaaaagaaattaatgacaaactctttgttgatataaggaaggtgcgaataagcaggtcatttcttcccaagctgactcgctga

SEQ ID NO: 154548 - DNA, 1692 bp, Enterobacter cloacae
atgacagataacttgaacttagcccttttcgatgaggcagaatatgaagaacgcgctgattatatcgataaagacgatcttttgagatggacggccacgagtaagcattttgataatattcaaaagaagctgattcaggtaggagcaaagttaattgttggtcctaggggtacaggtaaaactcaccaaatgcgttgtgcttaccatgcatgtaaaaatgatccagctaaacctttaccgctttatattacatttaatcattacttaaggttggaaacttatctgcatgaaaactcaaatgcaatagatatttttcatgcttgggttttggcaaaaatagtctcttcctgtgcggattcttataatgtttttttgactgatgtcagctttgatttgaacttcttaaaagtttttatatcagatgtcgaaaagcaacgatatgatgaaaaatattcaattgttcttgtcgagcttaatataaaaatagtccaagatttaatcgaaaatgctattattagaaataatagaaagcgtgctgtattatttttagatgatgcggcgttaacatttactaatgatttcatgatagaatttttcgatatttttagaagtttgaagacaatacatatttcaccaaaggcctctgtttatcccgggacaactcaatatggaccgcgttttcatgttggacaagatgctgagcgcgtacctatttggatgaatgttgaggattctgattaccttagctttatggatgcaattgtattaactagatttggaaatagcctaaatattgataaggatatgcgtgagttattaatgtttgccgcttttggaatcccgagaacatatatcatgttcttgaggtcttatattgaatcagatagaaaaagtcaacagtcaaaatttaatgctatcatttctgaaaaatgcaataatattataagtgaatacaattctatttctcaaaaaatgccgcagtatgctaagataatatctattggcgataacttattatctgaaattgttaagaccataaaatcctttaatcataacaaaatagatgagcaaggtgatgattataaaaaaaatatcgtgataggaattgaagatatagatactaaagcagacagaatgatcaagtttttaatcgaagctggtattctgtatgttgaagaagatatatcccatgggactgaaagaaagattaaaagatttattcctcacttagcattgcttattaaagagagagtattcactaaaagcaaaggctttaatgtgtctgaattgctaggagttattaaagggcagtctgaaaagcatcctgttcgcaaaaaatttaacagacttttatcacagtccactatagattcaatagagttagatctaccaccttgtagcaaatgtaacactccaaggatcgcagaaggccaacgttattgtcatatttgtgggactgcacttttggatagttccacttttagaaactgtatgaagacaaaattagtacaattgcctatgactgagttccaaaagaaagttattaacaaaacaaagtatataacggtcgaggatgttctttcttcagataatactgctgcagaattgaagaaagttaaaggtgttggcgaaaaatatgcaaataagatcgttaacaagataaacgaatggacaaatgagttcttatactaa

SEQ ID NO: 154549 - DNA, 1149 bp, Enterobacter cloacae
gtgattaagtataaccaatactatacaagcaaaaacattagtgatctagttactaccttgattagtatttctcaacctctaacttgcctcgaacttagcgcaggtgaaggtgccctgcttgattcagccaaaaaaaaatggcctcatcttcattgtacaacttttgatattgatgcgaaaaacattgatcttctccgcgaaaaattccctgaagatttacattattgtgtagatgccacaagcgaaatatgtcggtcacttctaaaaaccaaaaaatttgatattgctgtctgcaatcctccattttcatttattgacatacaggaaaacactaaagaatatctcaatgcggcattcggaagcatttattctaaaagtaaaaaaattcgctcggaaatattattcctagcattgaatttattagctttgaaagataatggtatcgtagccattatcgtaccagagcttattataaaggggttcgcccatgaaaaaattcgacgcgtaatcgccaaaaatttgacgatacaatatttgatagaatgcgaacataagtcattcagtaagactgaagctaaaacttttgttttaattttaaaaaaaacaccttcgacgaaagattcttactttaagtatataaaggttaatgaattcatagagataattgtaaatgaacaattcatgaccaatgtctttattggcccaaaaaaaagaagtagagaatctactgaatcacgatatcaaattttaagaggacgactatcaggtaaagagtgcaaaaaaatcgcacttagttatatccatacgacgaatatggcagatgatatgtgcgatataaactttaaagcgccagaaataaaccctgaaaataaaacagccattatgaatgatattcttattgcaagagtgggcagtagaatagttggtaaaacaaattttgtataccaaggtaatgcaataatatctgattgcatcttcgccgtaagatttcagaatgaagcagacagagtaatattcattaattactggaaaaaaaatagagatgaatggattagcaaaaactgtacaggaacatgtgctaaacacatcactattgcaaatttatcgttgctgattgattcaattttatcatctactcctttggagtaa

SEQ ID NO: 154550 - DNA, 807 bp, Enterobacter cloacae
ttgattgaaaaaaatattgccagcgataaagacgttattgatgcctgcggtaatggtaatgcgggtagctcagcgtgtgcaggtgcaagactaaaagtcattgcgacaaaagagggatatgaagatggcccttataactcgaaatatagtcaacagtatgctgatgcgtatgggcagatagtcaatctccttgatatcaccagtgttgatgcacagaatcagcagcaggtgaaagacgccatgattaactatttcatggtcaccaaaggggttgatcgtcagaccgcagaaagctacaccgaaacgaagcagggtctggagatcattgcggcttcggtaacaccaattttgggttctgctgcggcaaaacaattaagtaaagttgttgatgccaatctaaaagtcgtagccaagggaaatgtggatggagtgaagttttctgacaccaaccaaggtataagaccttcacagttagctgatttcaacaagccgactcttattaacgatgttgttcaggctaagatcgataaacgtcctgataaaaattaccccaatggaaatatgggaactgctcatgcggaagttggtgtgattcagcaggcctttgacaaaggaatgactcaagggcgtgaaatgactatgagtgtaggtggcaaagaggtatgcaattattgtttgagtgatgtaagagttatggctgaaaaagctggcttaaagtcattaacaatatacgaagaaacgacagataatgttctcttttggcagcaaggaatgaaaaaaattgagaatagaggacctgcaaaatga

SEQ ID NO: 154551 - DNA, 201 bp, Enterobacter cloacae
atggatttaatatctcttgctgggaaacaagctcaattaaccattgatgaaaatgagttattgatcctgaattcagctttgaatgaaatctgtaatggtatctcttttcctgaatttgaaaccaggattggggcttctaaagaagatgtctgtgccttacttaatgatttaggccagattttagccaatatgatggcttga

SEQ ID NO: 154552 - DNA, 264 bp, Enterobacter cloacae
atgattgatttagatgataaaatagttttttttggcgacctttttaaggggcgcttagataatgaaatactccaggatgccattgagtatgtagggcatggtgaaagagggttagcttttgaaacgatttgcgatcatttaagcgagtatgacgtaccgattagtcagtctgagtacgatttagcaataaatatttgtaatgaccttaaaatggatgttaatgacattagcttaaaacatttaagaaaattaattatcgagtaa

SEQ ID NO: 154553 - DNA, 771 bp, Enterobacter cloacae
atggaggatctgagtctcaatcaacagaaagaaatgattgcggtctgttccaccaacccgtcagcctgtaaagagaaatacggtgatatcccggctaatggcatgctggttcgtaaggcgcttgacggtctgtttgatgctgatgttccggcagaaatgaagaatgacttatcttcattctgggcacagcagatggaagcggaaggtgtcgttaccagtaccgagtttgcgagccagctggaaagccggtatggcatggacaaacagcagtctgaaatcctggcaatggcggtgcttggtgcagtgaccggcgggatgggcaaagctggcgcgtcaacaccaggcaaaacgatatcggccaagcccgaatggttgcagaatgttcaggcgggtaataagtttaacgcagaacagtctaaaaattatccgtacaatgaattgtatgtgaacaaacctaacggaaacgactattatcgtgttgattcgtataacccggctacaggtgagatagtgtcacgtaagttcacacaatttgctgatgtcacagaggctacggcgaccaattatatccgggaggctgtgaataagtatcctgctggcgctacagttgcaaatgttccgtccagtggagatcttggaggcagcttattgaaagggaaaaatatactagaagtccctccgcaggcaaaacctattccgcaatcaataattgatactgctaggaaatctggtgtggtgattcgtgatacaaatggtaaggtgtataaatga

SEQ ID NO: 154554 - DNA, 201 bp, Enterobacter cloacae
atggatgtaatatctcttgctgggaaacaagctcaattaaccattgatgaaaatgaattattgatcctgaattcagctttaaatgaaatctgtaatggtatctctgttcctgaatttgaaaccaggattggggcttctaaagaagatgtctgtgccttacttaatgatatagaccagattttaaacaatatgatggcttga

SEQ ID NO: 154555 - DNA, 906 bp, Enterobacter cloacae
gtgcctgagaaaactgagcttgagatagcaaaacagacgcttaaaaacaggaaagatccggcagagtgcgaaaaggcgcagccgaaatatgatgcattgattgaaaaagatattgccagcgataaagacgttattgatgcctgcggtaatggtaacgcgggaagctcagcgtgtgctggtgcaagactaaaagccattgcctcaaaagaggggtatgaagatggcccttataactcgaattatagccaacagtacgctgatgcgtatgggcagatagtcaatctccttgatatcactagcgttgatgaacagaatcagcagcaggtgaaagatgccatgtttaactatttcatggtcaccaaaggggtggatcgtcagaccgcagaaagctacaccgaaacgaaacagagtctggagatcattgcggcttcgttaacaccaattttgggatctgctgcggcaaaacaattaagtaaagttggtgatgccaatctaaaagtcgtagccaggggaaatgtggacggagtgaagttttctgacaccaaccaaggtataagaccttcacagttagctgatttcaataaaccgacgcttatcaatgatgttgtgcaggccaagatagacatgcggccggataaaaaccttcccaatgggaatatgggaacagctcatgcagaggtaggtgtaattcagcaagcttatgaaaaaggaatgactaacggcaaagatatgtttatgtcggtaagtggggagaaagttttctcatattgtctaagcgatataaaaattatggctgaaagatcagggcttaagtcgttaacattattttacgaaactactggtaggaccttatattggcagtcaggaacaaagggcttccgcgtaaaaggagctaatgatgaatag

SEQ ID NO: 154556 - DNA, 1212 bp, Enterobacter cloacae
atgttaaaggatctggaactgaaatatatcgaaaaatggctgccggaagcatcggtaaaatacaaggacggtagcccggcagtgaacctcgggctgataatcaccgtgttctttaaaaacggccatactccggatgtccgccgcaaaatggtggaatgtgtggatcgttattacgaggagtttaagctgtatctgaaaaaaaccatggcaccgaagtgggttggcattacagataaaaactatcagaaaaaacggcagcagatcctggactcaacgcctgaggagatcttttcctggtatttgggaagcgtcgatacggattaccatgctccggattatgaaattcttattatgggaaaacgtatattccacaatgaaaataaccgctccgttattaaactgatttttcccctttccctgttaaaagagccggacggtaaggaacggtatgaatcctggctggtgtggttatgtaacacttttaaagttgaaagcggctatgcagggctgtcatttattctgccctatgcctttgaacggatgttcccgtatgagtatgccctggcacagcgcttttccggtgtaatggtggactctctgggcacactggagggcggggaggcggttgaaggactcaagagtgcctgctggtacaccatactgggtacgccgtggctggaaaagctcggcgggcaagatgccgtcgcgcagcgtctggtgaaaacaccggaaatcagcctgctcgcctataacaacggggtaattctgaaagccggtgagcttactcctggtctgggtgagatgaaaaccgaaggcttcccccccttactggtaaaggtgaaccagattattcgtccggttcgttatgacggccataaagggctccatttctattccgaatacgaaaaccaccagtttgatgaagaatcctccatgaagtggtttgcccgcttcgatgaggccagcgccctgctggacggcgaagagcctgtaacctcatctgagccggtacgcattagccgctggaccgatgaaaccgccccgcacgccgggcagtgggccgccatcgttaacggcacaacggagtatattcagacccggaaagggcagaagatgcccgcctttgaggataagcacggcaaaaaacaccgcgcccgctggtcactgcttaagcgtgacgaccagggcagcgtatttgttattccggaataa

SEQ ID NO: 154557 - DNA, 990 bp, Enterobacter cloacae
atgcatattacctacgatctcccggtaaccattgaagatattcaggacgccagaaaacgactggcaggcaagatatataaaaccggtatgccgcgctcgaattatctcagcgaacggtgtaagggcgaaatattccttaagtttgagaacatgcagcgtaccggttcgttcaaaattcgcggcgcgtttaataaattaagctcgctgaccgatgctgaaaagcgcaaaggcgtggtcgcctgctctgcgggaaaccacgcgcagggagtgtcgctctcctgcgccatgctcggcatcgacggtaaagtggtgatgccgatgggcgcaccaaaatctaaagtggccgcaacccgcgactactcggcggaagtggtgctccacggtgagaacttcaacgacaccatcgctaaagtgagcgaaatcgtcgagatggaagggcgcatttttattccgccttacgatgacgccaaagtgatcgccgggcagggcaccatcggtctggaaattctcgaagatttatacgacgtggataatgtcattgtccctatcggcggcggcggattaattgccgggattgcaacggcgattaaatccatcaacccgaccattaatattatcggcgtacagtctgaaaacgtgcacggaatggcggcctcctggcaggcaggagaaataaccaaccatcgcgttaccggcacgttagccgacggatgcgacgtctctcgtccgggtaaattaaccttcgaaatcgttcgtgaactggtcgatgacattgtgctggtgagcgaagacgatattcgcaacagcatgattgcccttattcagcgaaataaagtggtgacggaaggcgccggcgcgctggcctgtgccgcgttattaagcggcaagcttgatcactatattcagggccgcaaaaccgtctgcattatttccggcggcaatatcgatctctcccgtgtttcccaaattaccggcttcgttgacgcataa

SEQ ID NO: 154558 - DNA, 378 bp, Enterobacter cloacae
atgcagtgtgacgtgaaggattttaatacggctgttttttctttgaaaaactcaatcgccagtcagggggatgatcccattttcccaattggtttacagctcagtaaattgatctcaatatttcaggcgcttaatattaattttgatataaaaaatgaagagatcaagcctcaaactgatgaagagaaagagttgaatttaccaaaacaagattgggttgaaacgaaattttcttacacatcagatttgaaaccaaaaatggtattcactgaaagtgaatatgccggatatagaatttcaaaaattacttatgtgcctagtttcgaaacaggcgcaatgaagtattcagttgagggtagcatatatggtaaagaataa

SEQ ID NO: 154559 - DNA, 330 bp, Enterobacter cloacae
atgaatactttacctgcaacaacccagcgggcggcgaaaccctgcctgtcacccgtggctgtctggaaaatgctactgacacacctgctggaacaacactatggtctgaccctcaacgacacaccgttcagtgaggaacgagttatacaggaacatatcgatgctggtatcacgctggctgatactgtgaattttctggtggagaaatacgaactggtgcgtatcgacaggaagggatttagctggcaggaacagactccgtatatttccgtagtagatattctgcgagcaaggcgctctaccgacttgctaaaaactaacgtgaaataa

SEQ ID NO: 154560 - DNA, 762 bp, Enterobacter cloacae
atgccatcaaacagcatccctcattacctctacaagcgtaaccacgtctggtggttcaggaagcgtttcgtcgctcagggcaatgcaatcgaatacagactgagcctgcaaacagcaagctttcagcgtgctcgtcttcttgccctgcgtttacaaacactttgcaaccagatggttgcttctttgggggccccaaaaaaactgaagaatggcgtgatggaaaaatcagcacaagagcaaatcagagcaaaacttcgagcaaaaattgccgaatggacagccgaggaaacagaacattggttctgcggctctaaacgtaatgaaggcgatcttaacgattatcttgagacactagatatggttgtctctgatttgaaagaacgcatcgcttacgatgataaaccatctctgcaccgagccgaagcaagtaccgttctggacgaactgccacaccttaaagctactctcagtgattacgattaccaggtcattactcgtatggtggcacaagccaaggtcaaatccttgcagaatacgcgagcaatcattcttggtggtgatgctgattggcttacaactagccctgtttcctctagagagacttctcgctctgatgttcattttctcttagatatgatcaacaagtaccaaaccgagaacgcaagcaaagagcactcgcagaaaagtcaggacaaatatgctcactcgctcgctctgaccttcagtttcttcggaaatgtgcctatttcggagatctcataa

SEQ ID NO: 154561 - DNA, 582 bp, Enterobacter cloacae
atggctacagttggctacgcccgtgtgtctactaccgggcaaagtctggatacacagctcgaagcgctatccggctgcgaaaagatattcagggagaaaatcagcggggcaaaagatgaccgtccagaactacaggcaatgctggagtttgttcgtgagggcgatgtggtacaggtaacaaaactggatcgccttgcccgtaatacccgccatctactggaagtctccgaataccttcagggtaaaggagtggccctgaatatcctcaatattggcatcaacacagccacacctacaggaaagctgatgctgacgatgatcggggctattgccacattcgagcgtgaaatgatgctggaacggcaggccgagggtatcgcactagcaaaactcaaaggcaagtataaaggtcgcaaaccaacagctcgcagcaaggctaaagaagttatagtattggtcgaaaatggaactagtaaagcagagatttctcatctgttgaaaattggtatcactagcatttatcgaatcatccgcactgaacgcccagacctactagacaatcaacaaggagtgaaactatga

SEQ ID NO: 154562 - DNA, 303 bp, Enterobacter cloacae
atgaaatggctactggcggcaggctgtttagcagcattccccgctatggctgtgtatcagcccactgaagacgagttgcagttaattcaggtgaatcgagaagggcttgagaagaacatgaaaaatgccctcccactgcaatctaaggtagatatctgcattggctacctgaaaggttcggggaaactcagggatgaagcaggccatacgactgaaactttcaagactctcgaatactgggaaaaagttaaacactatgttgacttgtcagttagggaaggtgcgaacaagttcctgatatga

SEQ ID NO: 154563 - DNA, 3831 bp, Enterobacter cloacae
gtgctgaaggccgggcaggatatcaacgcgcaggccgccgcgctggcggcggagaaaagcgtcgggctgcaggcgggtcgcgacgtgaatctggctgcggaagagaccacgcagggcgatagctataagtcaggcaagaaaaccgtcatcaacgaatcggtacgccagcagggaaccgagatcgccagcggggcgaatacccagatcctcgcggggcgcgatgtcaccaccgaagccgcgcaggtgacggcgaagggcgatatcggcgtggcggcgggccgcgacgtcaatctcaataccgcaaccgaaagcgattatcactacaaagagcagaccagaaccaaaaaagggttcctgagcaagaaaaccacccacaccatcgaggagaacagcgcgacgcgtgaatccggctcattgctgagcggcgataacgtgcaggtcgttgcgggcaataacctgctggtgaacggatccgccgtggcgggcgatggcgacgtgaagcttaaggcgggcaacaacgtcgatatcgtggcagccactaacaccgacacctcctggcgctttaaggaagagaaaaaatccggcctgatgggctcgggcgggattggcttcaccatcggcagcagcaaaagtacccaggatctccgtgagaagggcaccacccagagccagagcttcagtacggtgggctcgacggggggtaacgtcgcgatttctgccggaaaccaggcccatatcggcggcgcggatcttatcgccgggaaagatttaagcctcagcggcgacagcgtcatcatcgagccggggcacgacaagcgcacccgggatgaaaccttcgagcagaagaaaagcgggctcaccgtggcgctctccggcaccgtcggtagcgctattaacaatgccgtgagcgcggcgcaggagaccaaagagcaaagtgatggccgtctgaaagcccttcaggccaccaaaacggtgctgtccggcgtgcaggccgggcaggcagcggatatggcggcaaccaccggtgacccgaacgcaatgggtgtgagcctctcgctgacgacccagaagtcgaaatcacagcagcatgctgagagtgatgcggtggcaggcagcacgctgaacgcaggcaacaatcttgccatcaccgcgaacggtaaaaacaaaggcgcgaacagcggcgacatcgtgattgcgggcagccagctgaaagccgggggcgacaccacgctggatgcacagaacgacattctgctgtccggcgcggcgaatacccaaagaaccagcggcaagaacagcagcagcggtggcggcattggcgtgagcatcggtgccggcggcaacggtgcgggtatcagcgtgtttgccaacgtcaacgccgcgcatggcaaggataaaggcaacggtaccgactggaccgaaaccaccatcgacagcggcaaaaacgtcatcctaaaaagcgggcacgacaccgtgcttgatggcgctcaggttaacggcaataaaatcgtggcagatgttggtcacgacctgctgatgcgcagccagcagaacaacagcgactacgacagcaagcagaccagcgttgcggcgggtggcagcttcaccttcggcactatgtccggttcaggctatatcaacgccagccaggacaagatgaagagccgctttgattcggtggccgaacaaaccgggctgtatgccggggacggcggcttcgatatcaccgtggggcatcatacccagcttgatggagcggttatcgcctctaccgccacgccggacaaaaacagcctcgataccgggacgctgggcttcagcgatatccacaacgaagcggactttaaaacctcgcactccggtatcagcctgagcggcggcggcagcttcggggataaattccagggtaacctgccgggcggcatgatctccgctgcgggtaataaaggccataaggaaggcaccacgcatgccgccgtggcagagggctccctcactatccgcgacaaagcaaaccagaagcaggacgtggccgatctgagccgcgacaccgaacatgccaacgacagcatcagcccaatcttcgacaaggagaaagagcagaaccgcctgaacgcagttgggatgatcagcgacattggtagccaggtggcggatattgccaggacgcagggtgatcttaacgggctgaaggcggcccagaaagaaaccggcgcaacactccccgcaaatgcgacagaaaaagagcgccagaactatcttgcgaaactgcgtgatacccaggcatacaaaaacgtgatggtgacctacggaaccggcagcgccatgcagcgcggcatccaggcggctacggcagcgctgcagggactggcgggcggcaatatcggaggggcgctggcgggcgcgtcagcaccggagctggcgaacatcatcggccatcatgcaggcattgatgacgatacggcggcaaaagcgattgcccatgccatcctcggcggcgtaaccgcagcccttcagggcaacagtgccgcagcgggtgctgtgggggccgcatccggcgaactgattgcgacagcgattgccaaacagttctatcccgatactgacccgtcgaagctgacggaagagcagaagcagaccgtgagtacgctggcatctgtttcagcgggcatagctggcgggattgccgggggaaatacggctggtgcggcggctggagccagtgcaggaaagaatactgtggagaataacttccttagcgcttcaaaaaatgatgcacttaataaagcgcttgaagatcaaaaaaatggtaagaaccttcttcaggcatcacaggatattgttcgtctgaccaatgaggacaaagccaataatgggcttctgaataaataccagaatggtcagctgaatgatgcagaaaagcaagaacttgccgggttacttaatcagtatggctatgaactccagactgtttacggttactcagagcagcaagcggcacaagcgatacagtccctggcgaagggcggagcttttgtggcatcggcagctgatgccaaagcctataatgaggcgctgagctatctgaaaatgcacggtgttcagtcaggtcaagccgcagtgggtacagatgctttgatggtccttcctggagcccctggtactctggtgcgtggagttgtggctgcgggaggtgcataccagacaggtacggggataggtcagattgctgatggtaactatagtaacggagctctgaatgttggtctcggaacggctgctatatttggtggcgcagcagggaacagcgttatcaccaaaactgaaacaggtattgtttctccaaataaaggtgctggctggacagagaattctcagtctattgataaaaatgcccattcttctattcccaaagttactgctgaattgacagatcctcagacaggaaaagtcttcacggatacgaatcaggggaacagagctgatttcttcttgggggatgccagcaagccaacgcttatcaatgatgtagtgcaggcaaaagtaattaaccaaccggataaaaatttcccaaatggaaatatggctaccgctcatgcagaagttggtactatccaacaagcctacgagcagggtatgacaacgggtcgtagcatggaaatgaaagtatctggtaagccagtttgcggttactgtctcagcgatataaaaagtatggctgaaaaatctggcttgaaatcgcttactatttttgaagagaaaagcggagatactttgtattgggaaaaagggatgaaaaaattcaccaggaacgaaacttatgaaagatga

SEQ ID NO: 154564 - DNA, 216 bp, Enterobacter cloacae
atgacagagctggaaaagcagttgctgagcgcattagagcagctacagcaggactactcgcaaaggctggacgaatgggagagcgccttcgcggaatggcggagcatgtgtggacttatgcaacgggagaacgcggtgctgaacgagcgcgtgtcggacttgagcacgcaggtgctgagtttaagcgagcagctgcgccgcttgtccgggaactga

SEQ ID NO: 154565 - DNA, 492 bp, Enterobacter cloacae
atgagcagtcttttaacgctggcgaaggacttagagcagcaatcgaaagcgcagcagaagagtaccggcgagatgctgaaagccgcattcagcgagcacgagcagtctgtcagagcggaactgaacgcaagcgcgaggagaatcagcgacgccatcagcgcccacgagcagagtatgagcgaggcgatggagaaaaaccggcggagcgtgttgctgacggccgggaggacatggctcaccatcctgatggtgtcagcgctgctgatcgccacgagcgggagcattctgtggtggcagggacggcagataaccgacaattacacacatcttcgtcagcaggaagataccctggcgaaaatgaccgcccggacgtggggagtacgctatcaggagagcaacgacggccggaggttccttatcctgccgccggggatgcaagccgaagccatcccctacgacgggacgacctggatccgcctgaaacaggagtag

SEQ ID NO: 154566 - DNA, 1881 bp, Enterobacter cloacae
ttgccatgcgaattcaaggagttattctcatttgaaaattttaaaactactgttccgtacacatacaaaataaaaaaaggccaagcgagtttccgtagtttggcaattatacatccagcgcatcaactcaaaatatgtcatttttataagcagtatgaacaccttataattcatttatgttccataagtgatatttctctaagatatcctaataagatcgggacctactattatgaaaaagacttcttaaaggatagggttagattaaaagatgggggggttgatttagtggttgacggcttcgatttgcaaagtcagactgcttcatcatatttctcttataagaaatatccttttctttataaattctatgaatcttttgaatttcaccgccttgaaaggaagtacgaatatatggtgaagtttgatatatccaaatgtttttcacatatttacactcatagtttagcttgggctgttaaaaataaaaaatatgcaaaagagaatacggacagtactcattttgagggagctcttgataaacttttcagagattttaaccatggggagacgaatggaatattaatcggccctgaagtttcaagaatctatgcggaaatcattttgcaaagaatagatttaaatatcattgagaaattgagcaagttgtttaatcttaatttcaatgacgattatgtaattaaaagatatgttgatgactattttatctttgtttccgatgagatgcatctctcaaagattgaaatggtgctatcttctgaactcgaacattataagctttatttgaatgaatcgaaaaaggaaacgactacaagaccatttattacagggttaacgatagcaaaatatgaattgaagcaagttattgacgacgtatatagtgatattgtagatgttgaatcaatgtatgaaattaatagtttgatctctagaaaaaatatgggcgatgacttagggaaaatagatagtgtttttttgttagataaaagaaagaaaaaattcagccgtgctggagaaattataaagtctataaaggttgttattaaaagaaatgagataacttttgatcaagtttcgagttatctattaatggcattgaagaaaaaattattttcattgttgaagatattatctatctattcatatgatgaaaaacgatatctaaaactaatgaggttcgtatctgtacaattagaagtgattttctttgtgtactcgatggataatagagttaggccgacatatgtagcatgtcaaataatattggaagtgaatgcatttgctgagcgattcgatgatgatattaaagaggtattaaagaaaaatcttttggatgaagttgtattgtctttgaagaatgttattagttattcaggtggtggatatgttgagttttctaatattcttatcgccttaaaggagttgggcggtgaatattatttcgatcaaagttatttgattgatttcattgattctaaaatgaatgactccgaggggttaagttattttgtaatttgcagtattttgtactatatccatgggcggaatgattgtgcagcgcttattgaaaaggttgagaatataatacttgataaatttaaagataatgcaagcaataaaaatgattgcgaaatgacattgttgatatccgatgtgttatcttgtcctgttcttgatgataaatataaaatcaaagcctatagagctttttatccttcagggaaaaaagcgaaaccaacggatgaaatacagcgtactatcaatttcttcagaggtaaggtggtgttttttaactggctaggaaataaaaacctcgagcaaattctttacagaaaagagttgcgaaccccctatgaatag

SEQ ID NO: 154567 - DNA, 843 bp, Enterobacter cloacae
atgaagttgttccggtgtggtcattgtggcggtactatgatggctatgcgtcacggtgatactatccgttacctttgtgagaaaggcagaggatatcaacacgattgtaaaacatggtcattgccaggtatcttagttgaacatactctaatgctggtaactactattgcttacatagaactacagcagaaagggcaaggtaataaagccgattacacacagcagattaacgcaatggaaagtactatcaatggttatagtactcaaatcaataaagcaactaaattagctattgctcttgatgatgttgatgttgatgaattggcagatactattaaggaactcaagactaaaagagataatgctataatcgaacttgaagtacttcaacgtaagcaattactatcacacgatagtacttttgaaaccatcatgatggacttctttacctatgctcaatatggggtacttaaagatccagtacatgaataccgtagtaagttacgcgatgtggtatatagtgctataggtgatgtgcgagcgtggaagcatgatagaagactattcatcagttttcagatcaaaggaaatgacgaatattataacttctcagcaggtaacacaccttatgaatggggatgttatgtaggtgctctaccattctcaaatgaagaattagaagtagctaatggtgagttaccaaatgaagtacttgaacgtgttagagaacgctacgcagaactacacgccgcaaatatgatgatgttgaatcatgcccgtgagttactatcacatataggctatcctgaattggacagtaaaatgttttggccaagaaaatag

SEQ ID NO: 154568 - DNA, 153 bp, Enterobacter cloacae
atgagcaaaccaaataaagatattcgtgtatcattacgtattactactgaacaggctgaagcacttcagaagttgttagtagatacgggtaaagcaaaaacacaatcatcagcaattcagtatttgattactcaaatgatgatcaaaggataa

SEQ ID NO: 154569 - DNA, 546 bp, Enterobacter cloacae
gtgcctattggttctgcggttcgattaccttctggttacactcctacaggtcgtggagatgtggtaggtccgaaaggtggcatgtataccaatacagggaaaacagactcatcgggtaacgctatttacagtaataatggtagttattatacttttgatagcacgtcaaaaaatggcaccctatctccaaacccagcgaatcaaattcgccagaactatgatcagggaaaagcattcgaagatagcatttatcaaaaatattcacagggaatgaccgattcagccagagaggttacaatcaaaactggaagtggggtaaatgttagagtggatattatgacgaaagatagtagcgggaatattttctgtgtcgaatgtaaaagctcagagacagcacctttaacgcctaatcaaaagatcggctacccagaaatagaaaatagtggtggtgtgattatgggagtaggcaaacccggatttgatggtgggacagtgattccaccaacaaagattgacgtgataagaccaggcaaagataaaggttaa

SEQ ID NO: 154570 - DNA, 324 bp, Enterobacter cloacae
atgtcagtagaagaccttaataaaattgattttatggggatcactgaaaatgagccagacgctatcagtctggctatatcagatcatctggcttggggtgagaacacaaatgatcatttgtataagttacaggaaaaaataaattcatatattgagtttatagaaagtgggcaaatggaagaaagtttccctaaatctaaagggaaaacaaagaaaattattgagatttacttcaaaaattctccgccgaaagatgttctgtttttctttgataaagttgaaagtgttttggctgggattaatgtaaagctacagttaaagtaa

SEQ ID NO: 154571 - DNA, 252 bp, Enterobacter cloacae
atgactttcaaaatgagttggacactggacaaaacaggtggaaataaacagatctcaaattgggatatggtattaaatcagtttaaacaaattcagggaagaaaaggaacccttactcttgatatacttaataatagcgatgatagcgctggaatgcttcaggtcagaacggagaatggttattacttaataacattaggtgaaattgtcaaagatgaatatcaaataagaacgtactgggattcatcttaa

SEQ ID NO: 154572 - DNA, 357 bp, Enterobacter cloacae
atgttgatgtggaatgattttgtcgaaatgttaggctgccagaagatggatgaaagattcatccatctttctcaagagtttaatgaattacctaaacgtgatgaaagtgttttaggtgatagagaatattattcattcatcggttcaggtatattatttttattggataatgggatcgtggaccaaattagtttttacattgaggctgatgaaggattttccaaatttaaaggtgatttaccgttatcttttggttgttctgagtctgaggttattcatcattttggagtgccctcatcttcaggggggggcggaagatgcacttcttggttatatgaatcgctggataaaatatga

SEQ ID NO: 154573 - DNA, 546 bp, Enterobacter cloacae
atgggccagcacgcgtcccttaagatccttctccgggatggcattcgcgatggcattagcgatatacggcgcggcaccgcccgcaatcgcagctttaatatcgccacctgccagcgcctgaatggccgccgttgctgccgtgatggcgcgctgggtgctctgccccgttcccatgccagactggttaaacgcttcgttatagaaggcctggtacatctggtcatgaatcgcctgatcggtaacctctttaccgtcttttttcagctggctgatggcggcgttacgcgcatcgctgcccgcggttttcatcttctcgttggccgcttccgtggccgcaatcttgccgttggtgcgcgcaatatccgcaacctgattgccgatctcgccaatcatttgcgcggtttgcaggcgtttctgctctttctctttgttaaagatcgggtcgatgctgccgttggcatggccagtgtcacggctgagcgtgctgacgtcctgcttctggttagcctggtcgcgaacaatgatagcaccgtcggctaccgctga

SEQ ID NO: 154574 - DNA, 150 bp, Enterobacter cloacae
atgaatgcgctgtgtattgccgataacatcaaactggaataccaggatgtgacggacccgtataccaaagaaagatactttgagtactcccatgacggaaaactgatgggtcgactgctgataccctcaaaccctgagaaccacgaataa

SEQ ID NO: 154575 - DNA, 1206 bp, Enterobacter cloacae
atgtctcttcgttcgctgcgggcgctatgcctgacaagttttttcattgcagatgtccgcgatggcctggggccttttctcggtatttttctgaccgaacgccactggacccctgatgatatcggcatcctgatgacggccggcgggctggcgggcttattggccacgctgccagcggggttcatcaccgacacctcccgcaacaagcgcgctgtgctcgcgcttctgtgcattctgatcacgctcagcacgcttctgctctggtttagccagcagagcagcgttgtcgccgtttcgcaagtcgtcaccggtatctgtgcggcctttgtcgggccgttaatcgccgggattacgctggggttgaccgggcagggcgggttcagcgcgcaaatgggtagaaacgaagcgttcaatcacggcggcaactttgtcaccgcgctcattgcgggcggcattgcgtggtactggggcgtgggcgggattttcctgctgatgaccagcaccacgctgctaacgctgtgtgcgctgcttgccattcgcaacagcgatatcgataacgacgcggcgcgcgggctgtcctcttcagcgagcctgccggtccccggttttgcggtgctgatgaaaaaccgggcgctgtttgtgaccgggctgacgctgctgctgttccacctggcgaacgccgcgctgctgccgatgctgagcatgagggttgccgcggcacctgccgcgatcaaccccggtttgtatgcggctggtaccgtcatcatttctcaggccgtgatgatccccgtcgccatctgggcctcgcgtcggatcgaacactatggctactggcgcttgattatgctggcgctgctggttatgccggtgcgtgcggcgctggcggcatccacggatgcgccgttaatgatgatcccggtacaaattctcgacggcctggccgccgggatcctgggtgtcgtcgtaccgtcgtttattgtggtgctgctgcgcgaaagcgggcacgtcaatgccgggcagagcgtggtgatgttgatgcagggagtatgggcatccatgagtccggcattaaccgggacgatcgccggtcattactcgtttgcgacggcattcagtgtcctgagcgcgattgcgctggctgccgtcctgctctggtggcgcgttgcgcaccggagctgggaaacaaacgcgccgggtgaggcttag

SEQ ID NO: 154576 - DNA, 591 bp, Enterobacter cloacae
atgctcctcgccgcgcttatcctccatccgcagcttgttgttcgccggggtgcgcagcacgttgcgggtgtggttgtcgcgggagacagggtccggatgttcagaatcgtgcagggcatatgcgatatacggcaggtcaatatcaccgttgctgtacgctatcgccacttcggtcccgtcggtgagcggtgtgtgccaccccagcgtgtctccggcataaggctttgccatccgcagccacaggtagccgtacccgggttccgtcccttcccggtcgaagtcgggcttcacccggtagcgcccctgttcgtcaaggtgagcgtaaatatcgttcttttcccggctctcaatgcgggccggaagcgtaccgtgaatttccggacgcgggatgtccgccgggcggaaacagtaacgctcggtgtagggcatgccccacaccgacacgtgcaggcgggaatcacgggctccccggaaggtcacaagcgtgaggacaaccccctctttcagggccgtaatgacatcgccctgtggctccagcacctgcccgggcgtgaggtgggcagcattgctgaacaggtggatgcgggctga

SEQ ID NO: 154577 - DNA, 636 bp, Enterobacter cloacae
atgcgattgacggcatcgggggtatacaccccctcgcctgaagccaaatatgctcttgttgaattgcaggctgccggaggtaatggcgggaacgccccagcgacgggaagcggcgttgtaggtgttgccgttggagggtcagcaggtggttacgccaaattccttgtaaagattagcgatatcactaacttcaattacaccgtcggggttcacgcatcgacatcaaattctgccactgttgggggaagcacgtcattttgcggtgtaacttgcgcaggcggaacaggctcagcccttgcagggacttcatctggctcatcgccggtgcaatcacgtgctttcctgggcggtaatgtcacaaatgccggaacaacgccattgactttaatcgaatccattcagggggatacgagcagtaacgccctgtacacgagccctggaaactcagtatcgggcaatggcgcatccagcaggtttgcaccgggccccattggtataggtggaagcagtggaagtggcattaatgctaaagatggggcgggaggtagtggcgcaaacagtaccaataaccctggcggaggttttacgggtggattaggtggtgatgggcttattattctatgggagcttgcataa

SEQ ID NO: 154578 - DNA, 405 bp, Enterobacter cloacae
atgataaagcggtatgcactggtaaaagatggtgttgttgaaaacctcgtgtcctggaatggtgaaggggaactcttctctgaatttgttaccgtcgagctgaatgatgattccgttgcgagcgttggctggtcatacgacggaaaagaatttatgccaccgcctgaaccagaaaaaacacacgcggagctggtcattgaagctaaagcagaaaaacaatcccgccttgattatgccgcaagcaaaatcgtcgtctggcagacgaagttgctcatgggccgcaaattgaccactgacgaaacggcatcacttaatgcctggatggactatattgacgcggtcactgtgatagatacagaaaccgcgccagatgctattaactggccaccactcccggaggtgtag

SEQ ID NO: 154579 - DNA, 441 bp, Enterobacter cloacae
atgaaatcagtttactcaccatccgaacacgtaatatataacgccactttttatgacgattataagcgcgcagggacctggcccgctgatggggtcgaagtaagtgacgaggatgccgctacgtttaatggtagcaatgagccaactggtaaaatgctggattaccagaacggcgctctgtgctgggttgaccgtccggcccctaagctgacaaaagaacagcttatagtccaggcggagcaaaataaatctcagctgcgcacagctgcggatgaggaaattgcgtggcggcaagatgccgttgatgctgggatagcaacggaggatgaaaccgcttctctggcagaatggaagaaatatcgggtgctgttgatgcgcgttgatacttcaaaagcccccgatattgtatggcctacacctccgggagtggtggccagttaa

SEQ ID NO: 154580 - DNA, 624 bp, Enterobacter cloacae
atgaacgcgagtacatacacaaattctaatcttctcaagtactggaagttagttagaggtactaccaaaacccaattaacgctaatggaaattatgagtttaggcgtttttgtaacatgttttgatgtactaccaaaaggtactaatggtttccactggactgattcactaattgatattcctctagatggttatcaatatacaagttttcccgatattatcagtggttcactaccttcatattcagaacaaaagggtattactaatgatgctattaacttcaagataagtaatgttaatgcttcagtacgtgctcttgctcttggtggttttcttaaagatgctcagatgaatatcaagttagttatcttgaatccatatgatagtactgtaattgattcaatgcttatgttttcgggatttattgattacatccaggcagtactagatccaaaccagaaaaccaatgaaatgacagtatacgtaaactcaatttacaagaagctagattttcaaccctcattgatcgctgctaactcggtttatcaatccatgtataaaggtgatgaatacttttcattacttggacaagttaatcaaaaccaaaattggaagtacaaataa

SEQ ID NO: 154581 - DNA, 753 bp, Enterobacter cloacae
atgactaaaagagatattttaggaaagtataaaggctctgcaattggggtgttatggtctttaattaatcctatgcttatgcttattatctataccttggttttttcggtggtatttaaggctcgttggggaacgggagcagtagacgagccgaaaacgcagtttgcagtaattttgttcgtaggtttaataatacattcttttatttcggaatgtttagtccgttcgccgaatttaattttgcagtattccaattatgtcaaaaaggttgtgtttccattagaaatattacctttagttactgtattgtctgctctattccatagtgccattagttacgtagtgttatgtattgcgttctttatgtttaatggctatttgcattggacaataatttttgctccattagtattccttccattgtttgttctttcactcggactggtatggttgatttcgtcgcttggtgtgtatataagagatatcggacagtcaataggtattatagtcactatattaatgtttctttcacctgttttctacccgctatctgcgctaccaaaaacaatgcagagtatcgttttattgaatccactaacttatataattgaacaatccagaaatgtgattgtgtggggtaaattaccagatttttatggtttatcactttacctttctatttctatagtcatcagtacgctatgttatatttggttccaaaaaactcgtaaaggatttgctgatgtcatttga

SEQ ID NO: 154582 - DNA, 225 bp, Enterobacter cloacae
ttggctaagcaggtcataatcgggacgttcaccctcaccaaacattgtggcatattcaagcaccccaataagggtgatagcatcaaatttatggtccgcatcaaaacaatcgaatcgctctaccaatacttgtacattatcaaggtctctggttctactggcagctatagatgcgcgacgttggctaccctcaagagccaggatgtttccaccattctcgcctaa

SEQ ID NO: 154583 - DNA, 516 bp, Enterobacter cloacae
atgtgcagccggggctcaaaaaaacatcccgatatcgccggagataatgggctgggtcgctctcgcggcggttttggcaccaaaatccatctggcgacagacggaagcggtctgccgttaaatattgtgctgagccccggacaagcccatgaaagccagttcgcacaacgtctgctggacggtattggtgttcagcgccagaatggcagcatgaagcgacgtggtcatgccgtactggcagataaagcctactccggacatgcgttacggaacgaactgaaaaacaagggtataaaagccgtcattcctcgcaaatccaatgaaaaaatggcctcagatggtcgttcacaactcgatcgtgatgcttaccgtaatcgcaatgttgttgaacgttgctttggtcgcctgaaagaatatcgtcgcatagccacacgttatgacaaaacggcgaggaattatctggcgatggttaaactgggctgtatcagactgttttacaaaagattatgcaattaa

SEQ ID NO: 154584 - DNA, 237 bp, Enterobacter cloacae
atgcccgttattgccattatcgccattgttgtcatcgtcatcattctgaacaaaaccggggtgtccgacagcctcacggccctgacacttgccacggttgctgcactattgacgggcggaggtgcagcaggtgccgccagtgtcgcgctgacaccgttcgtcggcgtgccggtgggtattttcgtgggcatttatgtctttgccaaagtggttcgtctgatttcaggaaaaaaataa

SEQ ID NO: 154585 - DNA, 297 bp, Enterobacter cloacae
atgaataaatctattccattatccataccagaaattaatgtacgtcatgttagctataaaggctatccgatctctatcatgatgttatccgctgatacatttgtatatgaacttcatgataatatccgcgttattgaatgttctacctctgatcaggtgatgtacattgataaacacggtctaacggcggttattactcgtgattcactactgtataaagaactgttacaccggatcatgaatggtgacgtgttagaggacgggaactatcagtaccagcccgttaccatccagtga

SEQ ID NO: 154586 - DNA, 144 bp, Enterobacter cloacae
atgagaggcaatgatgatcaggtcggcgccgatcgtgtcagcgagcttaaggatctgatccttcggagaccccgtcacggcgtgggtctgtatcttgtctgcagggattttgaattgcttaacaatctcatccagtttcgctaa

SEQ ID NO: 154587 - DNA, 297 bp, Enterobacter cloacae; identical to SEQ ID NO: 144913

SEQ ID NO: 154588 - DNA, 171 bp, Enterobacter cloacae; identical to SEQ ID NO: 149518

SEQ ID NO: 154589 - DNA, 2391 bp, Enterobacter cloacae
atgtcagataacctgcttaatctggccaccgagaacgcggctaccaaacagcgtcttgcctgggctgcaggcaatgagctggccacccgcacgctgccgtttgcacagtctctgctgatgcttatcctggtttgcctgttcccgctgatgattgcgctggccgcgtcaaaccacacgctttttggcctgaacaccctgaaaatatacgtttccgggtttatctatttccagatgtggccggtgatgttcgccattcttaactatgccgccaactactggctgcagagtcagtccgggggcacgcctctggttctggccaacaaggatgttgtggcactgcagcattcggacgtggcgaatctggcaggttatctgtccctttccattccggtgctgtcgttctatttgaccaagggggctgcggcaatgggctctcaggtggcaggaagtgtactcagctcgggcgccttcacgtcagcaggtgtggcagcgaccacagcggacggaaactggtcgtttaacaacatgtcgatggacaatgtcagccagaacaagatggataccaacctgatgcagcgtcagggtcagcaaacctggcaggcggataacggctccacgcagactcagacggccggtggccatacggttatcgacggctcgggtgcaatgtcgaatctgccggtgaacatgaagctcagccagctggccagcagtggtttccaggagtctgcccgccagtcgcaggttcaggcgcagactgcactcgatggttacaaccacagtgttaccagtggctggtcgcagctctcccagctttctcatcagaccggtaccagtgacagcctgaaccaaggcagtgaaaacagccaggccactaatgcgacacgcggagctggcatgatgttgtctgcctctgagagttatgcgaaagcaaacaacatctcgacacaggaagcctataacaaactgatggatatcagtaatcaggggtctctgtctgcaggcattaaagggacggccggaggcggacttaatctgggcgttgttaaatttggcgctgaaggaagtgtttctggcgatttgcgacattcgacgggcagttcaagaggcgttcaggattcgggatcccaaactcaagattctcgacatgatcagaacagccaggctgttaatgacttccgtcagggtatggatatggttaaaagcagccgtatcaccgatggcgcgaatcattccgagaatgctgcaagcagcaatgttcagcagctggccgcaacgctcaatgatgctgaaagccagtaccatcagtacaccaccagttctacacagagtaacgagttcagccgtatggccaccgttgcgcagaaccagagcgcaagcctcgatacgaactatacacaggagtttgtggactgggcggccaataaatacggcgataaggcacagtccatgttgacaagtgcgccgtcggcgcgcgaagcggcgatggagttcgtaaatgaacggctcaaaccagaaatcatgggggattatcagaagggacgttcagatcttaccagcggtcaggagcatgcggcattcagtggggagcatatcgttcagccagcgcgtggcagtcaacaggtatcaggttcatctggtcatgatgcaggagtcagttacagctctcaggatggcggtgctcatagatcgggaggtgttggcagtgcccagacttacggaacggctcagggcgctgaatatggaggccagcagggtgggaattattctgccagaacagacgattctgtttcgccgggtatggagcagtcaactgttcatcaaggacaagcagccggacagagaagcagctcgggtaatatcatctcgtcggcaggcatggctgttgccggtggacgctccactgcagatgaaagaaccggccacattgcagaatctcaccaggagttccatcattcaggagccgtcagggagcaaggaagcatgcatggtcaggagagtgaagttactcatagccgttcaggcattaatgctggcggagaaaaagtacgtggcgatgctatgcaggagtcatatagagaaaatcaggctaagttgcatgaacattcctcgcagggttttggtcctcagaatgagttacagcgccgagtggcggaacaaagatctgaaaatgagcataaaatcaacgaatctgctggagaaattggcaaaaaacaatccactgttcaggcatccagtgatatcctgaaaggagagaatttaaatgcaaccggtaatttcaaaattcaacgaaaagaagccgaaattgaccagcaaacgccagttatagacagtgctgaaaaaaggaagttagaagagcaattgctggaattgaggaaaagggccagctag

SEQ ID NO: 154590 - DNA, 789 bp, Enterobacter cloacae; identical to SEQ ID NO: 130196

SEQ ID NO: 154591 - DNA, 492 bp, Enterobacter cloacae; identical to SEQ ID NO: 142944

SEQ ID NO: 154592 - DNA, 450 bp, Enterobacter cloacae
atggccagaaaacctaaagaaatcaaaacagacccgttagaggtcatcctgtggaaagcggctgacaagctacgtaagaacattgatgcagccgagtacaagcatgtcgtgctgggcctgattttccttaagtatatttctgattcttttgaatctcattatgagttgctgaaggctggtgaaggcgagttcgcaggcgctgacccggaagataaagacgagtacaccgcttacaacattttctttgtccctgagcttgcacgctggaactatctaatatctaaggcaaagctacccgaaatcggtaagctggttgatgatgctatggagcttatcgaagcgggtaacccacagctaaaaggtgtgctgccgaaagtctacgctcgccagaacctcgacgcaactgtgctgggtgaactgatagatctgattggcataattgctgcatag

SEQ ID NO: 154593 - DNA, 1467 bp, Enterobacter cloacae
gtgcagttcggactccagctcctgcacggccaccggccgggccgtggccgacagcttcacgcgcgcggccgcctggtcgagcaggtcgatcgccttgtccggcaggaagcgcgccgtgatgtagcggtcggacaactcggccgccgcgatgatcgcgtcctcggagatgctgaccttgtggtgcgcctcgaaggtgtcgcgcaggccgcgcagaatcatgatggcctgggccaccgtcggctcgggtaccgtcaccggctggaagcgccgctccagtgcggcatccttctcgatgtatttctggtactcgttcagcgtcgtggcgccgatcaggttgagttcaccgcgcgccatcatcggtttgaacacgttggccacgtccagcccgccttcgccaccgccctggccggcaccgacgatggtgtgcacctcgtcgatgaacaaaatcagctcgccctggtgctcggtcacctccttcagcaccttctgcacgcgctcctcgaactcgccgcgatatttggcgccggccaccatggcgttgatgttgagttccaccaggcgcttgtcgcgcaaggtctcgggcacttcacccgccaccatgcgctgcgccagcccttcgacgatggcggtcttgcccacacccggctcgccgatcagcaccgggttgttcttcttgcgccgggccagcacctcgatggtggtttcgatctcctgcgcgcggccgatcaccgggtcgagcttgccgtcgcgcgccatcttggtcaggtcgcgcgagtacttgtcgagttctggcgtgttggtcggcgtctcagcgcggccatcctcggcgcccttgccgaccaccttgctgacctgttggcgcagcgcctgcggcgtcaggccgtagcggcgcagcaggttggcggccagcccttcgccttcctcagccagaccgatcaggaaatgctctggaccgacataagaatggccgagttcattggaggccacgaaggcgcggctgagcgcatccttcacgcgcggcgacacgccgatctcgccctcgaagggcttgtccccgcgcttggcctcagactcgatctgccgcttgaggtcatcgaccttgatcttgaactgacccaggatggtcttgaccacgtcgctgtcggccagcgccagcagcagatgttcggtatccacctcggagcggccaaattcggcagcgtgtttggcggcctcctgcagcaaggcttccgactgttcgctgatgcggctggccaacccactgccgcgacggcgcggcgcacccgaacctgcggtggcgggctcgccaaacgaggcatcgaccacgtcatcggtatcggcggcaactggcgtcgcgtcttcgccgatgcggaagaagtcactgccgaggaagtcctcgaacaggccgctacgcgagccgaacaaggcttccagcggcgaaacggtgcgcttttgctggcgcactaa

SEQ ID NO: 154594 - DNA, 1191 bp, Enterobacter cloacae
atgcattcatacgaggaccggatccgggccgtcgaactctattaccggtacggaaagaaagcctccgttgtcgtcatggagctgggatatccttccacaaaacagctgggccgttgggttcggatttatgaagagaagggcgatttacccagggaattaaagccaagagaacgctattcacggacacagaaaattgctgctgttgagcattatcttactcacggtggttgcctgtcgtacactcgccgagccatcggctaccccagtaacgaaattctaaagcgctggattgaagagttttacccaaatgcgcgtcccctggtcattcgctcaggcacaaacaaatgcttcagcccggaagagaggtctcaggccgtccgggagctctgtaaccgacgtggaaccgcgcgtaaagttgcacaaagcataggcgtcagcgtcccggtcctgtacaaatggaagaaagaccttatcagtgacgaggcttatcaatccatgcgcaaacgaaaggcagcccctcaagataaaaatcaggatgctttactcggtgaaatccagcgactcaggcagcaggttcatcagctgcagctcgaacgtgacatactgataaaggcgaatgaactgataaaaaaagatctgggcatcagctttctgacactgaaaaacagggagaaaaccctgatagttgatgcccttaagaaaaagtaccccgttgctgagttgctaagcgttctgcaacttgcccgcagctgttatttttaccacaaagccagcaaacgtctgtgcgataagtatgcggaaatacgcgtgatcatggccgatatctttgaggagaattaccgctgttacggctaccggcgccttcacgcgatgcttcgcggtaacaacagggttatttctgaaaaggttgtccgcagactgatggcagaagagcagctcgttgttaagcgcaccaggcgacgacgatacaactcttactgtggcgaaatcggcccggcaccggaaaatttactcgcccgggattttagttcctgcaggccaaatgagaagtggctgaccgatattacggagttccagcttcctgctggaaaagtctatctgtcgccggttatcgactgctttgatggccaggttgtaagctggtcgataggaacacgcccggacgcgactgaatcgccacggataatctag

SEQ ID NO: 154595 - DNA, 234 bp, Enterobacter cloacae
atggactttacggaatatcaagaagaaataatcgaagatgttaaatcttgccttgaaaacttacaagtccaacccattttattcatgggtgcaggtatttcacaacgatatataaaagcgcctgactgggaaggtctattaaagcaactagcggaaatatgccccttgatcaaacgcccttatggttactacagccaaacaaagggtgataacaaacctctgattgctatgtga

SEQ ID NO: 154596 - DNA, 738 bp, Enterobacter cloacae
atgaagaagctctggttgttatgtctatgcgcatcgattttgccttcactagcgactgccagtgaaaaaatgaagccaaaagacattaagtggctgcaaggttttcctgaaaccaaaaatattggctgtgatttttacgaggatagctcttattcagcgacagggcgtgaagggcttgagtttagcccatcatctctcaaagaaaaaaaattgcgccctgatagccagataacttgtgatttatgggcaaaatccgatgatatcaaaacccctgtattgcatgtctcagaggaattcacaattgatggggtgaaggctcacatttatcactctgatgcgtcgggcactataggtaaagattataatgacaaaagcgcttggaactccgcctgtaagaccgatgcaatgactgacgaagtaacttgttatgtaagccataatagcttttatgttttcaaagataaatcaggctacaacgtgcttgttggtggcgaacatttccctggtactcttgcttacgtaagaatcggcaaggacaagcctattgcgtcaggcgaaggcggagttttttcatccagtaattccgttaagataattgagtcaattggcaaacagatctcagtatctactcgctatacaaggtggccatacgaaagcccggtcgatgaaaatcttgatgtgaaatattttcgacaagccaagtcggtcttagatctaatctatgacaaccatatttga

SEQ ID NO: 154597 - DNA, 216 bp, Enterobacter cloacae; identical to SEQ ID NO: 119954

SEQ ID NO: 154598 - DNA, 1368 bp, Enterobacter cloacae
atgagacaggatatcgaagcaagcgtgattggtggtctgttgttaggaggacttaccccggcggcaagcgacgtcctcgcacgggtggacgctgaggcattcacgatccctgtataccgtaaagcatttgaggttattcgtaagcaggcgcgcaaccgtaacctgattgatgccctgatggtagcggaagagtgcggcgatgagcacgctactgacgtgatgatgacagcaagatcctgtccgagtgcggcaaacctgtctggttacgccgacatgctcagcgatcagtaccagcgccgccagttcatcagcgttatggacgagcttcgcggccctgtgagcagtggaacgctggatggtgcatctcaggctatggatgaattaatgcgccgcctgagcgccatcaggaagcccaaaagtgaagtaatgcctgtacgtctcggtgatgtgttggacgactacaacgagacgcttgagaagcgtctcaaaaacggcgatgagtcagatacgctcaagaccgggatcgaagagttggacaaaatcaccggcggaatgaactcggaagacctggtaattatcgctgcacggcctggcatgggtaagactgagctggctttgaagattgctgaaggcgtggcaagtcgaaagatgccagggactgaaagcctacgcggggtgcttattttcagtatggaaatgagcaatcttcagattgccgagagaagtattgctggcagggaaaacatgtctgtcagtgtcctgcgtaaccctgcaaatatggatgacgagggctgggcaagggtatttaacgccatttgccacctgaaggaccttgacctgtggatggttgatgcgtcgaagctcaccgttgaggagatacgcagcattgccgaacgacacaagcaggaaaatcccgcgctttctctggtcatggtcgactacctcggcctgattgagaaaccaaaggcagaccgtaacgaccttgccatagcgcatatatcagggagcctgaaggcaatggctaaggatctgaagactccggtgatctcactaagccagctttcgagaaaggtcgaagacagaccaaacaagaggcccaacaactcagacctgcgtgactcaggaagcatcgagcaggatgcggactgcatcatcatgctctacagggaagcggtttacgacgagcacagtcccgcggctaaactggctgaaatcatcgttactaagaaccgtttcggctctctcggaaccgtataccaacgattcgttaatggtcacttcatgccatgtgatcaggatgaggcgcgaatgatatctaccagcaaaccaactcaaggcaagagatacgcgaaaggggcaaacgtatga

SEQ ID NO: 154599 - DNA, 813 bp, Enterobacter cloacae
atgggcgtcgttaagcatttagcagactacaggccgtcagaatcggtcgtggagcgtcaggtggcagatcttgatgatgggtacacccgcatcgccaatgagctgctggaagctgttatggctgccgatttgacggctcgtcagctgaaggttgttctggcggttattcgcaaaacctacgggtttggcaagaagtttgaccgcatcacaaatacccagatcgcaatgatgaccggcattcatcatacgcacgtttgcaaggcaaaaaacgagatgatcgcaatgaacatcatcgttacaaatgggctaaatattggtgttaacaaggtcatttctgagtggaattttgagtttagccaagttagcgaaacattagccgattcagctaataaaacattagctaacttagctaatcggtataagccaactcagctaaacacaaaagaaactattcaaaagaaagaaaagaaagacaaaacacagtcatctggagatgaccgcgagccgcgtaaacccgcaaagcgaaaagctacaaacattaactacggcgaatatctggaagcctacaacgaaatcgtgggcgatcgccttcctcatgctgtagaggccaatgcagagcgtaaacgtaaaattcagacgttggttaactccctggcgacaaaaaacattgacggcttccgggcttacgtcaaagcgtttatggcagctgcaagaccttttcatttcggtgacaacgaccgtgactgggtggccaattttgattacctgttgcgtccgaaagttctggttgcaattcgcgagggaacgctatga

SEQ ID NO: 154600 - DNA, 168 bp, Enterobacter cloacae; identical to SEQ ID NO: 118586

SEQ ID NO: 154601 - DNA, 384 bp, Enterobacter cloacae; identical to SEQ ID NO: 147975

SEQ ID NO: 154602 - DNA, 972 bp, Enterobacter cloacae
atgagcgaagtaacggacttagctgtcatcgaaatcaaaccggatcaggcgccagcgctttacatcgcgggtggccttgatgcttacctcgagcaaatccgccaggcagtaaacgaagtgccggacctgtcaacgaagaaaggccgtgaccgtgtcgcctctctggcagcgcaggtgtcccgcagcaagacggcaatcgaaaagccgggccgtgagtacctgaagcgcctgaaagaggctgtgcgtcctgctgaggcggaaattaagcgcttcgttgatgcctgcgacgagctgcgcgatgccacccgccgaccactcaccgaatgggaagcagaacaggaacgcatcaaggctgaagaagctatgaacgcgatgcacgatgaagcgctggagatgaacgaagagtttgaccgccagcgcgctgcgcaaatcgaagcggaccacgaaatggctcttctgatgaatgacaagtttgaccgcgatcgcgaagagcagcgccgtctggcggaacaggcccagcgtgaacacgaagaacgcattatgcgcgaagcggcagaacaagcccgcctcgatgccgaagcgaagcacaaagcagagattgaagccgcagcgcgccgtgaagccgaagagaaagcccgcgctgaactagcggagcgccagcgcatcgaagcggaacagcgtgcggcacgcgagaagcaggaagcagaagcgcgggcggaacgcgaaaaagccgcggcggttgaggctgagcgcctgaaagcaaaacaggccgaagcagtccgcctggctgagcagaagcgcatcgccgacgaacaggcaaaacgtgaagctgatgtgaagcaccgcaagacggtcggcaccaacatcgttaacgcgctcaccagcaacaccagtttaacccgcgaacaggctatcgaagtgcttaccgccctgaaagatgacctgatcccctgcgcgaaaattcattactga

SEQ ID NO: 154603 - DNA, 279 bp, Enterobacter cloacae; identical to SEQ ID NO: 121008

SEQ ID NO: 154604 - DNA, 876 bp, Enterobacter cloacae
atgccagcatccaacattccgcccgtagaaacgcgcctccattcttatcgcattgtgaagatgaaacccaaatcttcagaccgcgtaaatccgagttttgaccttaagggcgcgtctgcgccctcttggagttctgtcaataactgtactgggagctcaggagcggacgaagaaccaccgttaaaagcggcggtgccagctggtaccacaccgtcaaaaccgacgatgcatgccggtattgattacccgaacagtcaaatgacagaacttccgctgaatatcgaagatttgcgccgatattcacgccagcagcggcaggaagttaccagcaggctgaaaaactttggctgcgaaagctcagatcatgccttcgagcgtaccgcgcgcggcctgcgcacgtctgttgatgatgaaactgcgttgacgtgggggccaaaagtggccgctgcgaaagatatgagcctgacaccagaagaggcagaacagcgttggcggcaacagctgcggattgaagcggagcggcgtgctgataactatgccgccgctgttgcggaatatcagaagaaaaaagccgaagcggcactgcggcaggtacagataagagaggctgcgaaaaaaatcggagtcagccaggaaatcattgccagcatcggcgcgcagctgcgtagttgtaggattttcgtcagcgatgacgttgtgaggtcgattgctggcggttcccgcgttcgccacgacggcggactgatcgccatgagcaatggccggttgcaggaagtgaaggcatggcgtgccggtgataaagataaaccgacgtctgaatacatggaggtgtttggcttggtcatgcgctggaggaatgctgtgaaaagaaaatag

SEQ ID NO: 154605 - DNA, 909 bp, Enterobacter cloacae
atggaattaaataagaagaaaaaaatcacctttgcatggtggaacacaagtatgtctcctcattcgcaagaaaacaaagctagtgatgaacataaaacttatgttatttatacgctgctacgattgattaaagataaagatgttgacgttttatgcttgtgtgaggttacacaagaagatatcgcttatattcttaattatattgctgattttggattttcggtatatgacggcactattagagatggtcgaaagaagtttgatttgtgcgttttatatagggatgaattgctagagcttacaagctctgaagtaataagaaagccgcacgtaacaaagattatctatgctgctcaggaagtgaactttacaatcaaagaaactcaagagccgatggcattatacttggttcactggtctagtagaatatatgattacgaagactcagtgaaaaaacatcttttaggatctaccttgagagatgcagtattttcgagtattgaacagaaaggggtaagtaatgttattattcttggtgattttaatgaggagccatttaacaaaagtttaactgatgctttatgtgcttcgagagatatagggctcgtgaaaagttcaccaaggctactatataatccattttggaggcatttgattggtggtcacttgtttccggagcatagggagtttgaagggtgtggaacatactattacaaaggagatgaaatacatcgatggagaacgtttgatcaaattatattttcatcaagtttcgtaagggatgggaaatggttccttgatgaggcgagtacggaagtattctacgatgagacgttcctaaagtttatttttaattctaaatctaaatttgatcatttaccaataatatcgtcaatagagaagcgttaa

SEQ ID NO: 154606 - DNA, 483 bp, Enterobacter cloacae
atgaaagatttcaaaagttcactgcttgctggaattgccgccgcaaaaaaagcagaagataatagaagtgaaataagttcagtttttgctaatttgaatgaacaggttaaggaagttagtgagaataaagctatcttttcacgtgggacttttatacgtagaacagaaaataatgcagcgcaagtattcctaaatattgcgcagcaattcgctatgaataacgctgataaaacatataagggacttggtatttatgacagtgagggtaagaacggtattgtaattgctgagtggtcggaagatgattccgggtatccgtgtataattagctgtggtggtgagaaattgatttgttcaaataaaacagagttagagaatgcgttgtcatttgttcttcgagaggtgaaaacaggagaggctatacttgaacagatcgagaggtttgataaaaaatcaaaaccaaaggatgtcgatcctgcttaa

SEQ ID NO: 154607 - DNA, 297 bp, Enterobacter cloacae
atgaggccaataatgagtattatttactacgaagatagctacggttttccggaaagggaggtggttgtttttaaagagtcgcgtatggggccagcgccaaaggaggttgataatcaaggtttatgggaatacttcgaagttcatgaacctgtcgatttaatcagattttatggcataaatgaggatggtttcctctttggtttaacagattcaagtgtgcagttagtctcagaaagagaatgcaaaattggcggtaagtggtacagcaggtctgaacgtttaaaacaaaaattataa

SEQ ID NO: 154608 - DNA, 477 bp, Enterobacter cloacae
ttggccgattctgctgacaagttcagaaaactctactacgacaacggctcacacgctggctgcatcgtctacattaacagcgcgatggccgaccaggagagccttgataagctcaaaaagacgctgacggatacccggcgcggcggtgcgtttaagaacatccttctgcacgcacctaacggcggcaaagactccgtgcaaatattgccattcagccagatatcggctaaggatgagtttgtgggggtgaagtcttccacccgcgatgacatgctggcagcgcaccgggtacctccgcaactgatgggcgccattccggaagggaacggttcattcggtgatattgagaaagcggcccgcgtgttcgccgtcaacgagctgacaccctgcatggaagccatgaagcatgttaacgactggctgggtgaggaggtgattcgcttcaacccttacgcattgcttgaacccacgaagtga

SEQ ID NO: 154609 - DNA, 480 bp, Enterobacter cloacae
atgattcgttgttattttcatatcaataatggacaactctcttctctgagctgcccaggagtcggttttttcgctgcctactcaggcaataaagggaaacacagaaacaattctgattcgatcgcaataccaaaaagggggccactgccgccggggaagtactacatcgtcacccgatcgcgcggcggatggaaaaccagactgaatgatttctataaatcactggaaagtggttcagatcgcaagctgtggtttgccctgtatcgtgaagacgatcggattgatgatacttcgtttattggagatgtcgaacgaggatcatttcgtctacatcccgcaggccataacggaaacagcgatggatgtatttcaattgtttcgttgtcagactatatgatcctctggagggcgctcgttaaatcgccaccagtcatggttacagcccagctgagggcgtttggcacaatacaggtatattga

SEQ ID NO: 154610 - DNA, 1155 bp, Enterobacter cloacae
atgttaactaacttcaaaatgccccttgcccttcttgttaaagtgacagtcgtgtctctcatgttgtccttttctgttcatgcctcgacggttctaaaaaattgctttagctcacctcaggattataacgttagctatgaacgtgaactgagtgcagcagaaaacattgccgggagtgaaattgtggacaacatgcaccttctcggtaatggagcagagatggacgctaactgcagttgcgtcagtgatatggaagagtccaccagcgttatggaaatgacgttggccggaagcccattaaatgcaggtgccagtggttacggctatctgaatgacgtactggatattcatgtatccggttacagcgatgccattaactctccggacggcgctaatttgacgaagctagaggtattccagtatccgacgcctcgttcttccatgcaaaaaaaagttgaaaacattaaaacaacagaaggtactgccagtgtgtgcagtaacgatactcgtcctgctggcgaaccccgtcccaaacgcatgttcaaatggaacgtcatcgcggctaattttctgatcaagaaacctattcttggggtcatctcgttccctccgaccctggtcgttcagaactatgcctgcatctatattagcggcagttgtgccccgtcagatgcagaattggtctctaacatttggttaagcgggactatttctgcaccgctgagctgtacgatcaacgagggcagtactattgaggtcgatttcggtgaactggtgtccagccagtttgttgcaaaagggcagcaaccaaaaggctatacgctgaaagatgtcgatatctcttaccattgtgacgataacgccattgggagtgacgacagaatcaagcttaccctcaccgcagaccagggggtcgtcgacagcagcgacccggttatcgctaaaatggttggccgggaggatattggcgtgaaagtttataatgaggacaatcttaacattgcactggatgggacctacgagttcccggttacaatagacgagcagggaaatggccttgtacgcatcaaagcaacaccggttagcacccgcaatgagaaacctcaacccggtagctttgaaggtaacgtgacggtgaaaatggatctgcgctaa

SEQ ID NO: 154611 - DNA, 2556 bp, Enterobacter cloacae
atgactaagggattacgtctattccacgataaatacaacgtaccaagtgcgcctgtactctgctgcatcagcggagcgttgctgctgagctccggtaatatctacgcacgtgaatatcttttttcgccttcctcgcttgagggcgatgcactcacacagcaagatatcgacctttcgctcttttctaaagaaaatagccaacttcctggccgctattcatcgcatatacgtatcaacacgatgcgactgcgcgatcaagacattacctataaaagtagcgatacaggtgaactcatcgcgcaaatatcacctgacatgctgcgtcaatggggagtcgatgtagacaaatacccctcactggcaaagctggaggggcaaactccactgacaaagcctttgtctgactttatcccgttcgcatcatcatcactcgattttagcgaaatgacgctcaatttgagtattccgcaggcggcattactaagcgacagcccagactttatcgctccttcccggtggaatgatggcgtcccggtgatgttcgcagattatgctttttcgggctctcagcacaaagacagcgcaaagaatgcgacttccagccagtacctcaatttgcgaagcggtgccaatcttggcggatggcggttgcgcaattattcaacatggaataatacggaagatgcttcgagctgggattccatcaacacctttctccagcatgatattgacgttctaagagctcagttcacagcgggtgaaaacagcactcgcggtgaggtatttgacagtctgcaatatcgcggggtcaatctggtgtctgatgaagagatgctgccctacagccaacgtggatttgcacccgtcattcgcggcatcgcaagctcgaatgccgaagtctcggtacggcagaacggttatctcatttatcagcaaaacgtggctcccggggcattcgaaataaacgatctttactctacaaccaatagcggggacctggaggtaacgataaaagaagccgatggtagcgaacaccatttcacccagccttactcaagcatcgcggtaatgcagcggccaggccatctgaagtatgaattcacagcggcacggtatcgtgctgacagcgggagcgatcaaaaagagccgctgtttgtacagggaagcgttatttacggccttaataataccgtcacgctgttcggaggattgaccgcatctgaagattatcaggcgctcaacagtggcgcgggcatcgctttgggtccattaggctcactttcagcagatgtgacgatggcaaaaacccgtctcgataataatgacgagagcacggggcaatcctatcgcctactgtactccggtaaagttgataccacgggcaccaatttcaccctggccagttatcgctattctaccagcggatattatagcttcgccgatgccgcgcaaaaatatgatgacaacgaagacaactggctataccgctataacaaacgcaaccgcatccaggccagcattagccagaatgtattaggcagcagcgtttatctgaacggctatcaacaggattactgggggacctcgctgaaggaacgtaacctctcagccggatttaatacggttgtagatggtatcagcatgcatatggcctacacctacagtaaaaacaatgatgacagtgccgacaggatggtttcttttggcatcagtatgccgttaagtagatggcttccgcgcgcctggagcagctacaccatcagcaataccaggcatggttacacccgccaaaatttaggtattaatggaacgctgctggacgatgagcgtatgagctattcacttcagcagagtcgttctaatcacgacggagaggacaccagtagcgtttatagcaattatcgttcgcgttacgccaacctgaatgtgggctactactattcttcagacaacactcagcagttcaactacggtgttagtggtgccgttgttgcacatccccacggcgtcacgcttgctcagccattaggcaatcaatttgccatcgtcaatgccgagggtgccgaaggggttcgctttaagaaccagcgcggtattcagacggactggcagggaaatgcggtcattccgtcacttactccctaccaggaaaaccgtatccgcattgataccactagccttccggaagatgttgatacaagcgaaaccgccattacggtcatcccctcacgcagtgctgcggtcgtagcgagctttgatgcccacgttggctatcgtgcgttggtcaccctcacgcgtcctgacggccgaaatgtcccttttggtgctattgccagcgttagtcagtccgacatcagtgggatcgttgatgacaccggaacactctatctcgccggaattggcgaggaaagtcaggtgaaagtgagttggggaaacgctactgagcagcagtgtatcgctcatatctccctcaattcatcgcaggggttaaccggcccaacggggatccgctatgcccgagttatttgtcagcaggaacaacagcatgttaactaa

SEQ ID NO: 154612 - DNA, 693 bp, Enterobacter cloacae
atgcgcaaactaccgcacatatttttctgtcttatgttcagcttgagttcaattagtcatgcggcgggtattcagattggacgcacacgcatcatttataatgcggacaaaaaagagattgccctgccactggtgaacaaggacaacgctctgccctggctggtacagtcatggacggatacgggtgacggtaaaacgcgcggccccttcatcattaccccaccgcttttccgtctcgatcctcaaaaagaacaaagtcttcgcatcgcatggaatggcaccgtattgccagacgaccgtgaaagtattttctacatgaatattcgaaccattccagcgacggcaaaagaggacagcgataaaaatgttatgcggttgatctataaaacgcggctgaagcttttctggcggcctgatggtttaaagggaacgcaaggagaaacctgtaaaaatctgcattttaagcggcaaaacaatgagctgcaggtgatcaacgagggtgcgtactacagtacgtttgacagcttatatgtaggcaacgcaaaggttgaaaaggccgatatggtagcccccgcttccgcgatctccgttgaccttccaaaaaatatcgcaggaaaccgcgtgagctggcgctgcatcaccgactatggaaatgcctcagatcaatacacctccacattggttcaggaataa

SEQ ID NO: 154613 - DNA, 576 bp, Enterobacter cloacae
atggacttcaaaaataacattattgcaggtgttgtgcttgccaccatttcgatgggtacttttgctgccgaaatgaacgcagggacgattcacttcacgggtcaaattatcgaacctagctgtaccattgaaggtgataatggtacagacagtactgtgcctttagggacgtatccaaaatcggtatttactgaagtcggtaaagaaaccgatcttatggattttactatcacgctcgcaaattgcccacttaaaagtgatggcctccctgctgtacagttaacatttaatggtcaaacaactctaacaggttcaacgactttgctggatgtcagcaagatcaccaccgagggtgaaaaagccgcaacaggaattggtatcgctgtaagtcctgccggtgatgcaacaaaattcattgctttcgacggcagtgaagagcaggtcaagatcacattgccgacgataaaagacgatcaaattcatgcagacttcacagcacgctacaaatcctttgcggcgactgttgagccgggtgcggcagatgccgatctaaccgtgaatattctttatcgttaa

SEQ ID NO: 154614 - DNA, 354 bp, Enterobacter cloacae
atgaaacgtttactgctgttcgtattggcattaaatgcctctgttgtttatgcccaaacgctgcctgccgtcagcgctttttctcagcaacaaatttttgagaactgggtgcaaaatcggtgcatcagtaagatcgcggacagtaaaagtcttaaagatgatgcagaggccagcgcggccgcatggcttgaagcaagcgatctgcctgctgaaaattttgaaaaagctgacaaggtgattgcaactttactgaaagaaaacgtgggcggtactcagtcgggtcattatcaggtattgaagtgcagtttaatcgccaacagcgacgcgattcgtccgctcaaaaccgcaaaatag

SEQ ID NO: 154615 - DNA, 516 bp, Enterobacter cloacae
atgtctacctctctgaacagttataaagtattggctcagactatgccgcccattctggctaaagaggatttttccgtgaaaatcaaagaccagtctgtcgccctgggtgacagttggattcctgatattgcctgtaaaattgacgtaccgatggaaggccgttttaccggtgaggttacttttgacggaactaattataaattcttccagcatcaaagggctggattagaaatattcagctccaatctctggtgggataaagcggaaagaagcgttgatgattatatcgtgtctcaaattacgctgactgccgaagacttcgcaacgccgcgcggtgtgcacgtgggctcaacgagagaagaaatgaacaacgcatacggtatcggtcaggtagacaatgattcgggggaacagtggattacctacgcgttgggtaaaaaagcgctctcgtttgagataaaaggcggcaacgttgtgaaaataacaatgaattacgataatggttcttcagagtga

SEQ ID NO: 154616 - DNA, 897 bp, Enterobacter cloacae
atgaccaaaaaatatttggcagtcgtattgctcaccgctttattgacagggggcgttgaaacgtcaacggcgcttgaattatcgcaatacaataagctcaatacggttagtcgcattgttaacgatagcgaagtgacagacaatctccggaagacgcttaggaatcattaccagacttcagataatagcccggttattcatgacgatattcagcagtggtccgccagattcaatgcgaagcattttgcaacgaacggccaatcaggcctcgcgtttgacggggactgggctggcgaattcgagaacgactcgacgttaaccctgcggttagctgaatcaggcaaccgtattaccggttcttattgctatatatcccagaaagaaaaccgcattgattgcccggaagatgatgagcgtaatcttagcggtacgatcgcaggcaatcgtgccagcgttgagttcaactcatcgtttggtggggtgggcgggcgcgctgttctggaaataaaggggagtgaaatggaatggcgcttagttactcctcctcaaaaaggaaattattatgctccgctacgttatacgttacgtaaagccgcttcggttcaaaacgctgaatccagaaaactagacaccgaaaagttcgctatttctcttataaacaagtgcggccatttcgagagcgaatgtgagcagatggtttatctcggcgtgcgcaaaagcgataacagtacaatctccttaatgggaaaaacgttgcgcgacaccggaggtaaaataatcggctcaacgtacaagaatggcgagatcgcttataccgtgacgtatgcatctgcgaaattggttgtcagcaaaggcagccatattttagtcgaacagtcaggtcagtggcttaaataa

SEQ ID NO: 154617 - DNA, 1077 bp, Enterobacter cloacae
atggaaacagaaacggttgaagtcgctaatgatatgattgatacaaacaaaaaatacttgatttggaacaacaaaggtggtgtaggaaagacttttcttacatacaaccttgcagttgagtatgcgattgcccatgagaatgaagacgttgtagttattgatgcttgcccgcaatcaaacgtttcggaaattatccttgggggaaatggtgttggtgaagaaaaccttaaccaactcagggacagaaatacaactatcgctggatatatcaaagagcggttcagcaaatctcctctttctagattaggtaatgaatcttcttattttgttaaggctgattcagtaaatgctaaaatgccacctaatttatatctgttacctggtgatgtggatttagatatttgctcacgtctaattgctcatattggttcttctccagtcaaagaagcctggaaaaaaagtcgctctttattaatagatctaattgcttcttttgaagctgacaaaacaatttctgaaagacctaaaacctttttcattgattgcaatccaagcttcgcgagttatactgaactcggtgttgttgcgtcaaatagagttataatcccttgtactgctgatgcagcatctatccgtggaatcaaaaacttagttaagttaatctatggtgtatcaattgataactcggaacaggatgagatgttccttgatttcaataaggaagcaaaacagagtaagattgaattccctaaacttcatgtatttgttcaaaaccgctccagaacgaatgagaaagacgctgcaaaagcctttaaatcgcacgctgaagaaattaaaaaaatcacaactgatttgctgaaaacccattcacatttattcactgaagaaaaaattactgaccgagtaatgcatgtaaaagatggcaatacactcgctgccatcataaaccatgaaggttgcccattaagtagtcttcaacataaaagctacaccatttacggcatggcgacccaagctaataaagcgcaaatcgatgctttagaaactgatgtaaataacgttgtaagctgtatctaa

SEQ ID NO: 154618 - DNA, 384 bp, Enterobacter cloacae
atgagaaaagaagaacccaaccaggtactggtagaaaggctcaacgagatcaatgctcgtggagtaacaaaagccgatatggcaagaatcgctggagttacacctcaggccgtgaacggctggtttaaaaaaggcgtaataagcaaaaaatctgctcttgcaatcgctgatgcggtagggatatctgtggcatggcttttaggggaagaggtaaatgaaaaggatggactcaagcaggatgagcagaagcttttagaactctaccgccagttaccggaagaagaacaacaaaatatgttgcgtatcttttctattaggttgaaagaacttgacgctctttatgaaaaatacatgagcaggagagttaaaggtgagcctgagtaa

SEQ ID NO: 154619 - DNA, 858 bp, Enterobacter cloacae
atggccgacctgtcgaatgggtataccaaggtcgcaaacgagatccaacagctcaagcctcgtctgagaatgtcaggccgtgagtggcagtgttttgaagcggtgatctggcttacctacggctggaacaagaaacaggaccgcgttacaaacacggtgatcgctgagcttacagggctgagtgattcgcatgtttctgatgcgctcaaatcgctcgcagaacgcaaaattatcttcagtcaaaagcagggagtgatgaaaactgtcggtataaatactgacctttccgcctgggttttagacaaaccgaaaacgggaaaagtcttcccgaaatcgggaaaagtgttaccgaaaacgggaaaaaccttcccggaaacggtagacacccaagactataacaaaaacaatattaaaatatcctcgtctcggaattctgacgaatcccgaaaccagaaaactcaaaagtttctctctcgccatcctgaagctgccgccgggatatacacccctgcaggtaaatcatggggatccgctgacgacctcaaggccgctcgctggatttacgacaggcttctcaccgtcaacgcttcgctatccgaaccaaactgggctgaatgggcaaacaccatcaggctgatgcgtgttcaggacaatcgtactcactacgaaatctgcgacctgttccagtgggccaacagggatgaattctggaaagacaatatcctgagcccttcgagtttgcgcaagcagtgggatcaactcacaaccaaacggctgcgcgcaaccggggcggcaaagtcatcgcggggcggcgttgacctgcataacaccgactggattgacggggtgctggaatga

SEQ ID NO: 154620 - DNA, 408 bp, Enterobacter cloacae
atggcctgggcgattaaccattaccgcgacaacgccatcacctacaaagaccagcgcgataaagccacggagaagctcagcctggcgaacgccaccatcaaagacatgcagacccgccagcgtgatgttgctgcgctggatgccaaatacacgaaggatttaactgatgcgaaaaagcagcttgatgatctgcagcgttgtcttcgcactggcaagtgtgggctgcacatcaacgccaaatgtccagcgaacggagcggccggcgccagcggcatgggcgatgcttccggcccccgacttactgactccgctgaacgggattatttcaccctcagacagcgaatcgtcaaagtaacgaagcagatcggttatcttcaagaatatataaaaaatcagtgtcttaagtaa

SEQ ID NO: 154621 - DNA, 162 bp, Enterobacter cloacae
atgctttccgggttgaatgtgattgaggtgttcgccgagggaaacacctcggcgcagttcaagaaaattaaatgtacttataaggtgaaaaaccttgttctactcggaaagcggcatacagtgacactcatagaaacaaatgaggtcaggaatgtacattag

SEQ ID NO: 154622 - DNA, 342 bp, Enterobacter cloacae
atgaaggtaactcagcaacgaatcaatgaagtcgcacatataatgaatgtagaaatctatgaggaagcatttggagggaaagctcgcgggcgtttccttatagatcgcaagcaaatgcgtgacttactggggacctctaagcttcacgacactacacttgctaagctttatgtagcctgtctagatgagggtattgtcatgattgatttggacgaggtcttcgcttttatcgaagcgaaaatggtacgtaaataccgcaaggctccagtaaggattactgacaagtttgttccgccaaatgaatcaaatgacgatttaatggaggaagaagaggaggactag

SEQ ID NO: 154623 - DNA, 345 bp, Enterobacter cloacae
atgactctgaatcgcctttgctttttattcctgctcatcgctgcaatcagcagctttttggccacgtatccctttgccatgtggttgctgttaatcaatgtcctgacgatgatcgtttacggtgtcgataaaaccgccgcgcgaaaagggatgcgcagggtaccggagatcacgttactggtgtttggcactgtgggagggtggccaggcgccatattaggccaacagatctttcgccataaaacgcagaagcagcccttcaaaacctggtttttgctgagcatcgtcgtgagtatttcagccacggcggcgctttatcatttctgtccctttattcttttctga

SEQ ID NO: 154624 - DNA, 324 bp, Enterobacter cloacae
atgtgcttccagtttgacgtttatcgaaatccctcagataggacacgagaatatcatccttactttatgattattcagcatgacttttatgatgacttatccacgaggcttattttaccactgagttatcataatcacctgaaaggctattttagtgccgcgaccccgctggtgaatattgattttcagacattctttctgaatacaacagcaataacctatgtggagaagaaaaaacttaacaataaaaattatgtatgtaatctgcgcagcgcaagaagcaatgtgattgcagggattgatgcactcattactaatacataa

SEQ ID NO: 154625 - DNA, 189 bp, Enterobacter cloacae
atgaaatttaagcaaacaggaaatcgtactgtaaaagaataccttcccgaggtcacaatacgcccaccgttgccagtagaagaacgcgcgctgcagagtcagcaggacaaagggttcataaaagccatgaatgaactgaccgcaaaatcagggttattatctgatgatccttattttggagggctttga

SEQ ID NO: 154626 - DNA, 156 bp, Enterobacter cloacae
atgcaaaatgataaattaaccaacgaacagcaggcgcagagcaagtcaaaccggaaaaagtgggctgcgtatgcgtgggaggcggttaaatggggtattcgactgtttgatttaatcacacgtttagtagactatttggaagggggagatatgtga

SEQ ID NO: 154627 - DNA, 309 bp, Enterobacter cloacae
atgttacataaagcccttcgtttgataaggcaataccataaagagtcattagttgagttatcagcatctttgggtattcctaaagaaaaaatagtagagtttgaaagcggcattacatcaccttcagtagaaattttacagcgctatgctattcatttcgacatacctgtaacatctttagtctttttttcagaatcattaggtacacaaggacgtttgtctaagcggttacgtctaaatttggctgataagattctggatatcctggcgtgggtgaataaaagaaatgaaaaaacggaaaaagcttag

SEQ ID NO: 154628 - DNA, 897 bp, Enterobacter cloacae
atggattcaccattttataaacttaaaagcaaaaaaaagcttgcagcacttctttgtgttaatattagtgatttttcaaccctgaagaaagatgaaggtaattattctatttttgaacaattatctaaaaaaggtaagcctcgaaaaatacaaaaacctctagaaaaattagatgttgttcatactcgcattgctagtttattagcacgcattagtttgccgctatatcttcactcaggtaagaaagcatgttctaacgtgacgaatgctcgagcgcatcttaataatgaaaaaatgatgactactgacatcaaagccttttttccatcaacaacaaggttgatgattttttcttttttctattcagtgatgaaaatgtcgtgtgatgttgcggatcttttatctcacatatgcacttgtcatgaccgtttgccaacaggcagtagaattagtatgcctttggctttttttgcaaattcaagaatgtttgatgaactaaacgagttgtgccaaaaattgaagattgaaatgactgtgtatgttgacgacctcacattctctggcgctaacgttaatcgattattctgtgctgtaacgcgcaaaattattagcaagcatggccacgttatgcatccaacaaagactaaattgtattccaaagataaacctaagttagtaaccggagtgattgttttaggcaatcacttgaaagttaggaatgaacagcatcgattgatggctagggatattgagtactggaaaataattaaagatgcagaaaatgcaaaggaaacctcaattgcaaaaacgctttttgggcgtttgcattcaatgggagttattgagcggcgttacaaatcgaaagtgcttacattaaagagtaacactgcaaattaa

SEQ ID NO: 154629 - DNA, 195 bp, Enterobacter cloacae
atgcataattccctatcatctggtaaagattcgtttgtctattgggcaaagaatctgactgtaatggccctaaacaacgatctgagctctcgcgagatcgaaagctacaccgcaaaaatggtcgaaaaagccagtaaagatgagctcatgaacgttattaaacacctgttaaatcacattagaatgcacaaataa

SEQ ID NO: 154630 - DNA, 453 bp, Enterobacter cloacae
atgagtgactttaagccgtttgacaaccagctcgccgggctgcttggtgccctgtcacccgcagggcgtaggaagcttgccgatgaaattgcaaaggagctgcgcaagtcgcaacagcaaaggattaaacagcaaaaagccccagacggctcaccgtatcagtcgcgaaagcgccagccgctaagagccaaaaagggtcgaattaaacgggcgatgttccagaaacttcgcactaaccgatatataaaagccagtggccgtgaaagcggtgctgtggtggaatttatcggaaaagttcagcgaatcgcacgtgtccatcagtacggtctcaaagaccggccaaacccgcacagcagggatgtacagtacccaaagcgcgccctgtttggtttaaactcggataatgaggatttgataaaagacattattttatactctttccaaaaaaaataa

SEQ ID NO: 154631 - DNA, 1071 bp, Enterobacter cloacae
atgaatactgctttcttcagcaatccagacaatcaatatctcatttcaaataaactacaggaattgaatgcaatggacaccgatggcgagataagtttcagtaaagaacgaaactacctcgtaataggagcgttacagctttttttgaaacatgcagcaatatgggatgaaagggttcagtttaatatagaactaatcggagaggcgttcattagagagctaaaaagtccagcaactgaagaaaatctcaatttactattctcctcttgctttagattttttatggaaaaccacatctttcataaagacaatctttttcagctcaccgagtccataaaacaattcgcgatttacagacaagatgaatttgacgaaagatcttcaggtcagatcacatatgccctcaaagaaatgcctctaacaatgatgagggaaatgttaagcagtgacaatgctcagtcctacaaagaatacattcaaagagccaatgacatggaagatgctggacgccattgggatacaatcttaaaggagaacttggcaaagtcagaaaaattaaatgaatccctaattatgcagttaaataaatttaactttgttggactttataaagggtttgctgagcttggggaaaacaaatctaaagagctaaaatcagctaagacccttatgtttatcttgggtatgctaattccagttcctttgctaatcgagatcctgacttttacagagcatgaagcactgccatcggggtggttaagtctggcaaagatcatccccatactttcactgacattaattctcgtttacttctttagagttgcacttttaaatttcaactcaattcgtgcgcagttaatccaaattgaccttagaaaaagcctttgccaattcatccagaattacgcaacttatgctcaagagataagagagcataacacagatcttttagtgaaatttgaagaggttattttttcgaacataatgccttcagaggacaagataccatcaacatttgatggaattgagcaattaacaaatttaatcggtgcgttaaaaaagggaggttaa

SEQ ID NO: 154632 - DNA, 675 bp, Enterobacter cloacae
atgggaagaaaaatatttatcacatataagtatgcagacaataaggtttttccaattaatcaaggggaaacaactgcgcgtaaatatgtggatgaactacaagagttgcttaaacataagaatcatattaataaaggggaggcggatgatactgacttaagtaaatttaaagatgatacaattcaaaataaactaagagctagaatattcgacagtactttaaccttagtcgtgatatcaaagggaatgaaagatccatctcttccagaaaacgaccaatggatgccatgggaaatatcatactcgttgaagaacaaagagcgagagggaaggggttcgttgccgaatgcaatgctagctgtggtcttgccagacgaggatgggctttatagttattacatcaccgatgattcgtgtccacattgtaaatgccgtatattaaaaacatataccttatttaatatattgaaagccaatatgtttaacataaaaactccaagttataatgattgcatccatcatgatgagaaatctaaaatatatacggggaattcatcgtatatttactctgttaaatggtgtgattttatatccaagcctgatttttatcttgacaaagcaatggctataaatgaagaaattgacaattatgacattaagagagctgttgtgtaa

SEQ ID NO: 154633 - DNA, 1464 bp, Enterobacter cloacae
atgactaaagcagctatgaaaagatttcttagtgaatttccaaatgccttgaatgatggcacaggatcaatttttattggtgctggtgtatctatggccgcaggttatccatcgtggtctgaattgctggaagaaattggtgaggaattgggggttagttcaaaaaacgtttatgatcttgctgcattggctcaatggagtattctagaaaatgggggggcaacacgtgttcgagaggtaattaagaaaaaaattagccctgataagcctataccggacacagtcgaggttattgctagactaccaattcgtcatatatggactactaactacgaccgcttagttgagagagcatttcaagcgattaatcgaccgctagaaccgatatcaggagccgaaaatctttcactaaaaacgacatatggggcatcgcgtttatataaaatgcatgggtcagttgatagggtggatgatttagttatttcgaccgatgattatgaactttttcgttcaaaaaggggagcgtaccttccgctttttcaagcgcacttaacaagtatgtctatgctctttgtaggaattagtttttctgacccaaatattaagcatgttttgtctttgatacgtgaaagctttaaagatgcacctccagagcattttgcaattgttcgccctccgcaacaaagtgactttacatccgaagacgaatataaagcacgttttactcagcatactttgtgggcaaaagaccttaaacgatacggtttacaagttgtcgagattgaaaactatgatgaagtaccagaattgttacgaaaggtggagcgtcgagtagcagctaagcgtgtctgggtgagtgggagttggcccgttgaacatggtggagacgaggcagcaaatattcatgcttttgcagaagctgtcggtcgaaaaatcggtgagactaatcgagatttggtcacaggagctgggatcttagtaggctcagcttcaatttctggttttctagcggccctgcgtaatggtggaggatgggatcttgatagacgattagtagctcgtccatttcctcagcccttaaaagatagtaaccctaatgataatgactgggctgcattgagaaacgagcttgccagacaggcaggggttgtcattttcattggtggaagcaaattagacaagggagatctaatcccagcaaaaggtgttttaaaagaattcgaatgcgctaagaaaagtggagcattcttacttcctatcgccgcgaccggaggggcagcacgacttatatatgaggagttgattagttcaaatctttcaacatcgggaagtgatgcacagcgtccgttcgacaaggaactaaagcagcttgctgatacatctttacttctcgaaaaccagagccgggagaaactggtatctatggtttttgagattatcgatagagttgcaaaacaagcataa

SEQ ID NO: 154634 - DNA, 423 bp, Enterobacter cloacae
atggcagacctgtacagccatcgctgggaaatagagctggggtacagggagataaaacaaacgatgcaactgagcaggctgacgctgagaagtaaaaagccggagcttgtggagcaggagttatggggcgtgttactggcgtataatctggtgcgatatcagatgattaaaatggcgggccatctgaaaggatactggccgaatcagctgagcttctcagaatcatgcggcatggtcatgagaatgctgatgacgctgcagggcgcttcaccagggcgtatcccggagctgatgcgtgatcttgaaagcatggcgcaactggtaaagttgccgacaagaagggaaagggccttcccgagggtggtaaaggaaaggccctggagataccccacagccccgaaaaaaagccagtcagttgcttaa

SEQ ID NO: 154635 - DNA, 963 bp, Enterobacter cloacae
atgtattcagcaaataaatatcggccgtatgggcaaatcatttttctggcactgttagggttatgctcactacgtgctgaagcagactgtacgtttgggggcagtggatttaatccagcacaaccgttcaatatacagcagcctgccgtgacggttcagcgcgatgctcccgttggcacagtgataagtagctttattaccaatggcagcggtgatattgacctctgtgtcggttcgggaacgattacctatgaaatgagtatgttcagtacgccttcgtcaatagcgaattattataatacaaatgttcctggcgtgggtattgcgttaaaatttacgtctgcaagctggtatttttccaacgtcaggcaatatacaaattcgacgccgacaaagacagttgtttcccctctggaggtaactttaataaagacaggggatattacgtcaggcgtgataggctccggactgctggcaacggcccatggtaatgataacgttcagtcgttaacggttaactatattggtaacaaagtgacgcaattagcatgctcaataacaacgcctggcttaagttttcctatcggtgatatttcagcatcggcttttggcaacgctgtcggcaccatcccttctggcgctcaaaacacgcagaatctgggcctcgactgcgatgcggatgcgaatattaatgtcatgctgcagggaatgcaaaaccctgacgtcagcactaccagcgtattagccttgaccggtcaggggaacgcggatgtggcgaaaggcgtcggcgtgcaattgttatataatggagcgcctttggaattaaataaccgaatcgttttgaagcaatccgctggcggccaggaaacttttccgattactgcccgttattatcagacccaggcgagtgtttcaaccggtaaagccaacgcatcagcaactcttgatttaacgtatcagtaa

SEQ ID NO: 154636 - DNA, 129 bp, Enterobacter cloacae
atgcgattactgaaaaagagagatccaacagtatccctgacgttgtttatgattgttgttgaggatgagttatgtattcagcaaataaatatcggccgtatgggcaaatcatttttctggcactgttag

SEQ ID NO: 154637 - DNA, 261 bp, Enterobacter cloacae
gtgaaccgcgatccggggcgacagccggagcgaacgctgctggcctggcgtcgtaccggatgggcgacgctggtcccggctcttctctgtctgcgtcgctggctgcacggcggcgaaccgctgtacgcggtgagtgcgttcctgctgctgacgctcggggtggccatgctgtgcggcctgctgcgcaggcagagcgttgtttcactgctgatcgccagcagcggcgtgctgctgctggttggaatagtggtacgcttatag

SEQ ID NO: 154638 - DNA, 858 bp, Enterobacter cloacae
atgtggacggtggaaaacgagcactttacggcaacggtacgggcatccggcggcgagctggtcagcctctggcacaagcaaatgcgcacagaacggttatggcagccgcaggcggcggtctggaaccatacggccacgcagctttttccggtggtcgggaggctgatacacgacggactctggctggacggccagttctggccgctcccggcgcatggttttcttcgggagcaaacgttctactgtgttgagcagagcccggacaggctgacgctggaagcctgttccaccccgcaggcgcgcaaacagtggccgcgccgttggcgggtgcggctggcgtttgccctcgacgcctgtggactcacttttcagcagacggtgatcaatgaggacagcagaacgttgccttattcggctggctggcatcctggctttgctctgcccgttgcttcccgctccgggtggtgggtggagttcagcccggcggtgaccggcccgttctttaccgataatcgcacgctaaaaacagacgggtctcagcggtgtgtcgcccgttttgcgctaacagggacaagcttcccagcaggggctgtctattttggcgactgccagcacagggtgattcgcgttcgtgcccccgacggcacgctcgccttaacgctggagaccggcgaacagccctggctggccttgtggggcgtgccgggagcggatttgctctgcattgaaccgctcgctggcaccaccgatgccccggatgctgacgggcagaccgttaacaagcgcggcatgcagcatctgcccgccggagaaagccagacttttaccgtccggttacgctttgcggtggacgcatga

SEQ ID NO: 154639 - DNA, 1749 bp, Enterobacter cloacae
atgaaagcagttatgttgatgttcgacacgctaacccgccatcatcttgccccctatggtggcgaggcgattacacccaatttcacccggcttgcgcaggcgtcggcgcagttcgaccgcttttacgttggcagcatgccctgcatgcccgcccgccgggagctgcataccggccgctataactttttgcatcgcagctggggaccactggagccgtttgatttctctacctttcaggccttacgccaggccgggatccatacgcatctggttaccgaccacaaacattactggcgggacggcggagccacctaccatacccgctactccacctttgagtttattcgcggtcaggagggggactgctggaaaggtcaggtcgagaaaccgaccattgcctggcaggggctagaagatgaagacacgctgcgcaggcgcagcggacgaatgacgcaggatctggtaaaccgagccgcgatgcccgcgcaggaagatcactatacgcaccgcactatccaggcggggatggacttccttgaggctaaccagcaccaggataactggttcctgcagatcgaatgctttgatcctcacgagccgttttttgtcccggaaaaatacctcgcgcagtatggctgtactgccgatgagttcgacggctgggttccctattattgcggtgcgcccggcgggcagaacgacgaaaaggtgaggaagttttaccaggcgctggtcaccctgtgcgacgactatctcgggcaggtgatggataaactcaaggcgctgaacctgtgggatgacacgctgtttatcgtctgcaccgatcacggtttcctgctcggcgagcaccagtggtggggcaaaaatatcatgccggtctacaacgaaatcgccaacacgccgtttttcatccgcgatccgcgcagccgcagctacggggtgaggcggcaggcgctggcgcagaccatcgacataccggccacgctgctcgactattttgatgtgccgcccccggcatcaatgaccgggcggccgttgcgcgaggctgtcgcgcacgacgccccggtacgtgactacgccctgttcggctactttggcggtcatattaatatcaccgacggcgattacgtctatatgcgctgcccacgagaggagggtaaaggccgtctgtatgaatacacattgatgcccacgcgcatcgacagcatgtttaacgtgagtgaactgcaaaatatcgctctccatccggggtttgactttacgcaaggcgcgcaggtaatgcagatcccggccacctttggctacctcaatccgtggcgcttcggcgataagctgtttgatctgcgaaccgatccggggcagacggtttcgctggcggacggtgaaaaaacgctgcattacgcgcaggcgatgcgcgcgatgatgcaggcgcacgatgcgccttcggagctgtatatccgtttcgaactggacgcgatcggcgccgcgcgcgagtcggccttcgccgagcgctggtcacggctgaatcttctggccgagtgcgagcatcatggcgtggaagaagccctgcgttttatcctccgcgccgggcaggctcaggggatatcccgcgacgtcctgctggcccacctgcccgaagggaaaacagtccgcgaggccgagattttttccctcatcgacgccttttttaaaggggatccgcatcgggcgctggtctaccagatccgattgttattaaggacagcgtaa

SEQ ID NO: 154640 - DNA, 207 bp, Enterobacter cloacae
atgccgttctggtttttctggcttaagaaaactcgccttgtgtcacgcactgaagaaaatgtcatcctgtcgttacgcttaaacaacgcgggaaggagcatggacggctttctcgtcgttgtacaacatgtcacgcataaatattttattaaaaatgaaatcggcctgtgcaatgcctttatggcgcaaattacaactttgtggtga

SEQ ID NO: 154641 - DNA, 186 bp, Enterobacter cloacae
atgaaatttgtaaaatcgttaatgtcccacgcaattgagggaactatcacctttttggttgtgatttttgctttggggtctttcttctggtttgaaagtacatggttgaagctcgccggatgttttgtggcgttgatagctggctatctgctttcatacgcagcggccaaaattagaggtagctga

SEQ ID NO: 154642 - DNA, 150 bp, Enterobacter cloacae
atgaaaaacacatttatcatctttatcctctgcatttttatcactggatgcccgggtggtaatcgtgcccccaaaaacaaatttgcttttattaatggcaaccacatatgttttagcatcgataaaaatgatgtactgaatttctggtaa

SEQ ID NO: 154643 - DNA, 600 bp, Enterobacter cloacae
atggaaattacctcgctaacaaacatttataaattatttattccattactaccatacttgaaaaggtttatcaccaatgataccttcttctctttatcagatgataagaaggctgaagcagtagattttctaatcgaaagtgctaatgaagaaagttcattaagaaaatacaagcaagagctcaaattgtctcattataaattatgtgataatttccaaatgaatatatatatattggaatactttcttgcaaacaaaaaagaacgaggaaagttttgtaagtccttgtttctagtgaaaggcttttatgagtatcaaaatgcagaggttaatcttaaaaataacataatttggttgccatttgtaatgtttattgtgggtgggctttcgggttggggtgcgattatgtcatggattaacataacggccagtccactgaaatggatgtttatcgctgggtgtagtcttatatgtatccaatatgtttattatgctgtttattgtttgttaaattacataagcttaaggcgtaaggtgaaagattttaacttttttataaccttatgtcgtttggataagacactaaataagttaatctaa

SEQ ID NO: 154644 - DNA, 960 bp, Enterobacter cloacae
atggtagacagttcctacgaatctcttgaagttgatcttaactcaatttattctgacgatgaaacgaatataatgggtgaaataaacactgtttctgattatattggcattataagcaatatagatcatggtaaattttatcgcggacaaggagacgcaagatggagaatagtgtcatctctcacaagggctatcttcccaaggaagaaggacttccttaataaaaaagagaagaatgaaattgactatagaaaattaaggatatgcatagactctcgtattaacgatatattcaatgcatatgtaatatttaaaaacaacttaccaacatatatatcagagattgaatccaaagagttccttataaactcaaatttatctatactgctattagctcaacattatggtttacctactcgatttattgacgtatccattaatccgctgattgcattgtactttgcggtgtcaaaatctacaatcaaaacacaagaccctgcggcagtatttatctatgatagtgaagcatatcttacaggggatgaatttgattatgccacaaaaaatcttattgaatcaattaaatcctcgcatgtaaagacacgttctgaacaaagctcatttagagagatagctaaattaagtagttttggttatcgttttatgtctgtgactccaatacctacgctaacggacaccttgagcattgaacattattcatttgataaaagaatgcaatctcaagagtgtctttttttgtttcataataattttgagaaaccttttcaagctaaaaatgaaaataatctaagcaaaataataattaacaatccatatagaataaaaaaagagctaatgaatttaggcattgtagaatccaagatatacccatcactatcaggattcagcaatactcttttaaatagaaaaataaacaatgatttttcattctttgactaa

SEQ ID NO: 154645 - DNA, 330 bp, Enterobacter cloacae
atgaatatgctagaacgaaaattttcgagtagcgtcaatcacaatgaagcagtagtaaaaatgctacgcgaggatccttcctctgctcaaatttatttgaatgttgcgttggatgagatctatgaagatcaggggatgcctgcctatctcattgcactccgtcaggtcatcgaagcccgcggcggcataggtgaaatctctgccaaagccgggctttcccgccagcagctataccgaaccttatcagacaacggcaacccaacgctgactacgctaatgaaggtgacccgtgctgccggggtaaaactgttcgacagcacggtccggtag

SEQ ID NO: 154646 - DNA, 150 bp, Enterobacter cloacae
atgcctgagtcgctctgttttatttttgtatttgtacatgaagtaattaaattgaaacagagcgcgctttttatcgcgttacatcccctgttaattaccccggccatttatgccgataccgccaattcctgcgcgctggatctgaaatga

SEQ ID NO: 154647 - DNA, 915 bp, Enterobacter cloacae
atgacaaagacagtcgtagcattagcaatgcttagcgttttttcaacagcgtcagtatatgccagtgattactcacgcatgatgaatattgaaaaccccgaccgtttgaaactcacgattaacaatgctacctacgaggaagggtacagcaatgatttcattcctcatttatacgtcggaagtgaagacaatggcgtaatgaacattgttgttgataatggtatagtgctgaacgaatccattgaaaatggtcgtaactgtaactatgccatgattgtcagtaaagataacggtgttaacttacaggcaaacgggaaaaactgtagttataagaaaaagagttaccgttccattaactctccggtagttaccattatcaatgattcctctttatatctcagacccaatttctcaataaacggaaatgatttttttgcagataactatagtattaatccgaacgggattcgcatgttcaccggggacagtggcacatggaaaaaacagggcgttcgccacggtgacaacctgaaagtgaagttcagctacacgctggctgagtcgggggcgcaaaaagaggtcgtctgtccgtcactggactccttaactgaaaaccggctttatcgccttcagggcggagagcaaaatgcgctctgcgtccttgagagcaacgatattcatattaaaaacgatcgtattgttgccggatggtacaaacccctgaccaaagcagaacttctgcaacggatcgaagccaccgccgcagacgatgacgtcatcattgatatgccggatgataaatacatggccctttatacccagccgggtgaatataaaatcccgctgaaagcaggggacgcaaaagcgacgattaccttagtggttatcaaagggaccattcccatcgcgcagtaa

SEQ ID NO: 154648 - DNA, 252 bp, Enterobacter cloacae
atgctttgcattatcgatgctgacacgtttggcacgacgttgcgcctggtgaagtatctggagttcatcagaagaattaaacccgacatgcttgttttgatcacgggtcatcatccccgaagcgagcagcatagatggtatgtgaaagcaaatgaatccctgtcgggctggcgtgaaaccatcgatgccatgaactttatgctacccaatctcgacagcgttattgatttttacaaaaggaagcatggttga

SEQ ID NO: 154649 - DNA, 1719 bp, Enterobacter cloacae
atgaaaattgaagctaatgataaagagatacaagatatcttttcatcaggatatttcaaaattcccagattccaaaggccctactcctgggagaaggatgaagtagaaaatttctgggaagatataactaaaaataatgatgaaaattatttcattggttccatggttgtatttcaatccgtaaagccttattttggcattgttgatgggcaacaacgtttaactaccataacaataattttatctgtaattagagatgcatttcttacattaaagcaagacaacctcgcaagaggaatacataaatacatagaaaaagcaaacgtcgataatgaagatgagtttattttaaattccgaaacatcattcccttttctacaaggagttattcaatcatacaaaaaaaacattatcaaagatgaaattggggtagaagaaagcaatctccaaaatgcatacaacttgataaaaaacaaattaacctcattaattccacagataacatcttatgataataaacaaatagaacttttcaatgatgttaaagatagtcctattcaaaagctaaaagacatcagagataaaatacttgcactcaagttggtgtttattcaacttgataatgaagatgatgcctatttaatatttgaaactcttaatgcccgtggtcgtgatttaaaaacatcagatctagtgaaaaaccttttccttaaaaaattaagatcaaacaattcgcgatttgatgctgcaaaaatctcatggaataatcttgtatctaaattcgataatgattcaggtgagcaaacgttagataattaccttcttcattattggttgtcggagcataaatacatcactgataagaagctcttcccggagataaaatcaacgttaggagatgataatcagaaagccgaaaaccttttgaataccataataaaaacagccgattattataaacaaataacttatcctaatagtgttgaatggagtaaacaagagttaaaaataaaaacaatatttgagaatctcaatttattcaaagtcaaacaacaatcatcaatgacacttgctcttactcgcgcatggagagagaataagataacactaaaagtccttaaatcgtcccttgaaaaaatagagtattttcattttgtattcaatgcaataacatcacagcgttcatctggagtgatcgccacaacttattcagaacatgctatcaacctaaccgcagcgagttcacatgatcaaatacagtctattctaaattcattatttaaatccctagattctaaattacctagctttgatgaattttatgttaactttgctgaattaaattatctttcaaataaaacaagaaacaaaaatataattaaatacatactatcgaagcagttgggtgatgctatatcctgtcttaacataaaccatcaccttttgactattgaacattatatcccagagtcaaatattaaatccggagttccaggcgatataattggaagcattggtaatctattgctaatcgatgaggtaacaaataataatatattaaaaaactccgtcatcgctgaaaaatatagcatattaaacaaaagcggatatccattaacccaaacttatataatgagccctttgtggggagagcaggaaataaaacaaaggaccgagatgattgcaaagcaactctataatggcactaggttattttaa

SEQ ID NO: 154650 - DNA, 177 bp, Enterobacter cloacae
atgaaacggattcttgtttggttcttaaagtcgttcttttatctcattcccgcggcattaattgttgcgtgtatatatctgtttgtacgctatgttccggattacgccgcaatcctgagctccatctggatggtggctgtttcagtggtctatattatttttaacaggtggtattag

SEQ ID NO: 154651 - DNA, 339 bp, Enterobacter cloacae
atgcgtaattcacttaaggccgttgtattcggtgcaatctctgtgttttctgccagcctccaggctgaggtgcatcagcacgacgcaatgaacgccgccagcgacgcggcttcagagcagattattcacggtaagggcgttgtgaaagcggttgatcttacgaataaaaaaatcaccatttctcatgacgctattccggccattggctggcccgcgatgaccatgcggttcacctttaccgacgctgacgagagtattaacgcactaaagcccggcagccaggttgatttttcatttgttcagcagggcaatatctctttactcaaaagcattaaatag

SEQ ID NO: 154652 - DNA, 1305 bp, Enterobacter cloacae
atgacaaaccggtccgaagcgatacgacagttgctgagacaaggcccaacatcagtaaggcaacttactgatgttatggggattagtcagccaaccatctccagagcgataaaagccctgggtgatgaggttgtacgtattggcgccggtccatctattcactatgtgctgagagacccgtttcgtggattcagttcggcacccatatatcgcataactgaagaggggcaggtcaaaccgctgggacggctcattccggtttatccagatggatttgtgatggaacaaacggacaatgtctgtctccacagcgacgggctgccgtggtggttgtttgatatgcggcctcagggatatcttggtcgcgcgtatgcatcccgattttcatccgaacttggcctgccggcaaatccagagatctggagtgactctgatgttatcagggctttgctggcgcacgggcatgatgcggttggaaatctgttaataggagaacatgcacggaaccatttcgtggagatgccgttgcctgttgcagtggacagggccacggcatacccgtcgttggctctggccgtaagttccggagatgtaccgggttcgtctgctggcggcgaacaaccaaaattttgcacctatacagaacgtggccacgtcatagtcaaatttacagccgcggacgaaaatcccatcagcgagcgctggcgagatttgttactcgccgaacaccttgctttaaacgtccttggtgtcgaaacagaggtatttgatttcggtggacggcgttttcttgaaatcccgcggttcgatcgcgcaggactgcttgggcgtaaggggcttttttctttgcgggctcttgaggcggagtttgttggccgtgcgagagaggcgtggcctgttctggttaatgagctggtaaagcagggctgcgttcaccctgatgcagttaacggaacggctcgactctgggcgtttggtatgctgattggcaataccgacatgcaccacggtaatctgtctttcatcagtgcgcatggtcgtccatatcatcttgcgccagcctatgacattctgcccatgggattcgcgccgaagtcaggtggtgagatcgtgaatacgcttcgcccggcatcgttacttgatgcaatagagggagagatctggcatgaagctctggaactggctgagcgcttttttgctttagtcagcggttgcgaacgtttctctgccagctttgcaccatgcgtgacggcattacgcgcacatcttgatgaggcgaggtcaaggatatcgcgtctgggataa

SEQ ID NO: 154653 - DNA, 489 bp, Enterobacter cloacae
atgacgtttgatatacttccgactttgaacatcgctgctaaagttatggaaattgaattagataaaagttttagagaaaggattttccatgccgtcatttttgaagtgatggccaacgttatcatcgcgctttccctcgcatggctgatgaacgtttctgtcctccagtcaggctcgttgtccgtgatctctgctctaaccgcaacggtctggaattttatgtttaacagactctttgacgcccttcagaaaaaacatcagtttcaacgtacgttccttgttcgcgccatccatgcggttggttttgaaacaggccttattatcaccttgatcccagtggcaatgttgatgctggatttaacgataactgaggcattttttgttgagattggccttgtgctgtttttcctgccctatacgctgctgtttaactggctttatgactatctgcgctggatacttgttagtcggaaacggtcagttatgtag

SEQ ID NO: 154654 - DNA, 351 bp, Enterobacter cloacae
atgaataaactccttctgctatttccctttctgtggctaggtggttgcgtggatttgggtaaaattggaacacacccggaagtggcgtcgtactatatcgatcatcccaaaagccaggttgtagattgcctcatctacgcatcatacagagagcgtttatcgctggagtttgatgataccctgcctgacggtagcgagcgatataaccttcagcagaaagattttattgatgttgcctgggtcgaggtaagtgaattcagcgggaagcagacttcagttgagttctattatgcacctcacgatcctgagttacataagtctatactttttatagcagatcagtgtaaataa

SEQ ID NO: 154655 - DNA, 432 bp, Enterobacter cloacae
atgcgtggtttagtgagaaaaggtatgtgcctggtattagcattgtccgctgcaggaactgtgcatgcggcacagagagcccccaatgataacgcctttacagggatcaaaatattcgctgaaaaagagtctcaggggagtcaatgggacagtacgacaggcgaagcacagtacatgttgagctataaagttacgctcgataacttttctaaaaaaagtattgagccaggtaaggacaataaaatgtgttttttcctgtatgataacaacggaaagtcatttatgagcaccggcattgaaatggagatgttgaaaaaatacaagcccttggatagcagaacgggaatggtttatttctccagttcaaatcctgacattttgaatatgccatttgtccgcttcggaattggaacagattgtatctcagagtaa

SEQ ID NO: 154656 - DNA, 714 bp, Enterobacter cloacae
atgtcttccgctttccggcatgctgttaaaaaaacactggcaattacttctatgggtgtctgtgccagcctggcccaaccggctttggcggggggcggtatttccatacagggaacgcgagttatttacccgcagaacgctgaacaggtgagtttgtcgatcattaactcttctcctaccgactcctttttggtccagtcctgggttgaggatgcgtcggggcataaaacggcggactttatcgtaacgcccccgctataccttagcggtcccaaaaatgaaaatgcattacgtatcattcatacaggtggaacactcccaacggaccgtgaaacgctttattactttactgcaagagccattccttcaatagatgacaacaacaaagccgataaggacatcttgcatttcgcccttgccagcagaataaagctgtttgtccgtccttccggattgaaaccttccccggcgatggcacctgctctggtggattttcatcaacagggatcggagctgattatccataatacctctccttactacctgaccctgacggcgatgacatctggtgggaaggcgctaaaagatctcatggtttcgccactgggaacagcgacagaatctctgccggctggccacggtagcacagttacttaccgtaccgttaacgattacggcaccatcacgccggcaattgaaacggccattaaataa

SEQ ID NO: 154657 - DNA, 2613 bp, Enterobacter cloacae
atgcctttagtttaccgggtgaaggatatgtctttcagatgcagtcggttgttcattctccttggaggaggaatattcggtaacgcctttgccgggctgcattttgatccagccatgctctctgacgatccgcatgctgttgcagacctttctcgttttgagactggtcacgcgcaggtagctggcagctacccggtagatatttatctgaacggcaatttttaccgttcgcaaaccctgagatttgacactgtacgcgacgaggggcgccgggaagatatccacgacagtaccgatctgatagcttgcctgaatcgccacgaccttatcctgatgggggtaaacgtttccgctttcccccggctggcgtctttgcctgaagatcggtgcgtatcgccagggcagtttatcccgcaagcctatacggcctttaactttcaaaaaatgcgtctggatatcagcattccacaggcggccatgaagagccagccgcaggactggataccgccggagcagtgggatgaaggtattaacgcggcattgttgagctaccagttcagcggcagtgatagccggggcagctatggtgaccgtcgcagcagctacctgaatctgaacagcggcctgaatctcggcccctggaggcttcgcgacgtcagcacatggagtgatagccgcagccgctccagcgatgagcatcactggcagcaccttagcacctatgtacagcgaatcattattcctttgcgaagtgaattgacgctcggtgacagcaatagtaacggggacgtttttgatactaattcattccgcggcatcaaacttgtcacggatgagggaatgtttcctgacagtatgcgaggttatgcccctgtcattcggggaacggcgaacagtaacgctcaggtcagcatccggcagaacggcagcgaagtctatcggacctttgtggcgccgggagccttcgtcatccgcgatctttttccggtctcgtcaggtggcgatcttgatatcactgtgactgaggcagatggaaccaaacgcagcttcaccgtgccctattcttcccttcccgttctgcagcgtcagggacatcttcgctatgccctgattgcaggaaattaccgcagcagtagtgaccgctatgctgcaccggcctttgcgcagggaacgctactgtgggggttggcccataatgtcacggcctatgggggtatccagtatgcagagaattacaacgctctggcagccggaacgggcctcagtatggggcaatggggggcggtatcagccgatgcaacccagtccaatagtacccttgtggatggctcgcaccaccagggcctgtccttccgctttatgtatggcagctcgctggtatccacggggacatcattccagctggccggttaccgttactccagccagggcttttacaccctggcggataccgctctgaaggagatgtccggctggctgcagaacgaagataagatcgatgctgaaggcaggcccgctaagggcaacttggcaagccactatagcctctacaacaataagcgggagcgtatccagctcagcctctcacaaaagtttgacgcgttcggctcgctgttcattacggccagccatcagacgttctggcagaacgacgccagatctaacacggtgcaggcgggcttcagcagtaggtttggtcctgtcagctacagcctctcgtggggttatagccatatcagcggccagcctgatgctgacaaaacgctctggttttcgacatcagtaccgttactcgccctgctctcacatgggagtaacactgaccacgaccatcaacttatggtcaactacagcgccagccagaacccggacgggaaaatcagtaaccaggttggcctgagcgggacggcccttgatgatgacaacctcgactggaacgtgacgcaggggtatgggcgcgccgagagcacaagcggtgacgccagcctgagctaccagagcgcatccgggaacctctcgctgggatacgggcacagccaggactatcgtcaaatccgctacggcatgtccggtggggcgattgtgcacagccacggtctgaccctgagccagccgttgggtgaaactagcattcttgttgctgcacctggcgcttcggacatacccgtagaaagcaataccggtgttcataccgactggcgtggttacacggttgtaccgtatgccgggccatacagggaaaacagagtcgcactggatatcagcgagcttgatgaccatacggacattgatgatgcagtaacccgcgtcgttccaacgcgcggcgcggtggtcagggccagttttataacgcacaggggaattcatgggctgtttacgctaaagcacaacggcgcccctttgcctttcggtacgacagttagtgtcgaaagtggcaacaccagcggacttgtcggagacaacgggcaggtgtggttaacgggcctgccgctccacgggaagttgaacgctaaatggggcaatgctcctgaggagcagtgcacggtctattacaacctgccggagaaggttttaacggctccgcttgttcaggcgcaggagatgtgccgctaa

SEQ ID NO: 154658 - DNA, 633 bp, Enterobacter cloacae
gtgccgctaaccaaagataacaaattttatcagtggggatccccagtcactcataaactaaaaaagaaggaaataaatataatgcttaatgtaagaaaaactctctcagcctgtgccatcgcggttgcactgtttgcaacatcctctggtacgtatgcagctgatcccgcctcaacaactgttagatttacagccacagtaacggagtcgacgtgcgttccagactggaatacagccaggggaatcgacgtcaactttgataaagttcgttcggaaaatctgaacgcagggggaattgccaagcgtccattcacacttagactgacaggctgtcaaaacgtggcaggtgttcaattgtcagcttcaggcactccggacacgctcaacttccaggcctttgcaaatactgaaccaggggacaacgccgctaaaaatgtggcatttattttgctggcgggaccggaccaggcccctctcataccgaacatgccgcacgcaggaaatatggaattcaaaattggtggtgacggcgactctattgaaatgccttttacggctgaacttgtttcaacaggacccgttaaaccgggaaccgcatcaggtatagccaccttgaatatgacttacgaataa

SEQ ID NO: 154659 - DNA, 624 bp, Enterobacter cloacae
atgcccgaattttcgactctgtttaccagtgagtatacaacgaggacgtgtgttgttctcacggataattattatctttattatggaatagcttcaagcttaacggaatacatctgtattaatttttcactatccagacatgatgccataaaagttgaatgtttaaatcctttagttctcatcgatagcaatattttcttctgtcgcacgtgggggaattttaccgctttgtttgagctttacccgcaaggaagatttgtctggctaccttatggcccaaaagaacgttttttacgtgatgacgccttatccatacgctgttgcgatctgtgcgacatccgggcattccgaaatgccattgaaagatgttcgtcagggaatacaattcccctggcacagaagaagattctttcgagaattgaagaacgatttctggcctgctttttaacggggatgacaattgttgaaacttcaatttttctaaaaaagccgaccagctacagttatgcgctacgaagtaaactaactgaaataattggcttaaaaaattcatgttatctgtcttttcatcttgagaaaatgtccgcctatgttctctactacaatgttctgcacgtttcataa

SEQ ID NO: 154660 - DNA, 306 bp, Enterobacter cloacae
gtgaaaagtgcaaatagaataaaatcatattcaaaaattcttaacgaattaaccaaagagaatttaacaaaaaccattcagttttatggctttctggaatgtgcaaaaatactgcgatttttatcgattatggttgaaggcgagacggtagacatgccttcgctgaagtacatactctcaaatataaatgagtgtattgataaacacgcacgtgattacagagatgaggttcacctgaagtatttcaattctttatttgaactgagaaataaaattgaatatgtaacatctatcagtattaaataa

SEQ ID NO: 154661 - DNA, 783 bp, Enterobacter cloacae
atggcaaaatttattcttgaagataaagtcatctatgattcgtctacacactcattgttcgaaattgacagacgagagacgcaggtaactctagccattcccgccagtctttgcttgctcgcgttgttgcagaataaagatgaaacggtgtctctcaatgagttacacgctttcgcatggcaatcacgaggcgttaccgtttcaaccaatgccatttatcagaatctgtctattctcagaaagcagcttgttaaagcaggcttatcaggagatatcatcaaaaccgttcctaagcgcggtttcgttgttttgtccgagagctttatacatgtggaaaatgaaagcacaacaaacttttatcctccgcagggtcagcacacaacgtccactatcgatgagttgcacctgtcaaaacaagcagccgcaagcagagaaaaaaacaaaggtgtaatgattcttctgtttttcacagtcgtactgtctttgctttcttttataaccggaaagcgactgcaagaggatgacgaaaaatatatttacccctctttttctgaactacatcgtagtggcaattgccatatatacagaaaccagtctttacgtgaggatgcgtattttcataattttctttcgaagaataatttcacttgcgaagatcaaaggtggtggtacatttttaactatccaccgatgtcaaaaacattagtcttacgctgctcgtctgacttgctttcgaaagacgataaagatggtgtgttgtgcagttctgattatttttattaa

SEQ ID NO: 154662 - DNA, 480 bp, Enterobacter cloacae
atggatatgtcttcattaaaatatataattgccgttattatcattatctctaccggtgttgccggttatctgggaagcaaaagctataccaccagtgatgggttctattgtactgcgaatgtgaatctgcataagcataataatatgttaagcgcggttctaaattaccacatggaagatggtcagggttttttgacgcttaacggtgagtattatgaaaatgaaataaagacagccgatgtcagcttatcaaaacaattccgatacagtgagaggcatggagaatatatacttagccaaaaaccagatggtattttagacgtgacgccggaagacaaatctattcttgtggattttattccagatttctatctcaccagctctataccttcacaccacatcagaataaaaaacctcaaaaaaggggcgtggatatttacaactgcaccagtaccctatttcgtgtgcactgattattga

SEQ ID NO: 154663 - DNA, 459 bp, Enterobacter cloacae
atgataacgattaaagcagccgacctccacgcgcctgaatcccaacgtctcattgataatctttcatctgaactggcggctattacaggggatcgcggtacgcgacattttaacgtcgacgccatgatggccgaacgcacactgtgggttgtcgctaagaatgataatggtgatgccgtgggatgtggggcattgcgcccgctatccgaacagattgcggagcttaagcgaatgtactccgacagaagcgaacccggtattggacaggctttactggctttccttgaagcctctgcgcaacgtttaggctacggagaaatctggcttgaaacacgaaaagtgaataggcgcgccgtgaacttctatgagcggaatggttacagcgttatagaccactacggaccctacatcggcaggcaagaagccgtctgtttcgctaaaaaattcatgatgacctga

SEQ ID NO: 154664 - DNA, 579 bp, Enterobacter cloacae
atgaaaacacaatccgcaagtaacgaaccgaaagtcagcgtcagggataaaatattacttacggcgcacgatctgttttattccacaggcttcagggcgacgggggtggatacgctgattaaggcgtcaaaagtcactaaagtgactttttatcgccactttccgagtaaaagtttgcttattctcgcctatttgcactatcggcatgaaatatggattagctggtttgaagctacgttacgtcgacatctggacgaaggcgaatcaccttctgatgcgatatgtgcaacgcttcacgaatggtttatttcacccgatttccacggctgcgcgtttattaatgccagcgcagaggcaaaatccgaagagattgaaaatgaaataaaagagatatgccgagaccataaggcagaaacaaagaataaaatcgaaatgctcgccggtatagcggatgaaaagacctgtaacgacattatgatgcttatcgacggggctattattcatgcccaaatgggaatggatacagaagcagtaataaacgcgttgaaaacgggcttagaaaagctgacgggccaatga

SEQ ID NO: 154665 - DNA, 396 bp, Enterobacter cloacae
atgcgcgacgctcggggttttaactggcgaatcggggtagtggttttcattttcctggggtttatcttgtaccctttccgcgatctttttaccacgtatgaaaattttaaggaaaaaattagggttaatgatcatttaactctgtatatcacccaggtagaagcaagttctttatctaaagatacgtttcatttttatctctatgatgcaagaaaaagcaccgaagagtttatgtctcacgtatcagatatcgaacctgtcatgattaccaacgatgcaaaagccgctgcaacggtcacaaatggagaaatttaccttcgcgttcgcggaaatatttactccttcactgcagttgggctcgatgtgcgtattcatctcgatagatcggcttattaa

SEQ ID NO: 154666 - DNA, 321 bp, Enterobacter cloacae
atgcaacagtttgaattgtcgttaaccccgcccatatggcctgctttgtgctattttattgtatctgcagctcttttttgcttgctgtatatgggaaaacgtaaggttaacacgcttcgcaaataccctgtcttcattgcttacacgctgattgtgatagccagttcagccattcaaattaacgtatttgccaatggtcgggagtttgtgagcggatttttgcatattaactttgatccgtggcgtttcgactcggtgtattgggggtcattaatattcgctatgctttatctcctgactttgccccgcatcaggcactag

SEQ ID NO: 154667 - DNA, 1188 bp, Enterobacter cloacae
atgagaaaatcgacgttgttttatctggggctgtttttttcgcaggcgactcaggccagcgcgctctacttctatgaaatagggactgaagataccgcgcttgcgggggcgggccaggccgcccgcgctcaggatgcatccacaatagtgaccaacccggccgggatgacgcggctgcctgaccatatgtttaccggtggattacaggcaatggacggggatatttcgtatcaccttgacgatgactcgggccgcaaaagccctggcgatatcctgcgtttttttccaaatgcgagtgccttttacacccagaaaattgatgatgcgctgtatgctggcgttggtttgtacggcaattatggcctgggcattgattttgataactgggcaggcgaacggcttatcaaaaaaagcacgatggtcgcgatgaccctgagtccgtccttagcctataagctgagcgagcgggtgtctgtgggcggttccgtcaatgtcaattacggattcctttctcttactcgacatgtcgacgatgaagacgtaaaagaaaacgatcatgactgggcgctgagctaccgtctgggcttactgatggcgcttaccgatcgaacgcgggtggggatcgcatggaccagtaaaacggattatgactttaatattgatgccaaagcccgcttcccaaacttacccaacgttgaatatgacattcccgtttctgcacaggtcagggcgcctcagcaaattatgttaagcctggtgcatgatttcaataaaacgtggtcggtaatgggggaccttggctggcaggactggagccaatttggcaacccgcagatttcagtagccggacaagatgccgaaagcaaaaatcgtcttaaagactcgtggcataccgcgctgggggtacagtatcgtccaaccgaattgtggcgcatcaatgcgggcgtcgcgtttgacagtaccgtctacaaatctcaggacgatgttgcactttccttacctaccggggacgagtggcgttttgcaacgggcgcccagtatcaggtgacgccgcaaagcaacatagggtttgccgtctcgtatctgcatatgcagtcctcgcgcgtgaaatcgccagaacaatttaagggaagctatgacgatccgtatctgtggtttgccagcgtgaactacagctataagttttga

SEQ ID NO: 154668 - DNA, 1464 bp, Enterobacter cloacae
atgaaaaaacgctaccttgccctcttcaccgcgctggcgctcagcgccggtatccatgcgcaaactgcgccacttaccattccgcatcccacccagtttgatcggttaaaccagccgtctgcggatgtgacgatgcctgaaagctatgtaaaggccattgcgcagcaggcctacatctggggctggcccatggtgaaccagttcaaccgccgggaaaccatcaccaaagcgccctatcccgcgcttaatggcgggatggtcccggtcgcacctatgggtcagctcagcatgctgacggactatatcaagccggaagaaaccttcgttacctgcccaaaccaggacgttgcctacgggcttggcttcttcgagttagataaagaaccgatcgttattcaggtacctgattttggcgagcgtttctgggtctacgctatctatgacgcccgcacgaaccaaattggtaacgtcggtaagccttacggcacgaaacccggattttatttattagtcgggccgaactggaaaggtgaaacaccgaagggtattgaaggggttattcgttcctccactgaaatggctaacgtcattccacgcgtgcagatggatgatacgccggaagagcgcaaatccattcaggctcctatcaaagaaatcatgacctacccgttaagccagtttgacgggaaaatgaaatcctttgagtactcaaaaattcccgccattggtgataaaccggatgccagcgcgggcgagacgcgttgggtggtgccagaaaaattctttgaccagttcgcaaacgtgctggaaaaagtgccaccgctgcccggcgaagaggccatgtacgcgcagtaccgccatctggtagaggccgggaagaaaaaccctgaagtacgcaaatggatggatgaagcagccatcgagaccgataaaacggtgattgcagacttctttaaatggaagaataacggggtgcctgccggcaacggctggaaccgctcgaaaaacaacgccgagttcggggtggactactacaaccgaaccggcacctccaaatcgaatatgttcgataacaagccgaacgaaacccagtatttctacaccgacaatgatgccgctggaggacagctatctggagatcatgattacacggtaacgttcgccaaaggcgagcttcctcctgtaaaaggtttctggtcactcacgctttacaacagtaagcatctgtttagccccaacgagctgaaccgttattcactggggacgaaaaataaaaacctgaagtacaacgaggatggttcgctgacgctctatgtcagcaaaaaccgcccttctgacgataaggtcaataactggctcccggctccggacggtaatctgtcactctacatccgcgcctactggggcgaacagcctattctggacggcacctggcagccaccgaagatcgaaacggtaaaataa

SEQ ID NO: 154669 - DNA, 405 bp, Enterobacter cloacae
atgaaaattggcgagctgtcgaaaatgacggggatcgccccgtcgcgaattcggttttatgaagcggaaggcttactgccacggccagtaaggcagggaaacggatatcgcgtatattctacgaacgctgccgcgctgctgaaaatcatcgataacgctcagcgcaccgggtttacgctcgagcaaatacgccgcttcctgccgcagccgcaacagcgctgggatcatgaagcactgatcgaatcccttaagacgcgcattacgcagatagaggctatgcaaaagcagctcgaggaaaacagaagagagctgctggacctggtcacgagtatcgcgaaccggccggaggggatcgcctgtgacgacaatatgcagcgcctgctggggcagctgcagggcgattga

SEQ ID NO: 154670 - DNA, 948 bp, Enterobacter cloacae
atgcaaactattctgggagccagcgggcaaatagcccttgaactggcccgcgagctaaaacgcggctataccgacgatatcaggctggtcagccgccatccgcagaaaatcaacgccagcgataccctctttgcagccaacctcctggatgcacagcagacgcagaaggcggtcaacggcagcaacacggtctattttactgccggtctgccgccagattccgcgctctgggagcgccagtttccgaccatgctagaaaacgccctgcaagccacgcgaagcgcgggcgcaaaattcgtctattttgataatacctatatgtatcctcagaacgacgtgccgcaaaccgaagagacgcgctttgcgccccggggacggaaaggcaacgtgcgtgcgctgatggccaaccgggtgcttgatgaaatgcagcggggcgatattcccgttctcattggtcgggcaccggagttttacgggcctgagaaaacgcagagcttcacgaacgcgctcattatcgacaggcttaagcagcacaaacgtccgcgcgttccggtacgtgacgatacgcgtcgcaccctcatctggacgccagatgccagccgcgcgctcgccctgctgggcaatacgccggaggccttcgggcagacgtggcatttaccctgctgcgacgaaaggctgacgtatcaaaagtttgtcactctcgcctgtgagatcttcggccagaaagcggactacgccgtgccgggcaagctggcattcgccgcgacggcgctgttttcgcagggtgcgcgcgaaatgtgggaactgttgcccagatatgacgctgacaatctctttgattcaacgaagttcaggcagcgtttccccgaattcgccgttaccccttaccgacaagggcttgaaagcatctggcatgagtggaattcgaaaacatataaaacagcataa

SEQ ID NO: 154671 - DNA, 261 bp, Enterobacter cloacae
atgtatagctaccatgacgtagaagccatcaaaaccaatcttgaatggattgttaaccaggcagcgtttagccattcctcactctcacgcgccgatcaaaaagcgctcattgacctccttgaacttatccagtcttacgaaatactcctggatttaattaacgaatttggggttgccgtgatcgatccacagattgcggaaggtctgtccataacggaaacactcatcgccagggtaaaaaacagcgcgaaggccatgtaa

SEQ ID NO: 154672 - DNA, 744 bp, Enterobacter cloacae
atgttaagcgaagcattatataaaggaattaaagtagcttgtctttctgccgctgtttttgcctcatttcaggcaagtgctgatatcgttatttctggaacacgtattgtttacgaacagtcgcagaaagatgttattgtctctttagacaaccgcggtaaaaaacctctgctggtacagtcatggctcgatgatggtcgtgatgacaccaatccgcaagaattaaaattaccgtttattattacgccacccgtatccagaatcgatccgcacaaaggtcagtccgttcgcatttcctatctgggcggcacattaccgcaagatcgtgaatctttattctggttcaacgtgcttgaaattccaccgaaatcaaaattgaaagacggtgagagccctaaccagctccaactggcattccgtacacgcattaaactctttttccgtcctgacggtctgaaaggtacgccaggagatgcagcatctaaagtcatgtggtcacagcagaaacaaggtaatgcctataatcttgttgcgcgtaacgactcaccttataacgtttctatttcaaacgtcacgctgaaagcaggtggaaaagtataccaggttgagcataaatccattttaccatttagctctcaagctatgcaggtaaaagggttgaattctgctgttgccggttctgtctcctatgaaaccattaatgacaatggcggagccgatactttcgaagccaaagttaattaa

SEQ ID NO: 154673 - DNA, 2595 bp, Enterobacter cloacae
atgctatttcaacgctcaatcttgtgtctcgctatctgtgcagcattacctttgcacgccagtgagaatggaaacaaaactgtagacaccacctccgaatcagaatcggccattgaatttaatgatcaattccttatcgataatggtggaggtatcaacgttgagcgttatgcttacggcaaccctattctgccgggtacttaccgcgtaaaagtgaacttgaatggtaattcaaagtccacagttgaaatgacatttattgataataaaacgccgcgtgcttcagcgtgcctgacgaaactcatactaaatcaatcgggtatagatacccgtacgttagatgatggcatcaagaacgatgaaaacgcctgtgtggatattaataaattttatccaggcgcttctgccaatttcgatagtaacaagctggaaatggatcttaatttcccgcaaatttacgtgcttaagctaccggcaggatatgttgatccttcattatgggacgacggcgttcccgccggattactgtcatacgatcttaacgcctggcacagcgaatctgatggctctgattctaataccgcttatgcggggctacgctatggcctaaatatgggtccgtggcgtttacgttctcgcggcagtttgaactgggatcaggataacggttcacactactcaagccaggacatttatcttcagcgcgatattacaccgctgaatgcgcagctggtctttggtgactccttcacgcgcggcgacaccttcgactcggtcaatctgcgcggcgcacgtatgtataacgatgatcgtatgctcccgcaggggtcctgtggctatgcacccgtgattcgcggtgtagcaaacagcaacgccaaagtcagcgtaatgcaaagcggcaacaaaatttatgaaactaccgtgccacccggcgcatttgagattaacgatctcagcacgacgggctacggtaacgatttaatcgttaccgttgaagaggcggacggaagcaagcgcacctttaccgtgcctttttcgtcggtaacccaaatgctgcgtcctggttcgacacgttgggatgtagggttaggtgaactgaacgatgactctctgcgcgaaaaacccaacgtaggctataccacctttgcatacggattaaacaatacctttactggttacactggtctgcaattcacagatatggatttctatgccggtctcattggcctggcaatgaatacccgaattggtgcatttgcattcgacgtgacccaatcctatgccgatatcgacggtctggacactcttaaaggacaaagttatcgactgacctatagcaagatgctggaaacgacgaacacctcctttaacgtggcagcttatcggttctcaaccgaggattaccttagcctgaatgatgcagcttctttgcaggacagcatccatcgtgaggaatacggcaacagatcctatgacagcaacgctgagctttatgccgactatcagcgaaccaaaaaccaggttcagatcagccttaaccaaccattaaagtttaatggagaggataaaggttcactttatataaccggtacatggcaggattactggaacgacaccagttccacctccgactacagcgtaggctacaacaacagctttgattacggtagctacagcgtttcagtgcagcgtagctatacggaatccggtgaaaaagatgatagcgtttatctcaacgttagcatcccattcagcgtcttcgatcgagacaaaacgctttctggtggctttaacaatatcaacatgagcatgcgctcagatttaaaaggcggcagcagctttaactccacggcgagtggaagtgctaaaaataacgacctgagctactccgttagcgcatcgtcaaacagcggaaattacggaaacctgaaccaggtcagtggctatagctcatggaatagcccttacggccctcttgggttgtcagcatcctttggtgatgacaatagcaaacaatattccgcgagttatagcggggggctggtggcgcatgcaggcggtatcgtaatgacgtccggcagtatcggtgaaacggatgcactggcgctggtaaaagcaagtggcgcaaagggcgctcgcctgggttatggccagaaccgtattaacagctctggatatggaattatgccctatatgtccgcctacagagaaaaccgcgtctcgcttgatatcagcacactggaaacagatgtcgaaattaaaagtacaagtgcagtcgccgtgccgcgtaatggctcagtggtattagtcaactttgaaacggacgaaggccgctcacttgttctggaactggaacgttctgacaaaggcttcattccgttgggcgcggatgtgctgaatgagaaaaacgagccaatcggaacggtgggacaagccgggcaagcttatgttcgtggcgtagaagagaaaggtgttcttcgagtggtttggggtaacgatggggcaagtgcttgtaccgtccattatcagatccctgcgaatgcaaaaaaagcgggtctgacgaccattcttagtaatcagcaatgtcaaatgtaa

SEQ ID NO: 154674 - DNA, 582 bp, Enterobacter cloacae
atgggaaataggatgaaaaaacatcattgcggatattcattattcgcattagcgatgctgacattgtcagcgtctgcttcggcaacggatttgaacgttaatttcactgccaatattcgcgaaaccacgtgtgatatgaaattggttggcggtacgggctctgatactaagcaaacactaaccattggtaacggcggtcaggtacgtcttgatgatgttaaagctggcactgcatcagctacattcaaaattgttatggttgaatgcccgtcttcgctcgcttcattgaaaacgaccgtaaaaggcaaggctgcaggatatttacctacaggtgttgttaacctcattccaaaagctgaagggggtgctgattatgctgcggtcgagattgccagagcgtctacaccagcatcaccatttaaggtgaattcgaccttagatgcagagcggctcgtctggactgcgacagaacttaacaacaaagaagtctctttagttgccacattgcgtgaaacccaggcaaacagcatgacccttggtgactttcagaccgtggccacttttgaattcagctacgagtaa

SEQ ID NO: 154675 - DNA, 564 bp, Enterobacter cloacae
atgaaatttaattcaacccttatcgctttgtccgttgctgcactgatggcctcaggactggcaaatgcaactattactggtactagcagtgtcgaaatgacatttacaacgaaagttacctcaggcacatgcacggctaacgtagttgatggtagtggtacatcaaccacgacagtggcatttggtgatgtctacaaatcagacctggtaaacaaaacccgtgttgagccgctcaaaatctcctttaccaactgttctggggtaaccaaagcaacggtagctgcagcaaaaggcgcaggtggtacatgtaccggtacatcagcaaatggcgactcttattccggtgggctgggaacaggttttgaaatctggtcgggcgatgttgattcaggcttgctgatgaaatgtaacacgccgccagcagcccaggaagttgcaatcactgatggcgcgggtgaatttccaatgaactcacgcattgtgattggtaaagataaaactattaacgatgttagcgctggcgcggttacagcaccggtaacctttactatcacttatccataa

SEQ ID NO: 154676 - DNA, 606 bp, Enterobacter cloacae
atgcaactatcagcatttaaattatgccagcccggtctgatgttgcttatcggtctggctggtaacgttctgcctggcattagccaggcagagtctgggcttgacgtaaacctgacagctaacatagttaacagcacctgtaaattaagcattgaaaatagtggcgaaatctatctcccaaacgtcatgcgtagctggttttataatacagacggcagcgatcgcttcaccgccaccgatgatgcgggcggaaccccctttaagatccacgttgatgattgctatggagatagcaccagcacagctaaaaagctgaattttagcttctcccctcaatcgggtttctggccgggacaaaaccaggtgttcaaaagcgaagataccgctgccggctcagcgaaaaatgtcggcattgtggttttctcagcgaaaaacaaaaccaacgtcttaaacagtgatgggacgtcaaaagtcatttatgacgtgagtgggcagggtaccgcctttttaacggattatcagttctatgccagataccagaatattggcgcagtcgctggcggtattgtcaccagtaaagtgctggttgatgtcacttacgagtaa

SEQ ID NO: 154677 - DNA, 1098 bp, Enterobacter cloacae
atgttcaaatatttaacacgccaaatgacggtgagcagatcggtgggtttaacactcgcgagcttgttgttatcgctaagccagacaagctgggcagacgaatgtcactttggctggtatggtgagggggggacgacaacgctggtcaatggccaatggacacgtagtccggtacgtcttcccccggcggacgttgtatttatcactgtccccgatagtgctatcagtatcccattatcaccgggtattcaagtaaaatgtgatgcgggaacggatggtgacagcttttatgctcagacggcgccagaactcaagatcggcgaagcccgtggatacgcgatgtttgaaacaaacatcccggggatcgcctattcggtatccgttcatactgatgaaattggcggaggctatgggggctactttggatataacactaccggctggcaggaccaaaccgggggctttcccgtgtcgaactgggcagataaatggatgatagcaacgatctatctctatgttggccctggctataaaggtaacccgaataaagcaacggtgataaaacctaaagccgggacgctgggtaagatgggggttgggaatcccaacgccagcgatcacaagccctggacattcctgataaatgaaagctcattccagatccctatcgttctcccaacgtgtgacactgcgatgataacaggtggctccaacacggttaacctgggcgattattttgcttccgacattaagaataacaaggttaaaaatgtgccctttgccattgaattaagcgactgtaccagcgcggcaagattcaccacgaagctcacgaccacaaaagcgacaggtacaaataatgatcttctgggaaatacgctttcgtcggcagctgagggagcaggtgtaaaaatactgtataacaacggaacgactcaactcattccgaataactcaaattcatcctatgtcatcactgatgactacgttcctgagtggaagcaaattgattttattgcccagctggtagcaaatggcagcccagtgaagcccggcgcgtttaaagccaccggaaccttcaccatttcttacgattag

SEQ ID NO: 154678 - DNA, 771 bp, Enterobacter cloacae
atgaaagggcaacaccgtctggataagattgtggcgtatttgaaaaatcatacgctggtgaccgtggaacagctggtggatgcggtagatgcatcacctgcaacgatacgacgggatctgatcaaactggatgagcagggcgtgatcagccgcagccacggcggtgttgctctgaaacgctttgaacctgctcagcctacaaccaatgaaaagcagttacgatcgccggcggaaaagcgggcgattgcgcgttttgccgcctcgatggttcaggcgggcgacgctgtggtgcttgatgccggcacgaccatgctggagctggcaaaatgcctgactcatctcccgctcagggtgatcaccgtcgatctgcatatcgctctgtttttatccgagttccgtcagattgaagtcaccatagttggcggccgaattgatgacagtagccagtcctgtatcggcgagtttggtcgcaagatgctacgtagcgtctatcccgatatcgccttcatgagctgtaacagctggagcgtggaaaagggggtgactagcccgacggaagaaaaggcaggactgaagcaggagattatcgctaacgctcagcgcaagatcttactggcggacagcagcaaatatggtgctcactcgctgttcaacgttgctccgctgagccgcttcactgatattattaccgatgtgagtttgcctctgcccgttcaggccgatctaaaagcgcaatccgttgcccttacgttagtacagcctgaactttaa

SEQ ID NO: 154679 - DNA, 984 bp, Enterobacter cloacae
gtggtaactaaaacaattgcgattacgatgggcgacccggcgggcatcggtccggaaattattgtcaaagcgctttgtgacgacgagcttaatggtgccccgcttgtggtggtgggatgtctccagaccctgagacgtctgcagggcaaagggctggcggaaggtgtcaccttccgcgcgattttcgacgtcgcggaggcgcgatttacgccaggcgtgatccacgtcatcgacgaaccgcttgcccagccagacgcgcttgaaccgggtaaagtgcaggcccaggcgggcgatctcgcctaccgctgcgtgaagagggcgacagaaatggcgatgaaaggagacgtacacgccatcgctaccgcaccgcttaataaagaggcgctacatctggccggacacaattatccgggtcataccgaactgctggcgacgctgactgaaagccgtgattacgcaatggttctctacaccgacaagctgaaggtcatccatgtctcgacccacattgcgctgcgcaagttcctcgatacgctgaatggtcagcgcgttgagacggtcatcggcatcgcggatcgcttcctgaaacgcgtcggcttcgcccagccgcgcattgccgtagccggcgtcaatccccatgcgggcgaaaacggtctgtttggcgatgaagaaatacgcattgtatcgccagccatcgaaaacatgaaagcgaagggaatcgatgtttacggtccctgtccgccggacaccgtatttttacaggcgtacgaggggcaatatgacatggtcgtggcgatgtaccacgaccagggacatattccgctcaaactgcttggcttctatgatggggtgaatattacggctggtctgccgttcatccgtacttctgccgatcatggaaccgcgtttgatatagcctggacgggaaaagcaaaatctgagagcatggccgtatcgattaaactggcaatgcaactggcgtaa

SEQ ID NO: 154680 - DNA, 1272 bp, Enterobacter cloacae
atgaagatgctcgttatcgccgacgactttactggctctaacgataccggcgtacagctggcaaagaagggcgcgcgcacggaagtgatgttaacgccggatcaaaaaccgtcgcgtcgcgctgatgtgctggtgatcaacacggaaagccgcgcgatgccagcagcacaggccgggaaagcagtagcgcaggcgttagcgccatggtgcgatggaaatgtactcccgttgatttataagaaaatcgactccacttttcgcggcaacgtgggggctgaagtcatggcggcaatgcgggctgcaaaccggacgctggcagtgatcgcggcggctatccccgcagccggacgcaccacacgcaacggattgtgtctggttaatggtacgccactgctggagaccgaattcgccagcgatccgaaaacccccattatctcctcgcgtattgcggcgttgatcgcgttgcaaagcgatgttccggtacatgaagtgtttctcgaagacgttcgtcggggccaactcagcgcactgcttacggcttttgccgccgagggtgaatgcatggtggtggtggatgcggtggaagaccgcgatctgctgctgattgcgcaggctatttgtgagcaaaaagagatgccgctattggtcggcgctgccgggctggcgaatgcgctaccggccaggatgttcatgcaggaaaagcaggatcttccggtactggtagtggcgggctcaatgagcgaagccacgcgccggcaggttgaaaaagcgctctgccaggcacgcgccagcgtcgtggatatcaatgcatcgcggctggtttcggcacaggccgagcaggagatggctgcgatagtggagcaggcttgtgcgctgctgagtcgccagcagcacaccattttacgtaccagccggagcgcggacgataggcagacgatcgacgagctgtgtagtcaggcaggagtaagccgccaacagctcggcgggatgcttagcgaacgcctggggatgattacgctgcgcattattgagcaggctcgtattggtggactgttcctgaccggaggggatatcgccaccgcggttgccagcgcgcttggggcagaaggctatcgcattcaaggtgaagtggcgccctgtattccctgtgggactttcgtaaacagtgaaatcgacgatctgccggttatcactaaagcaggcggattcggttcagacagcaccctttgtgatgcgctttattttattgaggagatgtacagtggtaactaa

SEQ ID NO: 154681 - DNA, 954 bp, Enterobacter cloacae
atgaacatcaagaaggctatagagcgtgtacccggcggcatgatggtcgtgccattggtgatcggcgccattatcaatacttttgccccgcaagcacttgagatcggcgggttcaccaccgcgctatttaaacatggcgctgcgccactgattggtgccttcctgctctgcatgggggcgggaattagcgtgaaggctgcgccacaggcgctgttacagggcggtacgattacgctcaccaagctcctggttgccattgccattggcctcggagtggaacagcttttcggtgcagaagggatctttggcttaagcggcgtggcgatcatcgctgcgatgagtaactcgaatggcgggctttacgccgcgctggttggtgaatttggtaacgagcgtgatgtgggagcgatctccatcctgtctctgaacgacgggccgttctttacgatgattgcgctgggcgctgcggggatggcgaacattccgatcatggcgctggtcgcggtgctggtgccgctggtggtggggatgattctgggtaacctcgatcccaacatgcgcgactttctgaccaaaggggggccgctgctgatcccgttcttcgcttttgctttgggcgcggggatcaaccttgaaatgctgctgcagggcgggctggcgggtattctgctcggcgtgctgaccacctttatcggcggtttctttaatattcgtgccgaccgtctggtgggcggaaccggtattgcgggggctgcggcgtccagtaccgccggaaacgctgtggccacgccactggcaattgcccaggccgatccctcgctggcggaggtagccgccgcggctgcaccgctgattgctgcatcggtgatcacaacggcgatcctgacgcctgttctgacctcgtgggttgcgaagaaacaagcgcgtcaggttgctgaggagaaaaaagcatga

SEQ ID NO: 154682 - DNA, 429 bp, Enterobacter cloacae
atgattcattttattgtcgcgacccacggcccgcttgccgccgcgctgctggaaagcggccggatggtgtacggcgaccttcccggcgtacaggccgtgtgtctgaccgagcaggcggggattgagggcttccggcgcgacttcagcgccgcgctggaagccgcaagcgtggatgccgacggcgtgctggtgctgtgcgatatgcaaagcggcacgccgtggaacgtggcctgcgagtctgcatttaatccgctcacgcagccgccggttgccgcggtggcgggcgtcaatttcccgatgctgctgcaaaccgacgaggtaatgacggcatgcgacgttcatcatgctgccgcaaagcttatcgatctcaccctaccgactctggtacaggcgaaaccggtagataccgcacagacagacgatttttaa

SEQ ID NO: 154683 - DNA, 555 bp, Enterobacter cloacae
atgaactcagatatctttctgccacctcaggtggcatgggctaccggcgcgctagccggtgggcctcttatccgtaaaacgacccgccttaccgatctccccggcatcttcgcggacggtgaggcgtggaggcgtggtaatcctcaacaaagcgtgtatgacgtggatgtcctgggttcccccgcgggcgagggggcgctttgcgtcggtgtgactcacctgtatacggggaacgtgggcgatgagttctttatgacgcgcggccattttcacgcgcgccgtgaacagggggaagtctattttggtctgcgcggcgttgggttgctgctgctgcaaacagaggcgggggacgcgcggctggaggaggtgacggcaggctccgtgcatattattccgcctcttacggcgcatcgcttgattaacacgggcaaggagacgctatcttcgcttgccgtctggccagtcatcgcgggacacgactatgcggcgctggcagaaggttttgccctgcgggtctttacctcggggcagggggtcgaggtgcgccatggctaa

SEQ ID NO: 154684 - DNA, 630 bp, Enterobacter cloacae
atgatgaccaaaaatatcattattcttgatgatcaccctatttttcataacggcgtgaaacagctaatagattcggaacctttactggaagtgttagatatgtgccgaacccgcgaggagttgtttttctcgttgagcttagggccggcagatatacttctgttagattgttcgctgccagacggtgaaagcaatatgcttgaactggttgagcagttatctctacaactgtctgactcagccctggttttgatgggggatagtgtttcacatcaaaaaatcgctgagcaatgttctccaatgattgcagggtatttctgtaaaacgttaccggcagaaaattttctcattttacttcaccgtgtccgaagaatgcttaataatgaatcaaataattacagcaaatgcaatatagttatgcaagataatgttccgtttgtaagtaatcgtttgtcggtaaaagagaagaccgttatgaaatatctacaaaagggtctgagcgtaacgcaaatagccgagtgtttaaaccgcagcgttaaaacgattagctcccaaaaaaggcaagcaatgcgtaagctcgatctgaagaacaatcgcgatatttttgagttgaagataaatgagttgtag

SEQ ID NO: 154685 - DNA, 1260 bp, Enterobacter cloacae
atgacaaacatgagattgaccagactcagtttctgcattactgcgctggtattggccccacggattaatgcagctgagcccgcgctgacaggctacaactcggataataccattccttattcactgtttgatgatacggagaaaaagcaaccgtggattaagcctccggttgcccgaacgccttctctgcgacccgcaacaaccggacaggcgaaggagaatcagcgcgtgcaggcgctggaaaaatcactttcagaacagcagcgcctctacaaagagacgctggataagcacgcaggggaagttcaatctttgcaaaataagctgagctcatcagaggttgacagggaggcaatgacggctcagcgcgagaagctggatgcgctacagcgagcgctggctgaagcacaagcgcagcacgacaattccgatcgggagctggcggagttacgcgcaaaagttgccgcccatcaaatgctggaggattcccgcgcaataacccagtctgcgtttgccgatcggctgaaggaaaaagaggacagccttctcgcgatgtcgcaacaaatcgaagcgctgaaggctgaaaacaacgttttgaccgaaaaacagcaggctgttaagcctcagacccgcgaacaaaaaatttcctatgccaacggcgtggcgtttgccagcgatatagtacgcgttttacgttcgcagcaggaggtgggtattgaacccgatcgcccgatggtgcttgccggtctgaaagatgctttcggccaacgtatcgcgctaccaaaagatgaaattgccgaactggtaagcgatcttgaccgccagcttaatgaaaaagtggccgaacaacagcagcagcaaatacagacggccagtcagcaaaagaagctcggtgaagagctgattaaaaagacacaaaatcgtccaggaatgaaagagatggatggcgcctattacttcgtcattaaaaaaggggagggagcaaaacttagcgctgacagcacagctgaaatgcttattacagggaaattagccgatggcaccgtatttgataacagcggtgagctgaatgaaattcagcagcttaaaatcgatacattgcttccggcagtgagcaaaattataagccagagtaacgttggcagcgaactcgaaatcattatgccgccagagcaggcctttggcgaggcgggagctcagcctctaattccgcctggtgcaaccctggtattaaaaataaaaatcatcagtgctatgtga

SEQ ID NO: 154686 - DNA, 801 bp, Enterobacter cloacae
atgaaaagcgtaacagcgatgctgggtatgcttttcctgactggctgcaactcacaccctgttgagcgtgaaaaaacacctcaacctgcactgctcaatgaatttaatcagcaggtggcggctgttcatgaacaggccgggcgtggcgatgtgctgtctcagcaacgtagcggggcctggctgttttctgccggaaaggatgctttagccgaaccattgctgcgtgctgcggcagagaaacatcaggcggaagcacaatttctacttggcaggctccttctggaacagcaacccgctgagggtcaacggtggttagaagcctccgctgaacagggaaacatcagtgcccaacaattactggcccgtcattatcgttcaggtttactgaacgttcatcctgagaaggcgtttaagtggctactcatggcagctcagcagggcgatgcacaggcacaaaatgatgtgggcgccgcatatacccagggggcaggcgtaaaaaaagatgtgcgccaggcattcacctggtacagcaagtcggcaaagcaaggcaacgcccttgcgcagtttaatctggcgggggcgtaccaggccggagaaggggtctctgcacagccagagctggcttttgcctggtacaacgcggcagtcaataacagccgcgatgagcgcctaaaacgaacagcggaaaaaatgaagttacgtatgtatgcagaagcgtcgcggcaggggaaagcgctaaaagcccgtcaactggcagagcaacttcttataaataactcaacatcatggagcgcagaatga

SEQ ID NO: 154687 - DNA, 384 bp, Enterobacter cloacae
atgatgcttttaactgctgactccagacgactcatgttcgcctgtggcgtactgatgctggctggctgcgccggtcattcaggtaccccatcaaccaccttaacacaggccgctgaggacgcaaagccactgcaacgctgtcaggatgagttggcagccctgaaacaatacgatgcggcacgttttgaaaagcataacggaacattaacggtgttgttaaataacagtgcccagtatttgctgacgcgggataaagttcaggaagacataaagagcgtagtagatagcatatttcaggctcagttcgcgcgggaatgccaggcaattcatatcgccttgtatcaatctatcgtgtcgcaagcagacgaggggattaacccatga

SEQ ID NO: 154688 - DNA, 702 bp, Enterobacter cloacae
atgaaggatttcgcaaaaaaaaatatctccattaccttgctggacgatcactttttagtcttacgtggattacgcgatgtgttaaccgaaaatccagcattcaacgtaacgggcacgttcaccacaagcgacgagtttttcaatcatctaaaatccacaccttgccatgttgcaatcgtggactatgagctggctccatcggatgtggatgggttaaatctcatcaaaacccttcatcgccgccatcccaatatcgccattttggtggtatctgcacactacaatcctgccacagtcgcgctttctcttcgcagcggagcaaagggatttatcggtaaaaaccgtccatttgaagagctgagtaaagcgataaccgagttgacggccgggcgaatctatcttgaacctgaaatgacccaacgtcttgctgaacagcagcaccacggagaagtgctcatcaatggcaacctgagcaccgacaatattaagcacgcggtgtcgttaaaaatgctctcgcccaaggagcaggaggtcattcgctgcttcctgaccggtatgacggttaccgacattgccgaaaaattttcccgaagccttaaaacggtcagtggtcagaagcaaagtgcaatgcgtaagctgggcctgaaagctgaccatgagctgtttatcattaaagatgagttgctgaaaggtggcgcttaa

SEQ ID NO: 154689 - DNA, 2307 bp, Enterobacter cloacae
atgccctcccgtattgcaactttattaattgtaatggcgttgtccctcctgagtaccagcgctcgggccacatcgctgttcagtgaggaagagcatgcctggatggtggctaatcccgtgattagctatagcgtgcagcaggagtggccgcttgattatagcgatcggggcaggcacttcggcctgagccgcgcgtatctcgaccagattgagaagatgaccgggctgcgttttaagctggccgaagagccccggaaggccgcgctggttaccaatctcgcaccgtccctgatgacagacacagaacgtgcaaaatggcttttcagccagcgctggatcaccacgaatgcactgatgatcgcacgagatgatgccagtaatttacgtactcttgagcatctgcgcggtaaacgggtagcggttcgtaaggacagtgactatgagcgctggctacgccgcttccatcctgagattcatctttttcctcaggaggatatgcctgctctgttgcgaagcgtaagggaaggggaagccgatgttgccatcggtgccgatctcatcattcgtccgctgctttaccgcagtttgggcagtaagctggtggtctccggacaactcccctcgctagtggcgggcctgcacatggggacgctgcccgaattgcctttgctgaaaaccattatcgataaagcgctgggcgagatgccagcaagccgaacagacgccatgttcagccagtggattggcgatctcaaaattggaaagataactgcaggcatgattttcggcctttaccagctggaactttcgctcattgctctgcttctgctcggtctcgcatgggcgctgtggcgcgcgctatggcaccgcaaacgtgctgtagccagcgaggcgcgcatgagtcagtttctggcagtgatgagccatgaaatccgcaccccgatgaatgcgatgattgcggccctggagctactacggctgccaggcaccccttcacagcgcaatgagtatctcgcccttgcgcacagctcatcaacgcatttaatgaacttgctgaacgacattctcgaccatagcaagctgtcgcacagtcagcttgtcctgagcaggcaaggcttttcactgaaaaaactggtagacgatctggtggcagtgcatcgtcccctggccgctcaaaagagattatcgctgaatgtgacggtggatacgacgcttgagcggcagtggatagtgggtgatgcacatcgcttgcgtcaggtaataagtaacttgttgtcgaacgccattaaattcaccgaagcaggcagcgtcacgctcctcgtctctgcagaaccttatgacaatacggaaggattacgttttaccgtctgcgacacgggcattggcattccgcttgaggcccagctgacgctctttgacgcctggacgcaggcagatacttcagccgcgcgctcgtacagcggcagcggcctgggattgtatatctgcaaagaactggtgaaattagcgggggggcgattaagttgcaccagcagaccgggagaaggggcgacttttatcgttgaactgccggttattttctgtgacgtatccgttgaagatgttagcgaatctcccaccgtgcaagaattcgtgaaaggcaccagcgttctgattgtagaagatcaccccgctaaccaggcgatgatggcagcacagctgggggcgctcaactgtcactatgatattgccggagagggcatggaagctttggcgttgcttgctgaggaaaattattacgatgtcatcttgcttgactgcaaccttccggatatcgatggttatgaagtcgcgcggcggatacgtgcctttgaaagcgctcagggtcttgagagaacgccgattgtggcaatttctgccctgagtggctcagcgcatcagcagaaatgtctggacagtggtatgcaggccttgctgaccaaacctttgcggctctcgtgtttgtcttcaatgctcatgcgctggtgccagacggctggcaccatgtcgacagaggttgtaaatgtaaggccggagggtgaggttgcctcctggcttttacaggacatcgcgggcttcgccgaggcgctaaaacagcaggatgctcgctggatgctacatcacattcaccgtttacacggcgcagcgaaggtctatgctcaacatgcgctggctgagtgcgccgcggcatttgagcaacaaatgcgcgaggataatattccttcagtgacggagggcgagcgctggattgaacagcttaagcgccacctttcagcaactcatctttaa

SEQ ID NO: 154690 - DNA, 2295 bp, Enterobacter cloacae
atgctacgttggtggttcctgattgtgctggtagcggtatccttaccgtgcatggcgaaacagcgattttcatcccagcagcaagcctggatcgatgcccatccgcgcgtgttctacaccgtcaaaaacctctggcctcaggaatccgtgcgtgacggtaagcataccgggctaagccgggaagtgctggatgaagtcacgcggcgcaccggcatcacctttatctatgttcctcccgggcaaaccggcgagcaaaagccaatgatggacagcgctgttactgccaatttactgagcgatgaacagcgtaagcggtggcttctgacctttccatggattaataccatgcccattatcgtgtccacaaaagatcaggttcaggtgcgcacgctcagccagatgcagggcaaaaggatagccgtcgcggctgacggtcaatacgcacagtggatccggcagcactatcctggcatacggctaagcgtcaaacccgatgtggttagcgcattaaaatctgttcagtcgggtgagaatgtggccgctattgcttcaggtttggtggtgttgcccattttgcagcgccactatatcaatcatctcggcatcgtagcgcagattccggaaatggtcagcggcgtgaatatgggcattgaccctgcttatcctgaactgcgggacattctcaacagcgtcatggcgaatatcaccgcgcgtgatgctgaacgtttatttgcgcattgggtcagcgtggtggatatcggaacgccgactttgctttttgtgttatggcaatatcggtacccgttgatagtgattggtgtcctgatcgtgctgttacttattgccatgcggttcgcctgggtttcacgacgtcgtgctatccgaagcgagcagtacaaaagccagttcctcgccgtaatgagtcatgaagtgcgtacgccgatgaatgccattattgcttcgctggagttgttacagcaaagcagtggcgataagcgtcagaagtatgccgacctcgcctatgcctcttcgcaggaactaatggaactgctgaacagcgtactcgaccatgagaaaatcaaccagaatcgtctggcgcttgcccttgagcctgttgaaccaggcgcgctactggaggccgttatcgacagccagcggcctgccgccgagcgtaaaggattatcgctaatctttgaggatgtccgtagcgaaccgttccaatggatcctttccgatccgcatcgtctgcggcaggtagtcaataatatcatttctaattccatcaaatttactcacagcggcagcgtaaagttgcgagtcagtgatgaagaacagcagttccgtatttgcgtccaggatagtggaacaggcgttccgccagcgctgcagaaaaagttaatgcaggcgtggcaacagggagagcctcaggcgggtggcagcggtcttggcttatacatcagccgctccctggtgacacagatgcagggtacgattcagctagaaagcgctccaggaaaaggcacaacggtaacaataaccctgccactgcagacagtttcagccgttgaggggggcagtagctctcatttgcaggcattacccgatttcgccggaaagtgtgcagtgcttgtggtggaagatcattttgcgaacagacaattactggctgagcagcttactcttttagcctgccattacgagctggctgaagacggagaaagtgcacttgagctgttagaggaagagaattattacgatgtcattctgctggattgcgggcttccgggaatggacggatatgccgtgtcgcgaaaagtcaggctgttagaacagcagcagcagcgtgacccatcaatcattatcgccatttctgctctgcagtctgccaaccatctcgcccgctgccgtgaaagcgggatggatgcggtactgacaaaaccgatccggttaggtgaactcgccgctcagttacaaaagtggtttcagccagctgatataagagcggtgagagatgaaatacccctccagctctcggaagatgtctggcagtcattgcaggaggatgtgcaggatttttatgcggcaagcgagcggcagcaaactcgtcatatgatacatcatattcatcgtataaaaggcgtggcgctgatgtatcagctgcacgctctggcggaatatgctgaatcaattgaaaaaagtttgcgtgccgaattgccccctgagcagtggcgtcctgaacagtggcgtcagcaattatgggcgctttgtacgcccctaaatcctgttaaagactaa

SEQ ID NO: 154691 - DNA, 711 bp, Enterobacter cloacae
atgggtaataatcccctcaatcgtacccgaatcgtcattattgatgaccaggcgatcgcccttcatggcatgtacgcattgctgaataagccgaatgacttccaggtcgttggccgctatgttcatagcagtgacttattggcagagctggcaagcttagacgcagacgttctggtgatggattttgccctcgcacccgacgatatggatggcatcagcctgctgcgtttacttcagacgcagtatccgacgctggcaatccttgtcatttctgccatttacaacagcgctaccgtgctgctggctttgcatgcaggcgccaaaggatttatcagtaaaagcatgcatacggaggagttagcccgtgcagtcggcaatgtcgcgagcggacaaattcatcttatgcctgagatggcgctggaattgacccagctgttcaataccgagctcacgcaacacctgccgccttttggtaacagtgctaaacagccgtcgctggacttttcacttttgtcaccgcgagagcaggaggtgattcaatgcttcatcgacggtatgagcgtttcagaaatcgccgataagtttaaacgcagcataaaaaccatcagtggtcagaagcagacggcaatgcgcaaactgggtttcagttcggaccggagttttttgcaacatcataacgcgctaaatggctccagtgtgccgttgccataa

SEQ ID NO: 154692 - DNA, 2451 bp, Enterobacter cloacae
atgacgttatcttcaaaaactcgcctcgcaacggttatcgcatttacgctgatgtctctgcaggccgcggcgttgccaatggaagacttgatctctcagacagaaaatctgcctgaagattttagctctcatttctttaatgcgcctttgatgactcgtattgaactcgatggtcaatacctgggtgacgccatgattttgttatcgacggaaaaaacggtacagcttattaacttcatccagtcaaacgagagtcagtttccacctgccacgcgcagccgctgggcgcaggcgctgagtaaacccgtttctctgggaagctgtgataagcagtgcccgcaggggttagtcagtctttactataaccttgtaaataccacgctatcgattgccacaacggaggctctcgcggtacaaggcgagcaacgccatgttgcgctgccggaaggtggcagcagcgggctgattttgcgtaatcagctgaatttaatcggtggtgaacagcagccgtggtcgggttcacagaacctgaacctggaaagcagcctcggtaactggacggggattgccgcgggtcagctgagccggagcgatatcgaaaacagccaaacggaagcacgtgtgagctcattgtttgttcagcgggaatacccggatcaggtcttacgagcgggtctgttccagccggatagccagggtattttgcgccagccgaacatgccgggtggcagcagcgtacaaacggtggcgggggccatgctggcatcatccgacacgctgttgatccaaaccgggcaggccagcctttacccggtcatggttacggcgaatcgggactctgtcgctgaaatttttcgcgacggcgttctgattaatagtcagccggttgcaccaggattacagcagctcgacaccaccgttctgcctggcggcatttatgatgtagaagtgcgcattgttgaagcgggtaaagagattagccgcagcactgaaactatttataagccgtcgaactggcgcaatccaaataagcgctggcaatactcagcgtatgccggcatggagcagcagctcggcaatagccgctataaaaataatgaaggcgagcccgctcttggggccagcgtcaactatatggcgcacccaaaagtggtcctgggcgccgctgcacaacatgctgcagagggcaagcaatatggcgtatctgcggatgtgcaggccgcggaaaatattcaattatacggcagcgcaggaagcagcgatcgctggggatcgcgttacgacacgcaattaaactggaggctgggccagcaaacaagcctgatgtttaaccacaatcagagctggtatcaggaaagtaacagccgtaattcacctggtcgtcagcaaaatagcagcgcaacaatcaatcagcggctcggcaatggcgattcactttcgctgcgcggcacgcattacagtcgtgagaatggtgtcggtgtggatgcgacctggcgcacgcgcatgaaaataaaagatacgccagtcacgttaagtctgaacgcctacgaccgcccatacatgcaaggtgctcagaagcgtaatcgtggcgccagccttaacctctcattggcattgggcggcgaaaaccggagcgtcagtgccagtttagggagtcgtaacgacaacaaaggcgggcgcgatctgtttgcgtcggccagcgtcagccagagttttgaagagagcgtgtttaaagacgtgagcgcaggcgtcaccggcgataagtttggcgtcagcaccaatctttacacccgatttgaaggtctctacgccagcggcaccgcgtacgccaatcattcttcgcaaggacaggctttcagcggcggccttaacatgaacaataccctggccgtggggggagggaaggtttccgtgagccatagcccggatgcgtatggcaataaaaccggcattatcgttgatgtggagagtgacgatcctgatgtgcgcctgaaaacccgggacagccagggaggtagcagtacgctgcgagccggacgtaactttattccgaccacggcatataaaccgggccagctgcaaattgatttcgacggtcgcgatgcgccgccgctgaaaatttggcccgcggaactgccttatcacctgaataaaggtggtgtcgcgcacagcaaagtacgcgtgatgaaaacgctaacgttaattggtcgcgtactggatcacaacgggacgccgctctccggcgcgaaactggttaatcatgccggccagggtatcacagagaatgacggctttttcatcatggatatgcacgaacacacgcctgaggtggtcgttcatgctcgcgataaaaagctctgcacggttaaattcgacctcaaggattataaacgtgagaacgatacgctaatgattggcgattttagctgcaaacgtaatacaaaaagctga

SEQ ID NO: 154693 - DNA, 483 bp, Enterobacter cloacae
atgaaatattcaaataaaactattttcgctgcactgctcgccaccagctccgccgcgatcgcagatgaccaaacggaactgcagtttcagctggaggctaacattcctgctcaacaatattttgttgagtttcaggatcccgcctttggtaccacgacacaaacaatggcatgggacaacgtaaacgaaaagctggaggatgtgagcaccaccctgctggccaaaaataacgttggcaaaattaccgcgcatctggattccgctgccgccttatcaaatggcacccaaacgatcccgctgacggtttcaattaacaaccttgctctgccggtgggagcaacaagcgcggttgaaattatcaacgcctctacaaatacgacgcagtcactgccgttaaccgttacgccaaccggcacgccaacttacgcgccgggtgattataacggcgcagtcaaaatgatgtttgattttgaattgccttaa

SEQ ID NO: 154694 - DNA, 729 bp, Enterobacter cloacae
gtgaaaaaactgttagcgacagcattaatggccgtgagctttacggcaactgctataccgcagatctctgttggtcagatgtatgaatttattgaaagtgataagagcacgcttctgaaaagaatcatgaataacggtgacaataccgcctttattaaaacagaagtcagtgaaattacctggagcgccaatgggcaaaaaaatgaaaagcgctttgatgccagtgcaatatcaaataccaatgccgatggtctgatcgtgacgccagccagaatgattgtgcctgcaaaaaacatgcagccggcgcgttttatcgttacgggcaacagggataaagagcgttattaccgtgtgcgttttatcccggttatgcctaaggatcagtatgagtttggacaaactaaaaaagattttgacgattacagtaaaaaactgaatgcgggcgtcaatgtcctcaccggctttggcactatagcggtagtgcggccaaaaaactcaatatttaacactaccattcagagtgaaggaaatagcatcactattcgtaataacggtaatagcaccgtagtgctggacaatattaaacagtgcgccggaaatagttgttcggaaagcgcatccattattctcttgcccgggaagcagcatcaactccggaaagaaatgaaaaaaatctggcaatttaccttgctggaaggacgtaagaaaacgccgaaaacattcggatga

SEQ ID NO: 154695 - DNA, 1233 bp, Enterobacter cloacae
atgaaatacatctttatattgttatcctgtgtatctcttacacttatctttctaccgtcaggctatgctgcggaagttgttgtcaatgcagaatttaaaccgtccgccgcaaatcctgatgtggtagattttacaaatatcacgccatcaacaggattttgcgttggcgatcgtgccaaaacctgccctgagggcacgttttcaatcgacacggggattgaggtcgagaataaaatattaagaggtaccggtggtattttgcgggaacaaacatttcagaaagtaaaatccaactggcaatacgttactctgactgatgctgaaacgggcaagaccatcattttacagtttcgcattaccttattaggccaacgattttaccaccgcgataaaggacttttaaataaattgaacggcgctggtgcacttcccggtggtggatgcaccgggacacaaggatgggcgcttagtgacggttcctcataccgtttcgcatggcttcatccagacagggcttcttcaacatgtaaccgtgcgccggtatcatcgcttgatctagataatgtgaatatcgatgaagtctcgattggctatgaattaagaagtatcgccagcccattaacgttacctaacggcaattacagtggcggattccagtatacagtgggaaaagacaaggatattgatcttggggaaggaacctataacgatacctacctacaggtttatatcaatgctgaaatcaagcatgattttaaggccagcattcagggttctaacagtattgaattaatcccgccaggaggatggcgttcatggagtaatagcagtaagccgcagtttcgcctggaaggtacgggacagatcctgatgacggcatcctcacctgtcagcattacggcatattgcacgcatgagcagctgaagagctgtgcccttaaacgtgaaggaggggatgaaaccgttgccgttgatatcaacttctcaatgcctggagtgcatgaacgtgacacaggggaatccgttacccgagtggctatacctattaccacaccagccacgccgggcgtgattattgagccggataattatcttaataatgtcactggccaggtgcattttaccgttaatgaagtcgaaagccttaaaatggcatcgcacccgggctcgacctggaagggctctgcgacgctggtatttgacgttgatatcccctttttaccggatccctga

SEQ ID NO: 154696 - DNA, 1023 bp, Enterobacter cloacae
atgaacattgagcattccttctccgcctgtagtaacaataaaaaattattgctgcttctgatccgtcagtcgaagctgagctatacctcctgctgcgcctgctgccagtcagcgctcaatgcatggcacaacaataacgtggcgggtggaattgcgtgtatcgacgatctgcccgatgccgccagcgtcgaattgctgatgaagaacctgaaaaacctgcgctacgcaatggcagcagcgccacgacaggcaggaggcaacgtcattctggtctgtcagcagctctccagtattacgcagcaaagcgccattcatcttcagcccgcgatgttatcggaggtgcagcgtaactggatcatgcatgccttaaaaccgcgcctgaagcagcagcagcagtctgctgaactgctgcgacgcttactcaacccggccccgctgattgcgcgcattcgctactggcgcgcggctgattcaaaccaggtcctagcgtgtgaacctgagcctcacgatgccacaatctcatttctacgcctcaacgaaagcgggctggagatgcttgcaagctttcgcctgctgcaggagatggtgcaacagcaaatacacgcgattgcaccgctgtctctaacagtcagccttgcctggctttcccatgccagcttacccgagctgctgttccggacgctctccttctcacagcaaccggtgcagctggtactgaacattgacagcggcaacagcgatacgctgacagaacaggtccttaccaatattcgcgagctaaaacagcagggtctgcgttttgttatgagtacgcaaggacgttgcggtcactatttacgtctgaaaatgctctgtgatggcgtgcgctatgatatggcgacactcatggcctcaagcgatgcacaagccgagcttaaaatgcatcagcgagaagggaaatttatacaaattgacggcatcacttcagcggagcaatcgcagctggctggcgaactgggcggtgagcaattgctcagttattaa

SEQ ID NO: 154697 - DNA, 507 bp, Enterobacter cloacae
atgcgagttcatcttgttgccctcatcgtttatagcggatttttacccgcatatgctgctcaggaaacaaatagtgtggcgatgaccttatctggtaaggttttttatcccccgccttgtgttgtcacaagcaatacgattgaggtttcatttggaagaatattcaccgatgagattagcccttcaacggtaggcagtgataaaaatacaaaaaaaatagccttaggcttagattgtcagggagcaaaaaaagatcagcttaagattatggtcagcggtgatgccgcagagcaagacagtaatatactgaaatcggcacaagacggttttgggtttcgcttcgatgatgcttcagcacaaagcatcatgccggttaaccaatggtactcattcgacaaaaatagcgttcctgacttaaccgttacgccggtacgatgggtaaatcagaacaacctgaagcctctgaccattaataccaatgccacggtgcatattatgcacgactaa

SEQ ID NO: 154698 - DNA, 276 bp, Enterobacter cloacae
atgacattcaattgtgcggcaaataattacaccgggaaaataacaattgttcccggcgcgatttctacttttgatgagaatgctatcgcgaccaacctagcggggctagccataaaagtaaatcttgatgataaccgggtaaggatgaacgaggcgcacgtcgtcgatctcaattcggcgcctaaatacgaagcggtattgctaaaagacccctcagtggccttacagcctggcaagtttactgccagtgcgacatttcgtctgacagttgattaa

SEQ ID NO: 154699 - DNA, 504 bp, Enterobacter cloacae
atgaatagcacaattattcaaaataaaaagcagcgctttaccctcttcgtcgccttgttgagtttaagttctatggtgctagcatcggatgcgaacgaggttgaagtcagcattacaggtaaactgcattatccgccgccatgtaatgttacatcagaggttaatgttacgttcgacgatatgctgactacaaatgctaatacccagcgcaaagatatccctttaacgttaaattgtgctggcgcaaaaaaagatcaacttgcttatcgcgtcacgggacgcggcatgtccggcaatgtctggcagtggtttgaaaccggcattaatggtttaggtataggaatttacaatcaggatgatgctcaacttagaattggatcatggtattcgtttaacaaaaacgatgtgcctactttttatgccaggacgagacactattccaccgcagtgatagaaccgggtaatttctctgccactataacgcttgaaatcaaacatgaataa

SEQ ID NO: 154700 - DNA, 474 bp, Enterobacter cloacae
atgagaatattatccagtatctggctattggcgatagcctctgctacttcacaggcaaacagcaatgatctggtactcaatatcaccggagaactggcctatccagtcccgtgtaagttcagtagtgatacgatcgaggtcgattttggcgacaatttacatcacaatgcggttgacggcgtcagatatgaacaagtgctggaaacccttgattgcagtgccgctgcggtaaatgccttaaaattacgttttgttggagaaggggccgaattcgatagcgaggtacttaacaccacgcatggtgatttagccattgaaattcgtcagagcgggaacaagctggcgaatggtgaatggcttaattttaccgctacaccacctaaactttcggcggtacccatagtaaggccaggacgcgttttaacccccggtcagtttaccgctacggccacgctggaagtggattatcagtga

SEQ ID NO: 154701 - DNA, 534 bp, Enterobacter cloacae
atgttacgtaaaaaatcaaagcttaccttgcgccaactggcttttatcttttttattctcgggctgaatttacctgtttcaacggcacagtcttcagaagttgaagtgactttttcgggtactttattctatccaccgccttgcacgataagcagcgtggttaatgttgagctgggagacgttatttttgattcaacgagtgcatcatttataaacttacccgtttcatttaactgcgcttctgccggaaaaaaccagcttacctacgccatcaggggggaaggaatggcgggtgaccagcagtatgttattaaaacatccattgataatcttggcgtgacttttattgatgaaagtaatacggatgaggacgataatggacgggttaacatcagaaaaacctacaactttgataaggatagtgttccagaaatacgcgttggcgctttccacttcaaagctgtgccagttgatcggaaaccgattcccggggcatttactgcaattgctactctcgagattggctatcagtaa

SEQ ID NO: 154702 - DNA, 513 bp, Enterobacter cloacae
atgaagatgaaaatgatgccatcagcattgctgataacactctgctgtggcgtatcggcacaggctgcagacatagataaaaacgaagtcactattaatattaccggcaggcttttttatccacctccctgcgtggtcagcagtgaaaatattacggttccgcttggcgatatgacgacctctaaagttgatggcactgaatatatcaaagagattggggtgaccataacctgtaccgcagcgaaaaaggactcgcttaaactatcgtttgcgggcgatgctgcaacgggaacgggtgtgccggcagggttgctgaaaacaagctatgaccgactgggcattcgttttaaaacgggagcaactacgcccgtcgatttgaatattaataccgattttaattttacaaagacaaccgttccaaaactgtggctcgtcccggtaaaaattggtaccgcagaactggaaccgcgcgatatcaccgcgacggcgacattaaaaattcagcataactaa

SEQ ID NO: 154703 - DNA, 759 bp, Enterobacter cloacae
atgaaaaaacgtttaatagccagcgtgttaaccggcacgttactggcgacacttgctcctgtagtgaatgctgcggttgcactcgatcgtacccgcgttgtttatccgggcaatgagaaatcgatcagcctcagcatcagcaatcaaaacccgaaattgccttatctggcccaggcgtggctcgaatcggaggaggggaccaagctcaccggtaacgcgccactgatggtgctgccgccggttcagcgcgttgagcctaatggtaaagggcaggtcaaagttcaggcaatgccaggtgccgcacagctgccgcaggatcgtgaaacgcttttttattttaacctgcgcgaaattccgccgaaagcagataaaggcaacgtgctgcaaattgccttgcaaacgcgcatcaagcttttctatcgcccgacgccgttagcctccgcggccgctaatcaaagcaatgcgccgtggcaggaaaaactcacgatgagcaaaaccggtgatagctatctactcaacaacccaacgccgtattacatcaccattattggtgccagcaataaaaaagggggagaaagcgtaaaaggtttccaggccgtgatgattgcaccaaacggtagcgaaaagctcagcgttccggcatccagtttgggagcaacaccggtgctaacgtatatcaatgactacggtgcacagccggaactggtgtatcaatgttcgggttccagctgcaaagtggataaaggcgccagtaaataa

SEQ ID NO: 154704 - DNA, 2511 bp, Enterobacter cloacae
atgcgtatttttcgtcgttcagcgatgaatatttactgccgtaaggcgctggcggctgtgctggctggatcaataagctcggtccatgcagaggagatccagttcaataccgatattctggacgtgagagatcgcgataattatgacttaagtcagttttcccgtaagggctatatcttgccgggcatgtatagcctcgccatacagcttaatgaacggagactatcagaacaaaatatagattttattgtgccagacgacgatcccaacggcagtgaggcttgtttaacaacggatataattaagcaattgggattaaagaagagtgcattacgcgatttaacctggtggctcgacggtcattgtttgtcgacagccagtttgcccgggatggaaatccgtaccgatctctctagcgcgacattatatgtcagcgtgccgcaggcttatctggaatatagccatccggactgggatccacccgtacgctgggaaaacggtatttcaggcgcgctatttgattacaacgtcaatgtgcagacacaaaaacagaaaagcgccggtgcctcgcattatctgtcagcgaatgggaccgcaggcgtcaatgtcggcgcatggcgtttgcgcggcgactggcaagcgcgtcatgagaaaaccccacaccagaccgggactgagcaaccctggcagtggagtcgtatttatgcctatcgcacgctgggtgagatgggggcgagactgacgataggcgagaactatctcaactccgccatgtttgacagttttcgctacaccggcgtgaatgtggcaacggatgacgccatgctgccacccaacctgcgcggctatgcgccagaggtcacgggggtggcgcgcaccaacgcgcgcgtagtgatttcgcaacaagggcgcttaattaaagaagtacaggttgccgctggcccttttcgcattcaggacctgagcagtgcggtaaacgggacgttagacgtgctgattgaagagcaggatggtaacgagcagcgcctgcaggttgacacggcgactattccctatctgacgcgacccggcctggtgcgttacaaagtgacggtgggacagccctctgactgggaacaccgtttgaacggttcactctttgccggcggtgaatttgcatggggcgtcagcaacggctggtcgctgtatggcggactgctgggcgacagtcaatatcaggcgctgtcgctgggcgtaggccgtgacttaatgatgtttggtgccctttccggggatatcacagagtcacggatgcgccttgccgaccgggcgttgctgcgtgggcgttcgtaccgtttgagctactcgaaacgctttgacagcacgaacagccagataacgtttgcgggctatcgcttctcggaacaggactttgccaacatgaatgattatctggcggcgcgtcttcagggcgagtggtctcgttatggtcgtaataaagagatgtatacgctcagtttcaaccagtatatcgagccgctggggttgacggccaatctcaattacaaccaccagacctactgggatcgcccggaaagcgacagctatacgctgacgatgtcgcgaggttttgatttttggcgtttccgtaacgtgaatctctcgctgacgggatttcgtaataaatacaggaatgataacgatgaaggcatgtatttaacgctctccatgccgctgggcgagcggtcgcgtctcagctataacggcgcgtatacccgacgcgagcagcgcaacaatgtgagttattacgatcgtcccggcgataaccaaagctatcaaattggttttggcaaatcgcagctgcgtaacgaagtcaacggcttttatggttataacggatcgattgcggatgtgacggcgaccggcagctgggttgaaggccagtatgagtcatacggcgtgtcagtgcaggggggcgcgaccgtcacaccgcagggcgccgccctgcaccgcattagctcgtcgggggggacgcgtatgctgattgatacgcacggcgtgtcgggtatccccatcgctgattcaggacgcagtacctataccaactattttggtaaggcagtggtgggtagcttgaacgactattcacgcagcagcgtcagtattgatgtggcaaaactgcccgatcacgcggaagccctgcgcagtgtgtcacaggccactttgaccgaaggcgcaatcggttatcgcagctttgaagttgtgtcaggggataaagccatggcgtttattcgccttgctgatggcagcgtaccaccctttggcgccacggtgctgaacagcaagcagcaagaaacgggaattgtgagtgatgatggacacgcttatttaagcgggatccaggcgggtggaatcatgtcggtacgctggggcggcgccgtgcagtgcgttattacccttcctgctgtgctgcccgcggacatgagctctgagctgttactgccttgcgaacgcaagccggaaccaaattaa

SEQ ID NO: 154705 - DNA, 519 bp, Enterobacter cloacae
atgaataatcacaaacccagcgcagcatttttattaggtgttttatcattatttatacaacgtactgctcaggcggattttttaaagcatggccatgttagcctgcagggagaaatcctaagctccccctgcctgatcaatttttcggataatgctaaagcgtggaatgataaatatattgcctcagaagacgttaacaatataaggcgttcattatcgctggcaattgatttgaaagggtgtaacaccccgacgctgtctcaccatcatgcggacatcggttttgaaattttacctgctgaagctatgactgcacaggagactagcctgaactttccggacgttagtattcgtgacgcagcaggtaatgaaatagtgagcgggtatggttatcaacctgttcggcattcatttgacaccagagcattaaaatatactttccatttcaggggagacagcaggcttttgagggatggtttttaccgcccggcggtcaggttcagagtggattataactga

SEQ ID NO: 154706 - DNA, 555 bp, Enterobacter cloacae
atgaaattaacacgtttagcactggctgcggcaattgctgcatcaagtctctcggctgcacaggcctctaccggtaccgtaaacttctcaggttcaattgttacggcttcttgctccattgcctctggcgaaggtggcgatgccagcaatattgatatgggccagattggtaacgctatccttgaagccaatggcaacacgggtgaaaccgcgcctaaacctttcaccattaagctggaaggctgtgctccgggcactggtgcaaacaccgttagcgctaagtttacgggtgatgccgcttccgctgacccgaaaagctttgctttgaacggttcggcgtctggtgcgcatctggtattgactgaaaaagacggcactaaaatcggactgggcgaagagtccgttgctcagcgctttggtagaggtgatatgacgctggaatttgcagcaaagctaaaaggtgacggcagcaccacgggggcagatccagagttgattcccattgtgccgggggcattcaccgtgccggtgacatttgcactgagctacaactaa

SEQ ID NO: 154707 - DNA, 738 bp, Enterobacter cloacae
atgaccaataatgtaccttttaattacggcaatcctggacaagtttcagttccagttgccaatagcatggctaataagttttattcttcaaatatacctcaaggtcaaacctgggttattcataaattcgttgaggaagagacaggagatgaaaaaatcattgcatcctgtaccaaaacgggaagtccaggagcgtggaataaaatgagctgcacaggacagattaagcaatttcctggatgggctggtgaagccttaatcgccgggcctgttattcttcaactcaataatacgggcagcagaagaacaaaatggtgccactatttccgtaaaacggatggcggctggctcacaggttgtttagccgaaatacagcgagaaccctgcacgttttctacaacggcctctaacgtatcactcacaacctacgttgcaggcagtagagaagaccaggcaacagcggcggtgacatggtcatgcccgcagaacgaaagacccaaagtagaaatacttgaccaaacctattctgacgattgcaagacatctaatgagtatcaggatgtgaaaggcgggaacggagacaatattgcaaaatatcgcgtcaagctggagggagtttgtaataaccatacgcctgcttatgccagcaacggcactattactaccagaatatttggcaaaggcgtaagtgccggcacaggcacaacctcctttgtcatgcgtatatcgttgccgtga

SEQ ID NO: 154708 - DNA, 153 bp, Enterobacter cloacae
atgaatgacttgaaattaaacattccagacgctattctttcttccatgcagctttacttatctatcgatcccttcctcgtcgggcttaacgacgcggaagggattttttttacacttttcaacccaacgactttcaatgaggtcaggacatga

SEQ ID NO: 154709 - DNA, 2583 bp, Enterobacter cloacae
atgtccgcactttataaaaaatacaagcgtcgcaacaacgcaaaaaatcactttagccagattttacttctggcattctgcgtttcaggccaggtgtacgccgaaagcgagaaaaagccggtcaatttttctcgcggctttatgaatttctataacagcgggttggatctgacgcaattcgatggggtcgaaaagatccagcccggtgattataaactggatgtgataagcaacagcaaaaacagaggctcctggcccatcacgttcatcccggcaaaaaatcagcagggcgtaaatgcgtgcctgacgccggaaatgattatccgctttgatatagacacccgtaagctgcctgaaaactggaaaacgggcagctgtctggtgcttgaagagctggtcccgggctcccacgtcgtctacaaccaggaggacgagcgcctggaggtaaccgttcctcaggcgatgctgctcaacacgccagagggctacatcagcccggaactgtgggataacggcgaacccgcgctcatggcctcgtatgcgctgagtggctccagcacgcgcaaccgcgagctgggggagaccagcaactatcttttcggcaatttacagacggccgtgacgctcggcgcctggcgtttcgtcacttacgacacgctgaatatgggcaacgacattgccgatgaaggtgttgatcacctgcaggcgtttgccacccgggggatcgcctcctggcaatccgaagtggtgctgggcgatctgagtaccaccggcgatatgtttgataccacggccattcgcggagcgaggatcgcgacggacgatcgtatgctgccagattccgttcgcagctatgcgcccgtcgtgcgtggatttgctaacagcaacgctacggtcaccatcaaacaatctggcaatacgctgtatgaaaaggtggtgccgccgggcgagtttgccatcagcgatctctacgcaacgggttataacggcgattttgaagttaccgtcaaagagaccgacggcacgcttcacacctttacggtcccctactccagcgttccgcaactgctgcgtgaaggctatttccgctattcgctctctgccggggagatccgaaatacgtttctcgccgacgatccctggatgacggaaggcacgttgcagtacggtctgtttaataatctgacgggctacgttggcgcacaaaccgcattcgacggggattacaacgccctgctgggcggcgtggcgattaacacatcattgggcgcgttaggtattgacgtaacccgctcctacacgaacttttcgtcgggcattgaaaacgacgattgcggctcgctgtgcaatatgtctttgcgcatcagccttgctaaaaacctctcggaaaccggtacgaacttcagcctggtcggctatcgctactccagcaaaaattactattccctctcggatgccgtcagcgtgaagcaggcgatagaacacggcaacgataactatctaccggaacgctaccgcgaacgtctggaagcaaacattaaccagatgctgccgcctggctgggggagtttttacgtcagtggctttgtcggtaacgtctggaacgatcggctaagtcgtacagaaaaatccaactatgcggtgggatataacaaccagttcggcagctccaccttggggatttccctcggccgtaccaacagcgaggacggcggtcacgatgatacgatctatctgagcgtttcaatgccgctgggccaccgctatgaaaagcaggcccgactgggagcaaacttcagttacaacagcgatgaagccaccttccgtacctcgttaagcggttctgccggtgagcgctcgcagtatggtttcagcggctacttcagcgaatccagccgacctgaaacgaacttcggcaccaacctctcgtacgttggagatagcgcctccggcggcgtcgcgtttagccagtccctgcacagctttatgggtggactcaatatgaacggcggcgtggtggtgcatcgtggcgggatcaacctgaccccaaccttaggcgacaccatcgggattatcgaagccaaaggagctgagggtgctcgcgtttatcctgactccactgccgtcataaaagataacggctatgggattgtcggctacctcgccccgtataagtacaacgaagtctttatcgacccgaaaggcacctcgatgagcgtcgacgttgaggatacgcggaaaagcattgtgcccactgccggtgcggccgtgcatatcaagatggaaacgcagcagcaacagcagacgtttgtgcgatttattcatgcctccggtatagagatcccgtttggtgcacaggtgactgatgccggcaataactcacttggcatggtgggacaaagtggcctcgccatggtgacgctgtctgacgcgaaaaatccgctcacccttaagtggaataaaaataaggcgatgaacacctgtattgcagacgtgaataacgcttctgagaaccgtgctgctcaggatattaaaaacgcggctcccctcgatgcaataaatattacctgtaaaggtctttga

SEQ ID NO: 154710 - DNA, 1011 bp, Enterobacter cloacae
atgaataaatacatcacggcttcgctcagtactatattgctgtctctggcactcctgttttcatttgaagcaaatgcggcgctgtgccaaatggacggtgcggtaaaagtattaaccattaccgacaatatcacgctcaacccggcggataaaggtaccgcaggcaccatactctggtcgaagacctatacggtacctaatatcaaatacagctgtgacgcctccacgcaaacgcagtggcatgcagaatatagccgtagctacctcgccgcttcgctggataatgtctataacaccgagatccccggtattggcattcggataaaatggccggcaaatgcaagcaattcctggctaccgggtaactcaggcaaccctgttacctgtaacccgagctgttcaatcgacaatagctcggtactggttgagtttgtacaaaccagcaccatcgagcaaggggaaaccgaggttcctgcgggtgaaatcgtccatgtcaacgttaagccgttactcgccccggaagatgaactgcgtattcttaacattaatttcggagtaccgattaaagtcaatacgcgctcatgctctatttacccctctacgacgaacgtcgatttgggcacctacagcgtggcatctttccagaataacccgactttccagggcgataagaaagacttttctattaccgtgacctgtcccaccgttgaaaaagtgggtttaaccattgtctcgatgcttaattcaccttttggatcatcacaaggtttattgggcgtggagagcggtgaaggttatgcaaataatttcgccattctggtttccgaaaaattaaatccttatttttcaaacgctataacgcttggaaaagaatctgtttttgatgtcacctcacgcgtaaccaaaaactatcaggcacaaatatatgttcccacggacgtgaatcgggcgaattcattaagcgccggaagggttgtcggcgccattcaatacaccatggcaataaaataa

SEQ ID NO: 154711 - DNA, 1734 bp, Enterobacter cloacae
gtgtttcagcgtttatcaaaatatgcgctttttttggtgccactcattccggcggttcacgctgccggcacgctgccaggccagcaaaataaacaggagctggatcgtctggaaagaaaaaccagccagctcctgatcgaagaagccaagcgtaccgagcagttacttcagcagcagcgaagccagcgggaagccgaaaaggagagcctggccggtagcgactcgacgtggaagttccaaatcgaccacattacgattctggacgacacgcgatttgatcacgccccgcagcgacaggagattatcgagcgctatgaaggtaaggcgctcggcaaagcagaaatctttgagctggtaaaggagctgaccgacttttatatttctcgcggttatgccaccacgctgattggtattgagccgggaaatattaaaaccggaacgctgacccttcgcgtactgtggggaaaaattaacgatttcaaggttaacggccaggagccgtctttccgcgaaaacacccgtcttttcaccgcttatccgtttgccaaagacaacctgctgaatatgcaggatatcgatcaaatggtcgaaaacctgctgcgcgtttcatccaaagataatatcgaagttcagccatccgttctgaacggctactccgatcttaacctgctgcatgaagcggagtttccgctttcggtcgtggccgggctaaataactccggggtaaaagctgatggctggcagcaatattacggcagtctgaccgctaaaaatattgccgggctgaatgatatttttaatgcctattacgcgcagtataacctcaaaaataaccaagataatcaggatgcatggtcattaagctatagcgtcccgctgggctactgggctttcgacgcgttttattaccagtcaagctatgacaaaaccctcgccggatataacgacgattatgcgtcagccggggaatccgatcgcgcttcgctgcgcgtaagccgcatgctggggcgtaacgctacgggcaaaaccagctggtgggcgaaagtcgaaagacgtaataacgaaaacagcattgaaaaccagcaaattggcgtcagctccaaaacctacacctcgctttcaaccggtgtgacctgggttggcgcgctgatgaacggatggttctacggcgatctgggcgtgacggcggcagtgccgtggtttggatcggcctggacaaacgataccgacctcaccgggtttgataccgactacatgaagtacaacggcatcgccagctggacccgcccgcttttccaggccggtcgcctgggcggcgtctatgagcttaatgccggcttccagtatacccctgacgtccttgtcagcgatgccaaattaaccctgggcgatgaattcaccgtgcgtggatttaaagacgatagcctgctggtggatagcggtggctggatctcgaatacgctgcagtttcctttcaatattggtgtcggcggaatttaccagttgattccttattttggctatgacctgggatacgccaaagataattgccctgtcggtgccagtgtatgcgatagccagttcatgatgggcggctcggtcggtattaaagcgacgggaagccatttttcaacgtatgtcatggctggctggcccattaaaaaaccggattcactggaagaaaataccgtcgataacacggtggtttattacaagatggaagtaaatttctaa

SEQ ID NO: 154712 - DNA, 7881 bp, Enterobacter cloacae
atgcgtaaaaaaaacagatcaaaacccgcgcttacagccgggaacttacataaacatctttgtcctctgtttatatcgattgccggtattctttcggcaaacgcagaagccgctacggtacccgatacaaaccaaagcaatggcccgaccatgggacaagcggcaaacggaacgccggttgttaatattaccgatcctaacgcaaaaggcgtatcgctgaataagttcgaccagtttaacgtcgatcaaaaagggctgattctaaataacagcatgcaggacggcgtatcgaaaatcggcggttatacggttaaaaacgcccagctggaacacgaagcgaaggccattatcagtgaagtgaccggcgcgcaggcatcctatattaacgggacgatggaagtcttcggtaaaaaagcggatgtaattattgccaacgaaaacggcataaacgttaatggtgccaccaccattaacgctaatagcctgaccctgagtaccggtaaagtccaaattaaagaagatggcaactataagctcgccgtggaaaaaggcaacgtctcactgacgggacagggtatttccaccgatgggctgagctattttgatatcgtcagccgtagcgccaaacttgaaggggaaatctccggcaacgcagatatcaaaattgtcgcaggtcagaacgattacgatctggccagccgcagccataccgttcgtgccacgggcgatcggagtgtcccggatgtcgccattgatggccgggcaatgggctccatgtacggcggtaagattcagcttatcagcaccgaatcgggcgctggcgtgcgccatgagggcagtattattgctaccgacgacatcgacatcagcgcgaacggcgacgtcaccctaacaggcctgcgcagcgataaaaacgtcaacgtcagcggcaaaaacattgcgctcaacaagaacagcagcggcgtgggcagtactgaagcgcagcaggatatcgtactgcgtgcactttctggcctgacgatcggtaacgacctgatctcccggaacggcactatccgcattgatgcctcaaccctgctgcaaaatagcgcggcgatcgtggctaaaaacagtgccacaacggcagtaccggctatccagattaacgttgcgggccagtacacgctgagcggtaaactcaaggcgctggatgctaacggcggcgttatttccggcggcgtggtgacgttgaaagatggcgactttgtggtcatgaaaaacggccagcaggttgcattcagcagcatcgtttctgataccgaaattgtgagcaatagcggcgatgtgaaaatcaacgctggcagcctcaacaacaacgaaggcgtgatcctcgcgaagagaggcaccctgcagatcgatctgaacggtgcgttcgaaaacaacggctccatcagtgcaaccggcgatattcgtattgcctccggttcaataaagaataacggcattctgtatgccaccaatgcgcagaccctgacggtcggacgcctcgacaacgccggtcgtctgtatgccgataataacctggtcatgaccgccagcgcccttaataacagcggccgcatcggtgccggtagcggtgaagtccgcatcaaatccacaggcgatatcagcaacagcggcaccctgagcggtgacgatgcgctggtgtttattgatgccgacggcaacatcgttaatgacggcaccatcgccagtaacagaaacgacgttaccctggcttcaggcggtcagtccgtcagcaacaagggacgtatcgaagggctgaatgtaactgccaggacgagcaacgttaacgccaccgtcagcaacagcggcagcatcaacgccggtgagcagttaaccctggaaactgccaacctgaaaaaccaggccggcacgctgagcgccgccaaagccatgcagctgaaggtgactaaacagctccacaacagccaaaacggcaccatactggccggtaaaacgcttaccgtaaccggcagcggtgacttagcgctgaacaacgaaaacgggaagatccagggcgagaatatcaccgccaccggtctttccagcgttaccaacgctcacgacgcgctgctggcggcaaaagagaacatcacgctctctgcaacatcagtacgaaatgatgccgcgaccattcaggccggcagcctggtgcttgatcgcatcgataccgttgataaccttaacgccgccacgctttacgccagcaacacgctgacgctttcccacctgaatacgctgaataacgacggtggttttgtgatttctgacggtaagctaacgctgtcggatattcaaaccgttaacaacactcagggtgcaaccctgtttggcgctggcgataccacgctgaagaacctcggaacggtcaataacagcggcgcgtcgctgattaagtctgatactgcgctcgctgtcacctccgtagacacgatcaacaacagcagcgatgcggtaatcgcctcttccggcgatctgaatatcaacgccgtgaagacgttaaacaaccagtccgtgatggtgagcaacggaacgatcgcgatcgataccgttgacgagctgaaaaacgaaggcgtcgttcaggcaggtgttgatctcatcatccgcaatatcaaagagctgacgaacaacggcgaagaccacgttctggttgcgctgcgtaatctgacgattgaagatgttgagtcactgaccaacggcaacggcgcgattatatccgctaatatgaacatggtgctcaatgcaatcggcatcctgaccaaccacacagccgcgattatgcaggccgttgacgggtcgctggatatcgtggccgataccctgagcaacgtcggcaatattttaagcgaagacgggcagcagtctgtgtcaaccatcgtggcgggtggggacatcaacgttgatgccatgcatgtatacaataaagatcaggccgttattgtctctacccaaaacgatctgtctgttgatgcgaccttcaacgtggttaacgccaacggcggtatcctctcaggggcaaacgccaccacgctgaacgtcgagaatggcaccgttaacaatgaaaacaacgcgctgattgccgggaataacgtcaccatcaacgccgcccagttgaataacaccgtatctgcagcagcgatcgcccgtaatgatttgacggtgaatatcggtgcgctgaataacatagacggcgtacttgaagctggccatgatctattcctgaaggtcagagactcgttatcgcttaacgataacaccagcaatatccgagccgggcatgacatgaccctcagcacgcagggctcgctgtttaacaacaccatgatggaagccaaaggcaatctgaacctgcacgctgacggcacatttgttaacagcaaatcggtggtgacgggcggggatctgcacattagcgcgaagaacgttgccaacaacagcaattctctgctctggtcgctgaataatctggagatcgatgctcgcgaaggcgcgtttgtaaacgactataccggtaacgtcctgagcatgggcgacatgtcccttattgccagtaccatccttaactacgccgggatcattcgctccgaacaaaatattaatattgatgcagcgtattttgaaaaccagagtacctggacagggggcgatatctctcagacccagactcaggatacggtaggccagtggtccggcattgataatgtgatgacccaggtgagcatcacaacagtactgcatattccggtactgtcgtccgatatcgccatggataaactcggcgaaatcagcgcaggtaaagatattaatatcaaccagcgcggtattttcgacgagaaagagatcaagaacaccggcggcctgatccaggcaggacgcgacatcaccatcaccggtaatttgctgaactccccgaaatatactgcggagtctatgtatgattatctcaacatcacgcttgaagaccctattgtcctgacggacttctggagagtgggcgtcgaccactacaccacgctgaccttcacttcgctataccagtacctcaatttcatcttcggtgacggccagcctgcaaccaaaaccggaaaagaagatcccaaccgtgagcgtagctataaatcgctgatcgacgcatccaacacctccacccagctcagctatgtgatgagcaaagtgtttggcgaaacctggaacgctcaggaattcagcacgctgagcagcgcctggcgcagcctcacagagagctcatacaatccgttaagacaaaatatgatctattttgtgccggcggaaaaaggtgaaatcacggcgggtcgcgactttattcataacggcggcacgctggataacggcctggcctacgctggcatcatccaggaaaacgcaaccgttcagaatattgatgtgggcgactacagcgtggatacggtgattgcgggctacgatatagccgtgaacaccaaaaccgtggaagaactggcgatgggtattagcccgctgccaaccataaaagatctggtttcgctgcctgggatgttcgaagtcacgaacgagtttaaaaaagcgtcggcggctgagaaaaacggcaccgaatatcacggcccgagcaacaatatcatcccgattttcgaaacccgtccggagatgatcgaccagagccagtacagcggttctgactactatttcgatcaggtggattacaccgcaacggagccggttaacgtcattggcgataactacttcatctctgagctgatccgtcgtgagattagccattccgtcggcagtatctttgccgtacgtgatgggctggaaggcgatgcgctggtccaggagctgatgaacaacgccggtgtagccgcgaaagacagcgaactgaatctggtggttggtcagcctctcagcgaagaacagcgcgagggtttaactcaggatatcgtctggttcgtcagccagaatatcaaaggcacggaagtgctggtgccggtagtatacctgtgcccggaaacgcttcgtcagattgaatccggcgatgtgaccaaaggcacggcggccattgccgccgggaattcgctttccgttgatgcgacagccgtcaataacgttaacggcaccctgaccacgcagggagatatgtctctggtggcacaaggcgatatcaagaacatcagtaacgcgactgacgccggtatcaatgcgggtggcaatatcagcatgacgaccgtcagcggcaacattgcctctaacggggcggcgatcaatgccggcggcaacgttgatatggcagccgaaaatggggatatcaccctgaccgcttccgtagggcacggcgaagacggcaagcaggttatccatgcgcatgacgacggcgttaccgctggcggcacggttaacatgcaggccaaaactatcacctccaatgcggcagatatcactgcaggccaggatgtgaatatgaaggccaccgacggcgacgtcaccttcaacgatctgcaccagattgatgccaaccgtaccgtagatacaaccatcaacggcctctccagctacaccacaaccgataaaacaacggtaaccggtgaagcggttggcgcaaccgtcacggcgggcggggcgatgaacatcgacgccagcaacaatgtggtgatggaaggcggcagctacacggccagcacgggggccatcaccggcgcgaataacgttgagttcaaaacctcggagaacgtctctctgacggaggaaaccacccagtctcgcgagtttgttgccgaagccagagccagtgcagccggtcatacagcctcaagctcgtacggtaaaaacaagggtctggttaaggaagccaactccggcgattacgacagcgcaggaaacgactccgaaacctcggcgataggcgctaaaccgggtcgcgcaccggttaccgacacagcggccttccgggtcggcatggtagacgtgaccgataccgtcacaacccagacgaaaaagaacgctaacgcttcggttaacttcggtgatagcggcacgatcggcgcgggtaaaacggctgatatcggcggcgctgatttgaatgcaggcggaacgctaagcatcaatgcacaggatgtcgccagcaccaaacgtctggatgaaaccaaatccagcacggcgcataaagagagatttgtcggtatttctggcgaagtgcacagcaccattgctgacgccattgataaaaccggcaacctgatcgagaaagcgcaaaatggccaggcgatcaacgcgggtacgactaccgcggaagtgctgggcgatgtatctaacgtgctgcttaacgatctggcgggtgcttccatcaccgtcggcggtacgtcgacaaagaccaccgagaccacgacgaaaacggcagaaaatatctccagtattaatgccggtaacgtcagcatcaactcaagcgaagacaccacgcttaacggcgttaacatcaactccagcacaacgacgatcaatgctggcggcgatgtctcaatgaacgcagcgaagacaaccacggaaaccaccacctccagcactcagcataagggcggcgtcaccgtgggcgcgggcgtctcgctttcaggcggcagcagcggcgtttcggttgattacagcggcaataaggaacacggctccagctcgtccacgtctcatcgcaataccatcatcaacggcgacaatgtcaacgtgaacgcgggtggcgatctgaacatgaacggtgcgaacgttgctgctcacaccgctgatgttaacgtggcgggtgacatgaatgtcgtctctcagcaggacaccgagcacacgggaagcagccgtacaaactggggcgcatctgtgggtattgccgtttctggtgcaggtgtagtacctaccgttgcaggaaacggtggcggcggctccgaaagctacgactcggcgaaaaccaccacccagtcgggcatcaataccaccggcgagatgaacgtgaaaaccggcggcgatctcaacatgaccggtgctaacctggtgtctcaggatggtaccggttcggttgccgtggcgggtgatatcaacgcgaaaacgctggaagatcgcgttgaacaggatggtatttacggcggtgctggccttggctttggtggcacaccgggtcaaagtgccggtattccgtctgccaacctgtatgtcgataccgtggatgaaattcactataacgaaacgcagaaatcgaccattgcagtgggtgaaaccaccagcgctggcgttaacggcgaagtgaatagcaacaaagacgaaatgtcagtggtcacgcgcgacgaaaaagaggccggaaacaatatctcctacacgcttgccgatccaggcattcgtaagaagaagaaagcggacgcagatattgataccgacacgccttctgttccggatgaggttccgtccggtggcggttgcccgcatacctgcattccggtaaaaccgggcagttcgtcgcagaccaccatcaaaaatacgacgaataattcgcagcatgcgaccacatcaacaacggtgaaaacaacagagacgatcaacgcaacggcggcatcatcttccttgcgcgcagatagcgtggcaacgaacacggtgcgcagcgaggccgttcctgccgtcacgccttcccaggcgcagccgcttacgccgaaagagagcacgtcagccgcgaagaaaacgcctgcaaccaccacgccggtgaaaaatgggcggtaccggatacccactatccagtgctctctcctggctcctctaccgcgaaaaccggtaaagacatgcctaaaacaccggaacataagcagtggaatggcgacatga

SEQ ID NO: 154713 - DNA, 645 bp, Enterobacter cloacae
atgtttacatttcagattcgctatattgctcacccaggtatttatctgtcaggtatacgaggatgtctggacaatattgtccacaatcaatcgcaccgggagtactgtttttctccatatgtttttaacaaaaaggaagagatacaccttctggttattgatgccacgtgccacgaaacgattaatgattttccggttgccgtgttggatttattaaaacgaagatccacgttaatgctggttaacgcgttacagaaaatgctcattgaacagcttgagaaggcgcattgctgctctgtgctttgtgtcgatgaaatgactttcgacatgcgggacattctggaaatgacgatgcataacaaacgatacctgagccctttggtgatgcgtatcgggcagcaacgcgatccggaagatgagattgcgcttacgccttctgaataccaggtcatgaaatatttcggcaatggattgagtggcgtagaaatatcgaagcgcttgtttcgcagtgaaaaaacgatcagcagccataagcgcaggatcatgaaaaagcttggcgcaaggagtgacgttgagctttgccaaaaaattgattcgctgaaaaataagctacgttttgcgagcgtcagagccggagagaaatag

SEQ ID NO: 154714 - DNA, 603 bp, Enterobacter cloacae
atggactgcattcgcccggttaaccgggtcattcttttcgagcctcgggcattagtacaaaaagggatatgtctctttttacgcgatcaacagtgtgaaattgtccactgctggtctttggaacaactttccgcagcgctttacgatcgtaccgatgccagaaaaattctccttgcaggtatcggtggccttggaaatatgctccctggctttatccgcactttgcattatccccgggcaatgcttttgacctcatttgtttatttgtcctcccgggatgcgttactggcaaagatgctgttgggcgcaggcgccgatgtatgccttgacgaggctgagcttgaaagcgcgctgcttgcacagcttgctgcgcctgtaaccgctcaacgtcgcgatgagcggcttaccgcatcagagcttaatatactgctggattacgcctgcggcatgcaggcccgggagattgcggcacaccgcaagtgtagctacaaaacggtgttcacttttaagcgtaatgctcgactgcggctcaatatagagaacggcttcggattgagacgtttaatgctgcatctctcattgctcatctcacggtatgaatga

SEQ ID NO: 154715 - DNA, 657 bp, Enterobacter cloacae
atggggaaaaaagtaagtgcagccgcagaacgttcgtgccaggaatctaccattaccgttattacgactgataagtacttttttctggctgtgaaatatttaatacattcgatgttgccagagatcctgagtgagaaaggcgtactttataatgttgtgcattgcgaaagcgtatttcatatgaactatcaggataaaactctgaatgaagaaagtctgcttatagctgattatgatgtacgtttaataggtaattcacatgtgctcaagctaatgcaggggatgaaaatttttcgttctatcatgctggttatccataaagaacttccactggcagatgttgactgttacttgtctaagggagcatcgcttaacgtgattaaaaaaaacctccgggattttatactgcgaccatgtgcagcgaaatacatcagtaataatcagttactggcacgctttacatcgcgtgagcaccagattattcgcatgatcctgaaaggtaagcgcgttgacagcattgcaaaagcattgaaggtgagtcctaaaaccatttatacgcatcgttcacgcatctatcaaaaagtcggcgtgcgtaatctgcaagggctttttcagcatgaagggctgctgacatcgcagagcgaatggtcaagctga

SEQ ID NO: 154716 - DNA, 558 bp, Enterobacter cloacae
atgaacatgaaaaagacctttcttactgccgctttaataactggggtattcggtacgcaggcacaagccgccgatgggactatttactttgaaggtaagctgaccgccaccacgtgtgatattaccgttgacggtcaggcttcaccggcaaccgttatactgccggaagtcagtacctcacgtttgcagactgccggtgagactatcggcgacactggttttagcattcagctggccaactgtacgggtgttaccagcgcgtccactgcggcggccttctttgaaaatggctccacggtagacacaagcacctttaatctactgaacactgacgagggcgtgaccgatggtgcaacgaatgtccaactgcaactggttgacaaagtaacagaactgccactgcaggtgggtaacaccagccagactgcaaacaccacacgcattgatatgagtagcggttccgccagcctgccttataccgtgcgttactacgccatgggtgcaacgacgccaggcacagtgaaaagtcaggttaacttcagcatcgattatgaataa

SEQ ID NO: 154717 - DNA, 714 bp, Enterobacter cloacae
atgaatttcaaaacttcctctcgtctttttattttactttctgtgtttattagttttactgcacaaagcgcagtgattatttcgggaacccgcgtcgtatatcctgagaaagataaagaagtctcgctcaaaatgacgaataacggaaaatcaccggtattaattcagtcctggattgattctggcgaacgcgagtcccgtccagacaccgcgcaagcgccttttaccctgactccgcccatcaaccgcgttaatcctggaaaaggtcagacgttgcggatacgttataccggtgagtcgctgcctaccgataaagaatccctcttctatcttaacgtgctcgaaatccctgcgaaggtgaataacacagaaggtaagaacatgctgcaactggcatttcgctcccgcctgaaagttttcttccgtccggccggtttagcgataaacgcaagcgatgcccaacagcaggttaaatggtctcgactgggcaccaccgtaaccgccaccaatcctacgccttattttatcaacgtggcttattttgcggcagatcgcgaaggaaaagtgagccttggcaacggagggatgatagcaccaggcgggacaaaagcctttacgctcagccgcaataaaggaaattactttccattcattatcaatgactacggcgccatgcgtctcgttgagcccgaaaaaagtagtgccacaaaatag

SEQ ID NO: 154718 - DNA, 2550 bp, Enterobacter cloacae
atggaacggaaccttaattttaagattaacggcacgctgaagctttgtccgttagcgattgccattgctacggtcttctttcctgtcgcttatggtgctgatacttcttttgctgaatttaatacccattttattaacccggccagcaaaaaccttattgatattacccgctttcaggaagacgtacctttgccggggaaatataacgttaatgtcatcatcaataataatagcatgggtcagtatgatcttcaggtatccgatggttcaggcgtgacggcggaaggggaaatatgtctttcgaagaagaccttgattaacctggaactggatacgggaaagctttcagatgagtcgctgaaattactgaataatgcggatgatgaagagtatcttcccattgagaagatcctgcccgaagcacacgttgagctagatactggtgagcatacgctgactttgtcagttgccgatatttatctgattaaacgtccacgcggctatgttaacccggcactgtgggatcaaggtatcaacgccggcatcctgaattacaacaccaatttttatcgcaatgtaacgcatagtacgcaaagcgacgcgttttatgccggtattaacagcggtctgaatatcatggggtggcattttcgtcacaatggtagcctgagttggcaggataatgttggccgtcactaccaatcactcgatacctacgttcagcgtcacattccatcgttaagcagccagcttactctcggagatgctcacacgaccggcgaacaattcgatacgcttgcctttcgcggcattcaactggcgaatgccgagcaaatgttacccaactctcaacgtggctatgcgccgttaattacgggcatcgccaggaccaatgccagggtgaaagtgatgcagcagaaccgcctgctgtacgagactaccgtcgcgcctggcgcttttgaaatcaacgatctctaccccaccggctatggtggtgaacttgaggtcatcattgaagaagctgatggttccgtgcagcgtcagagcgtgccgttcgcctcaaccagtaatcttctgcgtccaggcattacccattacagcgcaactctcggtgcgcttcgtaaaggctgggtcgaggatgaaccgcttcttgctgaatttacctggcgacgggggatttccaatcggttcacggcctataccggcattcagggtaatgaagattatcaagcggggcaaatggggctggcgctgggcacctctgtgggtgctttctcattcgatgtgactcacgcaagaatggtgctaccaaaggaatatggatcgtttggccgaacgatgtctggtgaaagctaccagctgaaatacagccatatgatccagcagaccggcagtaatatcagcgtggcggcctatcgcttctctaccgacggttatctggattatatgtctgccatgcaactgcgtgagacgctggatcacaatgtcagacaggaagaactgtaccgtcccaaaagccgactggggataacggcaaaccaacggctgccggatggctggggtaatgtatacgccagtctctatcaacaggactactggaaccaacatgggagcgatcgtcaataccagtttggctataacaaccacatcggcaggttcaattacagtttaagtgccagtcgtaaccgcaacggcgaaggtgattatgagactcgctatatgctgagcatgagcattccattctctggtgagagtttgttcagccaaatgtcgatcaaccttaaccgggataatgacggtcgaatgcgtgaacaaatggggctgagcggcaccgcgctggagggtaatgcgcttagctatagcctgagcgctgcccatgcgaataatggcggctccactagcggagcctttaacagctcattgcgcactcctgtgagtactattcaggccgctgcgggcacggggaaaaattatcacaacttttctctgggcttaaatggtaccgccgtactgcacagcggtggcattacgctttcaccttatagtgccgatacggtcgcgctggtggaagcgaaaggggcgaaaggggctgccgtaagcagttatcccggcgtaagtattgaccgttttggctatgccgtagtgccctatctcaacgcctggcaaatgaacgaagtgagcctcgatccgaaaggcttacccgacgatatagagctgaacatgaccagtcaaaaagtggcaccttacagcggcgccgtggttaagctcagctacggcactaccatgggcacaccagtgttgatagtgctggatgatgaatctcgcgtaccgttcggcgcagatgtattcgacagcaaccagaatattgttggtgtggtcggccagggacgacgcatctttgcccgtctgcctgagcaaagcggacagctgaacgtgcagtggggcaaaaagccgcatcagaggtgtctgcttaattaccagctaccaaaccgtcataaagcaaagagtggcgacatcctaaccctaaacagccgctgcgtgtcgcagtga

SEQ ID NO: 154719 - DNA, 1266 bp, Enterobacter cloacae
atgagtaagcaacaccgatttttacgaaaaataagtgctatgagcgcaatactcactatcgccctgttctactgcacatcggccaaggcgttggtgacctgttctggtgtccaggtaaacaacatcagcgtaccgggggcgcccgacttcagagacttcagtattccgatcctcggcagcggtattacggtcagcgcccttcgcgatctgcccgtaggcgaagaattatttttacagcatatcgcgcgcgtccccgcaatatatcagccaatgcgctacatggattgtacctctgactcgagcggtgcaagtaccttctccatcacgtcgaaagttgaatttgaaggagggccgcctgctactgccactacaattaatggcagaaaagtttacgaaacgggcattcaaggtataggttatagcctgacccatggcactagcatcaccacggcggtggatcttccgaggacgcaggaaacggtgctgagcactcaagtagcctctggcggaatagcactcgctcttagcaacggctatttgtatttccgtctgattaagactggtgatatacccgccgggacatggactgttcccatcaatattccagcaatcatcacatgggctgaacccgggcaaaatatggcagcagactttaaccttaacagcgatcgcatcactatctctggctcaataaatgttgtcgcaggaagctgtcagacgccggatgtaaacgtacagctgggcgagtatgaaataaccgatgagattcaaagatctaactggagctcaccgtggaaggaattcaacattcagcttattaattgcccggcgatcgctgggcgttacgctgataagagcgcaaactgggcaggggaagggagcagcaatacttatgtgaacgatcctgactatccgggcgtcatcgcgtatcggctggatccggttggtgagacaggatttacctatgcgggcgaaacatgtctgaaaaccgatcctaccgctaacggtgctgaaggtatttgtatccatatagacgatccagcgatagaaaatggaatctatacgaacgcgcttgacagctcatttcataactggcgtggcaaagcttttttaaatcaatattacattggcagtaatgccaccagttatactatccccctcagagcacgctactcccggcttagggccgcctccggaagcgcagtggttcctctgaaggccggccccgcaaatgccgctgcggaattcacaatattctatgaataa

SEQ ID NO: 154720 - DNA, 129 bp, Enterobacter cloacae
atgtttatcaaagggcggcggcagggtaaggaaaatctgcatgaaagggtctgcgccctgttagcgttgaacagtttgcgctgctgctggctgtcgccactggcggacgtgctcgatcagggctcttag

SEQ ID NO: 154721 - DNA, 159 bp, Enterobacter cloacae
atggcgacttttaatacagaactcaaatatctttctcgttatttcagacaaacgaagcatgcagaacgcattttatttcgctggctttatttgagcccggaggagcgtattgcgcgtctgcgcgagctgatgatgccggtcagcgaacatgagcggtaa

SEQ ID NO: 154722 - DNA, 345 bp, Enterobacter cloacae
atggtaccgcatggattgaatgttggtttcaacacgactgaagataacttttctattgggccaagggtgctgcattttttgcaaggctatgattattcgcctgttgagattgttcgcggaggtgaaatcataaaaaattactcgctcagctgtgatgagaaatatgcggggctcaatcctacgctagataaagatgtgattacgatatctgataaagggaaggcgcatatgtcagatgtctttgaggcgattcgtatccactctctcatgtatactaccctctacagttttgcctgccgggtaaacaagctcacttacaccgggacaatccaggtaaaacgctaa

SEQ ID NO: 154723 - DNA, 492 bp, Enterobacter cloacae
atggcaatccctgcttatttatggctgaaggatgatggcggcgcggatataaaagggtccgtcgacgtcgttgatcgtgagggtagtattgaagtattaagtttttctcatggtctggatattcctgtgagtggcaatgatggtaaaattacaggaacacggattcataatgcgatgacgatcggcaaagaatttgatcgctcctctgcttatctctacaaggctgctgcaacagggcagacgttgaaatctgctgagcttaagtggtacagaatcaacgatgcggggatggaagaagagtacttcaacatctttcttgagaaagtcaaaatcgtatctattcatccgttgatgaacaattgcaaagacccagccacttcacatattaaccatatggaatttattagcctgagatatgatacgatcacctggaaaaattgtgatgggaatataatcttcacggactcatggaatgacagacgaaccgcgtaa

SEQ ID NO: 154724 - DNA, 408 bp, Enterobacter cloacae
atgccattcaaaacggctactaaatggattcatcgccttgtgacattatcgcttttagctcttgtcattggatttttttggctcaaccgccagcccaaccggcaagcgagcgatgaacttcaacgtgtttatcaattatctgaccgcgtctggctctatatgaccgtgaacaaccaaggcggcgcaaccgtgccaacaatctaccgctactatctctcgcaaaagatagcaggggaagatactgacattatccatcagctcgctatgaagcatccggtcattgaaggtacaggcacaattacctctgccagcattgatgtaaacggagaagtgaaaattacctatagcgggaagatcatctcgatcgaagatactgtttcaaatctccagttctcagttaagccctga

SEQ ID NO: 154725 - DNA, 549 bp, Enterobacter cloacae
atgaataaatccgtcattgccatgggattattattggctgccgctgccagcccttccagccatgcggcagatgcagttcctggtaagggtgcagggcaaatcaatttcacgggcactattaccgagagcacctgtgatgtcgatattaacggtcagggaggtaacccaacgatccaaatgggcactatttcttcttctgcatttaagcagattggtgatgttgcaggtgctcaccgaatccaaatagatctctctaattgtcaaaccgcccttacagcagccaagacacgatttagtggtgcctacgatcccgtgaatcatgatctgcttgcgcttaaaaaggatgatgcgacagcagaaggtttgggaattgaatttctgaatgaagatggaacactgttgaaactgggtgagaatccaaataaatctgtccctattaccgatggcaccgcctccatgatttattctgcacgttataaatcaaccgctgctacagtgaccgccggtgaagcaaatgctgttgcggattacaccattatctataactaa

SEQ ID NO: 154726 - DNA, 495 bp, Enterobacter cloacae
atgaacctgaccaacttcctgccctggcgtcagcagcggcgcgcgcgatgcctgcgtttctggggcggcgcgtttgtcggcacatcgctgctcgtgctggtggccgtttttagcatgaggatgaaccatctgataacgctgcgcgcgctgcaaacgcaactggcgggtacgcagtccgtacagcgtggccttgtgtctcgccagcgacccaccgcagaggcgcagaaccccgcgggcacgccgccgcgccgcgcatggcaaccggtgctggagtcgcttgctggcgccatgcctgcgcaggtatggctcacagagctgcgttatcagcctcctgctctgatgttaatcggatatgccaccaccctgccggcgctttcagccttgcgtaatgggctaaagcacatagacggctttacgcccgggtctgagggggaactccggcaggatagccaggggcgctggatgttcactctgcacttgaaaagcgaggggtaa

SEQ ID NO: 154727 - DNA, 1116 bp, Enterobacter cloacae
atgaaccaaagaacagtaaatgctttgttatcgagagggttagccagtaatcttgctgaaatcctttcagcaaagggattcactctcagaaaactacaacaaaccaaggctgaaactcttcttgggatggggttatctaagaatgacataagcaatattcatgctggtgatcgccctcctataccagaggatacattgtttagcgttctaagcagcaatcgaagaacttgctgcgtctgctggcggcaaaataagccgattattgtacaccatattaaggagtgggcggtctctcgtagtcactcaaaagaaaatttagctgtactttgtttggattgccacgacttagctcatacgaagaagcagctaagtcagaatttaacggtaggagagctgaaaagacacaaagctgagtgggagcgtattgttggagaagagaaaagccgtacgcttttgaaccttaaacagtccggttattcagcccgttgggattggataaattgccgccgccttttcgagttggtgaatcgtttaggtatcaatatcgatatgacgaacgacgttaatcatctaaaagacaaaggtttcgtagatggaagaggcttcctaaccgatgatttgcaatgggagctggacaagagtaggcgagattattttcttgattttggttacggattctcagttgctaattatcttgatgggctccttgaggcagtaataggagagctacctgtggttgatatcacacctattcgcaacaaacgacgtgagatcaaggcacttgtggaaatgggtagcttcatttccattcaggcacctttcaattttactactatcactgacggtaaacctgcctcgaaggaagtaaaaacagcttattgccaaggctatggtttaagagtggagttcacattccaaccatggtactgcaccagttgtagcgcgaagcatagtggtatggctggtcgtcgtgttcagactgtttttggtttcgtgcgtgatattactactacccatgatggcgaactcgtaatctctctttcttgtctgggcgctggtactggatttaaaaggcatgaacaaagggtgatttcagattttgaaggttattactaa

SEQ ID NO: 154728 - DNA, 690 bp, Enterobacter cloacae
atgtccgtagatctgcttttccctcccgttcaaaaaataaccagccatcgtgatgatggccgttactcacttatccatagctctgaatatgtgcttgatgggcttgtataccgtttgaactatgattcgatgaagaaaggttatcatccgatcaggaaagaaatcattgatgcattcattaagcagttacaggctatgcaatcgcactacagtaagatttttgctttccgatttgacttatcagtgccggaagggatgcacgttacggaaagtaatgtcttagtgagtaatctttttgagcggctgagaggtcgtttcaaaaagaaggcgtggaatgaacagccgatcaaaaaatttgcttatggctgggttcgagaaaagaaagctgctaatcaggttcattaccactgctggattgcattaccttacttccaagttcaaactgctggctttggtaacacaggcatgattgggttgataagtgagctttgggatgaattaacagacaatatcagtcgggtgcatttagccgagaatagtcgatactctgttgtaaggggtgatcacgatagtcttgtggattttgttgagcgtatatcgtacctcgcgaaaaacagcggtaagttttcatctggggaagggcagaggatcttttcaacgtctaagctcagaatgaaagagagtaattaa

SEQ ID NO: 154729 - DNA, 234 bp, Enterobacter cloacae
atgaaaaaaagattcataaccacgctgacgcttgccgctattttgatctcgcctgcgcacgccattagtgagaaataccgtgcccagcttgaacgctcgggatgcacgcaggttaaggacggtaacgggtgcgatattcacaaaaccaaagcggcagcggagttcaatctgcttcaggaaggttttggaagctggttaacctcaacacaatcaggcgcaattaagcgtcactaa

SEQ ID NO: 154730 - DNA, 1530 bp, Enterobacter cloacae
atggaaaaaagaagagacgactttctgaaacctgtaatcaggcttttaaaagagtgctccggttataaatgctcaaatccgcaatgtcgtgttgtgactaatggtgctggattaaatacaggagttgctgctcatattcgtgctgctgctccactagggccaagatatgatgcgactatgactcctgaagaaagaagatcatatcagaacgggatatggttatgtcaaacatgttcaaaaatgattgataatgacgtgagcttttacactatcaaccttttgagcgaatggaaacgtttgtctgaagaagatgcaaggaacgctgttggtaaaaaagtgctcagtgagcaatgtgcaagtgacatgctggcaatggcgttgaatggctatcctaaaagttatatttctcagacaattaaaaatgctcataatgcttctgaaaaagctttagaagcactcgatccaagatttaatgtaacgtcaagttttgaggatgggttaacaaaattttctatacacgccaaagaaaatgtctctttaaaagtaaaagttaaaaacctcaaaaattacaaaaggaaataccaagagcttttaagcaagggagcttcattttcaatcgatatgagcgatgtcagtacctcaggctcatctttgattgaaacgataacaaaagatagtaatggggtgctaactttatcgagtcaagatattgatgttgtgatgaaaatatccttgactgacagcattagcctagttagtgaagctttagtcgaagtgcatgggaaactattccatggattaaaggcattcactttttctggggaatgtttctcgaatttgttaaatattaaagcgatatttcctttaaaaggcaacaaaacaaaatttaatatgcatgtcgaccttgaaaaatggtctgggttaaatattcttaatcttccattctttaataaagttaaatccatatatgataggatttgtgagggctggaatattgaatttagtctggagttcaatggtgacgaatttatctctggtgtgtgtaataataaaattaataatgaatattataaaaaggtaactactcttttgagttatactgaaagagctaggactctttctaatttgttaaatgtctctcttgagttttctcctcaaataacatttacttctgatgagcataggcaactacggaaagctatctctcggctcagagaggaaatcacacttgataccacagggtttaattctctaccaaaatttacattagttgcatgtgaggaaaatgtaaatatgtttaaggataagatgagtgaacctagtcattttgcgatggaatctgttgaatctgagaaaatttccgtttttagtcgtgaaatagaattatatcctgtcagacaggaatatttaaacgtaagttatatctttaataaagatatcaataatataaaatatggggatgaagtagaagtccagttagtagcctgtgaaaacttctcatacatagaaaaatatatattaccagaatga

SEQ ID NO: 154731 - DNA, 1080 bp, Enterobacter cloacae
atgaaccagataatttctgatgcggtttactttattgagcacgaattttttatcaatgcatccataaaggatgacattagcgatattcttccttttcaattaaagaataaagcacatgcttatacagttctaatagaggggaaccccttcctgtttataactatccaaaatgatgaagttctaagtgttaatagccaaatccatttcaaaagactacatgcaaggctgggttatccaattgttcttgtagcaagaaatctaaagtataaaacgagaaaagaactaggcgattttcttgcaggatatattatacctggcgagtttctttcgataccttcaatgtttatcaagaaaaaggctaagcctttcgaacttgaaaatactattgtcgataatgaaaagccatttggtgttattccatcgtatataataagttattacttatcaggttattatgacgattggtttaatagttttgatattatgagcattttcgatgtatctaaaatggctatatcaagggccttacgtgagttacagagtaatggactgataattcaagatggtaaagataggtataagtcctataggtttattattagtaaatatgatatatggaatatttacaggcacagaataaccccactatcaactggtttcattcccgtttctgtggatggtctacataatagaaagtacttcgcctccggcgaaactgctcttagtaattattctgatttatcaccaccgaacaaagaacaattggggatttatctaagttcgaacgaacggtatcttcgaactatttcacccgctacaattgaaggtgaatcattgttcaaagctattggattattgggagatagtagtaataacatcggtattgaaagctattactccgacggtgaagcgcttgttcaggtttttccatatgagccggttattataaacaattgtttaaatgatgtttttcttgctctttcaaggtttaataaatttgatgttagagtaagagcatcttatcaagagcttgagaaaaaaatatctttaaatctatctggtaatgaaaggaatacatga

SEQ ID NO: 154732 - DNA, 768 bp, Enterobacter cloacae
atggttgattttggatttttatctgattatatgcgcgattaccaagatgactatatattgatcggtggtaatgcttgtgcattaaattttaaagaggagggttcttctttcagggcaacggtagatttagatgtcgtcctgattattgaaggtgataatcagaaattttatgaacatttgagagcttatttatcagagcatgattatatcgggaaaacatataatggaagtaataccggagggtcatcttatcgatttgttttaccagaagataatgttaaaagtgatttacctaagcaaatagaattgttcactaggaaacctgattattttgatacttctaagtcatctaagcctcatattacaccaatacaagttgatggtaatatttcaaatttatcagcaatccttctggatgatgatatatatagttttatacggggttctaaaatatcaattgatgatgttagcacagttaatttagaatgtttattggggcttaaatcgattgcatggcatgcaaatcaagagttgtttgaaaaaggtatagtagaaaatgaaattacagtgtggaaacatgctgctgatattttaagtatcgttggtattattgaggataagcaatatatttaccctagtgtaatctttgatagcctgcaatattcaaaacagagatttaaagaatctgatatatataagcatatcacggtttctcaagatgacgtagaaaatgcgatccactttatcgaaaacaatgttactaaataa

SEQ ID NO: 154733 - DNA, 234 bp, Enterobacter cloacae
atgttgtcatttgatacgaaggccgcgttggaactgatcacacattctgctggtggttttagctatgacactcttgccagggcattgatttcagataaaaaagcacaactttcccaacaccttttagctgattgccgtgagttttgcgaatccctggagtcgcaagggattattcagcggtgtgcatcctgtcgcgaagttcaggatgtgtattacgaatatcgtgcccactag

SEQ ID NO: 154734 - DNA, 957 bp, Enterobacter cloacae
gtgagccaaattaatctgataacaacatgtacaaatggtaagcacagtaacggttatccgatactgaatctcgcaacgtggtcaacttctctttcctgttcccaaaatttagtccaggcatggtgtaaggtcgttaactcggctatttctgctgggcataccttgcctgttgagaaattgtataaaggtggacactgggcgacagcaatatctgtccacgagatatatccagttgaattgtgggtcctttctgcagggttagggttattgaaacgtggtgataacgttgtcccataccaggcgacttttgctgtaggccataatgactctataccattattctctaagtcgtataagggaaaagaatttcatcagatatggtggtctgaattaaataaacattcgccatttcaagagaagcatcctacatcgctgactgatctcatgaagaccagacctgatgagtattttatcatttgcggttcgcccgattatatcagcgcagttggcccagatattattaccggtttgccttatttacattcagcagaaaaacaggtgttgataatatcatcctctcgagttaaatcgccattaaaccattatttactggaaagtaataagagaattgctgaatggctaaaatgcaacatgctgatgcttaacataaaaatcgcgcagtatgtaatagagcagtttacccgagaaggatatgacaatttgggggtattagccaatagtttgaataaacagttttcttcgttgccagcggcctgcaaaaaacaaggtgtgcgcaggactccggaagaggtcgaagcctggatattacaacatctcaaagaggtatctgataccagcgcatcacgtgctctgcgtgtctttcgtgatagcggcaacagttttgaagagaagcgatttcgtgccttgtttcactctgtgcagttgcgcaatcagtaa

SEQ ID NO: 154735 - DNA, 2706 bp, Enterobacter cloacae
atgaacccggcccattttcttgcggcacgctcaaatgacgctccctatttctatccgttaagagagcgttttgttagtgcgtggatcaaacagcgtgctgcatgccgctcaatgtcgtcgttaatcagcagtcgggtggagattgagcctcatcagatagccgttgtgcgccgaattcttcaggaccagaaccccaagtacctgttggctgatgaagtaggactgggcaaaaccatcgaagcggggctggtcatccgcgaacatattcttgagtgtaatcgcaacgctagggttttggtggtcgtgccgcaggcgttaaaaggtcagtggaatcaggagttgatcgggcgctttgcgttaggtgaagtgatgatgggaggggggcggacgcggcaaatcagactttgcaaccatgaagaaattgccgatccttcgttgctgacatggaatccgacactgattgtagtggatgaagctcatcaactcgcacgtagcgcttgggctgacgatactgataatcacgttttatatactgcgttggtaatgctatgtcatcaaacaggtatcgtgttgttactctccgggacaccgatgcatggcaacgaactcaatttcctcgcgatgttgcattgcctcaataaagaggcttggccgctagatccggcaggctgtgaacattttatccaacgtgtggcagagcgtgaggctcttggtgggatctataccgccctccagcctgaaaacgataatgggattatcgagaattgtcttgatgagttatctgctaatttttctgatgatgaggaacttcagcgcttaattgatgaggtgcgaccgctagttgactttatcgctgatgaagaaggggaagagcgtagtgaaaaaattttgatgcttcgtcattggttaggtgagcattatcgtttatttcatcgactgttacgtaatcgtcgcgaagagccttctcttgccttgcttttccctgggttatcggggctgaagattgctcactggagcgtcaaacctgaagatgtcaccttggacgaactccttgaggattggcgcgccagtgtaagagcctctcctgataagtatcgccatattaccaccgacaatttaagtggctgggtggatgctctatttaccagtcccctgacattttcacgtcgggctcgcttagccttggaacagggaagtgcaagtgtagatgagcaaaattatcttgaacaagcgctggcaattgccaaacaagaacaacgtcaaaaagacgagcaattgctgctagccctcaatgcatggtttgcgaatcacaaacagggaaaagctgtcatattctgtagtgaagaagctgaatctgctcatcttttcactaagctggaactacagtctacctggaaaatcgtacgtcatgcaccggaaaagtatgctcttaataaccattggcaagtactgatatgtgataggcgtggggaggatggacttaaccttcatggcaaagaacgtctggccgtacattacagcctcagccgcgatttcaaccgctttgagcaacgtctagggcgcttcaatcgctattccagaagcttaaagggcatcaagcctgtagaaagcctcgtcatcctgccagaacgacagggactgtcatcagagtggatcaggcttttagaccaaggcattaatctgttcagacaaagcgtagctagcctgcaatttgtgttggacgagcagattgaggcaatgtggcggcgttattttgagggcggtcttgccgtcatcagttcgactatcgattcccttgggggagaaaaagggttcgtagttgttgagcgtaagaaagtgtttgagcaggagaacctgctttctatggagcaagaggtcattgcttcacgcgcattctctaaggcattgctggaatcggaagatgatgctgaacagcgtgcgctggacatgttgcaatggatcactaaagcgctccattttaatcagcaaatggaggaggataaatccggatttcgtttgcgcttcgagcgcgatgaatttaagggacgcacgctcgttgatattcaaacttttatcgacaactgtttgcttgggttggatttctcagagggttatccaccttcgacagccatcatgactttgtcgcgttcccaggccagcgtgcacaaaaacacttatcctttccgctacggccaacctttcgtagacaccgtctggcaacttatgcaaagcgatcctcgtggtacgacgatggcaatcctgcgcatgatgaaaacgattaaattaccttctccacagttttatttccattttcaatggataagcatggctaacttggttggcgataataaattagttgctcagcgtcagggtgacgagcgttttaccccgcgactggaaaccttctggcttgatgcaaatggccgtgatgttgatgaaaaaattattgctttactggaaagacagtacgataaaaaagggaatgcactttatgaggatatgaacctgcgaactgatgtctggccacagatgacccgctggtttgatcccgaagcctggaaaactacggtgctggagctaacagaaaaagcgaagcagcgtcagcaaattcgctacccttcgagtgatgggctgcctattaggcatcaattgatgggagttaaggcgatcattttgtgcagcaaagagactttccaagtggagtaa

SEQ ID NO: 154736 - DNA, 2481 bp, Enterobacter cloacae
atggaattccaatggaggcaactccgtgagttactcgcggtggacgagtgccaaggcaatagttctgaaattcaacaggatggagaccaattcttttatcgtctctggcgatgtttgaacgatgcaggggcggggaccgcagatcggttacatggctattatgacgcattacagtgcgcccgtgctcatggacttcttccgttgcgtttgccgctcaaggaggttatttctccagaggatttaatgcgtgcagggttaaggcgcaaccgagattatccgggcgaagtttttttagatgatagagcgttacaactctcatcagagtggcaggccgtttggcgtaaggataaaagacgtctgcttcagacaccaccacttgatacgctgctaccaaccttactgaacgatactaaatacactcactacacctcttttgggcaacaactcgctgtacgtacggtgcttacgagtgagaaaaacagtttgttgtttattaacttgccgacgggggcaggtaagacgttcattatccattctctgatgctgacaacacccgcaagtcaactgacgctggtgattgttccgactatcagccttgctattgagcaggctcagcgtgctcagtccatgttacagcaggcaaatgctgaccatggtggagaatacacctggcactccgggcaaacacttgaggtgcgagaagcgcttaaggcccgtattaaagccggtgagcaaaggttactgttttgttctccagaggctgcatccagtggttcgttgttattgctgctattctcgctggcgaagcggaaaatgattggtgccctggttgtggacgaagcccatcttatcgatcaatggggtgcggagtttcgtccggaattccaacttcttgcgccgttggtgaaatcattggtggaagtgagtaaggctagcattcgcactgtactgctttccgcaacctggggtcaggcgacgctcaatacgcttaaagaactctttgccggtgataatcttcaaaggatcgttgaagttaacggctgtttcctgcgaccagaacctatgtggtacgttagcaaagcgtatgatcgtgatgatcatcgtcggcaggtggaagatgctattgcaacgctacctcggccgttaatcctttacgtttcaacagttgaggacgccataggctggcatcagcgtttgcgtaaatcaggctataagcgttgcggattgattcacggtaaagtatctccacgccagagagaaaagcagattgccgattggactgaggataaccttgatattatggttgcgacctctgcatttggcgtcgggatggacaaaaacaacgtacgcgcggtactgcatgctgctgttccggaaaacattgatcgtttgtatcaggagagcgggcgtggtgggcgtgacggttatgcttcattggcacaactgatttaccgggacgatcaggtctctctggctcgtcatcttaaccgtgataacctaatcggtgcgaaaaaagggtttctgcgttggcaaaaaatgcatcaaaaccgggaatcggaatcacctggtcatttctccgtttatctggataccaagcacgacggcatcaaaattgattctcgagcaaatgtcgcgtggaactggcgtacactccttatgctccaacgtgctggcttcttgagcctgcgttttgcggcaccggatctcgagcagtttgcctcagacaataaggacgatgcggcggtagaacagtactttaaccattacttcagccatatcggtgtcgaactccatcgtgaaggtcatcttgatgagttggagtggaatggcactttaaaagaacttcgctccagggagttacatgcccgacaaaaagggtttcaggtgcttgaagattggttgaatcatctggaaaagccgctttgtggcatccttgagtcgttctacacgcttgatggttacgccccagagttggcttgtggtggttgccctggttgccgattgcaggcgttgccagtgtacacccctacgttgggcttgaatgcatatttgatttctggcgaaaaagacgagcgtatcgggagcgatatgcgcatttattatccaccagcacgttctgctgctttgttgcttcgccagtgggttgactggatctcacgtttgctggtcgcacatgagattcaggccatccgagcaagttcgaatgtactgtcgcaattaagccaacaactctacatgagagttccattctggtgcgcgctttcatatgacgatccctcgaccaactggaatgagttggtgcttgtcctgcccggggagtcccttccagagttggatccattcagtgatattaaacgaatcatcgtggctccagaaacgctagtcgaaaaaaacgctcggggaaggttgtggtgggagagtgatcctaaagcccgaacgttggatcaatttataaggagtttaagcagtggcaataattaa

SEQ ID NO: 154737 - DNA, 903 bp, Enterobacter cloacae
gtggcaataattaataacgctcaagatggcagccaaattcgtttactctgcatgatagatcgatttctgaatcgccgaggggataagtttattatgcaggaagatttggtcgaatatcttcgaccttccgcactacctaatagtgctactggtgcagaccgcctacctgataatttgattttttggcttgaagaagggctatggaagcaaaccgaggctggtatttcccgtaaatctcctttttcagctgagagtaatttaccaagtcgtgttttgcgcactttaatagataactgcactgacgagactttattaaatgaaactcgtggacagccctttctattgagtgtgacttctttattagcacaggataagttcacttttgtcggtaaaagtatcctgaccaaagaaacggtacctggcgcggtaggtgcgatacttaaagattctaataatgagggattacgtcgtcagcttaatctttccaatgaggcgtctactttccttgaattcgcttttttcctcggttttgttgagccatttatggatggatatctggttgatcctacgcgagctattgagggcgttctggatagggtgctggagagtcgcggcagtcttcccgcaattgactttatttcccggcttgcagaagtcctacctatgatcgatggaggaagttaccgtcaaaaggttgagccgctcattacagctgataattgggcacctaaagaacctctacatttgagcgcctctctaagccaggcgctggtgcgccttgagttggcaatgacccttaagtatgagattcgggctgacgaccatcaggctctattgttaactgggccagacggtaaaaaccgacggataagcactgttagccttggggaacttttaaaatga

SEQ ID NO: 154738 - DNA, 3138 bp, Enterobacter cloacae
atgaaaatgatggaatattggccgtctttaccgaacatcagacagtgtattcgtaccgaggcggaagagctctcggaccataccttgctggccgttcatgagcctgcacgaatcttacgaatgaataccgacggcagtccgttggcgtatgaaaccgaagagcaactgctaaaacactttctggaagtccagcgcccactgccaatcatcggtaatacaggagtagggaagtctcatatcatccgttggttggatgcgaacctacgtctgcgccctgaattcaaaaataagcagtggcatattgtccgcatacctaaaagtgcaagcctaagagaagtacttgaacttttactgaaagggcttgagggtgaaatttttgatgaagcgcgtgaggatatcaataaggtcagcgataaacgctcacctaaagaaatcgctgaatggctcttaatgttgatggggcaggagcttcgtgatcttcatgcgcgttctagcgctgattatgagcagcttaagcaagaagcggcacaagcaaacccggagcaacagaatgcattgcgcaagaagtcctcggagttaaagaaaatcaatattcatgccgcagaaaatgccctgccgacgctgatcaacgacgcctatttcaaacagttcttactaaaagaagaacagtgcctgtaccgttttgccagccgtctaatcagtggcgcaaacagcgatgaattggaggaaggtgaacagcaactaaaagccagcgatcttgatttccaaattcacctaagtgatttgagccttccgacgcgttcgtatatcagtcgaacccgacttaatacgtatgaaccaggtcggcaggaagccgctgatattctgaatctggtgcttggtaaagcggcgcaaaccctttttaatcaactgtttaatttccgtgggcgcagcttttctgatcttttcctacagattagaaaagcactgcacgaacggggaatgactttgatggtgctggtggaagatatgtctctgatcaccgccattgaagatgttcttatcgacagccttgagcgtgagggaatgcgagacggtgaagaggtgctttgtccggtttgctcggcctttgcaacaactgaaggttatcagggatataaccgtcgccgccaggggatgcgtgaccgtgcaaaaggcgaatggcggatcgaagaagttgtgggtgaacgttcagaaacgcgccagcgcatcgtcgacttttgcagtcgttatatcaatgccgcgcgttttggtgataagtctctgcgcgaattctggaataatcgcagcagtgatacaaactgggtgccaaattgggagcatcatacggaaactattgaggagagcgaagcttttggctatagctctctcgggtatgcactttatccctttaatgaacgtgcaatttatgctttggctgatgttcactgtagcgatggcaataagggcataaaattcaatcctaggatcatcattaacaaaatcctgttgaatattctgtctaactatcgggttatggcagaagaaggacagtttccgcccgtgcaacttgatggtatcaccgcaccccatggtttacgaacttggttgcgtcgtaaaacattggcagagcaggagcgcgctgaatccgtcgctgctatttggggatatccggcagacaatggcccggcgcttgctagcgcattgcctccttctgttgcacgttgctttggcctcgatgatttagcaaacgaactcatgtcgactgagaaaggtgagatcaattcaggttatgtcacctcggtagaaagcaaagtcgaacctgtccgcatgaaaacggcggagccaatcttagttcaacaaaaaacggtcgaagctgtcgatcccctcgaagcacgtatcattcaactggaaaacagcgtatccgattggatacttaaagaagttttactcgatcaggatacagcgaaatacatccgtaacgcactggcaatgatttatgaccagcatgcccatgttgactggttcggagcaaagtctaagcctgatatttgcagtgggaggtttgtgaatatcaacatacccaatgcgcatggacaccgactgaagcaggtagtgagtttcatcactgaggctgagtatcagaaacggtcagtctgggttaccgaggtatcgcttgcccttgcacgtttcggtttctacatggacagaaaaaatggcccagactggacctatccgaaagctcctgaagactatctcgttatacaatcttttgctaatcgttgggtgccctatgctcttaccgaacttctgcgcagcaagagagaaaatcaggggatgatgctggctgaacaactgcagttggcacgagcccttggtattatcaaaccgaatgcgacctccaaagaggtgctgaatcgattacttatgaacaaagaggcgttgatccgccagcataaatctgctgccacagagagcattgccaaactgcgtgctgacgctcttgagaagtgggaggaggttaagtcgcaatggttaaatctctatgccccaaacgaccatgcgttggaaggcgatattgtgcagaaaatggtgctggaggcgatgaagcaaccggcagatagcagaatagagcaggcagcgaacagaacggtgagagagattgcgtcaacgttgaccgaggtcacgtatttctctgattgcgagaatagtgatgctttcgctctacttatcgatgatgccgtatcgttgttagaagagttacgtgaagagggcgactatccgattaatgctgagttggactgtagtgcgttgcaggctgaactgaaatccttaaaagaaggaagtacatgggcaatgatccttaaattgcgagatattacgcagaaagaagatcctcttgctttatggcaggtactttgtggactggatgggggcttactcaagcgttttacggacacgctgcagcggtggcaaaaggtttgtaagcaaatatttagtgcgattacggggtacaaccacgataaaggtggtcaccgaatcagtgagtgtcgcgcgcaaatcgatagtgttctgatggagatgacgcagaatcttcagatcctcaaagagaatgccggaggcagtgatgaacacgcttaa

SEQ ID NO: 154739 - DNA, 744 bp, Enterobacter cloacae
atgaacacgcttaagcagcaactcacccagcttcgcaaggagtttcaagtgaagaagcaggtgaagaaagaagataatgtttacgaaaaataccgacaagttcgcgacgatttgtacaatgtttcttcatctttaaaagagacggcaacccagcttgatgtcattactcgtctgccttctccgttgtcgcaaatcactcttgatgatcatgaaaaagcggcgatttataacgctgaaatcggcttgaaagcatttgtggaaaaattccagcatatggccgatgaggttcagcaaaaagggggattaggagagacacttagtgcgcttatatccgtccagtcgaaatttgcagagaaaattaacagcaactggcagacattcatcaacgatcttgaaagccaacagatgctggaatcagtcttcctcgaacagcaaaagacgctgggactcgatcgtatctacaacgagtaccgaacggctctggaggccttcaatcgtcagaaaatgatggggccagccaatcccggtgtgattaaaaaactgcagcagtattgcgatgaaatggtcaagctaaagggtcaaatggattttaaagctccagcctgtgtcctaaattttttccatgcgctcaataatagcaatcgcgctccgttgacactgctgacacccgaagtcctcgcttggttaacagaaaaagaaatgctgaactcattcaacgtgatgcgtaaaggtttactgggatga

SEQ ID NO: 154740 - DNA, 4539 bp, Enterobacter cloacae
atgagtgaaattactactgatgtacttcatcacatacttgatactcttgaagcacaggaaaatgccttactggtctggggggatactgggggatttttcagcgaggaagaactgattgcgcacatcagaaaagaattaggcacatggtttaagcgcgctccaactaatgatgaatgtgataaaaccctgctggggttgctggatactgccatgctgctacaggttccacatgttagcggcataccggtgtggcgaacccgaatgggggaaacagtacatctcttgcgtaacctccggcaatggatgtcccacaagtcgcttgaagaaagtaaaacgttggtctctgactaccgttttattcgtcgtcctcgcagttatcccgagcgtattgcagaaccagaaacgttaattgccgactggaagacgagtctgaaactgagtgcgcgcatgtgtgagatcatgcgacaagccctggcatctgataaaccgtttcgcttggcacagtttcaggtggactcaaccgaacgtatcatacagtgctggcgcaagcatcagggatataatgagaccgccagtgctactatcgtttgcgcaggtacggggagcggaaaaactctgtctttttatcttcctgcgctgaccagtctcgcggatgaaatctgccgtgattcttcgcgtaaggttcgtattctggcgatctatccgcgtaccgaactgttgaaggatcagttcgccgaaacctttgcccagtgccgtaagctggataagtatatgcaggaaaatgcggggcggaagatccgtattgctgcattttttggcgatacaccagtgaaggtggagtggagtaagaaagacgtcaaaggcaaatcaggccttccctttggcctgatgaaatgtcagcagccccatccgaaggatcatcagcagcaatgcggtggcgtactggagtggcggcgtgatgatatctttgctcttaatgaagttctgacctgtacccagtgccagcatcaactggatgacagtgaaattatacttactcgtaattcccagcaggccaaggacaacgggccagatattctgtttaccaccacggaaatgctcaatctccaaatgaactctggctggagcaaccatttgtttggcgtgggggaagggcagggaccgacgctagtcctgttggacgaagttcatacctacaccggcactaccggggcgcaaacggcgctgcttttacgccgctggatgcagcgtacggactgcttgccgcatttcgtggggctatccgcaaccctggcggatgcacagaatttctttgctaatctagtgggagccccagaggaagaggtggctctgatcgagccagattctgaggacatgctcgaagagggggcggaatatctgctagcgctgcgcggcgatccggtttctgaaacggcattactgtctaccaccattcaggccactatgctgatatctcgtatgttggacagcgaagcgggtaagtccgaagggacgtggggcaggaaaacctttatttttaccgataccctcgacggcaataatcgtctttatcacgatctcagtgatgcagagggctggaaaacgactattcctcctcatatcgatcgtccacctctggcggcgctgcgtaatccttatgattccagaagtgaggaatacttaaagaccgaactaggacagaactggaaagcggcgatggacataggccatgaccttggccggaataaagtgatttcacgcacatcgagccaagacaccggggtcaatgctcaggcagatgtggttgtggcaacttcgtcgcttgaggtggggtataacgatcctctggtcggtgccgtcttgcagcataaagcgccgaatgatgtggcttcttatctgcagcgtaagggccgcgccgggcgtccacgtggtatgcgtccttggatgctggtggtgctgtcagaattcgggcgcgaccgggtagcattccagcgctacgaagaactgatgagtcctgagattaaacgccgtggattaccgctgggtaaccaacatgtgcagaaaatgcaagcggcgatggcaacgcttgactggatcagtaagacaggcaacttcaaagatgtttcctacatgctcaggaaaccggagcgcgatcggcagaagtttaagcgttattacaccccgcttattaacctcattgaagaggtgttgaatggggggagaaagcagaacgaattagctcgttatctgcaggatgcgttgcagttgtctgaaagcacaattcagagcatcctctggagcccaccgcgctcgattatgctcgagtttctcccaactattctgcgcaacttgacaacctgttggtcagtgaacggtgttgagtgggcagccctgcgatccccacaggttgacggagaaggagaacagtacaaaacgagttctcccgtaccggattttattccgcaaaacctcttcagtgaactgaacttaccggagttggatatacgtctgatgcgtggtcgcgataatgttgaacaatgggaaacactttcattctggcaagggatgagagagtttgcgccggggagactgtcaaaacgttatgcgattaagtcgaatagtagtaccgattggttggtgcctgaaacttatgtaccagcaactactgatgggcggcagtgtgttgattttcctgtaactgaggcatttggcgataattggcaggtggagtgtgaagttgaatatcaaggggagatgatcaaagtcattaaaccctcgaaggtgctaacttcacgtgcggatatccgtaaattgacggataaaagtaacgctcagttgcagtgggctctgagcttaatcaatccgaatattgcccgaccggatgtagtgccaaaaggagcttggaaaaagactctttgcgatgtcacattttttaaccatcagcacatgactccgctggagttagttcgtttttctacagcatcgcaggcatcgcttcgtttccagaatcgcgatcgtgcccatgtcgaatttagctgggtgaatgacggtgaaaatgttggggtcggtagtcgacagtgggttgatgccatgcgactgcgttttcgtctccccaatgagaaagtcctcggccttctactacaggacgatatccagcgcggtctgcgcccggtttacttccagcatcgagtgagacaactcccgacatttgagttcgatagctttagtgctgattgggtggttgagtgtttcatgacgctgctggctgaaacgctagtgacgagcaaccacgctaacgtaacctccgccttgcaggtaatggggactgcggaagggatggccagacttgtcgacatccccgccagtctgttccagccagattctgacaatgttaatggtagcgatcaggctctgcaactcaacctacgggaactgctaattatcccggaactccagcagtcgctgctggattgtgctgaaacgctctggaaaccagtggacgaaatcgatggatttgttgaatggtcgcgtcaggtactggcggatacattagcggcaggtgtgcagcaaacgttgagtatgcaccttccggatgtcgatgagcgggctgtagtgactgattctttttggtcgaaagatgcccattctggggatgaaatattggaaatatggctctgtgaaatagagtctggtggcagcggaatcctgatccgactgcagcaaaagtgggtggaagatccggttaacttcctgaatgtactggtgcgaaccctgtctgccagtgattatgagcagatcgattatgatctgcgaatggtattggcactgctgcaaaccgatgaggaactgcgccaggctgtgcgatcagtgcgtgaagctaccaatatggacactcgccgggaggcgaataaaaatctgcatatgatgctttcacgccgcggttttcgtctgtctcacagttttaccacggtgctctattcgcgtttgctgcggtctggtagtggggatgatactgatgcgcaacttcatcaactgctaaccgaatggatctcacttgaagcgcgctcaggaatcgaattcacactgaacacgatggcacacgcgctggcagttcgatctcgtggggtgaatacagatccggtgattatctttggattacagtgcaggcaccaaaatctgctatggccgcgtggttatacaattcgtcaggcggagctcggtttctataatatgttctgctcgcgtacggtggtgacagagcgtttgcttgcaggggctttattcagcgaatttgttgaaaagattcctctcgatcagccggactggttatcatcgttacacgttgcgttgcgtcagaatgggcgtgcggagttaaacttgcctcgcgagcaactaaacctccttcatcaggtcattactacagtacagctagagcctgtcgactatcttgggctcttgctctatccgcgattgggagaagcgagacgtgagcaagataagctgattttgcgtattgaactggcggagatggtgcaatga

SEQ ID NO: 154741 - DNA, 546 bp, Enterobacter cloacae
atgatgatgaaagccaaccagcgccagattttcctccatggtgcaactgggcagagagtcctgagagaggtgcttagtgcccagttggtgggattgattctgcaaccagagccgatctggttggtatctccatgggtaagcaattttacgcttcttgataatcgtgctggaaactgggacagcattgatcctgcttggggagggcgtgaggtagactttgtggagctattagcctgtgcagtcaataacggcgcgcaactatctttggttacccgaaatgtaccaatcagccgcaccttcgtgaaagcgcttgagcaccagctaaacaagaatgcggattatcgtcttgaatggcgcgagcacctgcataccaaaggtttgctgacgcagcatttctttctcaaaggttccatgaatttcacgtggagtggtgtgaaccggaacgaagagtgtgtggaattgagcagcgatccacacatgatcggtgatgcaatggcggcattcgaggagcaatatcaatttagtggatcacaggaagcgttctga

SEQ ID NO: 154742 - DNA, 2172 bp, Enterobacter cloacae
atgcaggcagactggctggaaaaattttacgccgatgatagacatctggatttcaggaaagcgatgcgtggtgagtacaaactttcacaaatcaatgccctgatccaaaaagctcatgcgcaaaaaatgccctgcattatcccttcagctcgtagtgggaggacggtgttttatggactagcacaaaacggacgtagcctcgatgaactacgacgagtgctgacggcggcccttggctctgctgacactaatgctgatattcgcactctgtatcactcaactgatccgggagagttactactgcttgagcgttccccggaagggatactggccttccattttttacctgtcacggcgtcgacagcaaaagataaagctgaattgcaggacaaacggaggaaacgagttttcgccatgttgcaaacagtgatggatctttaccatcaacggccagtcttacatacgctggtcagtcggcaaactgggcgcatactgcgcgatttttatactgcctgccatgcccgcgatggcaaagccgctgaggagtatctgcaggagttacgaggaaatcaggcgctatcaccgctgaacctgcagttccttgagcttcagggcatggcagcctctgcaaaatgggaagcgattctgactcacccgcggctggatgtattgctgaaggggcgagtacctgaacgtatccagcgcctgcttctacgttctaccgggcattacctgatgaatgcgattcaagaggcaaactttccggcaacttcaaaagcggatgcccgaagactagcgcttgatatgctgccgctctataaaaccaaaccggcgtttgcacatcatgaaagctttctttctgactggaagctatgggcaatgggagcagcgctgctgggaatcaaggagtggcaaaaggctacccccattttgcatcaggattggctgcaacaggtagagcattgggtcactgaagcagttgtactgcctgtaatagtgaaggaggctgaacagaaactaatccaggctccagtgattacattgctcagcgttgatgatgcaatagcattgttacttgaagcttttacagcggatgttgaacgcgagaacgagatttacgctcaaatgattaccatgccggaagcgacgaaacaggcgcttcaggtaacaccgaaacattgggaagcttggctggcgcttaaaaaacggtgtgaaccagaggattatggctggagtcgttggcttctcgacgttcagcaggccaaagataatcagcagtatgaattgttgcgtcaacaattgacgatgcagtatatggactggttgcctttcacgtttaatgagcaacaatggttggggctgctcagccagcaaccggtgggtatgctcggccaagcattgcgtgatgtattaccgaacatgctgcaatggctcattgagtatgacatcaacgtctcgtcttctttatggtctgaatggttgatgctgcttgctctagagggggttagttcagtagaggatgtccgcttaggtggtattatcctcgatgcactactctctggtaccttcagccataaggaatatcacgacgctcttgaagccatcgagatgctgtgtgcgaaaaatgaatcatcacaaacgctggggtatgcgcttgatatcgcagagattttgttcgatcgtgtgtgtggtgatgatgctcgtagattacagtattgggttaacatccaggagatgttggtgcgtcgctgggagcgactggataccagtatgcaacttctggcgcgcatggttgaacggctttatctagggcagaatgcaggcaatactttcccgacagaaaacacgccagcaggtgtggcttctccgttacatcgcgatctcagcgggaaaaaactggtgatttacagtctcacggaaagcgcggctcggcgtggtaaagacgctttgataaaactgtatccggaactgtcaattgagctcaacaatgatcatgttgccactgatgcattgatgaatgccgccagaaaagcggactattttatctttgctagtagcagctcaaagcatcaggcattttatgcggtggctagttgtcgcaaggatattatttatcctgcgggcaagggagcctcaagtatggttgcagcctttattcgcgagttggcctga

SEQ ID NO: 154743 - DNA, 510 bp, Enterobacter cloacae
atgaatatatatatagcctgcgctttgactcatgtgcctagagaactatttacagagtattgcaattggatacattatatagctcaggcattatccccaaaccataatgttcaatatgctttactaaacagtgatcctcagttagcagcaaaaccagaaagtaacaaatctcgtctttgctatatttgggatagagaaatggttgaaaatgtcgaactagtaattgcagaaagcagtttcccatcgacaggtctaggtattgaacttcagattgcggaacataaaaacatacctatcattttgtgttataaagattatgtaattaatagatctaaaactgttaaatatgagaaccccgatcactcatctcatcagttacaagttggtgaaggatatatttcacatatggccttaggactacctaacgttttagaaacaatattttgtgaagatatcgataaaacctgcaaaaaaataataacattagtagatgtattgaatcgtaattag

SEQ ID NO: 154744 - DNA, 1053 bp, Enterobacter cloacae
atgaataatataacacccatacttataaaaaaaagaataatgaaaccccataaatcatcaatctctcctgaactgtgtgcgcgaaacgtgttgacgtcaagtcattgggattttgtggaactatggttaaaaagaaatgaaaaagacgaagctttattttattggaatcaagcaagaatatttaatcaagcatcattaggattacctagcctctccgcacctttattacattattactcatttatgaatgctgcaaaagcattactttcgtcaaaaggaatatccttttcttctcatcatggggtatgtaaagcaaaaggcgattcatatacaaacaccgatttatcaacaatcggtgtgcatattaaaaactctggaattacaccgtcaatttcagattatttctgcgatgaggatacagaaataaaatatagtcttcgtgatcttttttataacctgccttatattcatcgaacatattgcttaacatatcaaatagaaaatgatatgtttatacctataaaaaacgctcaatttgttcgagacgccccatctggaaatgcttttttcattgcgacattatctaaagatttttcatatgacggcattgcagaacaattacctgatcattttcagttatatggaagcaatgaaaatagagaatttaatattagatcatccgactcaatagaatgtacattctctgaatgcacaaattctatagaattagatactctgtcacattttcataagcgcattagaaaggatttattctatataaacggaactgagacactttggtatattaaaggcacagccagtatgaaccagcaaataaaacgctcacctataaccattactttagcggcaatgcactgcttaagtgaattgagtaggtataatccattaaaattaatggaaattttaaatggggaggaaaactggattcttgctgaattcatacagcaatctcccacacaatttatcgatgagatatcttcagaaatcactggtcatcaatttttaatacctaacgtaaggtctgcaaaataa

SEQ ID NO: 154745 - DNA, 540 bp, Enterobacter cloacae
atgacgcctttcatccggaatgcgggctatcaggtcatcgttctgagcagcaacgcgtttttgtggctcggcctccattcgataatagcgacggccgtgtccccacgtcctgaagcgtactggatcaacaacgtcacgccagaagggctgctgcgcctgcaggagctgctcaacgcgcacgtcgggcagagctggctgttatttacggacacggcctgggtcaacgacgttaacgccttgccgggcagtgagcgggtcagagtggtcccgggcaatgtttcccttgcccagctgagccactgctttagcgacatgaccttctctttcgacaataccgccgcgctcacgtaccaggaaatgcgggtttgcatgctgtttcataaaggtttcagcccggtgcgtatcgcacaaattctcaataagtcaccgaaaacgatctacacccacaggcgtaacgcgatgaacaaattttgctgccatagccttgcggaattccatcgaaaactctgcctgctggacgctctggccacttctttgtaa

SEQ ID NO: 154746 - DNA, 558 bp, Enterobacter cloacae
gtgaaaataatcaacgtgatgctctgcggtctggcattactcttttcctccggagcattgagcgaggaatgccagattgccctctcccagcctacggtctcgtttgggcggtttaagcaggatgatattgccgcctcgcggaaaaactggaaccgcatgcccgccagggaagtcatggtgaacgtgttttgcccacggccccgcgtgatggcgcttttcatgcagtcgacatcggggctccacggcggcgttctgtttggtgatgagggccggctggcgcttgtggcggacaaaatgacggtggatggtcagcactacgatgttgtgaaaaccactgaccgggtgggattcacctcaacggatagccccaaagaaaaggtctttttgaaaagcaaggaaggcctggttgcccggcagaatgccgcaccggtgcgcggcaagcagatgagcgtgacgataaaaattacccctgtccttaatgatactttgctgcgctgggtctccgataatacggagctggagagcatcctttcatgggaattattaacggcagactaa

SEQ ID NO: 154747 - DNA, 2409 bp, Enterobacter cloacae
atggagcactctttgcgcaacaggatgcgccaaacggtagtcgtagcggcattactgccgtcttcggcgctctatgcgtccgatttagatttcaataccgatattctggcgacgcgcggtatcagtaccaacctcgcccactatttttctgaggctcagcgctatctgccgggaaaacatgccgtgcgggtcagcatcaacggtattgaaaaaggcagtctggccgttcggattggcgacgaggggcagctttgcgtagataacgatttcaccagcgcagcgggtcttttaccgttgaacgtcagcgaaaaagaaaagtgccacgatctgcgtacggactaccccaccgccacggtcaccttattaccaaataccgagtcgctggaaatttttgtcccggcggaagcgatggataccggattctatgccgccaaatactacgcccacggcggtaccgcgggcttaattaactacagcgttttcagcaactacaacgaatacggtagcggcgcaaacagtaccttttcacagggaaatattggcgccggcatcaaccttgctaactggacgctgcgcagcaattacatcctcacggatgataacggcacccgcaccgccgagaatctctatacctacgcagagcacgtttttgaagagcggaagatgcgcgttcaggtagggcaaattaacgccagttcagcactctttagcggcgcacaaatcaccggggcgcagcttatgccggagacgagccttcaacctaattttcaggttactcaggtttcgggcattgcccgtacgcatcaggcccgcgttgaggtgcgccagtcgggccaggtgatctactcgtcgctggtcaacgcggggccgtttaccctctcggacgtgcccattgtgcgcggtaacgttgacctgaacgtcagcgtcgttgaaaccgatgggacgacaacgcaatttaccgtgccctcctcctcgcttaacgtcaccggcagcaaccgcgccgaggggttaagcctgtcctttgggcaggttcgcgacagcggtgatgaaaatagctcgccgtgggtgttcaatatttccgacgggacgagcgtaaccccctatctgacggcgctggccgcaggcgttttggctgaaaagtatcaggcgacaggtgcgaagcttgactggacgataaacgaaaactggcttatttcgccaagcgtattgctgagccagtcccaattctacgccccgcaaaagggcagtaaggttgagctcagcagcaaccttctcctccccgcacagcttacgctggggctgagtgcatcccagttcaacggcggctttcgcgagcttactgaagccatggatgaagaggcgcaaagctatgagaattcctggaacgcgagcctgagctggaataacgagtacatcggttctttatcgctgcagtacagcgcgaattcgggtgacgaaagcagcagcgacacccgttatctgatggcctcgtggagtaagagcctggggcgaagctcactgtccgtcaactggcagcacgccatgaacagcagcgatgctgagaacaacgccggtaataatgacgatctcttttatgtcagcctgatcgtcccgctgggtgaagatcgcgtcagcacgtatatgcgcaggcagggcgtaaaacagaactatggcgttcaggacagcggtgccatcggctcgaacttcaattacaacatctctgccgatcgcgataacgacgataagagcaacgccttcaacggcaacatcagcaccaacctgcactacacccagcttggcctatctgccgggctcagcgacggaaatcagcataactacagcgcctccctgagcggcggcgtcgcactgcatcgtcatggcgtcacctttgcgccctatccgatcaaagagaccttcggcattgcgcgtttgagcgagccggaaagcgggattgagatcgccacgccagacggtaccgtctggaccgactactgggggcaggcggtggtccccggcctgcgggagtggcaaaaatcgcagatcgttatcaacgccagctcgctgccgcagggcatcgatttatccaacggcattcagaccgtttccgcggcgtatggctccttcgcgcaggtcgatttccaggtgctgaacacccgtcgcgtcatgctgcaggttaaacgtcccggcgggagctggctcgaaagagggctaagtattgtagataaggagagcaattatattgtcagcgtaatggataacggcagcgtatttattcccgatgcgtcagagacgcccgcgctctatgtcgtggacgacaatatgacccgaatctgccaaatcagctattcactgaatgaagagaaagacaaagacgcctattacgaaaaagcagaaggaacgtgccagtga

SEQ ID NO: 154748 - DNA, 690 bp, Enterobacter cloacae
atgaaaaacccctttctgttttccattcttgcgctcgccgtcccgaccacactgttcgctgctggcatggtgcctgaaaccaccctgctgatgattgatgaagcaaaccacggcggcgtaatgagcgtgaaaaataccgacgccactccggcgctgctctacacctccatcaatgatattgaaggagacaacggggtgaagctcaacgtgacgcagcctgttgtacgacttgaaccgggtcaggaacagcaggttcgttttattcttgaaaccacagaaccccttaccgttgagcactataagcgcgtggtatttgagggtattcctcccaggagcaaagataaaaacgtcaaagttggtattaacctccgtcaggatctgccggtattgatccatccgaaaaacctgccggttgttacagatgcctggaaactgctgacctggacagtagagggaaaagaggtgcaggtgcgtaatacttcggcctacgtggtgcgcttctctaccgccattacgctgctgccgtcgcaaaccgcggggctggtcaacaagacctttatcctgccgggtgaaacgatgaaggtgcagacggacaagccgattgcaggtaccgataacgccgtgaagttcagccctgcaagccgctatgggattgaggtggacgactacaccgcccctctcaaccgctga

SEQ ID NO: 154749 - DNA, 717 bp, Enterobacter cloacae
atgaaaaagcttcttcttgctaccgttttatccatggcggcgaccgccgtctatgctgaaccaaccgcgatgctgaaagttcagggtacgctgaccagcgctggctgcgtgccggaaatcaccaatggcggtctggtcgatttcggtgaaatcggtctggattcactctcttcaagcgttgcctaccaggcgggtcataaagacgttacgctgaccatcaaatgccagtccgctacccgtgtaggctggtccatcaaagatgaccgcgcggattcaaacgcgggcgcgaataaatctgccagcgaattccatatcgaaaacggtaccgcaagcggctcacaggcatatggttcatatcagcttaacggtgtaggtaaaaccagcgcgggtgaaaatatcggtgcttatgcggtttctacctattcaactgctgttaccgcagacggcgtaacggcccagcctattgccgccactatgtacaccggcggtaccattagcagcagaagctggatcaacctgtggaccagcggaatcattatgaacgacggtacggatgtgatgaccgtttccaaaaccggtgaacgcgctccactggccttcaccactgcggcattcccgctgaaaatcgcgctggcgattgcgccaagccaaaacctgacgctgactgacaagaccgacctcgacggtcagtccaccattacgctggtgtatctgtaa

SEQ ID NO: 154750 - DNA, 711 bp, Enterobacter cloacae
atgaaaaaaattcttctcgcaacgctaattgccatggcctcgtcggcagccatggcagactccagcgtggtaatgaaagttcagggcaaaatgaacaacccttcatgtacgccgcagttaagcaacggcggatcaattgatttcggaacgattgctctcgaccaactgtctcctacccagaccaaccagatgggccacaaagacatgtctctgaccattaactgcccgtcagcgacaaaagtagcgtggagtattgcggataataaagaagactctaatgcggctaacgacctgagctctagcgagttttacattcgcgatgccaaagacaacggcggtgatgtgtttggtgcagggacaacgtacggcgtgggcaccacggcggcaggcgataaaatcggagcgtatgccatcagcacccgcatcaacgacatcaccgccaacggtatgccggttcaggctatttatgcaccggcctacaccaacagcaacggcgaatatatgtggcgtaacctgagttcaggcgtgattgctaacggtaacgccgaaattcagaccgtcaccaaaccgggttataactccccgctggccatcaccaacgtggtcttcccattcaaagtttcgctggcaattgtcaataccgaccgtctgaccactaccgacgaagcacagctgagcggtgaaacaactatcactctggtttatctctaa

SEQ ID NO: 154751 - DNA, 1563 bp, Enterobacter cloacae
atgtcgcttagtattcgaaacttaatcagtcgcgtttcttcaggagatattcgcattcctgcttttcaacgagatttcgtctgggaaccttatcaggccgcttttttacttgatagtatttataaaggttttccaattggtacggtagtattatggaaaaccgatgcaagattgaatagcgagaagaatttaggttcattttcattacctgaaccagcaaaaaactaccccgtaaattatgttttagatggtcaacaaagactaactagcttattcagtgcatttcaaaatgaacttaagcctgtagacgatgaatggatcgacatttattttgatatgctttcagagaaaaatatacaagaatcaagctttacagcttttgatagcaacgaagcagatttatcccgatactttcctgttaaaaccttattcaatccaatagaatatcaaaaaagctgttcagcaattgatcaggcacttttaccaaatgtgcataatatggcagcaaagttctatgaattcttgataccgaacacaacatttgaatctgatgatagaaatgcagttgcaatagtttttgagcgtatcaaccgtgctgggactgagttggatatatttgaattactttctgcatggagttggtctgaagatttcgatttagttgaaaaatttaaagaattacagcttgaaattgctgaacataattttgatgatcttatgggagataaagatcttcagcttagaatttgcgcagcagttataacaggtgaaactaccccagcaaaaatcctcagtcttcagggtgaagatattcgtaatcgatttggtgaaattcaaaatggtataattggagccatagactttttgaaagttcagctaggaataagtcatttcaaattattgccttttccaggcattcttgtgccactcagttgtttctttgcaacggaaaaaaaggatggagtgaaatatactgataaacaaagggattgtttgattaaatggttctggagatctatattttcacgtagattttcatctgatgttaatgaaaggcaagcgcatgatgtgattgaaatgcttgctttattgaaaaatgaaaatcatcagtttaaattcccctcaaatgagaataaagtagattttcttcgcggcaacttctccgctgggaatgcgaactctaaggcattaattgtattgctcaactcgatgcaaccaaaatcactgcttagtggttctttagttaaaacggatgatgttttaaaaaaaggaagcaagcatgagtatcatcatatattccctcaagcacatttgaaggcattgggcgtaacaaaaaaagaaattaattccttggcgaatatctgttttttaacgcgagctgataacaatagtataaaggacaagagtccaagtgtgtatttgtcagcgattcctttagaaaaaaaacctgaatatctttcgttggctctttgtcctgaaaatacggagagtttaggttatcaggaattcctcattgagcgtgttaaattacttgaggcggctgtgaaaaagttgactgattaa

SEQ ID NO: 154752 - DNA, 1173 bp, Enterobacter cloacae
atggaaacacctgccctgcctcgtcgccttgcccttactgccggatgtaatcagcttatcaactgggggatctcgttttatctgcccggcacctttgcgcgggcgatttcagccgaccgggggtggtcagcgccgcagatttacctcggcctgacgctggcgatgctggtgatggccgcagtctcccctttcgtcgcccgcctgctggcacgcttaggcggacagaaagtggtgatgggcggaacgctgctgattgccgcaagctgcgccggtatggcgtatacccgtacgctgtctggctggtacgacgcctggctactgtgcggcatcgggatgcgtctgtcgctgtatgacgcgctgttcgccgcgctggtcaatctttatggccagcaggcacgcgggacgatctcacgtattacgctgatgggcgggctggcgtctgccgtcttctggccgctgggtgacgctttactcaaggtgatggcatggcaggacgcgctgaaaatctacgccctcttcggattactgagcgccctgctgcttcgccactttccgcgtcagcgctttatggtgaagccaaaagcaagcgcgccggtctcgccacgagacaggcgtaacggctggctgtatgcgacctttattgcgctcattaccttcgtctcaaacgggacctctacccacctccccgagtttatcgccagtttcggcctgccggtcgcggtcggcatgctgtgggggatcggccagacgggcgcgcgctttatggaggtgctggcgggtgcacgcttaaccccgttaaaactcacgctttttactgcccttgccatgccgctttgttttctcatcggtctgagcagcaccctgtttgcctggtgtgccgccggatttgtgctgggctatggcgcaattaacgggctggtaaccattgtcaaagcgaccctgccgctggagctgttcagcgcggagcgttacgccagccggacaggcatgcttctcatcccgggccagatgatggccgcggcttccccgtttgcctttgcgtggctgaataaaacactgggtattacgggcacgctgtggttttcggtgagcctgacgctgattatcgcggggctggcggtaagtatgttgagatcgcaaccgcagcagggcgtccctgccctgagcgactag

SEQ ID NO: 154753 - DNA, 612 bp, Enterobacter cloacae
atgtccccagtgattgcaacatggcgtacacgcattttgctgaccgcagccctgctgctggccgggtgcgaccagcccgttaaaacggaatctgccccgcccggcgggggcggaacgattgaagccattaaccataccagctgggccatcaaccgcttcagcgtgaacgggcagtccggcctcgatattatcggcccgtattcgggtggcggtgggggttgctgctttggcgtaagcgggccgtggacgcccggaatgacggtgcaggtggactgggaaacgggcgtcgcgtttgccagcgatgtgcctgaaattcctcctcctgagcggccaaatactaaaggaatggatgagcagacctattacaaggcatggcaggtttattcggataaaaaagaggagtggtaccaaaaaattaaggcactaaataaaaaacatacacaaattgtctctatccccgattacaccggccagaaaacctgcggtattaccgttcacttcctgccctgtgaccaggtgaaggtcaccaccagctgtgccgactacggcagcccggattatcccatcaaagaccccgtgcatatggagaagccgaaagtatgtccaaaataa

SEQ ID NO: 154754 - DNA, 1104 bp, Enterobacter cloacae
atgacaggatgtcatgtgatggtcaagccggtcagttcccgctgtaaccttaactgccgctactgtttttatctcaataagcgccaacaaccgcacatggacgacgccacgctggaggcatttattcgccagcaaatagccgctcagccgggtgttgatgttcagttcgcctggcagggcggtgaacccacgctttgcggcattgatttttttcgccgagcggcagcgttgcaacaacgttacgggcagggcaaacgtatccagaacgcctttcagaccaacggcgtattactcaacgacgtctggtgccgctttttccgcgagcatggttggttggtggggatatctattgatggacctgctgaactacatgacatctatcgtatcaaccgccgcggtaatcccacccaccaaaaggttgttgcggcgattgcgcgtcttcgtgagcatcaggtttcgtttaatcttctgacggtggtcagctatgaaaacagtcaacaaccggagcagatgtaccgctatcttcgcacgcttggcacgccgtttttgcagtttataccgctagtggagcaggataacccagcctcggtcaccggcgagcagtggggaacttttctcaaaaccgtttttgatatctggataagggaagatgtgggtcgcgtatatgtgcagctctttgattcaatgctcggcgtctggagtggataccccgcgcagatgtgttctctggccgaatgctgcgggcatgcctttgcgctggaggcgaacggcgatctttaccagtgcgaccactttgtttatcccgaatatcgattgggaaatattcatcagaagacgctggcaaaacttaatgccagcagtgccgcgcgcgaatttggtacgtataagcagcgcacattatcggttgaatgcaggcaatgtccggtgcttcgcctgtgcaacggcgactgccctaaacatcgcctgaacggtaaaagtgtgctctgcgtgggttatcgtgatttcttttgccatactgcgccctctatgcgggtgatgcgtgatctcatcaggcatcaccgctcgccgattgagctgatggcgatgttaacggcctttcgctaa

SEQ ID NO: 154755 - DNA, 894 bp, Enterobacter cloacae
atgaatggaaaaattcaaatttcgcatgtaaaaaacgaaacaacgtacaatattcccttagttcttgaggaaagtgtgatctcaagcggaatttcactgatctcgctctggcatacgttagccgacgagagctatcgcgttatctggcctcaggataagaaaaaaccactgattgctaactcctgggtggcggtttacaccgtgcaaggatgcgggaaaatccggctcaaagataattctgaaattatgcttaatggaaataacgttatattcttaaaacctaccgatataacgtcgtacttctgcgccggtcttatctgggaacaatactggatggaattcatccccacaaacatgatgggaatccctatattacaaactggcataatttataatggcaacgagtttaataaagaactttcagaagttgctgaattactcgctttgcgttcccccataaaaaataatttagccgtcgcgtttctcacaaaaattatttatcagtggatttgtcttatttccgaaaatggcaggaaagatcgggaactgctgcgtctggaaaatctgttggccgagttgcacgccagtgtgcaaaagcgctggagcgtcacagaaatggcacaacggatgcagtgcagcgagccctggctgcggcggatctttttacgatacacgggaaaaacaccgaaagaatattatctggatgcacgtctcgatctggcgcaatcgctgctgcgccaggaaggaaatacggtgaacaaggtagctgacatgctcaacttttttgattcgtttcacttcagcaaagcgtttaagaataagttcggctatgcgccgtcggcggtcagcaagtttaaggaccggcacctcgatgatgccggtcaggacgattag

SEQ ID NO: 154756 - DNA, 129 bp, Enterobacter cloacae
atgaatatttttcatttttttattgcggacctggccatgaaagcgcgcctttttacattttgcgagtattcttccacggttatgcaatggtttcactgcgccctgaaaatctctgaacaggcggcgtaa

SEQ ID NO: 154757 - DNA, 699 bp, Enterobacter cloacae
atgatgcggattctcctcctgatgttttgcctttgcctgtccgcctcttcttctgcggggctggtggccgccgctacgcgggtcatttttcatgaaggggaaacgcaaaagagcctgatgctggtgaacgccaacgcctggcctgtggtggtgcaaagctgggtagatcacggcgatgtcaacgccgcgccgggcagcgtaaaaaccccctttgttgctattccggcggtgtttcgcctgtctccggatggtgggcaggggctgcggctggtctacaataacatgccgttacctgctgacagggagtccgtcttttggctcaatctgtatgaaatccctcctgttacgcagcaggagcaaagcatggtgctaaccatgaacacacaaatgaaaattttctggcgcccgcgcgggttagggcagccggacacggcgttaaaacagctaacgtttcgtctggagggcggcgatcttgtctgtcataacgcctcgccctattttgtctcgtttgctgaactcacgctggaatcatcaggctcgctgcgtcgcgcgcggcaacagcccgatatgatggttgccccgtttagcgagaaacgttatccgctggagccgggggcgcgccttcgggctgaaagggtgcaggtggacatcatcgacgacaacgggaatcgcgaaatacatcgctatcccgtgcagtaa

SEQ ID NO: 154758 - DNA, 1311 bp, Enterobacter cloacae
atggaaaagattcgtatattactggccgctggattgtgtttgctgagcgccggagccagcgcggtctgtcaaaaaggccccgacttcgtgaaaacaacaaacgacaccctgggcgttgggattggccttggcaatattaatctcacgtccgttaatattcagccggtgggcacggtgctggcgagcacggtgtttaatttctcagataacgcgctctataaaggccccgacagcgtcttgtatgtgtgtgatatcaccgatgcaaacaacatctatgaggttatcgcaaccaatggcgacgatcgcagcggggggttctgggatatgggagtggctgacggtaatcccaatgtgtacggcacatggtttaactacgttggtctgcgtttaactcacgtcaattccgggacggtattcacccgcaactatcagcggatcccaatgacccgttatgccgtatcggcagacggtaaaaagataaatattcgggttaaagattttagcccgatccgtgctgatgccatccgcgtcagcgccattacccctgcttcgggcgcaccgagcagctactgcgggacgccgaaaagcagcggcagctattccgcctgtaatcagcccaatggttatgtcgcattttgttcgcctggcagtggaaacattgcctattgtgataccggcgactcggcgtttatctataccggctggtggtacgataactggatggcgatgaacatgggcatggcgcctgcttccacgctcaccaccactgccacctgcgtggcgaaaaacgttacgccggtggtggttttcccgacgatctcgcgggcggaactggaaaacggtcagcaggcccgttctccgtttaccgtgcgcgtgcggtgtgaaaacgcggcggtgagcggtgttaccacctcgcaaacggcgcttgggctacaggtttcttatgccagctatcaggccgcgcaatcgctggggctggtgaacagcagcggcggagtgagccatctgctgtccgagaattacgggcagagcgacatcgccagcggggtcggcattcagattgccaatgccagcgacggcgtgctccgccagtttctcggctgggatcgctgttcaacggccggcggatgcgccacgggcaacagcggcggctggtacccggtacgcgccggtgccactctggtatcggaccgtaatggcgtgagtgaatatctgattaatttcaacgcctttctgacgcgattaccgggaaggcaggttacgcctggccgggtcgatgcgcgggcttacgtctgggtaaaagtgcaatga

SEQ ID NO: 154759 - DNA, 2505 bp, Enterobacter cloacae
atgtttcgatgttcccacctcgcaccgttgctggcggtggcgtgtcttcgcactgccgacgccttcgccagtgaggattactattttgacgctgcgctactgcgcgataccggattaagtaatagcgacatacgtcagcttaatcaggacacgctggttaagcctggcgcttatttgctggacctgtatgttaacggcgtggctgttgcgcgggatgaaatcctctttagtgacgacgggaaccgcatctcgccctgttttacctggcagacgctgaagaaaacggggctaaaagcgctgccaaaaacagcgggggcatcgtcctgctatcgcccggacgacgctgtatttgatgaggtcgcggtgaacctcgcgatgccgcaaatgcgcattgatttctctgtgccgcgggcgctgctgaatatgcctccgcgcggtagcgtaccggaggagagtctggaggcgggtgagtccatgctgtttctgaactatatggctaaccaataccatgtgagtcagaagcaggcgggcaatgagagttcggattccacttttcttaaccttaacggcggcatcaatcttgggctgtggcgctaccgcgaacagtcctccctgaactatgacaccgatgcaggcagccgctggacgacatcccgccgttaccttcagcgcgcgctccttcccctcaagagcgaaatcatgctgggtgagggttttaccgatggccgctttttctcgggcatgggtttcagcggtgtacaaatgacctctgacagccgcatgcgccctgactcgcagcgcggctatgcgccggtggtgcgcggaatcgcccgcacaaacgctaaggtgaccatccagcagggcaataccacgctttatgaaacaaccgtggcgccaggggcgtttgttattgatgacctttatccaacccactatgcaggcgatctcaacgttaccgtgcgcgaagcggacggcagcgagagtacatttacggttccgttctcggcgctggcagaatctttgcgcgccgggctttttgactatgccgccacggtgggccgtgcgcgggatgtgggagatgatgacctgttcagcgagctggtctggcggcaaggcatcagcaatgcgctgaccttaaacctgggcaatcagctggcggacggataccaggcattcatgctgggtggcgtctacagttcgtcgctgggtgcctggggtatggacggaacgttctcccgcgctcgcctgcttgacgacgattaccagaccggatggatgttccgcctgaactacagcaaatatttctcgcagacttccacgtcggttgcgctggcgggctaccgctactccacccgcggatttgccgagctgtacgacgtgttcggcgcgcgtacggcgcaccagagcagcgaggagtggcaatcgtccacatatcagcagcgtacgcggctggaattgtcggctaaccagtccctcaacgcgctggggaatctggccatatcgctctcgtcacaggattatcgtgatggtaaaagccgcgacaagcagatgcaggcgagctggaacaaaaccttcgacgggggcgtttcggtgaactttaccgccgctcgcacgcgacgcgtctcacctgccagcggcagcctttttgccgacaccggctggcaggctgacactcaaaccctctggtcactctccttttccatacctctgggccataaccgctactcaccaacgctgtcgctaagcgccaaccgcgcagacgatgaaagcggcggttaccagtcgaccctgagtgggatgtacggcgagcgcgatccgctgagctatagcctgaactatgccgctgatgaacacggcgatcgcgccgtctgggggacgaacgtacgcaaaaacttcccgtgggctaacggtggcgcctcgtggtcaacctccagtacgtactggcaggcatcggcctccgttcagggggcgctggtggcgcaccgcggcggtatcacgcccggtccttatctcggggatacgtttgcgctggttgaggcgccaggcgcaacgggtgcacaggttatgggcggccagggagcacgggtgaatgcgtttggttacgcgctggcaccggcgctggtgccttaccagtttaatacggtgggattagaccctcaggagatgagtgacgatgctgaactgcaaacgtccacgcagcgtgttgcgccctatgccggggcgatggtgcggctacgcttctcgacgttgcaggggcaggcgatgctgattgctgctcaacgtccaaacggtagcgcaattccgatgggcgcggcggtgtatgacgaatacgacaacagcgtggggatggtcggacaggctaaccaaatctattttcgtgcggccgatgaaaaaggacgactgcaggtcagatggggcgacagcgtacaggatcgctgtcagatccagtggcaacgacccaccacgtcggagccgttatctgtcttgagtctgccctgccgttaa

SEQ ID NO: 154760 - DNA, 690 bp, Enterobacter cloacae
gtgtgggttgtcatttacttatttttcgcggttactccttcaacagccagtgtcatattaaagggaaacagaattatttattccgctgcggcaaaagaaaaagttgtggaatttatgaataatggcgatacgcccatgctggttcaggtctggatggatgccaataatccccaatcaacgccagagaccgccgatgcgccgtttattgccacgccgcaaatatttcgcatgaatgctaatgcggggcaggcgctgcgccttaagtatacaggccagccgcttcctgacgatcgcgagtctctgttctggcttaactacctgcaatttcctgccgtcaaagcggcggataccgaacgcaatcgcctttctgtggtgattaagagcaggctgaaaattttttatcgcccggcagggttgaaaggtgaggccaatcaggcgccttcagcattaaagctaatccgacaaggccgttcgctgagcctgacaaacccgacgccctggcacattaacgtacgtaacgctgtgctgaagcaggacggaaaagcggtcggcatcgggaagccggtcacgcttcccccctttggctcgacccgctggtcgctgccggagacgcaggcgacatccatgacgctttacgccattaacgactacggtacggctgtgggtcatacctttgcgctgccccgttga

SEQ ID NO: 154761 - DNA, 546 bp, Enterobacter cloacae
atgatgaagactaaattaattgcggcatttattttaactgtcggtatgaatggcgttgcgtctgctgacaataccgttcgttttattggtgaagtgagcgatcagacgtgtacgatcaaaattaatggcgcagactcttatccggtggtgctgttgccaaccgttaataaaggttcgctgtctgccgctggctccagcgcgggagatacaccctttacggtaaccctcagcggttgtgatgtcagcgcaacctctgtgcagaaggacgcggcggctcgcttcgtcagcggcaatattgacgggactaacctgtcgaatattgcggcctccagcccggcaacgaatgttgcgattcagcttctggagggcaccaccgcgctggacttcaccagcggtgaagcgaaaacctcgaagcagtctgttgggggagatgcgggttcggatacggtcactttcgatatgattgcgcgttattattccgcagccggtaatgcgacatcaggggcagtagaatccagcgcacaatttgcggtgacctatttgtaa

SEQ ID NO: 154762 - DNA, 600 bp, Enterobacter cloacae
atgtctctaaataacgttcataagtacgtgatgatggtcgccttgctttgcggggtatctgggatgccggcagtcgcgcaggccgaggatggcgaatgcgaaatgatgtccgccgtaaagacggtcgactatgggcgttaccgtaaagaagatatgcgaaagggttctgctgagcatgtgggcaaagtctataacggttatgcctcggtaacgcgggaacttcaggtgtcggtgatatgcccggatgcgcgtaaaatgcgcatctccatcagcggtgcggcccgacaaaatatggcctggcgatattcagataacggcgcgatgaagattgcgttcaaggatggccgcgtggacgggaatacggtgcagctggccgctgttgatactggcgcggtggccgttcagggtggggcgtcagaagtgacgttgccgccggaaaaagcgctggctgccgttaacggaacggaagttgcgggggagcagttcaccgcaacgatgatggtgacgacctacctgtcagataaagcctttagcacgaccaacgagaccgattttaccgagacgctgacgctgagcgtcgacaccctttcagcgcaataa

SEQ ID NO: 154763 - DNA, 684 bp, Enterobacter cloacae
atgccgcttttaaaaagaacgctgatttgcgcctgcctgttcgcctcgtttaacacgctggcagccggaatggtgccggaaacctcgctgctgattgtgaaagaagacgagcagggcgccagtatggacgtcaaaaacacggatgccgacgcccagttgctatataccaaactggttgatttgccggatgatccaaaacccggcctgattgtgacgcagccggtggtgcgcgtggacgcgggcaaaacccagcgcgtgcgttttgtgctgaaaaacagcgccgagccgctgaaggtggaacacttaaagcgcgttatttttaccgctattccgcagcgtgaaaaaaacaaggtgaaggtcacctttagccagaacctgcccgtgattattcgtccggccgggctgacggaaaacatggagccctggaaagagttaaaatggcaggttagcaacggcagcgttaccgtcgagaataaaactccttacgttgtgcgtatggagcaaaaagcaaaattattgccatcaggtacggttgtacaattctcaaagccttatatattgcctggcgaaaaaatgacggtgagcgtaaaagggaaaataacgccgtctgaaaagcagattgagatttatcccgcaacccgttatggctacaaagcgaatagttatattgccgacctgaaataa

SEQ ID NO: 154764 - DNA, 708 bp, Enterobacter cloacae
atgaacgcgatgtttaaaaaaggaatgctggcatccgtgctggctgtagcggcgtcttctgccatggcggcatccagcattgatattcgggtgacaggtaaaattgtgccaagttcctgtacgccctcttttgtgagcggcggcggtgttgctgattttggtacgatgaaagtggcttctttgaattccactacacagaccatgctggaaggtgtcaaggttatccctatttccattacctgcgaatccgctacgcgtgtaggagttacgttcaatgatgcccatgcagattctgcgccaaccaccgatacatccattaatttcgctgctttggatttacaaatgactccagcatataccgctgggttaggcatgtataacagtaagccaattggcgcctattccatggggattgatagggcagccggtgctgctacgaatgcagatggggatgaacttttcgcaattttctcgtcgaacaacggggaaacgtggggagcaaaaggcatgggctataccccagtgaaaactgataaaagtgaaatttatagctttagtgacgttaaggcaaataccacccctgttgcacaaactcagtttaactttaaagttggtgtttctgcaattatcaacccaaccaacgatcttaatattaccgacgaagcaacgctggacggtttaaccaacgttgagctggtttatctgtaa

SEQ ID NO: 154765 - DNA, 738 bp, Enterobacter cloacae
atgcatattctagaacaatatctccgaacagtgttattgcaggaagatagaatcacagattatgaaagggaacaacacccctataacattccagctttgaaaaattttcattgtatggatctgcatccgcgggtaacttttctcatgggagaaaatggtagtggaaaatcaactttggttgaagctattgcaatagccgcaggatataatgcagaaggagggtcacgtaattttaattttcattcaaatgaaagtcattcttcacttcatcatgcaattcgactagtaagaggagtaaggcgaccaaaagatggattctttttcagagctgaaagtttttataatgttgcaacagagattgatagtttaggtgtgcaaggagcctatggtggacgttcccttcacgaacaatcgcacggggaatcttttatgtcattattattgaaccgctttgcaccgaatggcctgtatattttagatgaacctgaggcagctttatcacctaccagacaaatggctgcgctcgctcatatccatcgcttggctcagagaaattcacaatttataatagcaacccattctcctatactaatgtcatatccagattcgaaaatattgcattttagtgaaaacgggattgaatctattaaattagagaatacagaacattacattgtgactcgtcggtttgtaaataatcctcaagctatcttaaatgagctcttcgactatgattaa

SEQ ID NO: 154766 - DNA, 1053 bp, Enterobacter cloacae
atgcaaatacacccagtagcgataaaagtaaacatcctagccattatttgtgtaattcttccgtttggaatagcttcttatgctgcagtatctgatgcagaaataagtaagccgattttttcagaaaacaatgattcagtatatttaaaatttataaacaacgacaatttaagtggtgatgagactgcgccgaagttgtttgtctcatttcctgacggtgctgaacgagaggtagtagttgatactggctctacaggtttagtgatttcatcttcagcaataccaaatgcaaataatttatcagctagaccaggtaaaatcacgtacaatagttccggacgtattatgataggttcttggctcaatactactctcacaattggtgatggggaaaaattcgtatctacgaatattatcccagtattggctgttaacgaaatccagtgccttgctaaggcaagaaattgtaaacctgaactaaaccctgagcatgtatcaatgatgggcatcggttttgatcgagaaagtagcttgcagagcgaaagcactccaaatacaaacccccttttaaatacaaaatcaggaagcaacaatggatatatactaacacgcagtggcatatatgttggaattaataaggatacagccaaaggattttcctttattaaattacaaccttcaaatgaaaataaacacgaatggatcgcaccgccagcttgtatcaaaataactggttggcaagggtatcaatgtggtactgtccttattgatacaggagtaaaaagtatgtttttaacaatacctaactatagtgttaatggtgggcaattacctaacggaacaacattaaatattaaactagcagaaggaatagaatatgaaattattaccgggggacacaaaacaaacatttctcccaaagagatatttttaaacacgacaaggcaacaaatattcgttaatacaggattcaattttttaaatagatatgacattttgtatgattatgaaaatggttattttggatataaagataatatatcccccccgtaa

SEQ ID NO: 154767 - DNA, 255 bp, Enterobacter cloacae
atgaaactcgcaaaatatttctgctgttttatggtaatgtttaatactactgtatttgctgctgaggaaattgatgcggaaaatgcaagtaaatataccaaaattggaacgttatcagtgactgaagatggttttacaatgtctgacgatgatctttcgcaaaaggttgatgaaaagggaggaaagtactacgttattacttcgaaggaaggaaaagaagagcataagactattaacgctgacatctacaagtga

SEQ ID NO: 154768 - DNA, 585 bp, Enterobacter cloacae
atgttaaattacatcaagaagagccttgcattaagcaccgtgataacaggtgaaatggcgactgacgattgccaacgccttgaatcattaaagaatcgtttaaaagctcagttcggtgtgcccgtgggggtacatatgactggcattcctttggcagtaagtacattactcacgattttttgctacgctatgctgcaagtttccgtctggatgttgctatttcgcctgctcggcctacctgaatttaaggtaatgatgggagtattccttgcagcagtggtgtattgcatgattgtgatgagcactatgtttctgactgccaggggatccttaactggatataaactgcatatttccgctattgcactgactggcttgatgagcatcgtttattttatctggacgtggatttcgcttttattcagctcggtagaaaattacacaccgcaaataacctctttgttagggttagtttttttctgcctgaatatcgtgtggatgaatacatcggtcttttaccgttcaattgcgctaacgctacataatcgggtttggcgtaagcagttgaagatggataagaggtaa

SEQ ID NO: 154769 - DNA, 627 bp, Enterobacter cloacae
atggcatggcctgccgctgtcttaccgtgctttatttcccgttttctctatcgacccctatttaatcccgatacgacccccagggagttacgcaagttggtaggtggaaaagcccgggaggatcttatcgttgcgaactggcctgatattttccgttgtgccgcgacgatgaccgctggcaaaatcaggcccagccaactcctgcgcaagctcgcttcttacccacgacaaaacaaccttgcagttgcgcttcgtgaagttggtcgtattgaacggacccttttcattattgagtggatcctggatacggacatgcagcggcgtgctcagatcggtcttaacaagggagaggcccaccatgcgctcaaaaatgcgctccgtatcgggaggcagggggaaattcgcgatcgcacgacagaggggcagcactaccgaatcgctgggctcaatttattgactgcggtgatcatttactggaataccgtccatcttggtcatgccgtcacggagcggcggaacgaagggttggatgttccccctgaatttcttccccacatatccccattgggctgggcgcacattctactgactggcgaatatctttggcccaaggaaccgaaagcttag

SEQ ID NO: 154770 - DNA, 600 bp, Enterobacter cloacae
atgagtgctgtttggaaaggcgtctttcaggcggccagcaacttccaccatgttgccggcattaaccgtcatgatcacaggctgattgatggcttcgctgatactggctgctgtcgcatatccctcggcataaagcaggttgtcaccatccttcagttggccacccacaacgaaaaaactcccccatgcctggccgtctttttcaaggtgtttactaccgtcggaccagatgcgctcaagggtcctgaactcgccatcagcattaaacagggggatcacaacgttgccccgctcatcagctttaaggccgttagcggcaatgacctgtttgtttttcaggtatgccagatctcccgtggcatccggaagccggttatattcttccatcaaccggttagcggtctgatcaaacttatccgcttgcgctgcagctctttgttcacgccttgccgcagcatcagcacggagcatggccatttgttcagggttaggggctgcgccggtagatacccatttctgaatttcaccaccgttcttatagtccctgtaccaccctgcaggccggccatccaggaaagcggcatacaccccctttcttga

SEQ ID NO: 154771 - DNA, 423 bp, Enterobacter cloacae
atggcagacctgtacagccatcgctgggaaatagagctggggtacagggagataaaacaaacgatgcaactgagcaggctgacgctgagaagtaaaaagccggagcttgtggagcaggagttatggggcgtgttactggcgtataatctggtgcgatatcagatgattaaaatggcgggccatctgaaaggatactggccgaatcagctgagcttctcagaatcatgcggcatggtcatgagaatactgatgacgctgcagggcgcttcaccagggcgtatcccggagctgatgcgtgatcttgaaagcatggcgcaactggtaaagttgccgacaagaagggaaagggccttcccgagggtggtaaaggaaaggccctggagataccccacagccccgaaaaaaagccagtcagttgcttaa

SEQ ID NO: 154772 - DNA, 879 bp, Enterobacter cloacae
atgagccataaaaatgaaaagaatatttgggtacttaataaaatacccccccttgaatattgttcaatatcacgagcagcaaaattactcaactgtgaaattgaggattttctacattggcatgatgttggtgttataaccttgggtattaacctacaaaaaacaaaaggtgttttaagaattaagatagggaatcacaacgcagaagacaatcccctacaactatattttgatggaaatttaacctttaacgaattgactcgaatcaataagatatggtcccgtcactcaaaagtgtacaaactcataacagcaaaagatgacctaatcctccctttgattcacaaaaatacactttcaacaacttatgaacttaattgctttatcagcgatatatggtctatcgactcaaggaatttatccgttctacttaaagatacaggtaatgtgtttgaagaaacaaaactgagtgccttaacaccctctgaaaaaatattgtcgaatagtttccagcctgagatagatgaaagaccggtgataaacctagacaatatctttataaccaaagagacaatcgataaaatttacacacatgccctaagtggaaaaccactaccattcatggaggatttaattaatcctgatgaaaatgaaagccatgatattaagcagatcttacctcataaagagaaactatctaactttattagattcctaatacaatcaaacccaacaataaataaaaacatactatcaactacagcaaacaatagacacaaaatcttaagggaatatcttgaggatttgaagtcaaaaggaactgagattgattatgacatcccatcttcacccacacttgagcgctatctaaatctttaa

SEQ ID NO: 154773 - DNA, 849 bp, Enterobacter cloacae
atgtccaataaaatcgatgtttttttgagcagagttagccacgtatcccagtttgtattggttgcttttgctatttttggctatttttatacagtaaggccaatttatcaaaaggaagttttgtcggaagacatagcaaaaaaagaggtggaattaaataaattaaaaactgcaatgtcaagctctcagaaatctatagagcaaaataaagcattgcgaaaagacctggagggcagcattgccaaacttgacttacaatataaggaatcagaagaaaagttaaactctataaatcatgaacttaaaaaaacattaaatgaactaaatcagcaaaagataatcgctaaaagagcagtcgatgcaaacaacaagaaccttgaatctgttttttgggagaatttcacgggtcttgttggagtagtttacctatccaagagtaccgattttgttaacaatactctaggtgacacaaaatcggcttataacacacctggtagtttatatttaaatccttatgatgcaattagtgaagcactaaaggatggcaaccataactttatatcaagttcagaaaacgtgcctgaaaatatccgcaaaaaaatattaacaaagatccgtcgcgccattgaaaaaaacaaagcaacattaacaacaaaacctatcggatatgacgaaaagattagtgaattaataaaaacaataaagtcaacaaaatcacaaaacgatgaaaatacaataataaaaaattataacgcagaaagagaactgtcatcttatatcttccagataaataagcagtcaagggtccatgcaatggatttcttaaaagacattcaatatatagactaa

SEQ ID NO: 154774 - DNA, 705 bp, Enterobacter cloacae
atgaataccaatacaaaatttgatctgtggttaatcagaataagttacatcgcccaagttggattgttttttttgacaaccttcacaatattttatacagtaatcccaatatatcaaaatgcaaacttacaggaatctatagcaaaaaaagaagttgaatacaaacaattaaaagagaaagaaataaatttatattcaaaattaagaaaggaatactctcgaaagtatgtaattgatgcgatctctaaatgttccccaactgaaatacttatgcgtcaaccctctgaagatgatttaaagaaaacgcatgatgttataatgaatgaactcaaaacaataatgaataaagatgtaactggttgctttgaagatactttctataacaatcagtacattaaggaattgagtgatagtgatcagcaagatattctacataaaatcaaaagcttgcagccttccattgctaaattacatgaaaaatacgaggcagattttaatgataatgccaagctattacttatcggaaaagaaagctcaacaagattaaaaaaagttgaggattttttaaccgaaactgggagttatacagcaacacataaaaatgattttgaaaactcatacatagagtctggagcgtttgatttagttgtaaagtatgggtttgaactcaatgatctattttcaaaaacaataagatacaattaa

SEQ ID NO: 154775 - DNA, 1329 bp, Enterobacter cloacae
atgaccacacataaaacgttaaaaaccggcggcgacccgcgcacgctgccggaatatacatccctgcgtaacgaattgaataaactaagccatccggcgcgcccggatgtgaattgggtatacgttgaaaagtgctgcctttcattatttgagcaaaacggcgttgagctgcagaccgcagcctggtacacccttgcccgtacgcatctgtctcgattaactggcctgaacgaagggctcgctatcctggaggctctgattagccgtcagtgggatgttctctggccgcagtcgctgcaggtgcgtatggagatccttagcagcctgagccagcgcctgcagcagctcatgcgtatgcttccgctgaacagcagcgatcttagcgatctttacaacgctgaagaattgcttgccagcctgggggcggtgcttcagcgccttgagttcaaacaccttagccagtttgatacgttacgaacggtggtacattcaagcgcagcaaggctggaaaccagttatggcgtgacagacttgaatgggagcaggcccgacagtgaatcgcctccggagagggcagagccgatcgaacaggtgaaatgggtctatgtggtgcagcaggaaactgagccgaatagtgaggaccgtatgacggctgccgggtctgtcaggccatggaaaccttttgtcgctggggtgtgttctgcgctggtggtcagcgtcgccgtggcgtggggatggggttttctgtccagacccgatcaattagcggctcaggccgttgcctctacggcaccgttacctgaagtgctcacgcccgtccagcgggacgccatattacagcgagatacgttacccgccacgtttgtcacagacacgcaacggcagcttgcgcggctggataaactgcctcctgactggaatattgcttacagtcttcagctgttagaacagctccagacattgcgacctgaagaggctaaggcgctgttaatacagtggcaaaaaaagtttaacgcgacggcgttgccggtaggcgcaatgaacagctggtatcaggggatgatgaagcttcagcaactgagtgatcggttgagtagtctggatgagcaaaaaggaaaatatatcaccgtgagtgagcttaaatccgtggttttttcgactatgcagtcatttaaccatgcgatacccgctgaagagcagctcaggcgcctgtcgcagtatcctgcgggaaatacgctccctgaagctgaaaagacccagcttgagctgcatctaaagcaactggctgcgcgttatgctcaaataaagcaggatgcttctgctcaatga

SEQ ID NO: 154776 - DNA, 471 bp, Enterobacter cloacae
atgtcaataaaatcacagttcctgaaaaaattgcaggccagacaacctgcgccagctttgccttgcagcaagaatcaggtggatatagctgagtttcgcctgcgaatggagcaacttcagacgcagatggatgagtggctgacaggtaccggactgaacgtggagccgctgacggcatccgtccctgacctgctggtggagggcggggctttcgagattaccggtatcgttctgcgttatgacaaccgggcggtaaaatttatgccggtatttctgtatgggcagggcgtggctggctgtgtcgaggtgactttttgctccggagaagatgtgatttctcaaggacgcctgttcatgcgggtgggtggagtgagtcactggacttatactccccctgatacatcgcctcagtcaggacagctatttgatgaaggtatttttttcggcctgattttagtgctgttgtcatag

SEQ ID NO: 154777 - DNA, 423 bp, Enterobacter cloacae
atggcagacctgtacagccatcgctgggaaatagagctggggtacagggagataaaacaaacgatgcaactgagcaggctgacgctgagaagtaaaaagccggagcttgtggagcaggagttatggggcgtgttactggcgtataatctggtgcgatatcagatgattaaaatggcgggccatctgaaaggatactggccgaatcagctgagcttctcagaatcatgcggcatggtcatgagaatgctgatgacactgcagggcgcttcgccagggcgtatcccggaactgatgcgtgatcttgaaagcatggcgcaactggtaaagttgccgacaagaagggaaagggccttcccgagggtggtaaaggaaaggccctggagataccccacagccccgaaaaaaagccagtcagttgcttaa

SEQ ID NO: 154778 - DNA, 165 bp, Enterobacter cloacae
gtgcttcccgtggtggacggcaagctcggctatatcgcggcggttgcggtgggcgcagtggtaacggcaatcagcgtcaacgtgctgaagcgtattgcccgtaagaatgcaaaacaggtcgaggaaaaagaggacgatctggatctggatttcgaaattaactga

SEQ ID NO: 154779 - DNA, 597 bp, Enterobacter cloacae
atgaaatcacgaattgaatgttgcataaaaaaaacagtcataactgttgctattgccttaagtttttacgtgtttcagggggttgttataaacccatgccaagcgaaatcaactgtagtaaaaccgacctcaaatgctgatactgtttctttacaacaaatcgtgcaattatccagaccggctatcatcgatatactcccgagactttatactgcagaagaggtttattcacgatttaaagaacatgagtttcgggcaactaactatttcaaaaattgtcgattaatggttacaggtaaaataaaaagtattggcactgttacattcagtagaaatccgttagttacattggatatttctggttcgaatgaaggattaaagtttgcttttgaaaatacagattatgataacaataaggtagcagcgttaaatgtgggagacacagtaattattgcaggatggaatgcacgtcctggaacatttgaaggtatttttttagatgattcgcaaatcatgacagatatgatttcaaaaaagaaaaagcaaatgctagctgtaaatggtggcgtatatgatcgggatatttgccagaagtaa

SEQ ID NO: 154780 - DNA, 288 bp, Enterobacter cloacae
atggttggacattttcacctgacagatacgttcatcgttgaatatattaaactgatacataaaatcgaaataactgattcattgatcagcggctgtttcactaacatatcagataccaatacccgtaaggttatgtatatggaaggctgcgatatgctatctaaagacacaatgaatgagatccgtaatgcagtgaaacatccgtctggtgacgtaaatatataccgccatgaaaataagattgttaagataacacttacggaagttcataatgaaatcacgaattga

SEQ ID NO: 154781 - DNA, 189 bp, Enterobacter cloacae
atgatcattgcagccccaatggccaataaagttcttgcgcaaattaacatgatggtattagaagatatatatgctaaacaagatgcaacacaaaataataacacgccaatcagagatatctttttgaaaccaattttatctgctagtacccccattggcagcaaaagacatgccataaccaacgaatag

SEQ ID NO: 154782 - DNA, 1446 bp, Enterobacter cloacae
atgtatctacccgtttctttagatgctactattctacatgttgcaacgccatctttagctttagatcttaaagcttcttcaaaagaagttttatggattatagatatctattcgttggttatggcatgtcttttgctgccaatgggtgtattagcagataaaattggtttcaaaaagatatctctgattggcgtgttattattttgtgttgcatcatgtttagcatatatatcttctaataccatcatgttaatttgcgcaagaacttttttggccattggggctgcaatgatcattccagcaaccctcttggcattaagactatctttcgttaagccaaaagagcgtgctgttgcactcggcgtatggtccgctataggcactggtggcgctgcattcggtccatttgtaggtgggcttttaatagaaaattattcgtggaactcagtcttttttatcaatatccctatttgcttcattgttttttttatgttagggagtcttagggaatataaagtattaggcacttctaaaattattaatttactagatcctttgcttttgatgttttctatattaatgattgtgttaggtgttaaaaacttaggggcttctgatgagtttataaagtatttatcattcattattttgggactagttttgctaatgatattttggaaaaggcagataaagcatgttcatccaatgattgatattgagctcttcaaacataagcctatattagcggggctaatacttgcgtttatcgctatggccaccctggttgggttcgaattttttgtttctcaggaattacaattagcatttgggttatcaccttttcaagctggattatttctatttccatttattatagcgagctctatatctggtcctttcgttggtttcacacttacatggttaggagttaaaaaaattggattttatggtgttttattaagttcgttatgtttctttttcatggcgtttatggactttagttctaatggatgggaggtttgggttgcaatgattatattagggttttgtatagaagcagctctaatatcctctacatatgtaattatgaatgccgcaaaaaaagagaaagcgggggaagctggagcaattgagggaatggcgtatgaacttggagcaggaactggtatcatattattcggaatgattatgtcggcttcattcacagccaatctgtctgttgattttcttgctgatatcaaacaagctcctccattatcattaagtgaggcgttcagtattgcagatttattacctagctggcaaggacaagaattaattcatgcttcaaaaaatgcctttttaaattctcacgttaatgtaatgcttgttgcagcgattttgttaattttattatcatttattatttcacatttacttaaagagtactctgacacaaatgaatag

SEQ ID NO: 154783 - DNA, 753 bp, Enterobacter cloacae
atgattgaaatttgcgcatttgaaagaagtattggcgactctcattctaaaccttttatagggataagtgattcagggaaaagatatttcgtaaaaacatataaaaatgagaagacctcattttcactattttgcgattatgtatctgcgaaacttgctggcaaaataggcttgccatgggtatcggttcatactgctcatctagctaaagagatacaggagcatgaatctatcaaaaacccttttgtaattgcctttgattttattgaagaattgaactatttagatcccaaacatacattcacaaaagagcaagtggagtttttacatggtaaattagtctttgataattggatttctattagtgatgataagactgacacatgccaaatagcaaatgaaaaattaatctttttagatgcaggccttgcatttcaaagtgatgaagttaatgaggaaggtatcagcgataattgggtgatgagtggtttggaatggtcgccgcgagggatgtatgtagagagttcactatactcagaggatattgttattgagcgaggttatttatttccatggattgataaaatatcagaaatcaatattgaattttacagggagttaatgtctgagattcctaaggaatggggtgttccagatgaatataaggataaatttattactgtattctcgagttctaaggaggtctttgcttcactcatgcgaaatgaaattaattactccaaacttaattga

SEQ ID NO: 154784 - DNA, 1104 bp, Enterobacter cloacae
atggtccaggcgtggctacaatacattataatttttgttgattatggctttaactttagtgcgacgttactggtttcagttaataagaataatcaatccaaaattgattctatttatacagcagtaactgctgctaagttagcgttattactgatagtttcatgtatttttgctttatatgtaattatcaatggcacgagtatatactcttatctgatcctgttagggatgatatccgtaataggtacagttttattccctgtatggttatttcaagggattgaaaaaatgcagggtattgcaatatgtacaaccattgcaaaattcgtctcccttattctgattttccttttagtaaaaacgcctgaagatatgaatatggccgttataagccaatcatcagggatgtttatctcaggtattttggcttgtttctttataaaaaaacaaaaattggccaaatttacaagagtttcaataaaagaaatctattcggttttatctaagggatttgacctttttgtatctaatataactataagtttttatacgactttaaatatattaattataggatattttggtggcccgacgctggcaggttatttctcagcagcagataaaatccgaactgcagcgcaaggtttgatgagtcctgttcagcaagcgatgttcccaagagtcagttcattgattagtgaaggaaaaacactcaatgaaatctggcacttgtatggtaagaagtttattgcgttcggattgttaatatcggtcgcaatggctgtcataggataccctgtatcactttattattacagtgaagaatatcgaatatcgtcgatgatattgttgatgatgtctcctttgccatttatcgtttcagtgggcgttgtatatggacaatggtggttaatacctaatcatttcacaaaagttgtcaggaaaacatatcttgctgtgagttttatgcatattatagtttctatactattaatgcatctgactccaacatatggcgtgacaattagcgtgattattacagaaataattgtttcggctatttttgtcctggtgagttttaatagcgaaaagaattcaagatga

SEQ ID NO: 154785 - DNA, 1167 bp, Enterobacter cloacae
atgattaaacgaagacctagaaatccatctttttatttatgtctgtatgttgtctttgcattagtattatgggtttcacaaagtagcctctacatcacatttgattctggtttgatgatcctaattgtttcttatttatattttttcttaggatgctatataggtaataaaacaacaagatttcatcagcaagataatctaataaataatcaatcgctctttaatatttccttgcaggtaaaaatttcacttgtaatcaacttcttcatattgatttatctggcgttcctgtttaaaaatattgtgacgagtggtatttcgttcgcagaatacagagaaagtttatttaaagatcaatcaataaaagaatactatggagcatttgcagcttatttatttgtatttgcaaccctggtgccgctttttggcattagttatggtttgtatttgaagattaataaaaataaatctgcaatcttatttttctcatttttaatgttggtaggaaaagaaagtatcttgatttcaagatactatgttttcgctccggtgttggcagcaatattaatattatattgctatgatagaaaaatgactttgaagaaagttatttttgctctgggtgtatttttgattttgttattagccatattcacttttagaggtgatagcgacttaagtcaaagtcttattaatactcgcaattatgcgattgcaggttactcactttttactcatgcaattgatagcggtgatactgatatcttgtatgagctttctagtccattttcattcttaggtatactaggcgctaagttttacgaccaaagcgctttcttcacaaaagtccaagatttcgttctgctaggcagtgctggttattttaatgccttttatacatccttgttattacccttcctgtatttcggtagtatagggttagctgtactcagtatgttgtttggatatattgtatcgagaaatcacaattgctttatcaataagaactcattccttaacttcaactccctgtttgctttgattgttattttcttttctcatcagtttttgccggtgcagttatccttcttttgggattatttcctgatttcgttatcagttcatttgtttgtagtttgttatagaaatataaggagcaatttttga

SEQ ID NO: 154786 - DNA, 1089 bp, Enterobacter cloacae
ttgaaaacgttagcattttatcttccgcaatttcatgagattgaagaaaataataaatggtggggagagggttttaccgaatgggtcaatgttaaaaaggctacgcctctttttaaaaatcataaccagcccagagaacctctgaacgattattattataatttgctcgatgtagaaacattaaaatggcaatcggaacttgcaaaaaagcataatattgatggtttttgtttttatcattactggtttaatggtaagcgtttactggacaaaccagctgaacttttactggagaacaaagatatacatctcccgttccttttttcatgggctaacgagccatggacgcgtagttgggatggtagtcatcgagatgttatcatgccccaaagttatggtgacgaatcagactggctaaatcactttaactatctcaagccatttttcgaagacgaaagatacattaaacataatggtaagcctgtatttctattatatcgttctgctagctttgaaaagtgtaatgagtggattcagtattggcggaaactggcaaaagaaacgtctttcggtgatatacattttgtgtcaacacttacctcattcgctcaagatcatcgtaagctagattttgatgccgagttaaattttgaaccaatgtgtacttttgaacacaatatggggaaacttaaaccgatattgcgaaaagtgatcggaagaataaaacgtatttctaatgaaaaattaaaaacaaattacgttgagcagatattatcttatcaatcaatttgggataaaatccttgaaaaggattttagtgaaacacattattcaggtgcattcgttgattgggataatacgccaaggaaaaaaactaaatcactcgtgatgaaaggaagtaatcctcaggtatttaagaataatttcgataaactttataaaaaatctatttctgctaatgttccattcttattcataaatgcatggaatgaatgggctgagggtacgtatcttgagccggataaaaaaaatggatatggttatttgaatgcagtaaaagatactgttaaaaaatacaaaaaaaattaa

SEQ ID NO: 154787 - DNA, 870 bp, Enterobacter cloacae
gtgattagttctgtaactgtaacatttaaccctgatatactttgcttagaaaagcaatttctttctttgcaaggccaaatagacagtgctgttataatagataacggctctcgaaattacgaagagataaaagatttagcagaaaaatttaatttcgtcatgatcagtttgcccgagaatatgggtctttcgcatgcgcaaaacattggtatcgaaaatgctatatctcgcggtgccgaatatttattacttcttgatcaagacagtgtattaggtgctaatttcatcagtgccatgagcaagatgtacacccagaaaaacgttggtatcctgggtccttctttttatgatccgcacacaaacgaattttattggggcactaattacatcggtccatttattaaacgaacgccaatagaagaaataacagatgtcacctacgttattgcatctggctctttcttttcttctgaagtttacgagaaagttggtaaaatggaagaagcattgttcgtggattatattgatgtggagtgggccctgcgtgctaaaaaattagggtatcgcgttgcaatgactaatcaggcgtcaatggctcacacgattggtgattcaaggctgaatctgttaggacgtaaaatatctgttcatagcccgatgcgacgttactttttggtcagaaatagcttctttatgatcagaaagtcatatattccagtgggttataaagttcgtgaggttttccttaattttgctcgtgctgcaatatctttaattcttaataaagaaaaaaagaaaacgttgatgatgatcttttacggtatttctgatggtctttctggaagatttggaccattcaaaagacattaa

SEQ ID NO: 154788 - DNA, 579 bp, Enterobacter cloacae
atggcaaatgttattcatgattttatttatgatatctgccaatcaggaaatcttgagtcagctgttcaacaatatgcactctattaccactatcttgacgattataccttcatttttgcagcggagaaaggtgcgactccgggcttatcggttaacaggaacttcagcagtggttctgccgtgcgtagcttattcaaaacgccgcatgtgtttattcttacaccagacatattcagagaaatgtttatctctggtaaccgcgttacatttcccatcgactattctatctcgctcgatacgcaggtattaagttatcttaagcctttctttgaagggcaaagatcgcgacttcccgatgattttgaagaaatttttgacttcatcgccagagaggaagtcaatgttgatcctttgctgtatgaactcgaaaatctttgtaattttagcgatctcaataaacaggaaaaaatcttcgaacgcattcgagcttatgagatgttacgcaacctggatgttgcggcttggcagcagcataggcagttaaaatttaatgtgtctgaacaggaaattaatagctaa

SEQ ID NO: 154789 - DNA, 210 bp, Enterobacter cloacae
atgttccgcacgttccaggcccctctcctggccgctattcaaacatttatgccgttttgtttcagtgacaaaactcccataggcaagatcgggtatgcgcagccctgtcctgttggcatcgtcaaagataaaaatttcagaaaatgcgccttccgccgaagtcactttaatccgtcgagtcaaataagtggaaaagcaaaaaatgaatga

SEQ ID NO: 154790 - DNA, 1158 bp, Enterobacter cloacae
gtgttggcgccttacgccagcgcatcgacaaatgggttcgatgcccgtagcaccgcgatggggggcgtaggcgtggcgtctgcgcactttggtgcggctcccttaaccaatccggcattgcttgccacctcgcgcggagaagatcgtttaagcctgattgcgccgtcgattggcgcgcaggccagcgattcggcaaacctgattgacgggttcgatgacgtcaccacggcgtgggataatctggaaaacgcccttggcagcggtaacgaagcggaggcggcaggtaaactggcggaggtcgtttccgggctcgctggcgaaaaggccaatgcgaacctcggtttgagtatgatgctggcggtgccggatgattctcttccgatcgcgctgtccgtgaacagctgggccaaaggccatgcgcgtgcgttaatcagccaggctgacctggattatctggacggtgtggcgaatggcaccatcattccgggcaaagacgatcttgataaattaacgtctcgcgcggaaggtatggcggccctggtgacggaatacggtgtttccattgcccatccattttcgattggggacacccgggtcggggtggggatcacaccgaagatccagcgcattgaaacctggaattataacgtcgccatcaataattatgactcttccgatctgcgtgacgggaactggcagcaccagaccatgagcgccaatattgatgcgggtttttttgccgcattgactcccgagtggatggttgcgctctctgcacaaaatctcttcgagaataaagtgaaaacgcgggaaattaacggctatcagcccgcgtttatcattcgccctcaggttacggcagggacagcatggacgacggaacgtgttaccctgagtaccgatatcgatctgacacccgtgagtgatttccagtatgcggataaaaaccagtatgcggcgtttggtggcgaattccgggccaccgactggatgcagctacgggctggatatcgcgtggacatgcgcggtaacgatcaccgcattgtgacgggtggggtgggcctttcagccggggaatcaatgcagtttgatttaacggcaatggcaggacgaacccgtacccttggcggtattgcgcagtttacgttccgtttctga

SEQ ID NO: 154791 - DNA, 678 bp, Enterobacter cloacae
atgatgaataaaacccacgatggaataaaagtttataccccgctaacactgaaattgtatgactggtgggtgctacgcatatcaaatcagtacgcatggaaatgctcgacagagcgttatcttattcctcatttcagaaataatatgaaaagtaatcatctggacgtcggcgtgggaacggggttctacctgaagacaataccggatatttgcaatgtttcgctgatggatctaaatacttcaagcctcagtgcggcgagcagacgagttggcaaagacaacatcatagcgtctattcagcacgatgtcttcaacccttatcccactcacttgcacgatcggtttgattccctttcaatgttttatcttctccactgtctgcctggagaaatgcaggataaggcagtcgttatccgccatgctgccgctgcgttaacgaaagagggctgtttatatggggcaaccattctgggcgatgatgtcaaccataatgcctttgggcgcaaacttatggctgtttataataaaaaaggtatcttttctaaccgcaacgacaccgtggagaatttacggtctattctttcagacgcttttcacgaggtggagattacagtggaaggaaaaattgcgctctttaaggcggaaagaaagcgagctaatcctgagttggtggattaa

SEQ ID NO: 154792 - DNA, 408 bp, Enterobacter cloacae
atgaggaaatttgggctcgggctaattctggcctcgccgttggcgatagcggctgacggctcctggagcaaccagagctttggcggcacaattacgcgcgagaatcagacgctcaaaagcaaacctgtacaaagcccctcacccctgtctccgggcacggtggcgacacgcgtatactggaaaattaacaccagcggcccgacgccagccgggtttcggattcgactatgcagtgcgacgcgctgtctgaaactgccaggattagcaggtgagatggctttgtttgcagatattcccgctggtgggccttttcggtttgaatatgcctcgcccaaagggggtacattcaactttcctctgaccgtgatgagcaatcaaatgacggtgagttattcctctcaacattga

SEQ ID NO: 154793 - DNA, 705 bp, Enterobacter cloacae
atgcctacgtttaaggatagccacgcccaggagtggcacagctggcagcctgaaaatctgctcggggaaccccttgaaacgccgctgccgacgctggatagcgcccagtccgaggcgcagctgaaagccgagctggcacgcctgcgaaaacaggcggagcagcagggctttgcgcagggacagcagcagggacgggaagaggggcgcaagcagggctatgaggcgggccttaaagaaggccgtgaggcgggctttgcaaaggggatggagcaggcgcgcgcggatcagcagacggtgctgcgtgaagcggaacagtgggtcactcactttaagctcgcgctggagaacctcgaaagcctgatccctggccgtctggtgcagttcgcgctcaccgccgtgcagcaactttacggcaacgccagcgtggtggataaccaggccctggtgagccagatccgtagcctgatgaaacaggatgtgctgctccacggtacctttaagctgtatgtgaatccggacgcgtttacctcggttgagcaggcgctgggtgacacgctcacggcgctgggctgggagctgcaccgggacgcgcacctggcgtccggcggctgccgcgtggtgtcacctgatgcagaggtggacgccagtatggaaacgcgctggcaggcgctctgtcagctggctcgcgaggaactgtcgcaatga

SEQ ID NO: 154794 - DNA, 1050 bp, Enterobacter cloacae
atgaacattgatattgctgccctgttactgggcggcggggcgcagggcaaaccgaaagccgggttgctgtctgacgaggattttggcccggcactggagggcaagctggcgcagctgtttaccggtctggagccgcagccgctgccggaggcgatgctgcccgccgctatgctgccggaacagctcacggaggtgacggtggggaatgatgaggagatggctgacacgctgctgatggccctgccgggactggcggaggcgctgacgggtgtgaccatcacagaagtcgaaggggaagaaagcccgcagtggcagctacagcagctgataacccgcagcgtgacgggagcggagacagcggcgaagccagaacctgacaagcctgcggtgggcgagaagcctgacgcgcagggcggtaaaacgttaatcccccttagcgtgacggagaaatcacccgcgatgacgacgacgcctctgacggcacagtctgcgccggtcgcgagcgaaacggtcgccacgccagagatgtcatcaaccgcgccggtcagtgccgtggcgctacctgccgccgtacgcaccagcgttgcccctgctccgcagcgggtggttaccgtgaatcacccgccggaaacgccggagtggaagcagtcggtaagccagcatatcgctatctttagccgcaacggcctgcacagcgccgagatccgcctacaccctgaggagctaggttcactgcaaatttccctgcgcgttcagcaggatcaggcgcacattcatatcgtcagcgagcattctcacattcgccacgctatggagcaggccatgccgcagctgcgcgccgcgatggcagaatcggggattcaactcggtcaggcgaacgtcagcgccgagggacaacagtacgctgcggcaggtgagcagcgcgacaatacgccgggcgcgcagcaggctcagctggagggcgaagggcagccggacgatgacgacagcgtcccgacattattaaccaccacgccgggaaatatatacggaattaatacctttgcctga

SEQ ID NO: 154795 - DNA, 525 bp, Enterobacter cloacae
atgactgcgaatcgttctattttcaccattattaaatcgccgatcgccctgctgtttcttggcgggatcattatcgggaccggcgccatggcgctgtacgggttttatacctcgccctacaaggaggcctgtattgcgccgacctcgtattacattattgaggacgataacaacgcgacgctggcgcgcggtatctaccggtcttaccgtgacggcctgttcaacggacataccacctatatcggcagcatcagtcacttcaaagacggcaagcgcgacgggctgccgaaagccgtaaaccgcgaagtgcgctacgacattgatatgtcgggcaagcggctccatctgaccgtcaccagccagcatcgcaagctcggcggccagagctcggatgaagacgtgaccgattatatcttcccgcaaatcaaaccgggtgaagaggcgaccagcactgtctacctgctggacgacaaagtcctcgcctccggcacggagaccgtcgcccgtatcgcctgcatgaattga

SEQ ID NO: 154796 - DNA, 822 bp, Enterobacter cloacae
atgctaaacaatatcgcgattggatcgttagtgtcgctggatttgcagatccgtacgcttgcccgaacggatacgcaagagaccgtcacgcttccccaaagtgcatgtctgtgccttgccgcgctggtggaggctcatggggaagtgctttcccaggaacagctgatggagatcggctggcgcagcgccggggtggaggtcaccgacaacagcgtgcgggtgatgatcaccaagttacgccgtgcgttcgctcagctaaacctgcaggaggccgtcacgctcatcgccgtaacgcgcagcggctatcgcctgctggtgcgggagagcggcagcgaagtggcgcctgcaacgcagataccagatctcccgcagcaggaagcccccgaacaggccgttgcgccagaggtaccgccgacggtcgaacccgccccgccgcgcgcccgcagcacgctcatgcaaaagatctgcgccacgctcagcggcgtgctcgttgggctggtgattgcgctactcctgcgcggaatttttgattttagcccgcagccggtgcactttgtgcgctggaatggccccggcgtgccgcccggtaccgaggtgatggttcagcaggacaaacagtcgcagaccgcgctgattgaatccacgctgcaaacctatacccgccacgttctggcgcgccgtaccgacgagaagcccgcagccgtactgtatgtgacaacgggctcggaaaagatgagtaaattccaggggcttattgcctgccaacaaccctttaaggattcagggaatgactgcgaatcgttctattttcaccattattaa

SEQ ID NO: 154797 - DNA, 492 bp, Enterobacter cloacae
atgttctctcttaagcgttttatgcatacgtccgatatgccggccatgtttcccgtatttatctgtcgtctggtgttaggtgtatttttcttttctgccgggtttaataaattatttgttcctgagaaccagctgctgatggtggataccctgcacgatgcggggatccctttcccggttgttatggcggtagtggtggcgttcctggaatgcagtatgggtctgctgttgacgctggggttgttcagccgcgttagcgcgctggtattaatggtcatcagcagcgtggcgctggtcacgattgggatttacaccattccgcgcgggctgaatttgatttcatggctgagctggctgctttatctgcccgagacgctctatgtggtgctctgcctgttcccgttgacctggggcggcaccctttgcagcctcgacggctggctggtcaaacgttggcagaaggtccgcaaaattgtttttgttgagggttaa

SEQ ID NO: 154798 - DNA, 1866 bp, Enterobacter cloacae
atgctggtctctgctttctttattttactgaccctcattaccctctgggttgttatgcacttcattgcgcccgcgctgctgaaagatgagcaccggcgcgtgcactatcaaattaacgagcacaccgccgccgtgacgcagctgatgtcgcgggtacaggcgcagcagcgcgtattgacggaaaccgtcgcgcagctcgacagcgcgcaaatcgaccctctgcttcccgccctggtgaaccagaacggtgacagcaccctgtttggcggcggcgtgtggccgctgccggggaagcgtgagccgggcgtggagaaaaacagcacgttttatgccagagacaagcagaaccagctgcagctgaacggtacgtggaatcagccggatgcggctgcttactggcagcagccgtggtttaaggctgggatgcgtgctgcaaaagggcaatgtgcgtgggccgacgcctatatggacgccgccagcccgcagccgcgaaccaactgtgcgatgccgatctggcgtgacggtcagctgtggggcgtggcgacgctggacgtgacgctgggcttcttcaatgagcttgcgcgcaagatcgccgagccgctgcagggcggcgtgctgattgtcgaggccaacggtaaaattatcggctacagccgcgccagcgacaccacgccgcagctgaaaaatattatcgacctgcccggagatgaaattgcccttctgcaggagatgctgtcgcagggcagcggtggctacatcgaacgcacctatgaggctgacgatggcgaacataccatcttcctttctccgattgccggcagtccgtggtttgtggcaactgatacccaaagtagcttgctgaaccagcagacccacagcattctgctgcgtttgggaatggtgcagatcccgctgctgctgctgttgggagtggttttgattctgaccgtgcactttatgatgcgtaacctccagaccgtgagcgaccgtctggccgcgctgtccgcgggcggggccgatctgaccctgcgcctgccgcagagccgtacgcgcgagctgaacgctatcgccgacaacgtgaatacgtttatgcgctatctgcaggggttgatacagcaggttggagcgagtacgcgcacgattgcggcagcctctcatcagattgcagagggcaacgtgtcgctctcgtcacgcaccgaagagcagtccgcctctctgacgcaaacggcggcgtcgatggagcagattgccggtattgtgggcaacaacgccgacaacgcggcggatgccgacaggctggccacgcaggcggccgccgtggcgcagcagggcgcgacgctgatgaatgctgcggtggaaaagatgagtcatattgaatcgtcatccctgcgcgtgaccgacatcgtcggggtgatcgacggtatcgcgtatcagaccaacattctggcgttgaatgcggcggttgaagcggcacgagcgggcgagcaggggcgcggttttgccgtggtggcggcagaggtgcgaagcctggccctgcgatcctccagctcggcgaaggagatccgcgagctgattaacgacgcggtgatcggcgtgcaggacggcagccgtctggtgcaggaggtcggggaaatcatgaacgcgctggtgacgtcggttaatgaggtctccacgctgatggaagaggtcaaaaccgccagccgtgagcagagcgtcggtattgagcaggtgaacgtggcggtatgtcagcttgaaagcgccactcagcagaatgccgcgctggtggcggacgtgtcgacggcggcgaaggcgatggaggagcaggccgcggagctggaaagcgtggtgaaccggtttagggtgtga

SEQ ID NO: 154799 - DNA, 450 bp, Enterobacter cloacae
atgactattctttccactctctctgaatcatcccgcgttaactttatcgaaaagctcattgccttaccgcttccagcctctgccgacctttttgatgtggtcgatatctgtgcggcattcgcgagcgcgttggttgaggtcgacactatacgcgaacgcaacgcgctctgcgggcgcttgctacacgctctggatgagctggagcatcgttgcgacgatgatctgccaccgcatttgattgaacagctcattgcaggggacgctgcgccgtcatgcatgccggatagctggcaggatacagccacaccggttagttatgcgcaagcgctggcacaggctattctgggtaatactctgccgcagagtgtgaataaggcattgaccggattactgcatgacatggtgcatctgttagccgattttgtgaaggaaccttacctgcacgcttaa

SEQ ID NO: 154800 - DNA, 1458 bp, Enterobacter cloacae
atggcacaggtcattaataccaacgcattgagcctgatggctcagaacaacctgaacaaatctcaatctgccctgggtaccgctattcagcgtctctcttccggtatgcgtatcaacagcgcgaaggacgatgcagcgggtctggccatctccaaccgcttcacctcttctatccgcggtatgacccaggcggcacgtaacgccaacgacggtatctccctggcgcagaccactgaaggcgcgctggaagaagtgaccgaaaacatgcagcgtattcgcgagctgaccgtgcaggcgaaaaacggcaccaactctgaagacgaccgcaaatccatcatgaaagagatcggttcccgtctggaagaaattcagcgcgttgccgacgtgaccaacttcaacggtgtgaaagtgttcgacggttctaaggataaaatcaccattcagatcggcgataaagatggcgacactattgatatcaatctgaacgaattgaacctcaaagaactgggtctggaaaacttcggtagcgactttgctaaaattacggcgacgatagacgatccacaatttagcgggaaaggcgttgtaggtgctaatggtcaaaaatatgataccccagcaggcgaatacactctgaccaccgccgatattactgctgtcctggctaaatcaactgtaactggtgctgacaaattacatacctatacagaggatgatggcactgtacgcttctttgcggttaactccacaacccaggaagcacaagaaatgaatatcaaatttaaagataatgctggtaacgttgaaattgatggtgatgcaacacctggtgctgcactttccaagctggatgccgatgttctgattaacggcctgagcacattcactccagtcgcggttaaaaacgacgatattctgaacgataatactggtgcagcaaccgcatttaaactttcagataaattagacgaaatttccgcggctgcattcgctggtgctgatgccgcaacctctggtattcaggtattctctggcggcacgccaaacagttactatgcggtcgacaataatggtgaagttaagtcgttcacccttgatgctgcaggggctgtgactattggtgccgatcccgctccacgtgatgcctacgctttcgctaaagccgcttcaggcgcggctggcgcagatactctgatcgatcagttggataaagccatcaccaaagttgccgatttccgtgccgacctgggagccgttcagaaccgtttcagctccatcattgcgaacctgaataccaacatcatcaacaccaccgaagcgcgctcccgtattcaggatgcagacttctccgtggaagtgtctgctatgagccgcgcgaacatcctccagcaggctggcgtgtccgtactggcccaggcgaaccaggttccgcagaacgtgctgtccctgctgcgttaa

SEQ ID NO: 154801 - DNA, 1494 bp, Enterobacter cloacae
atggctggaacgaattttttaggcgtggggtccgggctgccgtttgatcagtggctggcagatgagcgcaaaggtattacgaaaaaactcaatccttatctgcagaagcaaaccacctataaagggcagatttctgcatggggctctatttccagcgcgctgagcacgatgaaggacagtctcggcaagctggaagatgagggatttaacggcgtcagcgtgagtgacaacaaaacctttaaggccacagcgggcgaaggggcgattcccaatagctattccatcgctgttaaacagctggcgcaagcccatcagttggcagtagtgaacgatacgcgagatcaaaaaattggtgacagtgccgcgaaggtcaccataaccctgaaagagggtgaaaaaccgatggagctggatctcaagagagacgaaacttctctcgagcaaatagccaaaaagatcaatgaacagaagggcgatgtcgtagcggaagtgataaccattgggggcgggaagcacaaactggtgctgacctcgaaaaaaaccggtgaagccggggaaatggatatcaaagtgacaggcaatacggcgctggaagctaagctggcagatgctgccgcaaagcctgaaacagaagcgcaaaatgcggaaatatttctcaacggtaaccttgtcacccgcagcgctaataccataaaggatttgatcaccggtgtgacgcttgaactgcgggaagtatcggatatgaaggaccctcctgctgacccggccgaccctaacaatccggaaaactacaaaaccgaatccctgaccatcaccgaagacacctcaaaggtgaaaacgttgattgaggagtttgtcaaaaattacaacaactacctcaacaccgtggctggcgcgaccaaatataccgctcccgatcgcgacaaattagcaaaagatgaggtccccacatccgacccgaccaatggtgcgttgttcagtgacgggtctttacgtcgactgaccagcgagctgaaagccaccgtgacgggcagctatcccgaggttggggatgtcattcagacgctgggtaaaatagggattaccgtcacgttcgacggtaaaaccggcgatgatcgtaccggtacgctcggcaccctgaccatcgacagcaaaaaacttgatgccgccctgaaggacaacccgaaagaggttgaagcgctgttcctcggtaaaggtggtaaagagggaattaaggaccggatggaagggatttttaatacctatcttggtgacaaagagtcgattgagaagaaagaaggcgtgatcgaaaccgcgctggactccctgcgcgatcaggaaaagcgcatcggcaagcagatcacggccattgaacgacgcattgaagagaccatgctgcgcagggagaaagagtatcagcgcctggataaggccatgagcgatatgaacaacatgagtacccgtctacagcagtcgctggcggggctggtttaa

SEQ ID NO: 154802 - DNA, 321 bp, Enterobacter cloacae
atggataacgacgtgatggcgctgattgatgagttgctcatcagcaacgcgaagctgcggcagcaggccaatgccggcgagtgggatgtgtttcttgacgagtccgtggcgtacaccatgggaatgagaacgctgtgtgatatcgatttaacccagctggcacagcacaataaaacgtcggtcagcgcccggctggcgaccctgcttgagaacgatgccctcttaacgcgcgccattcaggggcgcctgagcaccatcagcaccgaactctccgccatgcgcaaaaccagcagcgtggcaaaatcttacaccgctgtttaa

SEQ ID NO: 154803 - DNA, 1641 bp, Enterobacter cloacae
atgaataacctatttaatttagccagaaacggcatcagcgtggcgcaggccgcgatccgggtgaccggtgataacctgaccaacggcatgtccggcaactatagccgccgcagtctgattatcggtgagcttggcggcatgtcgaccgcgcagggattttacggctatggcgcccgcgccagcggcgtagagcgtgcctacgatgccttcgccaacaaccagctgcgggactcgctctccggctacgcctccttcaccggacggatggaacagctggcggatatcgataacatgctcgcggatgaatcggataacgtctccgtttcgctgggcaagctgtttaaggatatggcgacgctgagcggcgacccggcggatggcccggcgcgtgcggcggtgtttacttcccttgacgtgctggccaaccgctataacgccagcgccaaacgtctttccggccttgaaaagagcaccaatacccagattgagcgcagcgccaaggagatcaatagctataccgaacagctggcacagctgaacacacagctggagcgtctgcaggggaacggcgcgccgcctgccgatctgctcgaccagcgcgatgcgctgctggaagggctgagcgaacagctggggatcaccgtcaccgaggatcagatttcaggtcgcgtgagcgtcacgctgcccgatgggcgtccgctggtttctggcggcacggcctataagctggaaacctctccgtcggatgccgatcccaacaagatgattgtgtcgtacgtggatgcgaacggcaaagcgtcgccgctggatgaaaacgccatcaccaaagggcgtctgggcgggctgtttaaattccgcaacgaggatctcaccgccgcgcgccaggatctggatcagatcgcctttatgatggcgcaccggatgaacgagcagcacggcgaagggcttacgcctgagggcaatcctggcggcgatctcttctcgttgccggatatccacgctatcgcgaacgccaaaaacaggggcggcgacgcgcttgatcagatcgcggtgatcaatttcaaagaggtgaagtcggagaactatgacatcagctttgatggtacagactgggtggtgaaaggggccgatggtcgtaccgtacctctcgatcccgctgcaccaccaggaacgttaaggttcgatggtatcgaaattacccttccgaacccttccaccgccgttgcgggggataaattcacgcttaacccgatggcgggcgcagccgaaggcatcagccgtaagataaccagtgcgcaggactttgcggctgccgacccgaagggcggagaggggaataacaataacctcgaaaagatgctggaaatccagactgaaaaactcattggtgacgacacgctgagcgcggcctacgcgagcctggcaggcaaaatcggcgaaagcgcgcgcgaggtgaaatcctatgccaccagtgccgaaagcgatttacgcaccaaatatgacaccaaacaggcgctctccggggtcaacatggacgaggaatatatcaacctggacatgttccgccagtactacaacggcagcgcgcagctgctgaaaacggcgaccgccatgtttgatgccctgctggccatccgataa

SEQ ID NO: 154804 - DNA, 354 bp, Enterobacter cloacae
atgaaacgtttattactgctggtattggctatcaatgcttctgctgtttatgcccaaaatctgcctgccgtcagcgcttttactcagcaacaaatctttgaaaattgggtgcaaaaccgttgcatcagtaagatcgcggacagtaaaagtctgaaagatgatgcagaggccagcgcggccgcatggctcgaagcaagcgatctccctccggagaattttgaaaaagctgacaagatcattgataccctactaaaagagaaagtaggcggtacagaacagggtgattatcaggtattgaagtgcagcttaatcgtcaatagcgacgcaattcgtcctctcaataacccaaaatag

SEQ ID NO: 154805 - DNA, 294 bp, Enterobacter cloacae
atggcaaatcaatcaaacgtttctccgggttactgcatagtgcagcaaccgggcactctggatttccaggctagactcttattcaacaatccaaatagtgatgctgcacgttatttcatgcagattaatagtgatgcgcagtggtcaaaacccggacagatgttgattcttgatgcaccgcgaagtaataattctgttcaacttaagcaattacagcttgcaaaaaataaagtcaacggtgctctggccgaacttaactctggagaagcgaatttttttaatcaccatttttag

SEQ ID NO: 154806 - DNA, 1134 bp, Enterobacter cloacae
atggatttatacttttcgatttacttagttttcacatgcttagccttggcaattgtgatttttagcctaccgctattcaaatttatagatgaagatactgaaccgacaaggtcaaacagtatagatggtatgagatacgtccttgcctcatttgtcatatttcatcatatggattgtgcttacacatttattaaaaaaggcaattgggctccgacatcagacttgttgctctattttgggcgatacggggttgctttattttttatgattacagcttttttgttttgggggaaaatcagaaaagcaaatgaagtggattggattgaattatataaaaaacgcctttacagaattgcaccgctatccgtattttgctccatagcggctctatctttacttttcttattaaccgaacgaaatgaattttctcttagtgtaataaacaacgcgctttcctggtttgatttgggactctggaatgacaaaccgccggtcactattttccagtatccttttatggctctggctggggtgacgtggacactgcgctgggaatggattttctatttctctcttccgttgttatatatgttcaaaaaatggtcctttgaattaaccatttttctttttgccttctccgtatattttcttccaggctttacgaacgattcatctttgtggtcttattttttcatcggaatgttatgccgggaaatcaaagacagaatagtcataacaaaaaaactggccaatgctgctttgatttgcacgattcttataaccctgttagcgcaaccaacactttacggtccttctgagaaactattcctctgcgcgatattcttttcagtagtttcaggcgcgaatctttttggttttttaattaccaaagcagccattcgtctcggtgcaataagctacagtttatatttgacgcaagggttgattttattccctttaatccttcacttcaaaacaaacaatgaaccagagttaaatgttcatacttttgtgatcttagtcttatgctacgcggcaatatgctttctatcttccattacttaccactttattgaaagacctttcataaagaaaatgagcattagtagcataaagaaagtatacgagaaataa

SEQ ID NO: 154807 - DNA, 243 bp, Enterobacter cloacae
atgctggcttacgtaaaccatctaaaattatctatcgcaaagtgttacattggcagcgattggacctttagttccagctatgatagcgaatttgactttttgtccttcaaaaagggtattaaatgtttctccccgcagggaagaagtgtgaacaagaacatctttacttccatcaagtggggagataaagccaaaccccttatcttcgttaaaccacttaacaagacctatgattttagatga

SEQ ID NO: 154808 - DNA, 246 bp, Enterobacter cloacae
atgcctgaacagttcgtaatgtggttgtatgttgcggtaagcctgccctgggtacatggtgcgttgaacaaaatcgctgatccactgctgaccatcgtatatgcaaacgtgcccgctatcatgaccaacaatattttgaataactgcgacgtcgcctgcatggggttgatcgtatacaaggcggaatccagcgttaaccaatgtccgccccatgtcttttgccagacgcgtattggggatttttaa

SEQ ID NO: 154809 - DNA, 1791 bp, Enterobacter cloacae
atgaacgtgctctttaaaactacgtctctcatctcaaataactatcgcaaaaaattcacgtcatcattactcgatttctttttcattattgtttttttcacattagctatcgctgaaattaaaaaccccgcaccattaccaaattatttatattctttattacattatctatggcttgccagtccactgcctttagcctatatctttctccgattggtaaaacttccatcattcgtttcagcctatgttgtttttttactcttaaaactgcttgaatacatcagtggcatcaagctatcactcacgggtgaagtgttgtcctggaatgatttgttttctcaatccaacataaccattgcaaaacattacctgacagcctggccagtactcttgcttttcctcgcaatttcattgtgtgttattttatgttttatcagtaggacattttacacaacaaagaaaaacaccattgtacttgccatcagttttatcaccatattaccattttccttttatactcacttcagctctctctttggcgaagacagcattttctcccgtaaaatgatattattagctaaggaaatgaatgtcacttataaatcctggaattggcctgaaaacctgcaggataatggaatggcaatgcatgtcgtgatgaccagttctcgaaaatctgcacctttagccagtaaaaacaataaagatacgtacaatcttgaaaagcgcgcagggagtaaggaattaccaaaacataaaacagttatttacgtcctgtgcgaatcatgctggtatgacaatgccaacttcaaagaaattatcaccccaatattaaatgaaggttttgttacgtttcgagcaacttcacccgtttatggcggaggtactgcgaatgttgaatttgaaatgctcaccggcttcgccagtaattcaagggtattatctggcataatttatcaagaatatgcgacacagttcaaatcgcataccgattccattgccagcgctctgggcgataaaggctttatcacctatgccgcacacaattatttgaaagagttttggcacagggatactgtttataaaaaatttggctttgaacgcttcgatggcctttatgaaatgtcgactataagcctgcctgaccaaattgtggcaggtagaaaaaaatggcaatggcaacccgatgattacctgctttacaagtcagccattgaacatttaaaaaaagctgacggaaagaacattttcatgaatttaattaccatgtcaacacatggcccgtaccctcatgagaacgactcaggcgagtacatctataccttcgaattgaaacaagcagttgaccgctttgttgacttctacaaggaagtaaaagaaatagatccgaatgccgttgttgttgtttatggcgatcataagcctgcactgaataaatttttcatgaacaagaatgttctgccatccaatcttttcagcaaaacaggtgaaaatgacaatgattttgtatttaaatgggatatcaaaccgacagattacggcgatgtcccggtgtttgtcgctgcgggcaatgataaaaacttagaaaaacttgctcaggaagcgaataatcaaccctatttttgcgtttcatctcttattgataaatatttaattaattccggactaacaagcttcagatataacgttaaaaatcgatgttttgacacaagtcattcgtatgaagaaaaaatcaatgcgatgccatcatgggtatattcgatggcactattcgaaggcgatgaaaaatga

SEQ ID NO: 154810 - DNA, 636 bp, Enterobacter cloacae
atgtcaaaaattaagtattcaacaccgtttaaaacagccttatttattactgttatgctattaaacgggtgtgatgcaaacgaaaagaagcagagtgttggttatgtcgatatgaaggtagttctgacacagtcaggattgtcccttcaagaaaaagcctatctggataacgttgccagcgtgcttaaagaagcaaatgacgaggcgcataaattgtatgaaaaaattgatacggataaattaaacgagttgcgtgaattggatcaactgcttttgcaaaaatcattacgaatggcacgctattctgcaagaaacctcctctatacaaagacaatagagacggcaaaaaatatatgcgataaaaatgggttgaaaataatacattatggtcctctgatacttacttctggcgactatatagatgtaacagatcaggtcattgatgcccttaaaggctctcaggttgattttggacatattccaaaattacaaataatattacctgaagataaaggagagggtggtaagtttatgacgggagttataaacttaagtaaattgtctaatggcaaccccaggtctttagtcattgtaaacgggttcttagggacttcctttattggatttgcagcatga

SEQ ID NO: 154811 - DNA, 612 bp, Enterobacter cloacae
atggtgatattgtttattggagccgataatttttgggcagaaggtgttaggcatattttagaggaaacgtattcagaaagtgtgaagcttgtttcatttcagaatgcgtgtgattctgtcaatcaaaatgcgcttttttacagaagatacgactttgtatttattgatatgatgagttatgttccagcactctatgggaacttatacaacatattaaaaaacgctaaagaaaaaattgttttcattcagccttcaaattcaaccggtgtcaacattcatagtagtctggtatcgaaatccataacgctatccaggtacatggcgattgaatcgttgaaagttaaactgatgtctccctgtgtttgcaaggaaaatgatttaataccacataatcattaccagtcaagctttaaacgctcgaaagctattatgaatgctttcgaacttgaagttattagatccatttccgctggagcgagcgtgaaagatgtcgctatacgaatgaataaaagtgataagacaatttatcaactactatcaaggataaaaatgaggatgggaataaaaagcaagcatgagttcctgtatttcttgtcatcatttggttcatga

SEQ ID NO: 154812 - DNA, 582 bp, Enterobacter cloacae
atgagccagacaacccgtcagttttttacgttttatatgatcattatggcactgtctgtggtgctgctgggaggatgtgatatgaagaaaaaaggaaatgatgttgcttacgtagacctggcagcggtcttgtcaatgtcaggactcgcgcagcaggaaaaggagcgcatggatttggttgtagatgcgctgaaaaaggccgaaaccgaagccggaaaactttatgaaaaaatggacaaagaccaaagagaaaaagcgcgccaggccgatcaaattatgcttcgtcgcgtgctggctgaagcagggcagtctgccagaaacagcattttggcggaggcccgccaggcgatagagaaggtcagacaacaggaagggctgcgtatcgtgatggacggttcgctgatcctcgcctcggcagacgataccaatttaacggttaatgtcacagaagcgcttaaagatgttaaagcagactttggccctctgccttccatctctgtcaccagtccgaagcctgaacctgctgaagcggctaaagagaataaggacgtcataagtcctaaaaataaaacctcaaaataa

SEQ ID NO: 154813 - DNA, 7902 bp, Enterobacter cloacae
atgaacgcaatttataaagtgatatttaacagagcgaccggacagccggtcgttgtatcagagttcggtaaaggtaagcagaaaagttctacctgcaagtcgataaaaaatgccatggtgttcctggtggcacttaatgcaatgccctctttttctgcaacctgcgatatagcaacatatatctgcaatttagataccacctggacggtagcaggtaataataataattatggagctacaacaattagtgatggaaagacatggcttgtcaatggtgtgcaaaattgggaatattcaggcgtaagttataagaattacactaatctcaaaaatgtagttaatgatggatatgttgtcaaaactggaggtaatattgttacatctttaccctctaattctctgtctttaaaattctcaggccttgataaatctataaaagtgtttgatagtattactcaagcacaaaaaactataaaagtatattcaccaaatgctttaacggaagtggatccatacgcgttttctgtttcggttaactttctcaaacaaaatgcaagttactacaacaacacacagctgattaaagtgaatgatggtattgcaaatattgcccttagtaaaggggcggtatacaatattggagagattagaaatagctatcttgcggaagtagatggaatctcaaataatgcaagcttgaattggatttcagagcaaacattcattgcatcctctattgactggattaatacgtcaccaactggtaattttaccagtaatgtgactagatataatggtaaatttgtaacatttgatgggagttctaaaaatgttaattccctgcaggaattcaaagattataatgattggttggtttcttcaatcgaaaatggtcttctagattcaggggactatattttctggcttaaaaaggcttacgatacaactacaactaaatatgaatattctccattccctggaaatgctgatgcatcaaatattccaaatgctgagggagctattgtatatgcccatggtagcggagcattagcaacaatttctcaattgggaaagatagaggtgcataatggagccaccaatacatttaaagtgattgttggggaagacgatgcaaccattattaatgatggtaaaataattgctactgggcgaattttggacttgacctctggagcaaaatttacaaataataacctcctttcgctaggcggtgggaatactagtgcctattctaatggacaatacagcaaaacaccaattatgttaatggataaaggcacattattccataatgcaggtgtttataatataaatgccaggcatgcttttaacggcggaaacggtattgtttacggtataactttaaaagataatgctagagccactaatgatggtttaataaatagtggttattggtatggcgatacgggcttggcagatactttatcaggtagcgtacgaagcgttgttgtatctgatggggcttcctttactaaccaaaacggcattattcaattaggtattggtgaggatggtgtttcttccgattatcttggaaatgaaagtgctgctatagaggcagttaacaatggtaccgcattaaatgccgggaagatcgttttaggttctaacgcagatggcgtttttggttttcttgctaatggtaataacattaaaatgtcgaatgtcggtaccatcgacgtaaatagcgacggcaacggaggacagtacacccctgcgcagagttctggaatttattcgcaaaatggcgcgtctggaaatattgataatgctggaattattaacctcaacggttctaacaatgtgggggttaaggccataagtggggggggggcttcgtcttcgggagtcattaatgtaaataaagcttcaggtcaaagttcactgccaaactacggtgtgtgggtagaaggtaccggttcacaggttgaaattgccgggacagtatatcttaatggtgatggtgctatcggcgcccatgcccgcagcggtggaacaattaacctgacaggcaatgctgctgtaaaatttacctcaggtcaaaaccaaattggttacttcgtctacggaacaggttcacagattaacaacagcagcagcagtgtgcaggacgtaacgtcagacgactcaacccttatgcgtcttgacggcggagctacctttactggtagctctacacctggctctttgatgagggcttccggacaggactcgcgaattctggttgcaactggagcaggtacatctgtcagtacaggaaaccttatccttgacctcactggccagggagctatcggtgtgctggttgaaggcggagctactggtgttattgatgctggcacaaatcttctcttgaacaacgccagcgccatcgcggctatcgctgacggagacggacacgatattagcggtaaatttaccagcaatgaaaccagtacaaaactggactcctcagcgaacctgtcctcaactgaagatcaggtgaccggctatattgcccgtaacggagccactctcgaaaattctggaaatattaatttttctggtaaaaacacgacaggattgcaagtcctcgatggttccacggggaccaacagcggcagtattaccgttcaggatggggggaaaggtctggttgccagttcaaccaaccaaaggacggctattaataatacaggtaatctgacgcttaaaggcggtagcgatgctaaccgcaccacgggaatccaggcctccggcaacgccgtaactgtcaatatgaccgctggtaccatcagtctggaaggccaaggggctataggcgttgaagttaccaacggtgcctctgtgaacctcgcgggtaccgcgttgcctgtgtttgcggactcgacgagcggcgtcagtaatcagatcgcattcctgatttcaggtgcgggctccacgcttaatgcccagacggctaccgtgatggatgctaacggaaagggttccacgctgttcagaatcgagaaaggtgcctctcagcagggggtactgtcttacaacgtatccggtgaagatggtcgtgggatctgggctacaggttctggcacgctggtgaacgccgctgcaggcagtcatctgtccattcaggggaccggtgcacagggggtgtatgctgccggtggtgccagcgcaacattgtcacagggcgtgaccgcggatctcaccggttccggggccgtggtcggtgttgttgacggaaatgagtacgatcttgctggcactgttaccaaaaccaataccggcacgatcctcacgaacgaggccgatattacctccggactcgccggtgcgacggcatttatctcgcagaaccagggcatgctggtcaacaaaggcaatatcgatctgaccactggcaccggcaataccggaataaaggttatcagcggacagttcgataatcaggccagtgatattaccgtcagcggcgtcgctgtggatgtggaaggggcaaactcaaccgtgctcagcaccggggggcgcattatcgcgactgacggtgtggctgctatccgcctcagtcaaggggcatcccttgatttagtggggagcggaatgggggtggttgaaggtcagggcacggcgcacggcgtgttgctcgataccgatgccgcagggcttattgtcaacggcgcgcgaattgatgtgaacgccgtgggtgccagcggaaacggaattgaaaaccgggcagagattgccggtatccagctcaacaacacgactatcaatgtgcaggacggtaaaggcgtcaggacatcagccacgctggcgcaacagaacagcgggacgatcaacgtagcaggaaacggcacgggactcgcattcatggctgcggacggcggtattaccggcaataacctggatttatccaactcctctggcctgaccattaatctttttggcaaaggaggcaacggtattctcgccaacacggcagatggcgcgacggtaaaaactgcagtcagcgtgaatgtgacaggagcagacggcggttccgcactggtggtgaataatcacgcgaaccgcgttgaacagaccggcgttctgcgctcggcatctaactcttcagcagtagtggatgccgcgaaggtcggcacgtttatcaataccggcgctatcatcgcggccacagacacctcgctggctatggcctttgatgacggtgtcgataccgtcatgcgtaatggtgtcgggggcgtaatccagggggttattgcacttaataacggcaataacagcctctactttgatgacgccagtacgctgaccggtaccgccactctggggaacggaaacaaccgcgtcaccctgaccggtacggcccgggcggacagcgtaattgccggtagcggtgacaacatctttacggtgaaaggcagaggagccgtctttaatctcctcgacgggggcacaggcagcaacgacaccctggtgttcgatgccgccgtgcaccatctgaccagtgcgtcaacgcttcagaattttgagcgtgtggccctcaaaaataactcgctcctgaccctcgaagaagcgctggtgctgaccgacggggggatcggggccggtgctgtcgacatcgaacgtggcagcgagttggcggtgaagccttctgtcgcgggagatttcacttttgacccgacgcttaccggtcagggcctggtatcggtcagcctcgattcctcgcagtcggattttgctttcaccggcaatacaggaagtgatttcgcgggcaccctgaaactgggcaccagtcatttccagctggaaggcgataacacgtcttcactgacgcaggcctccctggttaccgggaatgaaagtgtggtcacggtcggtacgggtgagcagcaactcggtagcctgtcctttgacgggggaaccgttcagttcggggccgtcatgccgggcgatgtcattgcagacaatcacatcaccacctctgccagcggcacgctcgatatcggtggcaaggggacggttcaggtcacactgggtggcggggtaattaaccatgttcctgccagccttagtaaaaaatcgctgatggagcaggatgatgccaccacgctggttcagcttgccggggcagaaggcgcggtaaaaggaacgggtggtcagcttaatctggtggatgaaaacggcaacgttatcagtgacgtgcagcatctggatatcgttcaggacggcaacaccgtcgcgaagggaacctgggattaccagatggtaagcagttccgatggtatcaccagtgacgggctgtatatcgcctacggtctgaaagaagtcgagctgatgggaacgggcgacaatgccctgacgcttgcggttgggccggatgctcaggggctacagaccgatctgcgcgtgaaggtgaccggcagtggcgatctggcgatcgataccggcagcgcgcaaaccgtgagcctgtcgaatggcggtaatgattacactggtgccaccagtgtgatcagtggaacgctgcgtcttgatgccgacaacactctggggctgacttcggctgtgaatgtcgcggctggatctgtgctggatataaacggttcataccagacagcgggtgcgctgaatacagaggctggcagtcaggtcatgcttgacgcaggcagtcatttgacgctcacccacgcgcagcgtgaggctggcatgaatgatgcgggatccatcgccggtaacacacttattggggcgggtgagctggaggtgctgtccggtgaactttatgtcgatggtgcgaataccggctataccggggaagttgccctgaacggcggcgcaaacgccatgcttaacgatgtggcgggcctgggtaacagtggaacggtcacgatgacgtcagcaaacgacacgctgacgctgaacgatggtgtctctggtgcgctggcgaaaacgctggcaggaaacggggggggcgtacttaaggacggtgcagatatcactctggcagcagataacagcggattctcgggtctctttacggtggagagtggagcaaaactcactgctcaggggcctgggcagaccggtaaggccgacattgagaaccacggtagcctggtgctgaacaatgtggccgcctggacggtagaaaaccacatcaccggtacaggggatctggtgaaaaatggccggggtaacgtgacgctgacgcagtccgccgcgcactacaccggtaatacagacgttaatctcggcatactcactctgggtgatgtggacaatgcagtttcgctggcttcatccgctgtaaacgtggctcgtggcgctgtctttgggggatacggcagtacggcaggcgatgttatcaaccagggcacgtttgtgctgggagagtatggcgtcgtggaggcaaccccactgcagttcgctgtaggcggtaatctgaccaacgccagttcggtgttgatcggccagtcgggagccagggccggtaacacgctccaggtgagcggtgactatgttggcaacaacggcactatccactttaacaccgtgttgggtgatgaccgttcggcaaccgatcggatggtgattggtggttctaccagcggcaatactactgtcagcgttacaaatgcgggcggaagtggcgctgccacccttaacgggattgagctgattacggtaggcggtaaatccgagggggaatttactcagtccggacgtattgtggccggggcttacgattaccgtctgacgcgtggacagggcagcaatagcgggaactggtatctggtgagccgggataccaccccggtcgatccggtaatcccggatccagagccaggaacaggcccggatacaggttcaggaacggatacggacacgggcacccagcctaagccggactggatccgtcctgaagcgagtctgtacggggtgaatatggctgctgcgaatacgctgttcacacaccgactccacgatcgtctgggggagacccactatgtagacgctctcaccggagagaaaaaggtcaccagtatgtggctgcgtaacgtcggtggacacacccgctcgaaagacagcagcggacagatgaacacccagtcaaaccggtatgtgatgcagatgggcggtgacattgcgcaatggagtagcgacggtgaaaaccgctatcacctgggcgtgatggcgggctatgcaaaccagaagagcaacgcgcgtaaccacctcaacggtaataaggccgacagcagtattaacgggtacagcctgggcatttatggcacctggctgcaggataacgaggcgaaaaccggagcatgggtggatacctggctgttgtacaactggttcgacaataccgtcagtggaaaatctgccggcagtgaaagctacaaatcaaaagggttcactgcatctgtagaaggggggtacacctggaaactgggtgaacgtgatgaacgtacggcttactacattcagccgaaagcgcaggctatctggatgggtgtgaaggctgatgatctgacggaaagcaacggtacccgggtcactggagaaggggacggaaatattcagacccgtcttggcgctcgtgcctttattaaaggacacagcacgctggatgacggaaaagaacgaaccttcgagccgtttattgaagctaactggatccataacactgagacgttcggtgcaacccttaacggcgtacgggtgaatcaggccggtacccgtaacattggcgagctgaaggttggggtggacggccagctgagccgaaatgtcaacctgtggggcaatgtggcgcaacaggtgggtgacgatggttatagcgacagcagcgccatgctgggcctgaaagtgagcttctaa

SEQ ID NO: 154814 - DNA, 801 bp, Enterobacter cloacae
atgaagaaaacgtatttaatcgacggcagggtagtctttcgcagtgggcaaaatgaactggccagccaggttaatccggatctcacggaaatactgaatgagccctgcgcccgttgccttgaggcgctgctggatgcggaggggagcattgtcccccaggcagaactgtataaggctggctggggtgaggcctataaagatgtcgcacccaataccctctaccagaatatccttctggcccgtaaggccttccgcaatatcgctgaaagtgaagacgactttatcatcaccgttcccagaaagggattccggtttaatgaaaccatgacggtgacagtaaaggtttctcctgagaattccgtttcaggtccggataaagaacgatctgaaccaaatagtaacggcagtaaaactctgttgctcagggagactgcccccaccctgctgtcccgtatgcccctcccggttgcggcaattttttttattcttgcattagtcatttttattgcagggcacttcagatacggagcgacccaccacgacgattttacttcggaatatgattatgcaggcgcgcaaaaagggtgtgaggtttacgttaataaacggcaaaccgtgtcaagtttaaaaattgaacagttcctgaagaaatggccgggtactacggccaactgtagccggttaccacaacgatatattacgccgtaccgtaactaccacagcgtgttttatctttcatgtaatggaaaaaataaggcaggaagaatatgcagttcaggctacctacagctctcagaataa

SEQ ID NO: 154815 - DNA, 501 bp, Enterobacter cloacae
atgcagttcaggctacctacagctctcagaataacagcatgcactgtcagcctgctggtattctgttattccgtttatcatctgctggagttgaaaaaaagatccgaagggagagtcattcactgtatggcggcgtttaatagccaggttaatcagcaccgcctcaatgccaaagtcacgctctatctgtaccgggaaaaaggcagtattcagatcagcggcgactatatttcacctgcaggtcaacagacaccggtaaaactggtttccggtattgcctatcaggtcacaggtgaggattatcatgttcgttttaccggcaacaaaacctcataccagtcagaggacatccatgaagcatttagtcacctgctccctttttccgtcaccagtgaaaatgtggattatgtctatcaattccgggagcaaagcgacgggagttatctgatccgacagcatggcattcccctgctgctgtgtaaaaacataccacgtcggtaa

SEQ ID NO: 154816 - DNA, 468 bp, Enterobacter cloacae
atgacagtaaatgtagtagcacttatccataatctgggcaaaagctataaagagttagttaataatgggttaatcacctacaaaagtgatcctaaaggggctgcaggcgatcctgtgttacttttaccaatggtgaacgaaggcgtttttttagcctttattcgagaagggagaatactgaaagaaattacgttgtctattcagcgtgatgacgtaaagggatgggtcttcccgaatgaactccctacaccgttgcagcagaacatgtctcgcgcatggattcatcagtcatttggtgagcccgaaggcttggttaccccaagaatgataatgaatcgttctttcgggtgggttgaaaaatacaccgttgaagattttcatacgccaatcacaatgcagattaattacgatcttgacgaaatggtgaaagcagtagcatttattctcacttctgaaattcgctggtaa

SEQ ID NO: 154817 - DNA, 1686 bp, Enterobacter cloacae
atgggttaccgtaccgataattatggccgggggcaggcgctgacaggagataaaacctctaccggggcaacctgtattggatccctgccgtactgcaccgaacacgggcgaggggtcgtcagggttggtgataaaaccacgccgtgtaaaaactgcggaaagcccggtaccattcttgatggtgaaccccgcgtaagcttccatggtgttgccgctgctgtcgatcgctctaacgtcaggtgtggatgcccgccgggaacaaattttatcatcgctcccattggcgactggctgggtagtggtccatcaccagaacaaatcgtcagggaaaggcacgctgtgatgctggccgaacgcagggcagagcaggagagggaagagaaacacagggaggaggaaagggagcgaaaccgggtatttgcaaaatcctgcctccgtggcgagggctgcaatgatgcaggcgaccagcgtgaacctcacaccaattttgctgatatggcattttttcaggccatgcccgccagcgaccccgtgaccgattcagacaccccgcagcacgcacagaccgccagaaagaaaaagccagaagatatccccaaaccgaagaagcgcagcgccttgtatcgttggtggaacggtaaccatgaggagatggattatcaggctgcggtggctgccgcgtctgctgctgcacgggcgcagacggccacggcaggcgcaagcctgctggagctgataagcggcagggcactgacttacggcacctgggcggtgcgtggtgctgttgccggacccggtgcacccgtggccggactgctggtggggatgatgcccggcaggctgaacgacggcgaacaggattttatcgaccgtatgcgcctggagcagatgcatgaagccccgagccgggtgcgctatacgtgggagaaggacagcagagggaacccggttccgcatggctggcacacaccacctggccgggacagtgtgcgtgtcagaaaaatggagtacgacaccagcgcgcaggcgtacaccttcaccacggaagaagatccgcacatcaccattatctggacgcctgaccgaacggtcgaggaaaagccgtggaataccggcaaccaggcgcgtccggtgttgccgaaaccggtgatagttgacccgctgccggataacaccggcataacggcgaccaccagcccggcaccggaggaaaagcatttcgcggattacattctgatcctgccgttccctgacctgccgccgatttatatctacctgagcaaaccaccggtggagtttctggaggttgagctatacagtgacttcaaacgccgttctcggcagggggtttacgaggcggatcacatgccgtcggctgcggctgttaaggcctatctccgtagggagtatccatatttaaaagaaacggaaattcaggaattttcattgcaggtggcggctatcgttgtccctaaagatgtgcatcagaaaatcagtgaaacttatggcggacgtaataccctgacacagattgatctagactcacagaacttacgggcagcagctgatcgtaatctggataccattaagccatcgttaaaaaagcagggtgccactgaagaacaaatagaaactgccagaaccaaaatgcacgcgctgaacggccagcaaggattatacaaatga

SEQ ID NO: 154818 - DNA, 1218 bp, Enterobacter cloacae
atgcaaattcataaaaccatcaaaccgattttcgtcagtaagtttcagtgcgtggggtcagcatgtttaatctcatgttgtcgtggctggacgatcgctattgataagaaaacccaccaaaagtatgtccagtccacgcacgcagaaattgccgccattgcaaaagagaatctgatccttcagcgcaagggcaagaacaactactccagagtgaagctaaacgaaaaaggggagtgtccttttatcgatgaaaacaaactctgcatggtgcaccgtgatttaggggaagaggcgctctcacatacctgcagtacgtatcccagaagcgcaagccgttatcaggatgaaacacggcatacgatgacgctctcctgccctgaagtggtcagacgcgtcctgtttgacccggaggccatgctgtttcaggagcaggatgagttagtggcaacctacaaaactaacctgattgggcaacgtcaatccgcctcacagacgcagcaggtgatccatctttttgcctggaaccttattcagtcgccttcccgcaatgttgaagaaaatttgatggcgctggcgcagtttattctctgtcttcagcacgttaattttgatttacataataaatttgccgaagtagaacaattttacgatgcgttacgcaatgacctgcaaaacgggaaatcgctgatcgatgcctgtcacctcacgcattcaaatgcgatgaaatatctggcactgtccgtgatgggaacgaacgtggcgaaagattcggtgcgggacggttttattcttcaggggcaccagcaaattgcctcgtatctggacatggccggcctgaacgacgcttctgaactggaagctaaattcgacgggattaatcagcagtggcacaagctgtgcgagtcatcctgcttgtcagaaccctacgtgttacgcaattacctgctgtataaactctatagcagctatttccctggtaaaaatacggcaaacatcatgcgccagttttaccgtattgtactggattttttctatatcaaattcattctcagcgtgcggtcgatgcaggaagacattgaccagcaggtcgtgatgaaaaccatcgccagcctctctgaaaagaccatgcacaatcagaccatagatgcgcgcatggactttgctattgataaaatcaacggtggggatgatttatcctgcctgctgttgattggataa

SEQ ID NO: 154819 - DNA, 582 bp, Enterobacter cloacae
atgaatactgagttaactttccgtagtcatactttcacaccagctatctgcgacaacaaattctggttaacgtcttcccagattgcagaagctctcgaatactcaagcactaaatcaataaccaacctatacaaccaaaatgaagacgagttcacacctgaaatgactcaggtcactgaatcagtgaccgcaggaaattatcgaaaaaaggtccgcatcttctcccttcgcggagcccatctgatcgccatgttcgccagaacgccagtcgcaaaagaattccgcagatgggtattagacgtcctcgataaagaggttttggaggcaactccgcaagtaaatgaggtatctgctcgacaaaattacgcagtaataacctacttcgaaaacggcttgcccgtggcctgccaccctcttatgcctggtgaagtagttatgaaccccgattcatgcctagagcatgtgattcgctccggctacgtggtgatgccgtgcgatgaagtagaaaaattcactctcggagagatacacaaaatgatcaccatagcacggcgagcacgtgatcggtggatgcaaccttaa

SEQ ID NO: 154820 - DNA, 1251 bp, Enterobacter cloacae
atgattaattcacaacaagtgcagttcattagtaaagcactttacataacaacatttacgcttttattggtggtactgccttgtgcatttatccatgaaaaaacttcacgcgtaatattttattggtgcgggtatttatcgctagcaggtttattactcaacttattcaaaaaagaagagaaattaaattgcaacaggattactttttcttttttgatgctatctgttcttttcttgggatggtcattgttatctggatttttatcaggagaaaaatcttctgaattgttatatacaccaggaaaaagatggcttatagcagcaataatttctctctttatcttaaacggtaaagataagctaaagaaattccccagcgctacgatcatagtatcagtgatgactttagctttcattgttgcaagcacttatgggatcttgcaaggaataaacagcgatacgcgcattcttcttggcattaatagagcaactcttacggcatatgctttcagtgcattttcattagctttttcagcgatcatagcagctactattacaactaaaaagaagtatctatttcaattaatcgttcttataatttccacttatatcattttcttaactcaaacaagagcggccatgcttatccatcctttgctcggcttgctgttgcttctgtcatggatgtggcgagataagttacttaatttcaagacgctgattctttcagttttgtcattattagttgttgcttccttaaattccaaaataataattaatcgtctcgattccacaatgattgaaataagggagtacaatcttggaaatgaccatacatctctgggagccagattcagcatgtggaaacttggaaccatggcttttgctaaatccccttttggacaaagtgagactcatcgaaataatgaaataattaattttttgaaaaatgctaacgaaaaatcagaagccgcaggttatctaacagtgcatttacataatgaatttattcagtacgcatcaatttttggtattttcggcatacttgtgttgtttgtttttttctttatgttgatttttaaaagtagccatccggctataattgggccaattggcatacctaccttagcagttttattctatggttccacagatgtattgttgacatcaatagaattgatagttattttttccactacaattattcttgcaagtatggcaagtaattattggcaaggagcttctaaataa

SEQ ID NO: 154821 - DNA, 753 bp, Enterobacter cloacae
atgaaaatatatattattaatctcgaaggcgatactgagcgaagggaatcaatggaatcccaagcaaagcgtctaatgcttgattacgagttaattccagctgtaaacggaaaatgtattccagaaaatgtgttttctcttttgaaaagagaacatagctacgcggtgactcctggggaaattggatgttccctgagccatttgacagtttataaagcgctggatgcttccaaagatgattgcgcgctagtgcttgaggatgacattttcttacctaatgatatttctcttttccttgatgaaattgagttatcaatcccaaaaaacattccatatgtttatttgctttctagagttaaccattacaacaataaaagcattttaaaattatctaacggacattctgttcatgatgtttataatgcagccttttctcatgcttatattataaataaagctgccgctcgcattctttacaaaaaattattccctgtttggtgcgtagccgatcagtggcagacatttaaagaattcggctttattaatttacgtggagttatacctgaatacatcaacaccaatccagtttatgagagtgtaaccaccatcggcaatcggaatgacgatataaccatgaaaaaaaagaatgaagcatggaaggctatttattcaagccgttcctttaaaatcaaaatagctaaagcttgcacccttctttttcatcgtccatttcagaaaataatcaagcagtga

SEQ ID NO: 154822 - DNA, 483 bp, Enterobacter cloacae
atgaatgtcgtctttctaagggatgagtatggaaatgattggtatcagtggttaaagacgctctccaaaaagactctaaaaatatcatacaatcctgaaaccaagaaaataattcatttttcatatgatgctagttcgatattccctattgatcagattgtagtggaagtcttacctgaaaatgtaccagatagatttgttaatgctggaaataatgcgtttcgggattctttcatctttgataaagggaaaatcatcactgcaccagtggattatgagctaaaagctcaacgcaaaaaacaggagttattagcctatgcaaataatataattgagcttcttaaagatgctattgatttagggatggcaacagaagaagagaaaaatactttattagcgtggaggaagtatcgagtgtttttattgcgcgttgatacatcgcatatatctaatataatctggccgataacaccttcatcatag

SEQ ID NO: 154823 - DNA, 1314 bp, Enterobacter cloacae
atgcatcgaattgatacacccacggctcaggccgataaatttggtcagggcaaaaatggttttacaaatggtgagccggccaccggccgccgtgctactgatctgaacagtgatatgtgggatgccgttcaggaagaaatttgtaacgctatcgagaaatcaggcgcggtgcttaataaagggcaacatgatcagctgtatcaggctatcgttacgctcatcactgaccgtgtgccggatgcgcttttacgcagccagaatcttgctgacgtggtagataaagcactggcacgcactaatctggagcttggaacggcggcaacacgtaacacagctgataacagcaacaataatgctctggtaccggttggttacaaggggaattttacagccgactcgaatcacggcgcgattgattttgcgacttacccctttgtcgtcggtgaatcattgtttattgatacacgtgggtgtaccaacaccccgccattcctgacgcaggatttttactatatcgatgtcgtatgtgccaccggccctgctcaggggggaagggtaaaccggccgttagtccagttcgtgagttacacgaattcgaagttgatcctcgccattcgtgaggatgatggcaacaacatcggctggcggtttttcagggcggtgcaatacgataccgataataatactgttaccatccctggggcgcttaaggctgtcaatggcggtgcagagctttcacaaaatgcgataaatattcgaggtgcaggtaataaacacctctggttttttaatgcttccggtgcagaaatggggctcgtttatgcctcagatgataaagtgcttcatcttcgcgcagcgcagggaccttcagtagatgttcaatcaaacggaaacgttgttgccccaaattatcttgaggctagggatgatattcactcagggaggaatatcagcagcgtagggctgattcaggcgggggcgggcctgtacgacacaccgggcgttcgagcattctccccaaactatatgcccacatttcctgttaccagcgttaacgggatgcaaggggcggtcgttattgatacaagtccatatgctcaatcggcatgggtttctgcaaatttcttgcagggtggtgtcaggttagcttcacctggaacggcagataacggaaataatgatggtaactttgcatatgctccagatggggctgtagttactgctgtgatgcaaaagacaaactatacggcagtacaatttcgatatattcaatataacatcaacggcaactggtatactgcacgggtatcttaa

SEQ ID NO: 154824 - DNA, 990 bp, Enterobacter cloacae
atgcaaatgattaaacagtgctttttcttactgattctcggcaccgcctcgttatttatgccgcacgcaaaggccacctgttccacgccggatatgccgaagatgattaacgtcgcctcgatttcagttccgaccacgcttgcggtgggcgaaaccattcccggaactgaacagacggcgcatgttgcggggcactgcgatcaatccatcgacagcgggctggaaatcgtcgcctgctattacggtaccggcgctgaaatccccggcatgaagggtgtctatgattccggcgtaccaggcatcggtatcgcgctgatgaatgacaaagggcagcgaatcagcggtgcaggtggcattcagtgcgactcgcgcgccatgcccattggttatgtctcagatgacgggcaactgtccttcaattttgatgtgacgctggaactggttaaaaccagtagcgaagtgacgtccggtacgctggtgcaatcacaaactgaatttggcatcggcgtcttcggtcatgaagggatcggctcgccaaaccatatcgcttacgccggaaacatcaacctgcaaaccgtcacatgttctgtgctgccaaaaaacctcaccatcgacctgggcgatttcccggtgagcgactttattggcgtgggcacgctctcacaacctgctcaggaattcaacgttagcgtgaactgtaatactaccgtacagccggaagtgaagatcaccagtgcgaacgggtacgaagagggatttgaaggggtgataaaactgacccccgagagcggagcggcaaaaggggtgggcgtcaggatgctgtttgacggcaacatcgccaccttcgacaactacgtcagcacccagcgcccggcagaagccaatgtaacgctggagatcccgttccaggttcgttacatgcaaacgcaaccggaggttctccctggcccggcgaacacggtcgccaccctcactctcgcctataaataa

SEQ ID NO: 154825 - DNA, 564 bp, Enterobacter cloacae
atgaagaaaacaagcctaagcgcgttgcttttcgcggcactcagttcgcaggcaatggcaacgtccaccaatctggatgtgacttttaccgcaactctgcgtgaaaccacctgtgatatggccatcgagggcggtaccggcgacggaaaaaataatacgattccgatcggtgcggcaggtaaaacggccctgtcggacattatcaataaaacagacggcgccagcaccgcgtttaagttaaaaattactgactgtccgtcgagccttgcagcactgaagacgacaatttcaggctcgaaatcaggataccttgatacggccatcttaaatggtgctacagccggaccagctgattatatgggggtctccatcgcacgcgcgtcagcacctacagcgccatttaccattaactcaactgacgatgcgaaacgcttagtctggaccacggctgaaattaacagcaaagaagttcctctggttgcccgtcttgtggaaaccaaatccggcctggcgacaaccggcagcttcagtgctatagccacattcaacttcgaataccaataa

SEQ ID NO: 154826 - DNA, 561 bp, Enterobacter cloacae
atgattaaaaaatctttccccctgattgcactggctgtctctgcgggtctgtttagtgcggcatcacatgccattaccggcacaagcagcgtgcaggcgacatttacctccaccattgaagcgggcacctgtaccgcacaaatccagaatgccggaggccagccaatcagcaccctggcattcggtgacgtcttcaaatccgatctggttgcccagacgcgcagtgaaccttttaaaatcgcctttagcggctgcgctggggtgaaatctgcaaccgtacaggccaccaagggaacgggaggcagctgttccggcgcagcgttaacgggtgactcttttgctggtggacacgaaactggctttgaagtgtggaaaggtacagccggaacaggaacgctgttgagctgtaacaccacgcccgtgcagaacgttaccatcagtggcgcaacggcaaatgttgatatggccgcgcgtatcgttatcgctagcggtaaaacgatcgccgatgtcaccacgggcgacgtcagcgcgccggtgacgtttgttgtgacttaccagtaa

SEQ ID NO: 154827 - DNA, 501 bp, Enterobacter cloacae
atggacgttacgcttaacgccaatattgttgaaaacacctgtcaggtttccattcctggcgatggcaagatccacctgcctattgtaggcaaaaactggttctacaacgcggacggcagtacgcgtctgcagccgagcgatgcggcttccggtacggcgtttacggttaaggtcgacagttgcccaggtgagggaacccaggttaacaggctgaaattcagttttcagccgcaaagcaaaacgtggccagccgatagtcgacagatctttattaatgaaacatccgttgatgaaggcggcgcggccaataccggcgtggttattttttcaaccgacctgaataccaacgtgcttaataccgatggcagttcaagcgttgtattgaatgcaaaaactgtatgggcgacagaatatgatttctacgcccgcttgcagaatttcggcccggtcagcgccggaaaagtgaccagtcgcgtgctggtcaacgccacatacgaataa

SEQ ID NO: 154828 - DNA, 1119 bp, Enterobacter cloacae
atgttcagaaacatgacaggacgttggtcttttctctcgtttataaaaatggcgcttgtaggctggctaagtttacaagggcaagcatgggcaaaggagtgtaaattttccgacggtgggggcggtacaaccaccctcgtaaacggcagctatccacagggcatccgctgggccgcctgggatggcgtgagtaacatgcgagaactggccacgttcgaactcaaccttagcccgacgctaacatcaaaatgtacattcgcagggaatgatggacagcagttaaaggaaaaagatcccaacgactatacctaccttcatggtcgcggccctcaggttgacggcggtacgggtaactattattccaccaatattgaaggcgttgtattttcagtgaaaatattctccagcgcaggcgggggctattttggtgatgggaatatggaacctagcggttggtcgacactggttagtcccggccctgattactactgggacaatcaaacctggaaagctaaagtgacaatctggcaggacgcacgagagttcctctatgctaacggcaaccggaataataatcgctacattacgcccgcggcatcgtttccgctggggcagatggcgattggcacacctactgacagtaataaccaaccctggacatttatggtcacacccacaaccttccaggttcccatcgtgacgtcgacctgccagaccgcacagctggataaaggcaataacatcgatctgggcgaatacatgatgtctgactttaacgtatcgccccgcaccaccaatttccgggtgcaaattttgggatgcgataacgtctgggcggtggatgtaaaactccaggcaaacaaaaccacgggttcacagaatgaattgctggggaacacgctgacgggaggcgccgaaggagtgggggttcagctttacgcttacaactcaacgccgttaccgcctaacgggcttgcttttacgcgttataccactgcgacagcgccagggtccgatttcggcatgatggacttttccgcccaactcgtaaaagacggtaaaccgatgaaagcaggcgaatttaaagccgtcgcgaccatcaacctctcctactattaa

SEQ ID NO: 154829 - DNA, 1323 bp, Enterobacter cloacae
atggggagtaagtggaaacgggtaaccgtagcagatgtttgcacttcgatagtagattgtgtgaataagactgcaccagttgtggaatacccaactaattataaaatgattcggacgcctaatatccgttcaggaaaagtaacacttgatggatgccgctatgtagaaaaagaagtttatgaaacttggacaaggcgctcaaagccccaaaaagaagatgtgttgcttactcgtgaagctcctcttggagaagttggaattataacaacagacgagaatatatttttgggccaaaggattatgcagtatagagcggataaaaataaaattgatccgtactttttattgtattcattcttatcacctgatcttcagcaacaatttttaatgcatgaaggttctggttctgtcgttagtcatattagggtcggtgattgttctaaatttgagataaatatccctccattagaagtacaaagatcaattgtagaaatattgaaatctattgatgatcatattgacgttaataaaaaaatcaaccaaaccttggaacaaatgtcccaaaccctattcaaatcctggtttgtagatttcgacccggtgattgataatgtgctagatgcgggaaacccaatcccagaaacactgcaatcccgagccgaattgcgtcaacaagtacgcaaaagtgcagatttcaagccacttacggctgatatccgtacattgttcccggctgagtttgaagaaacagagctaggttgtgtacctaaaggttgggtaacaaatcggctcgaaaatattttagagttggcttacgggaaagcacttaaaaagacagaaagaaccaacggtgattatcctgtttatggttctggcggtgtcgatggaacccataatgagtatcttgttaaaggacctgggattattgttgggaggaaaggtaccgttggttcattacattgggaaaacaaagatttttaccccatcgatacggtatttttcgtaaaacccaaagaatactattcccttgtttactgccatcaattgttgaaaacactgggattagaaaatatgaatactgatgcagcagttcctgggttgaacagaaacaatgcttatcgtcttgaggtcgtgacaccaacacaatctatcattaccaaattcacaaatataatccagacaatccagcataaaatggattcaaatcataatgaaacagagaatctaaccgccctccgcgacaccctgctccccaaactcatctccggcgagctgtccctggaggatctccccgacctcatcaaacaaacagaagccgcataa

SEQ ID NO: 154830 - DNA, 1527 bp, Enterobacter cloacae
atgactcaagcagcagaaaatgagatcgtgagccgaccagaatatgatgaaaatgggcgagtgtactacagcctgcctaatggcagagcgcaagacaatctggtggtcgcctgtcctaaggtggcggaaaaggtgatcccggttatttttctgccgggagtcatgggaacgaatctcaaaaagataaaatcccctgaaaaagtctggcatgctgacatgtttcagggctcagatgcgctggcatggctctataagtctaaagaacaaagaaaagccttgctggatcctcttaccaccgaagtcgatttaacgggaaaggtagtttacgacgatcttgacggcagagggtttccctccagagcggcccgtggctggggcagtgcgctttacaaaagctacggcgaacctctccatgtgcttcagtgcatgctgaatgacggtcatattctgattgataacctgatcaatggtacccgcaggcgcacgccccgccagttactgattggtgaaaatttaggtgcagagaaaggcgaagatgcgctgactgagcctgaggtcaggcggagttatgattacctttttcccgtgcatgtttttggctataactggctgcagtcaaacgccgattcggccgcgtctctcgggcgatatatcagtgagactttaggcacttatcatggcaggcttgccaccagtaaagtcattctggtcacccactccatgggtggcctggtggcccgacattattcagaacaaatgaacggcagagacaatattctgggcatcgttcatggcgttatgcctgatctgggatcaccggcggcatatcgccgaatgaagaccggagaacggggtattgtcggagcggtaattggcgctgatgcagccaacctgatgccggtactggcccagtcacccggccctctgcaactgctgccgggtaaagcctacgggccgggttggctgaaaattaacggcacggtaaatatgaataagccggagtctgacccttacacggaaatttatctgaatgaaagtgactggtggcggctgtgtgagaaagaattgctgctggatgatatagaaattgaatggagtaattatgttaattgcattacttatacgatttatgattttattgaaaatttaaacggcaaatatcaccccaatacctatgcattttatggtgccagcgaaaaatatccttcagacgatcatctgatatggcagcagatcccggcaccgaaaccggttatgggcgtaccgccggagcttcccgtttatcgccatgcagcagggaacacgtttgaattgacctcctccggcagcgccggggacggaaccgtaccagtacgtgccggcaggattaattttcccgggatccgttcgctgcttgcgactgaagtagatcatgaaggtgcctacgccgtgggggataccagtacggaaaactgtctttccgttgcgatgaagttcacgttacgctcgataataaaaatggccggggaggtcgcctcatgcgggtaa

SEQ ID NO: 154831 - DNA, 1119 bp, Enterobacter cloacae
atgcgggtaaggcatttatggatgggattacttgttgtcgtccttattctttcaacagctttctggttactcacccgttcgtggccggtagcccctttaacggcaaaggaaaaacaaatgacggataaactatttgaacagaccagacctcagtgcattggccgctatctttttgatgtgcccgcttcattcaataacgctgacgtaggtcaggtaaagatcaatgaaatgagaattaccagcaagcggctgtatcctccggcgtttgcacaacgtatccggttacgtgaacaggagttaaaaaatagtcctgcagttgatcccctggaccttccttatctgaaacaggtataccggataaatgacaatgcagtcatttttgatcgcaatgtaaatgaaagtgtggcaggaggaatgcggattcttgaaggacatctatatagcaatggagttgcatttattgtgtatttagaattcttagatcatacaagcactaaatattttgaaaagaaaaagatgttaaaaaatgcggggttgagtgagtctagcttaagtaataagcctcagaagctggcagaaatgcaaagcctgctatcccgactaaagggaagaaatgatgatgaagtgccaacactgcctggtatctgtattccggaaggttttattaatgattcggggggggtatcgaacgatgtcatcaacattatatataacagtgatgactttggccttattgttaacagtgataatacgcttcgaaaatctgaaccattcttagaaaggtctgatgaaataaatgctaccctcatcagagttggcgcacgcactctgaagaaaggggcagtaaaactaccgaagataaatgcagaagagtggttgatgaaaggtaagcaggatatttatcaaccgaaagagaaaatagttcctgcctacagattcgccttttatgggtatgaggatatagccgactcaaggcatccggtattttccgttgagttgaataattctggattggaaacaaaaaactatacggattcacaactggttgatatctgggacagaatcacaagaacgttcaggtatcgaactggaacagctccggtaaacatcagggagtaa

SEQ ID NO: 154832 - DNA, 498 bp, Enterobacter cloacae
atggcgattagcctgacaggctgcggcgtggcgcagagcgtcaccgacggcaccaaatcggcgtttaattctgtgttctataaaaagattaaaatactgcatctggatttcactgcacgtgaggcgctgaacattgatgcccgagaaagtaatccgctttctgaaccagtcgtggtgcgggtttaccagcttaaagatcgaaaaatctttgataagacggtttatatgcaactgcttcaggatgatagcagcattctgaaagacgatatgctagcgagccgtgatgtcgtggtaaaaccaggcggtgatgcaagccttgatatgccgatggaagaagctgcgcagtttgtggctgtggtggggctgttccgccatccggatgaggtcaacagcacctggaagcaggttattaaacgcagcgacctggatccggataaaccgcgtactctggaagctggcgagaatcatctgacgctgcaaccgcttaaggacaactga

SEQ ID NO: 154833 - DNA, 471 bp, Enterobacter cloacae
atgtcagtaaaatcacaattcataaaaaaactgcaggccagtcaaccttcacccgttcctccagtcagtaaaactcaggcagatattgcagcgtttcgcctgcgaatggagcaacttcagcagcagatggatgagtggctcacaggtaccggactgaatgtgagcactgtctctgcttccgtttcggacctgctggtggagggaggggcttttgagatttccggtattgttcttcgttatgacagtcgggcggtaaagtttatgccgatctttctgtatagacagggcgtcgccggttgtgtcgaggtgactttctgttccggagaaaatgttatttctcaagggcggctctttatgcgggtaggggggggaagtgactggatcttcactcccccagatacaccatcccggtcaggacaattatttgatgaaggtatttttttcggtctgattttagcgctgttgccatag

SEQ ID NO: 154834 - DNA, 1329 bp, Enterobacter cloacae
atgactatagatataacgttaaaaaccggcggcgacccgcgcacgcttccggattatgccgcccttcgcgatgaactgagtaaattaagccatcccgctcgaccggacgtgaactgggtatacgttgaaaaacgctgcctttcattattcgagcaaaacggtgttgagttgcagactgcagcctggtacaccctcgcccgtacgcagcagtctggagtcgctggcctgaatgaggggctggcgatcctggaggctctgattagccaccagtgggaggttttctggccgcattcgcaacacgtgcgaatggaaatccttagcagcctgagccagcgcctgcagcaactcatgcgtatgctcactttggatgacagcaatctgagtgagctatataacgctgaagcgttgctttccaggctgggggcggtgctccagacccttgagcttaaacaccttagccagttcgagacattacgaacggtgatacattctaatgcggcaagactggaaaaaaatcatggaataacagattcgcatgagatgaagcccgacagggaagcgcctttggaaaaggatgaaccgatccaggcggtgaaaagggtatatgttgtccagcagaaaaatgagccgaacggtgaggaacctgtgatgccctcccggattgccgggcagcggaaaccctttgtcgccgggatgtgttctgcgctgctggtctgcgtcgccatagcgtggggtgggggctttctctccagacccgatcccttaacgactcaggccattgcctcgctggcaccattacctgaagcgctcacacctgttcagcaaaacgcgttaacgcagcgaggaacgttaccgtctacgtttatctcagatacgcagcagcagcttgcacggctggataaactgtcttttgactggaatatttcctacagcctacagctgttaaagcagctccagacattacggcccgaagaggctaaagcgctgataatacagtggcaaaaaaagtttaacgcgacggcgttgcccgtagacgcaatgaacagctggtatcaggggatgatgacgcttcagcaactgagtgatcggctgagtcgtctggatgagcaaaaaggaaaatatataaccgtgagtgagcttaaatccgtggttttttcgactatgcagtcatttaaccatgcgatacccgctgaagagcagctcaggcgcctgtcgcagtatcctgcaggaagtgcgctccctgaagcagaaaagacccaacttgagcttcacctaaagcaactggcaacgcgttatgctcaaataaagcaggatgcttctgctcaatga

SEQ ID NO: 154835 - DNA, 594 bp, Enterobacter cloacae
atgaaattgtactttacaatctttcccaaaagaacagaaagcgaatcttattttcttcgcgattccaacgtaaaactgaaccgggttgacaataaagaagttgatttacatctcgattttgagcgttctttctcaaccatagcccaaaggcggggactcgataaaagcgaagtagatcgagttagaaagattaaacaacgtcttcctcagcacaaacacataggcgttgctcgcctgagcataactatattaaaaaatcgccaatcagcgttgtgttatcttttcgtctgtgaaggcaacgtagcatacctgtcagcacctgaaatggttttctgtggcgattctatgttcataagctcaacaaaaagatgctcggtttatgaaacgacctacaaggtcaccaaacccgattcgaagcatagttacgttaacctgcgttttgattctgaatataaacttgtcacgaaaagacgtgggccatcgaagattgaaaaatcgtcgctaactgcagcttccgacgcctccttattagaggaagttaaaactttgcgcaaagaaaatgagaggttaaaaaaacaaaacaatgtcacttaa

SEQ ID NO: 154836 - DNA, 3852 bp, Enterobacter cloacae
atggcgatctttgatatcgaaaaagatgaattactcggactttcggatactcttctcgaagagttaattgctcgcctttctgaggccgacgtggcggcctgcggtcacagcccggcgcgggtgcgctgggcaggatcgatcaatgcacctgatgggggagtggatgtccacgtgcagctgccggtcgaacaattcatctccggatatatagaacgaccggataccgtcttccaggccaaaaagcataagatgcgaagggcagatattctgcgagagatggcaccttctggcgtcctttcttccatggtatccgtacaggccgcaaaggggggaagctatatcattgtcagtctggacgaggactgctccccctccatgcttgccgaacgcgtcagagcgatgcaggaggctgtcaggcacgatccctgtcatgcagatcttcatctggccttctatgatcgcgctaaactcgcgcagtggatacgtcaatatccgtcggtgatgctctgggtgaacagaatactggggcggggatattccggctggcagccctatggcgcatggagttgccctcctgagggggcggacgataccctgattaccgcctccggtatcaggatctcacttccgtcggagcaagctcgccccatgagtattcaggatgccatcgggccgatacgccagcttatccggaccacccggaaagccgtgcgtgttaccggtttatcgggcgtgggtaaaacgaggatcgttcaggccttgtttgagagatccatcggtactgatgccctggaccgcaccctggcggtgtatgccgataccggtgacgatccgaacccttctgccgcagccatgctggaacgcctcatcgctgaccagcgcagcgcaataatggttctcgataactgcccgcctgaaattcatgcctccctcgcggcaaaagtcacctctcacggaagcatgatcaaacttatcaccgttgagtatgatattcgggaagacaaaccccagaccactgaggtgatccacatcgaggcggtagggccggacgttgcggaaaaacttctgctgcgccgtttccccggtatcggacagtttaacgcccgtcggatcgcgcaattcgctgacgggaatgccagagtctcactggctatcgccgagagagtggaggacggggagtcgctggccgttctgtctgatgcacaactcttcaaccggctttttgaacagcgccacggaccggacgagggattacgggagcaggccgaactcctttcgctggtctactcattttcgagtgacgtttctgaagccagcgacagtgagctggggatcctgggctcgctcgcgggttattcatatcaccagctctaccggacgcttaacaagctgacctatcgccacattcttcaggccaggtcgcactggcgggccatcttaccgcatgctattgcgaacaggctggccgcctcggcgctggacagctttccggtcgcgtgtctcaggtctgcctttgaagcgccgggacgcgagcgcctgcttatgtcctttgctcaccggctggggcttttacacgatcatccggtggcaaaggcgatttctgccgcgtggcttcagtcggaaggggtgttgggtaatctgctgggcttaggggatgagccggttcgtatgctggagtacattgcgccggtggtgccggacgttctgcttaacaggattgacgcggtcctcaggatctcagactttaaaagccgggagagacattacgatccgcgctggagcactatcctcaatcttttgcaggttcttgcgtgggaggcatcatactttgaccgttgcgccagccttcttctgcacatcgccgataacgaaacggataaacctggtcagcagaatgcacgggagatactgactctgttctgtcagccctacctgtcgggtacacacgcgtctcttgaacagcggattacgcttctggaaaaatgtctctcatcaggtatgccacagcgtcgggcgcttggactgagaatgctttctgccggacttagcggttcgacgtggacaggctcggggatctgtgagtttggtgcccgcccgagggattacggggcagaaccagactatgaggcgttgataacgtggcgacgtgcgttcattgcgattgccgttcgcgcaggaaacgacagcgagaatcatcttgccagcggtgcacggactattctggcaaattcactcagcggcctgtggagcgacaagaagatgggctccgtgctggttgatgccgcccgtgcactgcatgcccgtcttccctggggagagggctggaaggcgattcggacccgactgcactttctgcgaaaggatcctcaggtctcgcacctgttgctggacacgcttgatgcacttgaaaaggagctcaggccgaatgatttgctttctggcatacggctttatgtcctgagcaaaggccagcacaactgggtgcttgatgacgaatttaaccgacatggccatgaccgatacgctgaggcagagcagcgactgacggccagagcagagcaactggggcgtgagtttgccgcatcaaggctttgtctttctgatctgagacctaatctgttttcttctgagtggatgccttaccggcgcgcattcgggcaggggctggctcagggcgctgtggatcctcgtgagcactggcatttacttttaagcgagctggaccaggacactactgaaaataaggatttttcggtatttctgggctttatcgacggtgtggatcgtattaatgaacccctggtccatgagtttctggatcagtgcgcagtgcatccatcactgagtcgggtcctggttaaaattcatcctcagcgcgattttaccgaaacggatttgaatcgatgcatgtcgcttctggataaaccggatatccgcccgtttatgtttgacacctttttgtgggataaaaaatgccggcatctgccagcctctcgggtgctcgaactggccgaacgactcttagtcctgcaaagcggcgaggaagtggtcctgaatgggctcggtatgaggctacatggcaaaaagacgtcagaggacatgcctggtcccgaacttcttcacatcggtctcagggcggccattcaggttttacagaaagagactgacctccggggtaacctcgttgatgactttatggaatcggtcgtggcggcggcactgcagtcagatgatcgcgacgggctcaaacatcagtggctggatgctgtcttctctgcgattgataggcactacggctttatgcatgattatcgtaaaacaatacagacaaccgtggaacttatccctgaagcgtttctctcccgtctctttaccggttctgaagacctaagggttatgcgcttgttctttatgcgaggaagccttggggatactccgctgctttcaggcgttgacatcgaaaccctcattaactggtgctcctgcagtgacgatccgggcttgtgggcatctgtaccgcagggattagaactctgggtaagtgtttctgactcaagcgggacggtcttacataaaaatgcagtcaagttacttgaggcggcacctgacccttccgtggtcctggaatcttttgctgacttaacgagtccgacaagtagtattggacgtactggccatattgcaaatatattgcaggcacgggctgacgctttcggtgaactcatccaccaccagcgggctgatatttcaaaggctgcaagagacatccatgaaagcttaatgcttatgatagagcatcaacgggatcgggaacagcttgaagatcgtaaaggtgaacagcgatttgagtga

SEQ ID NO: 154837 - DNA, 237 bp, Enterobacter cloacae
atggaaaagaaactttttgacgccttgatcaacagcatggaggaaatggtggccatagaaagcggtcagatccagcctgccgctgaaaatgttcaccgtcaccccctgccggacgtgaaggctatccgcaaacatgcggggatgaagcaggcagaatttgctgaggttgtggggaccagtgtcgatttgattcgtagctgggaccaacagcggcgcgtaccctcgggtattgcataa

SEQ ID NO: 154838 - DNA, 900 bp, Enterobacter cloacae
atggtacatatgacaaacactcttttttttggtaatggaataaacagactttctgaaaatcacgtcacctggagtaatttactcgataacataaaaggtatcaataagttcgaaagcggccagttgccaaacactatggtgtatgagcgaatctatctagaaaaacatgcgccagatagaagcgaaaaaaaagatgagcttgaaataaaaaatgttatagctaacgaactacgagagcaaggatcaaatgatgttcttgaggagttagcatcgctaccttttaagcattatcttactactaattatgattacgccttagaaaaggcgcttgatatttcgccagtaaagctaagttcagaggaaatttatagcttgagaagaaaacgaatgtatgaatcacagaataattcaaaattcctgtggaatatacatggtgaaatagacaaccccaaatctattatgcttggtttagatcattattgtggttcagtgagcaaaatcgatgcttatgttaaaggcaactactcacataaagttaatggcgctgacgtttctgttaaaccgatgttagaaaaacttagagatgcttcattttgtcacacatcatgggtggatctatttttctcaagcaatgtacacattatcggcttttcattagactatagcgagactgacatatggtgggtgctaaataagcgagcccgtttttcatctgaagcaacaattaataacaaaatatatttttacactcatactatcagtgatgaaaaaaaaggactgcttgaggcattcggtgttgaggttattacaattgatgtgattgatgataactttgagggtatgtattggtctgctataaagaaaataaaaaataacctcaatcgagatacagaaaactga

SEQ ID NO: 154839 - DNA, 864 bp, Enterobacter cloacae
gtggaaaaaaatagcaaaggtctaagagttcgtaatttttttgatattgaagctaaagaaatcatggaaagatatcgtgtgatagaaactttattgcctaatacaaattccaaaggcgcttatcaccgaggtgaggaaggacgttatattgaatccttgttaagatcgtttcttaatagccatcttccctctaatctaaaagccatgtctggatttattcttagcccctcaactaaaacaggaatagaggataatactcgtgttgaaaactttccagatcgtcattcaaggcaattagatattatagtgtatgatgttgccaattatccaatctatgaaagatttgaagaattctgtattgtcccacctgaaggtgttgtgagtataatatccgtaaaaaagaaattaaagacaaatgacattcaccatgaggttaaagcattaagagatgctgccaccttatgctctggaaataaaaaaagaacgcctcacacagctattttttcttttgatagtgacatcaaaacattgagaggtctcaatgcgaaaatattctcaagcatttcaaaggagaatggagggtctttttccactcttattaacgaagttatagttgcaaataagacttgtatatttaaacttagaaaggacaacacgactgtagaaggtcatgctcaatatgtgggtgtggattgtacaaaaagacctcatatcacgttgcagagaatacttcaaagcatattatcggttcactatgatacctctagaggtagtacaattaatagaccaggatttgtatctttcgaaaaaaatacatttgccgattctcccaaaattggtacaattccatatgattatgactag

SEQ ID NO: 154840 - DNA, 375 bp, Enterobacter cloacae
atgacattgtttgaggaatgtaaggaccttctcaagacagattttaatgttatggaaggggatgatttgagtgcggtaatggatatttttcttcaatatccatggtatagcggtgatctcaaatggtcggaaatggactttagcgattatgaacctagtcatgagatgtttaacgtgagcgacttaggcaatgaaactgtatttgtcgtagcggatgatgcgaatgtgcccgtgttcagaacccatctacaactcattgtcgataatatctacgatgtcatcgccctgtcacctaaactatttatttttaacgataagataatgattaagcctttattccctcatgatcttataagggttggtctgcgaaagtga

SEQ ID NO: 154841 - DNA, 342 bp, Enterobacter cloacae
atgggtgttgaattgcacataacgagagccgaattttgggcagataatgaggatgcgcagataaccgctgatgaatggcttaactacataaataacgataatgaattaagcagatatattataaacggcgattacaacgccttgtggttagggcactctttgtacgaagaaccatggcttgactggagcgcaggtaatatttataccacatggcccgatacatacctatacagaaaaatgttacggatcgcaagacaccttaatgcccaagtaatggatgatgatggtacgatttacagtgacgaatcgcagtgggattatgatccgtcaactaacgcttaa

SEQ ID NO: 154842 - DNA, 630 bp, Enterobacter cloacae
ttgctgcctgtgaattcatttattgaactgaaacacaagtacgaaacaacaccgatacattcacttgcaaacaatgaaatggcgatgctcggtgacgtgaacgtcgggactaagccccctcttgttttcgaactggtagctgacaatagtaaagatgcctctgtcgatgaagaaaatcgtgcaagtttcatttgcggtgacgtgaagatgtactgtgccgagaaagagattgaagatcacgatgagaagaatattgctttctacctgatgcggtttggtcgctgggaatgtggcgaaccagagggagaaatggatgaaaacgggaaacttcacagcgtgcgcttcacgtttaaccctgaatcattagaggactttgaacgcaacggttttgccatgtttggtagcctcagttcgatgataactgaagcatacaacgagcataccgtatatgagcaagaagtgactgctataactccgaaagctgaccctgacgtattctctgttgagattcccaaggattacaaaggtaaggctcttggtttgtggtgtttcattatgcaagcaaatcctgatttcaaaatagggtctgaggagaaaatgcattacaagtacacggtggataaatcatga

SEQ ID NO: 154843 - DNA, 426 bp, Enterobacter cloacae
atgttcggaaactacaacgaggcaatgggtttactcagatacagaaacgagttgaacgaacaagttaaagataagatttcgatgtatggtgacattctgacgctcgaacatgtccaacagacgcttggaaaaaaactttgtgggggcttcattgacatcactgaaacctctatcgcgctgatagatcatgtaatcgttgaactttatcactttctttctgagtttcctgctatcgcagaaagcaacattgagttaagtcgagtcagggaatggggaggtgtgccgacttatgagaacaaacaagcggcgtttttgaagtgtatagaaccaattaagaaaccagactttaaaaagttctttgcttacacagggatgtcagagcaggaagcgcgggacaagtacacgttcaagtcatggtttgactaa

SEQ ID NO: 154844 - DNA, 597 bp, Enterobacter cloacae
atgagagcacactctaaacgtcactttaaaaaatcgattgcaactgtcgccatctccttcgggctttatgtgttgaacggattattaataacaccatgccaagccagtacatccgaatcaatacaggtatcaaacgaaggctcaacttattttcaacaaaaacaacaaccatccaaaccatcaataatcgatatacttccaagggcgtatactaccggggaggtttatgcgcggtttaaagaacacgaattcagggcaacgaatgatttcaagaagtgtcgtttgatggtgattggtaaaattaaaagcatcggtacagctactttcagcaaaaaaccgttagtaacgttatatgtccctgattcgaatgaaggattaaaattcattttcgaaaatacggattatgataacgataaagtttctgcgttaaacgtgggagatactgtgattattgccggaaggaatgcacgccctggaacatttgaaggtatttttttagatggctcgcaaatcatgacgggtatgatttcaaagaagaaaaggcaaatgctggctgtaaatggtggagtctatgaccgggaaatttgccataagtaa

SEQ ID NO: 154845 - DNA, 369 bp, Enterobacter cloacae
atgaaaaataatgcactgactttggttttaaaaaacgactggataacttcgtcttctagtcaaacctataacgggaaatacatggttggacattttcacttgacagatacgtttatcgttgaatatatgaagctgatacatggagtcgaaatacctgtttcatggataagcagctgcttcactaatacatcagataccaatacccgtaaggttatgtatatggaaggctgcggtatgttatctaacgatacaatgaatgagatccgtaatgcagttaagtccccaactgacaacgtgaaaatataccgcaatggggaacatattgttaagatagaagttatggaaaagcaaaatgagagcacactctaa

SEQ ID NO: 154846 - DNA, 492 bp, Enterobacter cloacae
atgaaaatcttcatctatttatcattagctatgagtagtttgtctacatatgctcagtgtgatttcatcaccaaaaattcgacagtgatagatatcaaaaacaacctagaatggcaggcttgcactttcggcatgcaatggaataaagaaaatggatgtactggagaaccaactccccttactttgagtgcagcttttggtgaagcaacaaaacaagggaatgggtggagactgccaagtatcgaggaattatctttactatcttcaaaaagctgtcttaaaaatgaccttttcaaatcatattttgacataccccaagataatggtgaaggagcatcgccttattggagttcaacgcaaattcaaagcataccttacttgtattatacatttgacatgatcaatcattatattgatggccatagtattgaaatgacttatcctgttcgatttgtcagagaagtaatggtcgacgatgatttaatattataa

SEQ ID NO: 154847 - DNA, 879 bp, Enterobacter cloacae
atgtcacttaatgtaaaaccaagtagaatagccatcttgtttagctcttgtttagtttcaatatcatttttctcacaggccaatacaaagggcatcgatgagattaaaaaccttgaaacagatttcaatggtagaattggtgtctacgctttagacactggctcaggtaaatcattttcatacaaagcaaatgaacgatttccattatgtagttctttcaaaggttttttagctgctgctgtattaaaaggctctcaagataatcaactaaatcttaatcagatcgtgaattacaatacaagaagtttagagttccattcacccatcacaactaaatataaagataatggaatgtcattaggtgatatggctgctgccgctttacaatatagcgacaatggtgctactaatattattcttgaacgatatatcggtggtcctgagggtatgactaaattcatgcggtcgattggagataaagattttagactcgatcgttgggagttagatctaaacacagctattcctggcgatgaacgtgacacatctacacctgcagcagtagctaagagcgtgaaaacccttgctctgggtaacatacttaatgagcgtgaaaaggaaacctatcagacatggttaaagggtaacacaaccggtgcagcacgtattcgtgctagcgtaccaagcgattgggtagttggcgataaaactggtagttgcggagcatacggtacggcaaatgattatgcggtagtctggccaaagaaccgagctcctcttataatttctgtatacactacaaaaaacgaaaaagaagccaagcatgacgataaagtaatcgcagaagcttcaagaatcgcaattgataaccttaaataa

SEQ ID NO: 154848 - DNA, 888 bp, Enterobacter cloacae
atgcgtgccagattacctttaaatgcattacgagcttttgaagcttctgcaagatatctaaattttactaaagccggactagagcttcatgtaagtcaggccgccgtaagccagcaggtaagaacacttgaacagatgcttggtgtggccctttttacaagagtaccgcgtgggttacagttgacagacgaaggcttgcatctgttgccttcgattacagaagctttgcagatgatgagttctgccatggataaattccatgaaggtaagattaaagaagtgcttactattgctgtcgttgggacttttgcaataggttggcttcttcctcggattactgagttccttaatgaaaatccatggattgatattagaattttaacgcataataacgttgtcaatcttgctgcagaaggtattgatgcatctattagatttggatcaggcggctggattaatacggaaaatattttactctttcaggcgccgcatacagtattatgttccccagaaacatccaagaaactgagcattccatcagacttaaaaaaagtttgcttactgcgctcctatcgaaaggatgaatggaataattggtttaaagctgctgggatcgacccttggactgttaacgggcctatctttgattctaccagacatatgatagatgctgtaaaattaggtgattatgcagcattagttccttatcatatgtttcaaaaagaattaaatgagcgctccgtagcaaaaccttttgaaatttatgccacgcttggcggttattggctgactttacagaaatctagggttaatcataatagtgaagcacttaatgtttttaaggaatggattatcgagcatagcagagagtttgtactcaaatcctaa

SEQ ID NO: 154849 - DNA, 225 bp, Enterobacter cloacae
gtggagcctgtaacgttctacgtgctccccgcgccgtttaaggatgaactggcgaacgggtttaacgtgaaccaggccgcccgtgtgctgtatgaagccgggatgctcaaaatgcccgccagcggcagaagctggcagagccgtacgccccgcatccagcatatgaacaaccgacagctacgggcctatgccgtgctgctggtggatgacagcaagccagaatag

SEQ ID NO: 154850 - DNA, 480 bp, Enterobacter cloacae
atgtctataccagcacatatttggcttaccgatgaaaatgattcacctttaatcggtgaatgtttaatgcctacacgattgggttccacagaactcaaatctttcaatcattctatatggattcccacagatcataacactggaaaacttacaggaacacgtctacatgtcccgattacttttgaaaaagaaattgaccgactcaccccctacttattcagaggagtatgccagggtagaatatttaagtcagccctgattaaaatgtacaagattaatgaggcaggaatagaggtagaatattttaatataatattggaaaatgtaaagataacaaggatttctccagtattatttccacttggtgtagcaggtaaacatatggaagaagttgagattcgctatgaatctatcgaatggaaatattgtgatgggaatataatgtttaaagattcatggaatgaacgggctatagcataa

SEQ ID NO: 154851 - DNA, 708 bp, Enterobacter cloacae
atgtattacagtgaagatattataaacaaaataggaaccaacaaagaattagccgtgagattagataaggctatggctggtgtgaaagatggttttatcgaatatgtaaataatctcggtgatggtgcaacaagagcactttattacacttcctgctttacagaaaattataaagatgtttgtaaacagcttggaaatgaggataagcgttttttactaggtttgtatgaacttgttaagcatagaaatataatttttaggatgatattaatttatgtgcaaacgttgcttaaaagtaaaaatgaaagtgaaaaagacattattcttagaaaagttgtgccgcctacaacacactattcagttatgcaagcttcaaggtttgcactagtctattcagttgttaaatacatttgctacgggagtaaaatcaatggagttatacaaagtgcaatgatgaaaaaaattggaggccttacatcagggggattaatagcattaagtacatacggtacggttcaacatgctgctgatagtgcaaacaatttaaaatattttctgccactgtactataatgctctttactcggaaaaccttgaaatgatgtactttctaatagagccagtagttttagatgttggttatttaaatataagcacagcatctaatgctgatataattaatgcattaaaacgaatggctggcctatga

SEQ ID NO: 154852 - DNA, 276 bp, Enterobacter cloacae
atgatggccgcctttattctcgaagccagggctgaaggtctcgcccttacgcatcttgaaattcacactgacgggcaccttccgaagggtataccggcccccggtgacagacctgcagaggatacctccggcaggcttgtgtatgtcatccatgtaagcggtagcggcacggtgtatcagtttgaaggggtccatcagcgggtgattgactcctctctgaaccggtggttactggcgcagaatatgctgatcgaaggtgacttaacactgagctga

SEQ ID NO: 154853 - DNA, 480 bp, Enterobacter cloacae
atgtctataccagcacatatttggttcaccgatgaaaatggttctcctttagtgggtgaatgcttaatgccaacgcgattaggttccacagagcttaaatcattaaatcactcgatatggattcctacggatcacaacacagggaaacttactggaacacgtcttcatgtcccgatcacatttgaaaaggaaatagatcgcattacgccctatttattcagaggtgtatgccaggggaaaacaattaaagaagcattaatcaagatgtataagattaatgaggccggaatagaagtagaatacttcaatataaaactggaaaatgtaaagataacaagaatttccccagtattatttcctcttggtgtagcaggtcaccatatggaagaagttgagattcgttatgaatctatagaatggaaatattgtgatgggaatataatgttcaaagattcatggaatgaacgggctgtagcataa

SEQ ID NO: 154854 - DNA, 336 bp, Enterobacter cloacae
atgtattacagcaaagatatcattgaaaaaataggaactgacaaagaactagccgtaagattggataaggctatgataggtgtcaaagatggtgtaattgaatatttaagtaatcttggtgatgccacaacacgcctttcatattactcatcatgtttaacaaaaaactatcatgatgtatgcacccgattaattgatgaagatgttagatttatacagggattgggcaagctagttaaactcagagatttgattttcagaatgattaagatttatattgaaacgattttcaaaaacaaaaatgaagttgaaaaaaaacacttcttgaaaaattaa

SEQ ID NO: 154855 - DNA, 444 bp, Enterobacter cloacae
atgaaaagatcttacgttcacgcatctgttctttgtgtattatcttttattatttcaccagtggcatcttatgctcacagcagtcataattctgatgggatcagcatcgaaacgttactggagaccgagaagtcctgggatggagtggaatatgcgccttatccagcaggtacaccgcagctttctgtgctgaaaatcactatttcgccgaatacaagtcttgactggcatgaacatcccatgccgaacgccgcctatgtagaaaaaggcgctttaaccgttgaaaaacaggcaacgggtaaaacccgtactctgcaggcgggagaggtgctaccagagatggttgatagtgcacacaggggctacacaggtccggaaggagccacgctggtggtattctatgccgggaaaaaagggcttccactgtcaaagcccgttaaataa

SEQ ID NO: 154856 - DNA, 255 bp, Enterobacter cloacae
atgctcacgccaaaaagcgtaactacaaacaagaatgaccagagcagaatccaggacattcgcattccagaacattctgacgatctgagtgctcacaatatccatgaatccttcagaatagagggggggcttgcttattttgaacgtaataagccaaagaacgcaaatcagagcaaaacgaaaagcaatccacgcgatgaggggcatcatgaaagcatgacctttagtgaatttgccccgatgagtcaggaataa

SEQ ID NO: 154857 - DNA, 369 bp, Enterobacter cloacae
atgacggcgatctcaaatggacaacaacttaggcaggccatacacgctgaagccagcccgggcaggaacaattcagcatcaaaaatcaagcaggtagaggcccagatcgaggccttaacaaaagaaatccagaattatgttgaaggtattgcaagtggtgagatagatgagactcctgaagaaaaagaacgcagaatggcagagcttagtcagcagctagcacatctttatgaacagcttggccagctccagagacaacaagttgaagaagcacagcagaaaaaagcagaatctacaccaaaacaaaacggagaagaacagatagatcacatcaagaagataacccgttatattgatgtatatatctaa

SEQ ID NO: 154858 - DNA, 528 bp, Enterobacter cloacae
atgcaatccaaaaactttctgatttctgaattcaaagagtggctgcaaaatctccccgagctaaacatcgttaatgatgccacagctcgtaatctacgcgactcttctcttcgtcttctaactgtgcttggtccagatggcgttgacggggatatccgtgattacagtgttgcctctatggcagatatgtacgcccaatccgcagaaaccaaaccatcagactctagcttgcaagcatacaaaagccgaatgcaaagcgctgttgataagttcattgcttatcagaatggtgaacttgagggtgacaaacagattcagcctgcgaaaaaggagcgtaataaagtggcacctaaaaagaaaacttcagaggatgatagtgggattaagactttcgaattgccaatcccgctacgtggagagttgattgtaactattggaaatctgcctcgagacttgacaaaggaagaggccaagcgaattagtcttatcgttgaatctttcgccatgtttgacgatggttcaaaataa

SEQ ID NO: 154859 - DNA, 138 bp, Enterobacter cloacae
atgaaagcacacgatgttaatcgcgatgacttcatttacgaacatgataaaccgatttatgtgcgcagttactgccgcgtccgtttcggtgaacttgaaaatgttcgtcagcacttccgttcatatccgagctgctga

SEQ ID NO: 154860 - DNA, 165 bp, Enterobacter cloacae
atgatttacgtctggcaacagcctgtacgtaaagcaataaaaaacaccaaagcccgcgtaactgcgggctttggtgtttttctgtctggctctttctggcagctgttagcaacgaaatgcatagctctacaatgcaatgcggcacaggccgagactgaaatttag

SEQ ID NO: 154861 - DNA, 711 bp, Enterobacter cloacae
atgtcttggatatgtccacactgtgatacggctgcaattgtcaatgataaagacattgcaaaacattcatttcagttgaaatcaggtgaacatcatttcgagtataccactatgggtttaacgtgccctaatcccgagtgttcaaaagctactatttggatgagcagggaaagattagcttctttcgctggacaatttttacctgcatcaggcacaaaaatgacatggtctgtaattccatcaactaataaggaacgggcaaagccctatccggattatattccaccatcagtgttggaggattacaaagaagcttgtgctataaaggatctttcaccaaaagcttctgcaactctttcaagacgttgtttacagggcataatacgtgacttctggagaatagaggcagataccctcaataaagagatcttagctatccaagataaggttgacccagtcgtctgggatgcaatagacagtgtcaggaaagtgggtaacatcggcgctcatatggagaaaaacatagacgtcatcgttgatgtgagttctgatgaagcagatttgcttatcgaaatgattgagatgttaattgaagattggtatatcgctcggcatcgaaaacaagagaagttgaagcggatacaggaggtagctgcggaaaaagcagcagcgagaaagatcaaacctaatgaaaaagccgatcatagctag

SEQ ID NO: 154862 - DNA, 126 bp, Enterobacter cloacae
atgaaagattccatcttaacggtggtgttgctcattgttctgcagtcgttcgttgcctcagaaggcccagggattaacatctccggtaataccttccaggtcaacgttattactcagaccaagtaa

SEQ ID NO: 154863 - DNA, 918 bp, Enterobacter cloacae
atggcgctggaaaagggtattaaaaagcttgttcaggattttattgcggcaggacggccctccccgcgaaagcaaagtattgatgaccgcagagccgggtacattgcgagcacagaacttgccggtgagactgaaaatcgcgtccttgttgaaacgctcgttcttgaggagatgacctttcgggtgttttcacctctcaatgcacccgaaaccttacctgcagccatctactatcacggcggttgttttgtcagcggtgggtttgaaacgcatgataatcagcttcgccagctggcgtttaaaggcaactgccgtatcgttgcggtgcagtaccggcttgcgccagaacatcttttccccgccgcacatgacgacgctgaaagaggggcagatttagtttggcagtatgccgacaggcttggggttaacagaaaccggataaccctttgcggagacagtgcaggggcacatctggcgctggtgacgtcgctgcggctcaaagcgaaaggtgtctggcaaccagcacagctgatcctgatctacccaatgctcgacgcgacggctcgttttgaaagctatattctcaacggcgcggattatgtcatcactcgcgacaccctgctcagcgggtatgaaatgtatctggccagcaccgatcgccaacatccagaagccagcccactgtggcgggatgatttttgcggacttccgccagtgcatattgttaccgctgagtatgatccgctctgtgatgagggcgagatgctgtatcggcatctttcagagcagggggtgacgtgcacggcccaacggtggctgggtgtgatacacggtttctttcagcttggcggcgtgagtcagtcggcgagggacgtgatgcgggatatcgcctggcggatcagtgccgcccggcgataa

SEQ ID NO: 154864 - DNA, 288 bp, Enterobacter cloacae
gtggcggtgacttccgccgtggccctgccgtccgcgccggtggtgccggtcacggtggtgatgctcgcgccgtccgccacggtgaagcttaccgccgcacccggtaccaggttgccctgcgcatcggtaacgatggcaaccacgccatttttcgccgtgccgttggccggggagttatccggctcaatcgtcaggttcgcgtcggtgatctctgccgtcgcgccgtccgccacaaaggtggtgtttttgctggtcgccttaccgttcaccgtcgcggtgaccagatag

SEQ ID NO: 154865 - DNA, 291 bp, Enterobacter cloacae
gtggtggagataacctccgccgtggccttaccgtccgccccggtggtcccggtcacggtggtgatgctcgccccgtctgccacggtgaagctcaccgccgcacccggtaccaggttgccctgcgcatcggtgacaaccgcgaccacgccattcttcgccgtgccgttggccggggagttatccggatcaatcgtcaggttcgcatcggtaatttccgccgtcgtgccgtccgccacaaaggtggtgttcctgctggtcgccttgccgtttacggtcgcggtgaccagatag

SEQ ID NO: 154866 - DNA, 546 bp, Enterobacter cloacae
atgtctgctgtggcttttccgtcagcgccggtggtgccattaacggttgtgatggtagcaccgctttcgacactaaaacttacggctgcaccagatacaaggttgccatgtgcatcagacaccactgcggcaacgctattttttgttacaccatcagcgactgcaccatcaggatcaatcgtgaggttggcatctttaatttctgccgtcgtgctatcagcaacaaaagttgtgtttttatgcgtttcagtaccattcacttttgccgtaacaacatatgtccccgctgttgtgctggtaactgtagcggttgctttgccatctgctccggtggttccgataagagtggtcactgaagctttatcagaggacatactaaagctgacttctgcgccagcaacaacgttgccgtacacatctgtcactacagcttctacaccattcgtttcatggccattcgccacagacccgtccggtgaaatagaaagattggcatcggtaatattcgcagtagcgagatcggccacaaacgtggtgtttttctga

SEQ ID NO: 154867 - DNA, 252 bp, Enterobacter cloacae
atgagccgtgccatcagcaccactttcgagttttgtcatactgaggtttgcaccttcagcggcactcagttgcagagtggcgccagcgacagcattaccacgaccgtctgttactttaattgttacggcattactgtcagtaccattagcgacagcgccactgccgacagtcagatcaccctcggagatttcagcaacagatttatcgacgacaaaattaacggtcgccgtctggacggtgcgaacgcctga

SEQ ID NO: 154868 - DNA, 3939 bp, Enterobacter cloacae
atggtgctgcctttcgggctgaatacagccaaagactggtttcataaaacactagcaaaatcccttgtcacttctacctccatttcgggggcggaagatcaacctggaacgcaaacgtcgttcgtcaattctaagcctgcggtttcaaataatgaatttcagacgctaacgccgattatcgatcctgataaagagggctataagccgtattttaaggcgctggattatgctctcagcagggatgacgtcaagaacatcgccattactggcccctatggtgccggtaagagctcagttattctgtcatatctcaaaatgatttcagcacgtaagtccttaagatataggctatcttgcttgtggcgtcgcgaaaaaccgaagaaagcggatgagcacgtaattatctcgctggcaaattttgaaacagatgaaacgctgaaaaactcggagtctttatcaaaagaacaaagcatagagtacagtatcttacagcagattttatataaagttgataaggggtcgttgcccgattcccgggtggaacgcattcatacgcgaagcgtcaggcaaatacttacaacatcctgtttgttgttttgtatacttatactggcaatcgttgacgctaccttattgtttccccaaaagatcgtcagcacgttttcattatccacagaagtgagtaatttcatcgcgattcatccgctgtggcgctggggatgcattactattctctcttttattatctgctggtatttactttcccgtttttaccgaattggtttttttgacaggaaaatagcacttgataaagtcaatcttctcaaggctgagatcgcagcggagaagcaaagcactgcatcgttactaaatttgtatatcgatgagatcgtttacttctttcttaagacaaagtacagaattgtcgtctttgaagacttagatcgcttgaataacgggcatatcttcatcaagctccgagaaattaatcaggtagtaaataattctaaattgcttgaaaagaaaccgataaaattcgtctttgcagtcagggaggatttattaaaggatgcggagtcacaaaccaaatttttcgattttatcgttccgattataccggcagtagatagcgagaatgcctacgatatattaaatagtaaagttgtagattttaattcggcagaaaaagaacaattttttaagaaagtctctctttatctgactgatatgcgggttatgaataatgtcataaacgaatttaatatctttaaaaaattaattactggtgagttttcagatattaaacttttttcgttgataatgtataaaaatttatgcactaaggattttactcaacttgataatcagagcggatttttatttaaggtagtacaggcatattcgaagaaaacgttacatgagatttattatcatacctttaaaacaacattatcttccctaaaatcaagagtagagcaggcgcgggaagaatcacttgattctaaagaagtgttaagagggaaactgttacagcgataccttccttctatctatttaaagaatgcatcattttatttgaatgtaactcagtatcatcataatggtgtacaaaatttaacgtatgaggatcttgttgagcatgagtctttatttattcgattcctcgaaaacccatttccttctggagtgcttattgttaatagtcgtaaccaaaattacgacgaccgttatgatattccagctgataagagaattgatttgttgcaagagtacaagaggcgtacccctgttgtagaggataataacaataagacactgagttcattgatgaaaaggattgatgatgcacgagaggttatcaattccaggcgacgcattacattacgtgatctatgcgaaaaaataactctttcgaaatttagagagtggttgtctaatgataaattagatgaaaacgaaaccgcacaaaaaaaagacaacatagctgcaattacttttaatattgaatttttattttttatgttatcgaatggctatattgagcaagattatatgcaatatcgctcaatcttccatgcgggggcgttaagcaaaacagataatatttttatacagaaagttgcaagcaaggttggttttgatgaattaaaagattttcatttggataatgttcccaatatttttgaaaagctggaggcattgtcatttaaattctatgaaggggtattgcaccctgatattatgtcttatttgttcgggcgtaaacgtgtaatagccaaggatgtagtaagcaactttttggagcatggttcaaaaggaacactttataatgtcattcaaacctattattacgagtgtgataatggcgtttatgaaagcttgctgggaataatgataaataatgataaggcattaggtaagctaatggctgcgctggatttctgtcgtgaaagtggaagcgagaatgaaaattatgaacaattgcttttatcattcattcgattcgtacagataaaagatctttccaaacaaattgctattcatgattatatccgggaattcaaaaaagacacgacaacgtttaagtttgtgccacattctgatgttgattcattctgtgaaaaattaaagcaattgaatattgttttcgaaaggttaaacgaagctaacgatgaaaatgaaagagatttgctacgctttgtagctgaaaactatctatatgaatttaatattgataaccttacagctctgtataatgtcttttctaataaaagaatattggcagatgaaatatcacgcctgccgtatagtttaattgtcaatcaaaatgtcccttgtttgactaacgctattaataaaaatatagatgtatttatctctgaatgtcttattcattcttcagagaatgtggatgttattactacattgcttaattcagacgttacggagagttccaaagaaaatataattgaaaatatgcaattcgaggttcagcaattatcaacaatcgaaaatactaaacttagtgtcaatgaagaagtttcgtatactgtttatgatctgctgattaagaaagggcgcgttgcagcgaactggagcaatatttttgactatatgcatgcaggtgccattggtgaattactgtgggcgtttgtagatatcaattcagaggcgctttcaagtcataatgtgagtgtgccggaagagtcaattgataatgtcataaattacttctattcagcagctgacaaaccggacgaactttatgctcaaatggtcagcgtgctatctgtcaaaatcgaacaggcaatcgatgatctgcctttgcagaaatttaaatcgttatgtacttttgacaaatttttactatcaaaagatctgtacgaagatctattaaccatttatgaagatcaacgtcgtaggggtcttaatgaatgtctgtcacttattattaaacacaacattagtatttttgaaaaaaatattgatttttacctggaagatgacgaagacttcgataatgagctaattgaattgttgctgaatgatgaagatatagctttagatgcgaaagtctctatcatagacagcatatggccacactataacgataccttattcgatcatgtatcaataaacactcgtgtgaataaagaactcttattgaaagttacaggcgatgatacacgtctcgtgtttttaaaccatcttttagaatttgaagaacttccccatgagtttataactcgtgctcttatgtcgtttgttgcagaagagtataacttgataaccgaaaattcaaagcgtgcgaaagtatctaaatcagacagtaatgagttgcttttacaatatcttactcagcgtcattatataagcagttaccgagacaaagggaaatatttggaagtttatcatcatcgcaaattgtttcagggttaa

SEQ ID NO: 154869 - DNA, 888 bp, Enterobacter cloacae
atgtcgaaattaagtaagcaactggtgactttagccagacaagctggtggcagttttaaaacggtttctgaccgttccaaaattgcagatcggctggcaatcagaatggctaagctcaatattcagatccgcgatgttaagcacttgaaaactcaacatattgagcgatacatccatagccgattggctgagaatatctcaaaacgaacactacaaaacgaaatggcggcaatcagagcggtattgagcgcagcaggcagatcaaaactagcagatcctcaacacgagcatctcaataacgcggcgcttggcttattcggtgccagtcgggatggcaccaaagttgcgataagtaacgagcgctaccacagggcgctcgccagcatttccatgagggatacaggcgtagctgccgccgtaagattagctcgcgtgttagggttgcggacagaagaagccgttcaggctgctaaatcgctgaaaacatggcaaagggctttaattaaaggtgagctaagattgaggatagtctttggtaccaaaggcgggcgtccaagagatacgacggtgcttgatcgccaacaggtactaagcgtggtcaatgaggcactccagcatgttgaccagaacaacggcaaactcatcgacaagctttctcttcattcagcaattgatcgatacagaaacgttgtgagagaggctggtttaaccggtaaatatgcgccacacagtttgcgttatgcctgggctaacgatgcgcttaggtttcatcagcgacgtggtttgagtagggatgaggcaagggcaatggtgtctatggatctcgggcacggtgatgggcgcggtaggtatgtggcgagggtctacagcaaaattgatgatgggtag

SEQ ID NO: 154870 - DNA, 273 bp, Enterobacter cloacae
atggcgaaaaatgatttaggcataaataatatcgaaaaaggttcaaatggagaaaatggcaaccatcagtttcaaataggaaacactacggaactatcacaaagcctcttatatagtgtaattgacattttcaaagcgattttgttcgcattcagatttattacatcaagcgctactgaaattgatgacgaactcaaagatgggtatcgtgatggctggcaaggctacgggcattatattcaaaacgtaaggacggatgagcgccatgattaa

SEQ ID NO: 154871 - DNA, 1524 bp, Enterobacter cloacae
atgactgccagccattacctcgaatacttcgttgtctttctcggttggctgctcaataacgccatctgggacatcattttaagtacggggttatttgcgctgccgctggccatcaaactcggaagtgtctggctgcgggtgcgcgaagaaggcgacgatgaaggaaacaagggaacccttgccctaccgagaatggaacatgtgatttatgtggcgtttgtggtgatccttttctgtgccattcctgttcagccactcgatatccagtcaatgcagttcgacaaagcccgatcaaagcagtgtggcgtgaatatcgcttcgccggaaaataccggttatggcgcactggttaatgattttgacggccaaacggcagcggtgccgatgtggtggtatcttgtgcacagcctgtcaaaaggggtgacgcaggcaagcgtagcttcgattccgtgtggcgaaaatcttcgccagttacgttttgagatacagcatactcaaattcaggacccggtaattcttggtgaagttcaggagttcgccagtcagtgttattcgcgggcttactatcggcttaaggcgttaaacagtcaattatcggataaaactatcgcttcagtgggatggataggctcgtcctattttctcaatacggcgggatactacgactattacacctcaacgattccacgctcacaatggccttacagtaccaaccgcgacgatggttatcaggacgttggccgtggcggctatccgacctgtaaggagtggtgggagacgcccaccaaaggtctaaaagaccgggtgctggccagttacagcactgcgactcgttatatcatgcaggctaaactgggtgatgactgggaggaggtcgcactacgttggcttgttagcccgaagaacagtacgctttcgggcagcggtgagagctatcttaccggtcatgacgcctcgggaggtacgttttcgtgggtatctaccgctctggcaaacaccggtgttgcggttacgcaggtagttgctcttcctggttttgatgccctcaaaactgcgttacctatcgcacagtcgttgctgatgatggctatggtcattgtgctgccggtgttgttgctgtttagcgcttacgacccaaaaacggtgatcaccgtttcgtttgcactgttcgccctgatatttatctccttttggtgggagctggcaggctggctggatgaccggttagttcgcattttgtataccagcatgcaggaaaaagaaggtggctctaaagtcccctttgcggatttttttagttcaaccatggatggctggattatgaatttagtccttggcgtaatgtatttggtgtttccggcattctggatgggaacactgagctgggcaggtgttagggtagggcatgcgtttggtagcgcactggagaagtctacatctgtatcacacggagctggtcagaaaggggcgaaggttgtcgataccgcaattggaggtaaaactaagatttcaacaaaaaaataa

SEQ ID NO: 154872 - DNA, 1422 bp, Enterobacter cloacae
atgaactatttctcaagcatatgttgtcactggttagtggctgcagtgttgctggggttgagctacccggccagcgcgatatttgacgtggacaacaatgtgctggaatccggttacggaaaaggaatgaaaggtgcggtgaatgacagcctcttttacaccataggcggcggcatggttatctcacaaccaccgagcagtaataacatgcaaaaaatcgggatgggcatcaattggaacagcgatttgatgtgcggtaatttcgatatcgataccacggttaaaaaccagctcaacgggataaccagtggctttcaggacatgatggggtcggtaattagtggcgcgaccggcgcagttgccagtttgcccgcgatgatcattcagcgtgctaatcctggtctttatgaacttcttaccaatggcatgctccaggctaatgcttcttttgataaagcccggctaaattgccaaaacatgtctaaaaaaatgggggattatgcattttcaaaccagtggacgcaggctgcgattggtgaagagtttaaaagtattgtgtccaacaccccggacgcggtagctgccgataatcagcttaaaaccgccaccgggaaagaaggcgttaaatggataggtggaacccggcgcggcggcagcggtcagcccgcgattaaaccgacccatgatttggccaaagccggtttcaatatactcaatagccaacccgtcaccagtgattcaacgataagcgagtcagactgtaatggagcgctatgcagaaaatacaaaaccagcgaagaggcggcgagtgcggtagtaaaagttctgggtgaccgtgcaatacgaacctgctctgttgccagtgaatgtgccagtggtgggcttgaaaacgagccaggtacatcgactgcaggcgttggttttagccctatgctggaggatgccagtaaatccaatctggaaatcttaatcaagttagttaatggcgacttagcccttaccagcgccaatttactacaacttaaaagcggtgatttgatcgtctcacgcggcgtgttgcaagcgctgaaggatgaccctgataacgcagcgctggttcagcgtcttgccagtgaactggctatggccgaaacgatttccaccgccctcgctatgcgacgaatgttaatggctggccagtcagaacctaatgctgctgaccagccaatggcgttgtctgaaacagaccggcgacttgagtttctggatcgggaaatctcagccctgaaaaacgaaatggagctacgcaaagcgatcagtaataactcgatactgaccacgctggcccgacaaagcgaacgtgatctcaatcatcgcctccagcagaaaatgggccaggaagataaggggttcggccagttgagtgaagagacggaacaataa

SEQ ID NO: 154873 - DNA, 960 bp, Enterobacter cloacae
atgatttcgatgcttcccgcctatcgtctgcatcgcttggctgcaacattcatggtctgcagtgccgctatgccgtttaccgtcaatgccattgatagtgccagtattattaccagtgcattatcaggagattgtctggaatatcggatcgccgggttgtgttactggcttttatgtaccccttttggctgcacgattaaaacatcagtgaaggtacgtcactatctgcccaatgccgtcgtgtcggcctataaccagacaggcgataacccgtggactgaaatgtcacttctcggtaccggcctccctggtattgcagaaggaggaggtgcaaatgaacaaaagcgtgacgtacaaaaaaataacctgcgctttaaaaacgttgatgtcatcggccatcctgcattggttgcgccggtatttaatcagtttatggctcaggcaggaatgagttgttccggttcggctacggcattgatgccgtactttctcagtacgctggatgctgttatgtggcgtagtgggttgcctgaatcccttttccccgagacgttaacacccggcgtacgtgaaatcggctcaagtctttctggcacgatgtggggtaacgtttacccccggagcggctttgtaacccagaccgatgattacaaagcggccgccgttacagctcagcgcgccgccgatgtggttacccgcagtggtcaggttcacgtttaccaacccatgattgcccaagcttctccaggctattggccacctgatgctgtgcaagagaacagcggcacccgtaaccataaatggcaacgacttacccctgaatctacttcgtcctgcactgtattccccgaaagcgatgcgcccattgcaactgatggcaaatacgcctgggccttatggcagccatacagctgttgtcagcggcgtggccagacatttctctacagctcaagttactaa

SEQ ID NO: 154874 - DNA, 402 bp, Enterobacter cloacae
atgatgcctgtctttctaatcttatccatattgctgttctcagccccgtcagttgcttcgatagtcgtatttacagacagtcagcatcccattgaccatgcaggagaaaatgctcgtatggttttgctcgatgaacccgagcaattacagcagcaattcttcgccaatctgcccaatgaaccgggaaacgctgaacatattgcgcagagtattcttttatcaccggactggaagcagaaggaacaacaacttttaaccgcttaccagggagtcattgaggcttatcaactgcagctggagaaatacccggccgtcgtgtttgacggtcattatgttgtgtacggtaccgctgatgttgcacaggcacagcggcattatgaactgtttagggagggtgaatga

SEQ ID NO: 154875 - DNA, 255 bp, Enterobacter cloacae
atgaaatctattttaggttttgactacctgcttacaccacgtgtactggtcttcttttattggctcgtcatgctgtccatcctgttaggtggcatttactccatttttgcaggtagccttataaccggctttttcggtatggtgttcagcttgatcggttgccgcgtgatgtttgaactcatcatggtagcctttaaaaataacgaatacttgcgtcgtattgccgagaacagtgaaaaaacggctattgagtaa

SEQ ID NO: 154876 - DNA, 645 bp, Enterobacter cloacae
atgattaaacacaccacagcagaaagagaaatcaacacttcagctaagctgaatgagtaccagttgaaccttctgaaaaggattaacaatctcgctatttccctgatgcctgaatttgaagataaaaatcaggctatgaatgcaatcacgcttgatgacggttcactgatgcaactgctttacaccgttcagcttgagcagaagactcgcgtcaacgactacgaactgcgtaaagtgcgccgacgtcgcgaaaatctggaaagattttatcgtgaacttcaggagttgggcggtacgcttaaggtgaacgacgtggccgatatccttggcatcacacgccaggcgatcaacattcgcgttaagaagaacaagctcttagcattcaaacagaacggtgattttatcttcccgaaattccagttcactgataatgggctaattcccggttttgaagaagtgatggcggcattcgaagaggatacacatccaatgttgcggttgggggtgctgaaatcaccgattgaggttaatagcgaaggcctaaaaaagacgccgattcaaatcatgctggacggtgctaaaaagagtgaacttagtctggccatacgtgcggccaaacagttcggaaatcatgtagccagttaa

SEQ ID NO: 154877 - DNA, 711 bp, Enterobacter cloacae
atgaccaaatggacatttgataaaactgctgtggcacaaggaattgctgcacaaaacaaatctggacgtattcctgtgattgacattcaacaaggcactggtcttttgaagcgtcatcaaaggaagttgtataaaagcgcaattaacttcagcgcgccaattgagaaagacgactgtgggcgatacaaccctcccgggggaagtgtggcggtatggtatgcctctgactctgcattaacggcggcagctgaagcatacgggcgtttgttccatctcgaaggaacgatttcttatcctgaatcggtactttcacaacactatatgtgctctgtggatgtcttgagaacggtgaaagtgattgatgttgtagcactttgtgagttgttacatatccctttggatagcttagagaacgaggattacacctttccccagtggctaatggaacatctttatacgcatttcgggcgtgactatgacgggattgcctatacctcaagacataagcgctataagcgttgttatgccttttgggaacgaccgggtagtactcaagcctttaccgatacccctcaggggatgtggccttatgcccgttacgtcgaaaccgacaaaggcatgttccctaaggggtggcacaaaggaacgatgtcaggtgaagagatgttcgaagagctgcttggattcgaaattacgccagaaccaatgtaa

SEQ ID NO: 154878 - DNA, 2799 bp, Enterobacter cloacae
gtgacgttttcattgttcagaagatccgctgtactctctcaacaacctgacgagtcaggttgcacacccataaaggcctgtacacaaaaaaagagtggcaggttgacccatcgcggcgttcaaaatctgtatcccaataacgcttcgtttatcgactatttaccctgggtggaatacctgccggaaacacaaagcctgttgctggatgacgggatctccgtgggagctgtatttgaggtgttaccggtgggtacagaaggtcggacgtatgagcggctggaagagatacgcgatattgttgaagacgccctgcaggatagttttgatgagagggacagtcatccatgggtcgttcagtttttctgtcaggatgaatgcgaagtggatagttttgtcgacagattgagtggctatgttaagccgtgggcgcagggaacggcgttcactgcagcgtatttgcaggagatggctcgccatatgcgcggtatatccgttcctaagggactgttcattgataaggcggtaaccggtgcggcgtggcgaggccagcaacgacgtacccgattggttatttaccgctatgttaatccgggggttgttgaagcctacacccctcaagagcagcttactcaggtgtgtgaacgattgtcatctgcgctggctggtgccggtatttcggccataagacagaatggcgagcagatacatggttggctactgcgctggtttaatccttccccagactggatcgataaagaaaccctgtatcgtaccgccagatatgaggataaccgcgaaggtgaattgcccattttgaatgatttcagtgaaacactgatgtttacaccgccgcgttcagacatcgagcatggcgtatggtggttcgatgaacgaccacacaaagccatcaacattgaacgcatccgccgcccgccaactgtcggtcatttaacgggtgaaatccgcaaaggtgatcatataaatgcgttaatggacacgctgccggaaggcaccgtgatctcgctgacccttgtcgttgagccgcaggatcggctagaggcgcgcttcaatcatctggccaaaaatgcggtcggggaaaataccgaatcagaacgggtacgcgccgatgcgcagacggcaaaaagttacttaggtgagcggcacaaactgtttcgagccagtatgacgttttatctgagtgctgcggatctcaatcaattgaatagtcgccaacgcgatgtcactgcggtactgctgaatgctggcctgcagccggttaagtctgaatatgatgtgggtccgctaaatgcctatctgcgggcgttgccaatgtgttttaacccggaattggataagcgtcactggtacacccgtctgacctttgttcagcatattgccaatatgctaccggtgtttggccgggatactggtacaggtaacccgggttttactttttttaatcgtggcggtgcgccactgacctttgatccgcttaatagtgccgaccgttccaagaatgcccatttggcgctatttggaccgacgggatcgggtaagtcagcgacactgacgagcttgtttacacaactgatggctattcaccgccccaggttgtttattgctgaggccggtaattcctttgggctcttggctgactattgcgcacgccttgagctgacggtacacaaggtcagtattaagcccggatgcggcatttctcttgcaccatttgcagatgctgggaaattgctgagttcgcctatcagaaaggtagatgaacaagagctgagtgatcgtatcgaggtggaggacgctgacgaatctgatgcagaagaggaccgcgatattcttggcgaactggaaatcgttgcccgtctgatgattacagggggcgaaagtaaagaagaggcccggcttgaaagagcagacagggggatgatgcgcgaggcgattttggttgccgcgcgtgtggcgtataacgaagggcgccagatgattaccgctgatttgcaggcggctttttatggctttgctaacgatcggcaaaggccagaagtgcgacgtgcacgggcccaaaacatgggggagtcattgagtgtatttatgcagggctttttgggagaactgtttaatcgtccaggagagaactggccggaggctgatgttacgttaattgatctgggtacgctggttagagaaggctatgaagcacctctggcggtagcttatacctcgctggtcaataccattaacaatgttgcagaacgcgatcagtttcttgagcgcgagattgtctttgccaccgatgaggctcatgtgatcaccactaatccgctactggcaccgtatatggtcaaggtggtgaaaatgtggcgcaagctcggagcctggttgtggttggcaacccagaatcttgaagattttccgtccacctcgaaaaaaatgctcaatatgattgaatggtggctatgcttggtaatgccgcccgaagaggtggaggagattgcacgatttaaaaaactgacaactgaacagaaaacgcttttgctgtctgcgacgaaaatgccacgctgctatacggaaggcgtggtactggccagccgtattgaagcgttgtttcgtgcagtaccaccaagcctttatctggcgctgggtatgacggagaaagaggaaaaagccgctcgccgtacgttgatgtcaaagtatggcatttcggaacttgatgcggcgatacgtattgctcatgaactggataaggtcagaggcatcgatgacaaaaaaagtttgtcatttctgtaa

SEQ ID NO: 154879 - DNA, 408 bp, Enterobacter cloacae
atgattttttttcgttacctgttaacgctgttgctcgtaagtaccttaacgggatgcagcaccactaaagacgaactattacctcctggcgataaaactatgctcgatcagtggcgatataaggctggcggcagcggcgttatggcagaggcaagaagcctgctacgtcgtggtgtcacagaccgtgatcaaaagcagagagtcattctggaagaaagctatacccgcactgcagaaaacgaaattcagcaacttttcccacgtctgcctaatccggatatggtgatgtatgtttatccccatctggcaggcaaagagcctgtgccagttcctggctatagtacggtgttcgccttttacagtcgggttcactatgcgctgccgggtgaacgtctggaggctctgtga

SEQ ID NO: 154880 - DNA, 1446 bp, Enterobacter cloacae
atggagataaagtctaacggtctactgaagatgattgtgccggtagtcctgtttgctgcagtggttattggggttaagtcgtgtggcagacaaacgcaacctgcacagaatgatacctcgaatgttgtagccgatttaacgcaagaagaactgaaactgttaggaattgagggggatacgccgcaggatacgctgcgtacattggttggccgcattaaagctattcaggctcagcaagaccagttagccgggcaaaacagtgcgttgcgcgacgaaaattcacgtctgaaaggacaggacgttaatctcgataatcgtattgattctgctattgaggcatttaaagaagaacaccgactttcacagcagaatctgcagaatgaacagctgcagttgaaagctctactggataagctgagcgagactaccacatcaccagtgcagagaccgacatcggcgtttggcgatctaccggtaggtcttgggctggaaggtgatgaatctcaaggtcggtttaatatacagtggattgaaccggaggatgcgctaccggtggatcgcactgggaaacctttatctggcagtgctaccggtcgcggcaatactcagtttcctacttccttttccagcctcaataataacgaaattaatcggcagaaagccgaacttgaccgcgttgctaaacaccagaacccaatagaagaaggggctcagccggtttacacactcccagaaaacgccacgctggtaggtagtcagggcatgaccgcattactgggtagggtgccgatagatggcaaagtgactgacccgtatccgtttaaagtgcttattggtaaagacaatctgacggctaacggtattgaattgccagaagtggaaggggcggtggtatccggtactgctacgggggattgggtgttgtcttgtgtgcgcggggaagtgcactcaattacatttgtcttcagtgatggcacggtacgcacggtgccgaaacccgctaaatctacagaaggaaaatcgagtagtaacaatggcagcattggctggctgtctgatgggaatggcattccctgtttatccggtacgcgcaaaaccaacgctgcaacttacctaccgacgttgtttgccctgtcggcaagtggtgctgccgctgattcgatggctaataatcaactcaccaccacggttgacggtacctcaataaccagcacgttgaccggcagcgcgggtcaggccgctctgggacgggcgctttccggtggtactaatgatgtcgccgagtgggtaaaggcacgctacggacagatgttcgatgcagtttatgtcccgcccggtgctcaggtggctgtgcatattactcgccagattccgattgattatgaagagcagggtcgcaaggtcaaatacgatatcgacattagtcaaccacacgcgctggattaa

SEQ ID NO: 154881 - DNA, 858 bp, Enterobacter cloacae
gtgagcagattatgcgacggactcttgtggtgtctgctgcttattgtcatcccggcatcggcagttgagctcattaaatgggaacgcattccgcttcccatagcattgcatgttggacaagaacggattgtctttgtggatcgaaacgttcgggtaggttttccaccgtcattgaacggtaagttgcgggtacaaagcagcggtggcgctgtgtatttgttggctcagggggatttcccccgaacccgactgtcgttgcaggatgtggaaaatggtgagctgattttattggatattagcgcctcagcaggtaagtcgatgcttgagccggttaagttggtttatcagggcgacgttacctcactctcggccaatacggatgccgcggacttatctacttcacgtggtgccaactccgtatcatcgcaaacgagcactgcctcaacgccgatacctgtaacattaacccgttttgctgcacaaagtctttatgcgcctcagcgtaccgtcgaaccgttgcccggcgtacatcgaatcgcgttatcgttacccgcgaatatcaccaccttactgccttcagaagctgttcatgtaaggcccgtgtctgcatggggattagcaggttatagcgttgtcgcacttatagtgcgtaaccttaacagtgatcgcatcattctcgatccacgccatttgcatggtgctttttacagtgccacctttcagcatcgctggcttggggcttccggtacacctgaagataccacgacgctctacctggtgataaaaggtcgcccggacaacgcatttattcctgagcctccacttgcggcggagaagggcgaaaaggagacgcgctga

SEQ ID NO: 154882 - DNA, 660 bp, Enterobacter cloacae
atgacgagtaaattcaaaaatgcgctgacagcccgcgatcatcacatccgaacgctgcgcgcggcatgcgttttactgctgctgttgctactttttgcgatgggcggatggatgcattcgccgcgtaatctgactattcataatccacctgacctacgctctggcagtattcgtgcctggtgggaagtgcctccttccactgtgtatgccttcgcattctatattttccaacagctcaacagctggcctaaaaatggcgataccgattatccgtggcgtatttcatctcttgctgcttatctgacgcctgcctgtcaggagcaactcaggctggatgccagacaacgtaaaaatctcggtgagctccgtgagcgggtacgcggtatctatgaagtgccaggtaggggctatagcgatgatagcgtgaccattgttgatcgtgataactggctggtcaggctagatttggtagcagatgagtattacaacaccgagcccgtaaaacgagcgctggtccgttacccacttaaggtagtgcgctgggacatcaatcctgagaccaatccgtttggactggcgctggattgttttgcggatacgccccagcggctggaagccgcaccggttgtactgccagagaaaaaaggagtgttccagtga

SEQ ID NO: 154883 - DNA, 393 bp, Enterobacter cloacae
atgttcaaacgcctgtattcccatttaatccgcattgttgaacagcagtggatgcgcctagggcgtaagggggggctgatgattgcctctgtttcgctgccccaaaccgtgctcgctggtttgcccgatgtcgaggggccgcaaagcagtaccgatggttcgttctatggtcagattgcggggtatatcaacgacgggattgtactgggtggactggtgctggcagccgtagcaatgctgggtgtcggcaatgctgtcctcgcgacatatgcagaagtgcgtgatgggaaagccacctgggctaagtttggcatgctttgcgtggttggtgtgattttgattgtgatcgtgatttggctggctgctaaagcggcgacagtgatgctgggttga

SEQ ID NO: 154884 - DNA, 237 bp, Enterobacter cloacae
atgaccgatgcccaatcccatgcttttgctgccgccagtggtaacgccgacccggcggtactgaaccatctgtttgttggtgcactgattgggctgctgctgctgtgggccggttggggtctggtgcacgtttatcgcggttatgcggctggcagggttactgaaccgttgatggtgcgctttgttattcgcgtggttgtactgattacgctcacgctgtttctgttcgcccgttga

SEQ ID NO: 154885 - DNA, 312 bp, Enterobacter cloacae
atgagtgtgagaaaccgtcggcttgtttacctgctggggtggctcctgtgcggtgcagttcaggcggctgaatctgatgaactggcgcttgtaatcaggcagctcgatcaggttcaggccgctctggaacgcgccagagtggccgctgcgcagtcggaaaaaaccacccgtttctattttgattatcaacgagccgctcaggatatttctgcaattaagcaggggatcggcgtttatctggagccttctcgcgcccagccgattttatcggacggggttgtcggcaaatatcagatggaacattctcgatga

SEQ ID NO: 154886 - DNA, 4134 bp, Enterobacter cloacae
gtgattcttgcggctgcaggggcaggcaagacagtagagatgcgctctcgcgctgaaatcatcaagcaaagtggaagattcgctttttttattcgtatagaagatttggatgagacggattttgcatggggtttggaagtaggctctgcggaggagtttgaggcttggctgggctctactgatgaggcttggttcttcctggattccgttgatgaggcgcgtctggtagcaccgacagctttcgaaaaagcagtaaaacgatttgcttacgcaataaaaaaatctcgacatagagcacatatatatatttctggtagaccttatacatggagtttcgcaactgattgtgaaatggtcgagcgtcatttacccttttctaatcaaaacggagttgacgggggttttagagataaccctttgaccatctatagccttaacccgttgagtctagatgatatccgtttttatgcatcccggcgtgaagttaaagatgctactgaatttgttgatgaaattgaacgggcaaatttacaagcgatggcgtctcgcccttttgacctggattttctgattactacatggaataaggatggaaagcttggttctcgtttcgaactatttgagcgaaacgttacaacgaggctcgatgaaatcgaccctttaaggcgtcaggcaagacctcttcaggcatcaaaagcgcttgaaggggcgtctttgcttgcgggggcagttaccttcactggaaaaagtggcattcagattaatgataagctgacagaacgagttggtgtgaatgctgaagttattttagatagttgggaacctcaaaatgtatgggctcttctggaaagagggattttcagtgatgcgatatacaatatggttggtttccgtcaccgagaaattcgcgattatttaacagcgaaatggcttaactcattgttggagaaagggcattcaagaagagtcgttgagtcactgatatttcgcgacatatatggcgagaaagtaattactcctagactaagtacgttagtcccttggctgatattgatggatgacaagataagggataaagcattaagcattcagcctgaaatagcgctcaatggtggggatgtctctcatttaccactgtctgtacgagtagacatgcttagaaatattgtcagtcgtattgcaagcgatacagacgaaaaacgtgtaaggtacaatgatgctattggaatgatagctaaaatagatttggtggaagaaatatcatctcttatcaaagagtactttaataatgacgatgttattttctttttgtcaaggatgctatggcaaattaataagcccgtttgcctggaagaattaatgtccattgcggttgatcaaaagcgatatctttacgcacgtattggtgccgttagagtattagttactaccgcaacggctgaagttttgacatcattatggcaaaccttgaataaggattcagctaatttatcacgacgtattttggctgatctcgtaaataatgctgattttaacatacaaaatgttaactatttattggattcatttaaaaaattagagccttataagcaattcgaaacaacgggattagttgaaggtatcaaggcattcatagaaatggtaccccacattaatgactccaataatgagaaagcattaattattctcctaaatggcttttacgatttaattaaacctaccccttactgtgagcaacctgatataggaatagcggaagaaaatgtgtggctgttgcctttagccatggatgttattgaaaaattggtgtcattacgctcggatatatgcctagagaacgaagtgctagatttaatgctggcttttgtccaaaccagagactggcatgctgatcatattagggaatacaaaggggcattgtctgaactagttcccgcatggccggagttaaacgatgctcttttctggcgtgcagtagagaatagaagaaccgaagcgcaattcaaaaatcgcagattgattgatgactggcatgtcctatggccaggacatttctttaagtttgatgtggaaagttttgagcgaattttgagctatgttagccaaaaagaattgcttgatgatcggttggttgcgttgtctttggctctgcgtatttacacgcagtcgaataatagtgaacaatttttatcgggaattaatgaagtatcccaacaacatcatgagttagtacagaaagttgcattttatttaaaccctccgatagatcctgaaagagaggagttaaacaagcagcaggctgatttaaaacaaaaggcagaggaaaaacgagcgcagaatgagcgtgggcgtattaagtggattgaccatgttaaagcaaatcctcaagttataataaatccacccggactggcgacaggtgagaccagcgatgatcaatattggttataccaggaaataaataaaaataagcacgatcatcttgcaactaatcatgactggcgtgatcttattgaaacatttggtatgggcgttgcctgtgcgtttcgtgatgcagccatggcatattggcggatttacaggcctgaagaccaaagctcaacctcaataccatttaatcttattttcggattgcttggactggagtttgaatataaagaaaacccgaattttcctcactatcttcaatccgatgaagttcagcatgctcttttatatttaactaaagaaatgaatggctttcctggctggctggaaaagatgtatcaaacttatccggagagggttgtaaatgctctctggaaagaactggagcaggaactttcaaataattatcaacccaatcaaatgtatccactcttgcatgatgttgtttatcaggctccctggagccatatagagttggccccaacactttataagtggcttgaagggaatgagccgaaatctaatcagagcttaagaagctgtattcgtattatggttaatggcggtatcggttttgctgagttagcccaattggctagcaaaaaaatcgatgcgccttctctggaagagaatcttccaacctggtttgccttatttgttgatacctctccggatgaggcgatacccaagttaaaaacctggctcgagcaattatcagaagatagagcatgtatatttgcacaacattttgtaacgacgctcaccgggaaattccgccatggtgaagagagagcctcttttacgggcggggtgcgtaatcctgttagtttaaaagcgttatttttgcttatgaccacgtttatcaagccggaggatgatttagatcattcagccgttactacgtatactccgacgcttagagatgatgcacaaagtgcccgtgaactactttttcagtggctagctgatattccgggtaaagaagcctatatcactataatggagcttattaatgaatatccttatgaaggttataagcattggatggtaagggctgcacgcaacagggcagtgtccgatgctgatttcgagctttggactgatgaacaggtacgagattttgatgctagtttagtgtttacacctaatactccagcacagctataccaaatgggtgtccattatttactggatttcaaggattggctcgaacacggtaatgatagtttggctaaaacctatcaaaacattaccagcgaaactgagatgcgcaatgttgttgctcatcatatcaaaaccaaagcaaaggggcgattaacctgcgctcaggaagctgaactcgcaaatagtcaacgaccagacctatggcttcaacatcaaaatgttgatgttcccattcctgttgagctgaaactgttggataaatcctggtcaggtagtgctttgtgtgagcgtttggaaaatcagttgataggggattacttacgtgaaaatcaagccgattttggtgtgtttttactgatttggcagggtaaagatcaaacagttaaaaattggattattaatggtgctaaagtaaatatcaatgaacttgaaaacgcattaactcaacattggttatctatctcgcctaattatccaaaaattaaagatgtaagaatcattgtcatcgatttaagtattcgcgagagaaggtctgctgaataa

SEQ ID NO: 154887 - DNA, 684 bp, Enterobacter cloacae
atggcttcaaaagcgttaagtagtgtagagaaggacatcctttcatttttaaaagcagagttcattgagcgcggctatacccgcgaacacttgcgggatggttatgatggccccaaacttgaaccaatatttgcagcattaagcgagcatgatcgcattgacctcgatattgccattgatgatttgacctcaaaggggttgattagtactgggcctatggagctcgtcgagtttgagaatgatagtccctctgtatttattatgccgtttcttgcatctaaaaaagaatatgtcaatttgacagagaagggttatcagagtgcctcgaatattaaaagcacttcaaggaactgggcgacagtgattaacaataacaactttcatgctccagtaaataatgcacagtttgttgcaggcaataacaactcacaaacaatgaatgttgatagccataacgacagtgaatcagtacgtgagatccttgcccttcttaaaaatgaaggcgtgactattgatgatgctaagcagcgtgaagtggttgaaatcgtgagtgaagctgagaagggaaatggcagtaaggtaaagcagttgatatcaaaggtatttcatggcgtcagtgatagtgcgattgatgcagggaaagcaatcttgacaagtttaataattagtgcagctggtttgtaa

SEQ ID NO: 154888 - DNA, 657 bp, Enterobacter cloacae
atgttattggtatctctgctatttagcttactggtcgaataccttggtatgacctttatctggccagaggaaggcgctcagcatagtcgtgcagtattgctggccgagagcagctattttgccgacggctttaagcagagcctctttctttcaacgccggtcacgacggtacaacagtggttaacattagggtatcaatggttgtttcttgattccggttttctcgattgggtgcatgcgactccaaagacggctatgaaacccactaacgaggtttcccgccagcttcgcttatggggggcttggctggctgcaatttgctatgaatacctgatggcgaccgtttatatcacaatgatctttctactccgtgtaatcattctggtactgtcgattccactgtttatcctggtcgcccttgtggggatttcggatggcatggttcgccgcgatttgcgccgttacggtgctgcatatgaatcaagctttctctatcaccatgcaaaacgatttgtgaaacccgcagcatgtataccctgcgtgctctatctttctgcaccttgcacggtatatcccaacctcttcttgctaccggccgcgctactgacaggactagcgatttctgtgacgatgggcagctttaagaagtatttatag

SEQ ID NO: 154889 - DNA, 2118 bp, Enterobacter cloacae
atgagcaatcgttacgtcgttgaagcattactcagacctgccgtggagcttaataccgcagtcatttctggatgcgcttgctatatctgcctgactgcaccgtgggcggtcgctctggtacctgaggtcagctatgtcaccgcagccggttttggacttttcgcgctataccgatttaagcaagggatcgctattttacggtatcgccgcaatatacgccgcctggcacgctatgttgttaccagcgataaagttacggtgagccatcatcgtctctttttgggtaagggttttttatgggagcaaaagcatacccagcgtttattggatacgttgcggcctgaagttgcgaagtatatccatcccccattgtggtaccagttggcgcgtcggtttgagcaacagcatgaacatcgttttcctgtactgtgcaaactgctgtcatgcaattcaggactaaatccggtccgccctttgccgccggttggtggtcatccggctttgcatggaattgagcctaatgaaatcaatgtatcaatgagcctgcaggaccgagtggggcatatgttggttttggggacgactcgggtaggtaaaacgcggctggcggaactgctaataacgcaggatattcggcgcggtaatgtgactattgtgtttgatcccaaaggcgatgccgatctgttaagacgaatgtatgccgaagctcatcgcgctgggcgggggagcgaattctatgtatttcatcttggctggccggatatcagtgcccgctataacgctattgggcgttttagccgcgtctcagaagtcgccacccgcgtagccgggcaactcagtagcgaaggcaatagcgccgccttcaaagaatttgcctggcggtttgtcaacattatcgcacgcgccctggtggctcaggggcgcaggccggactttagtcttattcaacggtatgtgaacaatattggtgatctattcgaagactatgctcaagagtggatgacccttcatgcgcctgcgttatggaaaagagtagaggatctgtcaaacatcctgaatgaacgcgatgtgcctcgccatatggaaggtcgctcaatgcgtgtggtggccatcgaacaggtgctcaacagtgatgaagggaaaatcctatttgatccgattctcgatggcctgcgatcttcagtgcgctatgaccaaaaatattatgacaagattgtcgccagcctattgccgctgcttgaaaaactgaccaccggtaaaacggctgaattgatctcgcccgattacaacgatatggacgatccgcgccccatttttgactggcagcaggtgatccgcaaaaaggcgattgtttatattgggctggatgcactgtcagacccggaagtggcagctgcggtggggaacagtatgtttgccgatctggtcagtgtcgccggacatatttataagtttggcgttaacgatggtctgccagtgttggatgataaaaaagtgccgattagcctccattgcgatgaattcaacgaacttatgggcgatgagtttatcccactgatcaacaaaggtggcggtgccgggattgaagtgaccgcttacacccaaactctgccggatattgaagcacggctgggaaacgcagccaaagccgcgcaggttgtgggtaactttaattctctggtgatgctgcgcgttcgccataccgaaactgctgagctgttaacccgccagctgccggaagtggaggtgtacaccaaaacactggtttccggtgtaacagatatctcgaatccgcagatgggcagtgattttacgtcgaatactcaggacagggtgagcacggtacgcatgccgctaataacgcccgccaacgtaatcggtctgcctaaagggcaggcgtttgccttattggaaggaggacgattatggaagattcgtatgcccttgcctgccagcgataatgacgcgctgatgcccgatagtctttctcaaatcgctgacgcgatgaaacgcaactaccgtacgggcgatgtctggtggacaggaacatcattgccgggtgatcgtgtaacggagccaggtgaaaccagtggctggaatggaggatatagccggtga

SEQ ID NO: 154890 - DNA, 519 bp, Enterobacter cloacae
atgaagcatgtacatctgttttttgccatcctgcttatatccattccctgtcttagcgcagcagcacttactgttgtcgccgatcttggcgggatacctacagcccccttttttgaagggataaatgatttaactgaacctaaaaaaatggcgtatcagccattaaccccaaaacccaaatctcaggctacggtcattgacatactgcctgtctccacctcagaacttacgccgggaatggttgaatcgcgtcgactgcaactgcccggtatgcgcgccacctttatcgttggcgatgatgctctatcacgtcgctggcttcatcttaaacgggaccatctcctgcaacttaacgcaataggtttagtgaccaacgtgagtcataaggcggcgctggacgatctgcagcaacacgctgaagggttggaattattaccggtctcggtcagcgatttagctcagcggttacaactgacccattacccgctgttgatcactgaaaagggattggaacaatga

SEQ ID NO: 154891 - DNA, 552 bp, Enterobacter cloacae
atggcggcccgtcaattgattagcctgtttttgttatgtatgtttttcattgccactcgcgtttgtgcagagaaactacctgaggcgtatcaacggattgcccagctggaaaatgttcctgcagaattgctttatagcctggcgttggctgaatcatcttatgaattatcgcatggggttcgtccttggccgtggacgatcaacgtggctggaaaagcttatcgttacccaacgcgttgggaagcctatcaagccactttaagttttatccaacgatatccacttaaacgcattgacgtcggtattgcacaaatcaacctgggctggaacggacactatttcaactcggtctggcatgcctttgatccctatctcaatttacgcgtggcagcacggctgctgcatggctgttatcaacgacacaggggaagttggattgcggctgcagggtgttatcaccgcccggctggcggtaagcaagcgctcacctatcaatatgccgtacaacgtcatttgtcccgcctcagtgaatcccaaagagagtttccgtga

SEQ ID NO: 154892 - DNA, 717 bp, Enterobacter cloacae
atgaacacatatatggttttcaaaatagtattcatttgggttctggttggatgtggtgctgcttttgccgaagaaaaggtgacaaaaacagaccactcgcaacctgtgacaactgaacatctacgcgttggaccgcaacaactgcactcgaaggcctcggaatggggattaaccgatgaagaatggtcgcgctatcaggaattgaatcaagggagacgtgggttgttgtcccccggactggacccgctcactatgctcggcattgaagccagaactgatgaggagcgacggcgttacgctgagcttatcgtcagacaagactttgagcgggtagaggccgaattggcattccagcgtgaagtaaccagtgcctggaaacgtctctatcctgatgtattacctatacagccgacagcagtaacaaatgaagaaagcggccggctggcattatttgtacgtgatgattgtagattatgcgaaataagacttgcacaactgctgcaagagaatcgaccactcgatatttatttagtaggaagtgcaggaaatgatgatgccgtgcttgactgggctcataaacaacgcatcccaaccgaaaaagtgaaatctcgacttattacgctcaatcatgacgatggggcgtggcttaggtttggacagggcaggatgcctgcgttgctatctcgcggagaaaatggatggcggcccgtcaattga

SEQ ID NO: 154893 - DNA, 687 bp, Enterobacter cloacae
atgaatggattttcaagcagttactccagccgttcgttaggaaagatattgcgcggcagcgcttctgcgctggttatcttgttaatgggatgtatgacccttctcagtttaaagcaagttaatgtattggctgaggagctttccgctttaaaggatacgatgcctacggcaacgaatactgaacctctggaacttgagctttctcatcttaaacttcagcttgaacggctggaaaatacaactaaagcctctgattctgaacatgtcgcagccattgaatcgctgaatcaatctctggcatctctaaggcagcgtttgcaggacgagattctcaggctggatggattacagactcaggtacagaatgttgagcatagacaaaaggccactcctccagttcccctcgttaactctatgcctgattctctttcttctatacgtactaatctcaaacgcaccacaagtacgcgaaaaaagattgtgaacccgccatttattctaactgcggttgaaaaccggggaggaatttcttttgcggcggtagcgcagtcggatgcgaagcgactctctcacgtgaatttgctggaagttgggcaaacgctgtcaggctggactctgcaatcccttaatagtcaccaggcgacatttcgacatgctgatgtcattcgtacattaactgttcggtaa

SEQ ID NO: 154894 - DNA, 579 bp, Enterobacter cloacae
atgcgttcagcttattcacaagccataacctctttagcagccatggtacttttcgggtgcacgtcaccacaaaagctacaacaacgcgatgctatgcacccctcaatattaacccgtaacgtacaggtagtggtcccggatagctatgctgtaacgcctgaggtggttcgctatgatcgctatcttttaatcgatacctcgcctaacgctgcgcagattgctcctttggaacagatcattgatgtgcgaatacccgcttcttttacgccaaatattgatgatgccatgcgttacgtgttgcgccagtctggttattcattgtgccgtatagatgataacaacagtgtgctctacaaccagatattaccagcagtgcattatcacctgggaccgatgcggttaagccaggcactgcaaatcatggctgggccagcatggcagttggaagtcgatgcggttcaacgtgtggtctgccattcattacgtggcggttttcagttgcctaaacctgttaataagaaagctgaatctgaactgctgccgccgccagttaaaactgatgcaggggtagcaacatga

SEQ ID NO: 154895 - DNA, 732 bp, Enterobacter cloacae
atgaccgataaaaccaaccatgtgcccggagcacttcgggcaaattgtaccatcgagttgcattcgcagtatgctatcaatacctggaccggccgacccgcgtcaccaggaaaatcatcacttataggcattccctcgttctttggacttttagcgaggattaaccgcgattcgcttgctgataatccatgggctgatgcagcattattatcaatagaaaagcaattggtggctggtagccaacagatgcagcgttggttggaagaaataaatgagcttattgtaagtcaggtccctactgcggtgaaaatgagcctggcggcttctaactcgccatcaaccattactgtgcatagtcagacaccactaggttaccgatgtgtctaccttttggttggatttgatcaacttattttacgggtatttcaggccagtcattatggactgatatcccttcagacgcgaaaacaatggctatcccgaggaagtaatcaaatccgtcgagtattaatgattgcgctgcgctacaaatcagtcccagttaccaggagagacatcgcgcttggtaatgacgcagcctgtcatgctatagctttactgggtaatgtaagtaaggaaattttactgggtgaggagcgctgtagcttttcggcacctgttgatgctgaaagtattcagcttttaagggcagtgcttaactctcagacaatgaaatccgaagttgaaatgtaa

SEQ ID NO: 154896 - DNA, 1224 bp, Enterobacter cloacae
atgatggcagtggataccgtcatcagccagacgcttgcgagaatgcagcgccggattgaggaaaaggcgcaatctggtgcggtggtaaacgaacaaagtgggctaatcttcctggggaacgtgcatgatgccgttccccggcgtctatttctcgactgtcgcttatcgccactggataaaatggcatggattatgattcgactctacgcccagcaaaacgagggggcggtattcccaacttatgacgagctgcagtgtcaattggcgtcaccgcatgcacaaaaagcctcacgggaaacagtcagccgcactctgattatgctgcgtttaaccgggtggttgagtttgtgcaaacgcgtgcgcgacaaaagtggtcgtgttcgcggcaatatttatgcacagcacgatgagcctgtctcattacgagacgccgaatatttcgaccccggttggctggattgtgtagcagagtgttgtcgccacacaaataagacaattcgaatgactgcacttgccgtgctgactgatatcaaaaatgacatgcagatgcgccacaggcactcaaggattgcattgatcgaagcgcgcttgcaggctccacaaacgccacaggcgatattggggttaaaagcggaaaaaacgctaagttccgaatgcgaactcagtcaaccagaccttaaaatgagacctgaaataccgggttcggaagccgaactcggtgtgataaaagataaaaataagtcgggtacggaaaccgaacccagccgaaagcagggcatttgtaacccagttcggaaaacgaaccgttacgtacgtagttttacacaacgtgtaaaagagacgtacgtaaaagcgaaaaactcagaaagtcatgccatgccattgatttggtcgactcggctgattgagcgtattgagcctgatgaacgagatatgctggaagcccagcttaagacactgcctgatggcctcggtcagcaagttctcgatgatttgtctctgcgtttaaagactgcgcagattcacaatgtggttgcctacctgcttaccaacatcaaacgagcccgacatgggcaatttaacgtggttggggaagctggcaaaacagtgcccgcgatttcagcggtgaccaacacttacgccggaagcccaaaaaaaaccgttaagcgggcgaagcgtgagtttgtttcgcagatactggctgagatacgtgccgagttataa

SEQ ID NO: 154897 - DNA, 564 bp, Enterobacter cloacae
atgactggttcaactttcggggttactgctaacggatttttgacgcagattgtgttggagattaaatccggaaatcttcggcgctgcgaagcgatggggctgacactcgaagagatcaaatccctcaataaactgacggtggaagacctgcattatctggtaaacacaccggtgtcgattctcacttttcatgttaaccatcaaaatcttcataccttgctagagcaagcccaccgtgagcagcatcgtattgaacgaattgaccgcgcgctgggtctgggcggttcgattgaactcatgcaacacttctttgggatgaccgccagtgaagttagctcaaggcggcgattagtcggtattgcaacgcgtcaggggcggaatgtgacgcccagtgaagcggatgaagtggccgtatggcagcagtggcaatcatttagcgtcgataatgtggactcgctggatgggcttgaatccatgatgcttattgcagagcaacagcatataccactcacaaccgtttggcgcctcatacgagattgggaacaacagcggagagaggtctga

SEQ ID NO: 154898 - DNA, 1563 bp, Enterobacter cloacae
atggcaacttgtgatctcattgacctaaatacccagcttttaaaaagaggtcgctcacctgcattggctccaccggaggttgtattacccgtgaacgaaatacccatggtgctaatgctcgaacaacttcgtccaaatccagataaccctcgtacttctcgcaatccaagatatgagtatatcaaggcttcgattcgtgcaagagggctggattcagtcccaaaagtaactaaagaccctgacagcgacgatgatgtatttatttttagtgatggtggcaatacgcgttacgccatcttgaatgagttgtggcaagaaacgcaggatgagcgctatcgtcgtattcagtgcattgttaagccatggccaggacggttacgttgcgttatcggccatctggctgaaaacgatgtacgtggtgatttgtcatttattgagaaagctttcggagtcatgaaagccaaatcgattcatgaagagcaacttgggcgggaaattagtcagcgtgagttggctgatttattgaaatctgaaggctatccagttcaccactccaacattagccgcatgctgcttgctgtcgagcatttatggccatgtatgcctggattactgagtgctggcatggggcggccacaaatcgttcaattactttcgctacgtattgctgcggaaaatgcatggcttacctttagtcggaacagcactgtgacgcctgaatgtaactttactgatgttttcagagcaaccagtcaaatgtttgacgaggcagggttacttgcctttgacgactttaaagacgagctcattggcgcgcttttattggcttttcccgatcctaaatacacctacgacagttggttgatagaactcgacccgcatgaacagaatcggcgaaaactatttggtgctcctcagacttcatcaagcattccaccgtcaacctatgctcatgaaacggatgtgatgaaacagggaagtactaagatcgtcaatccatctgagcaaggcgaggatgctactggcgacacagcttcattggcagtaaagcgaatagaagcagaaaaaatacctgttgctaaggcaagctatgacgctgtgatcaaaccgcaacaattatcagctcaatctttaggtgcatctgagccggataaaacaaccgcttcatgccttgcttttgcttctcagggattcgagccggtgcaggatatctggcatatcgaaccactgattgatgatattgagcatttgcaggatatcgctttccgactggcttttgagttggcggagatttctgaagatattgatcttcgtgaagatagcacacccacaggcatcggttttaccactcacccttttagctcaaatgacccagtctatgcgctattggcctcgctgcaaaatgagacagcaagcgcgtctttaaatacgttgtttatcggtggtagtacttctgatgcttcacctctttttgatgatgttttaacagtgaaatttttgcgtctgataagggttattcgtcgattacgtgagctgcaacggacaatgggggcgtgctcatga

SEQ ID NO: 154899 - DNA, 1347 bp, Enterobacter cloacae
atgaaagactattcacctccccattccactgagagcgagcaatccgtccttggtagtttaatgcttgaaaatgaacgctgggatgatatctcaccgctcatttcggctgacagtttttattctcatcagcatcgcgtgattttcaaggcaatgcagactctggttgaaaacgaccaaccgattgacctgatcacattgacggaagctatggagcggcaagggacattggagcaatgtggcggttttgcttatctagctgagttgtccaaaaacacgccgagcgcggcgaatatcattgcctatgcgacttacgttgccagctatagccaaaagcggcaattgcttgcattggggcatgatctcgttggacaagccagcgatgtccgttctgatttgactacggtgattgaaggtgcagagcataggttattcgctattgctgagcatcgcctggctgatgaggagattgatttacctttctcacttagcgcttttttagacaaacttgagcagcgttgcgcctgtgaggatttgatcactggtacaccaaccggttttacaacattaaatgaaatgaccagtggttttcagcccagcgatttagtattgctggctgggcgaccatcaatggggaaaaccgcactggggttagctttctgtgaagctgcacttaccggtcgcagcgaacaatccgtgcagatttacagtctggaaatgcccactgagcagttgctggcccggttcatcgctatgttgggacgagtccctttgcagcacttacgcagtggcgacatggatgatgaggactgggcccgtcttagtaaagctatggaaacgcttctggggccatggaaagaacggctcgttatcgatgacgccagttatttgaccccatctatcctgcgctctcgtgtacgtcgcaatgtacgcaaattcgggcaaccctctttgatacttatcgattatctgcaactcatgcgctgtcctggtcaggaaaaccgcacgcaggaaatagccgaaatctcgcgagccttaaaagcactagccaaagaaatggggtgtccggtcgttgcgctttcacagcttaatcgttccttagagagccgggctgacaaacgacctaacaatggagacttacgtgattcgggggcactggagcaggatgcggatctcatcatgttcatatatcgcgatgaagtatatgacgccaacacggccgatagtggattggcggaaataattctgggtaaacagcgaaacgggcctatcggtacgttaaaagtacgttaccaggcggatattacgcgctttgaagaggtgactgggggacataatggcaacttgtga

SEQ ID NO: 154900 - DNA, 879 bp, Enterobacter cloacae
atgcaggttatatctatcatttccaccaaaggtggtgagggtaaatccacccatgccgcgaatcttgcagggatgtgtgccgatgcaggattaaaaacgctgcttattgacggtgactatgctcagccaaccgcgtccagctactactctttgcgttatgaggcaccatgcggtttgtatgagctattgatgcagttggtcgatctcaatcagccctcgcaactcatttctcaaaccgccattgataatcttgatttgattatctccaacgatccacacgaacagcttaaaaccgcgatgatgcacgcgcctgacggacgttttcgcttgcgcaatgtgcttcaaaatcctcttttctcgcaatacgacgttgtaatcatcgactcgcagggcgcacgctctatcatgctcgaactcgtgttgttggctaccaattgcgcgacgttggcaatgataaaacccgttgttcccgatgtccgcgaatttcttcgcggcacaatacctctcatggaagggctaatgccttacaaaggcttaggcatcagcctgccgccggtaaaagtattggttaactgcatggactacacgcttttggccagaaaagcactaacggcgctgacgaacattatcgatgagggcagctatagcagcgccgatatctccgttacgcaactcaacaccaaaatctatgacttagatgtttacaagtttggtcatagtcttgggcagccagcccaccgcttagagtatgaaactgaacggagaagtcttcccgcagcacagacaatgcacaaccttgcttgcgagttgttcccgcaatggcgcgcgaagttcgatgccgtcctcaagcatcagccaaagggggttgtcgctaaatga

SEQ ID NO: 154901 - DNA, 786 bp, Enterobacter cloacae
atgtcccgtagtacgtggtatcacaatatgaatgcgctgaagaaagtggacaggcacgccgggctgaaagacaaaatcagtgagatctaccaccaccataaagggcgttatggctaccgccggatcacactctcactgaggaagctggggttgcaggtaaaccataaaacagtgcagcggttgatgacagagttgtcgctccggtctctgataagggtaaagaaatatcgcgcgtggaaaggagaaacgggcaaggcagcgcccaacatcctgagccgtgagttcagtgcctcgaaagccaacgaaaagtgggctacagatgtgacagagttctcggttcagggtaaaaagctgtacctgtcgccggttctcgatctttttaaccgggaaatcatctcatacagcctgtcggagagaccggtgatggaaatggttaatagcatgctgcgcgatgcgttctcgaaactcagtccggaagatgccccgttgctgcactcggatcagggctggcagtatcgaatggcaggctatcaggcaaaattaaaggcgcagggtataacgcaaagtatgtcgcgcaaaggaaactgcctggataatgcagtgatggagaacttcttcggcacgctgaaatcggagtgtttttacctgagtcagttcagcaatcttgatgagctgaggaaggcgatagaggaatatatccattattacaacaatgaaagaataagcctgaaattaaaaggcctgagcccggtagaataccgaactcaggctctgaaagccgcttaa

SEQ ID NO: 154902 - DNA, 888 bp, Enterobacter cloacae
atgattctccggaaaaataacttaagaagtaatcactatatggctttgcgcttactgtgcctgacggcattatcaactggccctgtcatggagagtcacgccattccctggcctgccatctcttcacctgttattacctcgtgcctgcctgggaaatacacctgttcggataatgttcaattcgcacatagcggaaccgttatgcgggaaatcggaacaccgacgagtccgccagacgcggggtcgtccatcattacggcctttaacattgattgtcaggatggtgataaagcccttggcatacctttcagtaactgcgtttgggatagccataatgcaccgcttccgcttggtgattgcagactggaaggggatggcacctggaatctcgaagctggtgcgaactgcaacactgagctgacctggcggaagcctagaaatagttccgggccgggtggagaatgtcttctgtttggtcaatggttcgccatcgataagggtagtcttcatacgccatttggcactctcgacgcagaagttgtcgcgaactcagattttacgttttgtgcaaaaccccctttacccgatataccttgtgatatcagcatcaatattgaaatcgatcatggaacgatctccggagagggaaattatcaacgagaaacctttgccagagtcaactgcggaacagtgatcgataggcccctacttgagattgtcgggccagacgaaatagcgcttgcccccggtataacgacgaaattgtctatcaccaggaagcttgagaaccctcagttttttacaattttatctgatttaacggttagcccgagggcgaaggctggggagtattcaggcacatttattctaaaagcctctccgttctga

SEQ ID NO: 154903 - DNA, 534 bp, Enterobacter cloacae
atgaaactgaatcttatttttttagctaccactattgcgatggggatgagctcatcggtttacgcctccggcggcggcggtaaaattagtttttctggttcaataattgatgctgcctgctccgtagcgccggaatctgaagatcaggcgatttcgctggggcagattaccagcagtcagcttggtaatggcggcactaatgatggtaaatccaagccgcgtaactttgaaattaaactggaaaactgtaccacgacgaccaaaaattcggttactacaacctttaccggctccccttcggcttatgacagcgacagtcttggcgtcaccggcagtggcggtggggtcagtatcgtcctgaccgatggttccggcaccaaaatcgctctcggaaaggaaaccgcgcctaccatgttagctgatggtaacaatactctgcgctttgcagcctatgttgagggaggcggcacttcggccaccataacggaaggggacttctccgccgtggcggggtttaccctgacgtatccgtaa

SEQ ID NO: 154904 - DNA, 546 bp, Enterobacter cloacae
atgtggtacgcctctccccttgtgcgcgcagcgacgctggccattatgctgccagcgcttcttgttagcccgcagagcgtagcgtcttccgtcattatgcttaaagggcgcgttaatattgcaggtagcatcatccattctgcctgcgccgttgtaacaggcgacgctgaccagaccatcgatctgtccgctatccccctgttccagccgggggcgccagacgaactaccgcataagcgtgaggggcacctgctggccatacaccttgtgaactgcctacaggagcaaaaaaacggtcaatttcgcatgaccttcgacggcgaccacgacggcagacattttacgattaccggtacggcagatactgtcctgcaaatacgcgatcgccatggaaatactgttcgtcccggcgttgcgcatgcttttcggggaataccggacagcgacatccagcaggcttacagcctgcggctagtaagccaccgcgccgcactttttccggctggctggcacaccactatccgcattcgtatggattacgactga

SEQ ID NO: 154905 - DNA, 2490 bp, Enterobacter cloacae
atgttagttgaacgagtgattacagcgcggcggctcagcctgaatctgttgcttatgtcggggctactgctcatgcaggcacgatctgcgaaggcagaggcgattcagttcaacaccgacgtgcttgatattaaagatcgggcgaatatagatcttggacaattctcccgtaagggttacatcatgcctggcacctacttgatgatgctgacggtgaacggccatgagttatcggaacaaaacgtggagtttgttgtgccggagggcgatgagggggggagtgaagcctgcctgacgccagaaatgaccgcgttatggggactgaaaccggcggctctggaatcgcttacctgggattcacaacgccgttgcctgaactatgcaagccttaatgggataagcgtcacgggcaatcttgctaccgcaacgctggcaatcactgttccgcaggcttatctcgagtatgtctccgacagctgggatcccccttcccgctgggataacggcattccaggtctgctggccgactacaacgttaatatgcagacaacccatcctgtttccggtgcctccagctactcagttagcggaaacgggattgtgggcgcgaatgctggcccgtggcggctgcgtgccgactggcagagccgtatcgaccacacgggcgatgaggcgcccacgagatatcactgggagtggagtcgttactacgcctatcgcgccgtaccgcgcctgggcgccaaactgacttttggcgatgactacctctactccgatcttttcgatagctttagctttctcggtataagtttgcgcagtgacgacaatatgctcccctccaacctgcgcggctatgcgccggaagtggcgggcgtcgctcgtaccaacgcccgggttgtgattagccaggaggggcgagtactgtatgaaacccaggtggcgcaggggccatttcgcattcaggatctcaattcatccactaccggtacattagacgttcgcgtggaagagcaggatggaaccgttcagacttttaccgtgaccacggctaacgttccgtatcttacccggcctggcatgatgcgttaccgcttttcagctggtcaggcagaggagaataaacgccgcgcggcagggccgactttcgggagcggagagttttcctgggggataaacaacgggtggtcactctatggcggcggccttttcagccgtgactatcaggcagcctcgctggggctggggcgagatctgctggtatttggtgcgctatcctttgatatgacgcaatcgcgcgctcagctgcccgacacatcgggcgtgttatctggtgcctcgtaccgtctgagctattccaaacgtttcgatgaatataacagccaggtgtcgtttgcaggatatcgcttctcggaaaaggggtatatgagtgcgaccgagtacttgtccgcataccgtaccggcggggtacggcagaataacagtaaggcgttatacactgttacgctgaacaagcagttcgtcgatgcggggctcagcactttcctgacctggggtcaccagacctactggaatcgcccgaccagcgaccgctataacctggcaacgtcgaaaagttttaacgtgggtaactggcagaacctgcatctctctttgaacgcttatcgcgaaaagcgtaaaggcgttaaggatgacggcctctccctttatctgtcggtgccgtggggcaatggcgccagcatcaactatagcgcctcgcaaacggggggcgtactcgcccactctgcaagctattacgaccgtctgcgtaatggggactattaccagctcaacgcaggaacctcgcagggttacagaaatctcggggcctactattcccatactggcggcctggcgcaaataaacgccaacctcagctatctcgatcgtcaatatacagccgcgggcctgtctctacagggcggttttaccgctacgactaaaggcgtcgccctgcatcgcgccagcgctccgggcgggacgcggctgatggtggatgtcggtggtgccagcggtgttcctgtccgggggtatggccagccaacccgcactaacctgtttggcaaagccgtggtgacggatgtcagtagttattaccgcagcagcacaaggatagacctggatcgtctgaacgataacgtcgaagtcacccgttccgtagtgcagacaacgttaacggagggcgctattggctatcgccagtttgacgccatcaccggcagcaaggcaatggcgattgtccggctggcagatggctcttacccaccatttggcgcgcgtgtactgaaccgccagaaacaagaggtcggccttatcagcgacgaagggagcgtctatctgattggtattcatcccgacgaacaaatgagtgtggagtgggatggcgttgaacagtgcgcaatctctctgccggaagccgtgacatccgggctgctgttgccgtgccgaaaatga

SEQ ID NO: 154906 - DNA, 738 bp, Enterobacter cloacae
atgatgaacttaattacacgcaccgcactgtttacctgcatgagcgccgtgttgactgcgccagcgcaggccgcaattgcgctggacagaacgcgaattattttcaacggtacagataaatcggtatctctcaacatcgataataaaaataacaaacttccctatctggcgcagggctggatagaagacgaaaccggaaaaaaactccagaagccgtttgcggtactcccccctttacagcgagttgaaccgaaatcgggttcgcaggtgaaaatccaggcgctgccggagatagcgtcgttaccacaggacagagaaagcgtattctttttcaatctgagagaaatccccccgaagagcaataaacctaatgtgctccagattgcgctacagacccgcattaagctgttttatcgcccagaggccatcattccagccagtctgaataatatgtggcaggaaaaactcactctgacgcacaaagcagaccagtaccacctacataacccgtccccctattacattaatctcgcagaagcattaacccaatcggacggcccaagggccgagggatttgaaccgatgatggttccgcccaaaagcagcgcagccatcaacgtacgcccgggcgcgatgggaagtaccccggtactcatctatatcaatgattacggcggtcgtacaaccctgccatttcgttgcgtagggggcgagtgtcgcgtcacaacgatgaaatag

SEQ ID NO: 154907 - DNA, 510 bp, Enterobacter cloacae
atgatacatattctttcgttgcgctgtggggagatactgacggctcttctcgttaccgcgttactgccacaggcggtcgctgcaaattttgggcaggtgactgtcaaggttaaggtggcggggccaacctgccatatcaacagaggcaatccaatcaacgtcgattttggcagcagtatcatcattaaccaactggatggtgtgcagtatcgccagcctctgagctttacgctggaatgcagcaaactgaccagcaataccatgcgcctgcgcttttccggtagtggggcggcttttgatacgacactgcttgccaccgataaatctggtcttggtatccgtttactacaggggagcggcagcggaagttcgcttgcgctcgaagactggttttcttttacttatccttccttgccgatattgcaggcagttcctgtgaaacaatccggcgtaagcattgatgctggcgaattttccggaacggcaacgcttgtgatggaatttatatga

SEQ ID NO: 154908 - DNA, 525 bp, Enterobacter cloacae
atgaaacgttttgtaaacaaggctggcgcggcggcctggctacgctatcccctgctgctgtttaccatgctactcgttgtgccggcggcaatggcgtggaccgaaagcaatacggtaaatttccgcggcaaactgattgaatcattgccctgcctcattaatagcggcaatacacttgaggtagattttggcgaaaaaatagggataaacggcgtgaatggtgtcaactacaagcaggatgttccctatgtgctggattgccctgccggtgcgcctccgctcactttaaatctgatggtgacaggggttgccgccagctttgacgcggcagcggtacagacctctgtcacaccgcttggcatccgcctgttgctaggtggcgcacctctggaactcaacaaaaggcaaattattgatcccgtgagtccgccggtgctacaggcagttccggtaaaacagcccggaagtaacctgcctgaaggacgcttcgacgcgacggccacgttgctggcagagtatttgtaa

SEQ ID NO: 154909 - DNA, 543 bp, Enterobacter cloacae
atgaaaaaactgccgttccgttgggccgcgccgtggccatttatctgcgcaggcgtttttttgctttgcccaccaacccacgccacggataacatgcatttcttcggtacgctggtgtatgaagcatgcaccatagcgccgggagacgaagaactgaagctagactttacaagggtggttgacagttatctctattcttacgggcgaacccgtagtcagcttatgccgctgcggcttattcattgtgataccaccataggtaaaacagtgaaaataaccctcactgggactgaaagcgccgtattgccgggtttactcgctttatccccgacgagcgtcgcaacgggggtggcaattgggctggaaaccccggagcagaaagaatggccgttgaatgttgaacatgctgtaaatcttaccgacggaaacaataggatagagatattcgcctttatacaaggcgaacctgacgcgttgcgtaaccgcaatattggccatggtgaatttactgctatcgctacgtttaccctcgcatatgaataa

SEQ ID NO: 154910 - DNA, 771 bp, Enterobacter cloacae
atgacgacctatctgattcaggattatatattatttgaacccgatacttgctcgctctgtatttatcatcagccagaagataagaccatactcaacgttcctgccacacgatgtttcgaagcgctgctcaaggcgcagggggtagtcttattcagaaatgatttacttgagcatggctgggctacaacgggagcgttagtgacatcaaatagtcttaaccaggctatatctttactacgaaaaaatcttaaaaaattggagtgttatgatgagatcattgttacggttaatcgacagggttatatcgtggaacgaaacattaagatcactaagctgaactctgaagcgatcgcacctttcccggtagtcactgagcgggaggaaaacaatgctgatttggccgaagaggaagagattataagccatgctgcaaaactgcttagtctccctgtgttactcacgcttctggttttgatactgtttatactagtaaataccaaacaaaaaaatgcttatattaatctggaagataattccccatcagtttatctctacattcatccagagctgaaggataaaaaactatatacggcatatgccacatggttactgtcctctgacaaggatttggcacaactttttcattctagcaagcacatctatattaacaatacaatcaaacctaccgtatttaattttttcttttgcgattcggaaatttataaaatggaaaagaaatgtacctcttttacttatgtgaagcaggagtag

SEQ ID NO: 154911 - DNA, 540 bp, Enterobacter cloacae
atgagattattcaaagcgaagttgtttcttattactgtattaatgcttgttattttattaatgagcatgggatggtattttcacgtaacagcgtcgtattcttgcacatccagatttagtttgaaatttcatgaacagggcacaaatatcagtcacttatctaaaggtgagatatttttcaccttccatcctgataacagtggtacgggggtatatgcgggggcgattatcactcatcggcccggtttaccgcaaaccatccaatatgttaaccgaactatagaatttaactattttagaaaaaataacagtattgtttccgaaactttacacgtggcaatcaacgccaatgataccgcgaacagtaaagatgtagttcagtatgttcattccatttttgagcctggtaaaaaaaattacagtaccatcctgaaattaggcggggatacatatgcaggcggggaaggtagatatcctaaggcgctatgccaacctgaaacacaaaatgattacattctggcgaaaatacttggcccgtaa

SEQ ID NO: 154912 - DNA, 834 bp, Enterobacter cloacae
atggtctgccagatggaactgaccagccatctgttgacggcagcggccttcggcacgatgaaaaacagtgaaaatgagctcgcggaacaactgatagagcagaccggcgataacaccctgacgttaatggataaaggctattactcgctggggctgctgaatgcgtggagccaggcgggagaacaccgtcactggatgctccctctcagaaagggagcacagtatgaagaggtcagaaagctgggtaaaggcgactatctggtgaagctgaaaaccagcccacaggcacgaaaaaaatggccgggtctgggagatgagatgacagcccgcctgctgaccgtaacgcgcaaagggaaaaccagccatctgttgacgtcgatgacggacgccatgcgctatcccggaggagaaatggcagacctgtacagccatcgctgggaaatagagctggggtacagggagataaaacaaacgatgcaactgagcaggctgacgctgaggagtaaaaagccggagcttgtggagcaggagttatggggcgtgttactggcgtataatctggtgcgatatcagatgattaaaatggcgggccatctgaaaggatactggccgaatcagctgagcttctcagaatcatgcggcatggtcatgagaatgctgatgacgctgcagggcgcttcaccagggcgtatcccggagctgatgcgtgatcttgaaagcatggcgcaactggtaaagttgccgacaagaagggaaagggccttcccgagggtggtaaaggaaaggccctggagataccccacagccccgaaaaaaagccagtcagttgcttaa

SEQ ID NO: 154913 - DNA, 1653 bp, Enterobacter cloacae
atgaccatgggcttggataacatggacaatagtaattctggcggcgttggggcaaaaaaaggttttttatttcaggattatgtcgctgccttatatgtaaccgaaatgcttcgcgataaacgaattaaaggcgtatgttgtgaagttaaagacgatgtagatataatttatgaaaatcatgttcgttttattcaaataaaaacaactgatggtgataaaaaatggagcactaaagaactctgccagcgtaccaaaaagaaagattccaatcgttataatcaagattcaattgttcataaatcattaaattgtgattcgtcagataaatttaaggcaatgtttggaataatcagcaccagagatgttgattcgacactgctttatttaaagattgaacatgataaaagatttgataaaacatcacagagagataaattaattaactcaattacaagacaaataaaagaatttagatcaaataataataacgacattgcatattgggtggataattgtgaatggaatacatttcataacagtgatcacattaaattattatgtttaagtaatataatgaaatgtgctagtgaaaatggattttatcttgatccgaatcatgataatgaaattatattaaactctattttggctaaagtaactaaactaagcacattatctaaaaaagaatttttaagtaaagataaaacatattttagagtggatctgattacatggtttaaagctgaaatagaacgtattagcgaagaaaaaccgcataaagtgtacaaaacaaaatctaataacttaccaacaatattgaatgaattaaataaattaaaagattccaagattgatactattagcggcacaagctattatcagtcttataatagattgagctatcgatttgatttcatttctacaaatttagtacagtggcttccagagttactacttagaccagaagagttatctacaatcactccaacaaatatgatttccagagtgcgggatgtttataaaaccatcagcgagaacaatcatgatattaaaaatataatttctcgagttttactacattctttagttcggcaccattgttcaagccaaccaattcctgctcatctttacactgaaaagaaaggggatatgatcgatttcgataatattcatatagtaattagagaaaacgatccagatgagatgtggttcggtctgagtttatggtgtgatggaagtatagaaaaaacagttagtttatttgcatctaaggttctttctttcgtagatgtaacatgtgacacacaaagaaaaataatattagacataaaatcagatgagtatttagttaaacatgatgttaattgtgtactggacccagcaacatcaataactgatcatttatctagaatatatttcgttgtttttattggatacattagcgaaacccagacattagaagttaaaaaagattatgaagaaaatctaaaggaagaagttttattaaagtttaaaagcatcatcgaagaactaattcataaccatgattccgttatagatttaaactttataatatatatgtatcccttgccttgtattgatagtttggtggactccttcaaaaataaaatggttggtgatataaatggataa

SEQ ID NO: 154914 - DNA, 585 bp, Enterobacter cloacae
atgaaagtactgctaattttggctgcactccttttccttgttcaaaatgcagcatcagcccaaatgtccggcttcgcagccaggtattatcaggatgatggaacaacaccagaagaacccacagaagtgcccctctatcccactattaccatcggtaagaaaaccgtacaaatggaggttactcacctgtcagacatcaccggttcacccgttgagaaagaccgttccgcgcgctggatctgcctccatgacgacgatggcacgaattactggttcatctcggataacgaaatgggtgcaggattgttaacggcactagccatagccagggatgggattcataaagagtgtgcaaaaacaacggaaccagtcagagtctcagtcgctaatgttccgctgttgaatgctactcacgggaatttagttaaactgttcggtaataaggagatcgccacaaagaaagcgatgctcttttatcatgagacgccagtgcaggatggattcatccagagtaataccgtctcttattccttcgatgacgaaaaagtgcgtggtgtaatcatcgggcaaattaccagcaactag

SEQ ID NO: 154915 - DNA, 723 bp, Enterobacter cloacae
atgccgatcgaaggggccaacggccgggaatacaccctccaggcgggagacgcgggttacagcattaaagtgacggtaataccggagggcagcagtcagccgtcgctgatcggggtggtgcagcaaagcccggcggtagatgtttacggtgcgccatcggtgacagatctgcatatctccggcacgccggaggtggggcagacattgagggcggaatataccttcacggcaaacggggccggtacggacatctccagcttccagtggcagtggaaggatggccagacgtggaggaatgttgcaggcggcacggcaaaaacgttcacgctgccggacagctatgcaggttatgacgtgcgggtggccgtgacgcctaaaggttcagggcagccgttatctggcactgaggcctttagtggtgctgttaccataagatctaagcctgtgcctttcgttacaaacctgggttacagcggcagtaccggagcctgtaacagaataacggcaacctacacctacaacgctaatggcggtgcatctgaaggcaacacgatatttcagtggaagtggggaagcaccgtcgtttccaacataaaaagcgttactttaggctattggggggaagtcacgctttatgtgacgccagttaataaggacggtatcagaggaaagacggaatcaaaaacgtttagaaatacgggctcaagtacctgtgattggtaa

SEQ ID NO: 154916 - DNA, 1005 bp, Enterobacter cloacae
atgcatctacgtcgttcggtcaacacttttcttttacccgttctgctcgtgctgacgggggcctttttccatacagccagagcagactgcacctttaacggcagttctgatgtggatgccgtggtgacgtttcaacttcctccggtgatcgttgttgcgcccgacacgcccgtcggcaccgtcatttatgacgccagcgttgagagtaaagcggtgacggtggactgtagcggtgatgcgcaagtacggcgagggtatctgtacctcacggataccgatgcacgagaagatgtcatgcccggggtttatcagactaatgtgccgggtattggcatccgcgcggctgcgtcgagcgaacgctttcccggttacaatgaagaggatattgtccggcctatccactatctgggttcgatacatggttattcgcagagcacatcgacgtttcgcgccgctgcacagctggtcgtgacgggcgatatccaggagggggatttggatacgtcgcgattaacgtcaatggatatcctgggcaacgcggcgatcggtgaaatgcgcttttctcctgccagcgttcacattacgaccaatacctgtaatgtggtcgatcggaacatctatgtgccgctgaaaacggtcaatacgcaggatttcaccggtcagtactccgacatactcactgacggtagctttaagattgaaatcaccgactgcgcggcagggacgaaggttgattatcagttcaccagcgcgggctcgacgggcgtaaccaacggcaatattttgggcatcgctagcggagactctgccgccgagggcgttggcattcagatcctcgaccagaataataccgtgctgcagtttgatcggaactacacggcgataaccagcacgcaggacaaggttcctgtcgaaattcccctcaaggcgcgctacgtcaaaacgggagaggttaaagcgggcaaagtcgactccgtcgccacgttcgaggtgttttaccgttaa

SEQ ID NO: 154917 - DNA, 231 bp, Enterobacter cloacae
gtgactctgcgttacgcgggtaagcccgtgccgtttggtgccgtggtggcgctggataacacctcggccatcgtcggggatgacggtgaggtttacctcaccgggctgtccggcaaaacaacgtttagcgtgcagtggggagaagagcgcgatcggcagtgccaggggacgctggacatttccacgcagagcccgacagggatcgtgaaagccacggtcaactgctattaa

SEQ ID NO: 154918 - DNA, 585 bp, Enterobacter cloacae
atgttcaagaaaacaattctggctacgagtgtcgctgtattagcactgggttctgtttctgcaatggcttctgacgttggcctgattacattcgatggtgcagtaaccgacacaacttgcgttattacatctaataacggtgttgatgccaacaacgtaacgctgactctgccagtggtcaaaaaagccgatgtagaaggaaccactgttgatgcaggcgtaggttcaaaagagttcgaactgcacctgagtaaatgcccggaatccctgaccaaagcgtctgccacctttacctctcagcagttcgctgaactgtctaacggtacgctgaaatcagacccaaccgtagcgggccatgccaataacgtcgctcttgcgctgtacaacaacagctcaaccagcaccgaccgcatcaaagtgggtcagccgagcaataacacccagaaagccactcttaccgcaggcacgggtactctggcttaccgcgttgcttatgtccctgcagcaaactgggtcgccaccaccaatccagtcagcgccggtaaagtcagcagcaacgtgacctttaccatgacctacgaataa

SEQ ID NO: 154919 - DNA, 723 bp, Enterobacter cloacae
atgcgcccttttaatacctgtattactgcactcatggtttgtgccgctgtgaccgtttcccacgcagcttatgccgacattgtcatttcaggcacacgagtcatttacccggcatccgctaaagacgtcaccgtgaaaatggaaaaccgcggcaataagccattattggtacaaacctggctcgatgatggccgcgacacaacgaaccctcaagaactcaaactgccgtttatcgtcacgccaccggtctcacgtgtcgatcctgccaaaggacagacggtacgtattacctggcttggccagccgttgccaacagacagagagacgttgtactggttcaacgtgctggaagtaccgcctaaagcaaaagcttctgaagaaaatcaaaacatgctgcaactagcgtttcgcacacgtattaaaatgttcttccgtccggacggcctaaagggcgacccggcaatagccgcagcacaattgaaatggtcccagcaggcaaatgagctggtggctaaaaatgattctccattctacgtctccgtcgccaaaatcgaaacgaccgtcggcgggaagaacatcgaaatagagccgcacgtggttgcgccctttaccagccagtccttcagccttaaaccaggcgattcggcacgtattacgaaattaacctatacctcgattaatgatttcggaggcgcagagaaacacgacgtcccggttaattag

SEQ ID NO: 154920 - DNA, 972 bp, Enterobacter cloacae
atgcgctattttttcctggaatgggtcaatcctttcgaaatcatgatgcttaactcgcttgctaaggatcatcccgtaaagcaaattaatcgcattatgcgacgctacaaatcgatcaatgccctactgccaggcgaggcgttaaaaaaatggcataagcgcacgcactgtgccgttaaattatcggcaatcaagcgggatgatatcgcgatttgtaatggctacagcgtctttccgttcctggattatgtcgccagcatgccatgtaaaaaagtgttgattctgcgcgactccgttgatgccctgacgcgcaaacgtcgtcttcttgggcaactggcgcaggatgcggattacatcgagaccgttcggcccatatttgatgctatttatagcttcgatcctgctgattgcgaacgctataacttgcgtgctatagagcagtttttgccatttagctggcaagaaatccagcaatttcaaaaagagagcgcagctgaaaataaaagctgtttttttgtcggtggctatgaacccattcgggcagatgttcttcgtaccctgacaccggtacttgaaaatagcggttatgagacagatttttatctgctggataagtacaataatcaggataactaccccggtaattgtcagaataaaaaactcagctatctggacaatattaaaaaagccaaacactgctcaattatgctggaaataaacaaacctgagcaaaatggtttaacactccgcgcactggaagcgctggttctgaataagaagctgatcaccaccaatgcgtcgattaaaacgatggcactgtacgatcctgcccgtatttttatttataacggtgccaataccgagggtctggacgcatttcttcaaagcgagctgcctgccagagatgaaaaactcctcagacaatacagtgcagacagtctgctcgctacgttgcagaatcatcattcctga

SEQ ID NO: 154921 - DNA, 714 bp, Enterobacter cloacae
atgcataaatttgtcatgtcggcgaaaatattcgcgatttcactgatgattgtgttgctggtcaacgcgcagggacatgcgggcgtagttgttggtggaacccggtttatcattcagcaaagagataaatcaaccaccgtcccggtgcgcaacaagtcggacataccttaccttgttactgtccgaatctctcccggtggaaaatggcccggcgcagaagcgcccgggtctgcgggccgttcgctggtggttataccaccgctatttgccataaaacccggacatgaacatattatccgcctgctgcaggcagaggctgacctgccagccgatcgcgaatcgctctttacgcttaacatcgccagtattccgtcagcccatgagggcagtcgggatgtgcagatagcggtacgttcggcgtttaagctgctctatcgcccggagggattaaaaggaaaccccgatcgcgcctatcgggaaatacgctggtcttactccgatgagggattaatcgcgacgaatcctaccccgtattacgtgacgcttttccagaccgtcatcaacggcacgcccgttgttaacgctggtgttgttgctcccttcagccaacgaaaaaccgaatggtgccgtcgcgcaccgcgctgcgagatacgctggcaaaccctcaatgacgccgggcgggtgttgcccatgatggttcagacgctgcattga

SEQ ID NO: 154922 - DNA, 531 bp, Enterobacter cloacae
gtgaaacccttcatcagattagctttacttagcgtatctctggcactgttcccgctggccgaggcaaagtcgcatgacggaacgatttttattacgggaacgataaaaaacaaaacctgcgtcatttcccccgactcagaacatctggtcgttaccatgacgcaggttaatgccacccagcttgagaaggccaaaaatgagacaccgtatgagcggttcacgattgacgtcgagcagtgcggggcggggcttaacaccattactacccgtttcgaaggaacacctgacggacaaaacaacgcgcttttggcgattaccgaggcgcaaaatagcgccagcggtgtcgcaatcggccttttcaacaccgataaatccccgctgccgctgagcggagagagccttccctttgtgcttaccggaaatcaaacgaccgccgcgctcgttttctttgcccgctatctcgccgtcacggataccgtcaccccaggtaccgcaaacgcggcagcaacctttgttttgacttatgcataa

SEQ ID NO: 154923 - DNA, 540 bp, Enterobacter cloacae
atgaatattacctggaaaaaagggctgtatctgacagccctgttattcaccccgttcgtcatggctgacggcagttataaccttcacgttttcggtaccattgtcggtgaatcctgcaatgtcgatacgcaaagcgtggagcagactgtcgacatgggcgagttttccgcaggcgattttcccgtaccgggctccaccactcccccgaaaaaattcgatattagtctcaaaggctgtaccgctgcgattaccgatactcaggtgtggtttaccggacaggcggatcgggacaatccctccctgctggcgctttcagataccggtaaaggccacctctcaaccatggcgaccggtctgggcgtagagcttctggatagcgctctcacgcccatcgatattaacaacaccgaatctgcccactatccgctcgcgccgggggacaatctgttgtccttctttttacgctacaaatccaccttgcccaccgtcacatcaggcgaagccacggcggtgatgtatttcgatctgctgtatcagtga

SEQ ID NO: 154924 - DNA, 1008 bp, Enterobacter cloacae
atgaagctatggataatgttaatcagcgtagcggggctggcgtttagcggtaatggcctcgccaaaacctgcgttaacgccaatggcagcatttccatcgttaactacgacctgaccactacactcacgaccgatcagaatcgccccggtagcggtacagaattagagaaaagtcaggatgttaatatcggtgcaagatgtccggcgggggactgggacaaacgaacctatcgtacttacctgagcccgtatcccgtcatcaaaaccgaaggcgaatggaagtatctgcagcttgatccggattacatcattggggccatgaaaattcacgatgccaccatcggcgatttctatccgccagttgaatatgtgcatatgggcggccatgacgaagtcgatacgggaggggtattccccgtcaacgacagtcatcttgtgttcaggctgcaaattgtaaaaccctttatcggcaccgtcgtgatcccctcaaggctcatgtttaacgtctatatcaccacaacggatcatgagccggttaatacggttgtttataaaatcatctacagcggggtgattagcgttccgcaaaactgcgtcatcaacgccgggcaaaccgtcacggtggatctgggtaaactctaccacggtgatttcagacaggcggggcagatgcccgataatgtccgtccaaaaacctttaacgttccggtcgaatgcaatggggacgttgaatctcccgcgcagttaacgctgcgcttaacgggcacggcggacagtcgttatccacaggcgctggctacggacaatccggacgtgggggtcgtcgtcacccgtgaggacggcacgccccttacgccgaacgtcttttcaagtaacgcgcccttcgagacggatatctctggaaaagccaacgtgacgctgcaagcgtatccaatcagcaccacgggtctttctcccgagctgggtgttttcaccgctctggcactgttacgcattgatttcgcctga

SEQ ID NO: 154925 - DNA, 2628 bp, Enterobacter cloacae
atgaagcgtaacgattcaccggctccagacacagcatatttaacctcgctgacgccagtggcagtagccgttacggcactcctcgcacttaccgaagcgcgcgctgagtattttttcaatcccgccttcttgtcaggcgatccttcagcagttgccgatctgtcgcgtttttccactaacggtcaggcgcccggcgtctaccgcgtggatatatggctgaatgagcactttatcgctacgcgcgatattaccttcgatgcccggaaagtggaagacagtgccccggcaaaatcgacggatgacactggccttgtcgcctgcctgtcggcgaaatctcttgagaatatgggggtcaacctacaggctctctctttacaggcatcggctcaaaaagataactgtattgatgtggcgggtgccattccagatgccagcaccacgtttgattttgaaaagctcagactggatatcagcatcccccaggttgccatgagaaacaatgcgcgaggctatattcctcccgaccagtgggatgaggggattaacgcgctcctgcttaattataatttttccggatcgcgcagtcgcgatcgcggaaccgataatgggaccagcaacaacgcttttctcggccttaacagcggtttaaatatcggcccgtggcgtttgcgtgacaatgtctcctggaaccattccagtagcgctcagggcaaaagcgatagctggcagcatatcagcacctatgcggagcgtacggtcgtcccccttcagggaaggctaacgctgggagacagctataccccctcagatgtctttgacagcctgcccttccgcggtgcgcaaattgcctctgatgacaatatgctgccggacagcatgaagggctttgcgccaaccattcgcggaatcgcgaaaagtcatgcccaggtaaccatcaggcagaacggctacgtcatttatcaaagctacgtgccgcccggcgcattcgcgatcaacgaccttttccccacctcatccagcggtgacttgatggtcgaagtcaaagaggcagacggcagcatcaatagctactccgtgccctattccgccgtgcccattcttcagcgcgaaggacgactaaaatacgccctgacggcggctgaataccgtagcagcggtagccagcaggatgacgttgagtttattcagggctctctgatctgggggcttcctcacggtcttaccgcgtacggcggatcgcaattgacccggaactacactgccgccgcattgggcgcagggctgaacatgggcgaggcgggtgccctctctgttgacgtgacgcacgcaaaaagccgcctcgccgatgatagcagtcactccggacagtccattcgttttctgtacgcgaaatccttaaacgccattggcacaaactttcagctgctgggctatcgctactccacctccgggttttacaccctggatgaaaccgcctacagacaaatgcggggctataaaggcgacgctcaggaagaggataacgcacaaaccctctggatggattactacaacctttactacaccaaacgcggcaaggtgcagttcaatctctctcagcaattgcctggttcgggttctgtttatgttaccggtagccagcaaagctactggcacacggatgagaaaaatacgctattgcagattggatacagcgggacctgggcagacgtctcctggagcctctcctataactacaataaggcccccggcatgtcgggaagtgatgaaatctacgcgctgaatatatcgctgccattaaaccagtggttatccccacagaatgaagtgggacaaaaacataattatgcctatgcaacctatagcctgagcacaaacaaacagggtgacacgtcccagaacgcaggcataaacggcacgctgctggaggacaacaacctcagctacagcgtgcagcaaggctatacccgccatggctcgcacgctcagggggcgagcagcatggaatacgacagcgcatacggtaatgccagcgtcgggtataactatagccaaaacggggactatcagcaggtcaactacgggttaaatggcggcgttatcgcgcaccgcaacggcatcaccctgagccagcctctgggcgataccaacgtactcattgctgcgccaggagcaaaagaggtcaagattgaaaatgaacccggcatccacacggactggcgtggttatgccgttgttccctacgcctcgtcctatcgcctcaatcgcatggcactggataccaactcgctggccgacgatgtggatattgacgatgcggtgacgcacgttgtgccgacacgaggtgctgttgtgcgcgcgacgttcaaagcgcgccccggtacgcgcgccttaatgaccctgctctatcgtggaaaacccgttcctttcggcgccatggtgacccgcgacgacggtggcagcaacacgattgtcggtgaagagggtgagacctatctgtccggcctgaacccaacaggaacgctgaatattcaatggggagaagatgcaaaccggcagtgtacggcgagatatcaactaccggaaagcaaagcgccgctggtacggctgaaaatggagtgtttataa

SEQ ID NO: 154926 - DNA, 705 bp, Enterobacter cloacae
atgaaaggattcatgattaatcaattacgtgctggcttattcatggccgcaacgtttacgcttacagcaggtatgacacctgatgcaaatgccggcggcatcgccctgggagccactcgtgtcatttatcctcagggtgataaacaggcatcactacctgttattaactcgtcaagtaataatacattcctgattcagacttgggtggccaatgctgatggtgtaaaatcttctgattttattattaccccaccgctgtttgttatacaccctaaaaaagaaaatacgttacgtataatgtatgcgggacctgacctgcccaccgatcgtgaaagcgtattttatctgaacagcaaagcaatcccctctattgataaaagtaagctgaatgggaacacgctgcagattgccacgcaaagcgtaataaaactgtttgtccgtccgaaaaaattggcgtctctctccgccgatgcgcccaaaacactctcctgccagacagccaacggccaggtgtccattaaaaatccgtccccctattacgtttcgcttgtgcagtttttcgtcggtgatacacaactgccaaattcgatggtggcccccttcaacacccttaccctgcctgttccaggcggcggtgccgggcgcgtcaggttccagacggtgaacgattttggtgctaatacgcccgcacaaacgtgctcttga

SEQ ID NO: 154927 - DNA, 537 bp, Enterobacter cloacae
atgatgaagtatgccactcaatacgtattactcgctctgggcctgatagcgtgtacttcagggcatgctttggcgagtgaagatgggcaggtcacctttatgggtcaggtcgttaatgccgcctgtaccgtgaacaccgacagccaggatctggtcgttcacatggggcaggtacgtagcagccagttcatctcgaccggggactgggctatgccgacgccttttcaaatcaaacttgaagagtgtgatgccagcgtaagccaacgtgccggcgtactgttttacggagagacggcgttaaaagatccccagatctttcatgccggcaagggtgcaggggccgcgaagggtattgggataggtatttttgatgcgacaggtcatctgctcattccgggtaccacgcccctcaggaaagctcccctccgagggggtgagaacgtgctgagattcatcgcgaaatatcggtcgacagcccctcacgtgcaggcaggaaatgccgatgcgcagatctggttttacgtcatctatcaataa

SEQ ID NO: 154928 - DNA, 543 bp, Enterobacter cloacae
atgaagaagcaattgttgggtatggctgtgactacagcgttgttgggcggcctggcgatgaacgctcaggctgataccgtaaccgtctccggcggtacggtgaacttcgtcggtcaggtggttaacgccgcgtgttccgttgcggctgattccgtcgatcagaccgtcattttgagccaggttcgcactgtcaaactgaccgctgccggtatgcaggcaaatcaaaaagaagatttcagcatcgtgctggaagattgcgacacgaccgtcagccaaaacgctgcggttatctttaacggccaacaggatgccgctcaggttggctccctggcgaataccgcaggcgcaggtgccgccaccaacgttgctctgcaactgtttggcccagatggcaacacgctgaagctgggtgagacgtcctcctccacaaaactcatcaacggcgaaaatatcattcctctgagcgtggactacatcgcgacgggagccgcaacacccggtaacgtctcatccacggcaacattccagatggtttactcctga

SEQ ID NO: 154929 - DNA, 1044 bp, Enterobacter cloacae
atgaaaaagatcgcttcactgctgggcttattgctgctgcttttttcatcgtcgtcatgggcggtagactgctaccaaaatcataaaggcggtgccacggtttacaccgctaaccttccaagctttaccgtcccttcaaatgcggtcgtcggaagcaaaatatgggaaagctctgacgttaacgtaaccgtttattgcgataatgcatcaggctggagcaaaaccaaccagacagaagacctcttcgcatggataaaactatctgcaaagaacagtgcggatgtattaaataacccctatttcacttttggcgttacctataacggcgcagaccatgagatgaatgatgaaggtattgataccggggcctgtcttgataaatacgaaccatactatgatggtatatggcataacccggtatgtaatggcatcacgatgcagaaaagcatcacgtttcctgcacgtttccgcttatatgtaaaactaaaggcattccctgacgatccggatactgtttataactttggcagcgtcaatgtccttcaatttgacggcgagggtggagcgaacctcgcttctaatgcaaaaaacctccgatataacattgatggtctcgatcatgttcactttctggactgtggcgttgatatacagatattccctgaaaaccaaattgtcgattttggccaagtcaataacatcgacgtaaacaaccaaaaagccccatttagcgtgtcgacaatacgcgacgcgactgcggcatgctcacagcagtttgatgtgaccatgagttttaacacagatgatttgtttgataccagccacgtcgatatgggtaacggtttagtaatgcaaattcgtgatgaaactttaggacaggatatcttaatgaatacctattatccctttgcaacctatttcccagacggtagggcatccatcgtaacccataattatatggctaagctaacgaagaacccgaacagagaggttgaagtaggtcccttcagcaaggacattattcttaagataaactatgagtaa

SEQ ID NO: 154930 - DNA, 735 bp, Enterobacter cloacae
atgaaattaacgttaattgcaaaaggatttttgtgtttactctgtctcagcacgctcgcccatgccaccgtttcaccggacagaacgcggataatttttaatgagacggacaagagcaccacggtcaaactaactaaccagagtaaaaccatgccttacctggctcagtcatggattgaagataaaaacagcgtcaagacgcgtgaatacattacgcctctacctccgttactgcgcctggaggctggcgagcagagccaaattcgtctgatgggacaacccacgcttgctcagttgcctaaagacagagagagtctgttctattacaacatgcgcgaaatcccccctcgttcagacgcgaaaaatgtcatgcaactggcgatgcaaagccgcctgaagcttttctggcgtcctaaggcgattgtgcttaaagaagggcaagccgtgcctatggaaaaagtggatatcatccgaaccgcatcaggcataacgatcaaaaacagaacaccttaccacgtctcggttggttacatcggtacagacggtaaaaccctcttacctggcgccagtgggtttatggtagcccctttcagcgaaaatacctctgaccttaaaaacctcccggccaaattccagattggctatatcggcgattacggcggtttgaatatgttcagtattaactgcacttcggtgcagccagtgtgccatagcgaaatagtgaaaaagggctaa

SEQ ID NO: 154931 - DNA, 2523 bp, Enterobacter cloacae
atgcgcaacattaaaaacccgaccatatctgtattatttcttttaataaaacagatcattcaccctattattgtcgcaggtgtaatcatagctcctgcctggtcggtagagttcaacaccgacatgattgacactgaagataaaagcaatattgacctcagccagtttgaaaagaaaggttacatccctgtagggcagtacatcgctcgcgttgagatcaacaaaaaaagccttcccaacttatggtcatttgactggattaaagccgacaatgaaagcggctctcaggtctgtcttacacagagcgatttacgctcatttggtttcgctgatgagtttattcaacaacttcagcctgttaatacacagggttgtctcgatctcagcgcaaaacctgaattaatcatcggtctgaataaagcggatatggttgtgtccatcactgcgcctcaggcatggatgaagtatcaggcaaaaaactggacgcctccagaattctgggacgatggcgtggcgggtgccttactcgattacaacgtctatgcaagtcagtacgatcctgatagcggcgaaaaaaaccagaacatcagctcttacggcacactcgggttcaacctgggcgcatggcgtctgcgctcagattaccagtacgataaatcatatactaatgggcataccaacagcagtgacagtgggctggatcgcacctatttattccgtcctataccatcattggcagccaaattgactctgggtcagtacgacctcaattccgatattttcgacacgttccacttcacagggctctcactggagagtgatgaaaatatgttgcccccggatttgcaagggtatgctcctcagattaccggcatcgcgcagaccaatgccaaagtaaccgtgacccaaaatgggagaatggtttaccagaccaccgtcgcgcctggtccatttaacatcaccgacctgggcgatactttccaggggcaactcgatgttaccgttgaagaagaggatgggcgtaaaaacaccttccaggtcggctcgtcttcaatccccttcctgactcgtaaaggtcaggtacgttataaaacctcgacaggtaagcctacaagcgttggccacagcgacgttaacaatccttacttctggactggagaattttcgtggggatggaagagtgacatttcgctttacagcggagcattgctgacggccgatgattaccaggcagtcacaacgggtatcggttataacatgaacagctttggcgcactgtcatttgatgtcacacgtgctgaagcaacattgcacaatgtggatagcggcaaacagcgaggctacagctatcgagcaaactattctaaactctttgaagaaaccggcagccaggtaacgtttgctggctatcgtttttctgacaaagaatacgtcactatgaacgagtatttaatgtcgcgaagcggtgatgattcgctcagtaatgaaaaagagagctatgttctctctttaaaccagtttttcacttcgctgggaatgaacgcctatctcaacctgacgcgcaatacttattgggacgacacagccagtacaaactacacggtatcggtcaaccgtaactttgatattggcaaccttcagggtatttcggcgtcgctctcagttagccgctccaggtgggacggagaagatgagacacaatattatctttccttctcagtaccactggagcagagccgcagcgcctcctggagcatgcaaaaaacaggcaatagcagcctcacacagacggcttcgtactacgattcttcagaccggagcaatacctggaatatttccgcatccggcaaggatagcgattttagtcacgccgagccgaccgttcgcggtggctaccagcattattctccttatggccgtctgaatatgacggggagtattcagcccaacttttacaactctttcacggcaggctggaatggctccttaaccgcaacgcgtcacggtatggccctgcatgattacagtaacggcaacaatgcacgcatgatggttgataccgacggcattgctgatatcccgttaagtgataaccgcactgtcaccaacagatacggtattgcggttaccaacgccgtcagcgactacatcacctctacaattcgcgtgaaaagtgccgatctcccggaaggtgtagatgtgaataattcagtgatcagtaccacgctcactgaaggtgctattggttacgccaaaatgaatgccactaaaggttatcaaatttggggtgttatccgtctgcaagacggtcattttccgccgttaggtgtcaacgttgtggataaaacaacaggcagagatgcgggcctggttgctgaagacggctatgtctacctcagcggtcttcaggatgaaagtgaactcacacttacgtggggtagcaacagctgcgaaattttagcgccgaataaaagtaatgccgatggaaaagccattattttaccttgtaaatcagtaaattaa

SEQ ID NO: 154932 - DNA, 567 bp, Enterobacter cloacae
atgttgaacaaaacactgttagccgttgttactgcttcccttctgtctggcgtagctttcaatgcatcagctgctgatgcaggtcatggtaaagtgacgtttaaaggtgaagttatctctgcaccttgctcaatcgcgcctggcgatgaagacctgcaggttaacctgggtgaagttgcggattcagcgctaaacggtggcaagttctctctgccagttgattttactatccatctgcaggactgtacgctgacgggcggaaccactgaagcaccaaccactatcagcaaagcgaaagtaacctttaactctgcaaacgaagatgcgaccactaaactgctgaaaaatacctatgaaggtaactacggtgctgcatcaaacgttggcgtacgtatcctgaccgaaggtaaagctaacgtagacatgggtgtagcgcaggtattcagcctggttgcaggtaaagcgtatcaggaactgaatttcaaagcacgtatggaatcaccaaccaaaactgcaactgcgggtaatgtttatacccaggctaactatattctggcttacgagtaa

SEQ ID NO: 154933 - DNA, 834 bp, Enterobacter cloacae
atggtctgccagatggaactgaccagccatctgttgacggcagcggccttcggcacgatgaaaaacagtgaaaatgagctcgcggaacaactgatagagcagaccggcgataacaccctgacgttaatggataaaggctattactcgctggggctgctgaatgcgtggagccaggcgggagaacaccgtcactggatgctccctctcagaaagggagcacagtatgaagaggtcagaaagctgggtaaaggcgactatctggtgaagctgaaaaccagcccacaggcacgaaaaaaatggccgggtctgggagatgagatgacagcccgcctgctgaccgtaacgcgcaaagggaaaaccagccatctgctgacgtcgatgacggacgccatgcgctatcccggaggagaaatggcagacctgtacagccatcgctgggaaatagagctggggtacagggagataaaacaaacgatgcaactgagcaggctgacgctgaggagtaaaaagccggagcttgtggagcaggagttatggggcgtgttactggcgtataatctggtgcgatatcagatgattaaaatggcgggccatctgaaaggatactggccgaatcagctgagcttctcagaatcatgcggcatggtcatgagaatgctgatgacgctgcagggcgcttcaccagggcgtatcccggagctgatgcgtgatcttgaaagcatggcgcaactggtaaagttgccgacaagaagggaaagggccttcccgagggtggtaaaggaaaggccctggagataccccacagccccgaaaaaaagccagtcagttgcttaa

SEQ ID NO: 154934 - DNA, 834 bp, Enterobacter cloacae; identical to SEQ ID NO: 154912

SEQ ID NO: 154935 - DNA, 834 bp, Enterobacter cloacae; identical to SEQ ID NO: 154933

SEQ ID NO: 154936 - DNA, 2001 bp, Enterobacter cloacae
atgctaattaaacagctggtattaagcaattttcgggttttcaatggaacacatgttatcgatctggctccgaaaaaacgtcaaaacgataataatacgcgccctatagttttatttggtggattaaacggtgcagggaaaacttctatactctctgcgatccgcctagccctatatggaagattagcatatggttcatcaactcagcagcaagaatatgttgatgaactcagcgcattggtccataacggttcttctttgggtgagcaacccaatgaagcctcaatagaacttgttttcatatacaataaaggtggtgaggaagctgagattaccgtaacccgagcctggcaaaaaggtaagagagataaactcacacttcaacaggatgggaaacttatccaaggcttgagttatgaccaatgccaaggtttcttgaatgaactcatccctcatggaattgctgatttattcttttttgatggcgaaaaaattgctgaacttgctgaagacgagtcgggtaatattcttcgcaccgctgttcgtcgtcttctcggtttagatttaatcgagaaacttcgtaatgatctaataatttttgttaaacgatatcaagctggtcaacttgctgagtcccagcagcagaagttagtggatcttgaggaacaaattaaaaagttcgcctttaaaacagaagagattctcgaaaaggctgattttgctaaatcgcacatagatgtgatgtctagaaaaattatgattcaagaggctctcttgacagcacaaggaggagcttttgcccaaacaaaagccaaagaaaaacaaaaagttgatattcttttaaaagaaagagaccgtctggaaaaagctcttcgtcatgagtgtgacagttctttaccatatgctttggcacctaaaactatgagccgcttgcttgagcagattggtacagagatccaaataaaacaagctaaaatctttgagacggaattaaataatttcctgatgaagctcaataatgatatctcattccgttcaggaagttcaggaaaaattgcggccgaagctattgaagacaatctaaaaatttatcttgcggataagcctaaaggtgaattacttttcgatatctcagagcgtgaagctggtattatccaacaatcaattgagcaagcgagtaaaagtgcttggaaacgttttgatctttaccgcaatcaattagctgaagtagaacaagaacttgagcaagcagcagcgaatatagcgcgagcacctgaagatgatcagttaattgatatttttgaaaaaatacgtgaacttgatcgccaacgtgaattaaaacgacaggagtaccgcttgttgctggaggaagctaaaaaaactaaacagcaacaattagattgtgcgcggcagattcaaaaagcacacgatgcagcacgtaatcagcatagctttaatagtgcatacaataatgctcaagatacaataactcttcttgagaaatatagtgagttattaactcaagcaagagtaaaaactctttcttcaaactttgaaagcgcttaccggaagctagcccgcaaagaagatctgcagctaaatgcgcatattaatcccgagacatttgatgttgagctagtggatgataatcataaagttattaataggaaattactttcagctggtgagaagcaaatttatgcaatagctattctcgatgcactagctaaaacatcaggtcgagatctccctgttattattgatacacctttagggcgtttagactctttgcatagagataaattaattaatcattactttccttatgctagccatcaggtagtattattatctactgacacggaagttgatgaaagatatttcgttgaacgtcttagagatgatatttctcacgcatacgaaattgtttttaatgctcatactaaatcatcaacacttaagcctggctatttttgggaactaacaaaggagatgagctaa

SEQ ID NO: 154937 - DNA, 582 bp, Enterobacter cloacae
atgaaacgtaaaatttttacagggattttggcgttatcttcactgtttttagcgaatcaggttatcgcatctgacggtattgtacacttccgtggcgaagtggtggataccacatgtgaagtcacttcagatacggctgggcagacggtgaatatcggtaaggtgggtaaaactgctttcacgggtattgactctacggcatcggtaaaagattttcatatccgactggataaatgcccaaccacatacactcaggctgccgttcgctttgatggtacggaagataaggacactatcggcaagggctatcttgccatcggtacgcctgtcgtgggtgacacgggcactgacggtaccttcaccggcggggataccgctgtcgcagcaacgggtgtggcgattaaattgtacaacctgaaagacgataccgccgtcccgctgtacggcaattctgcttatagccccatcaccgcaggcaaagccgatttagggtttaaagcgaaatatgtgcagaccctggctacggtcacgccgggtacggctaacgctgattctcaatttactattgaatatttgaaataa

SEQ ID NO: 154938 - DNA, 681 bp, Enterobacter cloacae
gtgataagagtgttattcggcgtactcatgacgctgtggctggtctttttttcatgtttttcaaccgcgggcatcattattggtggaacgcgtattatatattccagtgataaatccgatgcgaccatttcggttcgtaacaatgataatacgctgccctatttgattcagacatgggttgatcccttcgaaagtcgcgatcgctcttcaccgcctttcaccgttattcctccggtttcccggctggagccgcagcaggaaaaaattctgcgaattatgaaagtcaaaggggcactgcctgacgatcgcgaatccgtcttttggctgaacgtaaaaaatattccgccttcgggcaacagcccaaaccggctggaaatcgccatcaaaacgcgcatcaaactcttctggcgtccggctgcgctcaaggtcaccccggaagccgccgcgccgaaagtcacctggcataccgaaggcggttttttggttgtgcataatcccagcgccattcacgtcaacgtgatgaatgtgacggtcgacgggaaggatgtgcctttgaatattatccgcccgtttgaaaccctgcgtcttccgctgcctgcgggaacgtccggtcataacatggtctggcgctacgtcaatgactacggcggcatcagtaacactattgcgcttaccctctga

SEQ ID NO: 154939 - DNA, 2529 bp, Enterobacter cloacae
atggcctcctcaccgctcgtaaaactcctgatgatctcagggatattcttttctgctgcgaaaatgtctgcggcaaacgatctgtttaatcccgccttgctggagatcgatcaccccgttgatgtggacatcagccagttcaaccgcgcaaacagcctgcctgccggggattacaaggtcgatatttttgttaacggtaagcgtattgaacaacgcgtcgtgacgtttgttcaggataatgcagaggcggaaatcaccccctgttttgtggatgcgaaaagcgtcctggcctcctttggcgtaaaagttgaagcggtaaaggcgctggcagagatcgacgagaagcagtgtatccgtcctgcggcgatgatagagggggcgacctcgacgtttaatacggatgagctggccctcaatctgaccatcccgcagatttatattgatgccgctgcccatgatgcgataagcccttcccgctgggatgaaggcattaacgcattgatggtgaattatgatttttcaggctctgaaacgcttcgcgacgatgacggtgatgacgaggcgttttactacctcaacctgcgcaacgggataaacgtgggggcatggcgccttcgcaactacagcatcctcaatatcagcaacgggcagtcagcctatgacactataagcacctacgccgagcggaatattgccgcgcttcgtagccaggtgatgattggagatacgtttaccgccagcgatgtgtttgacagcacgcagcttcgcggcgtgcggctctatactgataacgacatgcttcccgccagccagagcgggtttgctccggtggttcgcggcgtggcaaaaagtaacgccaccgtcatcgtcaggcagaatgggtatgtcatttatcagtccgcagttccgccgggcgccttttcgctgaccgatctcaatactacccactcaggcggggatctggatgtcaccatcaaagaagaggacggcagcgaacaacgcttcacgcagccctatgcgtcgttagccatactgaagcgcgagggacagaccgatgtggatatcagcgctggtgagttgcgcgaccaacaatctttcacaccggaggtgtttcaggctcagctgctgcgcggtatgccgtggggattaacgctgtacggcggcatgcagctggcgcaggattatcgcgccgctgcgctcggagtcggcaaggatatggggtcgctgggcgcgctctcctttgacgccactcacgcagccgcttggttcgacgagaacgacaatgaacaggggcagtcttatcgtttcctctattcaaaacgctttgatgataccgacacgacgctccggctggtgggttatcggtactcgacggaagggtactacacgctgaatgagtgggcttcacgccagaataaccaaagcgatttctgggtaaccggtaaccggcgcagcaggctggaaggtacgtggacccaaactttcggcgaaggtatgggcaacctctatctgacgttgagccgccagcagtactggaagacggacgctgtcgaacgactggtgcaattcggctacagcaacagctggcgatctatctcctggaacctctcctggaactattcggattctgccaccacttccagcggccgccaggatgccgatagcacctcctctgaaagcgagcagatcttcatgttttccgtatcggttccgctatccggctcgctcagcaacagctacgtctcgtatagcgcgacgcaaaataaccacggtaaagggatgcatcaggttggcgtaaacggtacggcgctcgaaggacataacctctcttataacattcagcaatcctgggatgctgatgaacgagagagcaacggcagtgcaggacttgggtatgacggaacatacggctcggtgaatgccagctatgactatagccgggaatcagagcgccttaactatggtgtgaaaggtggcattctggcgcacagcgaagggatcactttttctcaggagctgggtgagaccgtcgcgctgattaaagcccccggagccgccggtcttgagctggaaaacgctggtggcatcgccactgactggcggggctttaccgtccagacgcagctcaacccctacgatgaaaaccgtgtcgctttcgacagcgattacttcgccaaagccaacgtcgaacttgataacagcgtccttaccctggtgcccacgcgtggcgccgtggtgaaggctgtatttgttacgcacgttggctaccgcatcttgtttaacgttcgtcaggcgaatggacaacccgtcccctttggcgcgatggcgtccgcggagcttgagtccggcagcgtgaccggcattgtcggagataacggcgatgtctacctttccggtatgccggaagacggtacgttttcactgaactggggaaaggggaatgccagtcgctgcacggtgcattaccacattaacaagccgacaggtgtcgagctggttcagacaacggcagtttgccaacaggaatag

SEQ ID NO: 154940 - DNA, 1077 bp, Enterobacter cloacae
atgaaattgggtttgaaaaggctgtttgttgtaatgacgcttttattcagtacatggagcaaggctgcgcttgcgggggatgggatctgccatgcagtaggtggaacctatctctacaatctgaatgtgaataatcagcaaataccggctgataaaaataaagcgggtatggagataagagatctggagaccctaacgtcccccacgacctataaagttgaatgtaattgcctgacgcgctataccaccgtctttcgagagatttactatacggccacttcgcctctgaacgtcgatacgacgagaaacggttatacctactacagactgaatgacaacttgagtattgcctcctcgattcatgtattgggacgtaactttattcccgtacccttttctgcggaaccaaatcgcgtaacctccggtatgtactgctatgcggatggcgaagaaggcaaccaggcgatactggatacgggatcggagatcaagctgtcatttctggttaacaaaccttttatcggcaaggtcacggtacccggcacgatcgtcgcggatctgtacggcggaataaacacacaatcctctttggcgagtaccgaaaagctggcagaaatccgtatttcgggtgatatcgtcgcaccgcaaagctgtgagattgcgtcggggcagtcgctggaaatcgattttggtaaaattccttctacggcgttttctgcggtgcagggcacgcccgtttccagccacaaggtgaccaaaaccatcctcgtccagtgcaccggaattagggatgaaaatatcgtctactcttcccttcatgccgatccggttgactccagcgcgacaatgatgaaagtcaacggtaatgatgatgtcgggattgtcatttatgacaaggccgaccgcgcggtgaatgtgaacggcggcagcatgagtatggacagggggccgaacaatcagggggcagaaaccaactcgctgacgttttccgcggcgccagccagtgcgacaggcgctcagcccaggccggggacctttgacgcctacgccaccatcacgctggagatcgccaactga

SEQ ID NO: 154941 - DNA, 873 bp, Enterobacter cloacae
atgaaacaacatttcattggaaatgttcattgtcttgaagaatctcctgagggaaaaatagaagacagtatagttgaaataccaataggactacaagacgacacaacgcctctaaatctcatagctggtatgcaagacgaacacgtatctagcctttctgaaaatagactggaagagtatttatcggaaaataggctccctaaagaaataataaaaaaacatgcttcatatgaaatcaataaagttttagagttattcaatgaaattgactggttaaaagacagtgaaatttcggatttgtgcttccagagatatcctgataaaaaggcaatgaaccagatcagcaaaaatttactgattacatcccgacaaacatttacaagaaattcggtatctactgagatcgagcatataagcggaatgttattttcatatataaacgcggaaacacatcaaacatattttgactctcaattaagtagaatcataaatagtcaaatctcagaaccagaaatttcggaacttataaatagagagttaaaaataatcagaaatgtattttcttattcaatacctaaatctttggctttgcaacaagatataatcaatttcataagccaaaaaagaaaattgaacttaactgctgattatagttttattattaatatttttgaaaaatttcacttaccgggtaacatatccgcactagaagaaatgggcgttccacttcagatattacaaaaaatcaattttcctgatgacgcgattgtagatataaataaatgcatcgaatatataaagaatgtttattttttaaataaaacactaagtaggttagaacggaaatttattgagagagcattgattatttaa

SEQ ID NO: 154942 - DNA, 834 bp, Enterobacter cloacae; identical to SEQ ID NO: 154933

SEQ ID NO: 154943 - DNA, 960 bp, Enterobacter cloacae
atggatgtaacttttgattatattcttgagcaatatttttttagcaaatctttacggcctgctacggtgtggagttatcataaagtagttaaatcctttcagaaatatagtgcacttccgccaggacaggttgatcatattttgattttacgatggcgattacatgtgctaagtgatcttaaactaactcctagaacttggaataataaggtggctcatctgcgcgcattgttcaattatggaattaaacatggtttacttagcttcagcgaaaatccttttaatggtgttgtagtacggcctggagttaaaaagaaaaaaatcctcaccaaagcccaacttgatgctgtttatcgtttaatggatcgctatgctgaagaagaacgttatacggggatgtgttccatatttaatgggcgtaagtgtgctttacagcccgtttggttttggcaaactgtactagatatgcttaggtataccgcgattcgtcaaaaccaacttctgcatattcgcttgtgtgatgttaatcttgaagagcgttggatagatttagctatctcgggcgcaaaaaatcatcgagagcaccgggttccaatcgtgtccgctttgtatcctgccctcgctcgtttagttaataaagcacagttagctgaggtagaacctgaggcacaattgtttaatgttggcttgtttgatgtgtcgcgtagcagaaaatattcagatgggatggatgttacacccatacggggtttctttcgtcgtctttcacgggaatgtaagtttaccgtaagcccgcatcgttttcgccatacagttgcgacgcatatgatgaagtccccggatcgtaacctccaggcagtaaagaagctattagggcatgtcagcataacatcaacacttgagtatattgacgagagcgtggataacttgagagaaattctagaagttgaattgatgtga

SEQ ID NO: 154944 - DNA, 1110 bp, Enterobacter cloacae
atgccccatagtggtgaagtgcttctgtcctcaccggagcgccagcgatgtttgcaaatcctatgggaaagctcagccctccccagcgctttttttaagctttattatttgtgtcctttggaacagtgcgtagagcttatgcaaagctttccatacgcctcatccggaccttatgcccagtcaggtggcatggtcgatgctatgcttgggatggttacaagcgctgtgcgaatatctaaaagacatatgctgccaccaggagcttcacctgaactacaggcagaacaatgtacagtctggaatggtgtcgtctttcattcagcgcttatgaaatcattgacaccgttaagtcatttaattgttgaactagaaagtgggcaatactggtcgccgttagaggggcccctgaaacaaccctatcgttttcgatttaaatcagagctatcaagggagcgggaaagggcgttaactgccatattagcgtttcggattataccgccggaagtcattgcttggttaaatagttgccctgatgcattggagtctttgacaatccaactactgggtctggaagcagattcaaacattcttgattcaatcgtacaggaagcgagttcggtcgcttgcctctacaataaacctctgtcttccgtacaaacagagaattctcttttgtcagataggacgtcgactttaaacgaacacaatatctctttttctgacagcgagcaaaagttaacaaaaaatctcggtgagcttttcttggaatggctaatacatggatgccgaaataacacgttagggataaataaaccgtcgggctacgtacatcttgtagctggtttcgtcttcattcgctctcctcacatcttccatcatttccttgctgagcaagggcagcagccagagttgaaaggggccctacaaaaggctttcgagaaactcggagtccatcgaaacgacaggggggctatgttcacttgtcagctttaccaggatactacgaaacaagggagatacataaagctaaacggctatcttattgttattaaaaagatttatggagattttccatcaggggaggataatgccaatattaagattcaataa

SEQ ID NO: 154945 - DNA, 669 bp, Enterobacter cloacae
atgaacttaactaagccagacaaagacgattttattaatttatttaatgagattgctcctgataaaggacgctacgctgtctttcaggattttgtcgaaatggcatcatactcgcttcacaatgcgtttaactggagtaataagtttgaggagtcctatttgtcgattgctcatcgctataaagctgatgacttgaagaatatgtctaagatgttaggtctgacgatagttagattacataattctcctgaggactttttaggagatatttacatgtcacttcaactcggtgagctggcgtggggagaatattcttttgctagcttggtggcaaagttaacgctgcatgatattgatgcacttgttaaagagaaaggatttcttacccttagagacccaacatgtggtgccggtgggttggctatagctcaggcgctgactttccagcaagcgggctatgaccttgagaagcaattttttatacagtgcgtcgatatcgatccagttgccactgctatgtgttttattcagctaaccgttatgggggttcctgctgaggttttgactggtaattctttaacgttagagtccagtaaggtaatgagaactgccagctattaccgccataattggaagcaatgtttaaagactacgaaaagagtaagctga

SEQ ID NO: 154946 - DNA, 687 bp, Enterobacter cloacae
atgaccaaaatgaacccatattctgctgaatttataaagctgttcaatgaattagaatctgggcatgaacgatttactgtatttaagaattttgttgaaaggattgcgtcttgccttcatggctcttataccgggaacgaggtggctgggacttcatttgctactattgcaactcgttatagctatgatgatttacggcgtgtaacaaagttgctggctttgatatgcgctgccctggatgctcagaaaggcgatttcctaggtgaggtatttaacctgcttggcttaggaaagtcgcgacctgaattaacattcataccgtatgaagttgcactttcttcagcaaatgagatgttttctaagttggacgtaataatgaaactgcagccccatattacgcttttggagatgtcttgtggtgcagggagcatggccatagctaaagctgaagtgtttaagcagcgaggatacaacgtacatcaacaactttatatccagtgtgtggatgtaaaccctatagttacagctatgtgctacatacaacttacagttttaggcattcctgctgaggtgctcacctgtaactcaataaggttagataaacatatggccaggtacactcctgctttttatgcatttgactggatgcaacgtttgcagggagaaaaacctggtttacattcttaa

SEQ ID NO: 154947 - DNA, 951 bp, Enterobacter cloacae
atgcgcagaagaagctcttcagctgaaatctataaacctaaaactgacttattccagagggtaaccgataagattatcacggtgctggaacaaggcacattgccctggcgtaagccatggaaaaccgagaaacacagccaagcggctctatgcttcccagttaatgctataaccgggcgcgcgtatagcggaatgaatgttgttctgctatggatggatgccgctgaaaaaggctttagttcaaatcgttggctgacatttggacaagctttggaggtcgggggcaacgtgcgcaaaggagaaaaggcaactttagtcacgttctacaaacctgaacaaccaccaattgatgagcctgccatgcatcagtgccatgaaaatgccggtgctctgaaatcacaacgcagttttatgaccagcaatcatctgttcaatgttgagcaatgcgagaatttgccggaaaaattgatgcttcggcattcagtggaactgccagatcagcatctgctatctattgccagagcagaccagattgtggctaacagtggcgtacgagtgattcataagtttcacagtcactcattttatcgtcctcagagtgacacaattactctgcctgctcgcactcagtttgattctcaggctacttactacagtactatgatgcatgaactggttcattcaaccggacatgaatctagactggcgcgggatggtatcgtttcttgttcgcgcaaatttggcgatcctgtttacgcgcttgaagagcttgttgccgagttcggtgcagcttttttatgtgcagaattaggtctcaacctggaagttcagcatgaaagctatattgccagttggctaaaagttttgcgcggtgataaccgagcaattttcaaagcctgccggttggctcgtgaagcgtttgaatacttaattaaccacgaacaggcctaa

SEQ ID NO: 154948 - DNA, 285 bp, Enterobacter cloacae
atgaaccatatgatttcttacgaagctgcagtgcttctacaggatgcaggtttcagtgaagaacttgtggaggcattagtgaaatttcaaaaatcagtcaatggccaaattgctaccagttcggaactacagtctgtaaaaaatgagcttcaaaccgatgtgcgggtcagtttgtcggagcttaaaaatgaactgctccggcttgaaagccgtttaaccttgaggatgggcgctgttgctgcattccttctggctgctctgggcgctatgaagtatatggcctaa

SEQ ID NO: 154949 - DNA, 1047 bp, Enterobacter cloacae
atgcctcttttattcttttttatcgctatagtgatcacagcattaaactgggaatgggttaacgaaaaccttgttattttggggaccatctcaaccacgttcgctttctttgctacagcatgggcggcctatgaagcaagggccagcgcaaaggcagcctttaacgcagttaaacttacgcagcaaacgttaactgaagcaagaaaggctgatttcaaacaatggtacaatgctttacttgaacagcataaagaccttcataatgaagccatagatcgtatcgataacaaccaagctcttaaaaaagatatgcacagtgacacgttatcaatagcttacagctatatagtcaaggacaatattatatcatcttactgcaaacttatttattccatcctggattatgtcgattgcgagttttatattcaaagtgaagacaaaacaccacaaaaaacatatctttcacggctaaattcaagtatgcgacaggatttaaaattaattgtagctatttacgcacttaaaggagctgaagtcacgcctaagcatggtaaaagaatgttttacctcctgacaaagtacgctttttttgaggaagacatactcttcgctgatgctatgagtcacaagctctcccctaacaaatatgcagaaactttatttacagaatcattcggaaaacaattaaacgattctatattcgatgctatttgtctagataagccaacaacagaagaaaaaatatttaattcatacattcctgagccaggtacaaaacagacaattacctatatatatgccaatatatttcagaaagcttttatcaagtgtttcgatcattacactgcaaacctggataaatgcttaattgaaagatcgatggatatagattcctatctttcaaagatcataaatggcatttataattacgagggaagtactttaaatattgttgataaacagcaaactagatttgcatcgcctgtttcaacattatgcaaaaaaaacagcgtactacagaacccaaaaaagactgagcgcctttaa

SEQ ID NO: 154950 - DNA, 558 bp, Enterobacter cloacae
atggctttaggaaattacactgctttttacgtcgcggaaccttttagcgaaagctccctcggggctcatgcaactaaagatttctgttactataacctgctgaaatcatggaaggcaaaggatagcagttttccgtttactaactcacatgatagcacttacaacgttcgcgataacagtaattgggagaccacgctcaagccgcgattgcgcgaacgcctgcgcaagtccaaaaatatcgtgtttttcctgagttccagcacactgaactctcgggcgttaagggaagagcttgattatggtattaatgaattaggcttgcctgtcattgtcatttatcctgattacgacaaaaactccgatcttcatattaatctgaatgctaagcaaaccataaaaaacctttggggtaaacttccggtgttcagggattctatgcacaaagtgccaacactccatgttccgatgaaaaaggaaactatcaccctggctttagaaaataaagatttcatttctggtgctaaaaccaaaccaaacacttatttttatacatattaa

SEQ ID NO: 154951 - DNA, 831 bp, Enterobacter cloacae
atgaaaaatgttaaggtttcatttggcgataagaaagttcgagattcattttatgaatccacttccaaagtaagcactatcttttctttggtgcttatttttgtagatatccctgatgataccaaattgtggttaggtggtttatttgtcatctgcttgtttatcatttacatcagaacctggcattatcttaacaaaatgcaatccattgaattaagtgttgaaggttcaactgttaatgtcaaaacgggagatatattcaggcaaaatgggctaaaagccatcgcttttaatgaatacttcgatacccaagtcgatgatgtaataatctcgaagaactctttgaatggtaaattcattaaagagcatctgcctgattctttacatgctctcgatgagcacatagataattataggtttgataaagacgaagtcattgaagagaataaatcgagagaagtaggtaaaaaaattcagtatgatttaggtactatctgcgtttaccacgattttttattgactgcttttactcacttcgatcagtacaatcgcgctaacctgaccatgccagagtacctcagattccttatcacattttgggataaggttaatcgcgtttatgctcagcgaagtgtttctgtaccaatctttggttcaggaatcacaagaattaaagagcataaaaatatcagtgatgaagacctgctaaaaatcatgctgtggacatttcggatcagtgaaactcggtttaaacaccctgcaaaactgacaatagttatccacccggataaaattgacagaattaacctcgcagatataagcaacttctaa

SEQ ID NO: 154952 - DNA, 840 bp, Enterobacter cloacae
atggcatttgttaaaacggatgacggcgtcaacattttttacaaggactggggcccgaaagatgcccagcctgtagtattccatcatggatggcctttgagcgcagatgactgggataatcagatgctctatttcctgtcagagggatacagggttattgcgatagatcgtcgcggtcatgggcgttccgatcaggtgagtgaaggacatgatatggaccattacgcagctgacgcctcagctgtagtcgaatatctcgatctaaaggatgcgatacatattggccattctaccggaggagggcaggttgcccgttatgtttcgaaatttggtcagccacagggaagagtaagcaaagccgtgctgataagctcggtaccgccgttaatgataaaaaccccgtcaaatcccggggggacgcctgttgacgtttttgatggattccgtaaagcgttggcagcgaatcgggcacagttctattttgacgtcgcctcaggtcctttctacggcttcaaccgcgaaggagccgatgtttctcaggggacgattcataactggtggcgtcaaggaatgatgggaagtgccaaagcgcattatgaggggatcaaggcattctcagaaacagatcagacggaagatctgaagtccatcactatccctgtacttgtcatgcagggggatgatgatcaggtggtgccttataaaaatgcagcgcttatgcaggataaattgctggtcaacagtaagttgattatttatccagggtatccacatggtatgcatacatcacatgctgatgttataaacaaggatatactcgagtttattcgcgaaaaataa

SEQ ID NO: 154953 - DNA, 4122 bp, Enterobacter cloacae
atgataaataaacgtacctttgggtttcacctcaccgcctggctgatagtctgccttcagctgttcactccgttgtttttcaccgccgcctccgtagcccgtgcggctgccgtgtcacagcccggcctgccagagctggggacgccgaagcaggaaaagacggatgactcagacaaaaccactgaccgtgtcattgctgcacaggctgcacgggcaggacaggtgctgtcatctgatgattccggcttcgctgcacaaagctacgcgcagggcctcgcagcctccgccatcaatcaggaaatcagcgactggctggcgcagcgcggtaccgcccgggtatcggtgggctcgcaccagaaggtctccggcgatattctgtatgccttctacagtaacgatgactacctgttctatgcacagggcggcgtgcgcgcggctgaagaccgcaatacaaccaactttggtctgggttaccgacagaatgccggtgactggctgctgggcatcaacgcattttatgactacgactacacgggcaaaaatgcccgcatgggtgtcggcaccgaagcctggacggattacctgcgtttcgctgccaacggctatttccgcattaccaactggcatgcgtcccgtattgatgccatgcgggattatgatgaacgcccggcaaacgggtttgacgtccgggccgaaggctggcttcccgccctgcctcaggtcggcggcaggctgaagtacgagcagtatttcggcgagggagtctatctcggtaacagcagcgtcacgaccgacaaactcaggagtgacccgaaagccctgacgatgggcctgacgtggacgccggtcccgctggtcaccctgaccggcgagcagtcaacaggtgattcgcacgattcacgggtgggactcgacttcacctggcgctttgatgtgccgctcagccagcagctcagcccggatgccgtgcagaccctgcgcagcataaaagcctctcgctacgagctcgttgaccgtaactacgacatcaccatgcagtaccgtaagcagagcctgctcagcatctccctgcctgacgtcgtgacggcagaatccctgcagaccgtccgtatccccgtgaccgtgaataaggcgaaatacggcctgaaagatacccagtggaccccgtcggcctccttcacggcagctggcgggaccttccggaaagtgtcagagacagtgctcgaggtgaaggtacctgcctacacggccagcgcgacagcccgcagcgccgtacaggagtatacattcagtgcaaccggaaccgacagcaacggtaaccgctccaacaccgccacaaccattctgcgcgttatgccatcgcagctgagcatcagcgcgctgacggtatctcctgcagacggcgtgcctgccgataacgcacagttcgccacgcttacagccacggtgacggacagctccggacagccagctggcgctcaggctgtcaccttcaccctgagcggcctgaccggcgggacgggcggcgctgcaggcaccctgtttacagacggcgtatcagacagtcagcagctcaccgtcatgaccggcgctgacggtaaggcaaacgtcagggtacgcagcagcgtcgccggaacggcgaccattaccgccaccactcagggcggggacaacaaggccgtgaccgtgccgtttaccgacctcaaactgcaggctgtgattgctgaaggtgacctgaaggtcagccagaacgcaccggcaaacgggacgtctgcagaccacgtgaccataaaagtcacggacggaaaaggtaacgtggtgccgggcgtcaccctgcagctctccgttgctgacggtgcctccgtcacaccggccagcgtgatgagtaatgctcagggactggctgaggcggacataaccagccgcaaggccggtacctacacgctgaccgtgctgctgaaagaatccggcaaaaccgccagcgctgatgcagtgtttgtggcggacatcaccacggctgcagtcagggccggagacctgacggtcacgcaggatagcgccctggccgatggcacagcgcgaaatgccgtacaggcgaaagtgacggatgccgccggtaataccgtggccggacagtccgtcacgttcagtgcaacgaacggcgccgtgctgaccgccaccacggtggtgagtgatgcgaacggtgtcgcggttacagccctgaccagcctgacggcaggcacctctgccgtgacggccacgctcaacggcagcagccagaccgtggagaccaccttcgtttcagccacggctgacgcagaaatcaccgctgataatctgattatcagccctgataacgcggcagcaaacggcacggccagaaatggcgtcacggcgacggtgacaaatgccgctggtaacgtggtgagcggtgcggaagtcactttcagcgtcagcagcggcgcaacagtcaccacgctcaccggtacaaccggtgcagacggtaaggccacggcggccgtcacaagcctgattgccggcagctacaccgtcaccgccagcgtgaacggccgcgccacgaccaaaaccacaacatttattgccgatgcgtcaaccgccaccattaccagcagcaacatggtcgttaccaccgacaattccccggccaacggcacagaccagaaccggctgcaggtcagggtgaccgatgcgaacggaaacagcgtgcccggcgcgacggttagctttgccggcaccgcaggggccacccttaccgcgtcaaccggtaccaccaaccagagcggtgaaacgaccgtcgccctgaccagcaccaccgcgggtacctataccgtaacggccagcgtcaacggcaacagcatgacgaaggacgtgaccttcataccggataccagtacggcagaggtgaccagcgcaaacctcatcattgacccggacggcgcagttgccagcggcaccgcaacaaacggcgtgatggccaccgtgactgacggtgcaggcaacccggtaccgggcatcagcgtcagtctgggcgtgagcagcggggccatcatcacaccggccaccgtcaccagtgacggtaacggtaaagtcacagcaacggtgaccagcacgacggcgggcacctacacggtaagcgcgcaggcagctggaagcagcaccgtggccacgaaaaccaccacgttcgtggccgacgtcacgggtgccacgattgaactggtcgccagtgacccgcaggcaagttatgtcgtcggcaaccaggtggtctacaccgcaacagcccgggatgccggagggaatgtgattaccggtaccacatttaacgttagtgcctcgggcagtgccagtactcaggctcagattaccggcgtcagtaatggcgtcgcgacgctgtacgtcacggatacaaaatccggaaccgtgaatctgaccgtatccctgcagaatgccggaacgattaatgccagcgacagcgtgacctttattgccgacagcagtacagccagggtcgaggaagggaatctggtagtaacatcggatggggcgctggctgacctgactgatacaaatactatcgttgcaacagtaacagaccagtacggcaatattgtacagggcgtttcagttagcttcacaacttcagctcttgacggaagtggccagctctcatactcaacaaatgggccttcagattcagccggacaagtcacactaactctgcgaagccagtctccaagaaggttttcagcgacccctgtgattgcaggagtgactcaggccccaacagtcgctattttcttcgccggtagattatcaattctgacagcaactcaaaataatgctgcggctgatggcgttgagacgaatgccgtgacggcgcgagtggttttcccaagtcaaaatactggcgtatcaggggttacagtaacattccgggccagcggcggaggggtaatgtccgaggaaacagtggtgacaaattcatcaggctatgccaacgcaactttaaccagtctgacgagcggaacggtgactgtcactgccagtatcgcggcgagaacaccacaggaacttaccgtagatacgacgtttgttgagccataa

SEQ ID NO: 154954 - DNA, 7656 bp, Enterobacter cloacae
gtgacctccaccacggcgggcacctatctggtgaccgcaacggtaaatggcaaggcaacgcagaaagagacgacctttgtggcggatggagcgacggcggaaatcaccgacgcgaacctgaccatcgaaccggataactctccggccaacggcacggcgaagaatggcgtaaccgccatcgtgaccgatgcgcagggcaacctggtaccgggcgcagcggtgagcttcaccgtggagagcggcgcgactatcaccaccgtgaccggcaccaccggggcggacggtaaggcgacggcggaagtgacctccaccacggcgggcacctacctggtgaccgcgaccgtaaacggcaatgcgaccagcagaaacaccacctttattgctgacgctacaacggcggaaatcacggatgcgaacctgaccatcgacccggataactctccggcgaacgggatggacaaaaatggcgtaaccgccatcgtgaccgatgcgcagggcaacctggtaccggatgcggcggtgagctttaccgtggagagcggcgcgaccatcaccaccgtgaccgggaccaccggcgcggacggtaaggcgacggcggaagtgacctccaccacggcaggtacctacaccgtaatggcgaccgtgaacggcaacgcaaccagtaaagagacgacctttatcgctgacgctacaacggcggaaatcaccgatgcgaatctggtgatcgacccggacggtgcagttgctaatggcgttgcgaaaaatggcgctgaagcaactgtaacagacgcaaatgggaatcttgttcctggtgttaaggttgattttagtatctcagaaggtgccgacattcacgttgtacgagctattactgacgaaaacggtaaagcatatgctgagataaccagtctgaaagctggaaccttccttgtttcagctcatgttaatggtaaggcgcagttttctcgtaaaaacactcgctttgttgctgatatgtctacagcgaaaattgaactggttcgcttaggtgataaggagcaatttgttgtaggcagcagcgcgaattacaccgctacagctatggatgctaatggaaatctgattaccgacgctgagtttgagcttgacgtaaagggtagtgaaaacgccagcggggcgattctggttgtcaatgatggggttgctgctttgtttgtgacggacactaaagttggtgacgttgaactcaatgttgttctacagcagaacaacgatgttagagccagcggcagcgtggcgtttatcgctgacaaaggaaccgcaacaattgcagaaaacgatctgacaatacttaaaacgggtgcagttgccagtggcaccgatgaaaatagtgtacaggcccgggttacagatgcttacggcaatatccttactgatatggatgtgacctttggcgttaataaaacggccactctggcgcaaaatgtcatcaagacagatagcgaaggacttgccgttgcacacctgacggataccgcagtggaaactgttacggtcacggccacaatcaatggcaacagtcaggcagttgaagttgaatttgttgtcggtcaggttaatccgtctgagagtactgctacgcttgagccggttcgaattttagccaacggaacagagcaagcgacgatcacagtgaagctggaagacttctttggtcatccagttcccggtaagaatgtgacagttgagatcattgaaagccaaccaatcactatatctgcaaacgtgcaggtaagcgagactgttgatcatgctgatgggtcatattctttggccgtgagtgggaccaaagcaggtactgttcaattcaatattctcgtagacggaaatagcatagacctcgtaacagatcggttaactttggttagtacgggtgaaattgcagaaaacgatatggttattgaccctgataatgcggtagctgatggtgtcgctaaaaatgtggtaacagcagtcgttaaagacttcagtggaacacctgttgcaggtgatgtagttacctttaatgttgaaggcggtgcagtacttacaccggttacaactaccacaggggatgatggtaaagcagtcgctgaaatcacgagtaccaaggcaggttctttcaaagtaactgccacggtaaacggtaagtcaaccagtaaagataccaccttcgtggctgatgcaacgactgctaacctagtgctagctcctgtaaataatgaagctgaatattactatgcaggctataaagctatgtttactgctacggttgttgatggaaatgacaatcttattacagatgctgacttcgaagtctatgcatcaggtacagaaacagtagttgcaactttagagagcgtgagcgcaggcaaaggcacaatctccattagcgatacagctgttggtgatgtcaacctagtagtcaagcttaaggggaacgaacaagtctctgattcaactcaagtcaagtttgttgcagacgttacgtcagctcaaattcttgatgcggatgtatatgttgagaatgacggggctttggcagcatcttacgggagtatagtccttacctttacggtgaaggatagatttggcaatcctgttccacgagctttaggttggcggcatgaggttgaattcaccccagaggggcacagtggtaacgtttcctcaagtgcagcaagcgtggatgatggtacaggagcaactatagctattactgcgaaaagcggcatggctgggcaatatcgagttgcactaactatcgataaaacgaactatatttatcgtaatatttactatgttggtgtaatggctccatttgaagtattcactgataatgcattagctaatggtgttgatgaaaaccgtgtcggattgcatattttccagagtggaaccccaagtgtaattgctaatacaaacgttcaatttgaagcagataataatgcgattttatcgtcacaaaatgtcctgactgattcagagggttatgcatacgtgaccgtaaccagtaaaactgctggtccggttaatattaccgcccgctatgctggtaaccagcagagaacgacaagtgtcaccttcttacaacagactggtgagatagctgaaagtgatttgattgttgaccctgacaatgctgttgctgatggaagggataagaacgttgtaaccgccttcgttaaggatacgagtggccaaccggtagttggagaagaggttacctttgaaacactggatgggccagttctcactcctgtaactaccaccacaggagatgatggcaaagcagtcgctgaaatcaccagtaccaaggcaggttctttcaaagtaactgccacggtaaatggtaagtcaaccagtaaagataccaccttcgtggctgatgcaacgacagctcgtatggttctgacagcggttaatccccttgatagccatcctgcaggctcaaaagctaatttcaccgcatcagtgcaggatgcgaatggcaacgtatttaaagatgctgaaattgaagtgagtgctagtggtaccgaaacaacagaggcagaagttacgagtgtttccggtggtgttgctaacctgtttgtcacagataccaaagtgggtgaagtgtccctgacggttaatcagaaaggaaacagcgaaatcagagcggctgaaacggtcaagttcatcgctgacgttgcctctgcacgtgttcttgaaagtgacttcgacacgcctaaggccaacgcgattgcgaatggagaggacgaggttattattactgctttggtaacagaccagtatggcaacccagtcgacgttgccgctacgcagtctgcagaaaaagcgaaaattgtgtttgtaatggaaggtaatcagtcgccaattattacccagacatccagttatacgtatgaaggtaataagattactcagcgaacccgtcaaaataatttcgcttcgttcccgacatatccagtggtgaatggtgtcgtgcaagatattgaaaagttgaccattaacttcattccagtgttgatttctctcaaaactctaaaggatggagctcaagcaaatggtttgacaccaaatgaaatcgaggtggtggtcaaatatggttcaataaacagtgcctctggcgtgactggcgcagtagttgatcttactgccgataatggtgctgctatagatggcagagtattaactgaggcaaatggaacagcgcatgctggagtgagaagcaccaatccaggtattagtacagtcactgccacatatgttcaaaatggcataactcagcaacttagtgtggaaactaactttacaaatgccgcaactattcttgaaaacgatttggtaatcaatccgaataatgcggtggcggatggtgcagacaaaaatattgtcactgccattgtaaccgatggaaatggttcaccagtagctgatgaagaagttagtttcagtgttgaaaccggaccagtcctgactgttattaatggaacgtcagatgcagaaggtaaagttgttgctgaacttacaagtactgttgctggttcattcaaagttaccgccgttgtgaacggcaatgcggtaaccaaaaatgcaacatttgtggcagatgcttccacggcgttaattgagctgacgcgtactaatgtgcaggaaacctatgttgctggtacccgtattggatatacagcagtagcgaaggatgcacatggaaacaccatcaccgatgcagagttcaacgttaaggctgaaggtgggaccgctgcgtcagcaagtatcactgccactaacaatggtgtggctctattgtcactctacgacacgcgtgcaggtgaaacaaaactaaccgtaacattagctaataatgctgaagttgctgcagatgacacggtcaaatatgtgccggatgagagtagtgcacaaatatctaacctgacggtagttaaggattatgcattcgcaaactcttctgatgaggatgttattactttcaatgccacagataaatatcaaaatttattgccgggagtggatacttcggcgtttacagtcagtgtagcccggtatggtgcatcgtgggtattgtcacagcaagaagacggttccttcgaggtcaaaatcaaaggaagtagtgttgctatgcacaccgtggttattaaccatgattcatggagtagtgtccagaaatcagtttggtttaaacccgtagtttctgcggaagtaatggttaacaacgccagcgctaatggcttgtcagaaaacgttgtccgaactagattttatgctgttgcgcgcgatggtagtgtcgagggtgttgctaatgctagatttgcgtttaaggccgacaatggggcaaatctttcccgcaccgccggatacactgattcggatggctatgctactaccacagtcactaatacaatccctggaacaactattgtaaaagccatttctgatgagtcgctctatggctatacgaccgcagaggttgaagttaactttgaacctgttgttgagttgaaggacggaaatgttgttatcgatcccgataatgcaccggcagatggcgtaagtaaaaacgttgtcactgcgactgtcaccaatcagagcggaagtcctgtttcaggtgctgaagttagtttcaaggtggatgctggaccagagcttttagtggtaaaaggaaccactggcgctgatggaaaagctgttgcggaactcacaagtctcgagaaaggtgtcttcaatgtcacggttaaagttaatgacagcgaagtgactaaaccggttacctttatcagcgatgcagtcattaaggatgaaaacatggtggttgatcctgatggggcaatttctaatgcactgaatcgaaatcgagtgacggcaattgttacggacagtgcgggtaatccgctatcaggtgaaactgttgtgtttacggttgaggaagaaccgaggctatatctgtacccgattatcaccacgaccggagatgatgggaaagcagtcgcagagttggccagcggtaaattcggtactttcaatgtcactgcaacagtaaatggtaaaagtacgaccaaaccgacaaccttcgtacaatggggtattggggtggtagaggctaatatcattaaaaacaatgctctggcagatgaagaagatacaaacgaaatcgaggctaaagtagaggacggtaattttaatccggtgtcaggagctaaagttaccttctgggtggaggggaactcgaacgcgcggccaattacatttgtagaaaacgaagtcctgacggatgaaaatggttatgcaagaacgaagattaaagctaatcgccctggtagttatcagatagttgctaatgtatacgattatagttccattggtgatagcgcatggtttaccttcgttacgagtggtctgaataccgataagtcagcgcttaaagtgacgcctccgatcattaaggctaacaataatgaatctgcaacaattgaactgaaggtgagagataaatttgacacatcaatccctggtcaggatgtctcatttgtcatagagtacgaagacggcactttgcctgccgaaggagccattactctgagtgctgttactgagggagacccggtaattcttgatgagtcgggttattacacggcgactctgaagggcgcaactccagggcgttataaaatcactccggttgtggaaggcgatcgcgttgggttgagtgaggtgattgaacttacctcaacagcacaaattctggaaagcggactaacgcttgaactggatggttcggtggctgatggcaacagtcgcgaccgtatcaatgcaatcgttactgactttgccggcaaacctgttgccggtcagcaagttactttcactattgcagacggccctgtcttaacgccagttattagcttaactgccgaagacggtaaggctacggcagatattacttcggtgaaagagggcgtctatcgcgtaactgcggaggttaacggtacgtcagcaagtaaggacgtaacttttgttcaactgaaagatattgccgtaaacggttataacttcgcattagacgcagacttccctaaaacaggctttactggtgctcagttcacgatagaactcacccacggtaatgcagccgactatgaatggacttcgaatgcatcatgggtttctgttactgatggcatagtgacttttagtggtgaagggaaaaaggaacttgtcacaattaatgttcgtgcaaaggaagggagagaaggagagatgacttaccgctttgaacttggcacctggtttaagaatcatggcttaagcggtatgtcccaggagacagcaaatgcaacttgcaatggtgatgggatgaaactgccctcacgcctagaactgactaacgtgactagcggacgaggtgagcgaggtattatcggtgtattttatggtgagtggggtagcacagccgcttacacgtcctctggatttgctaatagcgattactggactgccgaatatgctggagtgaatgaaggaaaagattattatcattatgtatatatggggtttggttcagtaagtgcaactgctgctgttaattcattatatgcagtatgtgtaaaatcactttaa

SEQ ID NO: 154955 - DNA, 2043 bp, Enterobacter cloacae
atgagcaggcgaaatgtaacacttggctataaatatgactttaaaaaaagtggctcttttggtgttttccagtcaaacggttctattcctatcgaatatttgatgacttcatttagttatgacgaacttttgagcctttcgtatgctaaagatgtaggaacagaacttaattttgattacttaattcaacgtgatatagatgttgaacgtgcaaccaaagaaattagtcaatatttggctgctcagaaaggaaatgtacaaaaagagattgtttttttgcctcctatacttgcggcaattgtttctgttgatagaacagataatttagaaaattattatcctacctgcgttgcatctaaacctagtgatgaatttggtgaatatatactccgagagtgggaaaatatttttcaaatcagaaattatcctgccaatattggcaggaaatgcactgtagaaattaatggtgtcgaggaagatattaatgttgatattaaccaggctatgttgttagcaaacatcactcctaaaactgtagcaggcgctaggttggtcgttatcgatggccagcatcgattatatgctctcaatgctttgaggaaatgcgagcctaatccccttattaatattaatattcctgtatgcattgttttcccacctacttcatctgaaaataatgcttcagatggtattacaccaacaatccctgaagttttaaggagtttatttgtcgatgtgaactctaaagtggaacgagtgagcggtcatttcttaactctactttctgaccaaacacttagttctattatttgtcgagagatgtgtaaaaagataattgattcgctccctaattatggcttgggtttaattgaatggaatataaaaaaccacaaggaatcaatggaaattgctagagagcacacgattaccagtattggtgttataaataatgcacttgaagaagtttttaaaactaaaaatggtgttaaaatagtttctgaaataatagatttaaaatctcatcgtaatgactttgattttggtgaggatgaatacggtgataaaaatcctctgcctgaatactttccttggagagattttttatctaggcataaagaaagtcttacacaattagttaataaaacaattgtgcctgatctctattatatcttcttcgaaacaagttttcaaaaaaaatatatcaatgaatattgttcatatcttattaagtctaaatcaaaggctcagaatgatgatagagatggaggagatgtaatcgacgaagctattgattatgtagtttataatagcccattattaaaaccagctaaagcaaaagcaatggagttaattgctgagttaaaagaatatatcgtaactattccaactttccttcggaccgttatatttcagaaggcaattatagatgcttgggttaatcttatttctaagatgatagcgtttggctttgaaaagagtaaagcaaaatatataattaggtgctatatcgaatctgcttttgatgaaaaaaatagtatttttgacccaagaaataccttattgcaagatactatcttaaatggaaatactattaaagttactaagcagtcaaaaaaccagatagtcagattattgttatctcaaggtattttatcttctacgatttctaatattaataaaatagacgcgcttaataatgaggaagaggcatttcttaaagagcttgcacgttcagagctttctacttatatagaaacaatgatttcagataaacggaaaagctttgaaagaggatatttgaccagcaatagattaacaccattcgaaaaggacaagttgactaacttagaatctaataagcaaaaagaactagcaagtattgaagcaaaactacttgaaagtgaaacagaatttgataaggctgtgaatgaatatattagcaatgatttggaatcatcgatttctgaaataaaagaaatactaaacgtaaaggttttcgattacaaaccagcaattgatgatattgatgatgagattatgtaa

SEQ ID NO: 154956 - DNA, 192 bp, Enterobacter cloacae
atgtcatggaataagcatgaagctgtgtcatacgcccgtagccacgcactaacccatactggacactatttcgctcgcacaatcgccgccgccattcgagccggagggcttaaaatcgaaggggcaaacgctaaggatttctggcgttctcttgaaaagcagggttcacaaaagtctatggcactcccatag

SEQ ID NO: 154957 - DNA, 507 bp, Enterobacter cloacae
atggcacaagtaagaaaaaataaggttattgatttagaagataacggattaatagatgagtttacgaaagaacgtattaagaatcttcgtaaagaacacgatattaaagttacaactattatacaagaagacaataaggtttctttgaaaagtcagtttgtaataacgtttttagataattttgatgcattgattaatttgggtttaaacaatacagaaatgaaagtaatctcatatattttgaaaaaaatggaatttggaaatctcttgaatttaaatcaagtatcaatttgtaaagcacttgatttgaaaaaatctaatgtctcaaagattttcacaaatctatacaagaaaaaagtattagttaaagattcagatggtaacacatacgtaaatgcgaacttgttcgcaaaaggtttaaaacataaaatgaattcagatagcgaaaatggtaagaatctaatcaaatcgcaagcagaatctgatatatttacaaagtcattttaa

SEQ ID NO: 154958 - DNA, 141 bp, Enterobacter cloacae
atggtagcattaattttcgagagtgaagtagaaagaaaaatcagagaaggtgaaattagtttagaagaggttttaaagatgaatgatgaagatcttttgcgtctttatcaatatcacaatgatgaagatttttacaattaa

SEQ ID NO: 154959 - DNA, 315 bp, Enterobacter cloacae
atgtacaattttgaatttaacgctaatattcatatatcatacaacaatatcagagattttattattcataataaaatgactgaacttaaagattttgctgataatttgaatattcaaaaggacttgatagattttgtttgtatgcgcgtttataaagataatgtttcttcgcttgattctgaactaatagatcagaaagaaggtaatacagtaagttacgagcttgaagtaatagcaacaaaagttattgctgaattaacaaatagaacatacgaagaagtttatgaagagtacgaaaaacattgtgatagttaa

SEQ ID NO: 154960 - DNA, 1137 bp, Enterobacter cloacae
atgacagacagttcaacgaaaaactacgcgattcttcgcgtagggaaaataaaaatgggaaatgtgaacgcagtagcatttcacaatctaagactaagagaaacgttcaacgcagacccaagcaaaaaggaccaaaataaaattttggttggtagcaaagatttgaagggggatttaaaaaatcatcttgctaaaaacggtatagagaaatttagaaaagacgctgtcgtattagcagaagttttattaactgcgaccccagagtttttcaaaacagccactaaaatggaaattgaagattgggaaagagctaacgttaatttcttaaaagaaaaatatggtgaagatcttcttcaagctgttattcattatgacgaaacaactcctcatgttcatgcaatgatttgtccgatcgtgcgcgacacgaacggccccaggctttgcatgaaagaccataagcatttatccggaaaacataatctaacacgcttacaaagcgcgtatgcgcgagatatggatcattttggattagagagaggtcaaagaaaaagtaacgttcatcatcaagatataaaatctttttacggaattttagatagctcgaaaaacgaaagaaaagaagatattaatctcaatagaaaatacaaattcgcatatggtaaatatgaagaaaaaaattggtttggtaagaataacggcactatctcgataaccaatgctgacaagctcaacagaagcatgttagctactcacaatcgcaatctaaaacttgaagtgttcgcaccgcaagaagctcgtagatccgctctggctacgggtttgaaggctcaaaacaacaggatgcgtgaactaatgcgtactaacagcaagctacaagcacagaacgagaggatgcttgcagcgcaaacgttagttaactcgcttgaagatcttggtctcatgccccaagtgaaaaacatacttggtcagagcgtgcgcgaacgcgctaaaatcgacaacgaagcgaagcaagcgtcagcagctcgcatcagggaaaacaaaagtctttttggaattgaagctataactatgagtcctgaaaaagacgataaggaaaaaacgtatacagcaccgaagccaaaattcaggccaaaataa

SEQ ID NO: 154961 - DNA, 180 bp, Enterobacter cloacae
atgaaaaaagcaacagcattagaatgtgagatattaaacaacttacaaaaaacattattgaaaatttcgaaaaagaaaacaacagaagaaagagttaacgatctaggagacattaggcttgttctaaaatattcattagaacaaattgaaaaaattattttattggagatttcagactaa

SEQ ID NO: 154962 - DNA, 474 bp, Enterobacter cloacae
atgaaattatcccagttagcaatagacagattaaataaaattaattggtttgttaatctaggtgtggcgacgacactctctggggttatccaggctcagtcccttagcttatttataaaaggcttgaaaagcgataaatgggaaagtgccaccctggaggctgtaaatgaaataacgggttatcttgcaaaaaaacacactaacaaatatcaatactggaactctttggtcaaagatgctaagaaagttgtggagaatgatattatcccaaaaatcaccttccctgagtctgagaaaggtacagtgactgagaacttaaaatgggaccttgtgaatttcttgcttgaagatgcgtatagttctctactacaagagccattcttttttgacggattaattagtgttcatgaagctgggcatatgccctgtggatgttcaggtacttggccagcgggaaaactggttatctattga

SEQ ID NO: 154963 - DNA, 291 bp, Enterobacter cloacae
gtggtggagctcacctccgccgtcgccttgccgtccgccccggtggtcccggtcacggtggtgatggtcgccccatccgccacggagaaggttaccactgcatccggtaccacgttgccagtagcgtctgtcacgactgccgtgacgccatttttcgccgtcccgttcgccggagagttatccggttcgatggtcaggttcgcgtcggtgatctctgcggtcgagccatccgccacaaaggtggtgtttttgctggtcgccttgccgtttacggtcgcggttaccaggtag

SEQ ID NO: 154964 - DNA, 291 bp, Enterobacter cloacae
atggtggaggtcacttctgccgtcgccttaccgtccgcgccggtggtgccggtcacggtggtgagggtcgcgccgctctccacggtgaagctcaccgccgcacccggtaccacgttgccagtagcatcggtgacgactgcggttacgccatttttgtccatcccgttcgccggagagttatccgggtcgatggtcaggttcgcatccgtgatttccgccgtcgctccatccgccacaaaggtggtgtttttgctggtcgccttgccgtttacggtcgcggttaccaggtag

SEQ ID NO: 154965 - DNA, 291 bp, Enterobacter cloacae
gtggtggagctcacctccgccgtggcattaccgtccgccccggtggtgccggtcacggtggtgatggtcgcaccatccgccacggtgaagctcaccgcggcgcccggaaccacgttgccagtagcatcagtcaccgttgcggtcacgccatttttcgcaacgccgttggccggggagttatccggctcaatcgtcaggttcgcgtcggtgatttccgccgtggtgccgtccgccacgaaggtggtgtttttgctggtcgccttgccgtttacggtcgcggtgaccagatag

SEQ ID NO: 154966 - DNA, 267 bp, Enterobacter cloacae
atggcagcggccaccgccaaagggaaagtggcccttaaaatccatctgccagaggcgattcggcgcgtcgtgttcgaaccgtcccgtggcgggaatgcccggtgttgcgcccggcagcaggccgtgacgggccatcaggctatggacggtgctgaaggcgggcatacggtgcccctggtcttcgagccagcgcttaatcttgcgtgcgccccagcgttgatgacggtcatgggccatgcgcagcagggcggtgatgtcgtcagatga

SEQ ID NO: 154967 - DNA, 498 bp, Enterobacter cloacae
atggtctgccagatggaactgaccagccatctgttgacgtcgatgacggacgccatgcgctatcccggaggagaaatggcagacctgtacagccatcgctgggaaatagagctggggtacagggagataaaacaaacgatgcaactgagcaggctgacgctgaggagtaaaaagccggagcttgtggagcaggagttatggggcgtgttactggcgtataatctggtgcgatatcagatgattaaaatggcgggccatctgaaaggatactggccgaatcagctgagcttctcagaatcatgcggcatggtcatgagaatgctgatgacgctgcagggcgcttcaccagggcgtatcccggagctgatgcgtgatcttgaaagcatggcgcaactggtaaagttgccgacaagaagggaaagggccttcccgagggtggtaaaggaaaggccctggagataccccacagccccgaaaaaaagccagtcagttgcttaa

SEQ ID NO: 154968 - DNA, 291 bp, Enterobacter cloacae; identical to SEQ ID NO: 154965

SEQ ID NO: 154969 - DNA, 531 bp, Enterobacter cloacae
atgttgttattgctaaacccttccatcgttgaagacttactccttttatcaaataatgctgcttcgagattagttaatttttggaatacactttcaactgctggtgcggacgatgaaagcacctcagagagactgcaaatttacaaggcaaacattgattggttgatgaatcatgcgaatgccttgttgtttggcaatggccgctttggagactatgaaattgatataattaatcagtatggtttaagaatgggcgaattccataatattcattttgaaatgataacaatttatggaataatcttttacatgctgtttttttcttattatacatttttgctttggcggtgcattaagctgagacatatcaaaccagctgttagacctctaattacctcagctgttttatatcctattttaatttcatttgggcctagtagttctttgaaatatccgtttctttttattattgtactattgatggctatcgggataaggacttatgaaaaaaatactaaagtgcatatttaa

SEQ ID NO: 154970 - DNA, 1101 bp, Enterobacter cloacae
atgacagttagtccccctcagccgataatgagtgccaataacccgacatggcccagttcatgccccttgtcaaaatatgaagccatcaaagaaaattatattaataaaatgtatggcttaagcactgctgatatacgatttgaagtgcttcgttatttgttgtcactaaaagaacttgagcgattactgacgcctgagatgcgacgaacaaccagtccgttaaaagaaacaggtggatgggaggatatgttcaagataaagcgtggactgttcagagctccggatgtcgtaaaactgagagatataacccacacagggattagtgcattccagcagggaaatatagatgatattattgagattaaatttaatgaaacaaaggatgctttaagccatgaacaagaaactgcatatattgttattgcaggagatcctgggaaactgcattttttagaaagccatacctgccagattgacgaccgacgtaaacggcgctggttgcgggaagcgaaaaaagaaccactctatgtaccactgtctttgggaatggaaaaacgtcaacaacgggtacgccttgaagtggaggaatatcagcatctgataggggaaattgatcgcgagcttgaaaaagtcaacgttcaactccgcccggtattagccggggagttatgtgaacgtgttgaacccaaatacgatacgccctataaactggaagctccgatgtcttatgaggcaaagcggcgaatggaacgcgcacgggctcaggtggaaatgtcgctggccgggccgatgtggggtattggtgctgtgggggtgacacttgcggcaggtggaatggtgatgcccgctgtaccggtcgtcgccggggaagttgccgccggagcatcctcatcaggttcgttaagcgtgggggcaaatgttattgagttttctgcaatcagcaaaactgtggctcagtctacgaccgcagcaggttcagtcattgcttttgacctggcggcaaaaggtacaccgggttatctgaacagcacgatggtgactaaaagttttctgagcgacccgacgagacaaagacaagaatatatttactgggatgactga

SEQ ID NO: 154971 - DNA, 852 bp, Enterobacter cloacae
atgcggcgtaaatctattatgaataaatttatattagttctgacattggtgttggcttcattttttttaaatgctaaaactgttcctgtcgtgacggatatattatcaccgaataattctacgtcttgggtgagttatctgatctccgagcctattattcctggaggagaagatgtcactaaggattcaattgatgttatttttaaagggaacaacattgttattgataacactaatgtctctatcggcaatatttgcaaatatgaatacagtaaggaaagtatatctcctctggaatactggcatagtgaaaaaacagctgatttatataaaaagttcctttctgcttataacattaagctaggaggtaaattaaacttaattactccgataaatccttctgttaaatgtgattatccgttttcttattttattgaggttgatggttcattagtttttattcttaagaatagagcaattatttattctcacaataataaaaatgatgatgttcccaattctgtatgtatacataaagaacaatcactggagcaaatatttgaagatggtgatattgaagagtgtttttataaaaataaaaatattttgagttcttatcaaaaatatagggatagtttaactaatgataacaaaaaatatctgcggaaaaatatagagttaaataaaaatttctccatgaaatgtgataacggatgtattaccgttatttataaatgggatgggccagatcatcttaccatttcgcagcagtttgatggtggtgaaacagagatttccttcagtaaagaagttcagggttgtcgagtcgtgactaagtcgcttcccgattaa

SEQ ID NO: 154972 - DNA, 228 bp, Enterobacter cloacae
atgaatgacgtctcacaccgcgaatcgttcgcgttcagcgcccgggtactgggcgcgctgttttatttcgctccagacagcgagcagaccgcgccgctggtgagtgccctgaccgcaggtgactgggttcaggactggccgctggcggaggaaaatctgctgcctgtcgccagtatgtttaagaccccatcggatgaagcgaaccataatccggaagcagggcgttag

SEQ ID NO: 154973 - DNA, 150 bp, Enterobacter cloacae; identical to SEQ ID NO: 132091

SEQ ID NO: 154974 - DNA, 126 bp, Enterobacter cloacae
atgctgcactacatcatgaatggttcgtccttcagttacagctgcatgatgaacaatacagttttacgggaggtatgtttcaaattcatgccaaagcatttcattcagcataaaccctggaattaa

SEQ ID NO: 154975 - DNA, 999 bp, Enterobacter cloacae
atgaaaaagataaacgctgaaatgaaaccttactgcgtcgggcgctatatgctcgacctgccatcctcctttacggcttataatgactctgcaccgctggataacaatatctgggcggcggtgatttcccggcctgaggatacatataaaacctatctggcgacaaagaaaatgtaccacccaagttttgtgcagttaatcgcattacgtgaaaagacgctacaaaacagtaaaaccatagacgcccaggatatgccctttttaaagaaagtctggccgttacccactggtatggaaggtgttatttttgaacggaatgaaaacggaggtgctgcggacgcaatgcgcattctggaaggatatctctataccaatggtgtggttatcaagtttcagaagcagacggtcaatgattcagcttcacgttatgaaaggcaacgaaatggcgatccaattcaaaacaatgtcgcaagtgatgtcagccagatgcagtcgctgatggttaggattagcggcagggataatgacgtcattccgacgaagcctggctcctgtatcacccatgcgtttattgccaccgacccaacttcccaggacagggaagatatttctgttggttttgaaagtaaaacactggaacatatcagaattattctttccaccgataactttacccgtgaaaaggacacggtgctggagagatctggtgagatagagagtaacttatatcgtggccatgtggaaagaaaaggggccttcaatgtgaacggattgcaggcccaggagtttctagcaacgggtttacaggcatctcaggacgagccgcgttacagctttgatatgttcatcaatgaaatgacagccagctacaagacccccaattttattctgactctggagaatgattccatgccgccaacctcctacagcaaggaagaaattattgccttctgggacacgatcagccgtagtgtacgcgtgcgccccggcgcattttaa

SEQ ID NO: 154976 - DNA, 624 bp, Enterobacter cloacae
atgaccaagccatatgttcgtttagataaaaacgacgctgccgtccttatggtagaccatcaaaccggactactgtccttagtacgcgacattgacccggacaagttcaaaaataacgttcttgcacttggtgatctggcgaagtattttggtcttccaacaattcttactaccagtttcgaaaatggtcctaacggcccattagtccctgaacttaaagaacaattccctgatgctccatatattgccagacctggcaatatcaacgcatgggataacgaagatttcgttaaagcggttaaagccactggcaagaaacaattaatcatcgcaggtgtagtaactgaagtatgcgttgccttccctgcgctttctgcgatcgaagaaggattcgatgtatttgttgttaccgatgcgtcgggtactttcaatcctataactcgagatgcagcatgggatcgtatgtctaacgctggcgtacagttaatgtcatggtttggagttgcatgtgaattgcatcgtgactggcgcaatgatatcgaaggtctaggtacgctgttctctaatcatatccccgactaccgcaaccttatgactagctttaatttattaaattctaagtaa

SEQ ID NO: 154977 - DNA, 312 bp, Enterobacter cloacae
atggagggcgtttatcgtgtcatgggcagctgcggccttagccttgaagggtggacagtcgagatcccccaggatatcaacggcaactttctgtgtttcgttgatattacgaccgaagatgatggtgtgctgactgtttcagtctttcgtcgccgttttgatgtggaaaccgcgatgattactgccggtgacccgatggatattcctggtggtcgctggatagatctccgactgcaaatgcccgccgattctttgtacaacacaaaaacacgcgcagacgaaccaccgttggaacaccagagcaatgaataa

SEQ ID NO: 154978 - DNA, 150 bp, Enterobacter cloacae
atgtccgacatctacatcatcaaactgactacgaacgacgcggcgagtacacgggcaagatgtcacggcgtcagcctgagctggttaatggatttgtgccgctggcgacggaaacgggcgagtggctttacttcgctcctggcgacgtga

SEQ ID NO: 154979 - DNA, 276 bp, Enterobacter cloacae
atgtcaatattaattccgctttttaaacctatccatactactgataatgccggaagaaaagttctaatccaggctattaacacctcttcgactgactgcattcatggcgtcaccatcggccaaaacggaagtgaaaaccccaccaattgggacttaaatggcactgcgagagataggccaagtgattgcaatattgatttaagaaaagaagaattaatgtatctgaaagagacggctttaaagatgcttccggatgaaattaagaagttcatctag

SEQ ID NO: 154980 - DNA, 288 bp, Enterobacter cloacae
atgaatggaaaagtagttccgtgcccgatttgtcaaaatgaagctattgtttcgaagcatcagaccctttccccaactctcaagacctcagtaccctgttatatctatacgtgtgaaaaggacggatggttcaaactttcagagtctgtacactcgcttttaattgataatccagcaccaagggtcattaaccgtttaaccaaaatcgttactgataattacttcccggcaagtttgatccctgcggaagcagtgactccactgagacttatcgaaaatctcgaataa

SEQ ID NO: 154981 - DNA, 999 bp, Enterobacter cloacae
atgatttttgaaatgtttctacataaaattgaacacttcactaatgcgagagcagagattgaaagttttgggaaatatatctatattcaggatgaaccggacctttttcccgtttgttttaaaaaagaaaatggaaagcatgcagaattaagtcgttggcaaaattgtttccctaaagctacgttacagcgtgcattgaataagttagacttaagtgatggtgagaaatatgcatttgaagttctcctttctcgattaggttatctgtttcaaatagataaccgacagcgtatagataaagatatctttatattgttttatgtatatcagctcgtttctttaaaaaataacaagaaagattactcaataaaagcaaaaaactactttttaaaatttttgtgttttgaaatgggtatggatgatgactcatataaattgctttgcattactaatgatgggttgtgtataaatactactcagcatggtgctgtatcagtattgtcattgcttgagaaattttatgcacaatttgaaaacaagaaaaaccttgaagacattaagtctataaagcattatcaatcatcggtattgaatttcctatttactcacgatgacagcaattaccatctgttttttaatgatgcgaattgctatcttagcgatcctgaaaattttattaatacatatataaaatccaaaaagacaatatataaagctttggagcagtgttttgacaagtatcaatctacaaagaatctactaatatcaaatttcatcctaatgaattactcttattacattgttagaggtaatttggcagatcttaaaactttaaaaaaatatatttcttcagaagtatttggaaaaataatttctgctatattatacagaggtttttttgtggatgaagaaaaagtactcaaggtagttggtgatgaatataaatctggacttgaaagtgaagataggaagttatttaatttaatatattcgatttaa

SEQ ID NO: 154982 - DNA, 315 bp, Enterobacter cloacae
atgaaagtgactgatgagactttgttgaattctgggtttacaccatcggacttgcagaagatgaagaacaacgttgaaagctacggtggaacgttggggaatgccatcaaggatctggccacgcgttttgttctcactgtgtgggttgtatctggttgccttgctgtattcatttttctgatgatattcgcatctgaagaaagttttttttctggtggtattggcctttcttgtggtatcgcggttgcaattattatccaaccacctttgcttgcctataaatcgtggcgattctgtagggggagtgaaaaataa

SEQ ID NO: 154983 - DNA, 786 bp, Enterobacter cloacae
gtgcttgagaaaattaacgaacaaaggattgagcctcataaggttacgaaacccatacaacttcttgctgcatggatggtgggtttagtggtgactaacagcagttttttgatcgcagcctcccagatgacagatcagagttgggaaaagggatttttagtggttgcggcagtaatcaatgttccgctttttctttttgcattatttttacttcaaacgcgttttagggctgagttgcaagaagatacttactattctgaatatttaagtaagaaaacttcaactcctattaaactggataaaaatactgagcaggatgcaagaatagaaagggttgagaggcttgtttcgcagctatctgcacaaaaaatagaacaagataacgtttttgcagaaggtgagcttgattggactgaatggcctgttagtctaaatcgctatcatcctaattttaaagaaattaaagcagcactcaaggctgccaaaataccaatcacatcctatttcgggatgaaggaaaaactaccaagcagatgggttatttcacttagccgatttttacccattaaccacaaaactgccattctcagggaactcatttcctttaagtttgatgggttccagctatgggagccaatgagggaagctgaagaaaacgaggacgtttatatcggtagttatggtagctctcccgtagcgccaataaacaatgacctcagagaacttctcatgcaggatgaaattgaggcgtctgaactagactttctttatgaaattaactcatga

SEQ ID NO: 154984 - DNA, 726 bp, Enterobacter cloacae
gtgttttttattgattcagatgacttgatatctacgaatgctctgtctgaggtggattcatgcatctcaaaacatatgtcagatatagtttatttcgactataaaaaatttcatgcagaaaaagatgaacctcttcctcagtttgaattatctgtgccgtctaattcaatccgtaaaatctctaatgttattttaactaagaagcctaactttgcatgggcgagagtagcaaagagagagatgtacattaaaaatcgctttccggtcggatttatctacgaagacgttctcacgtcgcctttattatcagctagagccagagcggttagctacattgaacatgagttatatggttataggaaaagatctaattcaattacaaccggatcagctgaaaagcaatttagattgtttgaaacgttaagattattgaaagaaaatgttattcgagaaaacattgacattaaattctacactactgcttttgtaaatctcatccagtcttgcttagtgagtttagtgcggattgatgatcgtaaaatacgccaaaagtatatagatttaatattggttgaatataacaagctaagctatcgagatatttttaattgttggtcatatagaaaatacaaaatattatcattattatcaaaaaataaaatctctcttttcttattaagtgctgctctgaggcagattgtagttttctcagataaacaaaggtaa

SEQ ID NO: 154985 - DNA, 930 bp, Enterobacter cloacae
atggatcgtttcgatgcgatgcgcgcctttgctcgcgtggtagaggcaggtagcttcacaaaggctgcccaaacgcttcatatgagcaaaaccacggtgacgcagcttattcagcagctggaagcgcgcctgcgcgtcagattgctccatcgcaccacccgcaagctcagcgtcactccagatggcgcggtctactacgaacgcgtcatccgcctgctggcggacatggaagatgctgaaaacagcctgtccagtgcggcaattacgcccaggggacggctacgggtggatgtgcccagtccgctggcccgcctcatcctggtgccggcgctaccggctttccatgcacgctaccctgacattcagttcgacatgggcgtgagcgaccgggtggtggacctgattggcgacaacgtggattgcgtgctacgcggcggcgagatcaccgatcagtccctgattgcacgccatgtcggagatttgcaaatcggcgtctacgccgcccccagttatctggaacgccttggccccccttcgcacccgcgagaactggaaaacaccgaccatcgcagagtagggttcttgtcctcacgcaccggtaagattgatcctctggtactgcgcagtgagagtgaacgtattgaaatcacgggcagctatgtactggccgtggatgatggcaatgcttacctcgaagccgggttagcgggattaggcgtgatcgcactgccagtctatatggcggcagcgcatcaggctcgtggtgccctgattccgctttttgaacactggcgtattgctccaatgcccctgtacctggcgtttccgccgaaccgccatgtcaacgccagactgcgcgtttttatagactggatcgttgaattgatacagcagcatgtccccaacgccaacatagccgtaaagctatag

SEQ ID NO: 154986 - DNA, 345 bp, Enterobacter cloacae
atgcaaattcataaaaccatcaagccgatttttgtctgtaaatttaagtgtgttgggccagaatgcttaatgtcatgttgtcgtggctggacaatcgctatcgacaagaaaacccatcagaaatacgttctctccccgcacacagagattgccgccattgccaaaaagaaccttatccttcagcgaaagggtaagaatagctactcaagagtgaagttaaacgaaaaaggggactgtccttttatcgatgaaaacaagctctgcatggtccaccgcgatctgggggaagaggcgctttcgcatacctgcagcacttacccccggagttcaacgctaccaggatga

SEQ ID NO: 154987 - DNA, 255 bp, Enterobacter cloacae
atgggagtaaggaaaatagaaaaactaattataataaagtgcgattttcacgaagagattaaactaaatcaaatttttaaaagccagataacgacatcgactaggaatacattaagtcgtcataaactaaacgtccgcaatttgctcatggagccatttacccaccccaatcgcaaaagtaacctcaacacaaccctcaaaaacctcaaaggggcccacccagcccctttctcacaccaccctctaagcagctaa

SEQ ID NO: 154988 - DNA, 4278 bp, Enterobacter cloacae
atgaatctggacatcatttcgttggaccgatcctttacagcagtccctaaggatagccttggtaatgaagatgaagcttccacatctttgggggcctcatcgggatcaataaaatggtcccaacttgaggatgagtatcgggttgtgattcttgcagctgcaggggctggcaagaccgttgaaatgcgctctcgcgctgagatcatcaagcaaagtggcagattagctttttttattcgcatagaagatttgagtgagtcggattttgcctggggtttggaagttggctctcctgaagagtttgaggattggctagtttcgactaaagaagcttggttctttctggattccgtggatgaggctcgtctggtagcaccaaatgctttcgaaaaggcggtgaaacgatttgcatacaaaataagcaaatctcgtcacagagcgcatatttatatttctggaaggccttatgcctggagctacgcaaccgattatgaaatggttgaacgttatttaccattttcaactcaaaacgctgctaacagtttcagaaaagataattctctaaacatctatagccttaactctttaaatttagatgatattcgcttttatgctgctcagagacaagttgagaacgcgactgaatttgttgatggaattgaacgagcgaatctacaagcaatggcatctcgcccgtttgacctcgattttctgatttcaacatggagtaaagaacgaaaattcggttcgcgcttcgaactgtttgaacgaaatgttgcaacacggcttgatgaaatcgatccttcaaggcgtcaggcaaggccacttaaggctacaaaagcgcttgagggtgccgctcttcttgctggtgccgtaactttcacaggaaaaagtggcattgagatttatgataagcgaactgatcgcaacggtgtgaatgctgaggttgttttagctgagtgggagcctccccaattgtgggctcttctggaaagaggtatttttagtgatgcgatatacaatatggttggttttcgccaccgagaaattcgggattatctttcagcgaaatggcttgattcattattaaaaaaagggcattccagaagaatcgttgaatccctcatatttcgcgatatgtatggtgtacaggttatcactccgaggctcagtacattagttccttggttgattttaatggacgataaaataagggataaagcattgattatccggccagaaatagcactcaatggcggggatgtttctcatttaccattgtctgtacgagttagtatgcttaaaagcattgtgagccggattgcaaatgatacagacgaaagatatgttaggtataatgatgctattggaatgatagccaaagctgatttagttgaggaaatatcaactctaatcagagaatattattcaaacgatgatgctgttttctttttaactagattgatttggcaaattaataaacctatttgctttgaagaattaatgtctgtcgcaattgatgaaaaaagaaatatttactctcgtataggagcagttagagcgttagtgacaacggcaacagatgatgttaaagcattgctatggaaaaatctgaatgagcaacagatcatttttccccgacgtattttggctgaactcgtcaatggctcaacgtttgacattcgcaatgtaaactatttattacattccctaatgaagttggagtcttataggccattcgagacgacaggattggtcgaaggaataaaggtcttcatagataaaatatcttgcattcaaccctctaaagatgaagaagcattcaccgtattattggatggattttacgcattaataaaacaacctccttattgcgaacaaccagatatcgggatatctgaggggaatctgtggctgttatcttcaaccatggagcttattgaaaaaatggtgctgttacgctcggatacttgcttagagacaaaagtgttagatttacttctggcttttgttcaagtcagagattggcatggcgatcatattcgggaatataaaggtgcattggctgaactagtacccgcgtggccagagttaaacgatgctcttttctggcgtgcagttgagaacagacggaccgaagcgcaattcaaaaaccgcagattaattgatgactggcatgtccaatggccagggcatttctttaagtttgatgtttcaagttttgagcgagttttgaactatgttagccaaaaagaattacttgatgatcggttggttgcattgtctttggctctgcgcatttatactcagtcgaataataatgaacgatatttatccaaaattaatgaagtatccgcacaacatgatgagttagtacagaaagttgaattatatttcaatcctccttttgatccagaaaaagatgaattaaaccggcaacaggctgatttaaagcgacaaggcgaggaaaaacgaacaaagaacgagcgtaagcgcattgagtggattaagcatgttagagccaatcctaaggatataaaaagtccacctggactggcgataggtgagatcagcaatggacaatattggctatatcaagaaataaataagaataagcatgatcatcttgctaaaaatcatgactggcatgatcttattgaaacatttggtatggacgttgcctgtgcgtttcgtgatgcagccatggcatattggcggatgtaccgccctgaagatgaaagcactacctcgataccatttaggcttgtttttggattgcttgggctggagatcgaatctagtgagaatcaagattttcctagctatcttcaactggatgaagttcaacatgcccttttgtatttaacaaaagaaatgaatggctttcctagctggctggaaaagatgtatcaagcttatcctgaaaccgtattagacgcactttggaaagaaatggagcaggagtttgataatgagagtcaaccaaataaagtcaatcaacttttacatgatattgtataccgcgccccatggagtcatatagggctggcaccacggatttatcactggctggagaaaaacgagccgcaattaaatcaaaacttgaggaattgtatccgcactttggttaatggtggtgtcagttttgcagaacttgcaaaattggcgagcgttaaaattggtgatcctgtggtggagaataatctcccaatatggtttgccttatatgttgataccttaccggatgaggccataccaaagctaaataaatggcttgagcaattaccaaaagataatgcaagtgtttttgcacaacactttgtgacgacactcaccgggaaattccgtcatggtgaagagagaacttcttttactggtggtgttcgtaacccttcgagcttaaaaacattatttttgattatgacaagatacatcagacctgaagacgatttggatcgtacgactgtaacctcctacacaccaacgctcagggatgatgctcaaagcgcccgtgaactgctttttcagtggttagctgcaattccaggtaaagagacctatgtcgctttgatggaacttactaacgagtatccttataaagattatacgcagtggatgatgagagctgctcgcgatagggcattagccgatgcagatttcgagccttggacggatgaacaggttcacgatttcgatgccagtttggtttttacaccaaattctccagcacaactataccaaatgggtgtccattatttgctggattttaaggactggcttgaacgtggtaatgatagtttggctaaaacctatcaaaaaattaccagcgaaactgagatgcgcactgttgtcgctcatcatatccaaaatgcagcaaaggggcgattcacttgcgctcaggaagctgaactagctaataatcaaaggccagatctttggcttcaacatcacgaagtatgtattcccattcctgttgagttgaaactgttggataaatcctggtcaggacctgacctctgtgaacgtttggaaaatcagttgctaggagattacttacgtgaaaatcaagccgatttcggtgtgtttttactcatttggcagggtaaaaatgaatcagataaaaattgggttattaacggtgtgaaagtaaagctcactgaacttgaaaacgcattaactcaacattggttatccatctcacctaagtatccaaagataaaggatgttaaaatcattgttatagatttaagtcttcgcgaaagacgatctgctgaataa

SEQ ID NO: 154989 - DNA, 201 bp, Enterobacter cloacae
atggacgtaatatctgttgcaggtaaacaagctcaattaactattggtgagaatgagctattaattctgaattcagctttgaatgagatttgtaatggtatctctgttcctgagtttggaaccagaataggggcttctaaagaagaagtctgtacattacttaatgaaataggccgtattttagacaatatgatcgcttaa

SEQ ID NO: 154990 - DNA, 588 bp, Enterobacter cloacae
atgaagcgtttattttgtttattaccattactggttgcagtcagtccgcatgtcttagcaactgaaatgactggcttcgcaacccagtatgacgacgaagacggaacgctgacggaaatttcaacaacaatgcccctatctcccactatcactatcggtatgaaaatcgttcagatggaggtaactcacctatcagatatagccaaaactcctgttaagaaaggcagttccgcacgctgggtctgccttcatgacgatgatggtactaattactggttcatttcagataacgaaatgggtgcaggattgctgactgcactagctattgcccgggatggcgtccataaagagtgtgcaaaaacaacggagcatgtcagcgtatcagtcgctaatgttccattgttaaatgcgactcatgagaatttggtcaaagtgttcggcaagaaagagatcgccaaaaacaacgcgatgctattttatcaggagacgccagtacagaaaggattcacccagagcaatacagtctcttattacttcaatggcgaaaaaatgcatggcgtaatcatcgggcaaattaccagtaactag

SEQ ID NO: 154991 - DNA, 234 bp, Enterobacter cloacae
gtggcctcatgtcaatcatatcgcgcgaaaaaaccaaaaagcggtgggcagtccccgcaatttaagatgtgtattgatctggcattgaaggagcggttggataccgtggcggctgaggacggggtgagcctcgccagttggttgaaggagctggcgaggaaggcttttctaaagaaaaaatattattccgaaaggttaacaaaattgtcagtaatgttatataacgaattctga

SEQ ID NO: 154992 - DNA, 1143 bp, Enterobacter cloacae
atgtgtataagagacagatccaagggtaactcattaattataatacaggtattaaactcacttcatcgaagagttgttgaattcgataccatagtaaataatctggcctcatatagctcaaaagatgcagagattatttcaaatttcatgtacaaaaatacatttgacagtgcttttacagcactagaacagaaaagaatgccagtcagggatgttgttatattaataagcctttataatgaaaaaatagatctgtactccgtaggtaaactggccaaaattgatattccagtatctgaaaagctatgtaattctttatgcgagcgtttaatcctcaataaaacaggggaattttatgaactaaatgaatttgctaaaagatttgtttttattaaattaatgcccgatcgtttccaactcgctgacttaaaagataaaattaggactcataaagaaaaaataaagcgaacccttactgatgttgacactactttaagtgccaacaaaagattaagagataacgttaatgaatggcaacctaaaaattatattgacaaaataattatagcccaaacttttgacctttatggtaaagcaaaaagttgtatgctacggaacgataaaacaggctatgataaagtattaaaagaaatgcaagagcattcaatgataacaaatcatccttatgtgccaatacagttcgcacgaattttaaaagatgcatatttaaaatttcataaaaataataatgatatccttgatattattgaaaaaaattatgaacaagctatcgagtctattgaatatgactacagatatttgataaacactaatgcatattactcacttttaatgttatatgggattttcctgtgtgaaagaagaaattcatatagtagagctattcgttatttagaagatgcaagggatggatttgaaaaaactcagatagaaccatggtttatatgttctaattatttatcaaagtcatacctcaaattatttgaggaaactaacaatggagcatatcgggatcagcttattaaaacctttaataatgtaaaatcaataccattgcgacggccctcaaaaaaaatggacctttcaaggtatataaaacaatattcagaattcgttatataa

SEQ ID NO: 154993 - DNA, 138 bp, Enterobacter cloacae
atgttcgcggtgcgattttttaacatccaggcattgagagttttacttatgctgacaaatgtttacccgcaactggcgtctttaagactatttctgaatcgtttaggaaacatctttccgaaagtcctattctgctga

SEQ ID NO: 154994 - DNA, 696 bp, Enterobacter cloacae
atgtttacttggaaacgtttacgcaatggaacactgctggttatagcggtgctgctgccgttttttaacgccagagcggcgctggtgctgagtggaacacgggttatatttccggcaagcgaaaaccaggtgtcaataaaagtcgataatccgacagagaatgattatttaatgcagagctgggtggaagatgacgcaggtaaaccgcagcaagatattctggttgagccgcctgtcgcacaaataaaagctaatcataaagttgaattaagatttagcctggtcgaaccggcattaaaaaataataaaagtgagcaacttttctggctcaatgtgaaagagatcccccgtgttgatgccagctcttcaagttctgaactgttattggcgatgcaaacaaaaataaaagtgttttatcgccctgcaggcattgaaccagaatctggcgatgcatggaaaaaattaacgtggcggcgcgcgggtaaaaacattgaggtgaataatccgaccccttattttattactattgatcgcgcgatgattgatggtcatacaaagattgatgtcgatatgatttctcccttttcaacaaaagctgtgcagctacaaggtatggcaaaaattaattctatctcctggaacgctatcagtgattatggtgacgtaacagagatgacttcatcactggttcgatga

SEQ ID NO: 154995 - DNA, 576 bp, Enterobacter cloacae
atgaaaaagttgacttctttggcaatggcgtttgctctcactggcgtcgccggttctgcttttgcaggcacgtcgacagacaacggtaatgcgacagctctgcacacttcaaccactgttcatttcaacgggttagttgaggagccgacatgttcttttaaaggtaaatcgatgaaggtggtactgcctacggtgagtgcggatgcatttgctgacctgaaagagggagatgtcgcgttaaatacacaaaagaaagattttgatctgcacattgcctgtgcgagtcaatttgaatccagtagagtacgtattaaaatcacagggcaaggagagaacaatattcttgaaaatacccacggtacagctaaaggaatggggttgcagatctttagcggcgacgggaataacgtgctgcctatcggccaggaactaaatagcacaaccgctggccttactaatgcattcctcaacagtgataatacgctccacctcagcacgaactatgttcgtacatcgggcgaggttactgctggtaaattagcaaccgacgctgtatttgaaatttattataaataa

SEQ ID NO: 154996 - DNA, 2358 bp, Enterobacter cloacae
atgaagaaaaatgctattttttctcttgttttctttattttttcaaccgcccactcagaagaaaaatacgacctctctttcctcgaggatgttggcggtgtaagcataaaggatgttgctgagtttgataaaggaaatgacgtgttgccaggtgagtattccctggccgtctatctgaatgataaagaactgccggagcaacagattacgtataaaaaaatcagtgctgataaaatcagcgcagttttttcctgcaacatcctcaagcagtggggcgtggtaattgaacactgctatgccgatcccagaccgttagaggattatattcccgaaaccagtatgcaactggatcagggtgaaaatacgctttctattacgatcccacagaaatttctgcgtattacctcagaaaatgatatcgctcctcctgaaaaatggcaggatggtatcaattcagcgtttacaacctataaccttaattacgacgatacgcgtggcacgacgcgtgctaaatctctctacggaaatttcactaacggtatcaatctggccggatttcaattcagaaacaacgggtttatgacgaaatccgacgactccggaatgcgctacgtcagcagcacaagttatattagtcatgatgtggatgcattgcgaagtactgccgttgccggtgatttttttacctcgggcgatctgtttccctcccaaaaccttcgtggtgtgaagctcgccacaagcacggatatgctctcgaacgcacagcgaacctatgctccggtgatctcgggcgtagcaaaatcaaatgcaactatcattattaagcaaaacgacctggttatcgcgacgcggaaggtcacaccgggccctttcgcgttaaaagatattcctgcctcgtcaaatgcgggtgacctggatattacagttattgaggcaaacggtgaaaatcgacacttcgtccagccttacaattccgtgaacgttctggtgcctgaaaacgtctttcgctatagcgtctactttggacgtaaccgagcgttatcctcttcgccacaattactcgaagctaatggcctgtatggtgtttcgaacgcgctcaccctcatcaacggttttcagtatgcaaaccactacctgaatattgctgctggcacgggagcaaatatccggtggctggggggtgtttacgccactataaataaaagccaaagtgattttattcagaaaaaacaaggttatgtcattaaatctggcctgacgcatagcattggcgtgacggacagctatctctattttactgcggaaaataaattatcccgagattattcagacttcgaagatgcggtaagggcttcgcctaaaagtgactataaatcgcgatatgccttacagctcagccagcagttagacactgtaaacctgacgctaaactacacgcagcagtatggatttacgcgtgaaacgagcagggagatgggcggcagtatggtctttagtctccgggatatgcaatttattgccaatattactcatcgctatggcaacagttctgaaaacagtgtctcgttcaatgcctcaataccgctgggtaaagaggacaaatattacgtcaactatagccagtcgcatgggacagcaacagatagccgcctttcgctctcggggagtttactggatgacgacagcctgaatttcgactctggcgtatcgtcaacggcggggcagcggcagtatgactcctcgttgaactggagcgccagcaaaggaaacctcagcgcgggctggagccaggggggagacagcaaagagctgagcatcggattgaatggctcagtggttgctcatcatcatggcattacctttggccagccccttggtttgagtaacatcttagtccacaccgatcgtatttcagggctgcatatcactgacgttaatgacgtcacgacggattatttcggcaacgcgattgtgaataacgtttcaccgtatcgctataacgaaacatcactctcttccgaggggctaaatcaacagatcgagatcgacagtaacatctatcaaaccgctccacgtgcgggtgccattgtggaagtcgatactaaagccaggcgggtacagattcaatatgcgcatatttacagtccgaagggggatcctgagccgtttggctcgcaaatttatgatgctgataatcaacgtgtcgggattgtttcagccgggggattaatcgcgctggatattctgcaacatcgctggccctatcatgccagcgactcgtctactcatgccatctgtaccattgatctcaatggtgttaacaagaaaaaacacatatgggaattacaatgtcgataa

SEQ ID NO: 154997 - DNA, 825 bp, Enterobacter cloacae
atgtcgataaaaaacggcgctctgctggcgctcgttgcctcattctccacctctgccacgaccctgatgcaaaatatgccagcaataacattgcaaaacatggcgggacaagaggatggaaccctgttaaaaacagtacccctctctgcccaggctgccagggcgttaaatgaatcacggctttccattgccaccgatgccgggatgtgggactcctcacggagtatttttaaaacaacggtaccgggaattggtttcagcctttgcgataatgataataatcgctgtatttcgagtctgtcagactggatcccaggagaaagtctctctcttcgtctctataaaattggcaatctccatgggggacggtacgcgataccgtcactgagcatctacggtaagacacatccgctgttgcgcataaacccgcccgcactgattgttaataccacgctttgcggggtgacaactcagcgaatcaaagtcactttcccgtcgttcacgctaaacaagaacggagaaaatttacccagtgtcggctttaaaatccccgttatttgcctgaatcccaatgattatggaaaagttgatcttcagttcacctaccatggcgatcttatcgatagcaatacgctaccgactcaacttggtaatattggtattcagattgaagacgatcacaatatgccggtggtgtttaataccgtgctcagccaggcttccccgtccttttcctatcgcgcgcgtttaattaccgtccctggaaagaccgcgcattacggaagattttccgctgacgcaacggttctcatcacgatcaggtag

SEQ ID NO: 154998 - DNA, 351 bp, Enterobacter cloacae
atgtggttaagtagtagtaaatatggcttgcttatcaccatcttcagcagcgttgtggcaacgtgcctgatggcatgggccgtttattcctccagcgatctctttttttggtgcagtgcatttgtacagatgagcggagggtacgtcatttcatggtcgaagaaaagagacgatcgggaagacagcattgttagctgcgcaattattaccggggcaataatgctgacggcagtcgtggctaactatgtattcttcgatattaaaccgtctccaggagcatgcctggcctggataatgctactggctggatttttcatcctgatgaaaactaaagtagaagattttaattga

SEQ ID NO: 154999 - DNA, 324 bp, Enterobacter cloacae
atgcaaaccgtacatttaacctgttattttattgttactattatgacgcgttctttaggggtggcattgctcgccggctctcagcgattgaatagaaaaatggccttttctatttatgtagccactttgttgttgtcttactatacgttatcaagctatatcgcttacctggactttgcgcttatctgcatcaccatagcgggtgcctgcttgtgcatgaatatgatctgggttgctttgaatgggaatcttaaattgtctcgtttacggttgcttggcacgggattagtgcttaccggaggattattgcttatcgtgctataa

SEQ ID NO: 155000 - DNA, 747 bp, Enterobacter cloacae
atgttatttaatcccgccgaccatacgatcgaatgcggtgataatgatgaatttattaagctcagtatacctgcaagtcagttgctggaactgcttatcctgtcggaaggtgagttagttacccgcgattatttgctgacagaggtatgggataaaaatgggctaagagggtccaacaacaacctcaaccaatacatgagcatgcttcgacgaacgcttgccagtcatggatgtgaaaatctgtttatcactatcccaaaaattggttttcgtcttaacactgatatcaagattgaaacgcgtggtggtcctggcgatcgggcaattgacccggtaaaccgaccgatgcgtaaacagaacggtaaagatcttaagattctggtcatcgcttttctgtgtatcttcgttcccttagccgttttcatcgcccttaagcagtctacgtctcactacgatattgtcagcagcgatctggttgaagttgcgccgggttgtcatgcgctttatttacacaaatttagcgagaatgagaaaattcgcgcgaagattcaaattaatgagatgcttaatgacctgaaacttaagtgcgatgcaggaaatactcttctgtttgataatgtcgatcccattccggatgaaaatgactatggccggactttcttttcatattgccataatgtgaacggaaaagcgttagcaaattgcactgactttttttattcggactggaaaagacatcatgaatag

SEQ ID NO: 155001 - DNA, 480 bp, Enterobacter cloacae
atgaatagaaaaaaatatgccatcctctttcttagcgccctttttcttgcaggggttgtattttcgttctttgaaaataaaaatgatgatacgtacgaagatttccgatgcaatgggccaacgcgatatttccttgaagatgaagagattgtggttaatcaggatctcagggtatcgggacacgataccgcttatctgacgctggaaggatatatttcaacggatgaggggcgaaaaaagctgcatcgtataatctatatgaataatgggaaaaaagcctacaaacactcgtggctttttaacattaccaatattcataaatcggtaaacgatacgttaagcgatcgagaatttgagccattgttgatggagctaacaggagacagttccctgatttcgcttgatatcaatcacctgtctgagaacgtttatctcatcggtacgcccctcagctatatttttacctgcaacggctactag

SEQ ID NO: 155002 - DNA, 294 bp, Enterobacter cloacae
atgcgttatttcctggccctgatgatttttgctttcgctaccacctgttcagcagcatcacaaacatctgtctcttttcaggggatgattaccgaagcggtatgtcacatctctacgtcacacggcaatatcagctcaagctgcactaaacagaatgcacaccatacggcttcttatcatgtttcgtccgtagataaccagacgttcgccctgccgggtaatgtgggtcatatgcagttaaagtggctgaacgccgcgcgtactaaaggattactcgttgccttttaccgctaa

SEQ ID NO: 155003 - DNA, 918 bp, Enterobacter cloacae
atgcctcttatatttgaaaaaaatgagccgcatatccattgccgtttactcgatctggttgataattttgatctcctcaccctgaatgaacatcattcaggtcagtatcctggatctgccattgaaaccctgtgcgattctatcggctcccgctattcactggatgacatcctctctctgcgtgaactcgaatactgtcctgacatctgggaaaagctcgcctcacccaacttattaaatgatgttcgggcaatgtcgcccttttcatcccgaacgctgactgagaatgacctgaaccagcttgcaagtttcatcgccagaatagtggatctgcattgcctgcatagcgtgccctattcacccctggtggctaaatattgtgtaaagcttgcccaaatgtacggcttctcgcagtcgggaattaaggaattacgtctggctggcttgcttcatgggcttggaaaacttgctcttcccgccgggcctcttatgaagccgggcgctttgcctgctgacgccatgtcatatttaaaagcataccccatgacgactcgcgaaatccttttctcaataccgggtatgttcaggactggtgttattgcaggcagccctcatgaacagcctgacggcaagggattgcccgagggtttacacggcacacagttagatctcagtgccagaatcattgcagtcgcctgtgagtatgtttctctgcgtgttaactgtaacggcatttcaccgtgttcaacggcagatgcactcagccagatgcaaataaaagcggcagccggttcactggatcccgacgtcgttaacgcactgagaatggttattcaatacgaagaagtgaatgccgataaaagcatcacgttggatgagctactggagggaataaataatgttaaggattatatttga

SEQ ID NO: 155004 - DNA, 756 bp, Enterobacter cloacae
atgaaatatctcattgacaggttagttgtatttaataccgacgacggcaccctgcatttgccctccagcgaggatgtgatcaggctggctttacctgccgcacgattgctggagacgtttttgtcgtccgaaggaagagagctaacgcgtgaatatcttctggaaaccgtctgggataagcatggcttgcatgcttctggaaataacttaaatcaatacgtcagtattcttcggcgtaacctttctctgctcggctgtcatgaacttattataactttgccgaagctggggttcaggctgaatgcggccatcagcattgaagttctggaaacggactctgtttctcctgacccgtcaccctctattgttacgccttcaggccatttccaacgccttttttttattggcagtattattattactttgcttgccggcgtagccattggtttgttttattataatgagacaaataacagtgcgacagtgcttcatgaacaacacagtgaatgcgatatttattatctaaaacatatatctgatgatgagaaaaaagaagcgttaagaagaataatgagcatcatgaaagacaatggaattcagtgtaagaaaaatgatgtggtcatctataacagcgaagcgagtctgtctgataaagttgaatcaagagaggtcttgtcgtattgccatgccgggaaagaccgcgttgttatttcatgtgataatttctaccgctatagatgggataaaacgcaatga

SEQ ID NO: 155005 - DNA, 486 bp, Enterobacter cloacae
atgaagacactatggctgagtgcgggattgttggcagcgattgtgttgatctctcttacgctattcctgagaggcaatgaaacggtgtctccactgaaatgcaaggcatttagcagaacaacgattgatgtgcaaaatggcccattagtcttctctattgttgaaaatttgcagctctacaatgaaagaaaagagggtatgatccattacaatggttatgtgaaatcacctgacgcaaatacgtatttcgaacgtacaatatatctttccgatggtgttaaaatcgataaagatacgttcacttataaaattaatagaatcgtcgcagccccgcttgatacgacctcagatgatacgtttgaccaaatgtggctagaaaacaccagtgacaataatactatcacgctgaatatcaagaatataagagagggtgtatttaccgtgagtagtccttactcgctgcagtatacctgcgtcaaatattag

SEQ ID NO: 155006 - DNA, 1458 bp, Enterobacter cloacae
atgaaaattgattttgatgctattttttttgacttagacaatacactgataagtactgactcactcaagctacaccgcgaaagtggtaacagttcatatctatctgttgaagagttgtccaaaaccaagatttataataaatcaaaactgcttcttgaatatctcaaaaaaaatgatgttaagacggcacttataacgaactcgccaagaaaatacgcgcaatctttgcttgaacattattcgttggaaggtttttttgatgtaataataacttataacgacgtgttaagagacggtgttaagccaagccccaaagggatcgagatggcgctttcaaaactcggtctttcgcgagaatcgaaagtagtttatattggagatgatgataaagatttcatagctgcttacagcgctggagttaaaccattagcaccagcttgggcaaccagaatacctttcagagtaatcccatcagctataatctcaacttcagctttgatcgatgacatcgactgtttcgatagcattgatttaatcgctgatatatgcgcgagcagaaataagtttgtacactcccgtaaatggttatattttatgccaatgactttaagtggtgaagtcggagcaataaaaaaagacaatattgagattgtttgtttagggaaatactttagccaaaaaggtgtattaacagcaaaacttcatgaccaacaccctttatcattagaaatagcaaaaaaagatcatataaagacctatgtcatgccagattatatcgtatcattaattcaacactgcatagatagagtatctaaatatttctttgatgagcatggtttttttgatttggttactgtaattccttccaaaaagaacaaaaaccctagacttgaaaatatgttaagcagagtttcaaggcaaggcttcgttagaactaacttcgttggtgacttattttattttgaagatggtgcggtaagcctcaaaactcttggaagtaaagcaaatcgtgatcagcagataaaggataaacttaaaataaaagataaatacttaaatttagtgagaggtaaaagaatacttataattgatgatgtagtaactacgggttcaactctacaaggtgctttcaatttactatatccccacagcccccaaaaaattttggcactctgcctagcaaaaactgtaagtatagctggggagcataaaacctgccctatatgtaatcgcgctttaacgcttagaagagggcatggtggtatacatttttggggatgcactgggttccatgaagcagagcagtgtagatataaacttaatataaaagtaaaagaatgtccggtctgtggtcgtaatatgtataagcaatataattctagaaaaaatagttactttttagcctgcgaaggctatcatgacaatagatcatgtacacacactgaggatgtaaattaa

SEQ ID NO: 155007 - DNA, 996 bp, Enterobacter cloacae
atgtttttttcagaagccggggaaaagctattagctttaagccgactcaaaggaatcggcgaaaaaacgttatcgtcattaaaaaaggaaacttatttccttgagatgactatcgaagatattatttcaaaatcatttggcaagaaaaatacttattcaaaatcagagttggataatgctttagattttgcaagaatgcaacgtgaactatgtctttctaataagatcagttttcataccttattcgataacgactatccctacagcttacaaaatttagactcctcccctccattcattttctgcaaagggaattattcatctttaaatgagaagaatgttgcagttataggaacacgagaacctacaacaaggggggaggagatagggaaaagaattactgaatggctggtaaaaaatggctttaatattgtaagcggacttgcttatggcattgacagtattgctcatagaaacaccttagctttgcaggggaaaaccatagctgtaatggctcatggtttagattccacttacccaaaggcaaatgaatcacttgcatctgagattttagataaacaaggtgcactagtaagtgaatatccagttggaaccaaaacaaacccaatcaatcttgtgaaaagggacgccattcaagcagcattgtcttcagccgtttttttaattcagactggtatcacaggcggtagcatgcatgcttctcgtgctattttacaatatagcagaccattagtagtagtaggccaagctaggactgacatcaataataaggaagagaaaatacaaggtaacattgaacttcttaacgctgatcatgaaaaaataaaatcaatacttaaagtaaataatttcgatgcaagtctgttagtgaaacttaatagtagttcagattataatcacaccttaacattgttgcagaaattcctttttagttctaacgtaacaaaaaataaattagacggattagatttttaa

SEQ ID NO: 155008 - DNA, 501 bp, Enterobacter cloacae
atggggactactttgcttcaagagaaccatgaaaaaattttaaacatactaaatgaagctaaagatgtggcgctaaggtattacaaattaaccaataaacctctcggaatcactggagaaatagctgagtatgaagctgcaactcttctcgggttgtcactatgttcagcacgtcagtccggatacgatgcgactgagattttggacgggaaagaatatagagttcaaatcaaaggtcgatatatgcctgatcctaaaaaagtctctgcgagaattggtgctattgatatatctaagccatttgattctgttcttttagttttacttgatgagaattatgatgcttttgccatgtatgaagcatcacgagatgtagtagtcgcagctcttcaagctccggggtcaaagtctagaaatgagcgaaatcagctaggcatagcaaaattcaagtctattagtagtctccgctggagcaaggttgctgaacctgagatcctttaa

SEQ ID NO: 155009 - DNA, 342 bp, Enterobacter cloacae
atgagtcagttagagtacagaaaagcttattgtttagatgttgtaataaataaaattggtgggggtacattggataatttttgtctgtatacaaaagaatatgagctatcagcaaaagcagatcttatttgttatttggaaagctatcctgccattattgatgacgatgaggaagtatatcctgattttgttgtcgaaaattcgctagagctgtttttctatggagagcaatttatagatgtattatataatatctctatccaaagagaaaaaccatctgtagatgatttcatatcaggtttaaatttttatctcgagaacgataacttcatagagctttga

SEQ ID NO: 155010 - DNA, 507 bp, Enterobacter cloacae
gtggttaaaacaattgacattgatgtgtattttaacgggataataattttcgattatccaggaatactggccccatttggtgggaagatagaggatggagataacattctccaggaattcaccaccacagacaaaggggatcttgttcttaatgaaggtgttgccttacctattgcgggccttgatgatggtggctatgttgttaggctctttttaaatgaattccccgagaatgaagacagggaggttatattcacggataaatatttctatcttaatgtgactggagatttatacgttgctgatatggcagtattttgggggtgggaagattatactggttggattaacgctgatattcctaagggaatatataaagttagccttgaaggtgttcatttattgaagggggaagagactgtttattgctatgatttaattttggaaaaaacgaatcaacttggtataagagatgttgaaccacgctcagactccaggctttattaa

SEQ ID NO: 155011 - DNA, 1533 bp, Enterobacter cloacae
atgaacgtgtttctgcgggctgattcatcgctatcgatcggttctggtcatattatccgttgtctaaatcttgcgaaagtcttagaaaaagcaggagctcgttgttcatttatatcaaaagaccaccctggtaatattctggataaaataaaacaggaaggttttcctgtcgaagttatcgcagctgccgataaatcgagtacttacatcagcgatgagaaatcatggcttaatggaagtcaatacgatgatgctgagaaatttatcgatttaatagtagaaaactgttctgatccagacatcatcattgtcgatcactattctcttgattacgaatgggaagcgattgtgaaagcacgttttcctgattcacatttagtggtgatcgatgatctctgcaaccggccgcattgttgtgatttactgattgatcaaacctatatgcgcagcgccagagaatatgcccaattcaataaaagagaaggtaaagttctcgctggcgcaaaatatgcgttgctaaaccctgcattttcgcaattaagaaaacaatcaattgttcgtaaagccaacattactgcaccgaaaaaactattattaacaatgggtggggtggatgcacataatgttgctggaaaaatgctggtattccttgagcagtcaaactttaaaaacatagaaaaaatcactgttgtattgggctctgcttgtccacaccgttctgaaattatctctcttgcgaataaatcgaaatacgacgtcgacgttctcgttaatgtgtcaaatatggcagaactgatgctggaacacgatttcgcaatcggcgctatggggggaacgacgtgggaacgatgtactatgggattacctgcggtaaacgtagtcattgcggataatcaaaaaaccatcgcaaacaatctgtctaacgctggtgcgattgtgctatatgcggataattttaatgctgcagagttgagcgaggctctcaatcatttgatcgcgcattatcacgagcagcgcctccttgctatgaacatatgtgatggacaggggcttaacagagatatccaggaaatagtaataatgtcagccaaagatggcactaatgtgactctgcgtcaggctacatttgacgatatcgattttgtatatcaacttcaatgtgagccgcaaacgcgcaaatatgctcgtaatcctgaaattcctgcatacgagaatcacgtcgaatggatgaaacgaaagttaaatgccgacaattcattcttttacattattgaaaatccaggggcatgtggtgtcattcgattagaccctgttgagcatgcctttgcaaactatgaaatatcgatttttctgacatctgcatgtcacggtaaaggcattgcgagtgcagctatcaaacgcgccttgatgttgcataaaggtataagcatactggcaacggttttaccagaaaaccatacatcgcatcagttatttgagcgtattggattttataaattatcaccctgcgaatatatcagcgagaaaaaataa

SEQ ID NO: 155012 - DNA, 522 bp, Enterobacter cloacae
atgcctatttcatacggtaaacctgcaaaaaaagatgaaattaaagttgtggagggggaattcaaagtcagtttacctgaggattataaagaattcctcaggttgaaaaatggctttgttgtaaaatctccggatttttgtgaattggagtacaaaggtgtcgatgaagggtttatcgctttttatgccctttttggaataaacatgaaaaatccaagccacgacatttttcgtcaaaatgaaaattttttaaatgaacttgattttattgatgataagttaattattggtgatgatcctggaggtaacttttatcttattctaaatggaattgaaagacagggggtttattattgggatagaacacatctacatgctgaggatgatatccaagaatttgagatcgctgagcaaaatgagtgcggcaatatttataaaattattaatagctttactgaattttacaagagaatttgtaagggttcccttgattcagaaatgaatgtaactgttgatttatga

SEQ ID NO: 155013 - DNA, 435 bp, Enterobacter cloacae
atgagcaacatcgacaaacatgctttgcgtgaatcggcggagaaggccagtacagataaccatacccaggatgaatggttccactatctgcgcagctcaattccagccaccatgctggcgctgctggatgagctggaagccaaagaccagaggctagatgagattctgaagcccaatatgttgttgccagtgattgacgatatggatgcagataatctgcgccaagtcattaagacagccagcgaaaactattcgttgctgcacgcgaaatgggaagtctcagagaagcggattgctgagctgcaggcaatgctggcgcggctctatgcagaatgcgacacgggcgaacgtcgtggcaatggcagtcaatcaggcgttgcaatgccttcgtgggtaactgttgaggcggcgcgcttgctgctgggagttaagtaa

SEQ ID NO: 155014 - DNA, 633 bp, Enterobacter cloacae
atgactgatgaacaaatggatgaactgatgactgtagcagtcaacatgcagcgcgatgctgagaccgattgtaaccgcccttccgctatgttcgcttatgcagttcaggttgctgttctggaactgcgtaaggttcgcaatgatacttctgcgctggctgcggagaatgcggggctgagggcaggctccggattctttatgtatagcgaagaaacaggatttgaattccacaaaacaaagacggatgcaattaaatcagcggaagacatgattggcgtatgcagggaagaagcatgttcagaaggctggcctgaagatacggaatccatttgctggggtgtgattatgcagaaagcgacagaagcagatttcgaaaaaccttctgagcaaaatggctggattggctggtctgaattttcgctcactccatccatagaaaccccggcgacagacgttttcctggctgaagtacgggccagcgctatcgatagcctggtagacatcaagactaagcaattggcagatatgcatcccgatactcatgcgttcggcgctaccgccatgactatccgtagccagattaacgagctgcagatgttcgccgcccagcttcgccaggaggccgcccaatga

SEQ ID NO: 155015 - DNA, 537 bp, Enterobacter cloacae
atgcgctttcatgttgtgtgcctgtcttttcaccacatcaggctcagtggtatcttggtagttcttacacagccaagaggttttgatatgagcacaatgtttatcggacgccatttcataaatacaaaagagaaaattgcgcaacttcgtaacatcaatattgttgggtcaatcgattttgatgaagtctcatgtgtctacaatagagcggctcagttgtgcattttggacgttctactcgctaaacatcgtgaagaacatggaaatcaatttaatggacttaatgggataaatgctctgcatcataaactcctgttgaaatataaatggcctctcgaccagatacgcgctttaactatttctgactgtcttcttgcgttgcatgaagaactgaaacttgaagctcttgatgaccagatagcaaatcattttaaaaatgtcctcagccagtatggagagaattattttccagacattctggatggagaatgggatccagatgcatatcaattaattcaagatcagcggcgttggtaa

SEQ ID NO: 155016 - DNA, 261 bp, Enterobacter cloacae
atggcaactaaagaaccaaagatttttgctgatggtttgaccaatgaagaagttcatcagtggatggctttaaaagttagcgcgggtaggcagcttcagggagcgctcgctgaaaaggctgaattgcaacaagcgcttaaacatttagatcagcgtatttctgagcttaccaacgccgctgatcttgaattaattgatatgcatctggatcccattctccatccagaatgtctggaaaataattctctccatactggctga

SEQ ID NO: 155017 - DNA, 534 bp, Enterobacter cloacae
atgagcagaaaaaaatctcaaagaaagcttcaaacagctaccccgagaaatcttgttaaccaaccagccacattagggcgagttcaagacggtaagacagaactgcttataaatgaggtcgccaagaaccctcaagttcttgagcgactcatggataggcctgaactagctggcatcatgatgcaagtgactcacactaggtcaggccccctcccagacgctgatgaattagccagatacgaaagagtttctccaggattcgctcgtgaaataatggacatggctaaagctgaacaaaaacacagacacgagcattacaaagcgggacaaagtggagcgatttggcgagatcgactcgggcagatctttgcaatggcttctgttcttgttttcgccgggattgcttatgagatgatacagcacgaggcttatggctgggctaccgggcttcttggtgttgagttagttgctttaactagcgtttttgtaattggaagaaaagacaaaccgaatccaaatcaaagtaaaaaatga

SEQ ID NO: 155018 - DNA, 222 bp, Enterobacter cloacae
atgaaaaaatctgcaaagctctttttcagcgctatgggctctatccttgacctttgcccagcaggtagttacagcgagtatcgttcaaatgctacagacatcgaccttatcaactctgattgggctaatgtaggtggttacgttagaggcgctgtaactgataatgagcagaaaaaaatctcaaagaaagcttcaaacagctaccccgagaaatcttgttaa

SEQ ID NO: 155019 - DNA, 921 bp, Enterobacter cloacae
atgagcctgttgatgccatcccggccgatagtgataaaccctgaccttgcttacagcattggcctgaacgaggcaattgcgttgcagcaggttaactactggcttaaagaaaccacctccggactggagcgtgacggcgtgcgctggatttacaacaccaacgagcagtggctggagcagttcccgttctggtctgagtctacgctgaagcgcacattcacccgcctgaagaacctcggcgtgctcaaagttgagcagctgaataagtctcagcgcgacatgacgaactactacacgatcaactacgaaagcgagcttttagatgaggtcaaagtgaccaaatcgaagagttcaaaatgcactcttccatcaggtcaaaatgaaccgatggaagaggtcaaagtgaaacactccatcgggtcaaaacgaaccgctctcatcaggtcaaaatgcactgatgttcttacagagaatacaacagagaatactacagatattaaaaaccctatttgtccggttgcgccgcaaccagaccctgaggtgatgatcacagataacgccattcttgttttaactcatctcaatcaggtgagtggttcccgataccaaaaatcaaaaacctctcttgaaaacatcagggcgcgccttcgcgaaggttacagcgttcacgacctgcagctggtaatcgatctaaaacatgaacactggaacggcaatgatgatcagtaccagtacatgcgacctgaaactctgtttggcccgaaaaaattcgagtcatacctgcaaagtgctactcgctgggaaagcaaaggccgccctaagcgtcaggattgggaaggacagcgcaataactccagcatgatggtatttggcgggcctgataaatcaatcccagcaggtttcaggggagctaagccatga

SEQ ID NO: 155020 - DNA, 366 bp, Enterobacter cloacae
atgagtaagattcttttaacagcattatttcttttccccgctgtatgttctgcaaaatttattaacccaatggagttcgatggctctgaagcccaaaagagcgaagtaatcgaatacattaaagatcgtgtgtataaagattactgtgagagcgagttgaagatgtgccaggacactgttctacgcatgatggaacgtgaaaaccttgacgcattcaaagaagcctctcaggcgaaagatgaaaggatcatgggacaagtcattaatgactattgcgactcggatttagatatgtgcaactattcaactatcaatatgatgtacaaagaaaacctgaattcttcaaaagaaagccttaaatggtaa

SEQ ID NO: 155021 - DNA, 1218 bp, Enterobacter cloacae
atgaaattgcacgaactgaagcaaaaacgtaacaccgtcgccactgacatgcgtgctctgcacgataaaattggcgatgcgacctggaccgatgagcagcgtacccagtggaacgctgcaaaatcagaactggactcgctcgatgagcgtatctcccgtgaagaagagctgcgtcgtcacgaccagacttttgttaatgagcaagagcctgaacagcgccagcgtaaggataaccctgaggtgcaggcggaagaacgccgtgccgctgcatttgatcgccttctccgccacggcttcggtgaactcactgccgaagagcgccaggccgttaaagagctgcgcgcgcagggtacgtctcctgatgataaagggggctataccgtacctacccagatgcgcaataccatcatcgatgcgatgaaggcttacggcgggatcgccagcgttgcccagattcttaatacctcgaatggtcaggatattacctggtccacttctgacgggaccgctgaagaaggcgagctgctcgctgaaaacactgcggccagtgaaggtgacgtgacgtttggtacggcgatcctgggtgccaaaaagctgtcatccaaaatcatccgtgtctctaacgaacttctgcaggacagcggcgtagatattgaagcatacctggcggggcgtattgcacagcgcattggccgcggcgaagctaaatacctggtccagggtacaggtgcaggcacaccgctgcagccaaagggactcgcggcttcagtcaccgggaccgtttctgctgcggcagcggcaacatttacctggcaggaaatgaacagcctgaaacacgcgattgatccggcatatcgcggcggacctaaataccgctgggcatttaatgacggtacgcttcaggtcattgaagagatggttgatgatcagaaacgcccgctgtggctgccagatgttgttggtggttccccggcgaccgttctgggtattccatatgtgatcgatcaggcaattgatgcggcggcggcgagtaagaaatttattttcctgggtgattttaatcgcttcatcgttcgccgcgtttcttatatgacccttaagcgcctggttgaacgttacgccgaatacgatcagactgcgttcctggcgttccaccgcttcgactgtgtgctggaagataccgcagccatcaaagcgctggtgggtaaagctccgtaa

SEQ ID NO: 155022 - DNA, 324 bp, Enterobacter cloacae
atgcttctgacactggaagaaattaaacgtcagttgcgcctggaagaggattattcggatgaagattcactccttgaaactctcggaaaagcggtgcaggcaagaacggaaacgtatctgaaccgaacgctttatgattcttccacaggtgtttcggctaatgatcctgatggtctggttatgtctgaagatatcaggttaggaatgctgttacttgtcacacatttctacgaaaaccgatcatccgtaagtgaggttgaaaaaacggaaatgccgcaatcctatacctggcttgttggcccgtaccggttcattccgctatga

SEQ ID NO: 155023 - DNA, 810 bp, Enterobacter cloacae
ttgcccaactggcgctatgtcgatacccgcaagcccgtcacggaggattttgctatccccacagacggcgcggaatcgccgtggggcggcgcgcagctgacctttatcgcccgtaaagccaccatgccgacgccgccgaccgatcctcaggcgctgctggcgtacgcgcagcagcatccgggcaagatcagctatcctcgcccgcccgattttaccggcacggcatttcttgagcagctgctgatgacgctaaccgctcacccggaggcgctgcaacaggcccccgatagcacctttgccgaggtcacggccccgctctgggattatctggacacgctccacccgctgctgtggcgcgaagggaaagattttcccccttctcctgcacggatggatgccctgcttgcccgcggcagcctgtacctgtacctgtccctgacctttaatccggcccatgcgcagcaaaaagtggcgagcggcgaactgcccgccgacagctacagctatggttttcagggcgggatgctcggcaacgtccattttgtggcgattccggccaacgccagcgcgagcgcgggagcgaaaatggtcgccaatttcctgctgtcgccgcaggcgcagatccgcaaagctgacccggccatctggggcgatcccagcgtgctggatgcgaaaacgctgcccgaagaagaagccagacagctgctggaacacacgcctcaggggctgccgaaggtgcttgccgagccgcagtccgcctgggtgaacgcgctggagcaggaatggctgcgtcgttacggcacccgctga

SEQ ID NO: 155024 - DNA, 315 bp, Enterobacter cloacae
atgccagataaagaatactgggctgtaacagaaacaagttaccgtgcggtgagtgggcctgaaagcctggtagaaggggaaatccttgtcgaaggggaacgcccggttatcccatacctggacaacctcaacacgcaacacgaaatgagagcggaagccgatgctattatcgaatcgctgcaggaggcagtagacgttgatcttgcaagtgatgaagaaaaagctgggttgctggtctggaagcgttatcgtgtactactcagccgtgtcgatctacgcgctgaaaaacctggctggccacaagttccggtctga

SEQ ID NO: 155025 - DNA, 546 bp, Enterobacter cloacae
atggatgctaactcaatttcgtatgaatcaatgattgccgccaaagaggctgcaacgtgggctttttggtcaatgattggtacctggtttgcagggatagctacttttatggctgtgttagtatctctttatcttgcaaatggtaaaacaaggccccggttgaaagctgatgttagctggagtgtcattagtggtggaacccatactatttcaggagtaggtattactgtagctaacgcctctcaagcaaaagttgtgataacgggaataaactggttaattgggtctgataaaaaattagcgcaaacatttggacatccactatcagcgaagatgccgacaaaattagaagagggcgaatcagcattttattttatagaggttggtaaagatatggcgtggcctaaaaccatattatctaatattaaggaggctggcggaaaagttagcagagtaaaactaagcgtatctatggcttctggcatcaagaaatctttcaaagtcaaaagtcttatcagcatgctaactgaactcaataaaaagtag

SEQ ID NO: 155026 - DNA, 282 bp, Enterobacter cloacae
gtggtactaaatgacccaactgcaacattaaacgctctgctctgcgccggtgtggtgattaccctgatgttttatcgtcgtggcgattcccggcaccgtccgtgggtttcccgtttagcctggctgattactgtcacgtacagcgctgtgccgttggcctacctgtgcgggatttatcctcattcgtcatgggccactattggggctaacatcattttcctttccgtgctggtggccgtcagaggcaacgttgcgcgcctggttgatcatctgaggcactaa

SEQ ID NO: 155027 - DNA, 1509 bp, Enterobacter cloacae
atggacttgataaagatacagattaacaatattaaaaatataaaaaaagcagatatagaactaccagttgagggtggtttatacagtctggtaggtgggaacggatgtggtaaaagcactttgatgcttatcatgtcagttcttttaagctctaaacgcttcaacatgttgcaagaagaagattttgatgacacatcaacaattgatgttgcaatcgcaaccgagaaggaaacagaaaataatcattggtttgtaaaaaaaagagagcgtaataatgaaaatatgtggtggtgctccagcagaccactttcatataaaggggtctatgaaggaagtttattttatggtactcgttttagggattcaacaatagttgataaattactgagaaacaatcagattaaggacgatcagattgttgatgctttcgattatgtaaaaaacaacctcagctatatccttcatggggatttcaaccattacaaggatatgaaaaaaatcaaaaacaagaaaatatctgaaaatttcgaattatctaaccttccatatttcatggttacaaacaaaggtgacctccttagtcaatataggatgagttcaggagagtgtcttttaatttcattattaaattatatctaccacacacttatcaaccaaggtaaaaacagaagcgtaactgatagaacattttttattttaattgatgaaatagagctcgcattacatccaattgcaatatcacgcttaatagggtatttgaattcgcttctggaatcctatccaaaattatgtgtatacttaacctctcactctccagaggtaattcgcgcattaaaaccacaaaatatgttccttataaataacaatgatggaattctagagcttataaacccttgtttccctagctatgcaataagagaagtatatagacatgacgggttcgactatttaatattggctgaggacgctctggcatcattagtcatagaaagcgttctttctgacgcaggattaaaaaacagccgactaattcatatctcaccagtaggtggttggcagaacgtattgaatttacacatggacctattacgaaacaacgtaataggtgtaaataaacaaataatcagtatcttagatggtgacatcattactgatgtagctaaaaaacctgatttcaagaacctcaccaaattattcctaccaatacagagcattgaaaaattcatatttagtctagtattcagcaaaagcaatgataaacttagaaaaatcgtcaacgataaatatttccctatcaaatcacttgatgatctagcggctgaacattacaaacaatatcctgggacacctaaaagccctgataaacttttctactttagagtcaaaaaggatcttgaaagtagaaatatcaatgaatcttactttattagaaaccttagtgaggatataaaaaaagaagttgactttacacattttagggaacagttagagaaacttttagcccagtaa

SEQ ID NO: 155028 - DNA, 1905 bp, Enterobacter cloacae
atgtctgttgagttaaaagtatttggtggtgcttacttcccaaaagataaagcattaaaaaaacaccccgatttaaaaccgcttgccacagcagttaatgcggcaacaaaagccatcgctgaagccgttattttcggcaagctggcggcagaacatcctgaacatattgatgattactttaaggtgaaaatctgggagcaccgagaaggtattccctgccctgatcttgatgttttctcacctgagtttttcgacagcgtggcagtatggaatgtgaacgctggcgaaccagctgcggcgccacagccagaggctgacgctaaggaagaatgggacgacaacaaggcagtggaagaaattaaaaccgttgcacggctcgaccaggcatcgcgcgctgcttgtctggcactgttcggcccggtccctggaatcactacggcgcagtacggccagatcgtagacctcattaacgatgacgctggcagttttacccgcgaactggcagaagcacttgcaaaagagacccgcgcgctggcgctggcgccggaacggcaagagcagttgctcgcctgggtacgtgaaaacacaaaagattctgcacagtggccggacatcaaaaagcagatcgctaaatggattgataccccagttgataagcgacctctggttgatagcacaaactcagaagaaaaccgtacagacaccggatccacgctgggcggtggtaacaagacagaccgcagcccggacctggttcataacctctctacgctgcgtatcgaagtggctgttgccattctgagcatgtacgacgagatcgacatttactggatcccgaataaatacatgattccagcgaaagccatggccgaagcagaacaggacacccgtttcacagcgtggtggaaaaaactgcgcagtaccccaggcattctggactattcccgtgcggccattatcgccctgattaaatccgctccggaggacatttggatggatcctgttgtcttgcgtgaatacatcaaccgcgagctggttgaacgtgaccatgcgaaccctgaccagaaaacggttgatatggcctgccgccctaaacctcgcactactgctgagaaaatagaaaatgatgaaaccgaatcgactgtaccggtcaaaactgatctaccagcagtttgcccggcaaaagctgcgcagctcgacaaagaactcaacgaggcattcgctcagagctcagcctcagaaaagcaagaaagtgaacagccacgcgtggagaacctgggcggcggcgtcttctctgttgatgctctgataaatatcccctcctcaaatgaagtcgaaaaacaggaagtgccaccagtaccaaatgatcgcgactttgcgattttgcatgctcttaatgaccttatttcgggacgcgccgacataatggggaaagaagaggcagagggcgtggtggcatgcaccggcctgcgggtttctgatgttatcccgcttctactggcagatatcacaaccacggaattctgcctgtctcctgagttctccgacgaggagatccacgacgtggcaaccacgatgctgtatagctggtccgacgatatcagtgtgcgccaaaaaattgccctcgatgcgattgttgaataccgccgcccggaaccaccaaaacaggttgtactcgatcagccatcagtcatggaaaaacctaaaaccgagcgcatggcagcaccagaaacaaacgttcagcaatcgtcggttacctacctgcaacggctgaccattgcagcgctgcagggcttatgttccaacccggcatattgcaatcagtatgaggaactaccggctatggccgctgggcttgccctcagcgtgatcaaccatcaggaaggctcctgtgcgtctgattaa

SEQ ID NO: 155029 - DNA, 1206 bp, Enterobacter cloacae
atggaattaaaggaaattgagtttatcgctcaggttgataactatttagtaaggaaagattaccaacgaggtggtcgttgtgtaagatttattgctgtgcataaagattcccaagagcttatgtttaatgagaatggtgtgaccacatataccatagatttaagctattgggatttattaaaaaaactaaataaccattttatgctttcaaatgatggtggcaataagaatctttcgtggttttatataaaaggagtggttggggagagtaaaaactcgggttattactatgaaacttttagcgatgataatcctaatttttttaaattagtagagtgcagagcaattgaccagccattggcttttggcaaaagctcagcaggtgaagcggaagaaattaatgattgtatcgtaaagcattttcctgagtcttcagctggtaataacccttcatgggacttctattcctttcatgtagggcagggaatgtgctcccttattactaatggcataacaggagttttgttagatgctggggctggaaagccagtattgcgtggtgattatttaaaaaataaatgtgcacatatgcagaacgatttatggagtttcgtggttgggcttgaaaaaattgatgtggtgatttcgcatccagatagtgaccactggcgtatgctcgcatgggatgaaagaatttctaagaaagtaaatcaaatatttattccacacaacacgaaaagtattacgtggaaagatgctaagataaaacgtaagattgttaacgtgtcgaattggcttgtttttgtcaaccataagatatttctttatgttcttagaagtaatcctactaaaaaaacagataatactgactgcttaatatgcatatttgaaggtctaggtggaggttatattttacaatccggcgattatgtatactctgatatgtacactgatactcgccctgaaataagataccttttaaatctttcgtacgatgcagttgttgttcctcaccatggagataccgcgagtgcgagtgccatttttagaccttcaggaagccatgcaaaagcattcttttcggcaggtaatcatagtggatatggtcatccaacgagtgtatcgttgaataaccatagattgactggttatacagtaatttctaataacagtcttgcatatataaaacatgttaagcttagttag

SEQ ID NO: 155030 - DNA, 654 bp, Enterobacter cloacae
atgcaccacccggctgattatccacgcctgctcgtctatgacgcgcttagctgctcctgctgcgacagtccgaagcgcaagcgcaccgccatttaccagcacgcgtcccggcgtaatgtcgtcacggctttcctgaacatttttacccgcggtggtaccaaggctgtttttgagctttgtaacgtcatcattaaccgtcttcacggcctttggcgtggccgcgagcgtctcagacgcgctgtcggttgcgctactgagctggacgatacccttttgcgccgtggtcgcgtcctgagccgtatatttcccgttagcaaggtcatacgccgctttgaccgctttcgccgtcgctgcgacgctctcagacctgctgtcggtcgcgctgctcagctgccggtgcggataaggttgcggatcgagcgtgcgatttcctgcagagaatttagattattcatggagaaaggatgccgccgggcaaggtctgcgacaatcaaggtgggttttgtggcggatgtaacaacaactgaatttttcactacaaatttcggcaaatgtctatctgacttaaattatttgcgacataatgaaatatgtgaaggttatttgagaacacctagttgtacgatggaatttaaccaattatatattcagtag

SEQ ID NO: 155031 - DNA, 1374 bp, Enterobacter cloacae
atgagcagtgcggctcgggcatttaagaaatgttttagtgaaaaatacctaagatctttatattttgataaaattaaagagactggtgctatcggtatcgatagggttagaccaagttcatttgaaaaggaatgcgctaaagaagtagctctaatctccaaaaaagtttttaattgcagttataaatttactgcctataaggaaaaattgatttctaaaggtgctcattctttccctaggcaaatatcaatccctactgtacgggatcgtataacattacgagctctatgcgatgctttagttaaagtatatcctgatgcaaaactatcgctacctcaggtagtaattgagtcactagatagtgctgttaatactggtaaatattacgagtttgctaagattgatcttaaaaacttttacccatcaataccacatgatttaataatggcgtcaattaagcagaaaattagaaagccagaatttcgtcagctaattaataaggctatttccactcctacagttaatgagtcaagaggtagtaaaggaagccctgcgtgttcaataggggttcctcaaggtttatcgatctcaaatattttagcggaaatcgcattgcaaaagatagatgctgagatcgaaggtatcaaagatatatggtataaacgatacgtagatgatattttagtgcttagccctatcgggcgagcatctgatgtagcaaatttaattatcaataaattgaaaaaaattggtctctcacctcatccgctcggagaagaaggatctaaatctgtagtaggcatgctaagtgatcctttcaatttcttgggatatgagattagcgataagggtatcagtatcaaaagggatagcatattaagatttgagtcatctctggcaaagatatttactgcttatagacatgctctcgttagggctgaaagtaagaaagaaaaagaaaaagcgttagcatattgccagtggaagcttaatctacgcattactggatgtatttttaatggcaagagaatgggatgggttgcttatttctctcagatttctactacagctcagcttagggtcgtaaatcatactatcgctaacttggtgaaacgttttgaattaaattcagaaatcaaaccaaaatcattgattaaaacatactatgaatggcgacgaggagaaaaaaactcacataaatacatcccaaattttgatgagttatctatcgaacagcaaagagagattgtttcattatggatgggaaaggaaaaagcaaaaggattgagtgcagcgtcaatagaaagaatgtttaagtataaaataaacacatctgttaaagaacttgaacaagatatttcaggtttctcatga

SEQ ID NO: 155032 - DNA, 537 bp, Enterobacter cloacae
atgagtgaatttaagccctttgacgaccggctcaacggtctgatagctgccctgtcaccggcagcgcgccggaagctggcctgggagatagcaaaggaactgcgcaagtcgcaacagcaacgtatcaagctgcagaaagctcctgacggctccccctatcaggcgcgaaagcgtcagcctctcagggctaaaagcgggcggattaaacggacaatgttccagaaactccgtacaagccggtacatgaaagccactggcagtgaaagcagtgcagtggtggagtttaccggcaaagtgcagcgaattgcgcgtgtccatcagtacggcctcaaagaccggccaagccctcgcgctcaggttatgcgctactcggagcgacagctattaggattttgtagggaggatttacgttcaattgagaactccattttaaaaaaaaattggatgaggactactataaaaaataaaatattttatataatgttttatgccatgattgccatatttgtttttgattttaagttgattaataggtag

SEQ ID NO: 155033 - DNA, 1509 bp, Enterobacter cloacae
atgtttcaaagtgaaattagacagagcacagttaatgaccttcttgaaaaagtaagaactcgaaggtatggaaaatatttattaaaaataattattgagaaagcacgttctattaataataaaacaatcaatttggattttcctgttacagctattgttggtcctaatggaggaggtaaaactactattgcaggggctgctgcaattttgtataaagatattgctccagcattgttttttgcaaaaagtggagcgtatgatgccagtatgcaaaattggaaaattgaatatgaagctatagatcggcaagtcaaaaacaatgatattgttcgacgtacagccaaataccataacttgaaatgggctagaacaacattagatagaaatgtattggttttcggggttattcgaacagtaccagcgtctgaaaggaaggaactaaggcgttgtgtttcaaataatttttccgttcgagctgataggatttctgatctgtcttctatagtggcaaattcagtttcagctattttggataaagatgtttctgaatttaaacatatgaaggttgatgaaactggtaatgtaacattgctttccggagttaatagtactggcgactctttttccgagttccattttggggctggtgaatcgagcattataaggatggttcttcaacttgaagcagcagtggatcatactcttgtaatcattgaggaaattgaaaatgggttgcatccgatcgcaaccattagaatggttgaatatttaattgaattagcagaacgtaaaaaaatccagaccatatttacgacacactctaatgatgcacttatccctcttccaagcgaagcgatttgggcatctgtaaatggagaattgtatcaaggcaagcttgatgttaaatcgttacgggcgataagtggtcaaatcaattctcgattaataatttttgttgaggatgagtttgccgcgatgtgggtacgtactattttaagttttatgccaaatgttgcaatggatgcaatttcaattcatgcgatgaaaggcgacggtactgcagtaagagtacaccaaaatcataatcaagatcctagtgtacagcaaccatctttatgtattattgatggcgattcgcttcaggatgaatcttccagtgccttaatctatcgtctgcctggtgagggacctgagtcaactgtttataattatgcattagataatattgatgacatagctggtgaattagcagttcaactgctcaaacctttcgagtatcatactcaactgagggggaaaatgactagcgtgaggaatactaatcgcgattatcatcttctcttcagccaactcgggcgtgccataggttttgtctcagaagtacgcgttaaagaagcatttctaacccaatggtgtgaacgaaatcaagaatatattgatgctctgtatgctagtattgaagaatatctgcctcttgaaagcgatgttgtagaaattagacaggcttaa

SEQ ID NO: 155034 - DNA, 840 bp, Enterobacter cloacae
atggcagttatcaatactaatctgttgtctctcactactcagaacaacctgaataaatctcagtcttccctgggtactgcgatcgagcgtctgtcctctggtctgcgtatcaacagcgcaaaagacgatgctgccggccaggcgatcgcgaaccgtatgaatgcccaaattaaaggtatgaaccaggcatctcgtaatgcaaacgacggtatttctttaattcagactgctgaaggcaatctgaacgaaatcaacaccaacctgcagcgtgttcgtgaacttagcgtccaggccgcgaatggcacgaatgacaccactgacattgattcaattgaagctgaaataacccagcgcttggaagaaattgatcgtctggctaactctgcaaccttcaacggtaaaaaactgttcaatgatgcagatgtcaccatccaggtgggggcaggtgcaacaacagatgacaccattaaaattactaaagatgcactgatcaaagcgacttcttctgatctgaacactgcgctgaaatcagacggttcaattgacctgggtgacaataccaaagcacaagcatttgttactgcagttgacgatgctctgaaaaaagttgacggtgcacgtagtaacctgggtgcaattcaaaaccgtctggagtcaaccattaataacctgaacaattcagtgaataacttatctgctgcgcagtctcgtatccaggatgctgactacgcaacagaagtttctaacatgtctcgttcccagatcctgcaacaggccggtacttcagttctgtctcaggcgaatcaggttcctcagactatgctgtctctgctgcgttaa

SEQ ID NO: 155035 - DNA, 405 bp, Enterobacter cloacae
atgtataacacatcaggtgttcaggcatatcaacaagtagggcttgaaagcgcagtaatgaatgcaagccctcacgagttgatagtcatgttgttcgatggagcgcttagcgctcttgttcgggctcgcctgtttcttgagtccggacaaatcgctcaaaaaggcgaaacgctttcaaaagcgattgcgattatagataacggattaaaagccggtctaaacatggaagtcgaaagtgaattaccaggcaacctcgctgctttatatgactatatggttcgacgtttgttatatgcaaatttacgcaacgacatagacgcaattgttgaagtcgagggtttattaaacaacattgcggatgcgtggaagcaaatcggccccaatgcgtcctctatttcaggataa

SEQ ID NO: 155036 - DNA, 1650 bp, Enterobacter cloacae
atgagcgcgatcacattacgtaaagcgttaggtgtacttgcgaagtcatcttcgttttctgtaaccacagaaactcatcggcaaaaggatgtgttcgatgagctaaaagaacaactctttgttaaacaagaaattgaagaagagttacagcgttatttggatacagcgacttccggtaaaatcatttttctatgcggaagtagtggggatgggaaatccgaaattttaacccgctgtaagtcagatccacgatatcaacataagtttagtttccatctggatgcgacacacagctttgcgcctcaacaatcagccattgatgcattgaatgatttatttgaaaatcatcatttgcaatcagacccgctcctcatcggtatcaacaccgggatgctcgccaactttgccagagaaggttctgagtcccatatggctatccgcgccgctattgactcattcttgtcatcgcaacaggaaggccaccgtccttaccgcaatgaacattgtacattttttgatttcgaacattatccaaagttcgagtttgacgaagagcaggaatactccccttttatcaaaaaattaatgaatcacttaacggggaatggtgacaaaaaccttttttacacaatttatcaacgtgatgaatcaataggacatgatttaaaaaccgttgctaactttaaactactgtgcatgcccggtgttcagaatgttttaataacacagttatttaaagcccgattaataaaagatcaattcgttaccacaagaaccttattggattttttacatcacctgctgacagggtctgggtacctttttgataatttgtttaatggtgcagaaaatgatctaattaaaaaggtttctgattttgaccctgttagattacatacatacgaaattgatcaatttattttacgctatgagcttggattggttgatcccgaactggatgagttcctaagtacccttgcacaattacatcttacgtttgatcgtaaatgtgttaaaccaggtgatgcagcttctttaattagacttttctggctactacaacatgaatctttagggaataactatcacagaaaattctctgtattctttaaagaaactctctttgagcgttattctgaaatttggcatctgcataaaaactataccgcagatccggaacaaaaaagggcactgaaccgcttttactctttcgagcttatcgctggtattcagcgttatgcaaaccgtaaagcacctgaattgagtacccaaaaagaagagttctttttaggcgaatttggtgggattaaaataacagcacctgttgcgctgaaaccggactgggattccattctcaagaaaaatacagcccatacaacttgtttcgatatctatttaaaagtaggacaagatccgctggatccgattcggatcggtcttaatttatttgagctattgagcaaactgaataatggctatcgccctaataaatatgataaaagtgcgattgtcttactggacgaaatcgttgacctaatcgcagaaaaggcaaaatccagcagcgaaataaagttttatgatggcctaaagcgggtttatagtgcaagagcggacgatgacatgattactatcagcggcatggagggataa

SEQ ID NO: 155037 - DNA, 1326 bp, Enterobacter cloacae
atgtatcctattgcaacaaatttaaaagttagtaataaccagctggatagctaccttccaatacgtaataagaataacaatattgactggcaaatcgtaacaggtttagtactaagctatgccgtgaagtataaaatcgatacttacagtctcgagcagtttcgcgaggattgtaaaactcatctgcaaatattgatcgatgaacccgcgttcttgtccgtgctggaacggatgtatttttccagtcaggatatttttcgtgtatctccccttttcttgctgttccacgctcagtttgatggtgaaaagataagtgcaggctcgactgccgacaaacgccttggaacactgtttgccaatttgatgagagattttagccttaataacccgatacaagataagttgaattttattgaaaaagagatactgaataagctcaataaaaaattaattcgactgggtgaggggccatttgcaaaagaacaaccttatttaccctatctggtaacgtgttttcagtctgatttggcgtttctggcagagcatccacaatatcttttgcaggaactgaccaatactctacgtttgtacgcctttagttggtgcgcacaactggcgctcaatctggacaactggcaagacggcgagccgcagagtaaatcattgttctttatcctcgatactgaaaaagctagctcagaacgagataaaataaagctcttcggctataagtggtttgcccgccaaagtgaaaaattgttccccatactctctgcattagaggtattacaagtaaaaggtgaggaaaaacgccctctttggcaggtatatcaagattgtttagattattcagatacatcgaatcgagtactgaatgaactcaataattatatacagaagtttatcagtaaggaggagcgagatcttcctgaacgcgatcgtgctacaaacctggaagatgcctttaaacagctgttatctgttgccgttgaacagtttcagggtaaaaaaaccgagcgagcagcggtaaatcgcaaatacatcaacgagctggaaagccagatttgcactgacttcattcaggttcgtggccgagcggggaaagtgctggtactgaatcaagatagactactgctactaactaaccttaccgtgggtaaaaacaaaaaactccgtctgcatgagctgctacgtggttttgagcaacgcggattttatctggataaccagtctacacaaatgctggttgcgttttatgaacgcatggggaatgtggagagaatgagtgacagtggagacgccgtatatgtccgtaaaacagtatga

SEQ ID NO: 155038 - DNA, 5115 bp, Enterobacter cloacae
atgtccgtaaaacagtatgaaacctatctggcagaaaccttcattgaatgggttagcagcatcatccagcctggtgagcgctaccagtttaaatctcccgatccggataacgccttaaagctctggaaggctttcgactctttagcgaatggaaataaactagaaattgcaccggggcaatatcttacctacgtccaatgtaataatatccagcttattccggtactgcacggcaccactaccccttcatttacagaaaactatatttctcatttacgcgatcaggtttctggccgcaatggcatttttgcccagacagcgttgttgattatccacaacagcatgctggataccttactcaatagtaccaaagatgtcgctgcaccggatgctatctggcatccagaaaccttccgtcaccagctcgaaaagttaatcacaacggacagcgcccgttctcaagtatcccgctgcttgctgggcgatcagttgacaacaatattggatgaaggcgcaacggtttttggattttcatcgttataccgtctgctggacgacggcaatctggatttctcagagctaaagttattcaacgataataacctgctgaattttagtgataagcagttgcgcgcccggctcaatgaaaaccaaaagttatatcgccagatagaggacagtgttgaacgctacagcgggcaactggagaatatactaactgaattcagtgcaaaattcattcaggagcatttcgttgacaatgacgattggcgtgaacttgatttctccgtctacctgaatgaaaaagcacaaaacagtgaacagaaactggtgttggaaaacattactactgaaaacggtgaggtctggcaaagagccaaaagcaccagtaaagcaggtaaacgagatatcagtgtcctggttcaggttctaccggggcagtcacacgttgagctggagtttatcttccagggtaacgaccttcaggacaatcaggtaaaaattgctcatcatcgtccgttacagaaagaacgattctggcgtactagccggctcggggggagaaactctaagatactggcatcagtgccttttgatggtcggccctgcttctttagcctcgaaatcattaaccgcaataactcagcagaagagtacaagtttcgcctgctgttagttgaacaagggcaattctggcttaatgaaatccagcattgttatcgtattgaacccggtaaaggtcaattaactctgcaactggaagataatgagttacgtattgcagagctcggcgacaagacctgtttacttgatgaagaaagtgatgatgttgattgccgccattatgcactcgttaattttgaaacgctggcgaatcaaagtgagctgatcaaatttaccttgatttcaggtgactcccgtttactgtttaacatcgaaggtccaggagcagaggaaggattaacactgcctctactttttgatcagggtcgttttaataaactctttaaagaagaagggaatgcaacctggaacaagttgaaaggtcgcgtcatcctggacaatatcgaacataatgtggttggtgttcgccagcagttgcttatgcaagagaacgccctgattgagcgtaatctgctcagcactggcagtaatggtagtaatggtagtaatggtagtaatggtagtaatggtagtaatggtagtgagtttgcactggatgagcttctggcgatctatcccgacctccataatgcgtaccaccaattgttcgtttactatcaatgtcgaaataccctgccgagtctggtgtcatggtccgcggaatatcgtgtattagtcagtcacatgatcgctacttttgaacaggcattacagcaaatcagtctaagcagagcattaaccatccaggaaaaacgtctgttacatctggggatttgccgcggcgacgattatgaacgtctctcgcctctgcacccattggtaatggcttatcatttacagctagctgaaactattatcgccgagcccggataccccgcatcagcttccttcgcttcattaccagagattactctcgatcgtctggtcgtctctggcctaatgccatttgtgtatcatagcgaacatgaatacgcacagttacaaccgatggtagaaaaccgcttctggatagatattgttccccagcgccagatgagccacgaatatgttaagcgtctggcgaaagacaagctaaacgaatttacagatgcctattctcggctgttccagagtgcaggaaataatgccctggttattaatgctattaatatgggagaagccagagagctattcctgggactggtagattattttaagcaggaaaaagataacgcaatttcgatacacgtaaactgctatgacgaacgtctgctacccaatgcctttgaccgctttgccgaaagcggcagctatgaacaacttaaaaatgatcttggtctgaacagcggtgcgtggcgttctgaagccgatatgttgatcgatctgcttcgcagtcacttaacattcagcaaatttatcctgccaccggaaagcgatcaactggcttacgcccatctcgcatttttcaccaacaccgcaccggttgattgccgccaaattcgcattgaggatgctgccagcggggttttatgtcatggcttgattgcaggcgaaggggctgaaacacaaggcgatgcttactttaccgcgtttggtctgcgtaatgtcgatactgaatcgtcttgcgccctgcgtctcgcccgcttgttaggctgtctgtggcaaccggcacggcagagcaacagccagtatcacggtcagggaattagtctggctgtcagtggtaactttaagcaactgctgaatcgctcttatgatagctctctctggaccacaattatcgaccctaaggtcacactcgatttctttactagtcaaaaagatgtcgtactaattcattactctgaccagtacaccagttgtgctggttatgacgccgtaaccgtcacaaaacaggttgagttgttcctgcgtctccttcaaacaggacaatccaccgttgatagccagcaattacttgctgaatttaatgcctttaacggtgagtggctgttgaaaatgttgcgttcaaatgaaaaggagcgcaaagaaaaacacggcattatcggtgcatacaaattcgtacagtctatgctgctccagtcagatatttgctggatcccactttcagtagctgagatgatccgcgtgtccggcaatgtcgggctgagaatgaaagaaagcgatttatcgcgccatttacagggttatcagaaaggagcgatctctgacgatgtgctctttgtcggcttcaaagataacaacctgtatctgttaccacttgaagtaaaaacaggagctcgccccgattacaaccatgcggggcagcaggcccgcgagctaaaacgctatttacagcaagatattcttgggccacaaactctagcatcacaactataccgggcactttttatccgccaggtattaatgcaggtagagaagttgcgtctgtatggtgtactggataacgataagctatcccctctgctggaacgacgtgaatggtggctcactggcgactatcagttaggtgagcttgctgattatgcagaaggctttgtggtagctcatgtagacagcggaacctgttttgatctctcttataaagaaacggcagagaatattctacagatcgaaatcccctattcattgcttccatcgttaattgcagcacaaggtgatcaacctccactagctgaacgctatcgggtgccggaaaaatatctgctcaaaccagagtgtgatgtcaattcttcacacccagtacaggtagcaacaacaactgagccgcagcccatttctgtgccggagcttccacaacctgaagcatcggcgcttccccccagtaatgtcagcagtacaccattacaggtcttgtttggtcatgatgcagtgcgtcagaatccgttgtattgggagccaactaacaccgctaagttcatgaataccaataccggcattattgggacaatgggcaccgggaaaacccagtttactaaatcgctggtaacgcaactgatgcgcaatcagtcctgcaacgttgatggtaaaccgattggcttgttgatcttcgactataaatccgactatgtggatgatgcgtttctggaagctacgggagctaagaggtatcagctatcgttgttaccttacaatccgttatcgttatttggtgatatgcccatgttaccgaggcatacagccatggcattcgctgaaacaatgggcaaagcgtataaccttggcgtaaaacaacgcatgaagcttgttaccctaataatggaatgctacgacttagcaggaatagtgcctcatgatcgatcaacatggaatcgtgtagcaccgactattgaagatgtgtggcagcagtacctggcacaagagaaagtcgacgaagattcattatatgctgcgctttataatctggctggtttccagatttttgaaacggatcctgagaagatgaccagtttgtacgatctggttgatggcgtcacagttatcgaactcgctggttattcatcagagattcaaaatctagtggttgcactgacgcttgacctgttttatgcccagatgcaaaaacgcggaaaaccgatggtgcgaggagattatcgacagctaaccaaaatgattctggttgatgaagccgataattttatgcgccaggattttgccagcttgcgtaaaattcttaaggaaggtcgtgagtatggtgttggtgcgatcctttcaactcaggagatcactcactttaagacaggtgaaaataattatgcctcctatattttaacttgggtgattcatcgagtttctgagatcaagaatgctgatatcaaggccgtatttaacattgatgataaaggcgagcaggagtctctgatggggcagattaggcagctcgagaagcattttagcttatatattgatggagataagcaggtgaaaaagatgcgtgacaaagcattttgggagttgatttatgaagaatga

SEQ ID NO: 155039 - DNA, 525 bp, Enterobacter cloacae
atgggaaaggtgaggcataatccgtggggaggagtccttaaagagctatgggcacggattgttaatacatttaatagcatctcatttattgcatttttttttgcaggaatactttttgtcggtggtgtcggtctatggctaccttacttgtctgctataatttccggcgataaaaatgcatcattttttgagagcgtaaatgtctttacttattcgttcgctatacttggaacattatgtgttgatgtaatcttaaacaatcaaaaatcgacaaaagattttttaggattagggatgatatttggagtaatcgctcttattctctgtgtcgtaggatatttgacaacaaagacaggaagctcatatttattaaacttcggcacctttattacattacttatctttatatgcgctaatgtaaatgatgataaatttgataatgatacgtctcgaacggagcctggcccgacaggataccaagaggctactctatctaatattaaagatggtgaaccaaatgaataa

SEQ ID NO: 155040 - DNA, 2262 bp, Enterobacter cloacae
atgagtaataatgtcagtcttcaggaactgcttaaggcagttgatcgtgcaagccgaccgcttaacgctctccagaacgccagcctgactctcgcgagcgatatccatgatttgcagacggcgctgggggcgctcgacgagcaggctggtcgcattaacggcttcagaaaagcaaatgcccagctcgccacgacggagcagtcgcttgctcaggcgaaacagcaggcggcggcgctggcgttgcagtttaaaaacacacacaaccctactcaggcacaggctgatgcgctgtccgctgcccgaaaatcggcagccaacctcaagcttgagtacaacagcttacgttactcggtacagcgtcaacggactgaactcgctcaggcgggaatcaacacgcgaacgctttcgtcggatgagcgtcgtttaaaaagtcagatcggcgaaaaaacgcagcagcttaaccgacagcgggatgcgctggcccgcgtcaatcagcagcaggcgcagctgagtaccgttcagaatcgctacgagtcaggcaaacgcgttgccgcgcgggtgcatcagctggctaatgcgggcgtgggcatggccaaagcgggctttgatcagacgtcccggtttatggcgcctggcatcagttttgaaaaacagatgtcgactattcaggcaagccttggtctggagaagggcgacgcccggcttgaggccattcgccagcaggcgcgggaggtcagtgccaggaccggagtacccgcagatacggtcgtccgtgcacaaaccgaactggctcgttcaggctacgacgccgatggggttatggctgccacagtacccacggttaacctcagcctggcggggaatgtcgacgcggctaaagcggccgatattcttagcagcacgcaggccgcctataacctggccgatacggatgcgggacgcatcgcagatttacttacccgcgggtttacctcttcgaacaccagtctcgttgagatggcggcggccatcacctccgctgcgcccgctgcggatgcgacaggtatgggtcttgaagagacaatcgcgcagcttggcgttctgacggaaaagggaatgaacggtgccgccgccggggacgcgctcagcgcgatgctgcgacagtcccaggctccggatgcactgcgttcagccgcgggtaacggcgcgcttgataaaaaacgccagcagttgcagggggcaacgggcagtgccgcgctcgtggcttccgtgcagaccgacaatcttgacggcgatatcagcaaattccaggccgcgtggagcgggcttaagattgacgtatttgataaagcagatggcgctttgcgcaacctgataacaaccgcaaccggctggcttggcacggcctccctgtgggtgaatgccaaccctgagctgacgcagaccctcgccagtattgttgtcggcgcgcaggcatttgctggggtactgggtggcgtaggcacggttattggcccggttctgacgggcatcaatatagttattaccgcggccgggatgttaggaacggtattcagcgtggtgggcggtgccgtcatgacggtgctgggcgcccttagctggccggtgatagcccttggcgcggcgattgccgccggtgctttgctgattttcaaatactgggagcccatcagcgccttctttggcggggtgattgagggattgtctgcggtattcgcaccgctgggcgagctgttctctccgctcttacaggcgtttggttttatctcagaaaaactgggcgggatctggcagtggttcactgatctgattgcgccgattaaggcgacgcaggaaaccctcgacagctgtaaaaatgtcggtgtggcgttcggtcaggcgctgggggatgcgctaatggcaccgcttaatctctttaacagcctgagcggtaaggccagctggctgctggaaaaactcggactgatcaaaaacgagtcgggtcatctcgacgccgcggcggcaaaagcagacgcggcatcttctcctgcgggcagtgcgtccattccggtggcggggatctctggcggcggtcaggggtatcagcccaccctcgtgccgggaggacgctcttacgtcgatcagagtaaaagcgaatatcacatcacgctgcaggggagcgcggcctccgcaacggatctgactcgtcaaatccgggaggaaatcgagaacagtgagcgtgataaagcgagacagcggcaagccagctttatgtacggttga

SEQ ID NO: 155041 - DNA, 1920 bp, Enterobacter cloacae
atgaaagcaattattaaatctataaatatattcaataataatggtgaacatagatttgttgaattcacggatggtgtgaatgttataacaggcgattctaaaactggtaaaagtgcattattagaaatagttgattattgtttatttgctaaaacttcgagtataccaaaaggaataataacctccttttcggatttctattcaatcgtatttcaattaggcaagagcttcattgttatcggtagacctgcatttaagactggaatgagttccaaagcatacattagacaagaagttgatataacaaaaatatcaccattaagcttaaggtattttgaaaaaatacctcctgcatcaatcaaagaagctcagaaaaaatttgaaagctatctcggattatcagtatctaatttaagagacgatgaaaatagtttccatcatggaaaggcatcgattagaaacgctgtttctttattatttcagcatcagaatttaattgccaataaacatgctctattttatcgcttccatgattttatcaagcgagataggaccatcaaggaattaccaatatttcttggttgggtagatgggaattattatagattgattcgtgagctcgatgacacatataaaaagctcaggactcaagagaaattagaaagaaattataaagccacatatgatcaaaagaaaaaaaccttaaaagatctaattgaaaattatttagcatttattgattataaattaactgaggacttaaactataaccaaatattgaagattgcaacggaccttcccgcagtcccggatatggcatatggctcagggcaaacagaaagtttgtacagagattatataaaagatcaagataactgtaaccttgaacttgcaagtattaatgaaaaaatatctaaattagagctatgcaattcaatctccgtggagcatgcaactgagctgaataaaataaaaaaaacatttgatattccttctccagacatattgaaatgtcccctttgtgaaagcaagcaatctgcattatctaaggaattagagtctctaattcaacatcaaacagttttagtacaagatctttcaaaactacaatttttccacgaagatattaccactgaaatggaaaatcttattaaacgacgtgacgagataaagaggaacttacggatattaaatggtaagattaaggcatttgagagaaataaattagaattagccaaatcaaaaagttttcgcgagaaagcgaacttcatgcgcggacaagttagcactctaatttctgtttatttaaataacaatgaaataataaattcagatgactcaacaaacgaattaagatctagaatagaaaaattagaaaaggaaattgcaacatacaatcttgaagaaaaatacctcacatatgagaaaagattaaattctataatgactcaaatttgtaatcaactcgattttgaagaagagttaaaaccagcaaaccttcatttttctcttcagtctttcgatttttatcataaattgggggaccaagagattaggctacatgaaatgggaagtggtgcgaactggttagcttgtcatttgtctttatttttatctattttatatttactggctacagaggaaaaatcatgcattccaacattcctttttttagaccaaccaagtcaagtttatttcccttctggatttaataatcaaaaagagaaggattcagatctaaaacaagtggaaaatatatttaacaccattgttacaattttaaattacatcaaagaaaaatctggttttatgcctcaagtcataatattagaacatgcagataaactagaactaaaagatattaaatttgaatctttagttagaaaaagatggaaggaaaatggtgagaagttaatataa

SEQ ID NO: 155042 - DNA, 471 bp, Enterobacter cloacae
atgaaaccgattgattttattgcattattacactcacctttatggatcgcttctttactcgaattttttttaagtggtgcgcaaagaataaaaaaagatggattagaatttgaattaatctttcttgcaattcctattttgctcgatgagaatgctttagaacatctctcgaaaggcaacattaaatcaaacatgagtaaactattaactaatagtaacttacaaagctcatattttaaatcaaaatggaatattgaacattataaaccagttactaaaaaagccattattatattatcatcatcaggtaaaatatctataaacagtcacattactcttcatgaaccaataaaatccattacagaaaaagatgagtataaaaagaaatattataaggctgcatataatcttggcgcaatgttagcaaaagaagactcattagatatcattataaaatttggagcaatctaa

SEQ ID NO: 155043 - DNA, 1116 bp, Enterobacter cloacae
atgtcaggagtatctaataatgccacctcaaacatattgggtttcgattaccagaaatttatagcgttagaaagatgcttgagtggaaaagagaatgatattatttggatcgaatgctttggtgatgtagcccataatagaactagcactgaagttaaacatcatatgtctgaaacattccttaatgatacacacagagacttttggaagacattatataatttaatgtctgagcatgcagtttattcaggctttacacggtttgaattattaacaacttcagacattaaagaagagtcaatattttacgattggaataatttatcatcaaagataaaagcagaacgattaaagaaagtcgtacctacccaaacaatacagaaatatcataatgaactattactacgaagtgatgaagagattttatctcttgttgataaaataaatatcatctcatcgcagccaaatataatggataagctcgagaaacttaagtcacatgaagctttactattaatccccgacattcataaggaatccttcatagaaagaatgttgggctttatatcattaaaagcaataaaaaactcagatatgtggcatatagaatataatgagttcaaaagagaaatgataggtttttcgatgccttatgttcagaaagattatccatttccagtagtatctaaaagagatgtaatagaaggaaaatcaaagaattattatttcgttaaggaactagaatctatagaacttggcgaaaagatgataactgatgcagtaatagattatcttcgctcagaaaaaagcttgctaaaacttcttaggttgcattcaactttggttgatcatcttgaagattttgaagatgatttattacaagatctcgatttattaaaattaaaacatatcaacaccttacaattaatgagtgccccaattaacgtaacaaatcaatcaaaaattatgtactcagactgtttgctgttagaaatgaaacaaatacggaatgtacattccatggaaaaatattatcagaagggaagagttcattctcatgttgaacagaaaaatttctcatggcattttgaggtaaataacaatgaaaccgattga

SEQ ID NO: 155044 - DNA, 858 bp, Enterobacter cloacae
atgattaaacgcatgtatgcgagtttagtgttattcactatttttttttctgaagccagctatgctgatgttacgatccaatccccgattggagggagtataattttttcacagaaaaaaaatggtgagcactacgaggataactcatgggggaaaattatcttttccaatcatagttactctgctgatctcagtcgggatgaccgaacttacattgaagacggttcttcaaaagtatctccgtcagggaaatatttaattgttaatagtgtctctggtggaaccgtagaattcggagatggcacttcaaagtatgtagatagagcctattgtagcgttgttgacatgagcaatggttgtatcgttagcgactgggatggagaagcatgtgggtatacctggacgggggggggagatgtattagccaattcagaagatgcaggcgctgatgtttttgattttaattctatgcgaccttcaatcaataaaatgaaaaataaactatcttcattggatatcagaagtgcaagtaatatgcttcgttgtgatgccccctcaaaagaaaatatagataaatatcaacaattggcgaaagaggatgaaaagacaaaaaaaattgtaattaatgctatctctgattacttgcagagtattgaaaatgaagcatcaattaactcgaagacatatttattcactgctccagatagtaatgcccaaactaaagcctatcttgtacctggagataaaataaaaataatacaatattcctctgataataaatgggtaaaaattggttatattaattcaaaaggatcgccgcttgttgcctgggttaaggctgactcagtaattaaataa

SEQ ID NO: 155045 - DNA, 2892 bp, Enterobacter cloacae
atgactgcaaagctacccaaaatcagttaccccgtaccgtcaaataaaaatggccatgcattttcctctgtggaagagttgttatcgacgatcggcggagaaagctcaggactgtatctggtgggaagtcagggtatgtggcatggcggtatccatattaccgatgccaccattccctggtgcgccctgagtactgacagtgaagctgagaacgaatattgtcgcgagctctataaaggggagcaatttattcgttgtatggctgatggtgaaatagttgcctggcgggtatgcaaggattatgagagcgcagcgattgaatggcgcggtgaaaagctgttcatttcgccatcctttgtgctggtgaaacattatatccagccgggtgataacgcagaaagtggactgacgttttttacgctgtacatgaatctggcaccatatgctgcttatgaacagcagggaaatctgtcggacagaaaagtggcaggtgttcagcgctattacaccagtgcggaagatttgcatgcagaccgcgcagccggaaaactgaataaaggcacggttgtcacgctgggtgacagcattgtgacccgaagtagtgacagacgtcagttcaccgaagtgaccattacccgtgagacgaaaaatgcagcaggagacacacttgcaacaggcaccaaagtctggacggtgtctgatcggggctcgctgaaagcggtggcatcagcacccgttccgtcctggtgggcaaaatgcacaccttcttatattacccagcaagaaggtgtggtgaactgctcctcgcgcactgactggtcatactatctgagcagtgacgatgtactgcaatataaaaatgcaggcagactggtggcaggcttcccgctttcttacgagcccggtaaaacgacgcagcaggtcatccgcccgggtaaagaacctagcgaggctgcaagaacatttagccttgtcatgctgggccgggataaggaaccgttgaaaaagggcgatcgggtgtgggtagtgtcagatggtgacagtctgacgccgcttgcaccggcagcatccagtagtgagcctgtttttaatgttgtgtatgtcccttcagcgcctgtatcggtcaatgccggagacagtctcgggcatatgggtttttatcagctaccggaagaaaacggcaaacgctcgcgctaccaggtacatatagagtgcctgagcatggatgatatggaaaagttcatcactaatgccggaagagcaggagagcatgcgccggtgtacctgacctggaaagccgatgccccattatctgagaagagcgataccggaataacagcaggcggtcgaaaaacaaaggctccggggatcctgacgcttgcaaaagtaccaggagttgatgctgaggggaacacgctgggcaataacaaggatgcggcatactatcagatacgcccggaaggtggctggctggccgctgccagtgtacagaaagtatcacagtatgcgcttggtgagctcgggtttgtcacgctgaataaggcgccagagagttttgacctgattgatgggataaagcaaccgaataacgtggtgaaggggattctggagcagttgtataaagcggcacaggatgaaacgcgcaccactcatgccctgaacaaatataactaccagcgattgctggagatgatagatagtaaccaggacgggtattactcggagcaggagtatcttcaggcgatccacaatgtttcctaccgtgaccatctgtaccgtgtgatagcgaagcacgccagtgaatggtattacagtaaggatgacccgctctggaagacatacctggaaacattaaccacagatgcaccgttgtggaaaacgtatctggaagagtttttggataagatgacatggatgaaggcggtatgtgaaaaaggtgtggtactgggggcggagccgtggcatatgcatcctattgcatttttggacatgttcaaagatgcgaaatgtgattgcgaagagctctatgctgataaatttggagtagtcaaatatggaactcaatatggcccactctataaaggtgggattacgttagccagctatacccgatgggatggtttggtttcatcgggcaagataacgtctgatgaaaaaacaatacttattgccatgtctgagaatgagggcaatatggatgcagtccaatcatatgatagtgaagtcatcactgcgggagctatgcagaaaacagtaaaagatcaggaaaatttagaagggaaaggcgagttatcaactcaatttgcaaaatttagagatgctcaccctgatttgtatgcaagttacgcgaagtcatgtggctggactgttgagggggcagggagttcagctgttatttattatagtgacagtttattaactcagggaaataaaataacttcctcagagttaaaaaaattattaaggcagggttgcacagaaaatacatataacaaaaaaatacataataaacctcttgccgcacttgtgaaggttttgacattgcctgagtacttagatatccaagttttagatttcatagaaagacttcatagcgcagaaaataaagtggttttaagtgctgggaataaaaaaataaaggatttcataaaaagtaattttggaagagctgttgtcctggatcattcggttaatcgcccgggatatgtagcatctgattttagtaaagccatcgaaaatttccatacaaataacccaactgtaagtttagacccccaaacttggggcaatgaaagtgcttcatatgaaagcaagcttctggaagagtataaattaaccaggagaatgaccaattcctcccttcgttttaatacattaaaggctaagttatga

SEQ ID NO: 155046 - DNA, 1680 bp, Enterobacter cloacae
atgcgtagatcagtcatcattccggtaatcctgcacaccttcgtagccgttggagcgttgctgtggttgctgtggtatttcatcccgacaggcaacgtgtttaaaagcctgaccactctgctgattctcctgctggcaggctggtatgtttttaacaactgtcggcgtgtagagccttcatccgatgctaccctgtcggctgctgaactgccattactcgactcccagggccccgttgtactggtgtgtggtgacatgctggatgcgttgtttcagggaaactttctgcgtaaaacagcccagggatggtggttacgggctggtgacatctgccggttaactgacattgtccgtagcatacagacgcagttcccgcgccatgtcggtcagctatcggttatgtaccgctgcctgccagaccatcaccaggatgaagccgttcttcgttccacactgaaaacgctccgccagcagtgtaaacagattaaatccctgacggggttcactctgccggttgtgttgtgtgccgaattttccgggccagaaacgccctggataatcgttcggggtgataaaccgattgtctgtccggtaaatgattcgccgcaggcattcatcgactggcagcaggcggaagacaatatcctggcactgccagccgtcagtgaggcattttcctttatccgtaatacgcttactgatgagctggaaaagcctgatcggttaacgcctccagaacgaacattctctgtggcaatgcgcctcggtaccgtccttcccggtacagagtcagtctgggccgactggctatataccctcacctgtttacagttttttcgaaaaccagggcagacagcaccggcaagtttgtttccggacgcggttctgccgctgctggctccttttgcttcacctgtgcaggggggccagcgtacccgtcgtctgatcctgctggtgtggctgtgtgtcctgaccgcattgggtatttctgcgctcaataaccgtgacctgatccgtcaggtgagtgccgatttacagcgctggaatgcaatcccgatgaaccactatcgccctaaggcagaatcactggccaccctgaagcaggatgcgctcctgcttgaacgctggcagcgccagggtgaacctttgcgttacagcctgggctattacccgggccaacaactgtggctggccttgcaacaggctatcgatacctggacgcctccaccagcacctaaaccaaaaccagtaccgaaaattgttcgtctcgacagcatgtcgctgtttgattccggtaagtccgtgctgaaaccgggctccaccaaaatgctggtcaactcgctggtcggaatcaaggccagaccaggctggctcatcgtggtcagcggccacacagacaataccggtggcgttcagctcaaccagaccctgtctttacaacgagccgaggccgtccgtaactggatgcgtgataccggggacgtaccggaaagttgctttgccgtgcagggttacggtgacagccgaccgattgcatcaaacgacacgcctgatggccgtgcgcataaccggcgtgtcgagattagtctggtaccgcaggctgatgcctgtcgtttgccaggcgcaaaacacgcgtcacaggatgtacgtgacgtttcaactaaagaaatggagaagtaa

SEQ ID NO: 155047 - DNA, 948 bp, Enterobacter cloacae
atgtgtataagagacagctgcagaaatgataataatttaaaaattgaagagaacataacaattttttttgataaagaatttctagaaaagaatcaaaaaggaacttgttgcgatttagatgtatggaatactgatttagatgtaaaggataatatactctatatttcctcagaacgtggtcttgtctctttgccatttttggaagaatgggataatggtaaggtcatgaaatttaaccaacttatccctctatggaaagaagcaaaagtttttggtctcagtacaggttcttggggaagaactattcttgccgcaggtgataatggtgcgctcgaaataatgaatgatggcgtagagcagttacaaaagattggcttccataagaataaagaaaaaattatcgataataatatttgcttagactgcgaatggagttccaactccaccttggcaattctagacgggttagatagtaaagcaatgtatatgttcgactcaatagacagtgactctaggtttaaaagaaataacaatagcaatcagaatagaataacagaagatgatataaaaaaaatagcaaatattctaaataaagagacagcaaaagatatatccaaaaaagaaatacaacactcatggttcgaaggcagtaggctatatgctgtagattcaaataataaaagattttatttcaaagctggtagttgggtagaggttaaaggctgggagttagacgaaagtgatgcagtgttaaaactaaaaaatatcactgccgggaaatttattgagactgatagcgatgcattgtttagagtcgtaaatggaaagaaagaacttttgtcagaagattttacatcttggcgagtttttcctagatcaaaaagttatcaagatagaattcatgtagtaaacgatgaatatcttcaaataaagatatttaatatttaa

SEQ ID NO: 155048 - DNA, 138 bp, Enterobacter cloacae
atgcccgcgtcaaattgtaatcatcccagcaaaactaaccatcagcgtttagggagtatctggcacttcaacgtccgcttatggcacgaagcggacattggcagcctcaacaacatgaaaagcattaaggtgtattaa

SEQ ID NO: 155049 - DNA, 549 bp, Enterobacter cloacae
atggcattcagactacccgccaaacgcgaagtgtttgcatgcttttgcctgggattatggttttacgggatgtgtcggcttgacatctatacaagcgatgcgtacttgatagaaccaggttctgtttattggccaattatcttgatttcagtcgctataggtgcctttgcatcatggcgcgtttcgtcacgcgtcaaaagcaaagagggtaaactggagcgcgttaagtttttcctggcttgttttgtgtttgtagtgggtgtcgtatctttcacactctgggaaagcactgaagcaatcatcgtttcaagtgcaacgcaaacagttagcggaacttaccctttcaggatgaactacccaggaccttcatgcggaaaacattgccgttgcaaggctggggttgtgtattatgacgaattcttaaagcgtgaaattgaattctgccagtgggatgacgcttcgtcttttttctacacagactctattcgtgtggtcaaaaaagtcaatgctcacggcggtaaaataataagccatgaggcaattcactaa

SEQ ID NO: 155050 - DNA, 288 bp, Enterobacter cloacae
atggcttttgtggttctcgctgctcctgttttagctgaggagtacagttatggtccttcaacagcagtatgcctcaataaatatacgatcccgtacatcaacacggataggcccgccattgagatagttgatgaggcatacgataagtgtcaggacgttcttgctcagtgggataaggaaagggagtcattaccacccgagcttattgtcagccaggatgaagagtttcacgcattttacgtacatatgatcgaagctcgccgaaaatcggatgctaataaaaaatga

SEQ ID NO: 155051 - DNA, 1506 bp, Enterobacter cloacae
atgggaggggttggtatcgagttacgcatggggattttgcataatgccgccaagcagcaaatgctaggcccccttttgtcccatgggtggattgcttcggtcgtagaagagtccaaagatggtgaatacctaataatagacgccgaaaaaggtacgaaaaagcattcggtcgcactaatgtatacttcagcaacagataatcgacactacaggcagctggaaagtagggtcagtcatattttcacaaatggccagctttaccatgttgaggagtatacaagaggaatcgctactccagtttctccactggatgatttttttcctctgctggtcgagtggaatagcgaattagcaccaccgaaactaagtaaaaaaatcgcaaactcccctgactcgataatcagaattgtttcagaaaatcctttggccggtatttgggctcgtctgaatcagttctccagctctgagatagctaaaaagctggttttaaggcgagccgagagagaaggagttgtgctgggggaagagcaggtcctttctaaagcgtatggcatcgcgtttgcgttgggcaacgctgctgattattacaaaggcgcgccgtacgaaagcttaaataaacgagttcttagcttgtactacgggaccttgagccttgcatttgcagaaatgctggccgcacctaatgggccctccgatcttgatcagctggaaggcatgaccaaacagggacatgggctcttcgctctgtcatcagtaaccggtcatttcggagacctgaaggttggtgtactggctactgggttttaccctaattgggtgagttttctggggtatgacaccggttattatcctaaggctaaagcaaaatccgtgggtgatttagataattcggttaagtatccctcacagtcatttaccggcatgtctgttttactatctgcgattcccgagttgggggatctattcactcaggtctacgacgatgagcctgcttgggttattccgtatatcgatatgatctctcaacacgcacaaagaactgctaatccttcgagcagttacatttttcttaaggatcggtctaataagatatccgaggcacgaattgctttgcagaattggccgtttgctgaattaacaaaggttgaaactccccacgatggtgaagtgtttcgggcgcgggttgatcaccaggggtttaaatcttggcacgatgcgttgttattgcatcgcagcccttatctaagcagccccacattaatcttgccggtattaggaggcgtgccggagtatagggtcacctctcttgcaatattgtattcgttgtcaattttggtgaggtacatgccaagtgcctggaggcgggtggaaggaggtgattgggaccagcatttaagtgtcatgcgtgccgtactggacgtatttgagaggattctcccacaacaatttcttgaaagcatttcaggcgagcgtgttcatacgagcttgccaggcgctcttatttaa

SEQ ID NO: 155052 - DNA, 288 bp, Enterobacter cloacae
gtgagcatggttatttatcgcagcaaaaaatggctcgctgccgtcgggcagatagagcgttgtgttctttgtggtgcatggggaacgcaggtggcacaccggaacgaagggaaaggcatgggattaaaaaccgatgactgtgcgacagctgcgctctgcgtttgctgtcatgacagcattgataacgggaataagctgaatagggaagagcgccggcagcttatggtccgcgcgattgttctgacagtgattgaagttgcccgccgcgggctggtggtgcccgcatga

SEQ ID NO: 155053 - DNA, 354 bp, Enterobacter cloacae
atgctcccaaatcgaatggcgcttagccgtcagactgaagaacagcttaaaaagcttaaagggtatactgggattacacccaatattgctgcccggctagcatttttccgctcggtggagagtgagttttgctattcacctgaacgagatagtaagaagctggatggtacgctggtgctggataaaattacgtggctaggagaaacgctgcaagctacggaattggtgttgaaaatgctttaccctcatttagaacagaagacaatgattaaagcgtgggcggcgcatgttgaggatggaattgcaggattaagaaattatcgtacactaatatcaattgttaaagctatataa

SEQ ID NO: 155054 - DNA, 489 bp, Enterobacter cloacae
atggccgcaatagattttcccgacaaggctgtcagcgtattatccagaggctgcttgtttgccagggcattagtcatagttgccgcaaagttaggatcgttacctaacgccgccgccagttcgttcaatgtatcaagcgctgcaggtgaggaaccaacaagcccggcaatagcggcctgcacaaaagcagtattggcaagctgggtggaattgttaccagctaccgccgtcggggcttttggggtgccggtaaacgtcgggctggctttttgtgcatattgcgaatgcggatcagctgccgcaagatgtgccgccatcagctcatccacatacacctttagctccagcaccttgtcatccacgtatttgcgggttgccagcactactgccgggtcaattttgagggtgatattgtcggtgctgcttgtaatcattaccatgcgcacggtctgcgtgcgtccgctcccctcagccagctgcggcttgtag

SEQ ID NO: 155055 - DNA, 261 bp, Enterobacter cloacae
atgggttctaaagacttcaaataccagattgtgtatcgcggcgatatgcttgagacaatcatccctggtcagtgggttttcttccagcgcctcaaagagtatggcggcggttattggttagggaggacttatcatgattgcttctggtttgaacttgatcgcccggtatcgttatctgatgggcttgattatttaatgctgctgacgaaagtcgaagcgacaagccaggaattcgacgctaattattctctttttgactga

SEQ ID NO: 155056 - DNA, 405 bp, Enterobacter cloacae
atgtaccctcagtcagacgaaaaaaataagtccaaaaacgagagccagcccacagtacgccccctttcaaagattgtcgtcccgccagtgaaacaggtgacgctagagggcggcacgtttgatgaactgcaggatatctatcttgatcaggggctgatttcaggtaaagcagaagactgtttgtacgtaaaaacgagtgaaggggattacgttgtcgatacctctgcaaagcatctcagtaacggaatctggcttatcgatattgatggtatgaaaaatatcgtgaagattgcccgcatccctgggaacaaaattattgtccatcaagatgacacctcttttgaatgctctgtcgacgacgttgaggtaattggccgtgcagtaaaagtcattaagagtatctga

SEQ ID NO: 155057 - DNA, 669 bp, Enterobacter cloacae
atgaatagcgaactagagttagttataaaaatattattcccttccctatctgccattatatcattattagggcttagaacagggtggacttataaaaaagacaaactattcacatcacgtaaaaacattagcgaattttcatatcagatgtataaaagcagtgaagatacgaccttcaaaaaactggcggaagattacggcattgctgcattaaccaaagacaacacattgacaaaaaaacaaagattaattttactcaacacaataaaccctgttagtgatatagataattattccaaatgtcaaagtctaatttccattactacccatcaagaaatattcgcatggaataaaaaaagatataaatacagcatatatagaaaaataataaaaaccataacaactctaatttacttcatgagcagtctcatcgtagcacttcctttcagttattctgttgtagtaagtgctaagatgatggagaagataaaccatctaactacttggcaatactttggtttaagcagctattttgtggttttgggagtagcaatatgctttatctgcctagataaggtctccaagattaagatcgccgagagattaatcgtttcaaatagacgtttaggcgacaaatgcagtggcggcactttggcggcagaaagttaa

SEQ ID NO: 155058 - DNA, 2337 bp, Enterobacter cloacae
atgcatttagaatttttaaccatcaagaattatagaaagtttcgctctacggataataaagtatgcttcgttaaaccagaagttatagatatgacaacagaaggtgagcaatcaaaatcagtgattgcgccatcgacaaccttaataattggtaagaataacgcaggtaaaacaactgtcatcaatgcacttaaaatgctatgcggaaacgaacaacccttagcatctgactttaacttatcatacttaaatgagttatttagtctttacaaacgatcttataatattgatcaagatacaaagttcgaacaattagaaacaccgacattagagtttactttagcaattaaagtagatttcaacgataatgatttaatgacgaacctatcaccttttatatcaattagtgagggtgagagtggaacttccgtgagtatacgcattgtagtcaaaattgtttattctgaagaaactgcttttaaagaagaagttaagaggatctttaatttaaaaaattcagaagggaatacactagatcataaacagcagtttgaaatgttttacttaatgctttcaaaagacactaactgttttaaaaatgaggggaatctttatcaaactaattttatcgatatattaggtgaacccgcagaaaaattctcacttaaaaaattaattaacatcaaagaaataaaagccaatcgtcatcttaaagaaggagttcttagcgatgttttcaataagatagtttcatttcaattcactaatgacactaaatctcgcacaggtttggaatccagcattcatctgattaaccagcaaatatctttaagtgtgggtgcaaaaagtactgatatatcacaggttctttgtgagatagagcactcaaataaagtagatttaaatctatcgggaaatgttagttatgatgcgataatgaaaggactgataaaatataattttatagatggcgaagattatatcccagaagatcagtttggcttaggatatataaatctattaaatataatcggtgaaataattcattttgtagatagctatgaaaacaaaagccattttagtaaagttaatctactatttattgaagagcctgaagcattcatgcaccctcacatgcaagagttctttattaaacgtattgataatgcagtaaaaaaagcactggagatagcaaacaactcttcggttataaaaaaaactcttcaatgccagatagctattacaacccactcttctcacatcgttaatagcaaaatccatagtagcaatacattcaacaatctaaattacttaacttcaataaaaaaatgcacaaaagccattaacctgactgatgaatgcgtagtctctagtgaagataatgatgctaatgaaaagctcaaatttataaaaaaacatataaaatacaaagtttcagagttgtttttttcagacgcaattatctttgttgaaggtattactgaggagactttgttacattattatttggaaaaacatccaattcttagtaaatactatatatcagtattcaatatcaatggcgctcacggcaaattatactttccattagccaaacaactttgtgtccctagtctaattgtgaccgacatagatatcaagcgtgaaaaatgtgaaaaatgcaaagcacataaagaaaatgaaacttgtctaagatgtggtcaacaggcaaaaaatggggatatacctttccgtccgggtactgcaccaactttttatcaaatcaccagtctcagtggtcgaactacgactaatgcgacacttaaagaattgaacataaaactcaaagataaatctgaagaagaagcaggccaattagataatatagaattctttagtgacgaaaacctttacgttgtatttcaaaaagatccaatcgaaggccaatacgcaactagtttcgaagaggctttaattttgacaaattataacaacgatgcacttaatgaagcactaaatgaatgtaaacctggtatttatcaagaaatattgaatagtagtggtaaaaaatctaataaaaatttaatctctcactcttataaattacagaaaaaactttctgatagtaaaagtgatttttctaacaaattgttatttaattttctctcagcagaagatactgaatacttaccaaaactaccaaattatcttgaggatggattaaaatggcttgcatttaaaatacaaagagatagtgcacctccgacaaatgaatacggtatggtcgttaaccaagatgttgtaatcccggaaattgaaattacggcggagatagctgatgtttacaaatcaaattaa

SEQ ID NO: 155059 - DNA, 399 bp, Enterobacter cloacae
atgtgcttacctaattatgagtgtaaaagtgatcacagaattcctggctggaataaaattgaaaagagtaaatgggtgatcacttctcaagaagagaaacaagtattcatggatggttttaatgctcattggtttcaggataaaataatctggtctttaaaagctgtaggtaatactttggaaaccttaggtgaagatcatcgccctcgctatgtgcctaaaggtaaacaatatacagagcttgtcatagctaaattcgttgaacatagagaaaaccattggcacggataccctgtgaatgttcttactgactttccatgtagtgaagtttttaaagtttggagccaaacacccggcatccctaaaagatcaatcatgaaactgaataaacctagatag

SEQ ID NO: 155060 - DNA, 1131 bp, Enterobacter cloacae
atgattgacgaaaacagcatgatgcgagcaagtttgctatcctatcgcaatagaaaattgcttaatgagaatgccgatataatatcgattgttgaatttatcatttattctgatagtagatttaccggtcaagtctcagatgaagaagcatattcttttttaaatatgcttccattatcccatgatgatgtggttccttctattacaatacgagctaattggtctgtagatataaacaagatggtatttttaggtgcggagccttatacttctgattttcatggaggatggtatactgatgaaattgcggcactcatcagtttaaaacttggtgttagagcccacgctggcacagtcacaagagaatataattactacgccccagagtatgggcagccaagagcagaacaaaacccaccgccaccctttttcagtaaaaataaaaaattaatcattccattctgcaaaaaaaatataagtatcgaggggttaaaagaagtaaacaacatacatcatctgaatgaaacggatttcaatcatttgataagagcagcaagaagttttcaggacagtctttggatttgtgaatcttcacctaatcttgcatggctactcatggtttcagccttggagaccgcggctcaacaatgggatcagagtaagggaagcaatattgaaaaatttaaagagtcaaaacctaatttattcaatgaattaaataacgaacaacacagaaatcttataccaattatatccgatgagttttccagtacattcggggcaggaaaaaaattccgagatttttgtgttgcattcctacctgatgaaccacaggaacgccctaattttggtcgaataaaatggaagaaacaaccactgaaagatatctttattaagatttataatttgcgttctattgcactacatactggccaaccgttcccagcccctatgtgctcggcaccagatagccactttggtatttccgaaatgggtgtgactgcattggcctcatcgaccttaggagggacatggactccaaaggaggcaccaatcaatcttaacatatttttccatatgactcattctatattaaataaatggtgggatagcttatatctaccaaattaa

SEQ ID NO: 155061 - DNA, 330 bp, Enterobacter cloacae
atgaaaaaatactatcgtattctaggtgaagttcagcaactggacaatgtagcgaatatttatgatgagctttcaagcctggactttactaaaagtatatttgagcaagcgaataaacttgacgaagatctatttcagttaacatttatcaatgggaatattatcgatattggttggtatccagcatttgaggaagatggagaatttattattcaggttatatccgatgagaactgggatgaaccagcgttcaaagcatcatcaagttgggataaaaatgaactaattgagaaagttaatgatgctttaattaactgcccatcatcatag

SEQ ID NO: 155062 - DNA, 1428 bp, Enterobacter cloacae
atgaagttcagtcatgatactctacttgagtatgggttaaaactagtcaaaacttatccaatgctatgtcgtattattattgacagttacccttattttttcattgatgaatatcaagatactaatagtcatgttgttggtttttttaaaactctttatgatttttcaaatcaaaataacaagaaatggatggtaggttactttggcgacacggcccagtgtatttatgatgatggagtaggagaaaatatcacaaaacttcatagcggactttatgaaatagataaaatattcaaccgccgctcacatcaacaaataattgatgttgcaaacaaaattcgcgcagataaaatagttcaaatacccatttcatcagagagtaataaaggttccgttattttttctcatcatcaatccaaggagaaactggaaatagcaaaagagtttctctcacattataaatcttatttagctcaaaccagtaaaggtagggataatgacgattgcaagatccactgcctagttttaactaataggctcatggcacagttcaatgatttcgaaaatgtttaccaagcatatcaaaactcaatgatctatcatgaaaacctaaatactcaagtgttatccaagcaattagaaaaactccacccaaccatattgattatctataacctaacaaaattatatcaagacattcttcaaaataatgtttcttatcactgtatttttggaacttatggtgagggactaagtttttcttctgcaaattcaattttacgtgaactgcaaaataaagaaattgtatcacttaatgactggattgaactaataacagaccgtcttgaatatagtgaagcaaaaggttctctagaaaaaatactaataaaccgcattaactctgacaaagaaaaaaccgtgtccccccatttatttaagtctgcaattataaacagcataaatgtactcatgaatagtatgtctgaagatgaaactgtagctgaaggtaaaatacagagtattttatccttaccaataaaatcgctaatgaattggattaattttatagatggcacagagattggtgatattatctaccacacctaccatggtaccaaaggtgaagaatacaataatgttgctattattttagaacatagctttggaaataaagacaagcttaaatttaaaaactatttcaaatttcttcaagaaaataaagaatctcgcgctcatttgctaactgatgatattttcagagaaaaacataataatactaaaaatttgctctacgtggcttgttcacgagcaataaaaaatttaagaatattatatttagatgatatctcagaaataaaagaaggcatagaatcaatctttggtcagagcaatctctggttatcagattcggataacataactgtgtaa

SEQ ID NO: 155063 - DNA, 642 bp, Enterobacter cloacae
atgccatcaaagggaaatctttttcgtattcgcgtgcagggtgcgggtggtggctctggctcagcaagggcgaccagcgcgacaggactttctgccagtggtggtgggggtggtggtgcctacgttgagttgtggttgacgcgtgcagagttgcaggcattgattgatgtagctggcggttatctcgatattatcattggcgcaggtggtgtgggaggaactggcggcgcaggtggaactggtggcactactcaatttggtagcctgattgtctgtcctggtggtaaaggttcagattatggtatcgcggcgtcaacttccactaccgcactggctagcggtggtgcttccagtgccgatccggtcatagctatccctggactggattctagcaaaataattctttcgatggctggagcgccaggtcattttggtatttctgtccagtcaccaacactcgccgggcacggtgcaaactcacctcttggcaacggcggcgtcggttctggtgcatcagctacgcagtccaatggaaaaggctacggtgctggcgctggcggggtgtctaatggccttagctctgcggcgaaaaacggcgctgatggtggcgatggcgtcataatagtcgaggtgtacgcatga

SEQ ID NO: 155064 - DNA, 1662 bp, Enterobacter cloacae
atggaatttttctatgtagttaaggctacgcagaaatctggcaaagacgacgcagtgatttggttcactgcgaaatcagaagcccgtgccaacctgcagttagatgttgagctggaagatgctggtattgaaaccgggcgtggtaaggattacaccaaacctgttcgcactgattttccggtatataacgacctgccgaaagaaagttcggtggattacacctggtgcaaacgctatgcacttcaggacgatggtcgcacctggctgccaaaggctggcgctgagtctactggagcaatggacgactccgccgcaccggaaaagaccgtaaaagtcgaaactaccgtcgtgagtgttccgcttgaaaaccgcactccagcggtacgttttgctgtccatctgaccagcgacaaataccagtcacacatcactaaagagcagcaactggctgccagcgaaatgtcactggatgaaggcaacacctatctcaagaacttactgctggcgaagaacgacatccctgaagttgccgaactcagcctgaacgctgagtggaaacttgttcaagcgattaagcaggtcttcaagccagatgaagagcacgaagtaaatctgcttgctgctttcatgactgactgggcgagaacagatgctggcgaccgcaatctgttagttgaagagtggagaggcggaaagcttactcttctcaaatcagaacgcaccagcaacgccggggttgcaactggtcaggatgtagaacctgataacggtatccagattgacgagaatgatgacgaaaccacacgttatccagtcgttcgtatgaccttccgcaagcagctactcgcccagttcactgccgacgaactgcgccaccacctaacccgcgaagaatacgaagctatcagcgtgctggagatggacactgacaccagctatgtccagaacctgttgctggcggcagaaaactgcgaagaggttaagggttacgacaccaaagacctgtggcgctataccgacgccattcgcaaggtgttcagccaggataagcgtcacgaactcgctttggttctccgattcaccagaatctgggcttcgactgattacattgaccgcggcaccctggtgcgcgaatgggctgagggtaatcgcatttctgaagtaggttctcctgcacctttagaaccagcaaagccagaaactacagaatcctataaacgcgctgttgcccagaacatggcgaacttgagcattgagatcgcgattgctcagctgtacccagatgcagtaccgggacaaatcaaccgtacgcaactcctggccgccaaagaactcgctgacaaaaaagatgagtggcacgccaaggcgctcaaggttcttggtaaaacaccgatatcctcgactacgacgccaacagtatttttggagttacccgcgctatttcatggtctggagaagaaagtacaaccgaactgcgtagccaggtgcgtgagtggttcacggcgaacggcatctatgaaagcggtgagcgctctaaaggctatccagaatggaacgaagactcccgcgcggttcgtcattccacagtggaagaaccaagtactccaagccagccaaaggtcgcaagccttggaagcggcgtgttctccatcgatggcctga

SEQ ID NO: 155065 - DNA, 198 bp, Enterobacter cloacae
gtgagcgataaagagtcaaacgcgattaaggtcaaaccgattctgacaagtaacaacctggtattgaaggctgctgatgctgcactgaacgcagtgcaagacactatgggtagtcttcgtgaagacgatcattacctctatatgaaaatggccagagccgccctcgattctgcacgggcagctcttggtaatgattaa

SEQ ID NO: 155066 - DNA, 693 bp, Enterobacter cloacae
atgaaatctcttgcagagcagatgcacaaccacgaccgcgagcagatgagccgcatggcccataacctgccagagcagtaccaggagcgcgcaccggtcgagcaggtggctcaggtattcaacaagctgttcaacgagctgcgtgccgcgttcccggcaagcatggcgaacttccgcactcaggacgacctgaacgaattccgccgtcagtggctgctggcgtttcaggagaacgggatccactcaatggcccaggttgatgccggtatgcgcattgcccgccgccaggaacgaccattcctgccgtcgccaggccagttcatcaagtggtgcagggaagggcgcagcgtactggggatcaccaccgctgacgtcatggctgagtactggaagtggcgtaagctggtgttccggtacccgagcagcgagctgtatccgtggccgaagccggttttttatcacatctgtctggaactgcggcgccgtggaacagattgccaactgagccacaaagagcttgagcgtgaggctagagatatactgggcatgtgggaaaagcgcgttcttgatggaaaacctattccaccaatacgccgagcactggctgccccaccgcaaggtcgcggcccaaccccggcagaaacactgattgtagagtatcaacgccggaaagcggcaggtttaaccaagtaa

SEQ ID NO: 155067 - DNA, 204 bp, Enterobacter cloacae
atgcatacagttaaaacggcggaggcattcatgaaagctgaattaaccattgatcgcactaaagaacttcctaagggcgcggttacagcactggaaaaagaactgttaaatcggctccagaatcagttcgatgagtgctgtctggtaataaggcgtgcaggctccgatgggttaagagtttacggtagtgaaaaagaagcttag

SEQ ID NO: 155068 - DNA, 942 bp, Enterobacter cloacae
atgttagattttctacgggatatttttgcctcctttcgtcaaacctctctagaaagggtaaagagcccttttcttggggcctttgtcttttcatggattggatttaactggcaaatgcttgccattctatttttcagcaagaatagtattgaagaaagattgaagtttataaatagtaattttgatgtttggaattatttatcagcaccactttgcacctctgcattgatagcttttttgttaccgcaaataaataaagcaattactaaaattcaagataaacccaactcggaaacaattgagttaactttatcatctaaaattagagtagcagaacttcagcaatcaattgcagagatcgaagcaagaaaaaaacttgctgataaaaaggaagaacggtatatagaagaaagcatctcattaattaaagtcgataataaaagactgcatgagttagtgctatctttagagatagaagtcaaagaattgcaagtcaaattaagtgatagcaaagcagaagaaagtagcttgaaagcccaacttcgctcagaaaaagattcactagaacaaagtgagagtgctcgcaaaaaattgtctgaattaaatatagacttaaactccactatcaaagaacttgattatgaacgtatgcaagcaagccatagtattctaaagcttgaggaagaaataggcaagctccaaacagattttgataatctaaatgagttaaaaaatactttagctactcaaataactaatctatcaaatctttatccgggtattttcagaaatcacttagtaaatggagttcctcacatagaacttacagaaaatgcaacgaggggattaccaaacattaatagaacaatgattatggataatataaggaatgctttaaaaaagaaagaacctggggcagaagatttaatcgaagatatttaa

SEQ ID NO: 155069 - DNA, 603 bp, Enterobacter cloacae
atggcgctagaattacaacttatcaaacaccactcaggaatactgatcccggcaacgcccgagaccagctatatcctgcaattaaaaatccggctcggcgatgttcttgttgccgagttcaagcgggtacgtaaccctgcatttcaccggcgctttttcgcgcttctcaatctcggttttgaatactgggaaccaaccggcggggctatctctagcaacgagcgcaagctgatcagcggctacgccaagttcctggcttcttatggcgggaatgagagcgcgctgaacgatgctgccgagcagtatcttgagcaggttgcttatcgacgcgtcacaaatggcattagcctgtgtaaatccttcgatgcttaccgctcatgggtaatcgtcgaggcagggcactttgatgccattcagctacctgacggcacactcaaaaagcatcctcgcagcatttcattcaccaacatggacgaactagagttccagcaactgtacaaagccgcgctcgatgtcctatggcgctggatattatccaaggcattcagggaccagcgtgaagcggagaacgccgctgcacaactcatgagttttgcggggtga

SEQ ID NO: 155070 - DNA, 207 bp, Enterobacter cloacae
atggggatgaagtacacgtggttccatcacaccgaatgcacttccgaacaggcggatgaactccaggcggaatatttacgccgcggcgttaaggtcgagcgcagcctgaaccgcgattacatcacctggaccgtcagcgtcaggctaccagagatgcgccgacaggaacgcacaccccgaacattccgacaaaaggtttgggggtga

SEQ ID NO: 155071 - DNA, 846 bp, Enterobacter cloacae
atggcttggcaaggtattccatttaaatttattaattctgaaagtgttgaaacattaaaaattgcgcttcagactgtgccaaagatatcgattgataatccaccagattatacagcaccactcttaacagggttgatatcgctattagctggtttgatccctgctgcaattgctgtttggacctttaagcgtaatgcctcaaacctaagaaatgagcgagaatctcagcagcaatttctcaaagatgagagagcaaaacaacatgaattcatgaaagaagaaagagcagcacaaattgcctcgactgagaaagaccgcgagactcaattggcaatatcaaagcagaattttgatatgcaagttttatccgttaacaggcagcagtggataaataatgtaagagatgttcttgctgattacatatccattgctcctgatttaatagaagcgaagtttgctttccttacaatgagtgaccagtactctaacgctctcaagaaaaagcaaactatgctcgtcggtacgaccaatcaaattattcaaaatgattatgataaggccacagttgattttagagattctttagatacattgagaaaactcagaacaaaagagaagttattgattgctaagataaaaatgatgttaaaccctaaggaggaatggcatccacagctatcattaattttccttcaagtatctaaagcttacaactccttagacaaagctgatccgaaggaatttgctaatagaagcatggaagtgggttctgctattgattcgatgatattaatctctcagaatttattaaagtttgagtgggaaagggttaaaaaaggaatttga

SEQ ID NO: 155072 - DNA, 423 bp, Enterobacter cloacae
atgtcagaattaacagaaaggcagttagtagacgttttgaaaagccgtgatttaaatcttgaaaaatttgcggagcttgctaataaatacgatatgaacattccggtgactttatttaccaaaggcactgtcatttccggtaacacagtttctggcaaaagttattttgaagccttggcaagtaaatatggtccacatgttgaaggacaaccaactttaggggactacttccgagctttctcagctgaagggtatgagcccaaagagaatgaagaattttcggtacctctaaattttcttcatttggaaaaagtccatgttcttacaggaactggtaactttgttccattcagtggcggattactacgcatcaaaatcgaagaagtagacgggcacattctcggaaatgccgtaagcggttga

SEQ ID NO: 155073 - DNA, 432 bp, Enterobacter cloacae
atggaaacgattaaatttgcaacactgtcacgtgccctaggcgtgcaaggagaagacatactttttaagaaaaaatgcctctttgaccgtgtgtacaattactggagtagttcaaaatcacttaatcgcgagattacctttgtgatggagaatgatgagcttgagattaaaattccgcagtgcgatttccactgtttcagcatgacaaggattaggttcgtaggcaaacagccgatagctgaaatcgccttctgcatcaaagagaaggacgagattatcaagtttgctgttttccacatcgatagcgataacacaatgactatcccaagccgaccagaagcgccatcaatctctattgattatgctgacaacctcgaaaatcactttatggacgagttggtcaaggccgctgtgatagcccagcttctataa

SEQ ID NO: 155074 - DNA, 183 bp, Enterobacter cloacae
atgaagggtttgatattattgaatacagctgaatttacctttctgcacaaagcggaccggcataagagccgcatggtccgctacgagcaaaaagcggaagttggcacttttgtggggtcagtccaaagttcccacaacagtgattacagaaacagttgcaattcagtgtttcaattgccctaa

SEQ ID NO: 155075 - DNA, 165 bp, Enterobacter cloacae
atgaaacgtaatctgaatgacctcctttatttcattaccgtcacccgcgaagggagtttaacccgtgcggaggctaaaccagggggcgcaaccggctctcagccaggcaatatcggcgtgggaataacggctgcagctcctcctgctcatacgaactacccgtaa

SEQ ID NO: 155076 - DNA, 207 bp, Enterobacter cloacae
atgaccaacttcctgttgagagaaattgcgcagcgtattacgaatgcgcaaaactcgctcttcaggcgtggtcagaccgaattttgcctgcagcataacaatcggctgatggaaaatataaaccgttctggcgcgctcccgatctgtcggctcctggcgcggctctgcggctacgctgagaaaggagattaccgagagcaagcatga

SEQ ID NO: 155077 - DNA, 429 bp, Enterobacter cloacae
atgattgaaataattagcgacaggaaagtacttcggattaccccctttgagcgggaaaatacacccgaagccccagcgtatgactggatacaaacttatgtagagtatgagctaccagagcttaaggctcaatataaggcttcttttaatgtcggtgaacttagagctttaaaagataagctcaaaaatttacatgcgaatttagttaatggcgttaaagcgcaggacgtggtttttgatagcacggagaaccagttaaacctgatattttcaccctcatctgttggtcggggggtgcttttgacattaactctcagaccggaaaaccctgccgaaagtgtagttgttaacgatagtcttgggctggatgaaagttactttcctgcactacttttagggctggacgaaatcattaattgggcaaattaa

SEQ ID NO: 155078 - DNA, 651 bp, Enterobacter cloacae
atgtacatcagtgaagttaagatcagtaatttccggagttttagagagttaaatgttaaactgagaaaaaacacaatactcattggagaaaatgacgttggcaaaaccaacttttttgcagccttatctcttcccctatcaactaatcaaattgattttaataaaaagaaattaaacatttcagacattaacaaagaagccattatagatttctacaaggctatcatagcaaatgagaacatttctactttatcctctagaatccctaaggttagtgtcagcttaaaattcacggatcctaaaaacaattacgaaaaatgcattcttgcaaaatggttaattgaagaaaatgataccccatgttttaagataaggtatgaattcaaacctaaaaatgataatgacctcattgcagccactaaggaaatattaaaaaacaaaagcattaatgacacccaatggttttcattcccaatagaattttatgattacgttattgtttccgaaaataatgaaaaacagattccattcagcgactggccggtcacggcaagctgtgcgctcgctttcctgaatccgtcaagcctgaaaatatcggctcaatgggcgatatcgagaaggtggcgcgggtgtttgtgcgtaacgaactga

SEQ ID NO: 155079 - DNA, 1248 bp, Enterobacter cloacae
gtggatattattactgcaaagaaaacttttaaagaaaagtactcagttccatttttggaattggttgatgaacatcacagcgagcttttttttaagacaagacataatgatatagttaaagtttcttcggaagagctacagtcttttattgattttgaaaaaataagagatgatttcatagtcggtccggtagaatgttctatgtgtagttctaattatcgtgagcaagtaataagttctggaagtcgctatttcaattcttttttgattgctcggcgaggtccttttatttttggagataaggaaagtggcggtatttatgcagaaataggtgaggcaagcgataacttcaagaactttttccgttttagtgaagggtatctagaacattctattgaacgaatcacaaggcgtccaaactatagtggtagcagtttttttgatatcctatatacccctttaactattcgtgtgtataacattggagcttctgattacacccaggcaattaagaaaagccagaatataattgaagggtgtctattcaatttgtcctatttaaaaaatattgcattatcacctgatgaaaaatggcctcgtcgctcagaaaatcagaggccatttcaatttggagagcgtgatattaatggggtttacccattaccaaaaggaagtttaaatacagacattcttaggttttatcagcgtggaatggctacggacgatccagtcaatcaatatttatcgttttaccaagtgctagagtatttctttgtttctatttcggatgaagagttatatcgcaagatgtctgctataatcaataacccagcgttttctgctaaacccaagcagctagataaactaattcaggaaactgcgaatcacaaacgagaatcggatgaaacagaaatgttgagaatggtgctaaagcattatgtagatgagtctgagttaaccgactttattgaagagtatgaaacttaccttaatgaaccatggtttacgaaaaaaagaagcgtatttggtgaagaaagcgatattcgacttcagcaaggtcatgttattgggaatgtatcgaaaagggttaagataataaggaacacgttagtacattcatccgatcgctataatcgtaaagatggttatattccaaattctcactcggaaggaattgtgaaaaaagaagttccactcgttaagtatcttgctgagcgggttattattgctaattcgtatgatcgttga

SEQ ID NO: 155080 - DNA, 357 bp, Enterobacter cloacae
atgaaaaaacatacattaactgtatttattttaacgttgttttttaatatcatcatctctttttttattggggtgaagtataagtctgttcttgaggcttttttatcaacgtcgatttattatcaggttgttatttttatttcattgacaatgcctttggtgatttcagggatctatggatgggttgcaaagctgattgttatgtggagatttagtaggttcaagaaaaaaacgattgatgtctctaaacttgatgaagaaacgaaaaaaatgtatcaggcaatggtcacgcaagatatgccaacaaaagcacaagttaaagatatgtttcatgctttgaatgaccagtttaaataa

SEQ ID NO: 155081 - DNA, 531 bp, Enterobacter cloacae
atgtacatatataaaaaagaaattctcgcagcaatggaaagtcagggtggcttcgagattattaaggataatgaggatggcgagggtctgcaaggaagtgtgttggctaaatggaaaggtttgactttttttatatcattcaatgacaagttggctatcaatataaaaaataacagtgactcggatgatgagagaatatacagggcgacagcgtatgactttcaaattactttcgtgatgtcccccaaggatttaaagggtgatgagggttcaaaatataaaattgcaaattacgcaaacatgacaactgatttgggggctgtttatatttacagggaggatgctgatttgtttgaaatccctgtaaggaatacaggtgttataagacaaaaatcagaggcccatattggcgcggctattataagaatgatattaacaggtacacttgctgtacaagagttaacagaagttcttaagtcatacatgaattctccagacgcatttttggataaatgtaaaggtgttagttaa

SEQ ID NO: 155082 - DNA, 753 bp, Enterobacter cloacae
gtggttgaagagaaaaaatattttaaagggaacgttgatttcatctcaggtgaagggattattctcaatgaatttataggagaggtcgccacacgacaaataaatattatagatggtgagtattatgcttcttcctctttgctagataaaaacgaaaaaataggtttccttctctatgatggcaaaaaaagtgacttagatttaagtgactccgaagaaatttcagatacagaatttgagcgtgtctggatggattcaatcgattcattgaaagaaaaaaaacgaataaagtatttatccggtaatgcagtggagcctttgaataaatccacagttattgctcacattgtaaataataaaggcaagtgggggaggggttttgttctttctctgtcaaataaatatccggtctcaaagaaatactatctcagaaattttgaacaaaatagcgttccagaattagggtcggttgatttttttatggttgatgatcctaatcggatttttattgctaatatgtttgcacaggatggtataaagaaaaatttcagtgataaaaatcaatatgtatgttatgaatctctagatatttgtctcgcaaagttatgtgattatgctttggtgaaccgtctttcaatacaaatgccaagaataggagctggtcttggtggtggtgattggagtgttatagagtcattaatacttaaaaatatttgttataagctgattgattgtactgttttgactttatga

SEQ ID NO: 155083 - DNA, 204 bp, Enterobacter cloacae
atgcctctgattgaaaactatgcctcacctacgccggaagaccttgctctactcaagtcatcgctcggtcttacgggtacccaaatggcaaagtttgccgggcttgcaggaagcaatcactggcgaaaatacaccggcggtgagttatctcgcgtaatggggatgcacagggtgttttttggccgctcatttagttttaaatga

SEQ ID NO: 155084 - DNA, 897 bp, Enterobacter cloacae
atggataataaagtctgcggagtggtggttacttataacccaaatattaatgatctccaaattttaattaactcgatgacctcacaagttgatgagataattattgtcgataatggctccagtacagatttcagcggtcttcaaatacccgataagttgcactttgaattcttaaatgaaaatgctggtatcggaagagcacaaaatataggtgctcgattagcaattaaaaatgattgtaaatttgtttgtttttttgaccaagatagccgtttagaacctaaattcatttcaagtctgaaagatgcctattcagatcttacccagcaaggtattaaagttggagcactggggcctataattattgatgaaagatcagggaaaaaatttcccttttaccgttacacaacatttaaacgtatagtggttagcgcagacgaaaatgaaaaatatattgaaactcaacaattaatttcatcgggaacttttttttgcgttgatatatggtcttctgaatctgaaaaccatgagggatttttccttgaatatgttgataccgattggtgtttacggttatcccaaaagggatataaattatttggcgtaactaaagctcatttaatccacaagctcggtgatgaccgtaaaaaaatattgaatgtcttggaggtaccaatacattcaacatatcgatatttttatgtatttcgtaatggcgtttattgtagtttctacaggaagttcccatttagttggagttcatataacatatttagactaatatctttctatcttatcatgttaatgcttaagaaagataaattaaaatttaccaactatgtggctctgggtatttatgacggtatcaggaaaaatttttcaagaaagttaaaataa

SEQ ID NO: 155085 - DNA, 198 bp, Enterobacter cloacae
atgaatttagaaatacgcaaaataaattacagctatgcgtctgaatggcaaggtatatacaagctatatcttaaaagctatgggttaagtcttatttcagaatcaaagttatcgattttttattcgatgcttgggagcatcgttcgtaaggttttacgagttatatttatattgaaggtatatttctctcatggataa

SEQ ID NO: 155086 - DNA, 1830 bp, Enterobacter cloacae
gtggacccaattacaagtgcagcacttaagccaataatagatgaaaccgcaaaaaaaacgattggtggagcatttgatttcctagcgaaaaaatatcaattgttagagattttgaaatttaagaaaaactatcttgattactgtgaaaagatattacaagtcaaaacattagtgtccccggatcgggtattccatattgatgatatttatgtaacggttgatattttaccatcaggttcgcagttaaaaataccaatcatggattcaacgacattggataatgataaggctctattgattaaaggattagcaggccaaggaaaatccacccttctaagaaaattattgtctaataatgctaaacggtttcatcggcttccaatattttatgaattaaaaaactatacaggtggtaggattgaaaaagaaatcacattatcacttaataactccgggataaaaataaaggaacatgctttatctaaactattgctcgatagtaatgtcaaagtatatcttgatgcttttgacgaaaccaaaccagaatttagaaatcaattaatagatcaaattaggcgattagtaaattcctttaaatgccatgttatttgcacaagtcgtcctgacactgaaattgatactctttctgaacttgaaacctattcagtatgtgagttaacagaacaacaaatattcggaatcataaaaaatacggcctctgacaatgagaaatcaagagaattatgcgaagccctaaagcatagcccgttgcactctagacaagactcgatattaaaatcaccaatacttgtcgttcttttttgcatcagttacaacttaggggaacagataccagcaacactatcacaattctattcgaatattttcgatactgttttccataggcatgataacatcaaaggtaaagtaaatagacaacgtcactggaatgataataggcgtatatatagagagttatttaactgcctttgttttatttctctgcgtactggtgtaattagtttcaaaaaagatgtatttatagattttgttgctcactcattaactcatgttggcgaagacagtaacgtctccgataagatagccattgaactttcaactatcacaaatttaattatcgaggacggattcaatgaataccgttacgttcataaatcaatccaagagttttttgcggcttccttcattctgtctttagaccatagtaagaaagttggattttataaaaagtgctttaacgatcattctttttatattatttttcataatgttctttttttcctagaggaattagattaccatgattattttagccatggatttattcccgctgtggaagatatgttttcacttaagcatcaattagactttgaaaccatttcaatccctcaaaaaatagaagatattttcttagaaaatacatttatgaaagcaagaatatctttattcaaagcaaagggaaatgaaagtattgatgttgaaataaataatttttcctttgaatcagaactctctccaccaagtctttacgtaacagtatttaacttttgcctcgaacaattgaatatagatttttctgataaagaaattgcagagttaatattaaagacaggaagaaaaactaatgatggttggcataagttatccttaaggactgcactcttacataaaagaattccattatcaaaaatacaggaattattgcgactaagttttgatgtactcatacgccgcaaattagctttagctaatgaaaaaataaaaagccgcaaagcctctcttgatgataccgagttttttgacttttaa

SEQ ID NO: 155087 - DNA, 1830 bp, Enterobacter cloacae
atgagccttagtcaatacaaggacagaattcgcgctttgcaacgtgaacttgaaaaaggtgattttgaacccttcattcagcatatcagattcccctatttcaaaaatttagagatgaatgctcgaattgattttcaatttccaataactgctttagttggtcaaaacggcacaaataaaagttcggttattaaagcattgtttggatgcccacatggtaaaaacattacgcgttattggttcactactgaaacggatgagtttcctgatctacaacttgccgatggatcgtctttgaagccacgttatatttatggctataaaaattccgaaggtaagttaattgaaattctacaatcaagaatcaatgctacaaagcatactatcgattactgggaaaccagtcggccattagttggcgataatatgattagtgtttctgccgtatctggagcgaatagtagagctacaagatggcgtaagattagtaaaggacttgaatttttagatttcagatcagaaataagtgcgtttgatagatgcatgtatcactctgattttaaaatcaggaaaaagaaaagtggcaatgttataaccaaacaagattatattaggagtaaatccaaatatatcaaaagagcatttgatgaaaagttaggtagccttgagttgtggggggcagaaacaattgtaaaaaataaaaccttaacccaagatatggttgaggccgtatcttttattcttggtcgtaattataaagcagtgaaatttttagagcatagactttggggggctcgtggaggtactgcacttctctctacagacaaattgaattacactgaggcatttgcagggagtggcgagttcgctgttgtatcgctggtattacgtctttttagtgcgaagcctaaatcattaattttgctggacgaaccagaagtgtcgctgcatccaggggctcagaaaagaatgatggaggttttatatagagttgttgaagaacataaacatcaaataatactttcaacacactctccggtattggttaatttacttcctaaagaagctattaaattatttatatatgatcaagaatcagagtcagcttcaattgctcagaatatatcagccgacgaagcattcgtagaacttggccatgatataacaaaaaaaacaatcgtcgttgaagataagctagcgaaagagattatattaaaagctataaaaacagatgattatttaaataaatcatttaatgttgatttcatacctggtggatcagaaaccattttgagtaaacatttgccaagttatgcattggtttctcgagacgacatattatttgttttggatggtgataaaaataaaaaaattaagtccgtacgcataagtgaaatcgcagatgcgaatttggttaagtttatgaaagaatattttgggtgtgaattagttgtaaatgccagtgggaaccaagggaaagtaaatgagaaagaatccattaatcttaaaaggcaagttttagaatatgccataaaaaaagttcagtatttaccatttgacacacctgagcagtttttacttgagaattgctgtactgaagatgaattaaacatgttagggaaaatggtttgggatacaaaagataaagatttatttaagcacaaaattagtgttttagcccaaactcaatacgcaaaagatgatgtagacgcggatgaaatattttgtttccagaaaatactcatcgctcgtttaaaaaatgaccagccaattttgaagggcattagaaagataattactacggccctcgatcgtggtatcataaagtaa

SEQ ID NO: 155088 - DNA, 1041 bp, Enterobacter cloacae
atgaagaaaatcaaagtgttcgatttcttttccggttgtggtgggactagccaaggcttccgccaagcaggcatggaaattgttttcggcttggattacgatcatgatgcctctaattcgtttcgggcgaacttccctcaggctactttcgttaatgctgacatcagagatatttcagatgatgctatttcacatttgattaatgttgatgatgatgagtttattctattttcgggctgtgcaccttgtcagcccttttccaaacaaaattctaataagagagacgatgatcctagattggatcttctaaaggagttttcaagattcgtttcatattatttgcctgatttcgtttttgttgaaaatgttcctggcatgcaaaagttcaataaaaatgaaggtacgttcaagtatttcttggataaactaactgaaactggatatagttttgattataaagtcatgccatctgcttggtttggcgtaccacaaacccgtgaacgtttagttttactcgcggcaaaaaatttctcggtacaactgccgctacctacccatggtggaagtgacaatcctttctccactgtcagagattggattggcaacctccctcctataaacgcaggagaaaaacatggtattgtacctgatcatgaagcagcaaaattaactgagattaacctcaagaggattcaatcaaccccggagggtggaagccgtgaattttggcccgaagagttgattttaaaatgtcatcgtaatcataaaggtcatactgatgtttatgggcgtcttagttgggataagcctgcaagcggcttaacgacacgctgtataagttattcaaatggacgctttggtcacccgacacagcatagagctatttccgttcgcgaagcagctagtctgcaaacttttccaattgattataaatttacgggttctcttcagtcacgtgccaagcaaatcggaaacgctgtaccgccaaagatgtctgaagccatcggaaaacatttgaggaagctaattgacggtttttaa

SEQ ID NO: 155089 - DNA, 420 bp, Enterobacter cloacae
atgaccaaaccattaacccaaaaagagcaggtagcggtttttgttcgttaccaaccgaactgtgcagttggcgacgtttccgaggcgcttaatatgcatggagctacagcaggcaagttactgagagagttaagtgacgaaggagtaataaaccggacacgtaacagcattcagtttacttattcggccgctcctgatgcagaaattcctgaggtgatccttccatgtatgttggaaaaaagcgatccggtcaggatgcaggctgccgagcaaaaagcgaaggagcttgagcagaagggcctgtggcgaagagctgctgcggtgtattcagaaatgtttggcatagctggttgtgctgttgaggttgcacgtatcgctaagcgacgtaaagactgtctgcgccaggcgacgagggggtga

SEQ ID NO: 155090 - DNA, 312 bp, Enterobacter cloacae
atggccagccataaactctggactattatccgcgctatccagcgcagcggggaaataaccccgcgtcaagtacgcgctctgctggggtgtaacagtaaaaaagcatgccgactgctggagcatctcgttgcagtgggcgcgctgaagaacatcgggcagcctcgtcatccagtatttgtgttgcagcctagcggggtgcaacgcatcaagccagtgcccgttgagcgccagaaaagaagcgttgtcgaagcttgccgccagaactggcagggctatcagatccacaaaattattgggagcactcgcgcataa

SEQ ID NO: 155091 - DNA, 195 bp, Enterobacter cloacae
atgacaattagaaaagtaacattcaaaaaaggtaaggaagaaatcggctgcgattgctttgatctccctgatatagccgattcccaagggtattatggttatctttctaaagataatgtagatatgttcgaaaatgaagtctcataccctatagagaaaattggcgaagaatattttgttcatctgccacaataa

SEQ ID NO: 155092 - DNA, 849 bp, Enterobacter cloacae
gtgaaatattttaaacatggcgctggatgccgagtagatttaaattctggacctgttgattttgatttcggtgaacatggtgagataggtgggtttaattcttggtggttaacagaatgtgcaggcagtagattaccattatatggatttattaattatagtgatgtagataatcatttaaagcaagaattagaaaatggacatttattgcccttgaatcaaggtctttactacattgctaaagttccatttaaatacgctttagatatagatagtcgcgcccctggggatgaacttccaagtcgtaatcaagatcgcgttttaacactgcagattcattatttcgaaactgctgaacttatgttccgaaattacaataaactcaaacaaaaaatgcaaaaaaatggatcgttgattcatcgtgatgaatttgacatgcgagtatatctttttacatggttaggtttcttaggtgttgtatgcgagggttttcgtaacctaaacatgcgaatcttattggcaaaagaacgccccaatgaatttaaagaactaatattaatttctgacaacattggaaaactgatgaaagaaaattcgaattcgctcagggtttttagaaataatgtatttcaccttagagaaaacacagaatctgtgcgtcaattttttgatgcagacgttaatcgccttcaatgggcaagagacttacacgcggcactttcagattttttttcgaattaccgagtcttctgtgaaatacattatttaattaacggacggaatggcgagagtgatttgataagagagaaattaacaagccagaagaaatcaaatttaaattcacattga

SEQ ID NO: 155093 - DNA, 276 bp, Enterobacter cloacae
atgttagattaccttcagtcattaccggttcgtattcatgatcattttgctgcgatgacggcgctgatcttctttgcaactattttcaaaatcgtttttcctttcatcgcgtacctgataaaccgtgtctttgagtatcgaagttacaagcgctttagcaaaaaagaagggataagcgacgaacgagcgagagaaattgctaaagagatctggagaccgaaatccaagccaccaaaatggtttttgagacttaaaaacaaactattacgcaaataa

SEQ ID NO: 155094 - DNA, 516 bp, Enterobacter cloacae
gtgaaaattaattttttccccatcgcgatagtcgttatcgctgggctgtcaattgcgcttgtaaaaagttgctcatacgccggcagcatacagagtgataacgatgttctgcgaagtgacaacgctttgcagggccaggtgatagctactcaggctttcaacttcaatcgattcaatcaggtatcagagcatgccaacaggcttaactccctgatcgacaccagcaccgaagaaaccgtaatcgaataccgggagattctccgccgtgaaaaaaactgtgatctgcctgttcctgctgacattgctggtgggctgctcgaatacgcgtaccgtttacgttccagcgcaatgcacgccgataccaacggacctgatacagccgatgatcgtgccgctgccgccagcacaataacgtactgtcaggctgtgctgtggattaagccgctactggccgtgattgaaaagggcaacaataacctggctggcatacggcagattgagcaagagcggcagtga

SEQ ID NO: 155095 - DNA, 753 bp, Enterobacter cloacae
atgggtaaaaaaatcattacgttgtccgcagtagcgacggatgttctgtatgcgctgtttttccgtggtgcgcttaagtctagcgatctgccagctaaatctggtgcaaatgagcttcgagggctgggattcgctgaaacacgccatagcgcgacggagtatcaaaaggaaaattatttcaccttcctgactgctgcagggcaggagtttgctattaagcatctggtaaatacacgctttggtgtacctgccggtggttatatcggctcacatgtagataagccggggggagatatccgttgctgctgcccaatagaaggcattagctggggctggtttgtcgataaatccggacaggcatacatccacaaggcgctgatcggcgatggcgtattgtctacgagttacaacgtgaaattacacgtcgccgaaaaaggcaaatcgtatgaagccggcatgaccatcggggttgaagatgggcagaacaatgccgttgaagccgctcaatcaaacgtcggaaacgccgtggtaacagccacgaaggtgaagtttaagcttggcgatgaaatgacgcaggccgtcattgatgctgtacgtgaaagcgatttattcgcatcgctccaggcaaatattgatgcgcaaacagcttcagtggctggcctgcaacaggcgatgcacgatgcggtaaacgatgcaattcgcaacgcgctaaagcctggcggtgcaatatgggttcaacaaagagcgagttga

SEQ ID NO: 155096 - DNA, 297 bp, Enterobacter cloacae
atgccacagggtttacaatgctgggacggcgcggggcgtattgccgtcgatttaagtgattatgctattcggtatattggaagcacttctgtaacatttgcggcgggggaaacggctaaggacgtttcatatcccggcattactcaggacggtacatttatatcgattgtcacggctggcgttactgcaaacgaatattactgccgtgcttataatggcggctttactgcattctatttgcctatcaccggtagtccggcattcacttttaatgttgaggtttataactttcaatga

SEQ ID NO: 155097 - DNA, 363 bp, Enterobacter cloacae
atgaaacgattattcgctgcagtatttttgctgctggctggctgttccagtaaacacacagacaacacattcagaatggattacccggttgatgcagcccgtttatcactgggtggtaatattcacgtgaatattgactgcgcaaccaggaaagttaacgtaatttcagacagcagtaatggcatcttcagccgacatgtcaataagcggctcagcaatatctgttataaaaaaaccgataaactcgatgtcgtttatcgcttcaacgcagcgaagggagtcaggcaagatatgattgccacgcactatccacgcgtcccgccagtatcaaatcccgacaaactgagcgatggggattcgtaa

SEQ ID NO: 155098 - DNA, 276 bp, Enterobacter cloacae
atgacgccttacacgacacgccagagggctcagggaacgttacctagatacaggtatcgtaatgaggaattttcgtttagtcgccagatcccctctggcgtgggggctatcatcgtcaagctggactcacaactcatagcagaccgaggatgcccagattacgtcaactttgtgccagaagcggacgttatgctaatcattgatgagatgatttggttggagcgtacgcttagccagcttcttttgcagaatgataacgatgatggggaaccctga

SEQ ID NO: 155099 - DNA, 513 bp, Enterobacter cloacae
atgaaggttacgaatatatactcgcaaaaaacgcgtcacaagacggcacattttccatcctcaggcacaaagttgatacccttggacaaactcatacacggtcgcccgtacgaagaaaccgacgcagggccgctctttaaaccttgcgtgccgcacggtgtgctggcccggcttggcgataaatggacgatccttgtgatttcccatcttgcggtggcccctggccaccgcctgcgtttttcggcactcaagaaaggcattgagggcatcacgcagagaatgctcacgctcaccgtccgcaacctcgaacgcgatggcctgctgctgcggcattatttccctgaagttccgccgcgcgtggaatacgagctgacggccatgggtgccagcatgttgcccgcactggaaggcttcacatcgtggatccgcgataactggcccgacattagagaggcacgcctcagctatgacgccttacacgacacgccagagggctcagggaacgttacctag

SEQ ID NO: 155100 - DNA, 915 bp, Enterobacter cloacae
atgtctgacaataaaggtttgattcttgtcttcggggccactggccagcaaggcggctcggtcgccattgcactgttgaaagcggggtggtccgtccgcgcgctggtgcgcgatcccgcatcaagcaagtcggccgcgctgcgtgacgccggggcggaaatcgtacagggcgatttcagagatgctgcatcactgcgcgccgcaatggacggtgtgcatggcgtgttcagcgtccaacccagttcacctggcggcacggttactgacgacgacgagattcactttggcatcgccatcgccgacctggcgcgcgagtgcggagttgcgcacctcgtctacagttcagttgccggtgtcgaggctggcgagggactgggccatttcgagagcaaggcacgaatcgaggcacacattggcacgctgccgatgaatgcgaccattatccggccgtacacctttatggaaatgctggtcatgcccggcttcggactcgacagcggacacttcaactttttcatgcggccggaccagccggtaggtgtgcttgccgtgagggatatcggtaactatgtcgctgcgattttcgccgatccagcgcgttttgccggcgccacgctggacatcgccggcgacacggttacgggcctggacctcgcgatgctgttcaccgaagcgtctggtcgaaccattacctattcccgctttccggacgaggtgctcgctgcaaacccatttctgggcaaactgaccgacatgctggatcgagtacagccggtaagtaaggccgaactcctggaactgcggcgcatcaatcctgagatgcaatcgatgcgcacatggcttgcaggtgatggccgggaagcgttcatgacagcactcggggcaggcggagcctgggcctacaaccagcattag

SEQ ID NO: 155101 - DNA, 561 bp, Enterobacter cloacae
atgtataacttaatgattttgggggcgggtggtcatgggcgtacgctctatgagatggcgagacttctgggatacgaggatattgttttccttgatgataatacgtcacccttcgatgacactaacaaactcataatcgggaaaatttccgaactcaagctacatttcaataaagccagtcatatagttattggcattgggaataataatgtcagagaacaactctatcgacagcttaaaagcttaggtattcatcccgtaacgcttatacatccctttgcatttgtcagcccatcggcgacgattgctgatggttctgtcgtattagcgggagcggtggttggtgccaatacgaaattaggtgcaggtacgattgtaaattgccattcgacagtagatcatgattcaactgtgggtgattttgcacacttaggtgttggtgtacatcttgctgggggcactgtgattgggaaatcagcgtttctgcaggcgggtacagtgggtggttataatgcaaaagtagatgctgacttagtatgttctgctggtactattttataa

SEQ ID NO: 155102 - DNA, 1044 bp, Enterobacter cloacae
atgttgactctggagatcataatattcgcctttttaatctcatgtgcacttacatggagtttacgcgtttacgcgattaaacataatgtaatcgaccgtccaaatcagagaagttctcattccgtgccgaccccgcgaggagggggagtagcaatcgttctgacaatattagcggcgttagcctgtttctatttcagcaacgatctgatgattaagagctttctaggattgtttatcccagggttaattgttgccattattggtttccttgatgatcacggccatattgcggcgcgctggcgtttgttaatgcatttcctggccgcagcaattggtatgtattttttaggcactttccccgttattaatttgtttggttatgagctttccttatcatggattggtatgattctgggctgtgtttatctggtctggatgctgaacttatataatttcatggacgggattaatggcttagctagtgcggaggcgatcacgtttgccgcatgtagtgcaatattggtggtcgtcaaccatttcaccgacgcgcctggaagtatttatccactgatgcttgcccttatcggtgctgcgggaggttttattgtctggaacttcccggtagcgaaaatcttcatgggcgatgctgggagtggtttccttggaataaccatcggactgatgattcttcatatcgcgaaagtagactcgcacttctttattgcagagttgtccttgctgggcatatttatcgtcgatgccacgactacattgcttcgaagagtcgtggcggggaaaaaagtctatgaagcgcatgccagccatagctatcaaatcctcgcaagaaaatatggcagccacgttcctgtgacattgatggcgattgccgtcaatctgctgtggctcttcccaatcgctatgctaattgcctcagccaaaattgatggcgttgtggggttggtaatcgcctggttcccgcttcttattgttgcacttaaatgtggtgcaggcgttagagacaaagagagcaacgtcaatgtataa

SEQ ID NO: 155103 - DNA, 948 bp, Enterobacter cloacae
atgaaagtattggtgactggcggaaccggatttcttggtactgctttagtccagacgttgaaatcatcagggcatatggtgatgttaacaacgcgcaggcaggaggatattgaacaggggatgtacaacctgggtgatatcactgcagaaaccaactggataagcctacttcaaggatgtgacactgttatccatacagccggaagggcacatatccttaatgatgatgctcaggatgcgctagcggaatttcgccgagttaatcacgacgcaactctgaagttagctaaagacgcagccagttgtggtgtgaagcatttcattttcataagctcgattggtgtcaatggtaattctacaacttcaggcactccgtttacagaaacctcagtcccgcgcccaacatctgattatgcaatttccaaacttgaagcggagcaaagtttggtaaaaaaatttgctgacagtgaaatggcgattaccattatccgtcctgcgttgatttgtggtaagaatgcgcccggcaatatccagcgcctgttaaaactggtgtcgaaaaatctgccattgccctttaaaaacattaaaaataagcgtgctctggtgtcattagataatgttgttagctttatcaatgaatgcgttgtgaatgatcactcaaaaaatcagctctacttgctcgccgatgaagagcatccttctactgaagatatggtgaacgccttcgctgcaggaatgggattcagcgcaaaaaatatatattttcccaaaactatcatgaaattacttctttcagttgtgggtaagcacgggatttatgaacagttattcggcgatctggaagttaatgccagcaaatcgcgagaccatttgcattggacaccaccaactacgctgtatgaaacaatgaaaaaaactgcgaaatattatagtgaaggaaataaataa

SEQ ID NO: 155104 - DNA, 987 bp, Enterobacter cloacae
atgaacaaatatggaatttggctattagctccgctaatgctgggcgcctgcgataataatgtacctacaaaaccagttgtgggctccgggcagaaccagcagcacagcgcggaattacagagcctgattcgtcaggtaaaagcgaatctggtgtttgtggaaggcggtaattttctgatgggcgacttcggagcaaaatactgcccagaaaagattcaactcgacgcccaacaggacagtaaaccactgcataaggtgacgctgagcaactattccatcagtaaatttaaaaccaccaatcaggaatatcagctttacctgaaactaaataaactgtatttaagagaaagtaataatccattaacgcaaaagcgaatggatgcgttaaataagttgcctgatacgccagcgcacatggactggtacgatgcggagaaatattgtgcctggctgggtaaggtgagtggtctgccgtttgccttaccaaccgaagcccagtgggagtatgcggctcgcaaccgggggcagttcattattgctggaaccaatagcggtgtactggaaatggatgggatccagcgtgggattaatatttctggctccctggatcgtaaggagtttgcccggaagatggggcttagtactgaaatagatacagcaatgccagtggatcgttatccccccaacccactggggctctatgatatggcaggtaatgggtatgactggatcaaggactggtatgatccagattattataagaattccccggttgttgatccccagggaccggaaaaaccggtatttaagcgtcgtgaggggatttacgatacagaagaaaaatatcagaaggtgctgcgtggtgcgggaacttcaggtccctttaacggcttgacggtcgcccgttttaagcgcagccaggatacaaaagttacctttataacgacggttcgctgtgtcgttaacagtccacagccggtgaagtag

SEQ ID NO: 155105 - DNA, 150 bp, Enterobacter cloacae
atgatccgtgaaacaatgataagtatgaaatcttttatgttcataacgtccaatttaaaccaggcgcctaataaaactaataatgatcctcccatttcttatgaatttttgggaatgcatatagatagattacatatccaacgcatgtaa

SEQ ID NO: 155106 - DNA, 228 bp, Enterobacter cloacae
atgaattttaaaagcactattatttttgtcatttttaagggtgtttgtgctgttggtgcaactttagtccttgtgggactcattatgtcttgttggttcttttttgtatcagagctagagaacaaattctactggggagggctggcttttgttgttacatgcgttggatatgtaatctatctatatgcattcccaaaaattcataagaaatgggaggatcattattag

SEQ ID NO: 155107 - DNA, 831 bp, Enterobacter cloacae
atgctggctttaggggtatattctgaagtttttcttgcagatgccagagctcatcgtgatgaggtttgtaagcttttggcaaacagcatcgatccgggagataaaaagaaaaatgatgaggttgaacaggaagaagcacgtactttcgaacaacttgctattgagtggcatgctacaaataaaaagtggtcggaagaacatagccggcgattactgaaaagcctggaggacaatctcttccctgccataggtaagcggaatattgctgatcttaaaactagagacctgctagccccaatcaaagcggtagagttgtcggggcgacttgaggtggcatcccgtttacagcagcgcactactgcaattatgagatatgccgttcagaatggtttacttgattacaatcccgcgcaggaaatggttggtgctgttgcttcaagtgacaggcagcatcgacctgcattagagttgaaacgtacccccgaactgcttgagcgcattgacagctatacaggtagacctttgacccgccttgccgttgagctaactcttcttgtatttattcgttcaagtgaactacgttttgctcgttggtctgatatcgattttgaaacattgatgtggacgataccagcagagctcgaagctattgaaggagtgaaaaaaatgcgtacgcctcatttggtgccgttatctcgtcaggcgttagcaatccttaaacaggtacacaaacttagtggcgatcgtgattttattttcattggcgatcatgaccatcgcaaaccgatgagtgagaacacggtaaacagggctctgcgtgttatgggttag

SEQ ID NO: 155108 - DNA, 150 bp, Enterobacter cloacae
atgagccatattgaacgtaacccagtacgtgctgcttacattcataaggctgagcatcttgatgagcggcgactaatgctgcagtggtgggctgattttttggatgcgaatagggaaagtgaagttagtccttatgactttggcaagtag

SEQ ID NO: 155109 - DNA, 234 bp, Enterobacter cloacae
atgaaaactttcgatgcccaacttgcgatgagtattgtatcgcactcaactggaggttttagtcacgacactcttgctagggctatgatttctaaggataaaaatgaaatccctgacgtccttcttgaatcatgtcgagacttttgtttatcccttgaggaaaaaggcattttgagacgatgccaaaaatgttctcattctcaagatgaatatttcgagtatattcctcactaa

SEQ ID NO: 155110 - DNA, 2184 bp, Enterobacter cloacae
atgaataatatcccctcttggattagggccttctttggcgaaagcaatttgctcagccttgataaactgctaagcgactcccccggtgcttacgcgcccgagcagaaaaatgcgctgttgcctcttgtggagagcgcactggacggtgaatggcccattattctgccttggtgcgaccgccaacactgggttttcttcgcgatggcagaagatgagcgcaccctgcaggaactcaccaaagttatcaatgcccggcttggttcagccgacgttgagcccgatcgccgaatttacttgagcccgacttctggcccgacttttacggcagaaaccgcattgctcgaacatagcccagcagggtttattcgtattgagttgctggaaggtaaacgtgaggataagcaggcaaaaacgcgggtttttgccgccctgaaagagttgattgacctgttccgactgcgtccatctctcgttcgcacccgcaagcgcccgtttggtcgtatccttagcgatttcatgctggcaacaaatcaaaaagaggtggaggccagcaatgactttctgcaagaactgcgtgataacggtctgctctccaaacgcaatctgctgctacttgagcttcagcaggccgggaaatggcaaaattgggatgccctgctaaaccaccaagacctgccagatctgatcagagggcgcattccctcgtcgctgaccagaatgctgcttgccgcttatcagcaccgctatctgggccatgatgcccttagctacacgcaggagacgccatcggttttgcgcccagccttccttgccctccaaccgctttttacgcaggttccactgctaggaagcgaggaaggggaaattaactcttggagaagttgggcgattggcgtggcgctggtgggtgaacaaaacctgctcagcatgatacctgacacgctgaaatcaggatggcttcaggaattacagcactgggccgaactcaagagcactgtgtacgatactccagcctcttctcctgtctcgttgtcgctgccgccaacaacacttgaatctctggccagttatctacaaacgtcgttgacagccacagccgaaacgctgggaagctatgctgagatgctcagcaagatagattcacaacttattgatcaagctcagaaaatccctcttctaaaaacgctgattgagagcatcaaccggcttactgccacgagcatcaccggctgggacaactggttctcgcgcctgcgcgaacccgatgccgatagaaacgctctgatgcaaattgtcgctctggagagcgagcactggccagccacctccttccaagaatcggcttttgttcacctgctggcgcaggattttccgccgcatgccttttcaacactacgcaacgccatgcccgcctttatcgagtggctgaggaaaaaccaactgcaattgcagagtacaacatggctgaaatggatggatgttctggcgatggaacaaagcgtcagtccggcggacatcaaactggcaaccctggcaaccgaatctttcctgcaaggtcctctcaccctggctgaataccagaattttgttgctacattgcaactcattattgagcgctgcagttcacttaaaaatctgacctcgcttgaagagatgatcgaactgtttctggatgcaccggagcacgataacgccacacgaaacgcgctatggatggatattcagacttttgctgttggtgtatggccgcgcctcgatcactcaacccgagccatcatgcgtagtctggccatccacgtattgggcaatggtgctgattcagcgtttcctccggaaccggcacgaagcgatgatagcgagcctgaaacacttccggatctctcgggcaaacgcgtcgccatttataccctgacagaaggagctgcccgccgggccagggggatgattgaagtgttgtttcaggggatcagagtagatgtgaatcatgaccataacgcaacggataagctggtcaatttagcaaaacaggctgattactttatttttgccgccgcgagcgcaaaacatcaggcactgtatgcgataacgcctcatcgtcgcgatctcatttatcctgaaggtaaaggtgctggttcgattctcaatgcctttgttgcacgtcttcaacaaacccatgagtattga

SEQ ID NO: 155111 - DNA, 531 bp, Enterobacter cloacae
atggaagagcaacgacaaatatttctccatggacctctcggacagcgacaactgagggaagtactgagtgcgcagttcagtgggcttatcctgtaccctgaactcatctggctgatctcgccatggatgagcgattttgacgtcattgataatcgcggggggcaatggagttttcttgatccgtcgtggggtgccagaatggtcagtttccaggagcttctggcgacggcggtgaataacggctgttcactcaggatagtcactcgcccggacacgcttaacaaagtgttcgttgagcgactgcaggcaagactttcgccgaatcatgatatgcaatgctcctattatgagaacctacatgccaaaggcatgttaacaaagcacttctttctgaaaggttcgatgaactacacctggagcggtgcgaaccttaacgatgagcatttactgttctccagcaacaaaaccctcatttctgacgcactgattgaattcggtgggcaatataccttcggtgacagtgatgaataa

SEQ ID NO: 155112 - DNA, 4431 bp, Enterobacter cloacae
atgactgctgaggatataagtcgtctgcatgcggcgctggatgtactcgaagggcgcgaatctgagttgctggtctggggagacacggaaggcgcctttacggatgcggatattctgtccctgtttgcccaccattttcctaatgataatggcaaagtgctgatgcaggatcttcaagacgccgcgatgttatttagcatccccaatactcagggaatgaggctatatcgcactcgtatggcggaatctgttcatctctttcgccatcagcgccagtggtttcgcggccagcagttgaatcgcacgcggtcgctggtggctgactatcgctttatccgccgtccgcgcagttacccggcaaggatatatccggctgaagaagtgctaaatcaatggtccgatgttgagtggatgaacgacattaaacgtcaggccctactaacgcttatcggtgatttctccatagccggttttcagtctaaggctacggcgcgcatcctgcgggcatgggattttcacagcagtcacccacatgccaaagaagcaaccgccaccatcgtatgtgccggcaccggcagcggtaaaaccctggcgttttatctgcctgctctaacatcacttatcaatgatctgcaacgcgaccgctcggcgcgggttcgctcactggctctttatccgcgtaaagagttacttaaagatcagtttatggagacttggggaaaatgccgcgaagtggacacccaggcacagaaactttccgggcgaaaaatccgcattggctccttctttggcgatacgccgtacagcatccagtacgttgataaagacaaagatcttcattttgatctactacgctgcagcactccaaaatgccaaggcgaaatgtgctggaaagcggaagatatccgtcagggcaaagagatcttgcgttgtacgcactgcacgcacagcgtgggtgaagatgaagtggtgctcacccgcgtctcattgatgaataacccaccggatattttgtttaccaccactgaaatgctcaaccagcatctaggcaacaacaaggccagccatctgttcggcgtcggcatgaatgtaattgcaccgccggtggttttgctcgatgaggtccatacctattcaggcaacagcggcgcgcaaactgcctatctacttcgtcgctggatgcaactggcgcgctgccgcccgcattttgtgggcctctcggcaacgttgagcgatgctgagcggttcttcgcagacttggtaggagccaacaaaaaacatgtcatgctcattgagcccgctttccaggagatggtagacgaaggggctgaatatctgttggcactgcgaggcgatcccgtttcgcaaacggcgctgctctcaaccaccatccaaaccagtatgctagcacgccggattatggatacccgcaaagccacgtcgcacggcacctggggtcgcaaaaccttcgtctttaccgacgatcttgatatcaataaccgcctctaccaccagctctgcgatgccgaagggtggcgtacgcgcggacaacaacttctgcctaacgaaactccactggcagctcagcgtaacgaaaacaatggtgcttccgacgcgttgacccttgccggtcaaaattggcgaatggtgatcgatattgggcatcctcttgatggtcacgatcgtgccatcgtggcgcggacatccagccaggacgctggagtcaatcctaaagccgacattgtcgtggcaaccgcctcgctggaagtcggctttaacgatccttcagtcggggtagtgattcagcataaagcaccgcgcaatgtcgcctcttatctgcaacgcaaaggccgagctgggcgctcaagaaccatgcgcccctggatggtggtcgtgctgtcagaattcggtcgcgatcgcgtggtgtaccaacgttatgaggaactggtgacaccggaaatcaagggccagtcactccctctaggcaatatccatatccagaaaatgcaggcagcgatggcaactctggactggctaagcatgaagatccctggcagtaacatctggtcattgctgaacaatccgcccaaaagcaaagagcagctaggacatctggaacgcatgctctctttgatttccgccgtgctggaaaagaatgtctctcagcaggaactcgaacaatacttattctacgcgctcaaaataaccgagctgcaacttcagcgcgttatgtggtctccgccacgctctatcatgatggagttgctccctaccttgaagcgccaattgaccacccggtggtcgctgatgggtactcccggcgcagacagatcgacggggcgttcaccactgccttcgtttattccagcagccctcttcagcgagttgaacttgcctgaactgagcatccagcttgaacgccgctttacgaaatatgaaaatctgccatttattcagggtctgaaggagtttgcaccgggtcgcatctccaagcgctacgccatttattccgatctggaagccgattggctggtgccaaacaattttgtgccgcaactgaaccaggtttcagacatcgatttcgagatcaacgaggcatttggtgatacctggcagccggagtgtctggtaacccttgcggatgcatcgcagctaaaagtcattcgtcctctgcaaattattacccgagctcttgatttcaaacagaatctgactgagaagagtaattctcagctaacgtggcacactcacttttccacagatgcccatgccgaagcgatggcgatccccgctgggccatggagcacagtgttgcggtccgccacgttttatacacatcaacatatgacaccccttgagctgacgcgttatgccaccgccgccagcgcttcgctgcgcagtaaaagcaaacagcaggcctgggtgaattttagatgggtcgaaaacggtcacccagtcgcagttggtgcccgccagtgggtggatggcatgaagctgagttttacgctgcctcccgcactgcatcagcaggtcatgaatgatacaaagttagccgggtctctcagaacgctctatttccgccactgtattagcagtgaagctcgttttgaatatgacagtttcaccgctgactggatctacgagtgctatatggcggcgctgaccaaagaagttgtcagcagcacagccctcgctgatgcaattcacgctctacgcacgccggagggcagagagtcgctggcgacaattgccgactcgctgttccaggccgaaaatatttttgaaaacaacgaagatggagagggctcagcggagcgccaggagctacagcagcagttgaggaatctgttcaacgagccggaactgcttgcaatgcttgatacgcatagcgccgtgttgactgacgacctcagccaaaatgcctctttttgccagtggctccagacgttgttgatcagcaccttctcaggtgccgtaaaacagaccagccatatgttgctgcctgaggtggacgacagaggactgctcgttgacgccgttcttaatggggaacaactcgatatctggctcaccgaatcagagcctgggggctgcgggattatcacccgcgtcgaagaagcgttccacggcgatccggtcgccctgctgaacctgtttattcgtagctttgccgccagcgactacgagcagatcgatgacgctctcttcgagttgctctcgcgactcccttcaaacaccacattgcagcagacgctgaacgatttacgtttggcggggaatcatcatgatcgccggattgcgaatggaaacctacgcactgagctaaaaaaacaaggatttgcgctttctcacagctttatgtctgtgctgcatacccgcatccttcgccctggcagccagctttctcacgatcggcgcttgctggactatctgcgcgaatggcgggcgctggaggccaaagctggttatgagattaacctgaatatttttgcccatactcaggcaattcaggaacttcccggagcgaacgtaacaaaaattttcgaccgtttttgccagattcagggcatgctgtggcagcgtggcaatactatccgccagtcgatactcagctactacaacccctttgataacggtccaaaactcacggaaaggctgctgctcagcaccttgttctggcaacctgcgacgcagattgatgtgacagacagcgactggctttcgcagatccacacggcgatctctcgcgaagggtttgctgaattactgctcccccgggaagcccgccaacaggtggtacagaccgtatccgcgttacaattggtacctgtcgattatttcggcctgcacctctacccgagaattggggccgtcgactatcgaggcggcaacatcgtgttgcgagtcgaactggctgaagccctgcagtaa

SEQ ID NO: 155113 - DNA, 828 bp, Enterobacter cloacae
atgagtacgttacgccaacagcttgcagagatgcagaagcaactggacttaagcgtccaggcgagtaaagccacgcaaattattgagaaatgcggcatcgttatctcaaaaaccgacaccgtcgccgggcattatggccgccttaaataccaatacacggccctgcaaagtctgccgtctgacttaagggtcaattggagagaagagcagcgaaatgaactcaaaaatgctgctaacagcgtcaacaacctgctgtcgcagtggagtcgctggctgaataatcagacccaggtcgcagccgctgccaatacgcaagcttctgatgaaccgttggataaaacgcttacaatgcaggaacccacggcctatgacattattcagaatgactccctgaccaactgcgtgagccaggcactcagcctgcaccgcacgctgagcgaccagttgaaaaacgcatgggaagagtggcagcagatcctgtatcagcagattcaggtagacagcaaaaccctcgatgctcagcagaaactcgagaaactgaaagagattgctgacgaatacctaagcctgcgcgacaagtttgatgacttgatccagcctttgcctgagaacggcgagagcgtggcgaagatccgggcaatggcggagcacctgaacactctgcgcggcatgatgaaaaccgactggcctgaagcggtgcagcatttcctggatcgaatcaatggcccacagcgaagcaaaccgacactgagtgcactgacgacagaagtgtttgagtggctgcgagatgaagacatgttggaagaatttgtgattacaaggaaatag

SEQ ID NO: 155114 - DNA, 3201 bp, Enterobacter cloacae
atgagcatcatgaattactggccgtcacttgagcatatcgagcagtgcatccgtaacgaagccgaagagttgcaggatgatgtgctgttagcggtacatgagccgatggtgcttacccgtcgtgacgttaacaacaatcaggctgtcctcagagatgaagacctgtttacgcaactgctcaccaccgagcgagctatcccgctcatcggccgttcagggatgggaaaatcgcatctggtacgctggctggactgtcgtctcaaaagccatctgcatgcaaaaggcgaactggcaaaatgggaaattgttcgtatcccgaaaaacgccagcctgcgccaggttctgctgctgatcctgaaaaatctgcacggcgatttttttgatgatgtgcgtaaaagcgtcgacgatgtggctgaacaacactccgctaaagatctcgctgatctgatgctgaccatgatgtctcatcaattggaaagcatgtatatcgaggcgatgaaactcggtcaggaatatgaatcgcaagggaaagagattccaacagagatcggtaatcgccttgatgcgattaacgaggaagttagcaatggtattggtaaactcattaccgatccaaaattcaaagaagacatacttcagccagggcattgcatctacagacgagccagtcgcatgagcgatgggcttaaagacggcgatgaggatcacgataactacgaacttgtacctgacgatctctttttccagaaaaatatcgacgatctttcgtcacctgcccgagagtatattcgccattcccgcatcgatgaagaggggaatgagagagcccgtattcaggcggtcagcgttctgaatgaagcgatgcatgcggcgttaaaatcgctgtttgccaaactctttaccttcaacggcggcaacttccaggagttgttccagcaaattcgcagtgagttgctcgcacaagatcgccgcctggtgatcctggtggaagatatggcagccatttcggccattgaagacgtgctgatcgacagcttaatccaagaaggtatgcgcgatggggtaaaaacgctctgcccggtgcactcagtcattgcagtcaccgataactatccgggctataagcgccgtcaggaaacgctgatgacacgcgcaggctatgagtggagcattgaaagcaccgatagagacaacaatgaagagcggattgtgtctctgtgcggtcgttatctgaatgcggcacgccatggcgcatcagccctgaaacagtcgcgggcagaaggtttggccgactggcctccgatatggaatgatgacggagcgccggaatggttggcggactttgggacgacagacaaacagcaggttccgctgttcccgtttaaccgcaacgctatccgggcgctggcaaataaaaactgccgcgacagcagcggccaactggcttttaacccacgaattgtgatcaaccgtatcctgctggatattttacgtgattgtcgcgttgaggcagagcacggggcattcccaccgccaaactttgccggaataatcacggaccctgaaatccataataaaatcaaccagctaactaccagcaggacgagcagtgcagcctctctggctgcattgtggggatacggcagtcactcttgggaggagatttgccagcaattaccatcaggtgtcgccgaggcctttggtttgagcgagttagccgataaaatatctgctaataaaggcaaaaacatagataaagacaaagacaaagacaaagacaaagacaaagacaaagacaaagacaaagacaaagacaaagacaaagacaaagacaaagacatttttccaccgccaccaccgccgccggaaaaaacgagtctgccttttgttaaacaccttaaagcctgggtcaacgaccaggcaattttacctcaggatgttgcccgcgatctgcgcgcaggaattaacaattgctatgaactcaatgcccaagtggaatttttcagtatggcagagcggccttcactgattgagcgtaatcctttgatcagtctgccactggcggcttccgatccttcgaacgccattgtgaaattctatgacctcaaagacctcaacgatccgctacgcaggatagagatctacaacgtgtcgctggcgattttgcgtatccagcattacgctaacaaaaacgaagggcttagctaccctgaagcgatggaagactacgcccactatgaaaactttgtcagttggtgggtgccgcaggccacggagattgcaatcaatcatgcccgggcacggaaactgaagcctgcgctgcgtaatcattaccagaaagcactgctgctgggcctgttgactggtaaagaaaatccggcggaactcatcgatgcgctttgcctgacgcagaaaggcgtcggtcgaaccgaggggaaaactcgcggtcgtaccgcagactctaacccatctgacctctgtttctacggactcgaagccaaccagaaaccacattccagcataaaagtggctgaagcccggcaggcagctcttcagggttgggacgacgcacgagacgcatggctttctcaggttgccgtccctgaattaagttccgggctcacctcaacccgcgcactcgaagccgaagtggtcacctccgcgttgaaagagctccagaaagaaccgctgggagcggatgtgcaacgtgcggccgagaccgtccgcaaagagatcgcctcaacgatcgaaaatgctcaactctttgaaaatataaaaaatcaggatgatttcattgctctcctcgatgagtggcagacgtttatcgaagcggttcgcacccaatattaccctcaggaatccgagcagatcagaaactcatcatggttgctgggtgaaattgaagcgttaagagtggatgcagaggccagtctgaacacgctgctcacgcttaattccctcgtcaaacagaaagatgccttcatgttgtggcatgacatttcccatctggatggtgattatgtcagtcgtatcggccaccttcttgcgcagtggcagaacattcaatcgaaaatcagttttacgctacagcaggtaaacagtaagggtgacgcgccgaaacttgaaagtgcccgcacgcaggttgaagagagactgaaaaatctggcagctgatatcagtgcctctggggtgaatgaatga

SEQ ID NO: 155115 - DNA, 873 bp, Enterobacter cloacae
atgtcaatcatcaataacgcaaacccaggaagcagcctggtgctgatccccttgtttgatcgcattgtacaaaatgcccaggcaccgctttccccggaagcggttgtggcccgctatcggcccaataacctgcccgctaacgataacgcctggggaaaaatcagagagaacctcgccttttggtgtcgactgggactctggccgatggaagaagagaggatcctgccgcagcccaatgaaactcgtccgctctatcagcgcgtgctgcaatgcactattgatgcctgcaaagaaaaaggtatcgctgaaggtaaggaatgtgaaccattgtggcgagtgctgacctgtttgatgaatcttcagcaacactcattaggcggcaaggaaccgttggccccgaatatcatcactgaaaaactgcaaagatggcttccgaccgaaaccattaactccaataccgaaaagctggtcagggaatatggacgctatctgggctttctggaactggccccggaccagaactactacaccgatccaacccgggcaattcagtgctttttgccgcagatttttggcgagcaaaaaagcctctccattaaaaccttcatggccaatatggctgaagtgatgccgatgatggacggtggtgagtttcgggtaaaagtgcaggagatcatgagcgaacggaactggtctgcaccggaaggtaagaatatcagcaccagtacatcacttgcgctacgtcgtctggaaatcgaccagaaaattcagctgatcgttgggagtgatgacgccgcctcattatcgctgcaattgcccaatggtgaaatccgcccagtcagccagatcagtctcagggaggccgcacaatga

SEQ ID NO: 155116 - DNA, 2481 bp, Enterobacter cloacae
atgacggaacaatggtcacgtctgcagtttgcgctaaccacctattttaccgatgacgttaccttcaaagaggggattgaaaatcccttcttcctgcggttaatgaacatcatcatcgatcctactgcgggcctgaatgatatttttgccggctatgctgatgcccttcgcaccgcacaggtgagcggcatcgaagatccctggctgccttctccgccgactctgacggagaccccagacccactttgggggctggaaaaatccgtcgtgggacagacgctgtcactctctgctgaagcggacctgacgggcacccagaccacttaccagcgccgaacccgacgtaacttattacagccggaaatggatccggcgctcaagaacctgctggtcgacacaccccatacgcactaccgtggcttcggacagcaggcggcaatccgcacgctgctcacctccgacgtcaacagcactctggtggtgaatctccccaccagctgcggtaaaagtcttatcacgcaaatccaggccatcagtgcgccgttcggttcgttaacgctggtaattgtcccaacggtcgccctcgccatagaacaagcggattttatgcgggacatgctgcgtcaggctgagcaggatcacggaggaacctatgcctgggttggcggtcaggatcacacaacgcgccagacgctgaaagaacggttgagaaacggctcacaacgcgtgctgttttgttcgccggaggcggcaaaatcgtcgctggttccggtactgtttgacctagcgaaaaataacctaataggtgccgtcgttatcgacgaagcccatcttatagaccaatggggcgctgaattccgccctgattttcagctgattgcgccgctgattcgttcattaaaagcccagcccggatgccgttttcgcaccctgctgctctccgccacctggagccagaacacccgtgatgtgattgttgagcagttccgctcagatgagagcgagctgatcgaaattacggcgaacttcctgcgccccgagcccgaatacttcgtgcatgctgaacccaaccctggtgcgcatcagcagcgtgtggagcagttgctgatgacgctgccacgcccgctcatcctctattgcaccacgaaggaagaagcggaaaactggcatcaccgactccagcaacagcattaccagcgtgttggcctgttccatggagacacggaaaccctggcccgcaaaaagctgatttcacaatgggcaagcgaccaactggacatcatgattgccacctcggcgtttggcgtaggaatgaataagagcaacgtccgtacggtcattcatgccgccattccggaaaatatcgatcgctattatcaggaatgtggacgtgccgggcgcgatggcaaagcttgtcaggcgcatctggtctggcacagtgcgcaaatggaaacggcagaaagcctatcggttgaaaaacttatcagtgtcgaaaaaggctaccagcgttggatggccatgtttgatcaatatcagcccagcgatatcgccagttacagcgtctcactggataccaaacccgatcatatcgactatcagggcgatcgaaatcaagcctggaaccgcagaaccttactgttgatgcagcgcaccgggctgattgaactggtgttcgcagcccctgaactgccagaaaacctgcgaaaagacgaagaagaaaacgctcaggcggttcacgattggtttgcccggtattacaacaaagtgcatatccgtcactgcaacgactcgcaccactctaaagagtactggaatacctttgttgataaggcccgccaggaagaactggataagcgccgcgcggcatttaccctgttgaaaacctggatcctcgaccctcgccctcccttgtgccagacactaagaaaattttatatttatcagaaccatgcgccagaaataacctgcggtggatgcccggggtgtcgggctcagggtaaaggcgcgttctccccgacagtcggggccgatgtggaaattttacgaacgacgccgaagaaacgagcgcgcttcgttggtgccgtcaggaaagtatattacagcgatgaactggaaataagaactctgctgtcagaactccgcgtaccgcttcgtcaactgatcggctctggcgattacgagaccatccgggcagataaggccgatttcaggcatctggaacgcgccctggattccatctctcgcttctggtgcgtgcaaaaacttaccgcacccacttccgacagcgcggaaattgtgattgtggctaacactgccacatcgctaccggacctaccggtctcgcgatatgaacgcatcatcatcgccccgcagcacctggccgatccgcagcatccttacagaaaatggtgggaaagcgcaggcaacgcgcaacccctggacacttttatcaggcaactacagcatgtcaatcatcaataa

SEQ ID NO: 155117 - DNA, 3114 bp, Enterobacter cloacae
atgatgagcatattatctattgggtcgctggttatttctgagcattttgagggcatcggaaaagtcgtcagcattgatattgatgcaaacaatgcaatagttgctttttttgaatcgcctgcacacccctatacacgtcaggttgcaattagccttgagaacttgacaccgacgattccccatgaagaagctgtcgtctactgtcttgaaccacaaagtcaacgttggacgcgcgctcgattcggtggatcgcgacctaatggtgattttttggtcatttttcgcgaagatgacgcaacaacgctgcctatcgataagatcttcatactgaacaaagcatccgataaacctattaatcctgcacattttctggcttaccaggccaatgacgctcccttcttctttcctcgccgacactccttcatcaagacctatatccagcaacgcgcttcctgcaggggtctagcatccatttccagcagcgctgtcgaattggaaccacatcaactggccgttgtacgacgagtattacaagataaaacgccgaaatatattctggcggatgaagtgggtcttgggaaaaccattgaagcaggtatggttatccgtgaacatgcactggaagaagcggggcatgtcagtatgcttatcgccgtgccaagccaactcgtcagccagtggcgggaagaattaggtgaacgttttcagctaaaacagttgctcgttggtgtttcagcaatgctctccttgttaaagcaagatggtgctgcacaagggattgttatctgtagttattctgaggcatgcctcctgctgagcagaggattctcaccatccctgatgaccattgatgaagtccatcaaattgccgactggccgtggtctacggacgaagtccagcgtgatgatttcaaactgatatcacaaacatgtcagaaagcacattatacattgcttctcactggtacgccgctgcatggccatgagcgcaacttcctgtcgatgctgcactgcatcaacccggaagcattccagattgatgaaaaccacctgcacgcattcaccgaactagtgaaaaaccgtgaaagccttggcggtgttttctcttctctagttccatctgtgtctaatattagtcttcgccgtaaccttgaagaggttctggtccaattccccgacgaccatcagttggcaacgttatgccaaggactgtttccactgatcgggagattttctcaaccaacacctgaacgtgaagcgggtattaaagcgataagactacatcttggcgagcattaccgcatccaccaccgtctgctgagaaatcgccgtcaggttgcactgagtcaggatgaaagcaaaaacctgaatctggatcttctcttccctggtctgaacggcgtgagggaagctcactggcaaaccgaaggactaaccctggatgaattgctggaagagtatcgcgctatggccgtactaccgcaaaaccagcattggtcgttaaaagaagcgaactacatcgcctggattgacgatctcttttccagtccaatttgtgttctgcagcgggcaaaagccatactcacagagtcaactggactgcccaaggatgagcaagccttactggaacatatcgtctcgacggctaaaaatgagcaacaagctatcgacaacatgctggccgcatcgcttaatgattggctaaatcaatttccagatggcaaagcgattgtcttctgcgatcgtcctgaactagcgcagcacctctcagtcaagatgagcattctgctggactacccgatagaacgctatcagccaggccaaccactacagttcactcaggtacaaacccccattcgggttctgttgtgcgatagaagcggcgaggatgggctgaatctccacggaggacgtcgtctggccgttcattatggtttgccgcgatcctgcagtcggattgagcaacgtctgggccgtctcaaccgctacagcgccaacctgcgtggtatcaaaccggttcaaagcctggtactaaaaaaccatgtgaccgatagcttacgcaatcagtgggccgacattctggtgaacagcattggcgtatttaacaataccatcgccagcctgcagttcgtactggatgactatatcggtgatgcctggaacagactattcctcgaaggcccacaagtgctgggaaaccttgcggcagaatttcctggcgaaaatggcgttttggtcagagagaccaacaaaatcaacatgcaggaaaaattgctggcgatggatgaagaagtctcgcaagcggcacttttcgcccagcagcttagtaatgacgatctcattgcagcagaacagtgtaaagcacttacgccatggatctctcaaggattgcgtttccgttcatcaggaaatgctgaagaagggatgcgttttagttttgaactagctgaacgcagttctgggacgctggtagattttaaaacatttctgacgacctgcatgctcagcttcgacaaagagggaggcaacccaccgtctacccatctaatgagtgcagaacgtatccctgccattgacgggacaacggtttatcccttgcgttacggccaacctttcgtcgatgcgatctggcagttactgaatcaggacgcgcggggcagttcggtggcgatgctacgtatgattaacgcagaactgaatgaacctcgctatttcttccagatgagttggctcattactggctgcgatccgctaagcccttacgccactcttcgtcaatgcgatgaactggagccgccacgcattgttgaggagtgggtagctgcagacggttctcaggtgacaaatccacaactgcttggaatgctgaacagcgagtacagcaagaccccttctgccacaaaaagttatgtggacctcaatctgcgagccacaagatggcaagaaattgaagagctgatttccgctgatgcgtggaaagaacaggttgagcaggtatatgataaagcgcttcaaaaacagcgtgatttgtctcaagccaacgcttatatccagctgatgtcggtaaaagcgatcattctttgcagtagcaatattttatctggagtcgcctga

SEQ ID NO: 155118 - DNA, 270 bp, Enterobacter cloacae
atgtttgctaaatcctttatcgctctcgacggtaacggtcgcctgaccggggctcgtagcgcgcaggcagcgccttatgatcgatatacctgccacctctgtaacagcgtgctgcaataccgtccagaatacgccactgaacgcccgtggtttaaacataccgacaaagggcttaccgacaatggtcagtaccattgtccttatgtcagtcctgaagcagatgaggcacacctcgctaaacgtctgaaacgcttttccctgggtcactaa

SEQ ID NO: 155119 - DNA, 417 bp, Enterobacter cloacae
gtgggttgtgcaatgtcattctcaccggacagtaagctgaccatcaaagcgctggaaatggcgtgggaagctcgcggtaaaccagccggagtaatgttccacagtgaccagggtagccactatacaagcaggcagttccggcagttactgtggcgttgccggatcaggcagagtatgagccgacgtggaaactgttgggacaacagcccgatggaacgcttcttccggaacctgaaaaacgagcgggtgccagtgacaggttatataaactttagcgaagctgctcatgcgatcacagactatatcgtcgggtactacggctcgctaaggccgcatgactataacggtgggttgcccccaaacgaatcggaaaaccgatactggaaaaactctaaagcggtggacagttttagttga

SEQ ID NO: 155120 - DNA, 654 bp, Enterobacter cloacae
atgccaatatcctcaatagctttagtgggcgcatcagcagcactcgcagtcgcagtctttaaggacaaagattctcgtataaaagaggccattgatttcatgaaaatatcccaacatgaggcgaaatcatcgaaacattatactataatcaaaaatgacattaattcttatatcacaggtataaaagataattcttttcatacacccctgttagatataatggcaagagaaaataaatcaataggttatttttgtaagctggagggccgactggagtctaatggtccttataatcttcgcataaagaaaatgagttttattcagtctgttaaatgttcatttgttagtaagttgggaagtgcttctcattttgctcagatgttatcttttattttttgtctttggattgcaatgcttttcgaacaaaatataggagtatttgagcaggcgctttcattggttctttatgctttgtcaggatttatgttatataattggtttactatcatggcattgatatggaagcaactcccaagtggagctgatattaaagaatattcgttattatttgataaatatgccttagataagcaaaaagagacgttttcaacttccattccctgtccgctttgtgcgagcaatagtcgatgctag

SEQ ID NO: 155121 - DNA, 468 bp, Enterobacter cloacae
atgaaacaggttaattcaatatctctggtaaaggttcaggaagcgacagatttatcccaggcgcagtctaacgtagtgatcaatggcaatagcacagacattattgtaccagggcaaatactggaagcagctgttcaggttaatgatcatcgctatatcctttttttaacggatgacattattttcgaggagtcactgacaattgctcttatcgatgttaaggatggcgttaaagaaatcgtccgtttgggtaacgagtattcgatggggagttttgaagtattatccgttacagtagatagtatcaatttcagattcattggtaattttctctggacagtcaacaccgtcgactccccgcgcttaaggcttccttttaattcagaccccaagggggtaaaacgagaggctggtctgaaaaaatacatgacgatttcagccactcctgcgccagagaaagttcgttga

SEQ ID NO: 155122 - DNA, 747 bp, Enterobacter cloacae
  misc_feature (648)..(657): n is a, c, g, or t
atgcctgaaatcatggagattgcaaaagaatttgatctactcgtcatcgaagatagtgcccaatctcatggggcaaatattaatggtaaaaaatctgggaactggggtatagcgtcagggtttagtttctatccaggaaaaaatctgggtgctctgggcgatgcgggtgcaatcactaccaatgatgatgaattagcagatgtactccgtgctttaagaaattatggttctcagaaaaaatacgagaacatttatcctggagttaatagtcgccttgatgagattcaggctgcaatgctatctgttaaactaaaatatcttcctcaagaaactattcgcaggcaagagattgcaaaaatttatatcgaagggatctctaatagtttgatcacagtgccgacagtaacctttgactctgcacatgtttggcatctatttgttgtgaagtgcgaatacagggaacagttacaggcatggctgacaaaaaataatattcaatcattaattcactatccaataccacctcataagcaaaaagcatatgaggaattaaacggtatgagtttgcctgtgacggaaaaaattcataatactgtattatctatacctcttgatccaacaatgtcaaaccttgaggtgaaaaaagtnnnnnnnnnnaatttactgtatgaaaaagttgttaaaggttacggcaatgacagggtcattaacattattaaaaatgttaattggctttataattgctaa

SEQ ID NO: 155123 - DNA, 246 bp, Enterobacter cloacae
atgaaaattcaggcaggcggaccagcattcccatacgtacttgttaacaactccagtgaggcaatgaacaccttcggcattgaactggatcccggaaagacggctgattttggcggcatgacactgcgcgactatttcgcagctaaggctatgtcagcattgtgtagcagcttggatcctgaaaccgcggctaaggaatcctatgactacacagacgcaatgctccgcgcccgggaggcatcatga

SEQ ID NO: 155124 - DNA, 210 bp, Enterobacter cloacae
atgatcattacagttcgcgtcactgaaaaccccaacaacattggcaacggattctgggagattggaagcgtattcgacgtggttggtgagacgccatgctattacatcctgagtaacaatcaccgtgttaacaaagagcatctatctatagctggcacggcatgcaatgggcatagcgtaaaagtagaaattttgaatcaggtcgcttag

SEQ ID NO: 155125 - DNA, 564 bp, Enterobacter cloacae
atgagcaacatcgacaaacaggcagtgcaagcagttgccgatttgaaagctggttacaccctcggtcacgctgatgtggcaatcctgagtgagctggcgcgtatcgcgctggcatcgctcgaagcggaggccgtggggttcatcgccaggcataaagagactggtaaatttggtagctatctgcatccaaaggcggattggtttaagaatgatgaatacgaagtgctgaacgcttacaccgccccgccagcgccggtatctgtgcctgatgaagctactccggagaatattgaaatcctcgccagtacattcgcgccacgcggcgttacctaccagtgggatagagatgagtgcaatgcagcagctgactcctggaacgcctgccgcgccgccaggcttcagggggacgatggcaactctccggtgattcaggatggttgggttatggtgccggttgatgcgactcgcgcgatgattgatgcagcaaggcgcgtagaggaggatggctacgacgcaatgcacaaggccatgattgcagcagcaccgcagcaggaggtgaagtga

SEQ ID NO: 155126 - DNA, 2052 bp, Enterobacter cloacae
atggctacgacacctaccaacctgccagtaccgagcgagtccccgcgcgatctgaaatttaacgcagggaaaattgatgagtttgtgacatcgctggcacttcagtacattgatcgctttggtgatgcgcattacacaattgaagggttgcgctggttagcccagcaagcagtttcgcagtttggatggattcccgtggaatcatttcaggcgggcgcaacaatttctttgcctaatcagattctcaaagacacatcaactggcgaatattaccgctgggatggttcgcttccgaaggttgtgccaacagattcaacgccatcttctacaggggggaccggggtaggagcctggataagtgtcggtgattctgcgctaagaagcatgcttgcagccaacgacggggaaaagctaattggtgagtgcccaaccattgccatccttagaaccattgagccctctgtcgataaacaaagaattacgctaaaggaacacacggccggaacaagaaaaggtggtgggcagtttagggctatattgaacggtgcggcttatacagataacaatggtactgttataaaaactgttggcggtgcagcatggctgagaattaattctgaaatattgaatcctctaatgttcggggcgataggagatggcattgcaaacgacgctgttgctattaaccgcgccttgtcatcaggcgtcagcattaacttggttggacttacttatcttacgtccggtacacctttgcgcatggacgtcatatcaggaaggcaggagctttacggtgggataatcaaggatggatccgctgcaaacaataatatcctttccgttggcggcactaataaaacaattagaaacctgaccattgatggaacaaacggtcctacaagccgaggtataattgttaaagaaaactcatcagatattctgataactcaatgcgtaatcaaggagtgcaaatattatgctatagctgcatcatatgattacgctaacaatacccgctgtcagcgcatcaatgtcgacagatgctgggttgatcactgcggacaacttgggacaggcggtggttctggtggcgcttcttcaattctgtttgaccaagtttttacttcctcagttactaactgcgatcttacccgttgtaactgggggatatcatggctgcaaccattcactccgccagctgcaccagagccatttggttactacaacagggtggcgaattgtcgtataactggtagcggtttaaacggtaacccatatccagaaagccagggtatcagtgctcagagccagaagcatttacagattgtcaacaatactgttgagcagtttaacggtaatgcaattgacaaccagcgttgtgagtattcccagatccaaggaaatatcatgcgcgactgtaaagacggtatattcgttggcgatatggcgtttattgggcatcaaattactggaaacaatggctataactgtgagcggggtatccgggttcttgccgatgcatctggatcattcaccggacagtcaatgagagcctctgttatttctaacaattcattcggcaactctgttttgtatggtatttacgttcatcacaacgaccctaccggagaacttagcaacatcctaatcacgggcaatgtggtagacaacttcggtaaccgtggtggtagcactgaaattgcaggtatctacataaacggtctcacagcgggacaggttaataataattctgtaagaagtcagcgtcgttttgcaatacttgtagaagcgtgcatcggttgccaggttcatgacaacatggttaatggttatgactatgctagccttacggcacctgcgatttacctcgactctgcgtgtatcggagtatctgtacgaaacaacacaggcttcgggccaattactgctggaccaatggtatatgtgaatggtgacaagaacgcagtgtttggtaatcggcttcgcggatccgctcagattgtgctgaacagtggcaccaacacagccacaggagataacttgccattctaa

SEQ ID NO: 155127 - DNA, 1485 bp, Enterobacter cloacae
atgaaattaattagtattgttaagcaggatagatggttactgataatctgcctagctctgtctatagtttacttggtaccttttgccctgggtggcgcttattcagtggatgactggctgcgcagtgacactggaaatagtggctgggagggtaacggaaggccggcggcatcgattatcatggctgtaatgtcattattgcctaacggcttatctttctttggtgataacgttcttcaggatacttatccattctcaatgttccttggtgggatggttatggtaagtgcgggttatttactaaagaatgtcctggaggtgaaatctcagtttcttgctggagtaattattctatttcctctgaccaacccatattggatagggaatttagagtttcgccacgactcactgataatgtctgttgcctttttccttgctgtattttcagcggtggttttgaaaaggactaactgcaaaaggctggcgttatcagttatcatttcagttgcatgcctaacaataatgctgatgatttaccaagcagcgttaaatgtatacatgtcggtaactgttgtgattgtggctgtgctttgcataaaaaaggagcaatttaatgacattttgctgcatatcattaagtcaatcttatcaatgctcatagcgtatgctatttacagtgcggtaattaacaactttgttacgctaagtgagtacacaaaatcgcattcaggtatactcccattttcctctgattcatttacaaaagtattagctaatgtagatggtttcacatctattttttcagatttaaacaatggactatatggtttttgcgttttaattctcattctttcatcggtcattttttctattttaagatggaaagtactaggcactgctcgttctttgatgctaatagcattcattccattgactctgttcctctctgctggtgtgcttatccttctggagttccctgttatagccgggcgagtgatgatgggcttcagtgttttcatgtgttttgtcgctgcaacgtgcttcaaagagaagattggaacagtagtgggaacatttgtaattttacttaatttctcatttggttctgtagcagcaaacgcaatcaacgaccaacagagatacgatcgttttgtcgcgcagcagatagtttcaaatctttaccaagcaggttttgtaaacggaaatacagtacatgttaatgggccttcatcaactcctgagcagaccattagggccatgcagtacgccccactattaagaagctatgtgttttctgcattcgctaactctaacttcaaatacagccttttacggcagtacgggattcgaagcccaagaccgacacagagagagacaaacattttcaacgcaaaggttaagggaaaacctcctttattaaaaaataatcttatggagatttatcagaaagataatgaatattctgttttcatttttagaaattaa

SEQ ID NO: 155128 - DNA, 1593 bp, Enterobacter cloacae
atgaattacaagacaacaagtatcttatctttgttaattgtttttactttgattttgataccttcattgctaacccctatgcaatcagatgattacctatatagtttaatgggtttatcttatgagaagcatctatggcattatatgaactggtctggcagggtagtccctgactacatcagctcgtcaatgttatctcttttcccaaaatgggcctatgccgcattaaactcactggcttttacagtgttaatactttgcatttccttgcttccaggcatcgcactaagagataaaaatccatttaaaccggttgtgttcctgctaatatttgtttgctactggattgccaacccagcgttaggtcaaacctctttttggattgtgggatcagcaaactatctatggacaaacatgttcatagcaatatatttatgcttattgacctacgcttcaagtttagaaaatgcaaataaaaaatggtatgtggtgctggctctttctggacttcttgctggctgcgccaacgagaatacgtcattagtaacggtgcttataggaatttcgtatttatttattttcaataaaaaagataacaaaaaactaattattacaggcattgcattcagcgcagtcggggcagctataatgcttttgtcgcctgggaacgccataagagcagaaaagttcggtgattggtattcattatccttaatatctaaagcatttattcatttctatgaaagaattcctgctttggcctccagtttttggcaaatttacttaattattatagttttatttttaataaacagctcaagtaaaaaaattgagggtaaaagcaaactgatatctatatgcctattcttttcatttataatatctgacagtatattgatgtttgcgccaggcactccaccacgttcaaacaatggagcattttgctttttacttatgctgctggcttttatattgtatccttccatcgcagttaaaagtaaaaaaagttattacgggattggattggcttgttttttcggttttttttacttcgttccttcttacttactttttgtaaatacaatgcattcaacttatttgcaagagattacaataccacaattttactttcctttattaattaaaaatagcgataagtttgatttatatcaaagcattatgtttgcaaagtttgaaggattgaattctattataatcaaagatgttgattttgattactctacagctttctttaaggaaggactcaatatttcaggatgcataaataacgtatgcattcaaaatgtttatgctggaaatcgtggatttggtttaaaaccttatattatcttagagttaaataaagagcctatttacaatggcgggttttattttgcaagcatatatgattctaaaggcaggacccagaatgttagattggaaaatctcgaagagattaaaggtagatatttctatcaaatcgccataagagggttaaatggcaaggaaataaaaaatataaacttcggaacttacaatgaaagtagtgaaaagattgtggaacaattaagattaaatttcacaaagaaataa

SEQ ID NO: 155129 - DNA, 456 bp, Enterobacter cloacae
atgaataaaccagtaaaagatttatttcaaacattaaacaaaataaatcttatcaaaataattgatagccaggatagttctgataatgcattaatggtcaaattcactcaggaagatgaggttttctttgccttattaaagccattatcagaaaactacattgtcatgaatatatcaaacccagttgctctggtcgatttaaaaaatatggatagtcattcaaagtacactattctcaatagctttaacatgtacacaataggtgtaaaggccttaattgcagatgaagctaaaaatcatttcatttttacacgtgaagaaattttgagcacagatgttcttcttgatactgacttagttcaaaatagattatgtctagcattagatttaacaaaagagtctgttgatatcctagggagaataagcaaagagtttactgaaaatggcaaaaagtaa

SEQ ID NO: 155130 - DNA, 582 bp, Enterobacter cloacae
atggcaaaaagtaaatcacaaagcgatctgggcattttcgtaatcggatggttagcatcaactttagcagtgggtgtacctactatattcttgattgtgtttaagaagtattatccagacactccttctaattatgatgataaagtatctatcatagcgtaccttatcggtgcattttttagcggccttttcacaacttatagagttgtatgcaagtcaaaagagaaagacaatgaaatagaagaaagagataacaaaatcaatgaacttgaaaaagacattgaagatgccaaaaaagcttaccgatcactttccccaaaaagcaaaataatttcaatattggttgacatacattccgcatcttatgatttatcgaaaaaagaaatcatgaaatctttaatgcggaaagttaaagaaatcaataacgactctactttcgagccacgttacgatggtatgattatttacgttgcagactctgattataagaaagagattcattctaataacaacgctaacactaagaaaatcaactatagcaatataagaatggatcaacagtacgcgtttaaaactgtataa

SEQ ID NO: 155131 - DNA, 522 bp, Enterobacter cloacae
atgaaaattaatttgggtcttattgtcgcggttgttattgccgggctgtcaatggcgttggttaagagttgctcatacgccagcagtataaagagtgataacgacgttctgcgaaatgataacgctttgcaggggcaggtgatcgccactcaggctttcaactttaatcggttcaatcaggcttcggagcatgttaacaggcttaattccctaatcgacaccagcaccgaagaaacagtaatcgaataccgggagattctccgccgtgaaaaaacctgtgatctgcctattcctgctgacattgctggtgggctgctcgaatacgcgtaccgtttacgtgccagcgccatgcatacctataccggcagaacttctgaagttagttatagtccctttgccccccgcgaaataacgtattgccagttggctctgtggacaagtttacttctaagttcgattgagaaatctaacaatcaattagcagctataagaaagttacagaagaaagagaatgtaaaataa

SEQ ID NO: 155132 - DNA, 243 bp, Enterobacter cloacae
atgtcagacttcaacatagcagcaaagagccaggatgagcgcgataaggtcaacgtagaccttgccgcaggcggtgttgcgtataaagagcgcatgaaccagccggttatcgctgagcaagtggcacgcgaacagcctgagcatcttcgcgagtacttccttgagcgcctgaagttttaccgtgagaagtcgataactttaccgaaaggtagcgatccggtttacctaaagcaggagagttaa

SEQ ID NO: 155133 - DNA, 963 bp, Enterobacter cloacae
atgccagaaccaatcaaagttcataaggaatatgatgctctgatagagctactggaatcgagggatatgactatccctgacagggatcatgctatacgtaaaattactcaggtcggctattaccgcctttcaggattctggtatccctgccgtctccccgaagttaccaatggtaaaatcacagggcgcatcgatcgcctaagacgcggtaccagcttccgggacatttacgatctctatctctttgataaacgcctgcgcctgttaatgatgaatgctctcgaacgtataaaaatttacgttcgctccgtaattgcgcatgaaatgggtaggtttggtcccctttcctaccttgatgatgacctgatcaatccaaagcatctaactgtaaggcccggtaaagacatcagcactcgcgaggagtggaagagaaagcaccagacagaaattaataaaagccgcgaggactctatcaaatggcatatcaggcgttatgaggggatccccttttgggttgccatagaggtttgggattttggactgatgtctaaatactacggcatgcttaaggaccagcatagaaatgccattttagcccgccttggaatcgccgcaggtaatggtgctattttcgagaactggcttagtgcaatgaatgtactccgcaatcgttgcgcccaccactgccggatctggaataaagttaacgaaccaagattacgacctttgccaggcaatcaatacttcgaggcattgaatcttaatgcagatgcctacgaacgcctctatggaatgatagctgttctgtggttccttataaaaaaaattggcccaagctccgaatggatcaatcacattgccgatctggtcgacaataaacccactccaccggggtgccatctaactgctatgggatttcccaataatgatggcttcccaagggcaatttttggtattgaataa

SEQ ID NO: 155134 - DNA, 495 bp, Enterobacter cloacae
atgagcaacatcgacaaacaggcgctgcgtgaagtcgcggagaaggcgacaccaggtccgtggctatggattaacactggatcttatttctcgttcctggttcctcagagcaatcaagatcctcacaattgcattatcgatgatggatcgtcttggggtgagtatggggagacaattaaccccgaaagccctgatggtgtattcatcgccgcagccaacccagccgccgtgctggcgctgctggatgagctggaagcagaacagcgaatcagttcgacttggagaaaaacggcggaatcgaaccgtgaaaagctggaagccgcagagaggaggattgctaagctgtcagccagccacggaaaactacgtgaggcaatggccggcattcacaacataatcagaggcgaaggtgcttacacgcctctggcggccattctgaatgcatccaagcgcgcatacgaagagtcggccgccgcagccgggaaaggagagtga

SEQ ID NO: 155135 - DNA, 234 bp, Enterobacter cloacae
atgccgtatgaactgtctcacctgaatgccctgtgggatgcgctggggaaaacaacggtcagggatgaggacggtaaccttgtgaccgacgaacccttcctgcatttcccgaagggtacctctctcttccatatctggtcatggtttgaatccctgaacgacgagttcgtcgttgccttgaagctgtacaacacatccgtcccggatacgtcaacagacaggaaaagcaaatga

SEQ ID NO: 155136 - DNA, 360 bp, Enterobacter cloacae
atgcagaaagcaacccgtgtaatcaaccataatatcgcggaaccctggtggggcctcagacgcaacatcacgccgtgtttgggtgcccggctggtacaggagggtaaccacctgcattaccttgctgaccgcgccagcattaccgggacatttaatgacgcagatttacgccatctggatcaggcatttccggtactgatgaagcagatggaactcatgctggccagcagcgaactcacgccccacattcagcgctgcatcacgctccacgcaaaagggctgatatgtgaggctgatacgctcggctcctgtggctatctgtacatcgtaatttatccgaaatctgcactaaccgcataa

SEQ ID NO: 155137 - DNA, 882 bp, Enterobacter cloacae
atgttttcaattgtaattacaacaaaaaaccgactggattttcttcgtagagccgtaaatagcatacttaattcatcgttacttccgaaagaaattattatcgtgaatgatggtggtaaaaaacctgatttttcagatattgattttgggggcgtcattttaatagtagtaaataatgtgtcaagcatgggggctaattactcccgaaataaaggggttgaactttcctctaccgaaaacatttttttgttagatgatgatgatgcagttgaaaaggattccttccaaaaaaggataaatgttctgttaaaagatgatcggattgggcttgtttttactggcataaaaatagttttaagttcagagcttaataatgttcgacgaaccgtacttcctcgtgactatgatgattacaccgaggctctgctctccagaggcaatgtgatcgggtcgacatcacgagtattgattcgtaagagttttttcctggcggcgggaagatttgatgaggcgttgccttgcatgcaggattatgatctttggatcagaatgtctcagcattgcaagattaagcatgataatagtgccacagtcatttatacagttcataataataagaagcaaataagttctaattttatgaagtatcttgaaaccggggagtttttgctgaataaatacagtgcactaattaatgataatcagcggaatcactttatggctaatctttattttcgcgttgcgctatcggctgcatcaacttcttatatacacagaatgcgttacgctttcctctcgttgacttcagtattttcgcttaaagggctcattttgctattgacaccttattcaatattgaaacgcaaatatctctttgcgtag

SEQ ID NO: 155138 - DNA, 405 bp, Enterobacter cloacae
gtgccgatatacttcacccaggatgattgctttctcactgcggccctgagtctcagcctggaaatcagcgattcctggagcctgcatgctcaacgaactgagcccactgatggtatcttcaccatcaatgacaactgtgattgcaattttactgatgttcgcaggaacacgatccagtgctatctcaatgctggactgctgagaaccggtaacgagctttactgccccttcaggagaagacagattattataaaagataaagtcagaatcgccggttacctttccctgagcattaagcaggaagaggcaggtatcgggttcgcctttaaagccggatttggcagggtactgaagattcagcctgatcgcagattgctgaagcggtatgttttgtccggattgtag

SEQ ID NO: 155139 - DNA, 906 bp, Enterobacter cloacae; identical to SEQ ID NO: 105517

SEQ ID NO: 155140 - DNA, 168 bp, Enterobacter cloacae
atgaacaatactccaaaaaggaaaagagctctgggcaccatgataaaagcctctatgagttcttatgaaattgaaatgctggtttcagctggcaaaaagatggtagacgaagagatctcggccttacaaagagaagaaggcgggtctaatgcggccaaaaagcactga

SEQ ID NO: 155141 - DNA, 498 bp, Enterobacter cloacae
atgcctaaaatcatcgtagaaattcatcaaagcatcgctcatttaccaaacatacaaaagttaaaagaacagttcattcagtacaaatctatgtcttatgagtatgccaaggacacaggctttgcagtaactgaattcttgccaactttgtcagtcgcagatcaggaagcattccctccagatcaccagatgtttggaaaagataaactcttcgaaggtccgcaaagggcgatacaagagcagctttttcacgtacatctattcaggccgaatcaacaaaaaacttactggcatactgacgaaaaaccagtaatgcaatgggaatgcactagcgattcagcgcttgtttactcccatatcccaacctcaacagatgactctttgttcttgtttatccgtgttatcgatccgggagctcatgatgcttacaagcaacccggacttgtagaaaaatgggctaaactcgcacaagactacaggtgcactgtcagacgttag

SEQ ID NO: 155142 - DNA, 441 bp, Enterobacter cloacae
atggaagagaaagatcaaaaagagatactagaaactactcgtgtagacgacaaagattggtttctgcagatgctcgttggaatggctaatgatgggatgggtattggtctttcactcaatgttggggggttaataatttcgggtaccctctgtggagggaaagagtatttttatgaattcggcaagcagttaggtgacggtatgtatccagaaaatgctgatagtgcagaggaattcgcggctgcttataaaaaaattggagatgatgtgtactctgagtcagagataacaccgaatcccgcatcatatatccatatgaaaaatgcgttgtttttctctccaaagggagactctattccaagcaatgcacaaggtgcattgtggagaggtaaagtctctgatgttgatggatttagcttaggtcgtttttctaaaggctaa

SEQ ID NO: 155143 - DNA, 342 bp, Enterobacter cloacae
atggcttgtactgatgcagaagtcgttgaaaaattactaagtatttacagagataaattcgcaggaaaacaggggcaaaggtttctgatttcgtctaatgaaattagagagttgtacggatttggtaagctttttgaatctcgtatagacaagttggttgaatcagcctttgattctggtttgtatttgtttgatctcggtgaaagcgaaaggggacggctgattgcagtcatcaaaagtggcacagtaaatcgctggcgacgagtacctaaaaagatcacggaacagtacattgagccccaatcctctggggaaaatgaagaaattgaggaggatgaatga

SEQ ID NO: 155144 - DNA, 228 bp, Enterobacter cloacae
atggctttagtttgtaacgacattgaaaaacttaagaaagaaatcgtagaaaaatacaaagtcacccagagtgagaaattgacatgtaccgcgtttctttttgcagatcccgcattcaacggattcattgttaacgtttttcataacggtacagtgcagttccaaggtggtttttgtgctgacctaaaaaagcagatggaaaacttagttggcttcattaacagctaa

SEQ ID NO: 155145 - DNA, 633 bp, Enterobacter cloacae; identical to SEQ ID NO: 30074

SEQ ID NO: 155146 - DNA, 1707 bp, Enterobacter cloacae; identical to SEQ ID NO: 14772

SEQ ID NO: 155147 - DNA, 510 bp, Enterobacter cloacae
  misc_feature (492)..(501): n is a, c, g, or t
atgactttaaatacttcaatgcttaacaaagtatctgcaaaacaaatctctgagaattttgcaaaatcatatccagatttactggaaggtgcagttataacaaaaattgaaataagtggctgtcaaggatcgcgtcgaaccgataaaatcgatttgtcttatgatggagatgatattacggatcaaaaaagcgtatctaaaagcgaagtacgttggattgacataaaagcccttagcttcaaaagtacgattaccagcagaatatcaaccctttgctcacgcttgtgcatccgctatagcaatatgtggattttaccagtttccagtatggaagagtttctggaaggggcccaagagattgaacgagagtttcaggcaggtattcaaaacgttgtagacaattatgagatgcatattgaggctgaaaaaaatagaagcccaagaatgtcttctttgattgatcagttgaaattaactaaagatgatttcatnnnnnnnnnnatttcataa

SEQ ID NO: 155148 - DNA, 531 bp, Enterobacter cloacae
atgcttcatcattttaaacaggcagctacgctcgcggtcaacagtatccagaacgaagccatttgtgcagaacaacctgtgaaatcctattcaacaacccttctggcaactgtagcgctacgaactgataatgagctgtttgcggctgcattctggcttggtgatggtgcgataggtgcatacagcccttccggtaaagtcaggatactgggaaatcccgatagcggagaatacgcaggacaaacccgctttcttgaccagagcattatcgcagacccctcgtttagcggccgcatcagcgtgggtaaatggaatgatgtatctcacttgatcctcatgacagatggcgtatcagaccctctgtttgagacagataacgggcttcgcagtgacgaaaaatggacccgtctccttgatgagctcatccctgtccttacagacgccagtattgcgcctgagaggttaggcgactggcttaactttttctccacagggaaccacgatgaccgcactattgcggtgttgtggtaa

SEQ ID NO: 155149 - DNA, 342 bp, Enterobacter cloacae
atgattaaaaacaacgagttaatccatccttttgacgtaaccagtaatgaatcaggtaagacttatcaactgacgcctaactcgtccaagtcggttcagcccgtggccctgctgagattgagtgtatttacccctgtcggcacaaaagaaaaccgcgaccgaaactttgaagttgatgcctctgatgagctttcgtgtatggaaattgcaagatcggagggttatgacgacatcaagataactggtgtcaaactatctatgtctaccgactttaagtgcataccagatagctttcaaccttgtttggcaagggccagcttagggcttcttttgaagatctga

SEQ ID NO: 155150 - DNA, 354 bp, Enterobacter cloacae
atgaaccttgcatcggtagtgcttgccttctcagactctcgtagtggtcggttcacagtaacgcatctggtgcagaaggctatgattgatccaaaaagcgatactgttgagctggttggggatccttctatgtgggaactgtatcgttacgaccataagacattgttaagccttcaggttctatacattttggctaaaaaagaagctgcgcaatctctccagataattcgtaaagcaatgcgggaacttgaatctatcggatatctcgattatcaagaagttaagaaaggtcgcgacatacaatttcagatcttcaaaagaagccctaagctggcccttgccaaacaaggttga

SEQ ID NO: 155151 - DNA, 813 bp, Enterobacter cloacae
atgtcagatatcaccgcaaatgttgtagtgagtatgcctagccagttattcactctggcgcgttcattcaaagcagttgcaaacggaaaaatctatatcggtcagattgataccgacccaactatacccgctaaccagattcaggtttacattgaaggtgaggatggggatttaattcctgtatcccagccaatcttgatcaacgccggtggttatccagtttacaatggtcagataaccaagttcgtgacggttaaaggtcactccatgtctgtgtatgatgcatatggagtccagcaattttatttcccgaatattttaggctatgagcctgaccaatttgcaagcactcttaatctttcatggctaagggggatgaacggatttttgggcggggatgtatacccgccatcaattggcgtaaatgcaaatgttggagaaattattcctgccggcacgagatatatcaggctaaatggagttgtgatgatgcttagcgcaccattatcatctcctttaactattgcgagttatgacacaacgtctatcaatggttctgtagaactttaccctgtaaccttttttcatgaggttaattcagggtggaaaatcgcacagaatgacacccagttacagaggttgcttggtgttggtggaaatataattctgtcctcagaaaactatacgctgtcaggcgatttcacggtaaatagtgatttaactattaaatcaaaatggaaaaaaaacaaaattcacagtcaaccaattttggctgagaacaccattaacagcgtcaatcaggcaaccatatga

SEQ ID NO: 155152 - DNA, 897 bp, Enterobacter cloacae
gtgattcaagaagcaagagcccttttgtcaaccacaccttctgatttacaatctatagcattatcagcaggattcgattcgagatttattctctcagtttcagaacctcaatttgcgtatacttgggggcccgagaattctgctgacgtacagaatggtaaaaaattagctgcataccgtaacattaaattcgagtcttttaggtttaaaagtaacccagttaccgaaatcgataaatcaatatgtaaacagcttttcagtggaagtgtcaaagcatataacccccaattttttagtaactatcgccatgctgccagtttatcggagaaaaacaccattgctcttgatggctatttaggggatgtattgcagcgaggtgtttatatgtcctttggaggaaagttaggtgagttttataaacttttcccgtttttatcctcttcttttttaaagcctgagtatttgctaagaaagcgttacaaaaaattgaacaatcagcagtttaaatatgttttagaagatttttataataaaacctcaaaaataaatgccatagattctttacaaaaagttacatactatgagtttatttatggcagaggacttcgttttattactagtggggctttagtaatgaatctttgttttaaaacaactattcccttattcgcctcgcgcaatatatttaattactttattaatcaaaaagcttcagatatattaacgtataaaactttttacaaggtttggaaaaatgaagatgacttttacaggaaaatgaaatctgagggtgcctacagtcctggaacaaatccaaatttagtgccttttttgaatcttttcggaagagttattacaaatttccatccgaaatttaaaaattatacaaaggaataa

SEQ ID NO: 155153 - DNA, 306 bp, Enterobacter cloacae
atgagcaaattacgagtttggcacatcccacaagtaccaatgaaggcatttaccgttgaagtccagagcgtggaagaaggcgttcggctgatgaatgccctggctgattacgacattttccagtacgaaaacaacatcaagcctgactactgcaacgccaatggactgcaaatctgggatgaaatcctgaccgatgaagaaatggctgatatggaactcaaagaccgctgggttgactggtacagcgagtatttcgacgacccgcgggattatctggaaagcctgaagcagggagagctgtcatga

SEQ ID NO: 155154 - DNA, 624 bp, Enterobacter cloacae
atgagcaacgtcaccaaagaatggctgcaaaagactatcgctgagcttgaagaagagcgcgatgcggtgcccggcgttgtaaacgaagatgcggcgatggcgcttgctgcgatgaagctagcgctgtcaacgctcgaagcggagccggtggcgtacatcttcaagcatccggcaggcaggctgttctggtctttgactgacgagagcaataaagggcaaagcgacgttatgcctgtttacaccgctcagccagcgccggtatttgtgccggacgagctgacacgagaagagtacgacgctgttatggacgatgacgactttgacgacactttccgtggcggatggaaagcccaccgcgccgccatgcttaagggtgccgaacatgtaagtaatcgtgatgagctgcctgatggctgggtggcttgcagtgagcggatgccagaggatgaacaacaggtcatcactcacaacatttttggttatcgccatatttcctttttcgacgaacactcaggtcatttcttcgaccaccttgacgggagaccaattgattgtgtggagcatgttctggtttcacactggatgacactgccagcagcaccgcagcaggaggtgaagccgtga

SEQ ID NO: 155155 - DNA, 192 bp, Enterobacter cloacae
gtgaacttcaaccgctacgtaatcaccgtggtgctgcctaatctgattttctgcaaattagtcggcaagccagcgatgtcagtagagcgtgccgcgcgcaaagttcgcctggcgtgtggtcgccgcatggagcgcgttatgatggatgcgccgccaaagcggaagaatgacgagcaaattgacgataattag

SEQ ID NO: 155156 - DNA, 318 bp, Enterobacter cloacae
atggctaaacgtatgcaagataaagaaagcattgccggagtgtcatggctgattgtccttgccctgtcatgctggggcggcctggtccgataccttattgacgtgaagcagaacaaagccacctggagctggattaacgcgctggcacaaattgcagtgtccggttttaccggtctcattggtgggctgatcagcgttgaaagtgggctgagcctttacatgattctggttacgtctggtatcagcggagcgatgggctcagtggcactgacgtacttctgggaacgcctgacggggatgaagaatgcaaaccagtga

SEQ ID NO: 155157 - DNA, 1467 bp, Enterobacter cloacae
atgcttaataaaaatgagagaattgctttttatgtgttattggcagtttcattcatttatgtactgcctataatcaccgtaaactcatattactcagatgactatatgagggcagctgatggagtttttgggctaagtggattggggaggccgctggcagattattttttcaagattttatctttcaactcacatcagagcatagacactgcgccattcacgcagatcataagtgttgcagccctatcactttcagtagtttacttagccaagtcagtaagcacaacgcctagcaaagtagattactttgttctttcggctctgatattcaatccgttctacattcaaaacctgctatacagatttgactcaatcacaatgtcaattggtgttctctgcgcggctttagctgtttacactgcatcaaagaaaactataccatacgcaattatatccatccttctcattatgtgttcgctatccctgtatcaaccttgcgggggtatttttgcatcagcggttgttatattgctagtgaagagattaattggcggaaacattgagaatcctgttaaggagatactcatttatggagcaatttttgtcttatcatacatcctctatatggcaataattgtacctgcctactccagcgacccgaccaggtcatcactgatcccattcgatagcaatttcttccccagaattgttcataatgtagaagtgctaaccaaaaaggtcgcttcattttcaccatgggaaggactatcttcaattttggcaatggtcgttgtttatggcttgctcatggctaatgtgacgataaagtctaaccgacgtttgacaacatttattattactttaatttcattgcctgtggcttatctactaatcggcggagtaataatcattatcaatgaatcaatattcttcccaaggacattggtttgtttcggtctttttgtttctcttctaatctaccctacaattacatttaaagggcgggcaggaattgcaattcccgttgccatttctacagcgtttgcgatactttcgtttatcagtattagcgtaacgatgaatgccattaagtctcagattgaatatgaaaaattcataacttcaatgatcgcaagcgacgtaacgaagattaatgaattaaacaattctattacatacttgggtggaaacaaggttctggcgttaaacgctaagcgtcctgtaagggcattcccgattgtggatatgatttataatccatcttccgattgggtgttatcatacatgatgggtcagtatggtattaactacagattccagtttaacagagctgaacaaaagaaaatcatcaatgctgtttgctcaaataacatacctccagttgtttttaatgagaaatattcaatataccatcattcagggaaaaacattgcttggataaatggcgcgaagaaaatatgtgaatag

SEQ ID NO: 155158 - DNA, 729 bp, Enterobacter cloacae
atggatttatttgcaacaaaaatagccaaaaataaacttaatgatagcttcaaacatatttacaaagatccgaaacttgcttctgtaagggaagtgatccaatcttgggggatcggattgctgcaacgcagcggcgagagtactaaatttgttaatgagtttcagaccactttcaactctgcactttgggagttatatctgaatgagatgtttattcgcctcggttattccgtcgattatacaaaagatagccctgactttaatgttaccactccatctggttatactttcaatgtagaagcaatggtctctgacaaacctcataaacctccaattggtgattttttcagcgaatcaaagttcaagcatcaatccacgttaaaacttctcggaaagattaaagataagcatgaactatttaccggtgttaaggggaagaagttcccgtactcaacaatggaacatgtagtcggtaaaccattcgttctggcgcttgcgccatttgattcaaaactatcactaacacagaataatacgattattaatcgagtattatttggtatcgaagagcctacgatgagagatcttgcgagaggtcaacaacgaagagtatcatcgattaaaaaaaatgaacatagcgaaataccattaggtatatttacaaatgactcatataaagaaattagtgctgttatattctcaacaacggtgatgctgccaacttactga

SEQ ID NO: 155159 - DNA, 687 bp, Enterobacter cloacae
atgattacacacttcactaatgaatttgaaaaattattatctatcatttcatctaattcatttatattaaggtattgcggtgaatattttggtgacaagaatgataaggtggtttctaatgctgctcaccctatggtttcattcagcggttataataccagcgagttaccaacaaaaaacataacttatggtggatatggaatatctcttcacaaaagttgggcccgaaaaaacggaataacacctgtcaactatatagagaaaaactctccagtggcaatgggacttatagctttattaaggtcgcgccagtcgaaaaaacttcctagtaatcttagactaccagtcattcaattgaagtgttttacaaagcatgtctatggatataacagctattttaagcttaatgatttcgatttcgagtatgagaaggagtggcggtatgtcccaacgactgagcaaataaaaaagaacctaatttccattaatttctccgcatataaaagacggaaggatttctacaatgcaaaaataaaaaacttccctcttaaattcacacctgatgatgttcgatgcatatatgtaaaaaatgaaaatgaaagaaacaaaataatttcaacttttaatttcactaaagatcaagttattgtgtctccttggaagcaaaatgaaattagacacatctga

SEQ ID NO: 155160 - DNA, 651 bp, Enterobacter cloacae
gtggataatatatataagaattttattcatagatgtagcgtttatcaaacaaagatagaccatcttcgctttaatcgagctaagtacgatgattgggaatactcgcggttaactgaagctttaatgtctgacttatggcaaaactggtgtcacttctgtcgtagcttgattcataagtcatgtcgaggtgcgataagctcagatagttcaactattataccgaggctgatttgtaatgataattcttggcaacgacttggatatgaagctaggcagcgtggtaaacccctcaaagcaaatggccataatggatttctcattagatatgagcccacttggggagatttagatgtactggtcgatataatattagcgctcaagcctcataatcaaagttgcttattaacagcatttggtatgggccttaaggatattaattacttacagttagccaggaatgcatgtgcacataaaaatgttgaatccataaaagatcttattaataacactcatttatattacgacgtatctcaattaaaaagaccgagcgatctagcatggtctttgaaaactggaactcatagctttgcattcaatacatggctatatgaaatgagagttatcgcgaaaaatgccatacgtaccatctaa

SEQ ID NO: 155161 - DNA, 1053 bp, Enterobacter cloacae
atgaatacaaatgtagggcaaataacgctcatcgatcttatttcaatgcttgatcgtcgtgaattgattataaataaggattatcagcgtggaaatggaatatggcctccttttgcaaaaagttattttatcgacacaatattggaaaactatccttttcctaaaatttatctttatcaagtatttgacagaacgaatgaaagacctattaaagaaatagttgatgggcaacaacgtgtaacaactttagttgagttttacaaaaataaattcgccttgacttcagcgtcgaaaaaatatgcaggacttaagtttaacgaattacccgaagacgctaaaatgaattttataagctatcaggtcgaaacttccacagtttattctgctagtagagctgaacttttggaaatgtttagacgaatgaatgcctacacatctcctttgacttcagctgaaaaaagacatgctacctttcagggtgcatttaaatggtttattgttgaaaaagctgatactcatgctgagttactagaggttttcgagatacttagcccaaaagtattagccagaatgggggatgccgaatttatagccgatatgtcagttctcattgacagaggaatttgtgcaaaatccgctcctacaacagaagcaatttatagaaaatatgatacagaatttcctcaagaaaatgtattcaatgaacaaattgattacttctttggccttttagcaaatgaattatctgaattacgtggaactttcatgatgaaatcatacgtagtccaatcattattcagtgctgttgttgccttgaaatatggttttccaggcagtgaagctttagagcaggaattgaactttagggctgatcctaacttttcaatagatacagctcgtgtaattccgatcctcgtcgatatggcggatgcccatgaaattcaggatgaagaggggccatatgccgtttatgttacgaattgtctctcatctactaccaaactcccacaacgtttggcaaggacaaaggaactgattaaagcatttctgtga

SEQ ID NO: 155162 - DNA, 288 bp, Enterobacter cloacae
atgtcagttgaactcgaagataaacgccgtggtgggcaacgtattcccggcctcggactcgctaatgggacgtggtttgcagttctggatattccaggcatgggaaagcttatcaacaatcagcataccaatgactcgcttgatgtgacgccagccaaagcgaaaaagatggcagagattgtcgaggcatggacaccaccggatggttggtctggcagcgagcaagaaaaaatgaagagttatatcgtcgaatttcttcgcggttgcaacggttttaggagctactaa

SEQ ID NO: 155163 - DNA, 144 bp, Enterobacter cloacae
atgatatacattattcctaaaatagaaatcaagtccattcgactcatcatcaaaaaaattaaagatggcaacataaggactaattcgtttaatgcacctattttaaagtttttgttcaggacgatcatatatctgagtatttga

SEQ ID NO: 155164 - DNA, 213 bp, Enterobacter cloacae
atggaatatcaaattgaagacatcacggcttacgataatgacaatggaaaaggtatccttgctagcgtgtttgttaattatgaagaccactgtaaaagcgtgaaggttcgcgttcatttacccttgcagcgcgataaaagcctggcagagattgaagcagacatcttgagcgaagccaaaaaacagctcaaagaacttgtagatagcttctga

SEQ ID NO: 155165 - DNA, 294 bp, Enterobacter cloacae
atgactaagaagaaaattaaagacggcataagcgtcattgttgatgccgctgtgactacgatcaccaacccaatgggtacggctaagattgtttctggctacagcacactaaaaagcggttatgacgctggtgttaccactgatcaaatgaaagcaatgttccctgacttacaaaagttcagtaacgcgaacatcgaaggtttcgttgaaatcggtagctcattagctagtgggcaaactacggttgtaagctcaattatccaaggcccagcaggtgatcctgttaagtcttaa

SEQ ID NO: 155166 - DNA, 1254 bp, Enterobacter cloacae
atgagtaacgccgttcaactgccgatccccgccaagcttgcgccactgttcacggcggtgaataagcgttatcgatgctcgcacggtggacgtggcagcgccaagacgcgcacattcgccctgatgactgccgtaaaggcgtatcagtcgatgatgaacggtgaaagcggggtggtgctctgcgcacgtgagttcatgaactcgctggaagaatcgagcatgcaggaggtgaaacaggcgatcctgtctgttccctggctggcttccaactttgatatcggcgagaagtacatccgcaccatcgacaagagtgttaactacgtgttctgcggtctccggcataacctcgacagcatcaagtcgaaagcacgcattctgctgtgctgggtcgacgaagccgagtctgtcagcgaaatagcctggcagaagctgagcccgacagttcgtgaagaaggctcagagatttgggtgacgtggaacccggagcgcgacggtagcgccacggacaagcgtttccgcaaagaggctggtgacgactgcatcaccgttgaaatgaactacacggataacccgtggttccccgacgtgctggaaggtgagcgacagaacgatcagcgccgcctcgatccggcaacatacgcatgggtgtgggaaggcgcttacctcgaaaactctgataagcaggtcctggccggaaaataccggatcgctgaattctcggaccagttatggaaagaggccgaacgtctgttcttcggagctgacttcggtttctcgaaagacccgaacactctggtgcgttcgttcatcctgcacaaccggctgtacatcgaatacgaggcgtacgggcagcagacagagctcgaccacatgccagagctatacgacacaattcccggatcgcgtgactggcccatcaaggccgactccgctcgacccgagactattagctatctcaagcggcaggggttcaacatctcagctgctgagaaatggcaggggagcgttgaggacggaatcgcccatcttcgcggcttcgacgaaatcattatccatccgcgctgcaagaacgtggcgcgagaggcccgcatgtggtcgtacaaaacggaccggatcactggtgaggtattgcctaaactcgccgatggctatgagcactgctgggacggcattcgctacagcctcgacggtcacattaagcgcaagggccagatggcagggatgatgatcccaaaaaggttgcaacgaagataa

SEQ ID NO: 155167 - DNA, 174 bp, Enterobacter cloacae
atgaatttttcagaacttctccggtaccaggccgaaagcgttaaccgcgccaacatgccgccagtagcaaagcacagccatgaagcgtcggaccaaaagatacgaagcactttccaggtcggatcgactataagcctgcccaataaactaatcccatgggagatgtcagcgtga

SEQ ID NO: 155168 - DNA, 210 bp, Enterobacter cloacae
atgatgtcgcactacggcaccaccccgctcattcgccagtgcgtcactccaggcatgatggcattgcatgaaggccgcacttatcgcgtctccgcagtcattcaggagcgcaaatgggtatacctgcacaccgatgcagaaatcatccgcctcagtgactgcgtgattgacgtccttctggacggtcacggcaaccctatccagcactag

SEQ ID NO: 155169 - DNA, 1995 bp, Enterobacter cloacae
atggtgtcgcttaaacttgacgacggtatgaaccggtgcagtgtttattttgatgacaaaagtgaagaaagctacaccgcaacggctactcataatcattgggtacattacaccagtggtccggaaaggcagtcagagaattttgctgagtatacagagggcaatgtcgtgcaggctttccttggtggaaaggagtatttttctgcgcttctggcagcttttaagcaggcaaaaaagtgcatttttattactggctggcaggtgaactgggacgcccaactggcggaggggatacggctggttgataccctgctggagtctgtacagacaacttcgggtttacaggtttatattatgccgtgggagaacccggcgcaggttgagacgtatgctgcggcaacggaacgggtatttgctgcgatgaatacccatctcggacgacaggctttttatgttcagcgtgcgggatctaaatccggagtgatgttttcgcatcatcagaaatgcgtgattgtcgatgaaaaactggcatttgtcggcggaattgacctggcctatggacgctatgatgaccattatggtctgcaggcaaacgcagacggacgacagggcataaatatgtacaattcctgtattccacccattgttcatcgtccaggttatgacccgatgaacgaatatgttattccagtagggaaatattcgcaggaacagctacagggtgagattaaacgagcggaaaaacgacagacggacagcgttcagcacattattgatacagttttaaaacatgaactctggcagtctcaagggagttcgaaggacagcgtttatctggatccgacaatacaaccccggatgccctggcaggattatcaggtacaaattgaggggcctgcggtggatgatctggtcagaaactttgtactgcgctggaacagttattcacaccgctggcctgacaatcctctacagacccgtgtacctgaacttgatatccctgcagtaccatccataaaaaagggaagctgtcagatacagctattgcgcagtgcctcattgagtatgcgacttgatgaacataaaaatatgccggaaattgcgccgaaagcgcgactgaaacaggatgatatcctgcgcagtctccatctgctcatcagtaaggcggagcattatatttatatagagaatcagttttttgtgtcggcatttgagaaatcatctattggtgaaaatgaacccttgagtccagtggcaaaaagtattacccctaccctgagtgcttgggcaacccggctattgccggacgatgaaatgccgcaaaacccggtagcggaatggctgggggacagaattaagcgtgcgatttttagtcatgttgcgcaaccgtttcatgtctatatcgtactgcctgtatatccggaagggcggcttgatgacccggctatcgtggcgcaaattcatctgacccggcagtcactggtatttggttctcacagtctgctgaaccgcatccgccgtagtttgtgggtgaagcaacaacttgaagtgcaggcggtaccccgcaaagaatggagcaggaaaatagagaaactagaagagctatgtggaacggaatataccagtattccacttgaagtatgcgatcaatacgtgacgttattaaatctgcgtgaccatgatgaactaaacggaatggcggtgacagagcagatttatgtacacagtaaactgacgattgtggacgaccgctatgtgctggtggggagcgcgaatattaatgacagaagtctgttgggtgacagggactctgagctggcggtactgatatcggatactgaacatggctataccgatctggatggcagtggaactacagttccctaccgtaattttgctcgtaagttgcggcaaaaggcgtggcgtaaatggctggggagtgcggctggggaatgtgcagaagcgctggataagccagcactaaaagccagttga

SEQ ID NO: 155170 - DNA, 1869 bp, Enterobacter cloacae
atggagacaccatccacgaacgaacctgtggtagaagagcttttcagttatcttgatctggagaatcccagaagttttctgctttttgccggtgcgggatctggaaaaacccgtacgttggtcagtgtgctggagaaaatgaaacaaaggtattcttcggaactgtctagatgcggaaaaaaaataggcattattacttttacaaatgcagcctgcgaggaagtacaaagacggttattttttgatgccaatttcatggtttcaaccatacacagtttttgctgggacttgatcaacccatttacatcagacataaagctatggcttaaaaatgaactcgagaagagtattgatcaactcacccgcgacattgaaaaaagcagaaaacctgatggtattacggcgcaaagaaacaggcggagtttagccagcaaaacgaaacggctgcaatacctcgataaaattcaaaaattcagctattcccctacaagcaacaggcctgaaaaaggggcgttaaatcatagtgaagtgataaatgtcaccgcttatctcctccaaaatgaagctctgctcagagagattttatttagcagattcccagtacttttgattgatgaaagccaagacacgaataaatatcttatcgaatcgttaattatgacgcagcaggagcatcccaccaaattctgcattgggttgttcggcgatatgatgcagcagatattcagcgggggaaaatccgacttagcctctcctctaccccctggatgggcgtcaccagagataacaattaatcaccgttcaccagtgagaattgtcactttgatcaactccatcaggcaattcaatgatacacatattcaggagccgcgccctgacgcccagcctggaaccgcacgcttgtttgtggttgacatgaacacccacaaggaaagagccgatattgagcgtcaggtcgctgaatatatggctgaacaggcggctgatactgaatggaataacaaaaaatcagtcatggtactgacgcttgagcaccatatggctgccagacgcggtgagttcgaaaacttctttctgccccttctagaggttgaaaaattgggtgatgcagcaatcaatggggatagtcaagagataacattcttatcctcacagctatggccacttattgacgcaattcgcagtgatgatgattttaaaattgctactatcatgcgtaagtactcgcctgttttttcgagttcgcgcctcgaatatgctgacgatccactattgctcttccgggaagcacaatgccaaatagacaagataaaagtgcttcttggcgagaacttggctttccccattctagaagtgtgcaaactgattcatgaaggggaattgctgatcctacctgaggctttcctgcttcacctggcgctggtgccacataaggatgatgaatccacggaggaagtggacatcaacaaagagcatgaagcctggagccgatctctgagcgcatccacccgtgaactggaaaattacattagctatatttcatccacatcttcctacgacactcatcagggagtgaagggactgcagtttcctcgagtcatggctattctggatgatgaagaggcccgtggattcatgttcagttacgataagctactgggcgtcacaccgcactctaaaacggatcaggaaaacgaaagtgcggggggggactcttcgcctaaaagatcgcgccgccttttttatgttatctgcagcagggcacaggagagcctcgctgtcgtcgcgtatactaaagcgcccgatttagttgaacggaccgtaattgcgtcaggttggttcgtaaaggaagaaattatgcatatgtga

SEQ ID NO: 155171 - DNA, 1029 bp, Enterobacter cloacae
atgactcgcggaaactttgattttataaactctaacgtggcctactcagaatccgataagtcatggtggatagatctcataaacaccgattgcatctggtatgatatgatgattaatcctcccgatgatatcagaacaaataagataataaaaaactatctcagcaccatcgagaaacatgtgagggaaaactgtgaaaagagatttgtttatttcttaggttcaagaaagaaagtgaggttttcaaccaagaggaggcctaggtataaccctttcacaaaaaatgtagtattcactctgttgattggcaaagaagaacgaaagtttcgggtaaaatatttctttcgcaagcttacgcaggatggggaaataaagataacgccaaatattagagtaactgaaaagtttctctacattgaacatgaagatggcaattcatttgtgatttcagtccatgacttcgtgaaagaaaattacatcgatttaggcatccatactgaagtgcattacgtaggatatacacgtcatccgcataggcgtcctgttgatttcattcaccgtggcttatcgaagatgctgtatagtgtttcaaatgacgataatgatttttttgtttattttagtttgtttaatccaagagttatatctctgaataataactacaatataatgtttaatatttcaaactctcaattggatgaggttgaagttgataatgaaggtaggattattgaaaactgcttcatacgctactttgaccctaagcttcaagatgatgacaaggaaagcaaaaggtcagatttaaataaaatgtttatggatttagtgaaaaataaaaaaattaaaaaaatatctgtaaatttgcaatatgaaatgaacaatgagtacttctgcttttactctaaagttgtcccaccgcaaactgatcatttctttgtgctggatttcgctgatgacaaggtcaatattgacagggaccaggatatgacgactcagatggcattatacatgggagattgtaattattaa

SEQ ID NO: 155172 - DNA, 2130 bp, Enterobacter cloacae
atgtctaggctgactgatttaattgccaaagcgaaggctaaagacccgcaattgggtgcagacttggatcgagaaatcaagatcttgtcatcacgcctgccctttggtcttaatttcgaacgacatagccctgaagttgttgagttaccattgcgacctattcgcaagggagacaaggttcgcgttctgccggagcgtggtcccactaagaaatttgatcaacggttgtggcaggttaaagccatccacaaggcgaagaaggtcgccgatctcgagttgctgggcgcagctgatgtcgagactcaggctgttgcgctgaacgaccttgtagttatagctgaatttcgtgacacgatctggccgggtctggttagtacgggaaaagtgcaacgtggtggagacaagcctttccattcagtcatcaatggcgagaactatcatgttttgaaggcgttgacctatacacataggggaaaggtggacgccatctatattgacccgccgtataacacaggggcaaaggactggaagtacaacaacgactacgtcgaaggtgacgacatctatcgacatagcaaatggctggcgatgatggaacgtcgcttgctggtggcgaaagagctgctgaatccggctgattcggtgttaatagtcaccattgacgaaaaagaatatttgcgtctcggcttgttgttagaacagatattcccagaagcaagaattcaaatggttagcagccaaatcaacccagcagttgttgcgaaagcgaatggtttcggtcgtgccgacgaatacctattcttcgttatgtttggttccgctggcccacaacgcgttgcgctggatagggaatgggtttctgcgaaaggacgaacacacacaggttctgtacgttgggatttgttacgtcgttcgggtgaaaacgctgctcgccacgattctccaggctgcttctatccgatctatgtcagtccgtctggtccgagtgtgcattcagtaggtgaagccttacctgatggaaattcgagcccagaaaaaattcccggcactattgctgttcttccgatcagaaaggacggttcggaaggtcggtggcaatggacgccaagtacgtttcgtgagcggttgaaacaaggtcgagtgaaaatcaccggcaacattaagaaagggtttgtggtcaacattttgaaagatggggagtttgcaaaagttactgctggtgaattcagactcacgggttacgacaagaacggtgcattggaggtcgaatcgaaagagctggatactgtgctggctattccggggactcaatggaggttgagttcacatgatgcaacacagtacggctcacggttgcttgcaaatattttggtgaatagaaaatttccattcccaaaatcgctctatgccgtcgaagatgctcttcgcttttttgtcgctaacaagcccgaagcaatcattctcgatttcttcagcggttcaggaacaactgcccatgcagttatgcgtctgaacaaacaggatggcggtcgtcgtcagtgcatatccgtcactaacaacgaagtcgcagctggagagcagaaacagttgcgcgaacagggcttacgtcctggtgatcctgattgggaaaaatggggtatctgtgactacatcaccaagccgcgagtacaggctgccatcacaggtaagacacctgagggcgaaccgattaaaggcgactacaagtttaccgacgaattctcaatgtctgaaggattcgaggaaaacgctgagttctttaccctgacctacgaagctgagaagtcggttagccataacctggcctatgcgcgcattgcgccgttgctgtggttacgtgcgggagcaaaaggcaaacgtattgataaactgcctgctgaaggctgggcggtgactgatacttatggcctactgtcagctgtggatcaagccacccccttcattgaagccattagccatgccagtgacgtgcgtgtagccttcatcgtcactgacgatgaccgccacttccagtctgtcactaggcgtctgccaaaaggcgttgagccggtacgtttatacgaatcgtacctgaccaatttcagcttcaccagtggggaattaacagaatga

SEQ ID NO: 155173 - DNA, 447 bp, Enterobacter cloacae
atgaattttaagaccgctaccagtgaggaacagcacgccggaattcgtatgctgaaatgctacctcgccagcgaccaccgtgggcattttgtgacgaccagtgaagcggataacatgccgggacaggtatggagctgcgtatcctgtggctgccgactcatcttccataccggcacatacactgactcaccctggttcgaacatgaccagacgacagtagctgccagtacgctgatgagatgcgcgcatattgatccggcagtgaaggcggaggaacgcagcagaatattacgcagtcttttcaacaaaccggactccccggtaatgtcgctggcctggtactgcgtctggtgcggtgagcattacaacggggaaaagttctgcactgcctgcgggaccggcatttacagcattgagaaggccaactggcagataaattatacctga

SEQ ID NO: 155174 - DNA, 219 bp, Enterobacter cloacae
atgaccaaaaccattaaccccattctttgcgcagaagacccacttatcgacatggtatacatcaccacatacaccggtatgaccgacaagtggttctacaagcttattcaggatggcgaattcccgaaacccatcaaactgggacggagttcccgttggtataaaagcgaagtagaaagctggatgcaacagcgtattgcagactcgcggggaacctga

SEQ ID NO: 155175 - DNA, 570 bp, Enterobacter cloacae
atgaattacatctttaacgatttctggcagcaacgtattgccgcaacctttcagaatgccttggatgcctatccacgagtattaatgctgagggttgatctacgcctgcctgatacccctgccgccactgacgccgctgtaatatcccgttttacagaatcccttaaagccaaaattaccgcctgtcaattgcgtaaaaagcaggagggcaagcgggtacaccccacaacgttgcggtatgtctgggccagagagttcggggagcgcagcggtaaaaagcactatcacgctgttttactgctgaaccgagagagttggtgtggagctggtgattacaattcaccgcacacgctggccgggatgattaaacaggcctggtgtagcgcgttgcaggtggacgtgcagcagcatgccacactggcgaatttccctgagaatccagcgctatggattgacagggggaacagcgcccaacttcaacaggccctagctcgggctgattacctcgctaaagaccacacaaaagtcaccggtgatggcgggcgtaactttggctgcagtcagggctga

SEQ ID NO: 155176 - DNA, 903 bp, Enterobacter cloacae
atgtataagaatgtgatggtcaaatctgttgattttcgtcggctggaaaaagaatattgcatttgtttttatcaaaaagctaatgatgcacaaactgaagaggttttcaatcttattacagttttaaggtccgagtacgcaggagttcagcatggaaaactgatttttaattcagaaggtaaggaggattgtgaacgaaataaatggcttttactgagggcgataaaaaaagatataggtaaaaagatgagagtgttcagtactgccagagagtttcataacgagatgaaacacaagcataaaaaattgggtacactctgtttttctttattcgctgaatgtgtctctggagatcccattccggatcacatgaaaacactaaaaacgctaagctcccgattttttaataatatccgatccagaaccacatttaagcaccatgttctgggctatttctgggttgtgttaaagaacagctatgataatcggccttacttacatgttaacttttatattgatactcgggattttaataatgttattggtgaagaaataaatgcttgctggtttaatgcacttaaagccatgggggaaagagaagggggagtattgcatcttactgtgacaaaagaatttcagaatgggtttctcataagaagtaccagtggttacagtgagcagtctggagagaatcacgctatttttactcgtttcaattctgatgcaagtgtaattactcaagatttgaattctgcgaattcagaaatatataagcagtttactaataataaagataaacagtatttcattcattatctttatgcacttgctaaagagtcttactttattgctgaaaacactcatttctttggttcttcctcagtggtaaaacggttgaaataa

SEQ ID NO: 155177 - DNA, 789 bp, Enterobacter cloacae
ttgcaaaacaaaatcaaagaactccgtacccaactatcaatcactcaacgtgagttggcagatatggttggtaccagccaacagcagatccagcgtatcgaaacagggaaggttgcggccaagttgggactggcgcaagcaatcagcgcggtcttaaaaaagccattgagcgctgtttttccagatagcgataaatttctgaagaaactacgcaatcaaggtagccgtagtgacgatgagctggaaaatatcgcggctaatggcattgaaatggatggctgcatttggacggtgaaactctggctacgagggcaacaagattatttgctgttacctatttccccagctgataagcgtcgtttttactcacactttcaggaaagtgtagtgccagaccgtgagcttttttttgtttttgactctgagcagcatcgttacgctttaaatgcccgagaggtgatttttcaccaattcttgtttgatggttttgcacctgttcctgatgatgaggacagtgaaggaagctatgggaatgttcatatcaccatggtgaacggtggaccagttattgggctgtactgtgagcctgaggtttcggacgacgacgaaatcgatgatattggtcaaatgaatgcattttttgacattcttgaatcagagccggaatcaacagagcgatatcagttaatcgacatagatggagaagatgctttcatccgtattggctctattgcgatggtccgaatagatcttgatgctttggagtctgtcgaggaagatgatgtgtaa

SEQ ID NO: 155178 - DNA, 597 bp, Enterobacter cloacae
atgagagatcttgcgagaggtcaacaacgaagagtatcatcgattaaaaaaaatgaacatagcgaaataccattaggtatatttacaaatgactcatataaagaaattagtgctgttatattctcaacaactggtaccttcggcaaggctgttgttcaaagtggagttgaaagatatataaggtcaacaagataccgcactcttgatgcaaatcattttattgcctctgaaggtatgaaaaatgaaggaactcatacgaaaaaacttggtgctgagcattatttaaaaacgtaccgaaaattttacaataatgaggttattggtgcagatattgagttatgtcattcaagagaatataaagaaacacattttgatggcctacacgtttattacaacccaaatgctacagtacctttggataaaagtatcttttttcctccagaaattacgcaaaatttttatgacatggtgagtaattcgcctgttcaaaatcatcctgatagagccttggtgtcacggcaggtgtttgaaccgtctaaggcctgtctaagacttattattaaacactggttccctgagtatatcgaagatctgtaa

SEQ ID NO: 155179 - DNA, 396 bp, Enterobacter cloacae
atgatttatttttccaagtcgtctaatggctttttcctggacagcataaacgaaaatatgcctgctgatatcgtcgaaattagtgctgatttatacaacgccctaatgacggggcagcaaaatggtgggaaggttatcgaatcagatgatgatggatatccaattcttgtttcgccggaagttaaccacattgcacaggcagagaatcagcgggcgcaattgctggcaacagccgatgatgtgactgctgactggcgggtggagttaatgctgggtgatatcagcgatgaggataaagcaaaattatcggtatggatggaatataagcgcaaggtaaaagaggtggatacatcgctggcaccggatattgactggcctgaacctcccgaagattaa

SEQ ID NO: 155180 - DNA, 924 bp, Enterobacter cloacae
atgacaactaactccaataccccagaagcagttgagcaagataatattgttcctatggatgcaatgaatgattccattaatcctcccccaacaaaggaggagagagacgcatacaaaaagaaacagcaagaaaggattggaaagtatattgttggtggaacagatttaggtggaaacaccataagtaaaatttactcacgcggcgatgaatatgtcatttatgaagtagcgaaccttccacctcatgagtcaatgctcgtgtatatagactcgatcattgaggaagatgatactaagattgatagatatcatgcatctaaagagcattttgatgaattcattgcacactgttacaaatacaactgctcttcaatttataaaaaaagagcagcaaccgtcatgtcagcaacgatccttgggaaaaacaacttaaacaaaaataattttaccgagataaataaagatataaaaattgactatgaaaacacaatgctcggaaggaacttatatcaatcaggagcaatatcgctagctctgttattcatcgcagttgcattaatagtatacttaactagagataccaatttcataaaaaacaaccactttattccagtggttctttatgcagcatcctttgcttctgttggaggattcatctcggtatctcttaaaataaaaagccttcatacagacagagaacttaaaaagaaaacctatttcttttatggcgcggaaaggatacttctttcaatgatggctggtgtacttgtatacttcatgctaaagggtaatataatcttcggatttatgaataacagcagcgacatctcattttcaatttatgtgatttgtgctctttctggattcagcgaaacattgatccctaacacattgagaaaccttgaaaccaagtcggaaatttaa

SEQ ID NO: 155181 - DNA, 447 bp, Enterobacter cloacae
gtggatgacctgcagagggtggatgactggctaaaggccctgctggcgaatctggaaccggcagcccgcaaccgtatgatgcgacaactggcgcaggaactgcgccggtcgcaacagcaaaacatcaggctgcagcgcaatccagacggcaccgcctttgagccgcgccgggtgacggccagaagtaaaaagggacgcattaagcgccagatgttcgccaaattgcgcactactaaatacctgaagactgcagccactgcggactctgccagcgtgcagtttgacggctcagtgcaacgtattgcccgtgttcaccattacggcctacgtgatcgcgtcagccgcaaaggaccgctagtacgctattctgagagacggcttttagggataaacaatgaaggaattaacattattaaagaaatattatttagagaggtatcaaattga

SEQ ID NO: 155182 - DNA, 135 bp, Enterobacter cloacae
atgctcggcttgcccgggcttgatgcaaaacgcactttggagttaagcagctttctgcttctcttcgagtctgtcttgcagcacattaccttcaaccttgcattcctgcatcatatgtggggccgcctgaagtag

SEQ ID NO: 155183 - DNA, 702 bp, Enterobacter cloacae
atggaaaatctgatcagagttaaatggaatagattgaaatctaatcttacgttaagtgagattgctttttatataaagagtaacaagtactctgaagagcttggctatggttattctgattttgaactttcgtctgaagcactatcagctacgtatactgaagctaaattgaataaacagacctcagtagatccgttgggtaacgaaaatgaacaagagttcattacttatgagtcaattcagttctctatatcaaagctcataggtaggctatatttattatcagtttacaatcctccaaaatcaataaagtccttgacagagcggcttagtgcggattctggttataaaatagggtttggtatcgttgatattaaactgtctgagtatttgggttcgctgcgtgaaagatatgatttagaccttattagcatcaagaaggttaaggttagcaatttgatagttaatgataactctaaggcaactgtagaggttacatctaagaaaaatgcatttgatgatgtgaaggatattattggggataaagcatatactcttgataaggttagggctgcaggatatgttttagggcatcgttgtgaatttgagatatcaaagaacggttctgtctgtgctaacgagggtatggttaaatatttaactgagacaatagtttctcatattctggaacgggaaatttaa

SEQ ID NO: 155184 - DNA, 1125 bp, Enterobacter cloacae
atgagcaatatttatagtgtgacggataaggttttatgtgatgctcttaaccagtcacaagtaactcaaaatgagatgagagagctttttctttcaagaggtataatcatttcaaaaaacactgatagaaaattattagctaaaaacttctcaaagtttactcatgattactatgatcatcaaaaaatagcagagatattaggaagtgagcctcggagggaacgttctacttcgagactagtttctaatatgcctgaaaaaacaattttactaaaagcggcggattcgctgaaaaaagaactatcagaccaaaaagacctgtgccatgtagttgctgataaaagtggtataataaatatacatataacttatatgtcaaccaatttttcaaaaagtgatttcaaacaagtcgttaaaaaacaagctgtcattgaagtcgaaccaacagatgctggatatgtgattcgtcgcccagataatgagcaaactgaggtttatgagagtcagttacttgctatcgttgaaagattatcaaaggaaagagcaatcgaggaagggaaaccaatttcggacgctactctagatatccaagaaataagtctagagaatattgattctcctcagtccagaactgatttctttacgaaattaataaacgggcttgagggctatgagcttgatgatgtaacagatgcttacgtttatcacccaaaaccagaagagattgaagaggaaagcggcgaaattgatttaggagtacatgttagtaaggcatcgttgaaaggggaaggagtactcaaatctgaagaaatcaactcactttatgaacgtggtttttatatatgtaaaatcaaatggcgggttaaggagaaaggtgctgatccaaatatttttgagtttgaagcgcagtttaatgatgctcaaaacttcaaaggattttcatatatagcaaaaggtattaaaaaatacaaagggggcggtgagtataataagtcaacggttcaattgaaagatggtcagaagttattttttagtcgtatgattgaaaaggcagcccgttccattataattgaattgaataaacaggctcaggggaagaaagatggaaaatctgatcagagttaa

SEQ ID NO: 155185 - DNA, 1065 bp, Enterobacter cloacae
gtggctgagaacggaccgatagaagagttagcaaagatagtatcgtcgaagattttcgagcgctttaaatggagcatatcagggccgtgtgatcaggactttggatgtattgacgaagaaaaccataaaccactcgataaaaagcaggctcatacacaccctgtcgatgtggtttttagctataaagacccttatttaaataaaactattttattgaatactgacttaaaaagttactctaagggttctatcaatcctgacatgatagaaaaagcgctcacatcgcttggatatacaatttcctgtgctcaatatagtccagagtggcgagataaatataatatatgcgttggggatagtgaggttagagggctattgtttgtttataaccatgacaatgattttgatcatgacttttatgatttcttcgatcctcctaaacctgcgggaagaaaaagaaagccgaaagcagttaaattagataatataaaggtttctgatgggcaacaaatccatataattgagcctaagtcgattagctatatgttatctataatcgcagacatgaatgaattaatcagagataatcaatttccgagagaggagtatggtttttattaccctcaacttacgtatcataaggtaattgttaccgatgattatttacctgcaacgatagaatctttgactgctccatttttaattattaaacatgatgcagtttactcgtatgaccgcgagctacagaaagaagttgaagtttatcccgctgggtatgttgtgtattataatcgtccgggctccacggatatggaattttattacctatttgatcttttaactaactaccagattctgaatggaaagaacaacataagaatacgtatcgcgacaaaggatcggaacgattcaataagatcgcatttcaagcgagcacttcagaaatatgcatttgattggaattatgatgatagtgcaaaggaaaagttgctttctatggatatatatttagttcctacagttaaagagttttatagtactgaatcaacatcatgggattattaa

SEQ ID NO: 155186 - DNA, 987 bp, Enterobacter cloacae
ttgggccagttatgttcaggtatatttattggaatctatttagctatcatcatggctttaattttcataacatggtggaaaaagtggtatgttttaaatcatgaaaatctctttaaccaaaaactattttggattgtcattctaacacccacatttagtttcttatattttggcattttttcatggttagggcataaacctcaattgaacagcgaggggatgaataacttcctaagcattacaaaattacctttattcattcttgcatcagttgttccattaggcgctattgtaagtaatttacatcgaacataccaaatggaagctcaaatcaagaatagtgaatcaaaaaacaatctagatgctttttacgctcactacaaataccatacggaaagtttatcaaaaatatgcagcgataaaaaaataacccctctacaaaataaaaaattcgatgagttaatctcattaaaaatgtcaattaagaaaccacacagtctttataaattgttcttcccttcatccagccctattaatggacctgattacactccttctcaaaaggtaatatcacttctcattaagagaattgatgaattaacatcatcaattttagaactcgatgataaatatcttacagataagatcaataacggaattaaagaagacgacgagagactgaaggctgtgagaaataagatgttaaatttatgcagtgtgatttcaatagatgaggacatacgtgagataaagtttttagatcttgattatgaaaataactatttaaagctaagaggtaatattatcagaattagattactgtgccttaagattgattatatgttaagacaatctttatctgttatcggagttacaaagaaaataaatgcagaaatttttgataagttaaacatattaaaaaaaacctttactgtacaaagtgaacagataaaaaacatagcatctagtttaaacatcaatgactag

SEQ ID NO: 155187 - DNA, 537 bp, Enterobacter cloacae; identical to SEQ ID NO: 105514

SEQ ID NO: 155188 - DNA, 228 bp, Enterobacter cloacae; identical to SEQ ID NO: 120749

SEQ ID NO: 155189 - DNA, 381 bp, Enterobacter cloacae; identical to SEQ ID NO: 120748

SEQ ID NO: 155190 - DNA, 1167 bp, Enterobacter cloacae
atgagtgataagatcatgcaaacagtagatctgctaatttcacatagtcaaatattgttacgatccagagactatgacgaaaagctgagtcagtggggaaaaggtaatgtttctcaaggcgctgttttacacaaggattatgttgtattcgatccattaccagaggacgcatttggagcaaacgtcaatatcaaaatagataatgcttttaaattagatcaaaatgcacaacgctgcattgttgttccattttttattacggataaaaataagatccagatcgcatctgcgacagagaaatttgatgtaagcattaacgtaaccggcaagatttattcgctcttttatgaggtttgtgaaggggacgagatttattataattttactcttgtgcctgaaaaagaagcaatccttgtggttgaggtgaaaaaatattataaaggaagtgttgattttattgcaggtgaagggactattctcaatgagttcataggagaagtagccacgcgacaaataaatattatagatggaaattattatgcttcttcctctttgctagataaaaaagaaaaagttggcttcctgctgtatgatggtaagaaaagcgacctgaacttaagtgacgccgaagaaatttcaaatgaggaatttgaagttttctggcaaacatcaacgggttcattgcaagaaaaaaagcgaataaaatacttgtctggagatgctgtggaacctttgaaaaaatccacagttattgctcatattgtgaataataaagggaagtggggtaaaggttttgttctgtccctttcaaataaatatcctgcggcaaaaaaaagctatcttagttgcttcaaagaaaataacttcccagaattaggggtggttgattttgttatggttgatgctcaggagaagatatttattgcgaatatgtatgcgcaggatggtataaagaaaaatatcaacgacaaaaaacaatacgtatgttatgactctctgaaagtttgtcttgaaaaattatctgactttgctttagttaatcgcctttctatacaaatgccaaggataggagctggcctcggtggtggtgattggaatgttatagagtccttaatactaaaaaatatttgctataaaatgattgattgcaatgtaataactttataa

SEQ ID NO: 155191 - DNA, 279 bp, Enterobacter cloacae
atgcacctgaacatatcatttcaggcccttggaaacgcctggtgtacgatgctgacggtcggatacagcgagcaggttactcgttgtgtctgctggagcgacttcaggatgcgctacgccgtcgtgacatctggttggaaaacagcgatcgttggggtgatccgcgccaaaaacttcttcagggggaggaatggcaggcgcagcgggttccagtctgccgggcattgggtcaccccactaatggcagtaaagcatcggagcaattggccgctcagttag

SEQ ID NO: 155192 - DNA, 615 bp, Enterobacter cloacae
atggcattgcgccattacagcggcgccattaaggtacgaaattcctggggcaaactgactatcaacgtctcgtgtagcgctgtttcccaaaccgaagtttgcgcgagcgtcagcggcattcgttgccccggtcccgccctgcttaatgctgagagctgttttcagcccggaaaggctggtaatgtcgctgttatcccctttcttcgccagagatttttgacccggcacggtaacgacagtgccattgatagtgatggtgacatcagatgtcccgttcattacatcagcgaacccgctcatgtagcgctggtacatcgtgaaggtttcagcgatatcctgcgccagcccatccacgctcagactgtcactcagaagaatggcaaaccgggttccagcgggaacagttgggttagctgctggcgttacggtgagacttgttgcgctgccgatggtggtaatctgaaatgcctgcacagggctggtcattgcaataacggtacagccgttacgaataagagaaccagcagcagtgaagtttgtgccggtacctgtaagggtgtttccgctgatggcgatagtgccagtagtataaatcatgttttctccaggcaataa

SEQ ID NO: 155193 - DNA, 312 bp, Enterobacter cloacae
ttgttggatgcctttcttagcagtgatgaggatagcgaagattatcacgatgctttggctaaagagattgaaggtattgcatcaaaagtatccgatgacgtgaaagccgaattcggtgcttctgaatgggatatccctgatctccttatcgatttgaatgtttacaatgaggctttgtctctgagtcattcaatcggtagcgacttgtctgttttacagcaggttaaaatgcgtggccgaaacaaaactcatgagcgtgggattgccaccggtgggttcattatttccctcgttatcttcagcaagttctga

SEQ ID NO: 155194 - DNA, 279 bp, Enterobacter cloacae
atggaaaacgaaacaataaagtgcccgttctgtttcaaagagagccagttcggagtacgtgtctgcactggctgtcacgcaacaattaactatggtgttgtttcaccgtggcttgctttactaataggaattgtgctgttagcgattgctttcctcatattcgctatcagtgaaagctttatattaactgtcgttatctattttgccacagcaatttttttaagattttatttacgtaagaaatttgcacacagagccgttttcacacataaaagctaa

SEQ ID NO: 155195 - DNA, 2967 bp, Enterobacter cloacae; identical to SEQ ID NO: 153364

SEQ ID NO: 155196 - DNA, 339 bp, Enterobacter cloacae; identical to SEQ ID NO: 127131

SEQ ID NO: 155197 - DNA, 444 bp, Enterobacter cloacae
atgtctgcactttatgaaaaatcgcagctgacgaagatccttatttcctccctgccagccaccaaagaaacgatggataccgcaaccttcctcgatctgagttgcaccatcaaagaaattcagttcaccggcggccagaagcaggatatcgacgtaacaacgctttgctctaccgagcaggagaacatcaacggcctgccttctccgtcagaaatctctctgtccggaaacttctacaagaatccggcgcaggacgccttgcgtgaggcgtatgacaacgatacgacctacgctttccaggttatcttcccgtccggaaagggctttaagttcctggctgaaatccgccagcacacctggtcttccggtaccaacggcgtagtggcggcaacgttctccctgcgcctgaaaggtaagcctgaaaacatcgaatctggctcctga

SEQ ID NO: 155198 - DNA, 279 bp, Enterobacter cloacae
atgaaaaagaatagcactgataacttaattaaatttagatacatgggttatttcttacttgctgtgatattgcttcctttattgtctatgcttgtgtacatttcattcaactctgaatggatgaccaacaatccaaaatcttatcttttaggatacattttattttcttctttttgtctgatccgtttgtttatattgagaggctcttataaatatgctaatgatttaattctagcgatttttgccatttgggaccctcgatttttggacccttcttag

SEQ ID NO: 155199 - DNA, 339 bp, Enterobacter cloacae
atggcagtcgaaaccttcagctggtgcccaaaggttgcctctcaggttgatacaagttttcgtacccgaaaggcgcagtttggcgatggctatacacaggtggccggggacggcatcaacccggtaacacctcagtggagcgtgagctttaccggcgatgaggcttacattcaggccattaaaaactttctgaacagacatacagggtggaagtcatttatctggaagccgccgcttgagccttcaggtttatggcgcgcggaatccttccagatatctacccacggcaacaaaaaatacaccctcagcagcacattcatacaggcataccatccatga

SEQ ID NO: 155200 - DNA, 1062 bp, Enterobacter cloacae
gtgtcttataaactaaataaactacttagcagaatattctttaaattgattttgctttgtttggcactaacattcataaacatgatttcatttaaaagcatgaagtttatggccgtaatacaaccagtattcatagctttagctgttatatgggtgtcagttccgttagcaatatccgctgcaattttatatccaagagcttgcaaacatttcaagatgaaaagttggcgtttggtagtggaaataaggaggtactataaactcacgccaattaatagatttattttatatgttggatctttggcacttatgttttctttccttagtcagtttttattcggtggtaattctttcttcctgacaggattttcttttttggtaatgagtacttcctttgcaattgatatatataatcgctccatctatatcttcaagaaaatatggtcaggattattagggaagattataatcgcgttgttagcagcattgtcatttgtcattactaattatttagctagacgttgggtttatataactacggatctagaccctaaattcttcagtgagtttaataatatagttagcattttcttcacgccactttcttatctaattctagtgagtcttttttcattggtgattgtcattcccgaatttattggaataactttgatgtctttgcttagtcccattaaggataatttcctaagaaataaattcaaaaggctggcaaatttatcagtgaggatgagaacaggaaaacgaattgaaaagctcacttcatccgaactggtcttattaaactctagagttctattttttagagttttttcatcacctatttttgtctgccttattttttatacgttttcatggacaagcagcatcacgggctcgttttgggatacaaccgcaaggttaggtttggttaattattactatcatgccgaaggaacaagtcctatatctaagataaggcattatagctatgatggagaaaaaatttccacagctatatttaatggaagtcgatgggagtttttcgcttccaataacaaataa

SEQ ID NO: 155201 - DNA, 594 bp, Enterobacter cloacae
atgctctcagcaatcatgaccctttcagaactgagttatcgtttaagtattatcggattgatcgaatatcaggaacgttttgaaatatatagatggcttcaagacaaaagcaacagtatttctgatccacgcaacgctcctggggaatactatgccccctctgaagaagagaggatggatgatgagaatgaatcggataaaaataacagaatggaagattcacagttaagtcagaccggtgcaagaggtggtcaaaaaatcgaggacgaagatgattcgatgcatttcctggcttttaaaaaatggctctttactattggtgacgcagactgtttcccttcagttcctcatggtcattaccaacgaaaaaccaccccgtggccaaagttaaatccctataccggagtggtacatagcagcatgaaagttgaagatgttccttccaggctcaccaaaagagagatgagaatactttggaatgattctaagtttattgaagagtgcaggaagcagattctttggtatagtgggtttgcacctgattattcttttcctaatgcacgatttggcaggcatattctgccacggtggtga

SEQ ID NO: 155202 - DNA, 1029 bp, Enterobacter cloacae
atgagcgttaaagatattaaaaatacctatgaggggctggaccttgtagcaactatcaaggattctaaacaaggctcttacctgcttcaggatttgaacctgttcgctaaaggctcctctagcgtccctaatgcccgtgtgagtgatattactgatgcggaagattccaaactggaaaccgtatcgcgctacggcaccgacaccaaccaccagaaagctatgaccgctgttttccgtgatgccgagatcccagtcgtacatgagaccgcctttgtgcgcccgcatgattggcaggggctgatcagtccaacaactaatcaggatatggcgatcactgaagttatcagcaagcgtgctgaacagttcgaaaaggattatcgccgtactgtggaaacttctcttgcggaagccctctttgaacgtaaggttagcgcaccccataccaatgatggtgacatctccttcgatcaggtgttcgggacctccccggcttccttcaccctggacgcttcagtggatgcctctatttaccaacagcttgctaaactgcgtcgccaggtttcccaggcgctaggcgcggcccgcaactatagcgaccgtctgtatgtcctgtgtgattctggtctctatgacgtcattgccaccaacaaagagatccaagcatttattctgcacagcgtccagcaggcgcagatctccggcgtggttatccctaacgcgcttagtggttttaataccatgtcgctgggtcctgtaacctttgtcgatctggctggtgaccctacttacaaggtgagtgagaactccggtctggttgtcccacgtatgaccgactctgattactcatttttgcgccgtatcgctggcccatgtagccgcaatcagtcctacgccgtcaaaggtggcgttaaggatcgctacggttggaccagcgtagacgatgacgggatgattaagatgcaaagtgaattttctctgttgcctctcctgttgcgtcctcaatggctgaccactatcacgctgaagtaa

SEQ ID NO: 155203 - DNA, 201 bp, Enterobacter cloacae
ttgaaaattagtttaaacattccaggtgtgggcgaggtgtacacctccaccaatgccgatgttatcaaccgcgcggccctggcgcgtaagctggggatcgatcaggtgtcgttatgccgctatgaaaagctacacggctttgagcgagcattaaaaattatgttggagaagaaaaaactccggcagtgcatgaaaaactga

SEQ ID NO: 155204 - DNA, 345 bp, Enterobacter cloacae
ttgaaaacatcaaccctcatacaaaaacttacagagataagcaaaactgttccgttcgatgccgatgttgttacaggagaggattggtggcccaacccgatcactcgcatttatcacaatcctccacatacgtttatcgagtttgggacagaaggaccatctgaggatgaagatcccgatgagttcaccctgtacaaagaattggagatacgtactcatcaaatgatgattattcgagactttgtgaaatccaacgtcgaattgaagccagaagaaatcattaatgaactgaacactcagattgatcgtctgagactgatggctgaagcgatcttaacgaaatag

SEQ ID NO: 155205 - DNA, 468 bp, Enterobacter cloacae
atgaatggtataaatccttatattacgttgaataatggtgtgaaaatgcccgctctgggattgggtgtttatcaggccaaacctgaagaaactaccgaggcggtgaagaaggcactggaaaccggatatcggcttatcgataccgctgcggcctattttaatgaacgtgaagtcggcgccgggatccgtcggtcggacgtagaccgcgacgatatctttattgaaactaaattgtggatttccgactatggctacgattctgctcttcgcgcctttgatgtcagtctgaataaattaggcattgagcaactggacctctggctgcttcatcagcctctggcatcagaatttgaaaagaccattcaggcctataaggcggctgaaaagctgctggccgaggggcgcgtgcgtgccattggtgtatccaacctcacgcccaggagcaatgggaacaggcaggccgactga

SEQ ID NO: 155206 - DNA, 312 bp, Enterobacter cloacae
atgcagaaaataaaatcggaagaacgccacatcatctgtgaactgcgatgtgaacctgaaaatcgtgagcgcgttaaagagctggtcctgaaatttgttgagcctgcacgccttgaagccggttgcctttattacgatttttatcaaaaaatcgatgaacccgacacgttttatattattgacggctgggtaaaccaagatgcagtaaccagccatgcggaaaacccgcatgttgcagaagttatgtcatacctgcaaccgctgctgacattcggaccttctgtcagtctcattacccgtgtcagtgactga

SEQ ID NO: 155207 - DNA, 774 bp, Enterobacter cloacae
atgacgacccaatctcttaaaggccgtatcgcactggtcaccggcggaacaaccggcctgggtttcggtgcagcgaagcgactgattgaacacggcgcaacagtctatatcactggccgccgacagaacgtgctggacgaggcagtaaccaaactgggcaactccgccagagctatatgtgcggatgtctcaagtaaagaagacatgctgcgtgcggctgccaccattaaagccgaacaggggcatctggatattttgttcgctaatgcgggtggtggccacgccacgccactcgaagaactgaccgaagatcagatcgacagcgaactgagcataaatgttaaaggtgttgtactcactatgcagagcatgctggacgtgcttcgtgacggttcctccgtagtgctgaatgcgtcgattactgcagatatggggttacctggatttgctgtttatgccgcgaccaaagcggcagtgcgttcactggctcgcagctggaccacggatctaaaagggcgagatatccgggtcaataccataagtcccggtgtagtcccgaccgagggttacagcaacgaacagaaaatgagtgacaacgatattgcctcatatgctgagcgagtttccgcagaaataccggccgggcgcgtgggcaccgcggcagatatcgcggatgcgttgatttttctggtatcagactcgagtacttacatccgtggcattgacctgatagtcgatggcggtatgacccgtgtttatgccggtaagaactga

SEQ ID NO: 155208 - DNA, 981 bp, Enterobacter cloacae
atgcaaaagcgacaattaggtaacagtggccttgaagtatcggcaattggtctgggatgtatgggactgacctttggctacgggcctgcgacagacaaagctgaagccatcaaacttatccgtgcagcttatgagcgcggcgtaacgctgttcgacactgcagaagcgtatggtcagatcaatgaagaaatggtcggggaagctgtggcaccgttccgtgaccagatcgttatcgctacaaaattcggtttcaaagagggtaatgcagcggcgggactcgacagtcgtcctgagcgtattcgtactgtcgttgaacagtcccttaagcggctgaaaacggattacatcgatctcttttaccagcatcgtgtggatccaaacgtgccaatggaagatgtcgccggagctgtacgcgacctgattcaagaaggaaaggtgaaatattttgggatgtgtgaggcgggcgtaaaagctattcgtgacgcacatgctgttcagccgctgtccgcactgcagagtgaatactctatgttcacccgtgaacctgaagacgtcattatcccgacgctggaagagctgggtatcggcttcattcctttcagcccgctgggtaaaggctttcttacaggaaagattgatggtgcaaccacctttgctgaaggagatgtccgaaataatctgccgcgttttgctgacgaagcccgtcaggccaaccataaccttgtcgccctgatcggtaaagttgctgagcgtaaacaagcaaccccggcacagattgctttagcctggttgctggctcaaaaaccatggattgctccgatccccggcaccacaaaacttcaccgtctcgaagaaaatgtaggcggggctgcagttgaactcacggccgcagacctacaggaaattgcagatgtgctggcaaaagttcccgtccagggcgagcgttataacgctgcaatgatgaagtccattaaccgctaa

SEQ ID NO: 155209 - DNA, 888 bp, Enterobacter cloacae
atgaatcatacggatttcaatcatcttgctgttttcattacggtagcgcgtgaaaaaagcttcacgcgggccgcggcgcacctgggcgtttcacaatcagcaatcagtcatagcattcgaggtctggaggaaaggctggggatacgtcttctgacccggacaacccggggggcagtgccaacagaggcgggagaacgactgcttgccaatcttgctccctactatgatgggattgagaccgagcttacctctttgggagagctgcgcgagaagccaggaggcatgatacgcatcaccgctcatgaccatgcggcaaccactatactctggccaaagctttcaacgttattgagggagtacccggatatcacgcttgaaatcaacatagactatggattgatcgacattgtgaccggtcgtttcgatgcgggagtccgtgtcggggatcagattgccaaagatatgattgccatgcgtatctctcctgattttcgcatgatcgttgttggctctcctgattacttttccagacatcctaagccagaaacgccacaagatctgacttcacacaactgcgcaaatttgcggctttccacacacggaggcctgttcgcctgggagtttgagaaagacgggcaggagttgaaagttcaggtatccggccagatgatattcaatacttcgcctcaactgttatcggcggcgcttgcagggtacgggctggcgtatgctcctgaggatgtggtgcaaaaatatatcagagagggaaaattaatacctgtacttgaggactggtcacccacatttcctggttaccatctttattatccaagtagaaggcaggctcttcctgcattcaagttgattttaaacgctctaagggtatga

SEQ ID NO: 155210 - DNA, 864 bp, Enterobacter cloacae
gtggaaagatgtgttgttgcttcacctgttatgacggaagttttgcccactggtggattccagacagcgcgagggttgaatgaagaagatttgaattattacactcttttttgggatagattagtaattccaggctcaagagaaatatattttcaattaccccgagaagatatattgattggtttggactttttgtctagaccagtagtgtctatcggattcaatagcgatcagtacccgatagagttcccaaaacgtcaggttgagatacttagtaagttaaggaaggatgagcctcagcgtgactggaatttacatcagataggagaggaatttataggggggaatgggacaagtgatagaaatacgaacttaaaacttgaactctttgatgcacttcctgttcccggaccacatatccatccggagcagatacttgagtttaagcataaatataaagttgattatgatgcgttccataattatctggatgacttataccaagatgttgcttatgctcccgatgagccgctttttcaaaaaaaggcttatgaacgcttccgtaattccttggaagatataaacagaattagtgaaattaataaaggttggttcttaaatcgctacaatttaagttttgaaatgccaggttctgacgatatggttaatattgttttaggagcgattattagtgttagcgacacggaaaatccgttggtgacaggtttggggcttctgcaggctgcgaagggattcattaaagtaagtgataagcatgctgagattttacatagtgatgataaggaaagtaacctactttatcttgctagggcttataagaaagggattttagatagggattaa

SEQ ID NO: 155211 - DNA, 522 bp, Enterobacter cloacae
atgaaaattaatccgggtcttataggcgttgttgttattgctgtcctttcggtcgctctcgttaagagttgctccgacgccagtagccttcagagcgataacgacgttctgcgaagcgacaattctatgcaggggcaggtgatcgccacccaggcattcaacttcaatcgattcaatcaggttgccgaacatgccatcaggcttaactccctgatcgacaccagcactgaagaaacagttatcgaataccgggagattctccgccgtgaaaaaacctgtgatctgcctgttcctgctgacattgctggtgggctgctcgaatacgcgtaccgtttacgtgccagcgccatgcacaccgataccgacaaacctaactcagccgatgatcgtgccgttaccaccagcccaatgacatattgtcaggcagtgctttggataaaaccattactgtcacttatcgaaaagggcaacaagcgctttgcagggattcgagagatagaaaatgttcgagcatctcattaa

SEQ ID NO: 155212 - DNA, 189 bp, Enterobacter cloacae
atgaaagagggttattactggattcagcataacggcaaaactcaggttgcctactacagtgatggcgtgactgaagacctggaaacaggccagacatattttggagtctggcatctcaccattggcgatgatatttgcaataacggcgaggcagaaattcttgccggcccgttagaatctccaatctga

SEQ ID NO: 155213 - DNA, 297 bp, Enterobacter cloacae
atgtcagcaaacgatctggcactgaaattcagcactgcgccagcagaacagttaatcggcgtgttgcctgtacttgaagttaaagaggctctctacgatgaggtttctgacgatgtgatgaatgaggtttgtactgagcacgggtttgaaatcgaatttatcgagcagacctgcaacgccttcgcaacagcaatgaaacttgctattaagcaaccagccaaagaagctcgcgccacactgaaagcagcattaaaagagtacccaggatacgggcgagatccagacgagtcctcttaa

SEQ ID NO: 155214 - DNA, 186 bp, Enterobacter cloacae
atgagattaataacatttgacaatatagaatcagctgaggtagctaatgagcttgttgatactatccgtgtcgaatgtataactaatataaactcaaatgttatttcatttgaaaatataaaacaagaaagagaaacattagaagcttttgttgaaattatgaatactgatataatatttgattag

SEQ ID NO: 155215 - DNA, 1596 bp, Enterobacter cloacae
atggcagaaccggctaaaaaaaaccctccaaagagagaattaaaaagcgaaacaacctctgtttcatcaatggatttccttgaatcacggcaatctaaagatatctatttagggctgtgtgggtatgtaggatgtggcatgcgtaccataaaagaaataacagaagaaatatcaagagattggcgttacaatgttgttcatattcgcgttagcgctctaatggaaagcccgatatattttgaactaccagccatcatggcagctaaaagtcttaaaacaaatagacatttaaagttacaagaaatagctaatggcctgcgaaaatattataatagaaatgaactgctagcggaagcagctattgcagcaatagctgctgaaaagaaaaaaatagattacagtaatgagaactataaaggtacagttttcataatagatcaattcaaacgccctgaagaagtagagttatttagagttatatatcagcacaacttttatttaatagggattttaagagaccttgattacagaattcctaacctgattgctgatgagtcaacgaaggacgatttacatttaattataaatatagataataaatctaatgacatccatggacaaagaactggtgacactattctagactcagattttttcataaaaaataatttcagtcagaaaagtgaaattaagaaaaagatcgaacgtttctttggattaattcatggaaagaatgggcttacaccgtcatttaatgaaaaaggaatgtatgccgcttatgccacgtcacttcaatccgcatgtctatctcgtcaggtcggggctgcattactcgatgaagaaggcaatctattagctgtcggtaaaaatgatgtgcctaaggctggaggcgggttatattcgagcgatgactttgatggtgatcaccgttgcgttcataaaagtggtaaatgttacaatgacgcaaacaaattaaaaattaaaaatagaataaaagaagtactgtcacgtgaagtgaatgctgtattaggtattacggctggacaaagtgttgctgatataaatatatctaggttattaggaaacttagggcatatagctgatagtttatacaaagatagtaaaatatcttcagtcatggagtattcaagatccatacatgctgaaatggatgtcattacaacaatggcacgtaaatcttcaggtgatacaaaaggcaagatactttatacaacaacttacccttgtcataattgtgcaaggcatatagttgcggcaggtataaaaaaagtagtttatatcgaacctttcgacaagagtttagcgcttgatcttcataatgatgcaataactaaaaatgaagaatcatctaaagtctctttttgtgattttgaaggagtatcacctcgtcgttataataaattctttagaccgactgatgaacgtaaagatagttctacaggtaatgctaaaaaatttaacgttcggtataacaatcatatagatgtacagtatttggatgactacagaaaatacgagtcagctgtagcacaaaaattcatcaaggaagtatcaaaacctgaggagcctatgtaa

SEQ ID NO: 155216 - DNA, 684 bp, Enterobacter cloacae
atgaagcaatgggctaaaacactcctagaaagacttagtctttcacatataagatggatgattatcggagttttacttactgagtttatcacttggattttatataaaaacccaaagaaaattactgctcctggcttatctgcgattgtagctgtatgtgcattaatcttggcagtatactcagcctatcaagttaagaagtgggtaaacggaaaggtaaacgagaaaggttttaaaaaatgtgaagccataatcgataatatacaagaaatagccatgggaatagtaagagttaatatctttattgaacaattgttcattgaggagaaagttgaaattaatgaagaggtttataataaaacaattaaaacactcattaatgaacgggaaaaaatcaaagaaacaattttattaatgcattctcatcgattacaccttcagatttggggctttgaaatctcaaaagactattctttaaatcaatttaataaagcgttaagctcttatatttcagcaattaataaaacaataaaaaactccgcacagttattatcaactggcgagtataaaggtgttaaggaagatcaatccaaataccaagagtcactggaattaattggtgaattcatggataaatttaatggctcatcttttaatgatatatttttgacatacaagagttaa

SEQ ID NO: 155217 - DNA, 462 bp, Enterobacter cloacae
atggcaatcacagaagcaagcattaaacgtacattcactggtactaaagcattggcagtactctctatcctgggtggtgtgttagtgatgttcactgttagaagagaagacggatatgtctctacattcatgggggatactgctgtattcatacttgggatgattgctacagtactgtatggttgggtaggtatgttggtcggattactgactattccaattgcgaaaatgtttagcattgagagtagtaaactcaagaaagtattaagcataatttactggttcgtaatttcgtgggctgtttatgtcattggatttatcgtcacttactttattttcggtgatgatgaaatgactttaatggaacttaaaccagcagtagccgttgcctcattggttgtagcgagtattcacaccgggctgtttagagaaatgttgaataaagaagcattaccaaattaa

SEQ ID NO: 155218 - DNA, 285 bp, Enterobacter cloacae
atgaaaaaactattattagcaacattattcatggcgagttcatcacaggccgctactatctctgagggtttttactgcgacagctacggcaatctgatgaagatgattagtgctatctcgactaaagatcagggtgtgatgttgaagatggtcaaagctggtagttgcgttacggttgaagaacctatgacgatacgtaacgtacaggttatggatcatgggttcgtgtcgttcggtcattcaggcgaagtagggtattcagtacaacaattcattaaggaatga

SEQ ID NO: 155219 - DNA, 390 bp, Enterobacter cloacae
atgttgaaaacttatgaaaacgtacactatctcaacaacactgaaccagaagcagaaccaaaaaattacgcacatttaattaaaactgaacgagaagctatcgatcaattaaatttcaagttagcatcattaaaaaatgaattgcagtcactgaccttttggaaggtatcaccaaaagataaaaccattttcgataattattttttcagcaatcaacttgctttaggaacgttaagagaagcgataggttttgatatatatgatattcatgatagatatcatttcaatgttagctatgggaaagtattagtggatacatttaatggtttaatagaaacacatgaaaccttgaaaaaagacatgaataacctgttcattttctctaattag

SEQ ID NO: 155220 - DNA, 249 bp, Enterobacter cloacae
atgataagaatggaatttaacacctacgatgatggaacatactactttctctatgttacggaggaagtacgaattgaaactaatggtattgatggcctgcaattggaaacctgcgattcgcgagtatgggatttaggcgaacgaaaggatgtgtacttcaacgaaaccttcatgaatccgaatgcggaagagttaattggagcggtgaaaacgcttcaccgcttgctaaatagtgtggattctaattag

SEQ ID NO: 155221 - DNA, 1503 bp, Enterobacter cloacae
atggatttacagaaaaaaatcttacagtacatctctgatgaggcgaaggatttaactttaactcatcatgttttccataatgcactgcatattgaaaatattagaaagaaagaaagaagtttaaacccaataaatttacgagttttgtctaaaccaaagtattggagcgatgataaaaagtttaatcccttttatgtcaaaaaacactccaaagctatagcccactcaatatccaaaaaaatcacggctagaacatatgagccttttcctgtcgcggttaataaaatagccaaaccatctggagggtttagagaagtttcaatctatcagattcctgatgctgcgatatcaaaattattctatcatcggttgttgtcaaaaaataagcataggtttagttctttttcatatgcttatagagatgatagaaatgtgcattttgcaattcaggacatatcagttgaactctcccaaaactcacgggtgtttgttgcggagtttgatttctcaaagttctttgacatgatttcacatgattatctttttaggcaatttaaagagaacggtttctttattactgccgaagaacgtagtgttgtcgaggcctttttgaaaggcagggaaaagggaataccacaagggacttcaatctcactatttttagcgaaccttgcatgttggaagctagataagtctttagaaaaagagggtctacaatttgcgcgttatgctgatgatacaattgtttggtcacaagattatactaaaattactaaagccttcgatataataactagtttttcagccgaagttggtgtttctctaaatcaagaaaaatctgaaggtattagtatactttgtgctaaggggatgccttctgaattcagcaagagtaaggagtttgttgagtttttaggttattctatctctgtagataaaatatcaatcaaggaaggttctgttgtaaaaatcaaacgtgagatatcttatatactgtacaagcatttaatacaaccattaatgtccacaccattaaaggctttaaaaatccctgccaacaataaagatgaggcattgttaagtgcgatgtgcgaaattcgacggtatttgtatggcgatctatcagaggatatgatttcagcttatttgagcgggagaagcaatcgtatattcttcaagggagtaatgagtttttatccattgataaatgatgtcggacagatgaagtccctggacggttggctatccaatgctgtttataaagcggttcaaaaacgttccaagctgttgacgtctcatagacaacctcgacatacaatgtttccgtttaatgcaacacagaaagaattgatagctggatgtaagaaagctagagtaaataaaatgaagttattgaaaatacctagctttttgacgatttatcatgcgatgaagcgtggtttagaggagtatggcgtaattggtgttactaacaaaaataaccaagactataactattcataa

SEQ ID NO: 155222 - DNA, 318 bp, Enterobacter cloacae
atgatgttgcccccgttaatcataaagtgcgtggtgaaagagtgtcgtagcgcatgtgttgcttgctcggccggtaagtcgggcttaacctctattaccgaaatcatgcgtcgttttgccttaaaagagggtggcgatgaaatgggtgctacagaacagagctttgaggcgaagcaccttaatcaaggtggcgctgccggttacatcgcaaagtacattgcgaagaatatcgatggttacgcgcttgatggtcagatcgatcacaacaccggcaagcctctcacctctcacctctcaccgatacagcagcagctgtaa

SEQ ID NO: 155223 - DNA, 624 bp, Enterobacter cloacae
atgttaagagcaattacagagttagaagaaaaaaccgcctcattgttagtcgtagccggagagagtgctgcttgggagtactctgcttcattggtatgtcctgaaggaccgctacttgaattcagtacagaaatgctagattaccaagccaatccatcttcaacattacggtatttaatcgataatttacctgagaatgttttacatcataatcacctcagcggagagtctctaagctctggtgattggcgaggagcatccgtatacttcaatgagatcttcgctcattgcaatgatggcactatatattatggaaaagtattaaacaaagaaatggatttaccttcactgtttagaaaaatagaagcaaaagcacaaaattgtctttttaaatatacacagcgccctgacattgatgatttctttagaaaggaaataattaatagagcttttaaaattaaagggtatgttgaatatgaatattcatggggagggaaaaacacacctcatcaaaaaattaccgcattgaacctttctaaaattaacagcataggtcaactgggagcaacatataatggattaattgataacgcagccactgacttatcaaaaatgcaatggtga

SEQ ID NO: 155224 - DNA, 1311 bp, Enterobacter cloacae
atgtctaacccggtgcagctgttccagatttcctccgtgaacagcgccacgtcaatgacggttacgccagctgcttccccggcgcttagcggccagaagtatggaatccttgtgtcggataatatctcggtcgacggcctggcccaggccatgtcgcagctcatcaaagagtatgacgagaacattggcgcgtgggagacgttcgcaacgacctcggcaaaccagagcatcacagtaacgatcaatggagtttccgtcagcattccaggtatcgggaaattgctgcagaaaggcaccaacggagcgctggcggttaaagacggtggaacgggcgcaactaccgaatccgacgcacgggaatcattcggcctcggaactgcggatgctataacctttggttcattaattttatcgggtacccccccggaaaaaataaggttgattcagtcaagtgaaaatgctcttaatttcctttcttcgtacaaatccgacggtacgagaatgttttggtttgggaagggtagctctcagactgatgacattaatatttattctgacgttggaaattcatctgtaacactaaaccagaatggtgatgtaactgtaaatccagctggaggttttgctcttagggtcaatggtaatagctacttctcttcaggtgggaaacatattttcaacggggatgcagggtttgcatcaggtgctattaccgttccatctgccgcaagtgcaacggcaccaacaggcgctggggtccgtggagttcacgcaggcgttgactccgctgatttcaacaatgcatctaacatcaacctttattcatggtacgggattggtttctgcaccgcgtacacatcaccaactaatggtgttcaggaaggcaagccggccgtgtacatcaatacacgaaatggaacaattaacgcgaaaggggcggttcaggccaatggcgttactcttacgtcagactggaacgcaaaagaggaagtgaacatcatcgaacctgcggaggctctggaaaagatagccgcgcttgatggttacacgttccgctataagaatgcagattcaaagagattaaccgctggcgcacttgcgcaagatctcgatttagtgatccccgacctggttattcatgatgaagctacagattatcttgttgccgattatatggggctgatcggctatctgattgctgctgtaaaagggttgaaactgcaaatcgacgaaattaccaccggagaaaatttaaacaataacaaagggacaaatgcagatggggagctgacccagcagtcaggatcgtga

SEQ ID NO: 155225 - DNA, 339 bp, Enterobacter cloacae
ttgaaaagaataattattgcgactgcggttatgctcatttctggctgccatcaacagcccatgaaacctgaactggcgcagaaaccgtgcaatggaataacgaataagcctttccctgccatgcccgtaaaggcacaggcgctgggcattgagggtaacgttgttttctctttttctgtgggcgacgatggtcatccacacgatatacgtattgtctctgcacagcctgaaggggtgtttgaacgcgaaacgctgcgtgccgtgcaaatatggtgtttatcaccgaataaaagccgtcaaacagaaacggtcactttcacagtaaataagccccgatag

SEQ ID NO: 155226 - DNA, 285 bp, Enterobacter cloacae
gtgaaagcaaaaattgctatttggttaattggttttgtgttgggcgtgccggtgacgatagcaggtgtcgaatgggcgatgttcaaatacaacaagcaacttgttaactgcggtacagatgctgttcatgccagcatgagtgtgatggatttggagaagtactcaaacagtactgaggagctgaacctaatagctgaaaatttggacaagtgtaagaatgaagctagtcctcttaaatctaatctcgatttcatgcgtgatgaaatggggcggaggaattattaa

SEQ ID NO: 155227 - DNA, 267 bp, Enterobacter cloacae
gtgcatagagacagaaatttcatcaatcttcacttcggcctgggccagcccgtcagcattttctttgatggccagcgcctgctgctcaagttcatcgttggcctgtttgatgtcgtcagccatgccagcaattttgtcattgctgtccaccgcgttctcgatcaggtctttgaacgtatcggagtctttaatttcctcaagaatcacatctgtgatgtcggaaacatctatgctggcctgaccgcgcacccattctgtgtaccctga

SEQ ID NO: 155228 - DNA, 288 bp, Enterobacter cloacae
atggtagatgtacgattaacttgtattactctctctaactcggatgccctgcatgaacacattactcatgtaggaagtcctcaatttaatcctcctggaagcaaatggaccgttgcagaagtaatcaatgcaatcgagaacaaactgcataccttctatgttacggacacttatggaaagcgtgctgatgtaggggttgttgacccaggagggggcagaagaaaatttatacgtacttatgctgatggtcgatggaataataacttactgtcattaccgaaatgctaa

SEQ ID NO: 155229 - DNA, 294 bp, Enterobacter cloacae
atgccgacaatcaaagctagagcactcaaagaattagatggaatgaatacctcgacatctgcacctcatccacaagatgaaagtacagctaaggagatgtttaagtatctgaaagaccttggacatcctctttctggacgtgaaattattgaatatggtcgggcaaatggatggaatgagggattcataaaaaaaatggcagaatgggccgataaagttgcttctggcgggagagttgtggtcaagcatcctggacaattatcagatgagttaaaaaaacatttgaaaggatga

SEQ ID NO: 155230 - DNA, 249 bp, Enterobacter cloacae
atgccggttgcgcgcggtggtggaaaagggaataaagtgctttatgactctgccgccgtaatcgaatggttttccgcccgtgacgcagcgatagaaaacgaaaagccgcgcaaagaggtagaacagctgagagttgattcagaatcagaccttatgccttgcacgattgattatgagcgccaccggcttacccgagcccaggctgatactcaggaactaaaaaatattctatattattgtaatcaatga

SEQ ID NO: 155231 - DNA, 204 bp, Enterobacter cloacae
atgacagacaaaaaaagatttatccgtttacctgaagtgctggaaagaactggtttctctaaggcatggatttaccgacttataacccagaatcgatttcctaaaccgataaagactggggagcgtgccattgcgtttttggagaatgaaatagacgattggattgaacaggtgatccaatcgtcccgtaataaagctgcgtaa

SEQ ID NO: 155232 - DNA, 288 bp, Enterobacter cloacae
atgcgtaaacctttgttggctttatcactcatcatgctgttatcagggtgtggagatgatgggatctacggcaactatgttaatccacagtatggcgtcaggcttgatattcataaagatgaaatcaggttcaaaaatggtgtatttgctgttaagagctgggacgagagtcaaaagccgatttatatcgcacaaacacaaaataaaaccctaggttcttggtcatttaagattgagaaggtagatggcggggttatctatcaaggtgttaagtttgaaaaggactaa

SEQ ID NO: 155233 - DNA, 282 bp, Enterobacter cloacae
atgactaataaaacgattcaatgccctttttgccacaatgatcgcatcgttcgaggcatggggacatgcacgcagtgctttgcctcaatagggtatggcattgtgccaatgtgggccttgtcgattgttatgatcattggctccgtagcggggatagctacgtttgcaatctcgaacgcaaacccgctcgccacgttcgcagtgttcctccccatcgttttcgggggcgggttcgcattgaaagcggtatacagtgatcgggtagtgtttagccgtcgctaa

SEQ ID NO: 155234 - DNA, 168 bp, Enterobacter cloacae
atgaatgcgcataaatatttaaagaagtatgagcatcttctcaaagatgttgatgaaggtatgaaagagtttattatctcgatgcttgaagatgatgactggcgagatttcactaaaaaacaccttgaagaacaaaacaaaaaaatcaaaacggaaatgaaaaaataa

SEQ ID NO: 155235 - DNA, 378 bp, Enterobacter cloacae
atgccattacctaaaaatattgaagattttaagctatacgaagactacacacatatgaaacattgcaccagatgtgattcaagaagaaaactaatgttatacaccgcctctgctactgttgatagattagtaaaatgtgatccaaatatgtctgatgctcaggcatttgatgaatgggtgcatgaagtagaaagaacagaacaagttgaaatattacgactatatagtttttgccctacgtgtaaaaaacgcaatttaatatcttatgattcggaaggaatcacacaagaacgctatgagctttataaaaaaagcaagtatgggcatatatacaacggtaaacacacacagaaaagaaataggagcaaaaatggctga

SEQ ID NO: 155236 - DNA, 198 bp, Enterobacter cloacae
atggctgatgcgatgggggctggtttgggtatgttatcgggggcttgtttcatttggagcattatatatctttgccgtcttattgacagcgccatttcatgcgcttcaaaaggtgtagacgaggcaaaagaaaaaatgaaacagcatagaaaaaaagcactcaaaaaaatgggctggatgtcttcagatgataaataa

SEQ ID NO: 155237 - DNA, 381 bp, Enterobacter cloacae
atggaaacagatagaaatcgcggaagaagaaaactcgcagagcatgaggttagaaataaaactattcagttcagagtcaacaaagaagaacttgattatttgaatgagttgttttccagttctggtttagagaaagggcattttatcaggcgtgagcttttaagagtcaaaccaaaaagacaaccgagtaaaatacctgagataaatcgcgagacggtcagggtaataaataatattgctaacaatgtaaatcagattgcgaaacgcatgaactcttcattgccaggccttttagaaataaatcttgctaataatgccattgccgaggcgcgaaaagcactaatggggatcaaagatgaaatcgaaagtcataaggggtaa

SEQ ID NO: 155238 - DNA, 1479 bp, Enterobacter cloacae
atgaaatcgaaagtcataaggggtaaagggtttaaaggttgcgtttcatatgtatttgatacaaaaaacaagcacaacgaaaagcctgatttaataggtagcaatatgtcttctaaatctcatggtgattttataaaagagtttgttgctgttcgcgaatgccgcacagatatagagcgcccggtctggcatacaagtttatctttacctaaaggcgaaacactcacagataaagaatggcgggcggtagcagaaagttatctgacaaaaatgggctttgacatagacaaccatcaatatctgattgtgagacacaaaaacacagaccaagaccatatccacatcatagcaaatcgcattggcctggacggttctgtatggcacggacggcatgaagcgttcaagtctattgaggcatgtcagcaagtcgaaaaagagtttctactgaatagaacacagggccttcgtggaagccgtaaggacgtgtctatgccgtctcagaacgagatagagcaagcaatccgcataggtgagaagccagctcgtgtagtgcttcaaaacgctctgcaggctgctctatgcgataagcctgatctgcagtctttcatcactcgcctacagaccgtaggcattgaaccgaggttcaatgttgccgacacaggcaacgtcgcgggcgtgtctttcagtgttcgagatgtcgcatttaaggggtcaacattaggcaaaaaatttagctggaacacaataaaaggaatcgttaaatatgaaaaagatagagacaatgaactcgttagaagcctctcatcaagaaataatgatgaaccagataatattggacgatcatctgttgaatcagatttcagcaacgatagagccattatcagagacaatgatgattctctcggagtcggtcagtatagagctaaatcagactcaagagacattaataacagcaaggaagtctttagatatgatgacaagctctttaagaacagcgaaaaatgttttagaccaacaagcaaaaaaattggaagagcaacaaaaaaagctacagaaacactcaatggaattaaaagaagatatggtaaagaagcaagcaggtttggtagccaaagttgccatggcagtaggaacgataaatttactggcggttctattggtaggatacttcatcatacagaaagagcattatcagccacgtataaatttagactcaacagtagtagcatcgctaataatagagcagctgagattgaaaagataagaaaaaaattagggttaaatgattttgtaatcagacgtgaggaaaataaatcttacaccaacttggattcgggtttgaaaaataaaagcactttaaacaatgatggttttaaaaagagaataaagaatttcatggaaaaaacttcaatgaatggggttggacatctttctgaaagagatgaaaatagagtgaagccgaaaaagtttggtttttaa

SEQ ID NO: 155239 - DNA, 948 bp, Enterobacter cloacae
atgtcgaataacttaaaatcgttgcgcaagttattaaaaacgacgttgtttttaaacgacgatctaatcaatacgtttatagccacggctccgtatagatataaaatctatgaaatacctaaaagaaactctgatgagacaagaacaatagcccatccctccaaggaacttaagtctattcagcgcttaatcgttaatgaactaacaagtctattgcctatacatgactgcgcatatgcttatagaaagggaagaagtattaaagaaaacgcacttacacattcaaaaaacagctatttactaaaagttgatttatctaactttttcaactctttgactcctgaaatatttttctctgaatgtcagagaaatgacattctttttgaaaaagacgatacctcaatcattacaaattgcttattttaccgtgaaaatagaaagtccgacttaaaattaagtgtcggagcaccaagctctcctttcatttccaacgcaataatgtatacattcgacacaatgatacaaagcgaatgtatgaagaaagaaatatgtttcacccgctatgctgatgacatgactttctctacaaatataaaaggagtattaatcggctttgacaaaatagttaaagaaatattaaaagacacattcaaagataatatttcaatcaatgaaagcaaaactatttactcttccaaagctcataatagacacattacaggtataaccatctctaacaataatactatctctcttggaagagatagaaagagaacaatatcttcagctatacatcattttttgaatggagatataaatcctgaagaatcaatcaagctcaaagggttattagcttttgcggaatacattgaacctgacttcatattgaaaatggaaagaaaatatggttcagaaaccttaaaaaaaataaaaaaactgcaaagttag

SEQ ID NO: 155240 - DNA, 957 bp, Enterobacter cloacae
atgtacgaacaaattataaaagatacatttaaagaccttgacataaaaaacttcactgtaatcaatagcaccctcaatctgatatttgtttgcggtggccttgttgatataaccgaaccagttccctcaagcatgcgcggacaactttactcttatacagcatcagagcatgaagattttcatgattgcctgcgcatggctgaatccttccaagattatattgaaactgggcagtatgatgatttactccactttgaacacgatatagctaaaatatcatcacaagtccttttatttcttgaaagtcctggttcattagttgaactaggaatatttgcttcttttgaaaatctttatgataaaatttgtattatcgctcctgaaaaccatgttgagaatgaagactcatttatattcctaggcccactaaaaagaatatccacttatgtaagcgaagccatacttacttatccatacgaagctgaagatggaaagtttgatagagatgtatgggccgaaatatgtgaagacattttccagaagttaaattccaaggttaagatcgaaaaatatagaaaagaagatgatggtcatttatgtatgttaatacttgaaataatcaacatatgcttccctgttcaactatctgaaattgagactgttctatctttatttgaaatcgaaacctcacaaaagaggctgtctcaattgatatatttattgtctactctcgaactaatacaaaagaaaaaaagaagttcaaacacttatttcttccctttaaagaaattacaaaatgacacttatgtaaaatttggttcttatgcgaataaaaagcctttcgacaaaatgagcaataaaataaaattaaagcaagaactagctttaaacttaaaagacaaagaacaaagacgccttcgcgtattaaccaagtatggtgaagaaaatgtcgaataa

SEQ ID NO: 155241 - DNA, 612 bp, Enterobacter cloacae
atgttcgatttttaccccgagaagacttacgacagaacggaagttatgagaaagccaacgccagttccagctgtgaatggcgtctacttctggtggtttaaggaaattcctccaggcgttcctacagagggctgcattacctttgacggctacactctgctgtatgtaggcatttcgccagaccaacgtgggaaacccaacagccgttctaatttaaggaaacgtatcaaaacgcattacagcggcaatgctgctggctcgacgcttaggcgcacgcttggcgtgctgttaagtggtgtaagtagctttcccctgcgccgggttggatctgggtcccgaatgacattcactcacccaggcgagcagtggcttgacgtctggatggaaaagcatgccaaagttcactggatacctgtcgaggcgccatgggaacttgagaatatactactcgcaacgattcccctcccattaaatattcaggggaatactcatgactttagactgacactctcaggaatgcgccgccaagctgcggcagaagcaagattaatggagattgctgatgaaaggggtttcaaaaggagattagcagcgcagttattaaaagtgtga

SEQ ID NO: 155242 - DNA, 600 bp, Enterobacter cloacae
atgccaacttcaaagctcacaaatgggatcactataaacccgaatagcggagggaaagaagctattgataggcttgtaaaagcttatgggttcttaacaaggcaggctttgtgcgaccacttaggcgtatcgaagagtacgatggccaacagatacatgcgtgacacattcccgtctgactggatcatccaatgtgctttagaaactaatgtgtctttattctggttaacaaccggcggcgggcctgtatatgaagatgcaagaaacgaaatagtatctattccatcacaattattacttaatggaaatttgacggatatcaatcaaaacgtgttcgatacctctattcttcctgaccatctttcaaaaccacttgccatacatgatggaaccataatctatttggttgatagatactttgaagaagtagtcgatggtaaatggttagtgcagattgagggaaaagtaagtattaggaatcttactagaataccggtttctaaagtcagaatagatggtccaggcaccccctttgagtgccttctttcagatataaaagttctatctaaatgtcactccatttattataaggaaatataa

SEQ ID NO: 155243 - DNA, 783 bp, Enterobacter cloacae
atggaagagttaccggttcctcaagaaatgcttctttcagctcaaaggaatttagactttttcctgaagacattctatctgcattttttacctgattgggagatgatacaatccccggtaacagatgagtccgaagaacaaagaaaaagaagattaatgtctgagaaagaaagctttttacaatctggattagtaatcctttttaattcagcagaaatctaccttaaagccttaatagccgaaaaaagcgtatatttgctcttaaaagaagtaaaagattcatacaagtctaaatctttttttgattgtgcaacactggacgccggagaattacataaaattgctggcagtatatccggtagaacattgccacaacgatttaatgatacttatgaaaaattaagagttgaaagaaacaaggttatacaccttggcaaaagtaatagcaatgaaattaagaaggattttttaggttcctttttgacattgtatgaagaaatcagtcaaaaaactttaatcgaaatgtgcgaaaacttatttgataaaacaggtttatcagaagaagatataaacaactctaaaaaatatcatgcttcaaccattataaacatcatgaaaactttctttcctcttgatgaaataataaaagaatcttataagctcgataatccacctcggcaatgggtgaattgtttaaattgttcaacagcagaccatacattagcaacaatatctagatccaaatcactatgcttagcatgtggcttcaaaaatggagtttaa

SEQ ID NO: 155244 - DNA, 1077 bp, Enterobacter cloacae
atggaaaacttaaaatatatacctttcaatcaagtagattttgcagatccattttttgattcgttgaaggaaaactattctaaggggttcgttgaatggttctataaaaaatgtgaaaccccagaaaaagataaagcatatgtcttatatgatgaaaataactcaattgacggtttcatgtaccttaaaatcgaaagtggtgttgtagatgatgtggtgccacagattcgagaaggtaaacacttaaaaataggaacatttaaattcaatcccaaaggaactcttcgaggacagcgattcttaaaaaaaatatttgatcacgctttacgtgatatggtcgatgatatctacgtaaccgttttcgacgaacatagctatctcataaggctatttcagaaatatggttttataaaaaccggaactaaaacctctgagaacggtgtggaaaatgttcttgtgcgtgacatgagcacagatgaacttacaggtgacttactctcagactatccatatataaataacagaaatgaagaaaataaattcatactctcgatctaccctgctttccatacaaggctattccctgattcgaagttaattactgaatctccagacattgtctctgacgtttcatatgcaaatagtattagaaagatatacatatgtgccatgtctgatgttgcactaatgaaacagcacgacattattgttatttatcgtacaggtgacaacaaaggcccagcttattaccgttctgttgttacgtcattatgtgtggtagagaaagttagaacaataagctcttttgaaactgaaagagaatttcttgaatattgttcgcgatatagtgtatttacagagtctgaactacgctcgttttataaaacaaaaaagtacccttacattatcagctttacatataatttagctttaccaaaaagattaaaccgtgctacactaattaatgaagcaggattgaaccctaatagttattggggggtccttaaattgaatgattcacagttcaataaaatcctcgaattaggtgaagtaaatgaaagtattattgtcaattaa

SEQ ID NO: 155245 - DNA, 378 bp, Enterobacter cloacae
atgaaagtattattgtcaattaaaccagaatttgttgagaagatccttaacggctcaaaaaaatatgagtttcgtaaaggactatttaaaaacaatgaagttaaatcggtagtaatttatgccacaatgccgataggtaaggttgttggtgaatttgacattgaatcaatactcgaagactcgccctcaactgtatggcatcgaacaaaaaaacatgcaggcattagtaaagagttcttcgatttgtactttaatgaacgcgccaaagcttgtgcgattaaaattggcaatgttactcgctacgaacaccccctacaattgagcgatctcggtaggaatataactgctcctcagtcttaccggtatctaccaagctga

SEQ ID NO: 155246 - DNA, 726 bp, Enterobacter cloacae
atgatggtcaaattctcatttaaagttccagttttcgacttctccttaacatttgacattatcgaaacattaataactcaaagtgaatcctcaattgaaaaagggattgcagagtataaagaaaaaggcccagaagaatatgtaattgacatctctcctgaagaaggactttatcagtccattgatcactatatgggtcttgataattcatcagttgatctagatgagatgttcctggagtattacccaagtgtatttagaaggtctgttttcttaactatcttcgggatgtttgagcacgaaattgaaaaattctgcaataatttttcaagcagacaccaaaccctaataaacctttcagatcttaaaggcagcggatttgagagaagtcatcttttcatcaaaaaacttataggaatgagttcaacgactcactatccagccatcagaaaaataacaaaactaagaaatagttgcgcacacaacgatgcaaaatatatagaaaatgatgggcaggatagcaagcttattatcgaactgatgaatgttcatccggttttattcaaaaaagatggcaaacaagttctttttatgagtggcgtattgaccatggtcttagacgccttcaaatcgtatctaagtgaagttgagcaagcagtagatgagtacgagaagaggattcgaagtggcgacaaagtggcggcagcggttggcattgtcccgtaa

SEQ ID NO: 155247 - DNA, 1209 bp, Enterobacter cloacae
atgcccgtgttgctggatgctatccccgataaagcggcgaaagtgccgcgacccgatacccgccgttggctactgttcctggcatttgtcatgtcaggggggattacgttagcgctctggaactggacgacggagcgaacaggttttattttctggtttaccgcgctgggattacccttctgcacatggggactttttttctccgttcgacggttcgcatataaagcagggcaggttgggtctgagtccaggaatgtggaacgggagaaactgattgaacgtgaaacgcgccggggtcaacgctgcgcgtggatactcggtacttgcattcaacatatttccggaaataaaccagggatgcttagtaatgcggttatgcatcccacaccgacaaccgggatatccacgccacgtggaggtaccgctgccgtcagatatgcagccctcacggcctttcagaccgacttagagaacgaaattatttccaccgcgtcaacgctcgttgcccatgtacaaaaaattaccgacaccctgcctaaggatattccctgttgtgtgatgctggactgcgacgacgatatcctggaaccggtggagaaacacctcaaaaatgaactcgctgcaaaaacagggcgagttttcaggcttcttgcgggaaaaggtcttgttgcgtttgatgcctggctggataaccgatgggagcatccgggcattcttgtcgcagtgacgttttcattgccagcgcagcctaatgtaaatgacgctgatgcaattactcttgtggtgctcagcaaccgtaaggctattggttatccagatgcggtatgccttcatcgtcctgaaaagggccttgaacacacgctgggaaaaacactgcaacgggcaatattatgggctgggaaaagttctgaagcactaaatgctggttggcataccggaccaatcacatccagggggagcgcgtggaataaagcctgcgaagataacggagtaatgttcagcttgtcagaagacaatcgcagtattgatccggcactgggatatgccggtcgtgccgccccctggcttgccataattcttgcctcggctgtctgtaacgagaatggcccccaggttatcgccgcacaacccgccgctgacaaagacgacatctgggtagcggtcatcaccaaagaagaagttcgcaagggaacgcccaaaaatgtctaa

SEQ ID NO: 155248 - DNA, 711 bp, Enterobacter cloacae
atggggcaaaattttttttccaataaaaattactctgctgatctcagccgggatgaccgtttttacattgaggatggctcttcaaaagcctcaccctcaggaaaatacctgattgttaatagtgtctcaggtggaactgttgagttcggagatggaacgtcgaagtatacagaaagggcttattgtagtgttattgatatgagcaatggttgtattgtaagtgactgggatggagaagcatgcggatatacctggactgaagggaaagatgtactggccagttctgaagaagttggtgctgatatttttgatttcaatactatgcggccttcaattattaaaatgaaagacaaactttcttcgcttgatgccagaggtgcaagtaacttgctccgttgtgatgctccctccatagaaaatatagataaataccaacaattagcaagggagaataaaattaataaaaaaattgcattagatgcaatattgtcatttttgcacacccgtaaagaagaattatcaattgctgaaagggcaaatttattttccgccccgaacaataacagccaaactaaaaattacctgatcccaggtgataaaataaaaatcatacagtactcatcagataggaaatgggtgaatgtaggttacattaatcccaaaaacatacccctaatcacttggatcaagtccgatactatagccaaatga

SEQ ID NO: 155249 - DNA, 492 bp, Enterobacter cloacae
atgaagcggcatttcaatgagaaaatatatagtatttttagcgggagtgctttgctttttttgtcggcaggcgcgatggcaacaaagcagaatgtgactaatattatcacttgttcattacctggagaaggagtcaaagaagctttatttttcattgataatattacaaaagaaataaattataattttaaaagagatggaaaagtagagctaaatgttatttttaacgaagcgaataaactaaggcgcaccagagataacgaaatgggggttacttattatggattcaagcgcggtaaatatagttatgttattaatgtaattgatggttctgaaaataatgaatatacgatgtcatttgacatcctaaagaataaacgaattattcaatcaagggattgtttacctagttcattcagaagtgatgatattgtaagtgattatattgttgacattccttatgtgaataaaaatgggtactttttcccatga

SEQ ID NO: 155250 - DNA, 516 bp, Enterobacter cloacae
gtgattcacaatgttttctaccgtgactatctgtaccgtgtgattgcgaagcatgccagtgaatggtactacggcaaggacgatcaactatggaagacctatctggatacgttaaccacggatgcgccgttgtggaaaacgtatctggaagcgtttctggataaaatgacgtggatgaagtttgtgtcggagatgggcgtggcagtggggccggaagtctggcatatgcatccggtggtgcttttagatgctttgggtgaaagtgaagacggaatggctctgaaatggctcaaagtagataagggacaagttactttcgatgctgaaggtaatgatattacgggaaaccgctacttcagccgccgaattcattggcctggaaatgatctctcaggtgtgacccttggtcgagggtatgatatggggggagaagtaaagattcggtgtatagtgatatggttgcatcaggaattgattcagataaagccaacaaaatttcgatggccgcaggtttga

SEQ ID NO: 155251 - DNA, 861 bp, Enterobacter cloacae
atgagatattttaaaatattggcattgatatttgttttttccacaaaattatcacatgcaacatatttcaaattatcatcatctgatcaagttgaggatgtgaaatattttttattgcaagtgcaaaatgataataaaagtaaaaaaatagacgtggggcttgaaggtaattccaataatgctgaaataaaacaatactatactttttcttgtcaatggggaaaggcttatggagtcagattaaacatggattcatcctctaatgatgggcccttgttatttgataacatatatgtgctagatggagaattaaatatcgtttttgcaaaatcctatagtcgcatgagtaaaaaatgggttgatccagtcagcttaaatagtgcggtttgtaaacgttcaggcggtcatttaaaaaatgattcgtcaactaaaaaggactacattgtaaacttcgaagctatacagcaggggccttttgttttaaaaggcattaatgatacagtgattaaatatatcagagatgattctttaaatcttattcgtgaagatgcggatggtgaacgtgttgtcgatacaataaaaaaccttgacaacaagtcgccttcggttcgaaccgtattttttatgaatattagttcagaaatgaatgttattagtctggtctcctggggagggggtatagacgaaggtgattattataaaatatatggatatacatatgatgaaacagggcatctacgtttgaatactaccttagataaagattctaatttatcagggtgtaatacaaatgaatctccatttaaatataaaaatgcgaactccataaaagaatacttgattaaaaaatatggtgcctaa

SEQ ID NO: 155252 - DNA, 2700 bp, Enterobacter cloacae
atgactgcaaagatgcccaaaatcagctttcccgtgccctcaaacaaaaatggtcatcccttttcctctgtggaagagttgttatcgatgatcggaggggaaagctcaggattgtatctggtgggaagtcagggaatgtggcatggggggatccatattactgatgccactattccctggtgcgccctgagtactgacagtggagctgagaatgaatattgtcgcgagctctataaaggggaacaatttattcgttgtatggcggatggtgagatagttgcctggcgcgtcagtaaggactatgagagtgctgcgattgaatggcgcggtgaaaaactgttcctttcgacctcttttgtgctggtgaaacattatatccagccgggtgatacagaagagagcggactgacatttttcactctgtatatgaatctggcgccttatgctgcttataaacaacagggcagcctggcggacagaaaagtggctggcgttcagcgctattactccagtgcggaagatttgcaggcagggcgcgcagccggaaaactggggaaagacaccgtagtcacgctgagtgacactattgtgacccgcagcagcgaccagcgtcagtttaccgaagtaaccattacccgtgagacgaagaatacagcaggagaaacacttgccgcaggcacccgaatctggacggtatcagaccaggggtatctgaaagcaacagaatcggtgcctgttccgtcctggtgggcaaaatgttctccggcttacactaatgagtcagaaggtgttgtgaactgcacttcgcgtacaaactgggcgtactatctgagcagtgacgatgttctccaatataaaaatgcaggcagcctggtagccgattttccgctttcatacgagcccggtaataccgcacagcaggtcatccgtccaggtaagaatccaggcgatgcagcaagaacattcagtctggtcactctgggccgggataaggataagttgaaaaagggcgaccgggtatggttagtatcagacggcgacagtctgacgcctgttgcaccggcagcatccggtagtggacccgtttttaatgatgtgtatgcaccttcagagcctgtaccgatcaatgccggagacagtctcgggcatatgggtttttatcagctaccggaagaaaatggcaaacgctcgcgctaccaggtacatatagaatgcctgagcatggatgatatggagaaattcatcaccaatccaggaagggtgggggaagataatccggtttatctgacgtggcaagccgatgcaccgttgtttgaaaagggtgagcaggggatggttgcgggcagtcgtaaaacaaagatatcgggtattgttacgcttgcaaaagtgccgggtgccgatgctgaggggaacgcactgacaaataaccgggatgcggcttattttcagatacgtcaggaaggtggctggctatctgccaccagtgttcagaaagtgtcgcagtatgcgttaggcgagctcgggtttgtgacgctgaataaggcaccggagagttttgacctgattgatggcataaaacaaccggataacgtggtgaaggggattctggagcagttgtataaagcggcacaggatgaaacccggaccacccacgcactcaataagtacaactacaagcgcctgctggagttgattgacagtaaccaggatgggtattactcggagcaggagtaccttcaggcgattcacaatgtttcctaccgtgatcatctgtaccgggtgatagcaaagcatgccagtgaatggtactacggcaaggacgatcaactatggaagacctatctggatacgttaaccacggatgcgccgttgtggaaaacatatctggaagcgtttctggataaaatgacgtggatgaaagcagtgtcggaaaagggtgtggtgctggggccggaagtctggcatatgcatccaattgtatttttaaacgctataaagaaagggaaaacaaaaattacacgagagatgctcaggagaatttggtctgaccggagaaatgtttctgactctgtccttgatgttgttgctaaagaattttcaaataaatttgatatgtgtaatattaatactaaaaatagactatatcattttttcgctcaaatatatcaagaagtagggcctgcttttaatttgaatgagggttttaactacaggccacaagtgcttatagataaattcgcatattatcgtaatcaccctcaagatgctcaagcggatggctttattccgggaaggcaagcagcaaataaacaaagtattgcgaacagggcatatggtgggcgagaggggaatgctgatattgcaagtggagatggatggcgatatcgtggaagaggaatgaaacagttaaccttcaagaataactatagatcttttacaaattatcacgaaagagtttggggtgaaagtattgattttgaaaccaatccagattttttagttgaaactgtttatgcggcaaggtctgctttgtacttttgggttcagaataatttatacagtagagctgataatggggttggtagagcggtgtcggattcaataacgcgaattgttaatcttcatgataatcactatgtggatagacataataatttaataagatttctgcaagagggtgtttttgatgagatattttaa

SEQ ID NO: 155253 - DNA, 1680 bp, Enterobacter cloacae
atgcgtagaacagtcatcattccggtcgtcctccacgccctggtagccgttgccacgttgctgtggttgctgtggtatttcatcccgacaggcaacgtttttaaatgcctggccactctgctgatcctccttctggcaggctggactgtttttaaaaactgtcggagtgaagagcacacatctgacgttaccctcccggctgctgaactgccattactcgacacccagagccccgttgtactggtgtgtggtgacatgctggaagcgttgttccaggaaggccctctgcgtaaaacagcccagggatggtggcttcgggccggtgacgtcagccggttaactgacgttgtccgcagcatacagaaacaattccctcgacaggttggtcagctttcggtgatgtatcgctgcctgccagatgaacatcaggatgaagcggtactgcgctccacactgaaaacgctccgccagcagtgtaaacaaattaaatccctgacgggtttcacactgccggttgtggtgaatgccgaattttccgggcccgaaacgccgtggatcatcgttcgcggtgacaagccgatagtctgtccggttaatgattcgcctcaggcgtttattgactggcagcaggcggaagacaatatcctgctactgccaactgtcagccaggcattttcctttatccgtaatacgctgactgatgagatggagaaaccggaccggctaacgccgcctgtacgtgttttttccgtggccatgcgcctcggcgtggtcaatcctgaggctcagtcagtctggtccacctggctttgtgcccggacctgcttgcagttttcccgccagcccggtcagtcagttctggcaacccttttcccggatgccgttctgccacttctggcaccttttgcatcaaccgttcagggggggcagcgtacccgccgcctggtgctgctgatgtggctgtgcgcgctgaccgcactgggtatttccgcgctcaataatcgtgacctcatccgtcaggtgagtgccgatttacagcgctggaacgcgatcccgatgaatcactaccgtcctaaagcagactcgctggctgctctgaaacaggatgcactcctgcttgaacgctggcaacggcagggagagcctttacgttacagcctgggctattatccgggacaacgcctgtggctggccttgcagcaggccattgatacctggacacctccacctgcccctgaaccaaaaccggtcccgaaaatagttcgtctcgatagcatgtcgcttttcgattccggcaaatcagcgctcaaagaggggtcaaccaaaatactcgtcaacgcgctggtggggatcaaagccaaaccgggctggctgatcgtggtcagcggccacacagacaataccggtagcatacagctcaatcagaccttgtctttacaacgcgctgaagccgtccgtaactggatgcgtgataccggggacgtcccggagagttgctttgccgttcagggctacggcaacagccgaccgattgcttcaaacgatacgcctgatggccgtgcgcataaccggcgtgtcgagatcagtctggtaccgcaggctgacgcctgtcgtctgccaggctcaaaacatgcgtcacaggatgtacgtgacgtttcaactcaagaaatggagaagtaa

SEQ ID NO: 155254 - DNA, 138 bp, Enterobacter cloacae
atgcctgcctgtgtgaaaaattggcgacatttactggccttcaccatttttattatttatttaaatgggtcttattattttcatcagaaaaacaaatatcacaggggatttttgcatgtctcgccccagtactcgtga

SEQ ID NO: 155255 - DNA, 135 bp, Enterobacter cloacae
atggcaaccgaagttgccatttttagtgtttacgccctctccccgtgggagagggcgggtgagggcaccagcccgcactcatcaaaccagccggtttttcgcatccgcaatcgcctgcgcgacctgcttcggtga

SEQ ID NO: 155256 - DNA, 468 bp, Enterobacter cloacae
atgttcagactgacctgtattgaactcgataacggcgagtttgccatctatatcaacaaccattacctgtgcagtgaggatacgagcggggaacgactgcatccgggggaggtactggagaggctatcccgtctgccgggtgtgaagaaaagcactcttcggtcgacggttcctgagaacgatgactggtgctggaatgacatcgccgatagcgcgctgccggtgctttctgcctgcagggatgaaatgacggtggcggcgctcaccgcgagactgcagcagtatccgccggatgcgttgtgtatggggacgttatggctggcagacgatttcctgtcgctcgatgacagtctgtctgaagcggaaattgctgaagccatgcgtatctgcgatcacagccacgatgccggtatcggatttaactgggacactctgcagctagccattgacggggtgaaggggcgctga

SEQ ID NO: 155257 - DNA, 198 bp, Enterobacter cloacae
atgcaactgtcaccggaaacccgcagtatcctgcgccagtataaaacactcatcaacgagcgacgtcgcgaatccggactcagtcccgtcaccacagcgaaagtgctggatgagatctgcgaatctgctacccgccagtgtgccgtctatctttgcggccacttcattctccagggcggtcagggggatggacaataa

SEQ ID NO: 155258 - DNA, 642 bp, Enterobacter cloacae
atgaaagttaaagagaaaatgtgggatggtcgcggccgtccaaggaagttccagccaggggaggctgtggagtggaggctgcgtgcgcccgataatttgcttatggagctgagaatatgcgcgcgagctggtaacaggagtattaacgaggagattattgcgcggttgttattatcccttaattatcagccggggaagccggtcattaaaacggcggagggtgaaaggctcattgcactggcggtcaggtttgatgagtggcttgaaaatttactggatggcgggtcaggtaatcacggtgaggggaataaagttccgccccatcaggagcagttatgggtctggcgtaaaggtgagcgaatattactgccaggaaaaactacgggctatagcatgcgaattcctgaaaatcttgctgatgaaatcagggcgatggcaaaggtgcataaccgtagcctgaatgatgaaatgctcacccgtctgatggatactctgggctattttacggagcgcttactcgaacagaacgaggatgcgcaggcgcttaaagtgctttgtctggagtttgaggtctatcttaaaaagagaataaaagaggctgagaaaagcgaccttccctgggatgaaagttcttctcagtga

SEQ ID NO: 155259 - DNA, 582 bp, Enterobacter cloacae
atgaaaatgaaaattaaaggagagcgcgataaaaaccttgcttatggttttattggtctttcagcattaaccatacttttggctgctggaaatgtattaaccggttcactggcctggtattttgccaccacccagaaaaccatcaccaccccgttaacgtttaaccgccctttcgcatcagattctaaaagtgtcgatgccactggcctgacacagttcgccgcttcctttatttactggcggctgaatgtcagcccggaaaacatcgacattaaccagaaaatcattcttggatttgtcccttccgccgagcgggacgcactcaagaaagccctggacattgaagctgaccgaatcaaaaacgcgggcattaccacgcagttcatcacgaaagagatacgtgttacggacgatgataccgtgcagtacagcgggattctgaaatcctccaccaccaacggcgcaattatcacgccactgaaagaccaggaaaaaacctaccagctgaaactgagttacaacaatggcgtgattaacctccacagctttgaagaactcaagccggtatcccccactaactga

SEQ ID NO: 155260 - DNA, 432 bp, Enterobacter cloacae
atgaaatcattcatccgtgagaccaggcgtaaagacaaagctctgacaagaatccgggaggaccttgatgactggagcgccggccgatcaacgccggtacagcggtttttcgtaactgcatgggtattcatgattctcacaggaggcggtctcttcttgcattactggccagcatggggatggatatttctggcagcctggtccgccctgagtaacctgctgctaagaaaactcataccacgcaagaccgaatcgtgggaggccgtgtttgatgaaacgctgtcatcctacaaaccggttaatcaggcagcctgggaaagactgaaactgcaggttgagagagagggacttacgttggccgcagtcagaagctggtttcaggaagaagcaatatccgtctggccagaagagagagcaagcaggaatgcgtga

SEQ ID NO: 155261 - DNA, 468 bp, Enterobacter cloacae
atgcgtgatgaaaagcgtaataacaatctgctcaggaacatgcggatgcatattgctgaatgggaggccggacggcccaccccggcaggaagccggttcatgtttatctggtttgtctccttcaccggtatcgtagtcgtcacggtttcggcgttccgcccgtcacttttggctatgagcctcctggttgtctggttttttctgagtcagatgatatgcaggcgaattgtcccccgctacaacgaaagctgggaggaggtattcgacagggtgctttctgcttatgaacccctgaacctttccgcctgggagcacctgaagcatcaggctgaacaagaggggctgacgctcagcactgtcagcagctggtatcaggaagaatcgaggtccgtctggccagaaaagaagcctgacctgaagttcctccataaaacttctgaccgcagcgtgaaagcaggagaggagtga

SEQ ID NO: 155262 - DNA, 405 bp, Enterobacter cloacae
atgtctgcaatcaggacacgttcttcattgctcaaaatcctgtatgactaccgccacgtcgtctttttagttcttatttatgcgactgaaatgacggtatgggcggttttgaatctgaaaggactcggcgacaaggacttttccacatggcgaatctttctgatcgtcagtgtgtttatcatcatgggcagcgcgagagtttattatggttccgatgagccatggatgatgtttataggagccctggcaccttggattatctcgccagttgtgatcatcgtagctggcttcctacaaatgaatctggattttctgacgatcgactggttttatttctgcgtgttaaccagctttgccatgcaattcattgtcatctctacaagccgtctttaccgatacggataa

SEQ ID NO: 155263 - DNA, 279 bp, Enterobacter cloacae
atgatgacacgccaggtggtgacttacccggtaaatgtaaacgacttttcttccctccccactgactggttcagcagatcgagaaagttctctccgggcctggtgcccgtagtggaacctggagcgccgcaactggaggatgagacgctcgacgccctgagagtgagccatgactggcagactgatactgctggtgacggacagcgcagcggtcagatgaacgaagagaaactgcgtcgcctggagttaatccgggcagcagcggagggtcgaaaatga

SEQ ID NO: 155264 - DNA, 417 bp, Enterobacter cloacae
atgagtgaacaaaacgacaagccatatgacggtgacaccgttcgtgatggcgcaacgatggcaggatggttgacctcccgaagtgtgaagctggccgcctgggtgtttttcttgcagttgatcatgaccgcagcaggatggggttacctgaaatccacagcaccggaagtggtggtctttgacatgaaagggacggttgaccttttcattcagcaatccgcgcaactgcagctcgatgaagacaaagcccgggcaatgacggcccgcttcaactcggcgctgaccgacagcttgggtgagtggcaagcctcacataacgccatcattctggtgaaaccggcggtcatgagtccgcaacgggatatcacgaatgagatcagggctgatatagcacgacgcacccaggggggccagtga

SEQ ID NO: 155265 - DNA, 291 bp, Enterobacter cloacae
atgtcactgatactcagcacccctttgccggacacgccgcacttcatggcgtgtcgtgacgcagagtcgaatgcaatgcctactctcagcgaggaagacgtaaaacaactctgccgtctttatccagaaatcgcatcctggcaaccggcgctgatcgccggagcctggcaacagtggtgcgagaaaaaccagcttctgccgacggtgccggaaaaacgcgacgaggcgtttccgctgttcctcgtcagtcttatccgtaacagaatggaggagatgaacgcatggcgctaa

SEQ ID NO: 155266 - DNA, 546 bp, Enterobacter cloacae
atggcgctaatcagctgtttaaacggacaggaggggctgcaggggatgctcacctgtttgcgcgacaccgagggtatgaccggtcttcttgtcgtggttgcactgctcgctggctggattggtgttcagcattttgcagatgtacggcgtgaacgccgggcgtggaagagcagaccgggaatacccgttccgccggtacaatttggcagcgccagacatgctgaggcggtacacgcctttgctaaccgggagtattaccaagtgatgctcgccgagctggaactaggtctgaccgaagcggggtatgcactgacgcgtgatgaatcactgcgcgtaacgatgccgacagcagacctgctggccgtaagtcgcaggattattcgggcgcgtatgcattatgtcacaccgagagtctctgaacaggcgataaaagacagcgaggatgtggcggtgaacgatgggtatgccggcacgtggctcagtgtgcttatacgtggtagtgagcgcgctggctggtatatcaccagacccgaaaacagccattga

SEQ ID NO: 155267 - DNA, 483 bp, Enterobacter cloacae
atgctaaatacacttttcaccctcatccgtgatgcagggcggttcgccctgtactcccttgtctttggcccggcactggcgatgtatgtctttgtcatgctggctgcgtctgacggctcactttcgcggcagttcctgacgacgtttcatgacctgactgccggtgtgcctgccggcaaggtgttgagttgcgttaatgacatggcgccggtcattcggcagacaccgcaggaacctggagtaaatactcagccccagttgccggtaagcccgacggaagtattgtgtcaaaagggtcccgtggacagcgaaatatgggcgcgctcagcggatgccagtttgtggaacttctggagcataggggtgatgtttggctgcggggtatggtttgtttcccgtcgttgggcgtttgccgcccaaaagcgtatttcaccagacacacattcggttttagtgctgcaaaataaggaaaaacacgaatga

SEQ ID NO: 155268 - DNA, 417 bp, Enterobacter cloacae
atgaagctcatcagagtgaagacgcttatccgaaaccatgctatcgggatactgaaagactgtagtgaggacacggaagccagaaaatggactgatttgttaatactgaaactcttttatgccttaatttttattactgtggtcgaaagggtatacgtgaagtacgctgacacaacgctcagcgcgatggtcaatccggtcaccattgaccgccacgagcagtttacgctctcgcttctcatccactatccacagtacctgctgtggggcatcatggtcgcgatatgtgtgcttattgcggtgaatttactcgtctgtggctggctcagtctggccagatatctctttcgtaaacacaaccttgttggtatcccggcaggccaggatatgcaagctgtggaggtgccaaatgattaa

SEQ ID NO: 155269 - DNA, 315 bp, Enterobacter cloacae
atgatgcctcagagaaatgaacgtgcagattactcagctgaattctggtcacttattcatcttgaaagtgagctgatgacggcagtcgcctggctgaatgtattcggctcacttccggaaggtcagggcatgaccgttattgccggctgggccggctatgaattcaccctttatggtctggaaccccgggagtggcattctgctgcttatgctgatgtggcatcgtcagtccgtgctttggctgcgtacatcagtcaacaagactgggaggacggatgcgagcaggccagatatgagctgagcctgcttgaatag

SEQ ID NO: 155270 - DNA, 198 bp, Enterobacter cloacae
atgcttgccgttaacttcctttcccagccgggatccgtccggcaggcgaccttcgagcacggccgtcaggtcttctccacggacattgccctcaaggcccagctcttttgcgccttctcccatccacaggctctgcaggctgcccagaaaatagtagttatcggaattgctgtagtagtttgcagcctcgctggctga

SEQ ID NO: 155271 - DNA, 507 bp, Enterobacter cloacae
gtgtcttactgtcacttaactgtgagatggccagccgtacagcttcagccagatccggcaggggaatatctgtatgcaactgtggtgcccgggaaaaggtgccggctgccggcatttttccggggcgggacagtaccggctgactcaggctgtcagtctgttgtggtactggctgacgggacaggctctcccgctctgcgggttgtgcaggcacgtcaacgcgcttttctgcctgcgatgacgtctgtggagaaacctgttccgccccggtacgagccggcgtcgcctgatgaacacgctcaggctgaggcggtgtgtcacgaaggcccgcatcacgcgggaccacgctttcctggtacgctttcagatcgaatcctttctccttcatttgcctctgccagcgctccatcaggcgcatacgtgacgggtcgacttttgcacgacgcgtgtctttcgcggccacatcccggctgcgcagcgtggcttcagcccccacggcccccttaa

SEQ ID NO: 155272 - DNA, 495 bp, Enterobacter cloacae
gtgaaaatcaccgctcagaacgtgctgccggctgatgatccgctcccgcaaatcgtcggatttcgccagcgaaatggcgcgctcggcagagctggccagcacctgcacgtcacgaccgttcgcgccggaaataccggccagctgcgcggtcaggtcacgaatgcccgccacgccagaaggcgcgttcatcaggaccagggcgtctttctccacgacttccagcgccgccggtgcgtactgcgccgggcgggtgaaactgacaactttcgtggatttaaggtgctcctggctcagcgcctgaatggagagttcatccagcaggtgaatgcgggaggtgaatactcctttttcactgtccagcggcacaatcatgccgtccttcagcgctgcatcgatgcccacacggatatccttgatctccggcagccggtcactaagttcagccgtggtcagcatcagctcgccaaaggtaaaacgtgtcttactgtcacttaa

SEQ ID NO: 155273 - DNA, 393 bp, Enterobacter cloacae
gtgaaccgcgccgcgcagctgcacgtccttctggcggacgatctccttcatgatggccacatccatcgggctgcgctcctgcatcagcttaaagggtgcgcctacatcaaccgcttcaaactggtcgatatcccccatcgagaccgcgcggccgccgccgctggcaatggcctggaagagtgctgccgtgtcctggttgcccgccatcgaggactcatcgataagaaacacctgccctttataatcgggcttcccaccggctgccgtagcctggtcatgctcaacgataaaggatttgatggtctgcgcccggataccgacgtcgctcatctccttcaccgcctggtgcgtcggtgcaagccccgtcataaccgggcgaacgtccgccggtaa

SEQ ID NO: 155274 - DNA, 339 bp, Enterobacter cloacae
atgaacccgaacagaaagccgccacaaaaattcgacaacatgtgggatttaattactgaactaaacgctgcaggtcatccttatgaaaacctctggtacaaaggtgattttcgtgccggagaggaactgatcttttcacccagatattttctatcagcagcctgccgtttaatcgggcaacgcaacagtgacggtaaatggacaacgctatacggatacgacgatcctgtatcaccaggagggcctgttcctgcaggcgctcataacctggaagaaaagaaagacacactggagttgtttgtccataaaggtgatggtcccgtcctggctaacgaatga

SEQ ID NO: 155275 - DNA, 2622 bp, Enterobacter cloacae
atgtatcccgtatttgagaatggatcctgctgggtcaaggtggattttcaccttcatacccgtgcagacaaagaatttcgttatgccggggaacccgacgaatatattcgcgactacgtcagtgccctgaaagcggctcatgtgggaatgggcgtgatcaccaatcacaataaattcgatcccggcgagtttaaggccctgcgcagagccgcacgccgtgaaggcatagggctgcttcccggcgttgagttgtccgttaatgacggtcaggccggcgtgcacacgctcgtggtgtttgccgatgactggtttatcaatccgcagcagacgaaccatattgaaagtttcctgacggccacgtttgcgggcgttgataattttgagaacgaaaatgcccgttcaacagaaaatatcacacagaccatccagcgccttgaccggtacgaacgggattactttatcgtgtttgcccacgttgaggcggataacgggttatggggagggctgagccctggccggatcggggagctttttgataatgaccttgtccgccggcgcgtgacgggatttcagaaagtaatgacccatgacctgcgggtcaaaattcagggcgtgctcggtgcgcgctatcctgccgaagtccagggatgcgatgccaaaacgctggatcacatcggtgccagaaaagtcgcaagttacctgaaactgggtgattacagttttgacgctgtccgctttgcgctgcaggatttcccgcatcgcgtcggcccggagaaaccggccctgatccacagccacatccgccagatagccttcgagggagccggttcgctcggcggaaccgtggtcaaattatctccggagctgaacaccctgattgggatccgcggcagcggcaaatcctccattcttgaagggatccggtatgccctggacattccgtttggcgagaaggcctctgaccgcgactacaaagaaaatctggtcagtaatctgctcaaaagcggggggaagattaccgttgacgccgtgtgccgtcatggacgggcctatcagataacccgcatcttcggtcaggagccgcaggttatttttgacggtcaggcccggcacggggtggcgcttcgggaaacggttctgcacaagccggtgtattttggccagaaagatctgtccaataccggcgcgggatttgaacacgacctgattgaaaaactggtcggggagcgcctggccgccgtgcggaacaaaatccggcagcagaatgaagtcgtcctcgacaggttacgcgagtatcgtcgtctgaaaacaacaggagaaacactttccgaatggcaggcgaaagaaagggatgcgcagttccgcctgcgcttttatgcccagcacggtatggaagaaaaactggcgcatcagaccaccttcggacgggatgagcgctacctcagcagtaccactgcacgggcaaccctggcgctggacagtctgcaggaggggatcagagaaacactcgatgagctgaagcaggagcagaaacatgagtcagcgcataaccaggcagacattgatgattacagtgcgggatatgaacgcttcacggcccatctcgactccctgaacaccatcgtggacggcgcccgccggctcctcacagaactcgatacgaagcagcaggccttcctggagaaaaagctggcgctgacggaggaatttgccgaaatagagcgtggactggctgaagaactgcggctggcaggcgtggaaaacgccgatccggctgactttctgaagctgaaggccgggctggaacttgcggaacagaaaattgccgaactgacccgggctgaaagcagtcaggcgttactggagaaaagtctgacagaggcgctgagccaattgtatgaactgtgggtggaagaatatcaggaaattgaagccgtgctggccggcatcagccaggccggctcgcccctgaagatcgtgccgtcctttgcaaacgacaaaaaagccatgcaggccattctgaaagaggcctttaccggcagccggctgcgggaaagtacctaccagaccgtggctgacgccttcagagactttggtgaactctggctgaacagggacaaaatcccggggattatcagcggttctgcggagacgttcagcgagtatctggaacagcagattgaatcgctgatttcctggcaaatacccaatacctactccattgaattccgtggcaaacccctggaacagcattcgctgggtcagcgcgcctccgctttaatgctgtttgttctgaatcagcaggataatgatgtggtgatcatcgatcagcccgaagacgacctggacaatcagacgatttatgacgacgtgattaaaatcatccgggcaatgaaaccccgcacgcaatttatctttgccactcacaatgccaacattccggtgctgggagatgcagaaaatgtctgtgcctgtgaatattcagacgggaagatccaggcggccggtgggggcgtggatgcctcctctgtacaacagcatatcatttcagtgatggagggagggcgggaagcctttgagcggcgcagggaggtttacggttcatggctcagtaaaacctga

SEQ ID NO: 155276 - DNA, 276 bp, Enterobacter cloacae
atgagcaatcaagcacacctgacgctgatccactcgctggtcaaaaccaatgcgtttaacctgtacaccctggccagcacagagagctggcagaggccttcggtccgggggctgatcccactgaccgacgtcgagctggcccacaggctggatgtggacgaacgcaccatccgcaagtggaaatccggccagacacggatggtgtacaccacctggtgctgtctgtgctggctggccggactggggatgccgttcgatcacgttatcaatgactga

SEQ ID NO: 155277 - DNA, 501 bp, Enterobacter cloacae
atgggaaattattctgattttgagaccgaatttgttcagcgaacactggcacttatcgatcagtataacgaaatgattgaggtgcagggcaagcccttcagggagcagtacaactacacgctgaccctgaattgccttctgggtctcatcgtgctgccgaaagagagggcgctctctttcctgcccgctgaccgtttaacgcagcagcttaaaacaagcatggggttacaggagtcgcagctacccggaccggagatgactctgcgtgctcttatccttaaaatgaggaattctgtggctcatttaagcgtccaggttgtatcagtcagcgacgagcatcttgtcgatctgattgctttcagggatgatcctgaggatgagaatgcctacgccactttcagcgcccctgaacttttaccctttctgaaatattacgcagcgcagctgctcggtaatatggcccgccgtcgagcccctgctgttaacgcagtggatttgtaa

SEQ ID NO: 155278 - DNA, 936 bp, Enterobacter cloacae
atgaataatgttctggccaagaagccacaggaagacgaagaaacaacggtctatacaatcagggggatcaagaaatctcttgatgatacaatctctgacctcgcaatttactacggcaaaccgaaggccacgctgatacgcgagttcattgaaaaatacttcagcgaccatatcagcaattttgagatgaacagcccgttggtgagtaccttcgatgccgaaattgccgattacatcaaggcggagatcctcgaagaccgtttcagcaacttccacatcacccgcagcaaccacgtatttctgaaactcctcggcatcgacagcgaggaacagctgcgaaccctccttctcaacaatgcgccgtacttacggttgcgtgctgaccaggtctgtgccggatttgttaatataccccgcggcctctctctgacgtttgcgatgtttgctgagcttgcatcccgtgacagcgccaccatccgggaagcgcacgatacgatcttcaacctcttccgctctgatgagggcagcgaacgtttctaccggcacatcaacgaaatccgcgcagaaatgaaacgtccgccggtgctaccggacaccgcgatcagcgagtccggtgaaaaagtcatcgtgaccatctacagtcctcaggactacgcggctgaagcatggaaagttcacatccgcctcaaagacggtgtccgctcaccgaagtccggcttcgcgtttccggcgcttgaaaagcgtctgttcatcccggatcagccttatcgcaaggtgctgatatccgacgcagatgaatgggatatggggttcgcgttcaaggacgggatctgcgagctgcacctgtactccaatggcatcccggaagatgaaaacccggttccgctcaagaaagtggtttcagcactgatcagcagcatcgagaatcgcctgtaa

SEQ ID NO: 155279 - DNA, 330 bp, Enterobacter cloacae
atgatacttactactttttacagcaatattgacctgaaagttattatgtcttccctttcaggggcgctggtctgtatccaaacacaacagcgatttaaccgctgtcagagacccgttgctttttttgtgtcgtttgtgatgggggtcgtcggggcggataccacactggaaataattggtatatttgtacccgatgtcttcaacggtgaaagcgctgtcggagcatttttttgtagtgcgcttgttatcacagtcataactaatattatttccagagtggattccggcctgaaaaaagaaagaaaaaacatcacaaggtataaaaggtaa

SEQ ID NO: 155280 - DNA, 426 bp, Enterobacter cloacae
atgaaaaccggtgaaaaaggcctggcgctgattaagcattttgaggggctgcgcttgtgggcgtatcagtgttccgctaacgtctggaccatcggctacggccacacggccggcgtcaggcccggcgatgtgataaccccggagcaggccgatgcttttctgcgtgaggatgtggcggatgctgaacgctccgtgggtcgttttgtctgcgttccgctaacccagcatcagtttgatgctctggtttcctttgttttcaacctgggcgtcgagagtttccggacctcaacgctcctgaaaaaactcaaggccggtgattatgatagcgcagcccaagaatttgggtgttgggttcatgccggcggtaaagcgctgcccggactggtacgcagaagagaggccgaacgcgcgctctttataaagtaa

SEQ ID NO: 155281 - DNA, 888 bp, Enterobacter cloacae
atggcagggatgtatttcgacggaatgcatggtattggcgacaatatcattcagcgctgtttcattaaacagctgacgcgcagaggtcaggaaatctggctgaaaacccctgtgccggagatttaccacgatatcagcagtctgcattttgttaaggcaaattcacggttgcgtacacagcaaaaaaacgagatgcaatccaccataaaatttgaagccgctccagcaggtatacccggccagcgtattttttatggtgacaccgatcttcaacagggcagtattttcaccatcatggagcgccagtttggtatacccccggcggaccttgatttgcctgattacacattgcctgatatcgggttgccaccggatagccctcttgccgttatccgccccacaaccgagcgcacagaatggcataatgccagccgtggtccgctcaatgattacgttgacagcgtcgccagaatactggcaggcaggggctggcacgttgtcagcattgcggatactgaacccggtcaggaatggatacgagatacagagcctttcgctcatcagaaactgcatcacggcgagctgtctctgactcagatgctggctctcatccagcatgcaaacattgtcgtcaccggcgtcggggttgtgatgctggctgcgctggcataccggcgacctgttgtatgtctgcagggagggtgtgggggaagtaaccaccacgctaaagtgaccgaccgcagctgcatggacttatccgggacgaaattcatttatccggacaattactgccgttgccagcttatgaaacacaactgcgataaatatatcagcagattacctgacagggttataccgttcattgaacgtattacggcctcactgtaa

SEQ ID NO: 155282 - DNA, 645 bp, Enterobacter cloacae
gtggaatactttaataacgaactgaattccgggttaatctggcttcctgagctgggaatggggcgatatccggttcccccggagagaccctatgatgagcgctactttatgcgatatcaggttatgggcgatacaactatggggagccggcttaccgatgcgcgcattaatttagtcacgcggcattatcaggggaccttactggatgttggcattggtgcgggtcagtttgtggcgtcccggcctgaaactgttggttttgatgtcaacccggcggcagttgactggctcatgactcgggagttatgggctgaactgtatacggctcactatccggccctttctttctgggattcactggagcatatcgaccaccccgatctcgctgtgcttcacgcagaaaagtgggtgtttgtttcggtacccatatttgataatgcggagcacgtcctgtattcccgccattaccgtcgggatgaacatatctggtattggactcacgatgggctggttcgctggtttgacaggcagggattcgactgtacagaatttaatacaacagaaagtgagctcggccgggaaggtataggcagctatgctttctgccgccggagtaatcaggttgttaacatcagacggggataa

SEQ ID NO: 155283 - DNA, 558 bp, Enterobacter cloacae
atgtcagccagggccattgcaatatgcgcatcaggaccgtctctgtgcagggaggatgttcatcacctgcgcgataataaaatacccgtcatcacagtgaattccagctggatgatatatcccggctgtcagtatattttttccggtgatgatgcatggtggaatgttaattatcaccgaatttattctcatgccgaaaaatggacctgtagtgaaacagctgccagggcatatgatataaattattttagcagaagaactgaaggtacgtttaactcgggagcagtggcgattcttttcgccatgagtctgggcgctgaagatattatccttcttggctatgactgttctctggaaaaaggtattcactggcatggcgtgcataccggaatgaacaatccgacaggccaaagcatccagcgctggaaaacggagtttgaactgctggcgtctgaaatgtgccgcagagttaatattgttaattgcagtcgcggaagccggttgaactgttttccggttgtttcactggaaagcacgatgcgaagagtgaataaataa

SEQ ID NO: 155284 - DNA, 1065 bp, Enterobacter cloacae
atggccaatacaatcacactcagttccgacgtccccgttgtcgcgccgggtaagacgctgaacctgaccgcgaaagtctttgacagtgaatcaggcaatgggactagcggtatgaatgttaagtggaccatcgcacccgccaccacttcggcgacgctcggaaaacagtctgttacaacgtctgcggcgggctacgctgcgaatacggttgcctgtgacgtcaaggccgcagtcaccgtcacagccacactggatgatgacagtggtacttcagccacacttgacgtcggtttttattcatccgaactggttgctcccgttgtgccgcaggctaaaaatggcatcctgacggaaaaagaggtcaatggtacggtacaggcgatggtggtgcgccacactgacgacccggcggtaggggacctgtatgatttttactggggcaggaatgctatttcccggttcgatgacggtaccaatgagacattcccctgggtaattaacattaaaaacgattttacggcaacagaggttctggccgatggtgattatacggtgtattacaccgtaaccgacctggcgcagaacgtttcctattcgtttcctttggctattaccgtcaccgggggaacatatgttaacccgctttatgatgcgccagcgttccctgatattaagaataatacgataaactacgacgatgtattgagcggtggagtacaggtcaaagtccctcttccccaaagccgggagtcagaaggggccagtatttttgccggtaatacaattaccctttatatgagggtgttcgacaaaaattacaagacagaaattattgcaaccaaagctgtcgccacttatacagtgactcaaacggacatcgataacaacaccattctcgttacgctgccgaaagacgttattacggacggtcaagagaccttcgatgatgttcgtggccagttctggtacaccgtgacagggacgggttccgtctccgtagccggctcatcttttaccaaatcactgattattgatacggttccccctcatctgtctcaggattaa

SEQ ID NO: 155285 - DNA, 1329 bp, Enterobacter cloacae
atggccagtacagtaaacccgcttcctgcgccggatttaccgcaaatgacgccggattattccataagtcttaatgacctgaacgtggcgggtggtgttttcgtactaattcaggagtatgaggatgcagcccgcggggattacatttccgtattatgggacaatgaacccgtaaaagaagttatcgtggatgatttatactctgattttcccgttgttgtggtaataacaggaaatatggatgtcggggctcattacattaattataccgccacggatatcgccggtaacaccggagcgtctacagggcttaatgtcaatattattgacggtgagccggagataaagtatccggcacccgttttcactgacgctgtgagtggcgtaataaaccagagcagcattacagctagtggcggcactcatgttcaggtggccccctataccggcattgcagcaaatgactctgttactcttttctggaagggaaacagcgtatcaggagatatcacagatggcggtgtggagagtcatgtgatactggctgcggatatcagtacgggagcaacgtttttaattccggagaataaactcgaatctcttgaggacaaaggtatcgtgacagcgagttaccaggtcagaagaaacagggtcgtacttggcgtatcagaattcagtcaggcgactctggatttgaacggcggcagcagtgacatcagcatggtaatttcaacgggggcggcaaatacagattatgatgccattcatctttacccgtttaaccagggtgtggttaaaggcccggcaggggcaacagtcattttatcggtagtaggtgatgctgtttttgatgagtcgggctcggggacttatcagcccgtgcttaatgaatcaggccagagcagctttaaacttcgctcagcggtgcagggtaacgcagacgtcagcgctgaagcagcgagcaatcccggcgtcaccgtccagcagctcgtccgatttggcgcttatacgaagggaaatggtaatattcagtaccttaactactccacaggagcactggccaacggattaacgccctgctcagtgtacctgaaaacggctcagtcatccggcctccgcgccgaaataactcaggtccgggtcaccgtcagcggctctgcattgattgatgggtattcaggccagtcagcggacatcctgctgaactcggacaagtctgctgaaatcgacatcataaacagcgtagcggaaaccgttagtgttgaactttctctgcccgaatcatcaggctccattaaccggctttcattagtatttaagtcattctga

SEQ ID NO: 155286 - DNA, 984 bp, Enterobacter cloacae
atgaccacaggtactgctgccgtttcgtattccctcttgctttccgcaaccagcggcgcggtcgccgatggctctgccaccaataccgtcacggccacgctgatgtcgggcagtacttatgccagcggcaaatcagtcattcttaccattacggtcggcagtgccattttcccggagtccggaacggacacgctggcggtaacaaccaatacgctcggtcaggccagtgtagatctcactgataccgaagaggagactgtctggattaaagcaatcctgcttgaggacaccagcatcactgttcagacctcatcggtattcggcagtcgtggaagcactcttcccgccccgtccgttactgaggcgacggacggggtgctgccgtattctctgacgcagactcacgtcattgtccccacctccacgctgacagccggggatacgattcagctcttgtggaaaggcacgctgtctgacggaacgacgatagctgattacacgccgaacgatacagtcacctccgttacgcaggacctggtattcctcatctcctcatcccatatcgtgccgctgtccggtggcagcgtggacgtgtcttataccgatatcacaaccggtgatggttctgatgtccttcacctgggcgtgagcgaaagtgacggcaactggctggctgcccctgtggttgaggaagcatccgaaagctcactcagcagtagcgtggcgcaggccacggtgaatattgcgccttatagcggcatggcggctggtgacatcgtgtccctttactggaacggcaacaccacaggggaatacaccctcacgcagactgtctccggcaacacagcagggaagaccatgacgttttccgtgccggcctctcagataaaaggcaacgccgcggtgggcgttaactatacggtcacccctttttccggcgcggacctgcaggtttcttggcctttagggctgaacgttatctaa

SEQ ID NO: 155287 - DNA, 2883 bp, Enterobacter cloacae
atgaacgcacagaaacacaatacggccatcacaactgccattctggaggccccctccgtcagggaggcagacgcgaaccagcatgtgccctcaacgctggctgctgtcaccgttgttattccttactggaatacgatggctgtcggggacaggattgacctgctgtgggacggcgacgtcacagggacgtacacggattacgtgccggtgacgacagccatggtcagagacaaaatcagtccgacgttcagcgtgtcggcgtccgagatagtcaccaatcacgaagctgctatcagctatgtggtaacccctgcagccgggggtgacaaagaaagctcggtggtgtacacgctttccatcggagaggcgcagtttctcccggctccgtccgtgcctgaagccagtggtacgagcatcagcgtggaggataacccggacggtgttacggtggttgtaccagccgatgcaggcctggaggtcggagacgtggtcaccgtgtactggacgggcacgatcggggctggcacgaccagcataacggagacggtctccgggaccggggctggtgaggcactaatgtttcatatcagtgtggacgtgctgacggccgatgcggggaccggggtacggatttattatgtggtggaaaaagcatcgggcagcatcgggacgtctgctgaggtcagttatgaaattagtggcgcaggccccgccccatccctgccagcgccctatgtggcagaagccgataacgacaagatgaccatcaccccgtccagcgtaatgtcgggggcctcagtggttattcccgcaactgctaaacttgcacccggtgatagcgtgaccgtgagcctgcaggataaaaataacatcacaaccagttccactcatacggtgagggaagctgaagcaggtaaaacactaacgctggtactggatgtagcgctggataatgaggaaaacggtgacctggtgtctgtctggtacaccgtgacgctctcaggcaccgatactccggataaatcggatataaccacctatacagtgaatggtgtggtcgataaaggtaagcttaaggtcatgggcgcaagggcaatgcatgattacgcatccaaggcaaatatacagacgctggtagccctgaatgctgacacactggagcttatgaacgctacctggcagtatgatggcgatactgagagtacaactactcgctatttcagagatacaaccccagaacgtctcctgcacgttcgttcaggagagtatgaagtaacactgaacattcccaatgtgactttaggcaaagctgtaatagtagcccgccttgactcgggagcggtggttgcatggggggacgaagattctggcggcagtgtgccatctgacattgccggcctgaccgatatcgtgtcggtgatgggaggaggcaatgccgctgcggccctgcggagcaacggcagcgttgttgcatggggggacgaagattttggcggcagtgtgccatctgacattgccggcctgaccgatatcgtgtcggtgtcagcaacgctgacggcttttgcagccctgcggagcaatggcagcgtggttgcatgggggtacacagaagacggcagcgatgtgccatctgacattgccggcctgaccgatatcgtgtcggtgtcagcaacgctgacggcttttgcagccctgcggagcaatggcagcgtggttgcatgggggtacacagaagacggcagcgatgtgccatctgacattgccggcctgaccgatatcgtgtcggtgtcagcaacgctggcggcttttgcagccctgcggagcaatggcagcgtggttgcatgggggaacgtggctaatggcggcagtgtgccatctggcattgctgccctgaccgatatcgtgtcggtggcgggggggggtagtggctttgcggccctgcggagcaacggcagcgtggttgaatgggggtacgtagctagtttgccatctgacattgccggcctgaccgatatcgtgtcggtggcggggggagatgatagctttgcggccctgcggagcaatggcagcgtggttgcatgggggagcgtggctaatggcggcagtgtgccatctgacattgccggcctgaccgatatcgtgtcggtgtcagcaacgctggcggcttttgcagccctgcggagcaatggcagcgtggttgcatgggggaacgtggctaatggcggcagtgtgccatctggcattgctgccctgaccgatatcgtgtcggtggcgggggggggtagtggctttgcggccctgcggagcaacggcagcgtggttgaatgggggtacgtagctagtttgccatctgacattgccggcctgaccgatatcgtgtcggtggcggggggagatgatagctttgcggccctgcggagcaatggcagcgtggttgcatgggggagcgtggctaatggcggcagtgtgccatctgacattgccggcctgaccgatatcgtgtcggtgtcagcaacgctggcggcttttgcagccctgcggagcaatggcagcgtggttgcatgggggaacgtggctaatggcggcagtgtgccatctggcattgctgccctgaccgatatcgtgtcggtggcgggagcgggaggggcggggcgtagctttgcggccctgcggagcaacggcagtgtggttacatggccgaatagtagtaccgatacgttgttgcctgacgtttctggtcttccgtactaccgtgctgtatatgcggcatacgggacatttgcagggctgacggacgattcacaactggctatctggggcaaatatagtgggagcgctgaaggtatttcttatgaatatcaggctgtgagagcgaacccgtaa

SEQ ID NO: 155288 - DNA, 495 bp, Enterobacter cloacae
atgcagtcactctacgactggatacaggagcagatgaaggtgctgtcgcggcactcggatacggcgaaaaccttcgcctacctgcttaaacagtgggatgcgctgaacctgtactgcagcaacggctgggccgagatagacaataacatcgcggagaacgcgcggcgcggcgttgccctgggccggaagaactggctgttcgctggttcagacgcgggcggagagtgtgctgccgtactgtactcgctgatcggcacctgccagcttaacggcgtggagcctgaggcgtggttacgctatgttcttggtcatatccatgaaaaggttattgattgccaactcatttctccgcagtcctggggggatgcgttcatcttgttcactacacttagatatccgtctgtaacaggtgggcgtctaagtcaccagcactggcttaatggctacatacggcgctgggtttacgcttcccctgatattgcttcttccatttaa

SEQ ID NO: 155289 - DNA, 3408 bp, Enterobacter cloacae
gtgtatttttttaacgaaatgactgataaattaatttttttaaaatgcaaaatattgtctaatcttctgcttcagacaattctcatcgctataccttttatagcctcacaggtcgctgtggctgaacccggttcgcccttcactatggatcaccttaccagtgagccgcctccggagcagagtgatacccttttgtattcggacgtcttaagccagagtgcccggatgctcacctccgggcacgtcgcggattcagcccactcccttgcagtgggggaagcttctgctgggttacaacagtggttgaacggttttggaacggcgcgcattcaactaaatatggatcggcacggcaactggagccacagcagcggcgatctgctggtaccgctatatgataacggccagtccctgctgtttatgcaaagcggcgtccgtaaaccctcggatcgcctcataactaatcttggctatggtgtccgcaccttcaggcagaacggctggatgttcgggggcaacgtcttctttgacaacgactttaccggacataaccgccgggtgggtattggcggcgaagcctggtggaactacctcaggctttcagctaatacctacctcgggatcacagactggcacacctcacgagactttgacggcacctggcaggaaaagcccgctgatggatacgacatccgggccgaagggtggttgccgtcttacccgactctgggcggaaaactggagtgggaacagtattacggcagtcaggtggctctttttgataaagaccatttacagcacaacccgcacgctgtcagtgcaggcgttgaatacaccccgtttcctctaataaccctgagcgcggagcaacgccaggggaggggcatccatgacacgcagattgctctggatatgagttggggctttggtcacgactggcgctggcagcttgacccggcaaacgtgctgagcatgcgcaccctgtcgggcagccgttacgacctggtaaaccgcaacaacgaaattgtgtttcagtatcgtaaaaatccggagctgaatgtggcacacctgcgactgacccggatcaccgataacagcccggcggacggtgtcacccggaacgtactgcaggtgctggcgactaaccgtaccgggcagcctgtacgcaaagcatcagtcaactggctcacccccgtgaatgacggtagcgttaacctgacagcggcttccgaaacggatgataatggactggctacggtgatactggtcagtacgaagatgcagacggtatcgctgacagcacaaagtggcaccgccagcgccacagagaatagccacttcaccgccgtagcagtcagtaaaatcaggctggccgttactcaggacaatgctcaggcagatggcagcagcacagatacggtagtggctacactgacggacagtaatggcaggccggtagccggacaaacggtcaactggacagtgcctgacggcatctcgatgaaagagaccgcatccacatccgacagcagcggaaaagctacagtacacctgatggccacgaaagcgggcggtgcgtccatcagcgccaaggcaggtagtcaaactgatagctgcacagtaaacttcaacgggaatagtgctaccgcgaaagtcagttttctgctcgtcaccactgacgggagcccggcagacgggaagacggggaatgtggcgcaggtcacggtgacggacgcgaacggtaacccgctgtccggccagaccatcacctggaaggcggataaatccacggtcacctttggtcagtcagccgcaacagaccagagaggcatgacgaccgtaacctataccgacaccacggccgagtccctgaccctgaccgccagtctggctaacggcagcagcgccacagcgtcaagtcagtttgtgtctgacagcaagagcgccagcctgaaagacctgctcgtcaccactgacgggagcccggcagacgggaagacggggaatgtggcgcaggtcacggtgacggacgcgaacggtaacccgctgtccggccagaccatcacctggaaggcggataaatccacggtcacctttggtcagtcagccgcaacagaccagagaggcatgacgaccgtaacctataccgacaccacggccgagtccctgaccctgaccgccagtctggctaacggcagcagcgccacagcgtcaagtcagtttacgactgatctggatagcgctgtgatgactgtgacatccaccaccgacgcgctggccgacggtagcgccacagatacggcgacagtaacactgaaggataacagaggtaacgcactgccagggcaggccgttatcctcagcgttagcggtaacgcaaaactgtctgcgacatctggcatgaccgacaacagcggtcagattcaggtgacactaacggataccacggcggagacagtcactatcactgcagtactgagtaacggtaaaacggcaacggcgcaaggggcattcatcatctataccgtcacctctctgacgacaagctctccaagcgcgaaggcaaatggcagtgcagatgtaacactcacggctacagttagcgacaacaagggcaagatagtatccaacattccggttgctttcagcgtaactggtagtgccgtcctttccgcaactatggttaatactaacaacagcgggcaggcgcaggttatcctgacagatatcatcggcgaaaaggtcacagtaacagcgaaagcgaaagaaaacagcagtgatgcaggtaagacgaaggatgtgacgtttgttgcgccaactattacgggcgtcggggcttatggcaccacccatatcttcaccaccggtcagggattcccgcagaccggctacgccggtgcgaagatgtatttcctcattgatggttcagatggaaataacagcagctacacgtggagcagtaaccggtcctgggtcaccgccgacagcgacggttccgccgtcatgaatgactcgccgtcgttatcggaccgtcaggtcaccattactgccacacccaaaacaggaggggcggcgctgacctacacgttcacgctacagaagtggtacaaaaggtccgccacccgcgcctcagtcacaatcggtggagagaatgaggccagcggtgcctgtaacaacgtagggactattgagtcagcatcggacatgtcagacggggcggtgtcagttgtgggcaaactgtttggtgaatggcgagacagcacaacgctgatggccagcttcttctgggatgccgaaacgaccacgacgtggcgggcggatgagaatattgcttttatctaccgaaccggagtaccggcttcatcatctttgcccggtccaacctacgtgatgtgccgaattaactga

SEQ ID NO: 155290 - DNA, 636 bp, Enterobacter cloacae
atgacttatcgtcagcctctgaagaattatgatcgatgtatcattgttttaacagatgatcattacttatactcaggaatagaactatcagtaactaattttaaatgctatcacgtaacattatcaggcaaggatagtattatatccttgcgaggaaaaccactgatactggttgatagcaggattgttttcagtcgactctggtcacggtttgatgaaataattgtaaatcacccgcattcggatattctattgttgccgcatcgctatgggaataatttcattaatgacgaaattattttcccccaactaaaaaatgcatcacacagtgagtcattcaggatggcgatttactctttccttaaaaagccccccccctcccgggttatgaagcaattcacgcatactcagaaaaaactttcaccatatttttcatcaggtaaatccgttgccgttatttcaaatattttcaagtggccaagagcaagatcttatacgcacagaataaatctatcgaaaaggttgggcttaaaacatgcaagttatttatcttttcacttaagtaatctgtcgccctattttatttatttgagcgcgggacgctgctgtacagcttcatcggagcggctttgttga

SEQ ID NO: 155291 - DNA, 330 bp, Enterobacter cloacae
atgagtgattcacatccaattttaaaaacaactataaaaaagcctcgctttttttcgatggttcttgatggtttaaacaaagataacatcattgaaacattacagttttatgggtttactgaatgcgcgaaaatggtaagatttttatctatcgtggttgatggtgatgttatagacacagcttcatttaaatatttgcttgctaaccttaacgagtgtattgaaaagcacgccagaggttatactgaggataaatcgttgcgatattttgatggtctcgtaaaactccgtaatgaaattgaatatgtcacttcgatttgtgataaataa

SEQ ID NO: 155292 - DNA, 837 bp, Enterobacter cloacae
atgtcaatttcccggaaaaattattttggtgtcccattcaacatgacaaaattcatccttgagggtaaggttatatatgatacagcgactcattcactgtatcatctgaaacagcgaaggtcacaagttaccttagccacacctgccagtttgtgtttacttgccttgttgcaaaacaaggatgaaacggtttcacttgagtcattactttcttttgcctggacatctcggggtataaacgtttctaataatactatatatcagaacatttcaattctcagaaaagcattagttaatgctggtttgtcggcagatataatcaagactgttcctaagcgtggttttgttgttatgtctgatagtttttcagcgtttacacttccacctctaaccgaaaataaaaaagcaaataatataatcgcttcccagcctatcacttcggataaaaaatacctttatacaacaaggtctcttcaacaaatatcagcctgggcaccgtttgttataatttcattattaggttgctttctggccttttttgggggttattttttaacaacatataatcaagcatacgattcaaaatatatctaccctgaattccaggaaattcaaagtggcaacgattgtcatttatacagaaataaatcaacgagagataattctttttttgaggattttattgcatcacatgaggttaaatgcagcaccagaaggtgggtatactttattaattatccaccggcgtcaccaacttttgttttaagttgtgattttgacatactatccccacaaaaaaaagatggcattctttgcagttctgattactatttttaa

SEQ ID NO: 155293 - DNA, 477 bp, Enterobacter cloacae
atgattaaaaaaggtaaggctttagtttgcatgttacttatgactgcggcattttttatgggttatctgtatgctgtaagtaaaaaaccaaacgatggttttttttgcacatcagaggtgaatttccacacgaataaaaaacagttaagcgctgccattaattttcacatgcaggatggtctaggctttttgacactgagtggtgattattttgaaaatgctattaaactttcagcgatcagcctgaaaaaacaattcaactacactgaacgtaatggtgaatacttactaacgcaaaatgataatggagtactggaggtatctgaagctgataaaaatattttaaaggaatttcttcctgatttctatcttaccaggaacgtaaaatctcaccacgtcagaataaaaaaactcagaagcgaattatggatatttacaacagctccggtcccttattttgtgtgtgcagactactga

SEQ ID NO: 155294 - DNA, 1020 bp, Enterobacter cloacae
atgatcctgatacccgacgatgaaccggaacggagtctgcctgcaggcgtcattacgccggatgaggattttctgccggcacaggccggcaggcatgcgccggtgagtccggcccgggcctatctgctgtccctgaattccgtccgcagccggcagaccatggcctcgttcctgaacatcgtcgccggcatgctgggtgcagctactctcgatacctgcagctggggcagcctgcgacgccatcacgtgatggccgtgaccgaactgctgcgcgacactggccgggccacggcaaccgttaacacctatctttcggcgctcaagggcgtggcgaaggaagcctggatgctgaagctgatggacgtcgagagtttccagcacatccgggcggtacgcaacctgcgcggcagccgtctcccgcgtggccgggccctgcggccagaggagatccgtgctctgtttgtaacctgtgaagccgacagaagcagccagggcccccgcgatgcagcgatgctggcggtcattctcggctgcggcctgcgccgctcagaggcggtggggctggatttgagtgacgttgtcacgcatgagcgagcgctacgggtgctgggcaagggcaacaaggagaggctggcctatatgccgaccggcacctggcagcgcctgcagatgtggattgaccaggtgcggggtgaacatgacggtccgctgtttacccgtatccgtcgtttcgataccctgacgaatgacaggctgaccgaccaggcggtataccatatcctgcaggtacgccagcgtcaggccgggattgcgaaatgtgcaccacatgatttgagacgaacgtttgccacggccatgctggataacggcgaggatttaattactgtcagggatgcgatgggccacgccagcgtcaccaccacccaacagtatgatcgccgcggggaaaaccgtcttcgtcaggcgcgtgatcggctttcaatcgtgagaataaagcatggtggtgattttactggataa

SEQ ID NO: 155295 - DNA, 177 bp, Enterobacter cloacae
atgcccctcgggtcgtcagtgaggcaacccctttattgtattacacaatacaatatgttgatcgaacgcaatggtttttttagtgttacatttaaccaactgaaatatagacaaatttgcaccaagaataaaagtgtaaaattgcatgcttgtattaacatcatgttaagttgttaa

SEQ ID NO: 155296 - DNA, 1131 bp, Enterobacter cloacae
atgataaccattgaaaaaacaaagtatccaatgacggatgaacaagtgcgccgcaaactgttctggttgttacagcgactgagcagctataccctttggcagcgcaaacgggatgcctgggcctattttgtgcagaaatatgaagaagcgttaaagacctggccggaagaaaaaacatatggttttcatccaaagaatattatctgggcctatgatgcgctacgtctctatgacgaaggacttgcagaattggctgtgggtaatcggcaagtatggcagttaaaaactggtgaatttgagcagcttgagcgagcggttggattgatcgacagctttttttaccctctctgtcatgaacgaggctctcagcaggaaccttacccaccagatatagaaaagctcaataagctgaagattgcagcaaaaatacatggtgactatctaatgtatccaccacatgacaatgtatgcaactttttcgatgctgcatatttattagaattagataattatgaatataattttaataagttagcgtatccgactttcccgaaaaacttgtctcctgttccggaacgcagtgatattattattaaaaccgatgacatggtgccctgcgacggcatctgggaaccggtaaagattcattacaaccataagctattgattattaaagacggcatcagcggatttaataatctcgggccgtataattattttattcgtggaatgaatgctccccgccaggtgtattacgacgtattaattgaaagtgatacagaaatggttatccctgacgacccaatccgttaccgggacgttcactggcgtctggtctgggaagatacccgctactgtgacggaattatccctgatgaatcagaatactttctggatgatgcgccaggcaaacgcattacctgcccgagcggggagctttgtccgcattcaggcctctgggcgaccatagccggaggacatcagcagtttgttgatgttcaggccgggcagttgatgccagaagcaaccaaatatcagagcaatatatatgcggctgaaattcatcttcctgcgttatggagccttttacaccgggatgatgaggggagtgtttatataaaggatagttga

SEQ ID NO: 155297 - DNA, 1752 bp, Enterobacter cloacae
atggatgcgacggtcagcgtgcgtaacgacgcggtcaccgccggggagcattaccgctacgcagcgccttatcgtgacgcaggtgatgacaccagcccggagccggagaccgaatccggcgcgttctgggcccggctccatcatgagcgggtgctgaacagaacgacccgcattcacctgttcagcaacgctgcccaccttgcgccgggacaggtgcttgagctgcactggtttaaggaaaccagcctggaaactggacagtggatctggggtacgcttcaggggacatttaatgaaaaacagaccatcgggcagatcatcgttgatgcggtgatcggcatgatcccgctggtcggtgatgtaacggcagtacgcgatctgattgctgtttcgataggactggcgaaagaaccgaagaaacgggaaagcgtgactgaatgggtatttctggtgatcctgctgtttgcgctaatcccggtaattggtggcgtgataaaaggcgtcggacgtctggccctgcgtgtgacaacaaaagcggcagagaatgtggaaacccttggcgctgtgattaagtttctgaaccgtatcggcgaaggtgatgcggtgaagtggctgaataagcagaatgtcgttgagtatcaggcagagttgattgaaaagatgagtgatttttgcaacacgatgatcacagccatcaatcaaatcctgaaagcccgcgtcgggcggatgttgccggagaaatggcaggcggacttactccgggtacgtgatggttttacggcactgcaacagctggcatcgagaatgatcccgcaggcgctgaaagagctggatgcgaaactgcgagtgttacaggcgctggtgtataaaggtgaaatacatacgatagcaacgggaacaggacgcgctgaggtccggcgtgaggctgaggcgtatttgattgaacgtccgctgcgggaagcgctgaagcaagggacgcggtatccgagtgttcatgcggaggaattatataaaacgacattgcgtcgaaaatactctaaagccgggtatccagatttgataagaagtaaagggaaaagtcctgcttttggtaataagccagtatttacatccatcgcctcatttagtggtgacatcacggctaaaagcgcccgtgatatggcgggaagcactatttttcgtgcctttggtaatcccacagatttggctcctaatggttcgtgggctgctggtggattctgggggtatcaaaaagtgccgggcagtgctgaagaatggcgccagttatcgggggtactggatgagtggaacggcaacggttttctggtggtgctgcatctgccggaagacctggcaactcgtatgccgggtagcaacgcctggcatgggaaaatagctgaacagttcggtagtgcaattccagctcaatatctgaaaggtggtggcgaacaggtgattattaatctggatgagatgcttaaacaagaggttaaccgtattggggaacaggtcaaagctatcggacaggctgccagtgttgaaattaatggcgtaaaggctgagttttatcccacaaattggcaggatgttaacggcgtgcatggctacagtaaaccagaagggatagagcctccatatgccacgaccacgcgtgaattgcatgatgatgaactgcgcagcaaagtgacagatcggacgatactgaatgcagcccgttttgaacggcagacaaccacagggagtgaacaatga

SEQ ID NO: 155298 - DNA, 147 bp, Enterobacter cloacae
atggtgcgggtctatcagctgagagatcgtaaagcggttgatgccgccaattaccagacgctgctgcgcaattccgatacggtacttaaggacgacgtgctggcatcaaaagagttgctggtgatgcccaaagtagtgtttctctga

SEQ ID NO: 155299 - DNA, 744 bp, Enterobacter cloacae
atggaattcagtgacgatcaggttgatgtgctaaaaaaaatatctattgaaaattatattaacgaggtcattgagcattgcggagtcattttcccgagattaattcccctgtacagcaaggtggagttttattcatatattcaacagggcatcactcttgcgaaaaaagctggttacactcaacgaggacccgttcgtctctatattgatgcgatgattatatttggctctggtttcgagagagaaccactttttcattcattgggaattaacgaaaaaaaagaactctcacaaatagaaaggagcgtgaatctttatgcattattgaatgattatattgagaaggtttatggtgaaaatggatgcttttttaagaaaagctttgaggtgtttaaaaaatttagtgctaaagactttcccatggaaataagctccagtaatgcacagcttcacgaattattaatgggtatatatccgcagcggtatgattttgcaggttataatgctgttgatgatttaattgctgctttggatgtggcttgtgaaagatataaaattaagtggcttaaccatcggttatatttagctctcattatgtttttatttggttgctcatttgaacaggatgtttttcgtgggcatcttattacagcaccattaatgaaatattttaataacgagaatatcagcggccacaatattattgtgtcgtcttacgcctcttttcaggttaaccatggttag

SEQ ID NO: 155300 - DNA, 624 bp, Enterobacter cloacae
gtgatcaagtttaaatggtattggatttttttaactttaacattaattgttatcttatcaattactagggtgttatatatgcatgagcagcaatatcagatgtctgttctcgttactccagataatgagaatgatccagagtggccgagtaaacgtaagtggtttgacgcaagtaaatggctgaggataccccaatatgtcaaaattgaccaaatatacctcttgaatatcaaataccttccaattgaagatataaatgattttgatattacgttaaccctgcaagatgccattcgagatgaaatcaacaggcttcctgaattgtcagctttaagtaaaatggatgatgatgatttttttaatctaatgaaaaataatatttcttatgaatatctgaggactaaatttgatgtcaacacccttgaacctactgatgattattttttgttttatttcacttataaagggaaagagtatgaagtagagttattgcggaaaattatcaataataacttcttgttcatgccttatggctatcatgcagatagaaaaggttactggcattcgacatctccggctcaatattcttacagagattacatcaaaggtaaagctatcaaataa

SEQ ID NO: 155301 - DNA, 1323 bp, Enterobacter cloacae
atggctgaaaatgcatctttggaccccacaaccatgccgaattgcaccggtgaggcaggtgaacctgctaccaaatgtaaccaggaatttagccaccggataaaacttgtccctgttgatgaggcgttgatgtccctgagggatattccttggtctgctcattttgaggaagataaatacaacggacagggtgtgacggatgcagaaggtaaaacagaacgtatcaaaacaccacaacctaaaaagttttttgcgcttattggcaaattagctgagggataccggaaacgtggggggaattttggttcattaaaggaggtagaagagaggaaaatatccctggtaacggcgccaaaatatcctgaaaaagaggtgccctattgtagtggatatgactatatcactgtggtcggagccaggacagcaccaagggactggcgctggcagggcggatttggcttaacagaagagagcaaaggcaatcagtatcggtttattaattgtggactgcggcaattgcgggactttccgcagtccagcaaggggagttattctgtgcagcgtattatggtcgtgtttaagcaggggtatagtgagtatgatattagcaaaataaatgagtatgctgaaaaacaaagctcccggatcatttatgtaagaaataaagatgaatttgtttcatttctcaggcgacgtaaagcgaaaaaaagactcattaaaaaaatggtgtttttctgtcacggtatcattaatatcgcttcttttcattattccggggataatgaaaatgcgggtgaattttccataggcgatattaacgatgtttatgagtctgtttttgactatgatgcagaaataataacctacgcctgtcgtgccgggatctcagttgatggtaatgatttgaccgggaaagatgctggacaaaagcaaagtccggcacagaagatggctgatacgtgggatgtgaaggtaaacgcttttgagatgcgttccagctatgtcggggtttatgggactggtaaagaaataaaagaggttagtgattatgaaaaaaaaattgaaaaatacaaaagagaaatgagtgaatataaaaataagaaagctaatggtgaaaaaaacctaaaaataccagtgaagccagaatattatgacgaaatgctcaggcgaagaaaagatattgatgagcgagacgctaaccaaagtaagtctggtggtccgattgctcccaatggttcctggcgatacccaacaagtggtgatactcctgtagggttgaaaaaaggtttacttttatatagaccaaaggagtgggagaagtga

SEQ ID NO: 155302 - DNA, 555 bp, Enterobacter cloacae
atgacagagcagcattacgcattacgggaatttgcactgctcagagaaaaatcagaatctctaaatttatataccctggtggatggtattcagtttgatcgtttctttgaagagtcgcttaaggaagataaaggcattcgctctcttttcagtttaccggaagataggattctcgcttttgctgggccatggttgctggatgtgtcaaaactaccaagggagtatttagtgaaaatcagcctgctggaagaaaaataccctgcggtatcatggattataagtgagcaaccttttgcaacactagcccggcatctggagtctgttctgatgatttcactgccttcgcaagaaaaaggattatttcgttattatgattgtcgggtcttgaaaagacttcctgagcttttgtcatcagagcaggttgcacagctaatgaaatacagccagcggtggttttttctcagtgagggtgaaattaactgttatgaatgcgatgccggaatgttagggcattttattattggagataatgagttgagcagggaggtattataa

SEQ ID NO: 155303 - DNA, 1068 bp, Enterobacter cloacae
atggcgaagcccactgtcggtgacacgctgggctggcatacgccgctcattgacggcactgaagtggccattgcgtatagcaatggcgatattgacctgccgtacatcgcgtatgcactgcacgactccgaacatccggacctcgtgaaccgggacaatcacacccgaaatatcctcaggacgcccgccaactcaaaattgcgaatggaggacaaacgtggcgaggagcacatcaaactcgccacggaatacggcaagacgcagctcaacagcgggcacctggtggacaacaagggagagtctcgcggcaggggctcagaattgcgtactgatgagtggggaacgctgcgagcccggaaagggctgctcatcagtgcagatgcacaggcgaaagcgcagggcgaagccctggacatggataccgcgctgaatgaaatagaccggcttaatcagcaactgcaacagctggaaatagccgccgaaaatgcacaggccctgaaagcggatgtcgacagccagatacagatgtttgagcagcggctgaaaccgcttaacgaggcgttgctgttctcagccccggaaggcatggccctgaccagtggtgaagatatgcaactggccgcagcacgaaacgtggtcgtcaacgccgggggcgatatcagcgtcggaacaatgggcaatctgaccgcactggccggagaaaaactggggctctttgcccggatcggacaactgagcgtcaaatccggagaagggccaatagatatccaggcgcaaaacgccagcctgcggttgcttgcagagaagaagctgacgctgagctcggcgagtgacattttgttcgccgggaaaaaacgtatcacgctgatcggcggcggaagctatctgcggctggaggtgggaaaaatagaatacggtacgacagcgtcgtatctgcgtaaggtgaagcggacgatggcggcgggggcggcgagtatgccattgccattcagggaaaaaaggttatgcctgagctgtctggtggatgcagcaatgaacgggacacctgttatattgaggggaatttaa

SEQ ID NO: 155304 - DNA, 339 bp, Enterobacter cloacae
gtgcagctggccacactcaaacaaagggctgtaaaagccgccagaactgccgggcgtgcgccctccggcagtcaggctcaccggctggtaccgctttccgatgcgagctatgtcagccagctggagatgatggtggccacgctgaaaattccgatcgagcggcgaaataagcgcaccggcagaaccgagaaggcacgtatctgggagatcaccgaccgcaccgtccgtacctggctcaacgaagcggtagaggccgcggcggctaacggagtgacgttctccgtaccggtaacaccgcacacgttccgccaggagctcaccattagaattcgagcgtaa

SEQ ID NO: 155305 - DNA, 318 bp, Enterobacter cloacae
atgaaaaaatgcccgtcaggttccggaaatggaacgggggtgagcatttcagaagaaaaaacgttacccgaaaaacgctctgtttccgcgggatatataaaaagcagaatcgaaagttttggttttactgaagtggccgatattctcaattttctgtgcttcaccggtaacggcacgccggaatgcggcgattgtatgtatattcgcgggaaaattgacaggtgcctgcgcaatcatgacaacggtgaaggttactttgctccgctcagggaactggactgtattctggcggagaacaatcccttctaccggcgctga

SEQ ID NO: 155306 - DNA, 714 bp, Enterobacter cloacae
atgtctttatattcttgtctgacaaagagaacggcaattgccgtcctgacgggcacctgcatctgcctgacctcgctgtccgccctggcagaaggcgggatttccattcagggcacccggattatttacccgcagaatgcgaagcagcagaatctgtcggtaagaaattcatctcacaccgattcgtttctggtgcagtcctgggtggaagatgcgtccggccataaaatcagcgattttgtggtgacacctccgctgtatctcagcgggccgaaaaatgagaacacgctgcgcctgatgcgcgtggcggggtcccctgcgcaggaccgggaaacgctctattactttgtggccaaagccattccttccatgggcgataacaaggacgccggaaaaaatgtactgcgtattgccgccgccagcagaatcaagctcctggtccgcccaaccggcttaacgccgtcgccggatgaagcgccttcccgccttgatttcaggcaccagggggagcgacttactattaataatccgacgccctactatatcaccctgacggatatacatgccggcagcagaacactgctggatattatggtgccaccgcggggaagtatttcagagtcgctgcctggcggaagtggaaataacctgtcgttccacaccatcaatgattatggcgcaataacaaaagccagaaatgctgtgataaattaa

SEQ ID NO: 155307 - DNA, 2589 bp, Enterobacter cloacae
atgacatattttaagttatctcccatggccgggttactggccggattactgatgccttcggcgtatgccggactgcattttgacccggcgatgatttccggtgacccgcaggcggtggccgacctgtcccgttttgaatccggcagtgcccaggccgccggtgagtatatggtggatatttacctcaatggcagcagcgtggcctcgcgcaatgtgcactttattacggtccctgctgatgagcgtcaggaatttattcatgacagtaccgacctgatggcctgtctggcaaaaaaagacctcgcggatatgggggtgaatgttgcggctttcgcggcgctggcggcggtaaaggatgagcagtgtgtatctccgggtaactttattccgcaggcgtacaccgcttttgactttcagaaaatgcgtctggatatcagtatcccccaggcggccctgctgaaccggccgcacggctggataccgcctgagcagtgggatgaaggtatcaacgccgccctgctcagttatcagttcagcggcagtgaaaatcacggcagctacgggaacagccgcagccattacctgaacctgaccagcggcctgaatctgggaccctggcgcctgcgcgacaacagcacctggagcgactatgaaagccgttacggcgctcagcgtcgctggcggcatcttaacacctacgctcagcgggccattattccctggcgcagcgagctgacggcgggcgacagcaccaccggcggagatgtgtttgattccctctctttccgggggatacagctggcgacggatgacagtatgtacccggataccatgcgcggcttcgcccctaatataaagggcacggccaacagcaacgcccaggtcagcatccgtcagaatggcaatgtcatctatcgcacctttgtggccccgggcgcgtttgtcattaaggacctgtatccggtctcctccggcggggacctggacgtgaccgtcaccgaggcggatggcacctcacggacgttcaccgttccctattccagcctgccggtcctgcagcgacaggggcatgtccgctatggcctcactgcgggacgttaccgcaacagcagtgaccgttacaccgcgccgtcgtttgctcagggcaccctgctgtggggactgcctcacaatatcacggcgtacggtggggctcagctggctgaccgctaccgggcgctggcgctgggtgccggtctgaatatgggcgtctggggtgcggtgtctgcagatatcacccaggctgacagcaccctgaccgacggctcacgtcatgaggggcagtccgtccgcttcctgtacggtcgctcactgatttccaccggcactaccttccagctggtcgggtaccgttattccactcagggatttcataccctggatgaaaccgccctgaaaggcatgtcagggtggatgtatgaatctgatgaagtggacgccgccggccgaccagtgaaacgcgactggattaatcactacaacctgtacagcaacaagcgggagcgtgtccaggccagtatttcccagcgtctcggggacatgggctccctctggctgaccggcagccaccagacctactggcaggatacggccacaacggattccctgcaggcgggattcagcagcaccctggcgcatgtcagttacagcctgtcctacggctacagccgggtgagcggtcagccgctgtcggaccggacgctgtatctgtccctgtccgtgccgctggatagctggctgtcacacggtgacataactgaccatcaccatcccgtgtgggccacttacggcgccacccgcgacagtgacggtcatctccgtcatcaggccagcctcagcggcacggccctcgacgggaacaaccttgactggagcatggcgcagggctacggacgggagggcggcgacagtggtgacctcagtctcggttaccagggcggctacggcagtgcctcgctgggctatggctacagccgtgactaccggcaggtacgttatggtgcctcgggtagcgccgtcctgcatggtggtggtctgacgctgggccagccgctgggcagcaccaatgtgctgattgcggccccgggtgcggcagatgtgccggtggaaaacagcaccggtattcacaccgactggcggggctacaccgtggtgccttatgcctcgacctaccgggaaaaccgggtggcactggatgtcagcgggctggatgaccatacggatatcgataacccggtagcccgggtgataccgacccgtggcgcactggtccgggcggacttcaacgcccacactggcgtccgcagcctgatgaccctgagccgtgacggcagaccgctgccctttggcagcacggtgagtacggctgacggccgcagcagcggtctggtggctgacggcggtcaggtgtggctgtccggcctggcacaggaggggacgctgaaagcgcagtggggtcaggccccggaccagcagtgtacggtgcattaccgcctgccggagagcgcgctgcaggcgccactggttcaggtgcaggaaacctgtcgctga

SEQ ID NO: 155308 - DNA, 567 bp, Enterobacter cloacae
atgtcttttaccgtgaaaaaaatcggaaccgtaagtatgactgcagcggcgctgctggcggcctcctggggcgcgcaggctgctgacacttcacccagcgccgaagtgcatatcaccgcggaggtggcgggcagtacctgtaccccggagtggactaccgcaggtttggatgtgaacctgggcaaggttgccgagacggcgctgaaatctgtcggcgatgtgggcacgaccaaaccctttgtactctccctgaaagactgtgactccggcgtcaccaaagtctctgtaacgtcgatgggtcaggctgacagtgccgacagtaaggcgtttgccaatactgcggctaccggtgcggccgatggcgtggcggtgaccctgtttggtggtgatgaccagtcaacccagctgacgccggatgcaaccggcagtgcggaatatacggtgactgacggggcggcggaaatgaccttcctggcgaaactggaacgttccgcagaggtagccgaagacggacaaaaagacggcgcggtggaaagtaccgccacgctgtatatgtcctacgagtaa

SEQ ID NO: 155309 - DNA, 414 bp, Enterobacter cloacae
atgccgggcccccagtacgtgcactacagcgtggaatccggcggggagatatatacgcccgtaaacggcatcccacgcggctgcgccctgagtccgcttgtcggggccagtctgctgcgtcatattgacggttattaccggagtctgaacccggatgaggtgttttatgtcagatatatggatgactttctgctactcacgcgaacgcgctggcaattgcggcggggcgtctggtttgcaccagactgggccactatcgcgccccgggctttaaacaaccatcgcgaacggctttatgagcaggcccggcgcaggggcctgtctcatgaggcagcctctgagcgggtccgggcgtacgaggtgcggtggaaaaggtgggcggctgagctgacgtcctgttattacatcaactaa

SEQ ID NO: 155310 - DNA, 678 bp, Enterobacter cloacae
atgaaaagcatcatctctgccctactaatagcgatttcgtctctccccgcatttgctcaagtgatcagctctacgcgtgggaccaacacaagcgatctgacctgggtcgacgccggcaacgaatcaccgtcgatcaccgcgtcctgcacgacaaacacgaccattctatgctatggaatcgacataccgtgcgacaaccacccacaccaatttaaggttacggactccactttccactcatgcacgataacaaaccactccctagacactgatgacgacgtcaccatcaaaatgaccaccccgaaagaagacatgtcggtcaccgtgcctcacgaatacacatgcagtgccaatccaatggacgtcgacttcgggaaaataagtcctggtacaaaaatcaacaagactatgcccattaacgctgtcggcacagacagcaaccacaaatcatccgtcttgataacctccgccgccatgaactccgactatacagtccccctaggcggtgagaccggagcaacactctctgtcgatgccataaaccaagttctagtagcaggcattataccggggtggaaagcagaaggacagacgctcacgctgcacctggcagtcgatgcaaccgttgtctcgcaatcgctcacttccactatgactgcactagtcgactgtgaataa

SEQ ID NO: 155311 - DNA, 243 bp, Enterobacter cloacae
atggatctgtgctatcaggggcatgccgacggaagatacagcaaactgctgacgaaactgaatcacagcggtctgctgcttctggatgactgggggctggagcctctgtcgtcagaacaacgcagcgatctactggaaatagtggatctaatgtaccagcgaggctcaatcatcgtcctaggccagttgccggtggaaagctggtacaagcccgttacagtcggtttattcacagtcgactag

SEQ ID NO: 155312 - DNA, 468 bp, Enterobacter cloacae
atgactcagcgtaagaaaggtgtaacccagcatatctcggccatgaaagccggtatctctgtccgctccggccgccggatagaaaaagatcagtggtcaaaagccggtaatcgtcactggcggacacgtaaagatccgcttgaggccgtctgggacagcatgcttgttcccctgctgaaggagagacccgctttgatgccgacgactctgctggaaatgctgcaggataaatatcccggtcagtaccccagcagcctccgcaggacaatgcaacggcgggtccgcgaatggaagccgcagtatggtgcagagcaggaggtcatgttccgccagcggcataagcccggcctgcgtggcctgtcggactttaccgaactgaaaggtgtagttgtcaccatcgccggtatctgcctcgcgtgtgaaggagcatgttcagatttacaccgacgggaaggcggagtgggttaa

SEQ ID NO: 155313 - DNA, 921 bp, Enterobacter cloacae
atggagataacggcgggcctgagatgtccgtcgtatggagccagttttgacagtggctaccagaaagcaaaatacgcggatattgctggttacgtttccggggcgcaggtgctgtttatcccgcacgctacggcctaccttgattcagggctgcttcataagatgaactcggtcaccatatcggggggccgcgtcacgcagaactcaacgatgaaagacaaccgcatcagcgaacgggatagcacttacacgtttccgggaagcctatggcagatattcccgacaggtcagcgaagtggggtgggcttgctcatcagcaacagtacagacttcacctcgataaccaatgccacacagtcaggccagtgtatctggaaaggaaccgtgaatgttcccacagggggctgggcggtaccgacgatagcaggttatgacaagtcgaaatatatcgtttttggacgctgcaacagcggcaatacgattgacttcgacggaaatacggtcaggttcttcagccctccgtccacgaatgatgacgcccccgcaacaggcacgatagacatcgttatcttcgccagcggcgtagcgccgcagcctggtaccggcctcaatattttcaatgctgccggtgcctgtacgttttcaaccacaaaacggccattcgtatatctgaaccaactatggaacccttcgacaagcgccgtgagcatcggtagcggctatgttccgctggggagatttgggctgatggttcatatggtcaatggcatgtacgtgtatcggatgttcgggataaaaatacagaacgggaacgcttcagttcagggagggaaatatcttggtcgcgagcagtatgccattttcggtaataacacgataacgccgctcagccttccggttctgcctgatatgtacgtctga

SEQ ID NO: 155314 - DNA, 441 bp, Enterobacter cloacae
atgcgggcaacccagacccgcccggagttagatttaaaggtgatcaccggcgactggcgtgctcttgatcctggtcttacttacgctatccgtgaactgcctgttctgaaggaatggagtgacagagagatcgcgggcatggaggaaagtgaaggtccaccggactataccaatacaattttggaacgaaagtatctgtatgcccgtcttggtcttaaggccattctgcaggccaggagactgcgaaaactggcctgtcttcctggtacccgacttgatgcaacgaagtggtccgcgcagcccgttctctggcgggtgtggcgtaatgagcgtaaacgtcgggctcagatgcatattttgagacaacgggaactggctacattccatatcattatgcagcaacgcattcaggctaacaggcattcaggggcacaggaatga

SEQ ID NO: 155315 - DNA, 243 bp, Enterobacter cloacae
atggtgtcaactgagagtagtgaaaaggcgataacacagcaccggctgctggtgccgcgtctgtcgctgatgatgtttctgcaattttttatctggggtagctggtcggtcacgcttggcctggtgatgacccggcacaacatgtctttgctgattggcgacgcgttttctgccggacccatcgcttccattctttcgccgttcgtgctcgggatgctggtggaccgcttctttgcctcgtag

SEQ ID NO: 155316 - DNA, 501 bp, Enterobacter cloacae
ttgactctatcgcttaacaggctgaaagagttgcttttctgtgaccctgatactggaatattcacatggatttcatcaacaaataaccgtagaccgccaggagaaacggcggggtatataaacagtcttggttatgtccaaattggcatagattgtggtcactatagcgcgcacaggctcgcctggatgtatgttcacggagagcttcctgagctagatattgatcacattaacgggaacccatctgataatcgactcgagaaccttcgacttgtcacgcatcagcagaacatgtgcaacagaaagaaaaggaatgataactcttcaggttatcccggggtttgctttcacaaaaccaataacaaatggcatgcgagcataagagtaaaaggtaagcgcatccaccttgggtattttaaaacagcaaaagaggcatatgacaaatatgttgaggcttcaaaaaaatatcactcccaatacacaagagcccaacccttatag

SEQ ID NO: 155317 - DNA, 249 bp, Enterobacter cloacae
gtgagctttgaatacatagcttttccagagggtgaagaacctcacaaagatactattgatgatcttttgcctggagccccatttaagataaatggcaattgggagcttagaaggtttggtgtatttgagatatctaagcccggtgaaatagttgagtatctttatgcccatagcggaaaagacaaaccaggcgattcggtaattaaaaaagcaattctttcactcaatcctgaaccttataagcgataa

SEQ ID NO: 155318 - DNA, 171 bp, Enterobacter cloacae
atgagcatttctttctttgtcttttatttatggttgatggcaatctgttttctttgctgcgccaaagagctgatgactaatcaccgcaaaatagcgtggcttgctgctccacttgtatttgctgcgcaggtggtctctgtatatgcagtttacagattcatttggacttaa

SEQ ID NO: 155319 - DNA, 297 bp, Enterobacter cloacae
atgtcgccgcaggacagaaaagcctggtatcagtctgagaatgaaaggttaagatttgaagaagcttcacgggaactgtttccggtagatgaagtggctcgtgaatatgcctcgcttgctaaggcagtcgtaatggtgctggaaacacttccagatatccttgaacgtgactgcgcccttacaccgacggccgtaacccgagtgcagataattattgatgacctccgtgatgaaatggcgagaaagatacaggaaagtgattcagacgagggttggcctaaaaataatagtttgtga

SEQ ID NO: 155320 - DNA, 447 bp, Enterobacter cloacae
atgattaacggattcggtcacctgtactccgcaacggagcagaacattgcaaaaatcagggaagtcaaaaccaccggttttatagactccaacgagttagcgaaggtaacaaaccgcgcaattcagctctgcgttctcgacttaactcttgccgcgcaccgctcaaaacatgaaactccaatcaataaactccctggggctaaagctcttcaccataaacttctgatgaagtacaactggccactatcagagattcgtgcaatgagtctttctgatgtctttatcgccctgcacgatgagctatcactcgaatctctagaagggcaggctaaaacctatttttcaagtcttctcgctggggcataccctcttacattcgatgattttatcgatgaagagtgggaccctaatctttccgatagacttctatttgactcaaaagagtag

SEQ ID NO: 155321 - DNA, 285 bp, Enterobacter cloacae
atgagtgagaatcagaatgaagcggtttgcttaaaacccggatttgtttatcagccaattgcatctgaagaggttgggagcttaggggtcggaccactcatagatgctcgtggaatgtccgatgagcagatcttcgactggatggataaaaaacttgttgcggcgaagcggcttcgtgatttgctttctactaaagccgcgattgaagagcagttaatccatctgaatagcgaaatcgaacacgctactcttttgagtcaaatagaagtctatcggaaagattag

SEQ ID NO: 155322 - DNA, 615 bp, Enterobacter cloacae
atgtcggtggcgaaagtgaaatcgcttccctggttaaaaatgacggtaccgttgttggtgagcccaccgctgagggtcgcggttttttcgccatcgcccagttgcaacgaagcatctttggccacccgtgtattaccggtattcgataccgcgcctgacagggttaacgtgcccgtgtctatcagcaaggaatcgccagagccaataatatcgagatcgcccgacagcgcccaattttcgcccatcatttttatactggcaaaaccgtcgccttcgttcagacccacaaagttactgtcttccgtaccggtgccgatcagggtgagagtgtttcccgtggaattggtggaaataacgtcaccgataagagtggaacccgtatcaagcaccagggcgttatttttattgctggcaaacataacagcggctgtatcaccactaatcgttccgctattcgtgatatctacttttgccgtatcttttacattaatgccattctgggttccctgcacggtaccactgttaaatatttttgtattgccagtacccagtgtgatagcgtcaccgcttgtaccgataattgcaccactgttattaataccaatgccagtctga

SEQ ID NO: 155323 - DNA, 870 bp, Enterobacter cloacae
atgatcaccttcaccaaagaacagcttatcgctgctgcgcacgcgcgaattgagtttgcagagatgatgctggccggggagttagagcctctcaaagaacgcacttggtcaatagaactggagctggcgcgtatcgcgctggcatcgctcgaagcgaaaccgataggagctttccacatcgccgatcagcaggtgggtggaaccacggattatatcaaggatggcgagtggcccattgatgacggcgttattgaggtctacgccgtcccgccagcgccggtatctgtgcctgatcagtggaacaaatcattgcaggagatggttgatgccatgcggcagtatgagatggatattgacgaggatgcgccgcataaacacagagcaatgatgcgcagggccgaggagttattggcgaaccgcgccgccatgcttcagggtgccgatggaaaaccagagttaacggtctggtacggcgcaatgccggaaagtaacggcaaaacaaactggacggctattcttcatcgcaaaggtcagaaaccgtgggaaggaatcacaatcgaccgctcagagtatcctgaccgcgtgcggtatgaagctgaccgcgtgcgtcatctgattggtgagttggcagatgagcctgacatccttgcgtatgacgctgatgcacacagtggatatgtgaagcctggcaactctccggtgattccagatggttggaagttggttccggttgagccaacagcggaaatgcaatcagcggccgccagcgccatccgatttgataccacgccaatcaataagctctggactggcaacgccgtttacaaggtcatgctcgcagcagcaccgcagcaggaggtgaagccgtga

SEQ ID NO: 155324 - DNA, 252 bp, Enterobacter cloacae
atgagcagattactatttcagaaagataacaaaaccatgctgtgggaaccttcactatatcgcgttgactggcttaatgcgtgtgaacactgccaatgtagcaaaggaattgaggttactagccgttcactctctgggacatacctctacgctggtgacgccgtgaaatgccctcagtgtggaaatcaaggcgttatcgacgcagatggcgatggcgcttgggttgaatgggatacggagtgggaggactaa

SEQ ID NO: 155325 - DNA, 363 bp, Enterobacter cloacae
atgagcaaggaagtcgagaaactcaatgaccatcagctggctgacctgaaaaacgctgtcgaaagagagctcaaacggcgcgctgatgggccaaaagtcaccacgtattacgttgtctcgtgcatcacaaacgctcagcattttactgatatggactgcgctctgcgttgcttaaagcgcgtggcggaggaccttattgaatgggtagcggaagaccaggaaaaccgggattacgtaaatcgatgcactggcattgttggagcgaaactccaggttgcagagatgaatatcgaccacttcaacatgcgtgttgcagagaaatatttcgatgacgattgctacccaccggaggccgcccaatga

SEQ ID NO: 155326 - DNA, 708 bp, Enterobacter cloacae
atgaaacgtcgtcaattcgatacatccaaccgctttttggttgatacagcatttcaccagcttgaaataatccgtgatgacggcctctaccgccatctgcgcatgaagcagccaggcacatcctgttattacttcgatattgtaacctggcccggttatctgaccgtgaccggtgacatgggaacctggacgttctcccgcatcgctgacatgttcaacttcttcggtccatgggagggcggaataaataccggttactggtcagaaaagttggaagctggcgctgggcattcagcgtgtgaactcctggcgaaagagtatgaccatgaggcattttgccagagccttaaagaatcgttgagcgagtatcttgaagattctgacgatgatcatcaggaagacgaagactgggatgatgaagacgatactccagacagtgataaagccaaggtccgtgaggtggtccgtgaattatgccgtagcgatttcagtaatgattgggaagcataccatgcggtttatgaagctgactggcttgaaagctggagtgcgtgggatatctgcgacgggctgacgttcaagacctacaccacccacttccgctggatccttttcgctatcacttgggcgatcgccaaataccacaacacaaagctgatagataaagctatgtctacgtacctggcagtgaaaggagtgcagtcatga

SEQ ID NO: 155327 - DNA, 360 bp, Enterobacter cloacae
atgacgaacacacagaacgtcacagagttacaaccacgcatgaccagagagcagttgataaatgctgctcgtatagctgctatctatctgccagttgcatcagcgcagcttatgaatgagcttgctaaccgtctcgattacaccagcgtagcactttgtgaagcgatggcgcagcgtaaagaattggctgagcagaatgccaccctgcgtgaggatgttgccagttgggccaaagagtgtgaccgcatcgaagagcgctacaccaaaacgcctaccaacatgcacctgctggaagctcagcgagaactgcgtgagctcactcctgtcgtcatttccctgaataacgaggttgctctctaa

SEQ ID NO: 155328 - DNA, 255 bp, Enterobacter cloacae
atgaaccacctcgaatttattgagaaaaacgtgcgggaacagctgattaagcaaggcttttcctcttcggtggctcaggggggggcgtggcaagcgattgatttatataagcgcatgtcacaagccagtaagaaaggcgcgattttcgacgatgtgatgaggcatgcgaaagcctgggcagataaacaggttacaaaagctgaagttacccggaggaaacgcacctcacccaaagaccaagacggcctcttctaa

SEQ ID NO: 155329 - DNA, 327 bp, Enterobacter cloacae
atgaacagtttaacggtaaacaaccgtctcccgcaactccgtggtattcccgttgttggaacctcgtcgtttcggtatgagcgcatggtatcaggccgctgggttgcgtgtaaccacagtagggccatgggaattgtgggtgtatggcgtcgtaaaggggaatcgttatgcgtgaacttaaccggcgattcaaagaccactacggcgtcccggtccgtgtcatccgatgggagccagagactcgacgcgttatatacattcgcgaaggttacgaacatgagtgtttcagccctcttgaccagttccagcgtaaatttaaagagttaa

SEQ ID NO: 155330 - DNA, 321 bp, Enterobacter cloacae
atgatcgaattaacgtcgcgtcagagtgaagtgttggacgccatagtgctctacaaggacagaacgggattcccgccgacgatgctggagcttgccgcattaattggctgcgcatcacccaacgctgccgctgagcacattaaggcgcttaagaaaaagggttatatctccgttgctcctggcgctgccaggggcattaccgtcgtcaaaacagaattcgctactgatcctgtagcgatcattaaagacctgttattaggtggagacaaggccagagataacgcggttgattggctgaaaaaacagggagtgactgtatga

SEQ ID NO: 155331 - DNA, 702 bp, Enterobacter cloacae
atgcaacagatgattaacgttaaaaatgatccaggcttccctgctatgaccagccttgaaattgccgggctgtgtgaaaagcggcatgaccatgtttgccgcgatattaaagtgatgctggaacagctcaatattcaatctccccaaatttggggagaataccgggacgacttggggagggcatacccatgcttccatcttcccaaggatttatgcctgacgctggtatctggctataacgttgttcttcgtaagcgaatcattgatcgatggctggagcttgagcagaaaaatcagccaaaagtccctcagtctttttctgaggcgctccgcctggctgcagaactggaagagcaaaagcagatgctcactgaccagttagctatagcagcaccgaaggctgaatttgttgatcgctatgtggtagccactggttcaatgacattccgccaggttgccaagcttctcaacgcaaaagaacctgagttccggcttttcctgctcgacaaccacatcatgtatcgtctgaacggtacgctaacgccatatcaccagcacatcgaggcagaacgctttgaggtgaagaccgggaccacaaatgcatccaactatgccttcagccaggcaaggttcacggctaagggggttaaatggattggtggcctgtgggctgaacatatcgctaaggggcaaattgcgtga

SEQ ID NO: 155332 - DNA, 957 bp, Enterobacter cloacae
atgtccggtgttgtcctgttccgcccaggcaacgaacttctgtggctgtttcgtcgtgggcgggtggtgatagaaacaccatctgaagcaatccagcatttgccatcagggctgattcctgaagcacaccagccactgacagatgatgtcagcatgcaggaaatattcattaacgagcgggttatacagcgtgccggtgggctgcctggtcttgatgcgtggcttgagcgtaaattcgaatgccagtggccacacaaggactggcacgcaagagattttacactgatgcgtcatgcccctggcagtattcgcctttgctgggcttgcgataacgaattgcgtgaacaaaccactgaaagactggcaggaattgccatgcagaacctggtaaaatggttgctcgaaagggtgaatattatgctgggcttcagctcagaccacaccctgacgttgccggagttctgctggtggatggtacgtaacgatttggccgaccttattcctgaatcagtggccagtaaagctctcaggattaagcctgaatcgcatagctcagtaatgcgggaaagcgacattgttccgtcattaccggcaactgaaatcctccaggagaaagttaagaagattgtctcgatgaaggttgaccctgaatcaccggaatctttcatgctgaggccaaagcgccgccgctgggagaacgacaagtacacccgttgggttaagtcgcagcagtgcagttgctgtaataacccggcagacgacccccatcacctgattggccacgggcaaggtggaatgggtaccaaagcgcacgacctgtttgtgataccgctgtgcagagcgcatcacgacgagttgcacgctgatcctgtggcatttgaagcgaagcacggcgaccagttaacgctgttgtttcggtttttagatcgtgcgctggcaatcggcgcactggcgtaa

SEQ ID NO: 155333 - DNA, 1476 bp, Enterobacter cloacae
atgatttctggtaaaagagttattgcggcttacgccattttaattatttcgatgattttattgcgtgagtactggttattcatgcggcaagggcttcatgttgatgagtccatgtcctttatactctcggcgtacaatccttacggattcgataaagcattcccggatgtattaaaattgacaggcgatcagcttaggggggtgatgtggtttaatgatgtaaccatatctgggatgctcggtgacataaaaagcctatgggtgttcaatagagatacaccgcacagcaatttgtactactcacttctgagaatatggtttacaggaacctccagcgataaattttacttcacattgctgtgggctgttcagcttaacattgtcttgtctgttgcctctatgttgatattcagccacatggcctatcaactgtcgcgcagtcatttggtgactatatcatcggttatagtggcgttcatatgctacgagacaatatcaaacaccatatttgccaggccgtatcagcttcaggagaccatgaccttggcgttcctgtccatgactatggcctatatgaggaatgtagtccctggcaccaaattcattatttgttattctattgttactgcctttacccttcttactggttatttctcagtggtttatgtttttattgtaatgctcatggtgttgatttatgccatgtttaactgcgataaaaactacaaagaccttgcgttgacatgcttgaaattcgccatgacaaccagcattgttgcatacgccatttatcctccttatttcttcgttggaggttcgagacagagtgaggctttatcaaaatctgacagccttcatgagaacatgttaaaggctgtgaatactctttatgatcttgggacatatcatccatacttctggtttgcattcgtggtgttcataatcagtgttgtagcttcattcctctggaaaaaagctgacatgaataagtcattcatattgatagccgtatcatcaacaattatttggtggctgtttgtgatgactttcgctccttacaaggttcctcgatatgtttacccggcgcttcccgttctggcatttgtctatactacaattattataattgcaggcaggatacacaaggcgctaggaattgcggtttgtgttgcaattgtctcattctcaatcgtaacttataataccggaaaggttgattattcattttcgaataacaaaccatattgcaatgtagctttaagcggcgaaacgatttacttcatatcggccccataccgtctgaatgggcttacagattgcctgcctgataaacaggtaacaatagtaagcaatcaggatcagtttgataaggagatgagtaaaagcggctttaaccacatagtgtcggataagccgcttaatgggtttgctaaggttgactcttacggttatttcactgtgtacagcgcaaggtga

SEQ ID NO: 155334 - DNA, 2112 bp, Enterobacter cloacae
atgaccacttacgccactaataatcctctcggttcaacagacccgcgtgatctttacgataactcggagaatcttgatcacctttcactcgaccagcaaaacattacgtggcctgatcgattaaaccagccaagaagaacatggcatggtttagaggttatggttgcacaggctgcggcaaactacggctttactgttatctcaggaaagtcttttactactggggcaacagtaaacttaaatgaaatcctcctttatgaaagcactggtgagtattaccaatggacagggagtttccctgaaggaggcaaaattgtacccccatcttccagcccagcttccacaggtggagaaggaccgggagggtggctgtcggtaggcaatgcagcactgaagtcaatgcttgctgcttcaactggatttagcttaattgggcagtgtccaagcgtaacagcattaagggtgattgaaccattaactaacggacagcgtatcctccttcgtgaatacacagccggcacaggatatggcggcggtcagttacgcgcagttcttgacgggagctcttacactgacaacggcgtcaccgtgtttaaaaccactggcggcgctgcgtggattcgagttaacgccgacgtgataacttcattcatggccggaacggttcctgacaatggggtaactgacaatacagcagccattaacagattcctccaggctggcaaaaacctgatgatgggagatggtaactttggtcattctggtcaaatagttctgcgcaccggaatatctttgaatctttcaggggctacgttaaagccatcatcaacccttctcactgcggcatggagaggggatagtctgactgatgtaaaaataactggtggcatatttgagggtacggggcttgataacaccaccggcaacggccagcttcttctcttggtaagctgccagagatgcattgtcgatggatccacattcactaaatcacctaatgatggtttgcgtttcattaccagcaccaggtgcatagcaagcaatgttatctcgtataacaacttgtcagtgggaattcaggaccgtgacggtgattacaatagcatcatcagttgtaagtgcagtggcaacgggaatacaggggtagcatcaagtacaggcggtcgtggaattttaacctggcgcagcttcggtaccaaaatcattggctgcgatgccttcaataacactgaatatggaatccgtgcttactcccaaactggagattccaggggctctactcagattatcatctctgattgccatgttggtgataacaccaagatcgacatttacgtgtacaacgagatcggaagcttatctgagatagtggtatcaaaccctatggttcgtagaacaacgcagccagagggggccatgatagctctccagggaacgcgagtaagttgcaatggcgggagcgtggttaaatctggtgacagattaacagtgccatgcttctcaatgttccagacagatagtgcggcggtacgtggcgttacgataggaaacgttgggcagctatttagcttctcatcggctaacaactcactcataacaggattgattgccaactgcgctacggtgtgtggcactgccgcagggaacggcaccatgtttaaaggaaatagctttattcacggagggactggtgtaagcgatgcggcaattgacgctggaacagatccatgcagcataatctctaatgtgttcactgggttctggagaaatatttcatggaactcacagaaaatgaccatttcagacaatgaaagcagcggcaccacagagctatcaatgaggatgtttggtgatggaattggaaacctatatatgggccccaacagatgggataccgcaagcaacccaactctattagcaagcctgcagaagcagggcggcccaactgcgttaccagtatggtatgcagatgccgccccaacttctacctcactaacaaatcctgttggttccagggtgttaaaagctactccggtagtaggtcaacctaaaggttggctatgtacggtttctggagcgccgggtacatgggtggctgaaagcaacctttaa

SEQ ID NO: 155335 - DNA, 3078 bp, Enterobacter cloacae
gtgacaataagaatttatccgtcgaggctgccaggcgagccgctggaaactcataagcatggtgatatgagcctgtcgggttggcttacagataatgtcgatagatggactctcgacagagaacacccaattaccattgaggtagatggtaagccggtaccacatgatgaatggtcatccataaagattagtcccgaaagtgacgtaaaaatttaccccataccatacggtactggtcttgagattgttgcgtgggcagcagtagcggttgcggtagcaagtgccgcatattccatctacatgatgagcaatatgcagacaggcgggtatagtcagcctggaaatggcgaccaaatagagcttaatccagctaaagccaacacagccaaacttggcgatcctattcgggagatttttggtaaataccgggtatggccagattatatagtgcagccagtaagccgattcgctaacaaaaaagatctcattaccagtatgttcctatgcatctgccggggagattgtactcttcctgcatcagagatccgtataggtaatactccgggtgcagcatttggttctgacctttcgtatacgatttatccacctggagcggatgtatcgggtgattcgaggagtgagaactggttcaactcacctgaagtaggcaatacgacatctggcactgctggtcttgatcttagttcaagtggtcctgataccgtcagtgtggttgcagatgcactactgttcaacggcaacactgttacattgataggttcatcttcttctgacgatgatactgaaattcctccagcctggacgacaggtacaatcattgatattgaggctcctgacacatatacaatcgatttaaataatggttacagtgttatttacggctctgtttcagaaatggcaccagttgtcggaatggctatgacactagagctgaacaatgacacatataatttatatgtggctgcatatagcccggcagttcctgcagttccaggtgtcggtgggagtactgcaagtattacggctagcgcttcgcctacgacctatgatttcagtagtaccccacagacgtttaccataacctggaaaagcattacttatacggtctctcttaccagcaattacgtttctatgagtggtcttgttaatgcgatcacaagccagataagtgcttctggcctgagagctcgtgacaactcaggccgcatcgtgattgatgagctcagtagcccatatgccggtggttctattggacacagttctttaccagtgagtttgtttggttcttctccaactgatactgcaggtgtggcttcatctggtgggagtgctgctgtcccggcaaatatgcgtctcgcgtatgactctgcaacgggtactaaattctcagggatacctgttggtttgcaaaggcttactctttacccaactgattacagctataaaataaccggaatctctggtttaacgattaccgttggtcgggttcacgtgacaaccgattcttcaggtaatacggttaccacggatgatccaacatggcctgggtttgtacagcgcactgtactcgatggaaccgtaacaggcattaatgacgattatgattgggttggtccattccttgtatgccctgatggcgaaacaacaaatcgtatagaaataaacttcaacttccaaaatggtcttgcgaagtataatgacaaaggcaaaaaacgcgcccaggccgtcactattctagttcagtatagagtcactggttcaacaacatggaccgaaaagaaatttcgatattctgatgcgatagaagatcagattgggtttactgaaggaatatctgttacaaccgggcaatatgaagttcgtatgcggagggaagccccacctgcaggaggttccgcacgtgaccaggttttctggcaagccctaagaagcaggctttcaaaaagaccatccaagtatcgggatgttacaacaatcgcgctgagcatcagaaacggaaatcgtcttggagcacagtcagacaggagggttaacgtaactccaacaagacaatacgaagacggcacatcaagaagtatcagtggggctctctatcatgttctgacatcattaggttatcaggacaatgagatagacagggccacaattgacgcacttgaatcgacattctggacgccgcgtggggagacatttgactttgcgacaaacgacacaatgtcagcactggatatgcttaaaaccatttgtaatgccggtatggggtatttcttgctttctgatggaatggcatcagctggaagagaaggaataaaaccatggacaggtatggtcactccacaggaaacaacgtcggaactgaccacctcgtttaaagcaccaaatgaagatgattatgatggagtagatgtcacgtacatcagcgaactgacgtgggcagaggaaactgttcaatgccgtttacctggaaattcgactccatctaaggtagaaaactttactcttgatggcgttctttctcaggacagggcatacagaatagggatgagacgtttgctgggatatcagtttcagcgtctgtctcatgatgtttctacagaaatggacgccctctgttatcagtacatggacagggttattttcactgacgacatacccggtaatcagaccctgagttgtctcattgaagtaatgagttatgacagtagcaccataactctaactttgagtgaatctcctgactggacattcccaaacccacgggtggttattcgcgatcaggagggcaaggcatcagcattactcactccaaccagaattgatgatttcaccttaagcgttccatacaatgaatcattgtcacccgaaacatggatcatggatgacccggcaatagagcccccacgcttaatgttttgttcctcgacacgggttgggtatgacgccttgattggtgaaatatctcccggaagcgacggaacaaacgacgtgacggcaattcaatataatcctgagaaatatcagtatgacgacgctacctatccaggcgatgtcgtttaa

SEQ ID NO: 155336 - DNA, 381 bp, Enterobacter cloacae
atgtttgatcctgataaataccgttcagtcacctggctgaagggcggccgcgtttaccctgagcttgactgtttcgggatagttaacgaaatccggagtgacctcaatttacctttgtggcctgagttctcaggggtgacaaaagatgacaacggacttgacagagaagctcgtgggctgatgtcagaactgaccaaatgcgagccagcccccggggccggtattgcatgttattcgggcggcatggtcacgcatgttggtattgtcgtcgatattggcggttctctgtatgcggctgagtgcaaccctaaatccaatgtcacattccttcctctgtctcgttttgaacgtcgttttgtgaaagtggagtattaccagtga

SEQ ID NO: 155337 - DNA, 483 bp, Enterobacter cloacae
atgacgattttaaacaggctctatgccagcagtggcgacgaggtgatcattgatacactgcaaataacagtgggtggcgtcgattactggttaacacgtggatgggatgatgtaacagtgactcttgaagacggcagacaagctacctttatcggatcagcgatagatattgcattgcccgctcggaacgctgacggaacgcaggatttaaaatttgccatcagcaatattgacggggttgtttcaacagctatcaggaatgctctcgatagcctgaataatgccagtctgacatttcggcgttatgtttcttcagacctgtcagcgccagctgcgccaccatatacgctcgctattaaaaacgggtcatggacagcaacagaggtgcagattaccgcagggtatatgaacatcctcgacaccgcctggcctcgttaccgatatacgcttcctgatttccctgggcttcgttatctgacgtaa

SEQ ID NO: 155338 - DNA, 474 bp, Enterobacter cloacae
atggctatcacaaccaatatcaactacccgcacgattcgcttcctgtccctcttcatgagggatatggactaaagccggtaagccccttactcagaacgtcattaacatcaggccgcgcaagacagcgtagacgctatatgtctaccccgactatggccagtgtgacatggacattcactgatgtggaggctcaggcgtttgaggcatggttccgtgatgcaataactgacggttctgcgtggttcaatatgaagctacgcacaccaggaggagagtcttcaaaagtctgtcgatttactgatatctatcaggggccaaacatcattggagggaattactggcagtacactgcagaattagagctctatgatcgtgcaattatgcttcctccaccatggggtcagttcccggaatttattaccggaatggatattatcgacattgcgcttaacagggagtggccagaaggatga

SEQ ID NO: 155339 - DNA, 2226 bp, Enterobacter cloacae
atggctgatatctttaaagatattggcgataagattggcgacgcggttcttaataaatcaggcgaggctgttgacgcgctgaatgctctcggtctgtcggctgagaaattatccaaagtaagccctgacaaacagcttctggcgattggtgaatcactgagtaagatcgggaccaatgccgagaaaactaccattctggaaagtcttggtaatgacctttcaaagctgcttccgctgtttgataacaataatgaaaaactgaaacagtttattgatctggctaaagactacggtgtagcgccagacccttcatcaatagatgatctggtgaaggtaaaccagttattcgaagacatggaagctcaggttgccgggttaaaaatggagatcgctgcagggctggcaaaagtcgacctgactccattgcaaaactctctcgataagcttcacgatgtattaaccgatcctgttgtgctgcagggaatttcagacctggtatctgaggttgctcaactcgctggatggcttgttaaagcggcggctggtgctggtcaacttgccgctagtaccggcaatcgctttgctgcacttagtggaaaaattgacctgaacaatattgatcaggttaacgagagaatcgcatatcttcaaaaaaatcttgagggaaggaagggcttttactctcaggataaatcaatgttcgcctggttcactggtggcgatgacagtgttaaaaccctgaatgatgagctgaacacactcattcaaaccagagataagcttgctaaaccagttattggcccacttcctcttggcactgctactgtcggaaccggaaaaccatttgctcttcctccgggaggtactaacgggaaagtaacgcctgatgcaaacgccaaaaaacttgaatctgctttcaagtcacttgaaacaagttaccagcgccagatcgcgttaattgacgtaaccggtaaaaaaaatcaggaagtaactgaggttgaaaaactcagattcgatttaacaaccggcaaattaaccggcattaatgctgcacagaaggagagacttcagcaattagctactgaggttgacaggctaaatgccctcaaaaaggccaatgaagaaaaccttaaactttctgagttcgcgacaaatctcagaaaacaaaatctaaacgataagtctgccaatgatgccgaattcgttggtgctggcatgggcaagaaaacccggcagcgcatgcaggaattgttggatattcagagcggatttcttgagaaacaagccgacctccagaagcagtatcagagtggagacattacaaaatctctgtatgacaaggaaactcaggcgctgcaggatgctctgaatgagcgtcttgaaatacaggaagactactaccaaaaatctgatgacaagatgggggactggcaaagcgggatattcgactcgctgaatgattacgctgaaaagtcttctgattactatcagattgctgcagatggtatgacgtcgatacttgacagcgcgacttcatcaatagctgacaaccttcaggatttgattaccggtgctgaagatgtcggtgatttcttcagtaatatctttgccgatcttgggcagacagttattaaaactcttacagagatggcagctcaatggttagtttaccagggcgttcagcttctcgtcggcaagacggcgcaggcatcagcagccggaaccatgatcggcaatgcgcaggcaactgcatttcaggcacaacttgctgcatatgcttctacagcggcaattcccatcattggtcctgctttagctccaggctctatggctgctgctgctgctatcaccgcccctctggttgcgggagttagcgtgtcagctctttcaggtatggctcacgatggtattgagaatgtacctgaaacaggaacatggcttttacagaaaggtgagcgagttaccactgcgaagaccagcgcaaaactggatgccacgctggagcgtgttaataaacaatccaccgcacaacaggccgggaatattacagttcctatagagattcatggagaccctgaccagcgaacgctcctactgatagaagatgccgtcaaacgtggagcggtgctcggacatcaaatgacagcgaatgatctttctgccggtaccggaaaagcttcaaaagctctgaatagtggatggactgcatcgaggaagaggggctaa

SEQ ID NO: 155340 - DNA, 381 bp, Enterobacter cloacae
atgaaactgactctagacacgattaaaaatgcaggtgcatttactggccgccctgtagaaaaggaaattgagtggaccgacaaggacggcaataaacatgtggccaccacttatgttcgtcctatgggttttcatgcggcaaagtttgacattctttccgtaactggaaaatcggacggtgttgctggacgcattgcatcttcaatttgtgacgaaaatggcgatcctgtgttcactcctgatgatattaccggtcatgctgatccagaacgaggcgctcttgacggaagcctgacaattgccctgctcgtagcaattcaggaagtcaactcactgggaaaggaaagctcagcgcagaagacgaattctggtgtgaattag

SEQ ID NO: 155341 - DNA, 498 bp, Enterobacter cloacae
atgtcagtagtgactcaaggcacacagatgtatgtgctcgcgaatggtgtcgtgagcgaaattgaatgtatcacttcgttctcacctggcagtagcccagctgatcagattgaggatacctgtctcagcgaacggaatacccgccagtataaaaaaggtctgcgtactcctggccaggctaccgtagctctgaacgctgatcccgcgaatgatagtcacctgttgctcagcaaccttgctgaatcaaatgaccaggcaaatttaacattcgcaatcggatgggctgatggcgagtctatgcctgttgtcgcaacctcaggtgatcctgatgctgttgatggcctttcacttcctgatgaccgtacctggtacgtattccagggttatgtgtctgacttcccgttcgacttccaggctaacaccgttgttcagacatcggcgactatccagcgctctggtcagggcgtatggatcccgaaagcgcaaccaacaagttaa

SEQ ID NO: 155342 - DNA, 366 bp, Enterobacter cloacae
atgatcccaccgatatttcctgtctgtgcggcaagccaggcggtaacagatcttcttggttctgaccctgtaaggctttatccgttcggaatgcaaaatgacaatgttatctacccttatgcggtatggcagaacatcggcggtgagcccgaaaacttcctcaatcagagcccagatattgaccgcttctccctgcaggttgacgtctatggcaatactgatgaagaagttattgcggtagcaaaagcaatcagaaatgcaatccagactaaagccaatattacccgctgggggggacaaactcgcgaccccaatactaaccgttaccgatattcatttgatgtcgactggtttgtaaaacgataa

SEQ ID NO: 155343 - DNA, 486 bp, Enterobacter cloacae
atggctgatggagttgaagtaaagctcgatggtcttgattcactattgggaaagcttgacgcgataagcaatgaccttcgacgcaaaagcggtcgttctgccttgaggaaggctggaaacatcatcgtaaaccagattaaaaataacgcctcgcgtctggatgaccctcataccgctcgtaacatatccgacaatgctgctctaagatggaatggtaaggtattcaaactaactggagacctgggttttcgtatcggaattcttcagggggctgtacttaaaaaacatccaagcatgtccaaagatgctccgacacctcactggcgacttctggaatttggtactgaaaagatggcagccaggccgcttgttcgcgcggccgcaaattctcgtctcaccgaagtctttaactctttttcagttaactatgaagcgggtatagacagagcaattcagcgagctcagaaaaaaggagttccgccatga

SEQ ID NO: 155344 - DNA, 333 bp, Enterobacter cloacae
atgaacctcgggaaattgaggcacaggatcagcattgagcgccgaacaggtgtgcaaaacccttctaccggcgctatgtattactcctggcaaaaaattgcagatgtttatgctgaagtaacacctgtttctgtcaaagagttcatcacctctcaggccgctaatgttgagttaattgcccgcgtaaaaatacgatatcgggaggatattcataatcaggacaggattactttccgaggaaaaatttacgcggtagaggggattcttcctgatcctgatagtgggcttgaatacctcactctcccatgttctcagggggtgaaagatggctga

SEQ ID NO: 155345 - DNA, 195 bp, Enterobacter cloacae
atgaacgagcaactcgtaacagaactcctggaagcgctaaaagcccagacagcagctcagacaaaacaaactgaggcaattaaccgtctggccaactcgaacgagtcactttgcaaattgataatgcaaacgctggctgaagaagttgaagaggataactttcatcagcaaacttacctgagtgacagaaagtga

SEQ ID NO: 155346 - DNA, 327 bp, Enterobacter cloacae
atgatcgaactggtagaccttgaagaagcaaagcttcacctccgtattgatgatgattatggcgacgcagatcttgagatgaaaatacagggcggaagcgctgccatattgtctttcattcaggggagtcgtgagcgcgttgttgatagttccggggttctggtagagggagagccgcttaagcgctgccagacagccttgcttgttttgcttggctatctggacaggaaccgtggcggtgaggaagaagataaacttaagaagggcgaactcccttacgctgtcaccatgcttatttatgaccttcgaagcccgacaataatttaa

SEQ ID NO: 155347 - DNA, 903 bp, Enterobacter cloacae
atggatgagcgcgaattatctatcattcaggcgatcggtgaagaggtcagggatatcatcaccgctatgaagcttcagcttgaaagagaagtgaagagtctcgtggctgaggcggtgaagggtgctgtagctgaaattccagcgccggtagttcctgaattgccagacgtgacacaactggtcaccgatgcggtgaaggctgctgtagctgaaattccagcgccggtagttcctgaattgccagacgtgacgcaactggtcacagacgcagtgaaggccgctgtggccgaaattcctgcaccggtagttcctgaactaccagacgttacgcaactggtcacagatgcggtgaaggccgctgtggctgaggttcaagcaccggttatgccggagttgcccgacattcctcagttggttgctgatgcagttaaagcagcggttgacgagatgcctgaacctatcaccccgatcgatgggcgagatgctctccaaattgaattagaaccgtgcattgatgaaacaaaatcctacccgcgtggaacatatgcgactcacaaaggaggcctatggcgttcttatcagaagacagatggaatgcgcggatgggaatgcattgtagacggagtggccggggtcaacatccagcaggatgaagaacgtctcttcactatctcacttgaaaaggccagcggagtcgttgaagtaaaaacctttgctatgccggtcaccatttaccgggatgttttcaaggccggtaaagagtatgagcccggagataccgtaacatgggctggttcgctatggcactgcaatgaaaaaactgcagataagcctggtgaaccgggcacaaagggatggacgcttgcagttaaaaagggtcgggacctgagggataaaccatga

SEQ ID NO: 155348 - DNA, 1338 bp, Enterobacter cloacae
atgtggaacccttttagacggaaagagaaagcactacagcaaccaccatccagcgtatggactccccttttttctttcgttcgtgagccatttggtggggcatggcagcgaaatatggaagtcagaaatgaaactgtactttcatactatgcagttttttcctgcattacgttgatagccagtgacatttctaagatgtcacctgctattcagtcaaaggattctaacggtatctggaaggatatttctgatgccagtttcgacactctgatcgctaaaccaaaccagtttcagaacacgattcagttctttgaaacatggatgaactcgaaactttcacgcggtaatacctacgtgatgaaggtaaaaaacaatgcaggcaagattacagaacttcgcattctagacccagataaggttatcccgctggttgctgatgatggttctgtcttttaccagattagccctgaccaaattagcggactacctacacaggttactgtgccggcacgagaagttattcatgaccgttttaactgcctgtttcatccactgattggtatttcacctatctatgcctgtggcctggctgctatgcagggtaagcacattcaggaaagctctgcattcttctttaaaaacggcggtaagcccagtggggtgataaccatcccgggcgctgttgatgctgaaaaagcaaaagaaattaaggcggcatgggatgtaggttataccggtgagaatgcaggtaaaacaggccttttatcaggtggtgctgaatataaagcaataaccatgtctgcagtggatgcacagactgtagaacagcaaaaactctctgctgaaatggtgtgttcagcatttcacgtaccggcatataaggctggcgtcggtgaaatcccaagctctgacaacgtggaggcacttgaacagcaatactactcacagtgccttcaggtgcttattgagtctattgaggcacagcttaaagagaccttcgaacttgggacaaataagcgtgttgaacttgatataggcgcattgctgcgcatggacagcgaacgcaggatgaaagcattaggtgatggagttaaaaacaccattcttacacctaatgaagcacgtaaaagcgaaaaccttcctccaatagaaggtggtgattctctcttcctgcaacagcaaaattatagtcttgcagctttggctaagcgcgacgcttcagaagacccatttggtaaaaacatttctgatcctgcacctcctgcgaaatcagccatttctctggtagaaaaatctttcgtaaaaacttcactgagagggattattaacaatggatga

SEQ ID NO: 155349 - DNA, 1938 bp, Enterobacter cloacae
atgaagcttgaccgcgcatgtacgatcatgacggtgaaagcggtggatgaggaaaaacggataatcaccgggattgcttccacaccatcacctgaccgtgacggcgacattatggaccctgacggcgcgaagtttggcagtgaaaacccatttctctggcagcacgacagatcccagcctatcgggaactgtgctgcaaagaaagtgaaagagggtcttcagattacggcacagctcgtgaagccaacaccggatatgccatcgcagctggtggccaggcttgaagaagcgtgggcatcaataaaatcaggactcgtaaaaggcctgtctattggcttcaagcccattaaatacgcgtatctcgactctggtggcatccattttcttgaatgggagcttcttgaagtctccgcagtaactatcccggcgaacgccgaatgttctattcaaaccgttaaatcttttgaccgccagttactcgccgcgcttggcactgagaaaccggttgttaaaaccacaaattctgctggcgcttcagcaccgaataaatcttctcaaaaaggaaaaccaacgatgaatatcgctgaacagatcaaaagttttgaaaacaaacgtgcggcgctggctggttcacttagtgaaatcatgagcaaagctgccgatgaaggccgaacgctcgatggtgaagaaactgaaagctacgacaacacatcagctgaaatcaaatctgtagacgaacacctgaaacgtctgcgtgatatggaagccaacatggcatctacggctaaaccagtaaccaaagcggccaatggcgaagtaactgttgtcagccaggccccggctatcattcgcgttgagcctaagctggaaaaaggtatcgcgttcgctcgctttgccaaatcactggcagcggggaacggcagccgttctgaagcgctgcagattgcaaaaaatcagtacccagaagacacaaagcttcatcacgttctgaaggcggctgtcagtgctggcactacgacagacccaacatgggcaggcgcactggtggaataccaggattatgcgcaagactttgttgagttcctgcgtcctcagacgattatcggccgcttcggtcagggtaatatcccgtcactgcgtcaggtaccatttaatgtccgtatccctgctcagacttcaggtggttcagcaaactgggttggccagggtaaagcgaaacctctgacaaaatttgatttcgcaacgatcaccttcggtttctccaaagtggcttctatcgcggtgctgactgaagagctgatccgtttctcaaacccttcagctgacgcactggtgcgtaatgccctggcggaagcggtaatcgcacgactggatacagacttcattgacccctctaaagcggcggttgctgatgtttctccagcatccatcaccaacggcattactgcgatcccttcaactggtgacccggatgccgatgcctccgctgcgttcggccagttcatcacaaacaacctgcaaccgaatggcgcggtatggctgatgtccagcactacggcacttactctgtctatgcgtaaaaacgcgcttggtcagaaagagtacccggatatgaccatgctgggcggtacattccaggggctgccagttatcgtttctcagtacgttggtaatcaattggtactggttaatgcgcctgatgtttacctggctgacgatggcggtgttgcggtcgatatgtctcgcgaggcctctctggaaatgcagagtgcgccgacccatgacagcacgacgccaactggtgttgaacttgtatccatgttccagacgaacagcgtggcaatccgagctgaacgctggatcaactggaaacgccgtcgtgatgctgctgtagcagttatctccggcgttgattacagcactggctctacaagctaa

SEQ ID NO: 155350 - DNA, 1659 bp, Enterobacter cloacae
atggctcagtggtctaccgcctgcctcgattgggaacggcgactaattgctggtgagtcaatcatcccgccaccaattttccctgatcaggcagagcaggcgcttggtattttccgtgagctccgtgtttcagacctgcctggtaaaccaaccttcggtgaatgttctgaggaatgggtttttgattttgtgaagtccatctttggtggctacgatgctgaaacagggaaccagcttatacgtgagtatgggttactgatttcaaagaaaaacacgaaatcaactattgctgccggaatcatgcttaccgcgctcatactttgctggcgagaggatgaagaacacctgattctggcaccaacaaaagaggttgctgataacagcttcaagccagcggccggaatgatacgtgctgacgatgaactttcagatatgttccagatacaggaccatatcaggacaatcacccatcggattacaagaaatacccttaaggttgtagccgctgacactgacactgtttcaggtaaaaaatctggtcgtatcctggtagatgagctctggttattcggaaaacgttcgaatgcggaagcgatgtttatggaggctcttggcggccaggtatcacgtaatgaaggctgggtgatctttcttaccacgcagagcgatgaacccccggctggagttttcaaggaacgactggattactggcgtgatgtcagggacggaaaaatacccgaccaaaaaacgctgggcatactctacgagtttcctgaagaaatggtagagaaaaaagcctatctggatcctgaaaatttctacattacaaacccaaatattgggcgctcggtcagtgctgagtggatagccgatcagcttcgtaagaaccaggccaaaacagacggcactcttcagcagtttctggcaaagcacctgaatatcgaaataggtcttaacctcaggactgaccgctgggcaggtgttgatttctgggagcaacaaataaggccggtgacttttaccgatatcctgcagcgtgctgaggttgccactgttgggatagatggcggtggtcttgatgacctgcttggtctttacgtgatcgggcgggacaaaaatactcgtgaatggattggatggggccatgcctgggcgcacgaaatagccgtgcggcgacgcaaaagcgaggaatcacgtttcaacgatttcgttaaggctggtgatctcaccatcgttaaacgtgtaggtcaggacactgaagaggtcgctgaatatgtcagccgtatcaatgatgcggagctgctggacaaaataggcattgacccgtcaggagttggtcagatccttgatgctctcgttgaggctgaaatacctgaagattcggtagttggtgtgagtcagggatggcggctcggtggtgcgataaagaccacagagcgcaagcttgccgagggtgttctcattcatggcggtcagccgttaatgtcctggtgcgttggtaacgcaagggtggaacccaaaggtaacgcaatcctcattaccaaacaggccagtggtaaagggaagattgacccccttatggctttgttcaatgcggtttcgctaatggcacttaatcctgaagcgaagaagaaagattaccaggtatttttcatataa

SEQ ID NO: 155351 - DNA, 462 bp, Enterobacter cloacae
gtgttaacaggacaaaagcgcaaatacgcactggcgcggatgtccggttcatcccaggctgcagcagcccgtaaggccggttattccgagaaaaccgcaaggtcacagggttcacggctggcaaaagacccggatgtcatcgcgtttatcaacaagaaacgtgctgcagatccatatgatgtaccgacccgggatgaaagcactgcaccacctccagtagttaacagcacagtaaaaacctttgaagaccctctcgaatttcttaagtcggtaatgaacgacaccacagaagaaattgacaccagaaaggatgccgccaaggcaatgttgccttatctccatccgaagaaaggtgaggggggtaaaaaagatgcccgccacgccgccgcgaaggttgcagccactgccagtaaattcggtgccatggcaccaccaaagctggtggtcaacaataaggtgtaa

SEQ ID NO: 155352 - DNA, 369 bp, Enterobacter cloacae
atgggtaaactaaagactctacgccctcggttaaagtccattgatacccgacgcattaagccagtgtatggcgagaatagacgaataagcggcagtgcaagggtaggactcaagcgcaggatatatgtccgagatggtggccattgctgcatgtgtggccgcgtagtggatctgcatgacagcgagcttgaccaccgaatagcactacagtttggtggcgataatgagaccacgaacctgtggactctctgtattgagtgtcattctgggaagtcgtcccgtgaagcagcagcaggtcagccagatgccgaggcgctcaagcattcggtgccgtcaggtgaagggcaggccggaatcattgtgatctga

SEQ ID NO: 155353 - DNA, 594 bp, Enterobacter cloacae
atggtggaaacacaagtgaaatttgttgtggttggacatcacaatcgtatggatgcagccaggttgctatgtgacagactcgatgcgcatttgctcattgactacgacgaccatggcgcaaactggaaccatcgtcgtgcccttgagtgggcccaagagcagagatgtcatgttgtcgtattagaggatgatgctctgccggtagatgattttatttctgctgtttacgactggattgagcgttacccggattcacttatcagcttctatctcggcacaggaagaccgcctcagtatcagcttgagattgcatcaaagcttatcgctgctgataaatctagggctgatttcattacgctcacacgactgatacacggcgtctgctactgcgttcctccagggcatatccagaaagtgttggataaatggagccatagtaaagctgctgattatgccgttggtgatgcgcacggaggaccagtcatctacccgtgttattcattggttgatcatgctgatggtcagccggttgagcctgcgcgagataagcagccaagaacagaacgccgtaaagcatggaggttgtatgggtaa

SEQ ID NO: 155354 - DNA, 330 bp, Enterobacter cloacae
atgaaatatcaactcgcaaaattgtatcgcggcggtaaattttttggttatggcatagctgtatgcgggatacttcttgatagccaggtttcaactaccgtagagactgcgcccaatgaggtacctacagttaaagcaatttttaatctccttaatgagcactctgaataccagccgagtattgatttggataatccaagttacgatctaaatttagtgattcgtccaaataagccattaactgttaaacaggtagaagaattacgggatgtggtgaattcctttgtcgccaagcacaatctgcacgaaggctgcgtatggaagtgttga

SEQ ID NO: 155355 - DNA, 246 bp, Enterobacter cloacae
atggctgaaatcacggtaacacctgcccagcaaatccgcttaaacctgctggcgaatcttaactatgacactgccgccgctgcagacgcgattaagtttgttggtgatgatcccctgaagtatcaaatcttcgtaaaccagttaagccgggtaacttctgaaagcgggctggtggccagaacgacgaaggccatcaaagagtcggaagaagcgctgctgctgtttgaagctgaatctggttcgtaa

SEQ ID NO: 155356 - DNA, 195 bp, Enterobacter cloacae
atggcaagcatgcctggctccgttcatcacgaagggaaagactggtacccgttctcggtaaacttttccgatgcagatggccgttctttctccttcaccatatacgccgtaaaccgagagcatgcctcctatgttgtccaggagatacgcgagacggccaccctaggcgatcagattgatagcatcgtcaaatag

SEQ ID NO: 155357 - DNA, 486 bp, Enterobacter cloacae
atgccagaactcgttgatccaacagactcattagttagttttcagcacgctttttctaatggcttgattaaaccatcaccatgtgtagttcacccagaaatgaaggtacttttggatgacgccgagggtaccccaaggtttacttatgcattctttcaaggagaaactgttaaaggtgttgctgtctatgtccctgcagagcttgtagaaggtaagccatgttttggcgttggctatgcagtaactgatgaatataaaatgcgaggcattggcactcaacttctcatcgccagcatcgaagaaatgcaatacggatttagaaattccttcaaagaattctatgtagaggctattgtcggagttgataatcaggcctcaaacaaattagctgcaaaagttttatctgatacacctgagccagggaaagactcttactctggaaaaccgatctatcagtacatgaagcttttcaaaaccacaaagtaa

SEQ ID NO: 155358 - DNA, 306 bp, Enterobacter cloacae
atggtaacaaatgatccaactgcaatcgtcaacgcaggtatatgtgcggtgatcgttcttgtccttatgttctatcagcgcggtggctcccgtcaccgacctcttatttccctgatggcttacttttcggtactggtttatgccagcgttccattccgttacctctttggcttataccaggagtcacactggtttgtggtggtagtcaatcttctgatatgcgccgctgtgctttgggcacggggaaacgtggcgcgccttattgacgtgctgaggcagcctcatgaccaaagacgaaatttttaa

SEQ ID NO: 155359 - DNA, 396 bp, Enterobacter cloacae
atgtccgatcctgttactggcactactatagcggctggtggcctgatgggtgccagcttgtttggcctggctactggcattgattacggcgtggtatttggcgcttttgctggtgctgttttctacgtggcgacggcagttaacatcagccgattaaagctggtgggctacttcattacgtcattcatcttcggcgttcttggcgctccgctggttggctccttcttctcaagatggaccaactatagtgacaggccgcttgatgcactgggtgcggtaatggttgccgccgtggcaatcaagttgcttacgttcgtcaataaccaggatttgggtagcctgtttggaattctctctcgtttacgtggaggaggggccagcaatggtaacaaatga

SEQ ID NO: 155360 - DNA, 972 bp, Enterobacter cloacae
atgaagacggcagaagcagcaaagggtcagtgggccatgatttttgagcattacggactgccgccgatcaccggtaaaaaccacttcaggggaaaatgtccgctgtgtgattcgattggtaaattccgaatcgatgaccgtgacggcgcgggaacttggatctgcacctgtggctgcggtgatggacttaagctggttaccgaaacccagggaaaaccattcaacgaggtttgccgcgaaatcgatgagctgatcggcaattcattcactcgagtaaaaatgcctgtcacaagtagtgctggaagtctgcgcaaaagggtgctcagcaagttcactaagcttgcaccgttgcgagggacttctggtgccgactatctcaacgctcgcggcatatatcagatgccagccgaagccatccgctttaacgataagcagcggcatgatggcaaggtttttcagtccctctattcgctcgccaccgatgataagggtgagctttgttacttgcatcagacactactcaatggggcaaaaaaggcggacatcggagccagcgccaagcgccagaaatcactacaggaagataattatctggatcacgctcgttcagtcgcgattcgaatgttcccggtagcaagcactctgggcatcgccgaaggaatagaaacggcgttgtctgcgtaccaaatttataaagtgaatacctgggccactatgacagccaatttcatgaagaaattccgcgtaccggctggagtaaagcacctgattatttttgctgaccgtgacgagaacagcgccaccgggctggcggccgcatatgaatgtgcgcacgcgaacctgctggcgaaaaatgacctacagcgtgtgagtgtctactggcccgatcacgatgattttaacaacatgctcatgaacggcgatcaggttcgtgaattggttttctataaaaaacagcaggtggccgcatga

SEQ ID NO: 155361 - DNA, 1617 bp, Enterobacter cloacae
atgcagctgacgatcacaccgaattttgcacaggaacgagcacttaaccagctgcgccgtaactggaaggatacagaaaccttcatggtgtactcgccgacgggcagcggtaaaacaggactggccgccttcatcgttgccgggttcgttagtcgtggcatgcgggtaatgttttgcgcgccttaccagatcctcataacccaaaccgcaaagcgttttgtggagtacgggttgccgggtgatgaaatcggctatgtctgggcggatcacccaaactacgatcctaccctcaaaatacaaatcgccagcgccgatacgcttattcgtcgcgtgtttcctgacaatatcgatctgctgattatcgacgaagctcacctgcgaaaaaaacgcatcctgcaggatatcgaacgcctgcgcgaaaaaggcgtgaaagtgatcggcctgtcgggtacaccgttttccccgttcctgggcaaatactatgaccgactgattaagccaaccaccatcggcgagctgatccagcgcggcgacctgagcaaatacgaattttacgcgcccacaaagccggatctgaaaggggttaaaacctctccgtccctgcagtacggtaccgactacaacgaggcgcagctggcggagatcatgtgcggttccacgctggtgggcgatatcgtccaaaactggctggagaacggccgggacctgccgacaatcgcgttctgcgtcaacgtagaccacgctaattttctgactattcagtttaaccaggctggcgtaaatgcagaggttatgactgcagatacgcctgcggaagaacgccaaaccatcattcaccgcttcgaaactggcgccacaaaaatcatcgtcagtgtaggggtgctggttgccgggttcgacagtgatgttcgctgcatcatctacgctaggccaactaagagcgaaattcgctggctgcaggcgctcgggcgtggcttgcgcaccgctccgggtaaagagtcctgcctcatcttcgatcacagcggcaccgttcaccgcctgggttatccagactctatcgaatatgacgatcttccgggtaaatcagacgggatggaggagggcgcacgccgcgcaactgaggagcgagcagagaagctgccacatgaatgctctcaatgccattacatgaagccagcaggcgtctatgtctgcccgaaatgtgggcataagccgctgggaggtgaggacgtcgataccgacacagggcgcaaactcaaaaaactgggtaacgagcagcgccagccgacgaaggcagagaaacaggcctggtggagtcagatcaaattctatcagcgccagcgcatatcgcaggggaaaaagcccgtgaatgatggctggtgcgcgaacacctatcgcgaaaggttcgacgagtggccgaacggcctgagtgattacccgatggaaataacacccaccgtctctaatttcatccggcacaaattgattgcgtatgcgaaagggcaggagaaggcaaaacgtctgcaggaggctctgaaatcggagactccatcttcagtacagcatgcacggaaagcgattagcaatatcagacagcaattagggaaacgagtatga

SEQ ID NO: 155362 - DNA, 543 bp, Enterobacter cloacae; identical to SEQ ID NO: 118929

SEQ ID NO: 155363 - DNA, 282 bp, Enterobacter cloacae
atgggccatagtgttggtaattgtggggagtatggcttttgtggtgccaatgttcctattccttgctacacctgcatgcatttccagccttggctggatggcccccatgacgatgtctatcaggggctgctcaacgaacgtgaacgggtgaaagagataaccggcgacatccagattgctgccgtacttgatcgcagcattatcgcggtggcagatgtgatcatgcgttgtgcaaaacgtcgtgaagagcttcgtccacagggagcaatcgccaatggctga

SEQ ID NO: 155364 - DNA, 2034 bp, Enterobacter cloacae
atggctgagattttccagtttaagccaaaggctacgctgacagcagctgaaaaccttcgagtattcatatccaagtgccgagatcaattgactgtattcggctccgatttaaattggggggcacctgtttggccaaacataattgtatttgccaagttaggcatgactacgcgaaaacctatacagggagaggtacaagaccctgctttcattgattttgccaaagcttatttccgttaccagcaggggcatcatcccacgggagcaaagaatgaaagtaaggctttccgtacagtcgaggcggctttacttcaagtcaatgggaatgcaaatattaatggcctttcgatttcagtactggatgaagcagccgagttggcaaggcagcactactccgatggctcagcatatcattgtggtcgagagattgagcggctggctaagtttgtcgtcgaaaaccagcttgtatcatgtgctgtgcaaaattgggtcaaccccattaagcgtgcagacgacaagaacaaaacaggtagagaggcgaataaaaatagggaagagaaactaccgagtgatatcgctctcaatgcgcttgcggaaatttttgccaatgatccaatagacggaagagacatatttacaacatcggtatttgccatgctgatgtcagctccttcacgcatttctgaggtgttagcacttcctgcggattgtgaggtgttcgaaacggaccgcgatggtatagaacgctatggttggcgtttctttgccggtaaaggctatgagggagacatcaaatggatacccacagtaatggtcagcgtcgctaaaacaaccgtagccagaattaaaatgttaactgagaatgctcggcaactagctaagtggattgagtcacatccgaatagattttaccgccatgctaactgccctgatgtcgccgatgatgagcctttgacgatagagcagtcatgtatggctctcggtcttgtctctgaatccaaaaaacaatgccgttcttctctttataatcgagggttggcccataaagatggtgttcatacactaaaaagcttgtgggagcatacgttggcgcgtttgcctgatgacttcccgtggtttgataaagacaagggaattaagtacagcaatgccttgtttgcgctgaatgcaaatcagttccacggtaacagaggatgcctaccagtagaattgcataagccaaccaataatttcttcaacagcgatctaactcctcgtcttgctttgaaaggaaaacacaccagtatctttgatcgccattgttaccatgctgtaaacggagaaccggtaaaactgacctcccaccaggctcgacatctactcaataccattgcccagcgcggcggtctgtcaaacctggaaattgccaagtggtcggggcgggcagatgtgaaacaaaatcgaacttacaaccacatgactgaatatgagctggttggcatggctgaacgcctcgattcctcaaaagctctatttgggccggcaggcgaggtggcgaagcactttcctatgactatgctggagttcagtaccttagagcatgccgcagtccatgtgacggagtatggctactgcgtacatgattacaccatcggtccttgcgagaagttccgagattgcatcaattgtaccgagcaggtttgtatcaaaggcgaggatacagaaatattggatcgaattaagaaacgtttggtgacgttagaacaaatgctttgtattgctgatgcagcggtagaaagctgcgagatgggggctgatcgctggtatcaataccacaagaaaactgtcacccggcttcgtgagctagtcgctattttagagaatccaggcattgaaaatggtgcccagattaagctccggggcaatgatttcagccagcttcgccgtgttgtcgcaaagacgtctattgaggccatcgagcaaaaaggcaaagaaagtgaagaagctgtgatgttagatgatttgacaactttgttaggaggtggccttggctaa

SEQ ID NO: 155365 - DNA, 4764 bp, Enterobacter cloacae
atggtcaaaccaaactgggataattttaaagctaaatttaatgagaatcctcaagataattttgagtggttttgctacttgttgttctgtcaagagttcaaaatacccgcaggtatatttagatataagaatcaatctggtatcgaaactaatccgataaccaaagataatgaacttatcggttggcaagctaaattctatgacacaaaattgtcggataacaaagctgatcttatagaaatgattgggaaaagcaaaaaggcttatccaggattaagtaagatcattttctataccaatcaagagtgggggcaggggagaaagtcccatgaacctgaagacgagaagagtgctgataattatctggaaaatatcggaaatagtaacgatccaaaaataaaaattgaagttgatcagaaagcatatgagtcgggtatcgaaatagtatggagagttgctagtttttttgaatcaccgtttgtaatagttgagaatgaaaagattgcaaaacattttttctccctcaatgaaagcatctttgatttattagaagaaaagcgcaagcacacagaaaatgttttatatgaaattcaaaccaatatagatttcaaagacagaagtattgaaattgacagacgacattgcatagaaattctatatgagaatctagttcagaaaaaaattgtcatcgtcagcggagagggtggagttggaaaaacagcagttatcaaaaaaatttatgaagcagaaaaacaatgcactcctttctatgtctttaaggctagcgaatttaaaaaggacagcattaatgagctattcggtgcgcatggcttagacgatttctctaatgctcatcaagacgaattacgtaaagtcatagtcgtagattctgctgaaaagcttttagaactgaccaatatcgatccttttaaagaattcctaactgttttaataaaggataaatggcagattgttttcacaacccgtaacaactacttgtcagatctgaactatgctttcatagatatttataagataactcctgagaacttagtaataaagaaccttgaacgcagcgagctaatagagttatctgataataatggatttagccttcctcaagatgttcgattattagagctaatcaaaaatccattttatctaagtgaatatctgaggttctataccgatgaaagtatcgattatgtgagcttcaaagaaaagctttggaataagattattgttaaaaataaaccttctcgagagcagtgtttcttagcgactgcttttcagcgggctagcgagggccaattttttgtctccccggcatgtgatacaaaaattttagatgcgttagttaaagacggagttatcggctatgaagctgctggttacttcattacacatgatatatacgaggaatgggcattagaaaagaaaatttccgtcgattatatccgtaaagcgaacaataatgagttcttcgaaaaaataggagaatcacttcctgttcgccgtagtttccggaattggatatctgaacgattgcttttagatgaccagacattaaagccttttatcgccgaaatagtctgtggggaaggaatatcaaaattttggaaagatgagttatggatagctgtccttctttccgacaactcagatatgttttttaatttctttaaacgatatttacttggtaatgaccagaatcttttaaaaagactaactttcttacttaggcttgcttgcaaggatgttgattacgatctcctgagacagttaggggttagtaattctgatctgctttccattaaatatgttcttaccaagccaaagggaactggttggcatagtgtgatcaaattaatccatgaaaatttagatgaaatcggcgtcagaaatattaattttatacttccggtgattcaagagtggaatcaaaagaacaaagtgggtgaaacgactcgattatctagtttgatagccctaaaatattatcaatggactgtagaggaggatgtctatttatccggaaggggtaatgagaaaaatattttgcatgcgattcttcatggggcggccatgattaaacctgaaatagaagaggttttagttaaggttcttaaaaataggtggaacgagcacggtaccccatatttcgatcttatgactttaatccttacagacttagattcacatccggtttgggcatctctcccggaatatgttctacaattggcagatctgttctggtatcggccacttaaagaaaaaggcgaacgttatcaccgtatggatattgaagatgagttcggtctatttaggtctcatcatgactattatccagaaagtccatatcagactcctatatattggttgctacaattacagttcaaaaaaacaatagatttcattcttgattttacgaacaagacaacggtatgttttgcacactcccgctttgctaaaaacgaagttgaagaagttgaagtttttatcgaagacgggaagttaataaagcaatatatatgcaatcgtctatggtgttcatatcgaggcacacaggtctctgcctacttactctcatcaattcatatggctttggagaagtttttccttgagaaatttaaaaatgcagactcaaaagtactggaaagttggcttctctatttgctgagaaattccaagtcagcttctatctccgcggtagttacgagtattgtacttgcatttcctgagaagtcattcaatgtagctaaagtgctattccaaacaaaggctttcttccattttgatatgaatcgaatgattctagacaaaacacataaaagttcattaatctcactgaggaatagctttggcggtgcaaattacaaaaacactttacacgaagaagataggattaaggcttgtgatgatgtccacagaaataattatcttgaaaatctagctttgcattatcaaatattcagaagtgaaaatataacggaggaagttgttaaggaaagacaacaagtactttgggatattttcgataaatactatagccagtttcctgatgaatcacaagaaacagaagtcgataaaacgtggaggctttgcttagcgagaatggatcggcggaagatgaagataactactaaggagaaagatgaagggattgagatattattcaatcctgagatcgaccctaagctaaaacagtatagtgatgaagcaatcaagaaaaattccgaacatatgaagtatatgacgctgaagctatgggtaagctataaaagagataaggatgaacgtcacaagttgtatgaaatgtatgagaataaaccgcaggttgttttacaagagactaaggaaataatgtgtaagcttaatgaaaacagtgatgacgatttccgccttttaaatagtaatataccagcggatgtttgttctatattgctattagagcattttaacgagctagcatatgaagaaagagaatactgtaaagatattgttttagcgtattcaaagttgcctttgtcggacggttataattatcaggctcttgatgggacaacctctgcaatttcagctttatctgtagtttaccataattacccaatggaaagggatactatcaaaataatattactattaacgttgtttaatgattatcctactggaatgttagggggacgttactccgtatttcctagtatggtgattcataaattatggaaagactattttgatgacatgcagtctttattgtttggttttttgattttaaagccaaagcatgtggctctcggaagggaaattattcatgaaaggtatcgacagggcgactatgatatcaaaaaaacgaatctcaatgagaggttcttaaatgattatggacaatgcatatcaaatgtcattggtaataaaatttctatagatcatttaggagatatggaaaaggttgaactacatattttgaatactgcttttcatttgatcccaattaatactgttaatattgagcataagcaattggtatcattgattgttaaacatttttctacaagcctattatcgagtgatcgggaggatagagtagattacgctgtacggcactcattcttagaaagatttgcctattttacacttcatacatctgcgagtgaactccctgattatttaaaaccctttcttgatggtttcaatggttctgaacctattgcagaattatttaaagaatttattcttgccgaagatcaattaaatacttatgccaaattttggcaggtttgggatttgttttttgataaggtggttactttgtgcaaagatggagataggtattggtatgttgataaaattctaaaaagttatctttttgctgaaacttcttggaaagaaaattctaatggttggcacacatttaaagatagcaacagtcaattcttttccgatgtttctaaaactatgggtcattgcccttcaactttatactctcttgctaaatctttgaataatattgctggttgctatcttaatcaaggtataacctggctttcagggatattgtcggctaataaagagttatgtgaaaagaaattggagaatgatacagtttattatttagaatgtttggttagacggtatattaacactgagcgtgagcgaattagacgaacaaaacagttgaaggaagaggttttagtaatattagagtttttggtggaaaaaggatctgttgttggttatatgtcacgggaaaatattctttga

SEQ ID NO: 155366 - DNA, 525 bp, Enterobacter cloacae
atgtcagagaaaaacattaagttatccgaccgcgcgacagatgttttgtatgctctgtttttccgtggtgcgctgcaaagtggcaacctgccatctaaatctggtgtaacacagctgcgcgacctggggttagctgaaacccggcatactgcaacgccatatcagggggaaaactattttactttccttactgctgaaggccagaagtttgccattgagaacctggtcaaaactcgctttggtgtgcctgttggtggttaccttggggaaacttcaggcaagctgtactctgccggtattggcatcagtattgaaggtgatcagcgcaaagtagtgtttgaggctgaccgatttaaggtgaatgaagctgctcaatcagccatcaagaacgctgcggtttgtagcgggaagataacggtatcggctgtgcttagtgatgaaatgaaacaggcagtgaatgatgcagttggcgatgctatccgcaacatgctgaggcctggcggtctgctctatggtaagcgctaa

SEQ ID NO: 155367 - DNA, 321 bp, Enterobacter cloacae
atgctgctgtgttcacattcaatcgcgggtaagtttgcataccccccaaaaatagagaatccgatgagcgaagctaaaccacaggacggaagcaccgttaagggctaccgcgaactctcttacggtgaaatcggcaagatgaaccagttcaaggacatcagccgccagttcatcaaattgcttcgcgaacaaatgtgcgacatccctccgggagtcgacagctgggaagcccaggagtggataagacaggctgaatacgacatgaaacgcgcatgtatggctgcttgtcgagccgttgctcgtccagattccgactgttaa

SEQ ID NO: 155368 - DNA, 1236 bp, Enterobacter cloacae; identical to SEQ ID NO: 28546

SEQ ID NO: 155369 - DNA, 699 bp, Enterobacter cloacae
atgacctaccgcatcgccaccggtcgcgacgctggccgcaaggtcgtcacgctgcaaacattgcccggtgacgcaggctcgctggagggcgacgccggcaaggtcggcggcttctcgctgcatgccggcgtggccgcggaagcacacgaaagccacaagctcgaaaagctgtgccgctacatcacgcgcccggcgatcagcgagcagcggctgtcgatctcaccgcagggtagggtgcggtatcagctcaagacgccgtggcgaaatgggaccacgcatgtcgaatgggatgcggtggacttcatcgccaagctggcggcactggtcccgccacctcgcgcgcatctcacccgcttccacggcgtattcgccccgaatgcaaacctgcgtgcgcagctgacgccctcggggcgcggcaggcggcctgcgggcgatgcggtgccggttgacgcaagcgcccacgacgagccgcgcagccccgagcagaagcgccgtgcgatgagctgggcgcaacggctcaagcgggtcttttccatcgacgtcaccacctgtgcccactgcggcggcgcggtgcggatcgtcgccagcatcgaagaccccaaggccattcgcgccatcctcgcccacttcgagaaacacggcgcgctggagcaagcgcactaccggcccgcagcgcgcgcgccgccgccggccgcgtga

SEQ ID NO: 155370 - DNA, 246 bp, Enterobacter cloacae
atgccgtcgtcgctacccgcgctgtgcctggatcgcgccgaccagctggtgaccagcaaggacggcacccgcctgttcgccatccagggcgacgcgcagtccgaccaccgccgcattgggtcactggacatcgccagtgccagccggcaaccgatcgaagccagcagccgacaggcgaccggcggcggcgaagcggcgatcaacctgccgcaggccagccagcagcagacgccgcgcgagttctga

SEQ ID NO: 155371 - DNA, 348 bp, Enterobacter cloacae
atgctggagcgtgccgtgaaaagctggatttttcttgctgttgccatcgtcggcgaagtgatcgccacctctgcgctgaaatcgagcgaggggttcaccagactgattccctctgccatcgtcgtggtcggttacgcggtcacgttctattgcctgtcgctggcactgaagacgattccggtcgggattgcctacgccgtgtgggcggggctgggcatcgtgctggtggccggcatcgcctgggccatgcacgggcagacactggatgcctgggcggtcgtcggcattgccctgatcgtgtgcggggtggccgttctcaacctactgtcgaacgtgtccgcgcattag

SEQ ID NO: 155372 - DNA, 1530 bp, Enterobacter cloacae; identical to SEQ ID NO: 28545

SEQ ID NO: 155373 - DNA, 1638 bp, Enterobacter cloacae; identical to SEQ ID NO: 28544

SEQ ID NO: 155374 - DNA, 393 bp, Enterobacter cloacae; identical to SEQ ID NO: 28543

SEQ ID NO: 155375 - DNA, 903 bp, Enterobacter cloacae; identical to SEQ ID NO: 28542

SEQ ID NO: 155376 - DNA, 1470 bp, Enterobacter cloacae
atgaaaatgacacgcttagaagctatcaaggcatggggaagagcaagccgagaaggtaagccaattcccgaagaggtcagagaagttctgatcagcacccaacaaaatgatagtagccatgatttccatgtagaacccactacagctaaagttagagttagcaaagagcaagtaaaaaagaatattaacggtaagaaaccgttaactgcgcctgcacctatccgtagcgtaggaggttatttaactcctaaagaaatggaaacttacaaccaaaaacgcaagttaaataatcaaaaacgtaaaaataaacctttactttattcagatataatgcttgaacttcttgcatctggtttgtcaaaaaagcaagcgacgaagaaagcaaaagatattattcagcgtgaaacacttgagcgactcaataacaaaaaaagtaaacctgtggctaaagtatcactttcatccaaatatagagctattcgtaatgagaaaaagattaagtctgatccttggcacatagcgaaaacgaaacaggacgaaataattcaagctaaaaacgaacaaaaaaagctagaggcggatcttataagtcgccgtatttcatgtattgaatgcaaggttgattttcaatcgcttggaggatttgcagaccatgctagagatgttcatcatgcaagcataagtacacctaagctaattgtagaaattgaaaaacctattgccaatgctgattttttaatcggggtgcctgtattatcgtctactgaatcagtagaggaagttgtttctattcctgttgccaaaactccagaatcctttagtgataagtggctcagattgtttgcagaaaaggggtacaccgttgctatggttgatgctttcaaacgagaagcaactaaacaaggtatggatgtaaaagaggcacatgaatttcttagtgtctgtaagccgtcaaaacacctcacaggaatacctgtacgccctttagaagtgattcttcctcctgaacaaccgaataccattataaatcccgtagaaacgcttgtaaattcagttgctaatgctccttcttacgctcccgctctatctgaatctattgagcaagcgttgttcgcagatcgtattgttcgtacccgtaccaatcagaacgattttaaagagcgtgtggccgctaactttggttatcgttgtgccataactaatagcggagaagcactagaggccgcccacattgagccagttggaacaggaaataataatacttctaacggattattgatgcttgcatgtttgcatcgcctttttgatgctgatttaatggctattaatcctgacttactcactgtacatttcaaacctgattgcacatactttgctaaaagtatattggaaggtaaaaaaataaatgctcactcagttcctttgaacaaatcgggattgctagaacgctggcttcgctttgatgtctaa

SEQ ID NO: 155377 - DNA, 519 bp, Enterobacter cloacae
gtgaaccagacgctcgatgcccgaaggcaggtcgagcgtctgccacgctttgaggcgttcgatgtgttccagcatgtgccgcgagtttggcttgacgggcgactggcgcagccaagccagccaggtcgtcttgccgttatcgcggcgcttgagcaggtcgtcgaggcggcggcgatgcgcgtccgacagcggttcggccaaggcatcgtagatgcgccggttggcacgggtgattgcctcggcgctcgcccgctcgacggcgttgagggcaggcagaatgaccgactgccgccgcagatgttcgatcaaggcgctggccagcacgatgcctttgtcggtctgcatggccagctcggtcagcgtgtgcacggcctgccggtagtggctcatggtgaacggctgaaagccgaacaaggcttgcagctcgaccaggtgctcgcgccgggtctgctcccgctgcccgtactcgtcccagttttcgatgccgaccttgagttggtcggcgaccagtttcagtaa

SEQ ID NO: 155378 - DNA, 1911 bp, Enterobacter cloacae
atgagtactgaaatagcagttggtgggtatcttctttctaaggcagatatgctcattgatgagagtattaaggatggttttaaatctttgatgaccagtttattaaaagaaaaatgggtgcataaatcaaagaaaggtaatgaattaatttctaaaatcctcagcgaggatgaggtgtataatggatttattaagtcgcatataatggagagtttgtttataaaaacaatcgacggtaaaaataaaaacgtttttgtagatgacatatacatagaatctcaaatagaatgcattgatgatggtcagtcacttaattctaaggaaattattgaattagcaagaacagatgctttaaatattgaaggcatcgcagggcaagggaaaagcacatttttaaggagattaatgcttgattgtattaatctacgtacgcatctacctatttttgtagagctccgtaaattaaaagatgagcaaagtattataaatgcggttgtttccgtattgagggtcgcagggcttgatgcagatgtagaaaacacacagtcggcccttatgagtaaaaaaatccttcttttattagacggttatgatgagatccaaaatgaagatagagaaagaatattcaatgaaattgaagagttaaaattgaaatttaaaacccctttaattataacctctcgtccagatacggcaatttgtaacagtacccttgttaaagggttaaggattaaaaaccttactcgatcaatggccttagatattattaaaaagcgtatggatgaagataactacagtaaagctaaagaggttttagaaataaatgaaagattatttgattcacttatcacacctatactggtttctctattttgtgccagttatccagaaacagattttatcccgaaaacggccagcgattattattcacgaattttcaatatcttatatgaaggccatgataaaagaaaattgttttacaaccgcgagaaaaaacttaacttacccactgatttagccaagaaatcattcatggctctatgttttttatgtttttccgcatctaaactatctctttcaagagaagaaattcttcatgaaatccatatgtcacttaaaagtgttggtaaagaaaatagtttagaaaaccgcgagtgttttctcgaagatctagttaatgtaacaggacttatcaattctgatggttttgaaaactacacatttattcatcgatcaattatggagtaccatgcctctgtatatattaaaaactcagagaaaaaagcttcataccaaagaaaaatatgcgatgaactattgaaatataatgatgagttcgttggtttgactgagtttttatatgaaattgatcatgagtcaaccctaaagaatatttcaattccaatattcaatcactttgggtttgacgcgaactctgaagtaactaatgagcaactagatatgatttataattctataataggtgaagctagaattggcatgattttttatggcgaaagaacccaccataaagataacaaaaaaattcaagagtcactttttatcaataaagttgatcagtttaatgacatttcatttgtcttcaatgtttttgtcgccgataaccagcataaaattaaaggttttaatgatataacgcaagatgtaatctttaactcaccggctaagcgtgcctatatttccaaccacgcaaagaaagtaaaaaatcatgaggttgaattctcaagcgataactctacatctcttccaaacctaatttctgatatgaacttgacagatgatcttaaaaaggcatttttaacagaagtaaaaaaaattaagaacatacataacatacttgtaaataagttgaaagttatttctgattcggaaagctatttctccttataa

SEQ ID NO: 155379 - DNA, 543 bp, Enterobacter cloacae; identical to SEQ ID NO: 118929

SEQ ID NO: 155380 - DNA, 639 bp, Enterobacter cloacae; identical to SEQ ID NO: 152722

SEQ ID NO: 155381 - DNA, 285 bp, Enterobacter cloacae
ttgcagacgaataacgctttccagatgagagcctaccggatgctggctaccccgacgccccagcaccatgagacgaaggtcgctcagctcagccagaatttcatccggtgtaccgtgtttttgcatcaaaagcacatcctggcttccctgtttttgaagcagttcagcacaactttccagtattgttttcccctgcgccatcagcaggcgattacgttgcccttcgatttctaccagctcatcggtcagcaattgctgactgtctatgccgagagtgccggttag

SEQ ID NO: 155382 - DNA, 1479 bp, Enterobacter cloacae
atgttgctgtcctcgacgcgtaaggactggctgggtaacgtccgtggtgacgttctggccggtattgttgttgcgctcgcacttattccagaagcgatcgccttttccattatcgccggtgtcgacccccaggtggggctctattcggcgttctgtattcctctcgttatggccttctttggcgggcgtccggcgatgatttcttcatccaccggtgcaatggcgctgctgatggtgacgctggtgaaagatcatggcttacagtatttactggctgcttccatactgaccggggtattccagctgttagccggttacctgaagctcgggggattgatgcgttttgtttcacgctcagtggtcacgggattcgttaatgcgctggcaatactgatttttatggcgcagttgcctgaactgactaacgtgacctggcatgtttatgccttgactgcggcagggctggggatcatctatctcttcccttatctcaacaaaaccattccttcaccgcttgtgtgcatcgtggtgctgaccggcattgccatgtggctgcatctggatgtgcgaaccgtcggggatatggggaaacttcccgacagcctgccggtcttcctgctcccggacgtgcccgtaaatctccagacgctgctcatcatcctgccatattctgcggggcttgccgtggtgggactgcttgagtcgatgatgaccgccacgattgtggatgacatgaccgacacgccaagcgataaaaacagggagtgcaaagctcagggcatcgcgaacatctgcacatcctttatcggaggaatggcaggttgcgcgatgattgggcaatccgttatcaacgtaaaatccggtggccgcggacgactttcaaccctcacggcgggcgtggtgctgctgtgcctgattgtgttcctgcgtgactgggtctcccaaatcccgatggcagcgctggtcgcggtgatgattatggtttcaattgggacattctcatggcgctccattgctaacctgcggacacacccccgttctaccagcgtggtcatgcttgctaccgtcgcggttgtggtggcaacacataatctggccttcggcgtgctgaccggcgtactgattgcttcgctgaactttgccactaaagtctccaggttcatgcgcgtaacctcagttccggaggggacgagccggacgtataccgtcaccggccaggtattctttgcatcagcagaccgctttaccagtcactttgatttccgtgaagcgattgagaatgtggtgatagacgtttcacatgcccatttctgggacataacgtccgtcagcgccctggataaagtggtcatcaagttccgcagagagggcaccggggttgagatacgagggatgaatgaagccacccgcaccatcgttgaccggtttggtgtccacgataaacctgaagaagtcgaaaaactgatgggcggtcattaa

SEQ ID NO: 155383 - DNA, 969 bp, Enterobacter cloacae
ttgaaggatcagatcacgtatcttcccgacaacgcagaccgttccgtggcaaagcaaaagttcaaaatcaccaactggcccacctacaataaagccctcatcaaccgtggctccataactttctggctggatgatgaagctattcaggcctggtatgagtcagcaacaccttcttcacgaggcagacctcagcgctattctgaccttgccatcacgactgtgctggtcattaaacgcgtattcaggctgaccctgcgggctgcacagggttttattgattccatttttacactgatgaatgttccgttgcgctgcccggattacaccagtgtcagcaagcgcgcaaagtcggttaatgtcagtttcaaaatgttcacccgaggtgaaatcgcgcatctggtgattgattccaccgggctgaaggtctttggtgaaggcgaatggaaagtcaaaaaacacggcaaagaacgccgtcgtatatggcgaaagttgcatctggcagttgacagcaacacacatgaaatcatctgtgcagacctgtcgctgaacaatgtgacggactcagaagccttcccgggtcttatccggcagactcacagaaaaatcagggcagcatcggcagacggcgcttacgacacccggctctgtcacgatgaactgcggcgtaagaaaatcagcgcgcttatcccgccccgaaaaggcgcgggttactggcccggtgaatatgcagaccgtaaccgtgctgttgcgaatcagcggctgaccgggagtaatgcgcggtggaaatggacaacagattacaaccgtcgctcgatagcggaaacggcgatgtaccgggtaaaacagctgttcggaggttcactgacactgcgtgactacgatggtcaggttgcagaagctatggccctggtacgagcgctgaacaaaatgacgaaagcaggtatgcctgaaagcgtgcgtattgcctga

SEQ ID NO: 155384 - DNA, 1479 bp, Enterobacter cloacae; identical to SEQ ID NO: 155382

SEQ ID NO: 155385 - DNA, 285 bp, Enterobacter cloacae; identical to SEQ ID NO: 155381

SEQ ID NO: 155386 - DNA, 285 bp, Enterobacter cloacae; identical to SEQ ID NO: 155381

SEQ ID NO: 155387 - DNA, 456 bp, Enterobacter cloacae
atgcgacagcagttgttcgttgatcttcacccctttacgcttcagggcatcgaccgctctttccatatagacggtattccacagcgagatagccgccgtcagcagcgtcagtccactggcgcggtagctatgattttccggttttcggtccctgatttcacccagccgatgcaggaataccgcacgcgccagcgcgttacgggcttctcctttattcagccccgcctgtacccgccgacgaagtgccggatcgcggaaccagtcgagcataaacagcgttcgttcaatacggccaatttccctcaatgccttggcaagtccgttttgcttggggtagctggcaagctttttcagcatcagggatgccgtcacggttccctgctttatcgaggttgccagacgcagcacttcacgccagtgaatttcgatctctttcagattcaggctggttgttga

SEQ ID NO: 155388 - DNA, 1908 bp, Enterobacter cloacae
atgtcctgggatgctttcgccgagagcgtcaccgaggcgcagaagctcgcgcagcccgatgacttcgattttctgcatcgcatcggcgagagctacgccactttgcgccgttacgcgccggaatttcttgctgtgctcaagctgcgggcggcgcccgctgccaagaacgtgctcgatgccatcgaggtgctgcgcggcatgaacaccgacaacgcccgcaaggtgcccgccgatgccccgaccgatttcattaagccgcgctggcagaagctggtgatgaccgacaccggcattgaccggcgttactacgaactgtgtgccctgtcggagatgaagaacgcgctgcgttccggcgacatttgggtacaaggctcgcgccagttcaaggacttcgaggactatttggtgccgcccgcgaaattcgccagcctcaagcagtccagtgaattgccgctggccgtggccaccgactgcgatcagtacctgcacgagcggctgacgctgctggaaacccagctcgccaccgtcaaccgcatggcggcggccaacaacctgccggacgccatcatcaccgagtcgggcctgaaaatcacgccgttggatgcggcggtgccggacaccgcgcaggcgttgatcgaccaaacggccatgatcctgccgcacgtcaagatcaccgagctgctgcttgaagtcgatgagtggacgggcttcacccggcacttcacacacctgaaatcgggcgatctggccaaggacaaaaatttgctgctgaccaccatcttggccgacgcgatcaacctgggcctgaccaagatggccgagtcctgccccggcacgacctacgccaagttggcttggctgcaagcctggcatacccgcgacgaaacctattcgacggcattggccgaattggtcaacgcccaattccagcacccgttcgccgggcactggggcgacggcaccacgtcatcgtcggacggccagaacttccgaaccggcagcaaggccgagagtaccgggcacatcaacccaaaatatggcagcagcccaggacggactttctacacccatatctccgaccagtacgcgccgttccataccaaggtggtcaatgtcggcgtgcgcgattcgacctatgtgctcgacggcctgctgtaccacgagtccgacttgcgcatcgaggaacactacaccgacacggcgggcttcaccgatcacgtcttcgccttgatgcacctgctgggcttccgcttcgcgccgcgcatccgcgacttgggcgacaccaagctgttcatccccaagggcgaaaccaattacgatgcactcaagccgatgattagcagtgacaagctgaacatcaaggcgattcgtgcccattgggacgaaatcttgcggctggccacctcgatcaagcagggcacagtgacggcctcgctgatgctgcgcaagctcggcagctacccgcgccagaacggtctggccgtggcgttgcgcgagctgggccgcatcgaacgcacgttgttcatcctggattggctacaaagcgtggaactgcgccgccgcgtgcatgccgggttgaacaagggcgaagcccgcaacgcgctggcccgcgccgtgttcttcaaccgccttggcgaaatccgcgaccgcagtttcgagcagcagcgctaccgagccagcggcctcaacctggtgacggcggccgtcgtgttgtggaacacggtctatctggaacgggctgcacatgcgctgcgcggcaacggccatgccgtcgatgacgcgctgttgcaatatctgtcgccgctcggctgggagcacatcaatctgaccggcgattacctgtggcgcagcagcgccaagatcggcgcaggcaagttcaggccgttacgaccgctgcaaccggcttag

SEQ ID NO: 155389 - DNA, 963 bp, Enterobacter cloacae
atgctgaattattctcagacaatcccggctaatgtcagttacaacgaatatcagtttgtcattgtgcaggcgcgttctgacggtttcgtcgaaaaagtgtatcccctgacgattggcgatcatgtgaagaaaggcactccgcttatcgatatcaccattcctgaatgggttgaggcacaaagtgagtttctgctgttatccggtacaggcggtacgccaacccagataaaaggggttctggagcgacttcgtctggctggtatgccggaagaggatattcaaaggctgcgttcaacccgcacaatccagacccgttttaccattaaagcacctattgatggtgtcattactgcatttgacctgcgcaccggcatgaatatttccaaagataaggtggtggctcagattcaggggatggacccggtctggatcagcgctgcagtgccagaatctatcgcctatctgctgaaagatacgtcgcagtttgaaatttcggtaccggcttatccggataaaacattccatgtcgaaaaatggaacattcttcccagcgtggatcagacaacccgcacgcttcaggtccgcctccaggttactaacaaggatgagtttctcaagccgggcatgaatgcctatctcaaactgaatacccaaagtcaggagatgctgctgataccaagccaggccgttatcgataccggcaaagaacagcgcgtgattactgttgatgatgaaggcaagtttgtgccgaaacagatccacgttctgcatgaatcacagcaacagtccggcattggctccggtcttaatgaaggcgataccgtggtggtcagtggcctgttcctcattgactccgaagccaatattacgggcgcgctggaacgtatgcgccaccctgaaaaaacagaaaacagtatgccagcaatgtctgagcagcctgtaaatatgcattcagggcactga

SEQ ID NO: 155390 - DNA, 354 bp, Enterobacter cloacae
atgcgtaattcacttaaagccgttttatttggtgccttctctgtcatgttttctgccggtcttcatgctgaaacacatcagcatggcgatatgaatactgccagtgatgcttcggtacagcaggttatcaagggcaccggtgtcgttaaagaaattgatataaatagtaaaaagatcaccatttcgcacgaagcaatccctgcggtgggctggcctgcaatgaccatgcgcttcacttttgttaatgcagacgacgctatcaatgccctgaaaaccggcaaccatgtcgatttctcgtttattcagcagggcaatatctccttactcaaaagcattaacgttacgcaatcctga

SEQ ID NO: 155391 - DNA, 657 bp, Enterobacter cloacae
atgcccgttgatggtcgctgtgatgccgtttatctgcgtggccgtggcctgctggtaatcggagaacgtctggttcaggctgttgatggatgccttgttgccgttcacgtcagtctgcaaactcagcagcgaacgcgccgttgcctccttctcgttgacgatcacctcatcaatgcggtccagctgcgcgctgttaccggcgaccgatgcagacagtgttttgcgcgcggccacctgcgccaggttgccctgaataatcgcgatggcggagttcttcaccccccccgccatgccgtccacagacacgctgatgttatcgatgcgctggcccagcgcggtatcagccgttgccactgtctgctcaagctcgctcaaagaagaagacacatctccgaccttgctcgacaggtttgtaacgctggtctgaaccttcccgatatcctgggcattttgggcaattttctgcgcctgttgctccagttcgtcgttggcctgtttgatgtcgtttgccatgccagcaattttttcattgctgtccaccgcgttctcgatcaggtctttgaacgtatcggagcctttcatgtcctccagaatggcatcggtgatatcggatacatcaatgctggcctgtccgcgcacaaagtctgtataccctga

SEQ ID NO: 155392 - DNA, 261 bp, Enterobacter cloacae
atggttgccggttttcagggcattgatagcgtcgtctgcattaacaaaagtgaagcgcatggtcattgcaggccagcccaccgcagggattgcttcgtgcgaaatggtgatctttttactatttatatcaatttctttaacgacaccggtgcccttgataacctgctgtaccgaagcatcactggcagtattcatatcgccatgctgatgtgtttcagcatgaagaccggcagaaaacatgacagagaaggcaccaaataa

SEQ ID NO: 155393 - DNA, 285 bp, Enterobacter cloacae; identical to SEQ ID NO: 155381

SEQ ID NO: 155394 - DNA, 252 bp, Enterobacter cloacae
atggtaaacggtaagaaggaagagctgctgactgcacaacaaattttacgtgacgcgggtatagaaaacagcacaacacatcttaccggacaatcagtcggggatgcgcttatccgttacgctgaggaaaatgctgtcgatctgatagtgatgggggcctacggtcattccaggttacggcagttttttatcggtagtcatacctctgaaatgctgcaaaagacgcaacaaccgcttctgatcctccgttag

SEQ ID NO: 155395 - DNA, 228 bp, Enterobacter cloacae
atgacagagaaggcaccaaataaaacggctttaagtgaattacgcattttaaatttcctgattaatgaaataaatttactctacccaaccgccacccagtgcggtaaacagattaatttcgttaacctgccgggaataggtaagatcgagaatggtttgctgcgtatcgaagagagaacgctctgcatccagcacttcaatgtaactgacagcaccactggaatataa

SEQ ID NO: 155396 - DNA, 141 bp, Enterobacter cloacae; identical to SEQ ID NO: 36145

SEQ ID NO: 155397 - DNA, 663 bp, Enterobacter cloacae
atggattatgtatattttaatttatacttggcacaagtattaaaacttacaaatggtgtttttatttccaaggttaataatgaaatacgctatgtgaaagaagagttttatactttggttaatagagttattgaatggttacctgcgacttcggttgctgaaaatataaagtattataaagctaaattaaactatttcgcatatccatttgtacgaaaagatagcagaatagtttcaaaaatcaatgatgatatatctgattttttcaaggctattgattctacaaaaaatatcatgataaatgatatcaatgccagttttttcgattttttacaaagtgttttgttgaatataacaaaccaattcgatctagaggacatgaaagcagggagaattagtgttgataaagacttcgattatgttgaaattatagagagagttagcgaatttttagatgttattaattataaaactgaaagggttcgtgataagaaaaaaatactatcgagctaccaggatgttcagcatttagcacatgcttggaaagctgattacttcctaacaaacgatgataggttaattgaacgcggtggttatatatatggtttgttgggggtgaaaacaaagtttataaaagaaaaagaactggctgatttgaagtag

SEQ ID NO: 155398 - DNA, 639 bp, Enterobacter cloacae
atgcgaaaacttgatgtgatgtatcactataccggtgaaataaagcctaatactcctgttgctttgtacctccgtaatcgtgggatctcccgcttactgagtcacttaccaaaggatttaggctttaataaccggatctactattgggataaagataagcagaaatcgattatctatccgggaatgattgcaatctatcgtgacacccgaggtcggcctctgactatccatagaacatacgtagacaaaaacggtgataaggcacctgtagaaaatccaaagctgatgatgaagcctcctgccgatatgacaggtggctcaattcagttgtttgaccctcactatgattcaggtagttcgacctggacactgggagtggctgaagggatcgagaatgcgctttctgttgtagaagcgacttcaacaccatgctgggcagccagctccgcatggtgccttgaaaacgttactgttcctgattttttactgcctccgccggatgtaaaatatataaacttttatatctgggcggataaggatattgctaactcacaaggcactcgtgccggtatcgaagctgctcagcgacttcaaagccgcatggttgagtttttggctaaacgatatcccgcatcatag

SEQ ID NO: 155399 - DNA, 339 bp, Enterobacter cloacae; identical to SEQ ID NO: 155199

SEQ ID NO: 155400 - DNA, 339 bp, Enterobacter cloacae; identical to SEQ ID NO: 155199

SEQ ID NO: 155401 - DNA, 642 bp, Enterobacter cloacae
atgcttggatttgtctcccttgttgaaagctattgtcgttgcattattcgtaggatactaattacagataagcaagcaagatcctgtagctataaaaataatgttagctatgctgctgctgtttatcatagcaaagatatattaccggaggcattgctcgaagatgcttcttttatttcagaagcaaacattctagaaactataaaaacttttactggtttaaaaatagatcgccagaaagccgcctcagttatctcggccttacaaaaatatgatcaaatttgccaactgagacattgtattgtccatagatctgggttatttggcactaaaaatgctattaagttgggcttggaaaaacatcatttatttcttgaaaaaccaataatcataagctatgaggctatacagtctattgcatctgtttgtgataacgttgttaaggagttaaacgatgagctatttaatttacttttggatggtattgccgaacaatatgattggacaggtgacttaaggaaagacaagaaaatgttctcaccatattttgagatattttattcatcaatagcaaatccaaacaaaacagaggaacttaaaaaatgttatcacgcattctgtcaacatttcggttttaaataa

SEQ ID NO: 155402 - DNA, 141 bp, Enterobacter cloacae; identical to SEQ ID NO: 36145

SEQ ID NO: 155403 - DNA, 186 bp, Enterobacter cloacae; identical to SEQ ID NO: 153408

SEQ ID NO: 155404 - DNA, 246 bp, Enterobacter cloacae
gtgaaagcgggtgctgatgatgaaaatgtttcggtatcggaaaaggcacaccgtaatctttgcgctgacgtggtgctcttcattgacgtcctgtgcgacaccgataagcaaccggtattcagcgtagatgaagaagagcaggtgcgtgaaatctacggccccgtccattcacgcctgctaaaacaggcgcttgacctgatcaacaacgcggacgaagcgcgggaaaagtctcaacccccggcgtaa

SEQ ID NO: 155405 - DNA, 150 bp, Enterobacter cloacae
atgatgcatcaggctttcgaattgtgggttcgtaagcgatacggaaaccgctacgacctgacgcgggatattcaggggctttactgccgggaagtggttaagcggatgtttgaagtgtggtgccactgccgtggccttaatatggtatga

SEQ ID NO: 155406 - DNA, 633 bp, Enterobacter cloacae
atgagcaaaattactaacccggtggtactgctccattggcataaagtcccggaaagtgcatgccacatagctatcactaacggcagtacagattttcgcgatgccgagtatagggctgtattaggtgctggttacacagacgaaattatgaacgcatggagcaaaaccggctactacatggcggtggagatcgagagactaagacaggcgcttgctgccgcagaaaataacttgattgattctgaatgccatgtcgctgaattgataagcggcagagagcgtgataatggcttgattgacacatacgactggcagcgccagcgcctccatgaagccgcagagaaggtcatcaaatggtgcaggcaagaagctgaacatcgtacaggtgatccagacaaagcagaaaactacgcgtgcgttaaagaactacgcgacgcattaactttttgcgaaagctctgggggtgtcgagaagaaaagtctgaccatcacactgcccgatatcacatcaaaggcgttctggagcggtacaggtaaaagtgagactttccaccctgaaacctaccgctgctgggtgaaagaagccatcgagcgctattgcatcatcgcagggatcggcgtggaggtgaaatga

SEQ ID NO: 155407 - DNA, 213 bp, Enterobacter cloacae
atgaaaaaaggacagcattcagcttacccatgcccacgtatcgataccccgcgcggcatgacataccgtcagaatcttgtgagcaggctcgcgccagttatcgcatcagaattcttcagtaccgacatatgggctgattatgacgatgccgccaactcattgatgtgttttgttgacgccattatcgaagccgaaaaggagactgcgcgatga

SEQ ID NO: 155408 - DNA, 516 bp, Enterobacter cloacae
atgttcactgatgacttccggcaccagaaagaggaccgtatcaacaacccggctatgccggcggaactcaaacacgctactggtgataacaacgttcgccaccgcgccgtagtcctggtattcgattttcattcagcgtaccccaacaggctttgttgctttgagttcgtcacgttctttcacgtagcggtcatgcatggcatcccacttgtcacaccatttctgcgcttcacgtttatacctgaggatgcggcgaagccggcgaacacagcgctggtgggcggctctatattcaagagtgattccgccacgttgccagcaattcagatccgggttcagtgggtggacggcctgtacatccgggtgacgttgttggaaaccagaacgctcgaaagcgtgagaggtcatgaagaatgccagataacggatcgcggtatcgcgactaaagcatttcttcatacgaccgtggagagcggcgacgaacaacgggccgacaggtgtatcatgcttctgtag

SEQ ID NO: 155409 - DNA, 219 bp, Enterobacter cloacae
gtggcactgacagcgatacgaattcctgagcgtgttcacctgcaggctctgcaggtcctgctgcgatatcggcgtaaacgcatatatgcgcgacgcatgtaccgcaccggctacctcagtctgaaagttaaccctcgctggcggctgttatcgaaagacggcggccagaactgggaagtaatgagtcatgaacgttattcgggagaaataaagaaatga

SEQ ID NO: 155410 - DNA, 216 bp, Enterobacter cloacae
atgagcaaacgaatcccaacaacggtaaacgcacgtaactggacgacacaggaaatgagcgtacacgctgaacaattgtatttcttgttgcaagcgatatcggaaaatttcttgaagatggaagacgaccagcgattcgctctaattgagatagcctggaaccattccggagatattaacgcatggtttagtgagaaggaaaaacatgatggataa

SEQ ID NO: 155411 - DNA, 291 bp, Enterobacter cloacae
atgagcagcatgcttgacccacagaattacaataaagaaatgcgtgagaaaaagattgacttgatgctctcagccatggggccaatgaatgagaagtcggcatttcttttggctttaatgatcaaacactcagatgacccagccgcaacaattagagagatcggagactgtatcgaggcggtctacggcgcgggtgaaaatactgacacatctcaggggtcaaattttagcgagatgaggctgatgtaccacagtgccataagcatctatcataaaattaaagacatttag

SEQ ID NO: 155412 - DNA, 327 bp, Enterobacter cloacae
atggtaaggaaagtcatcgaacccgctaccgacctgtttaagacagttgggacaataaaccgcgctgatatacccacccgcgggattttttctaaaggccgcgcccatgtgctcgacaaactcatcctttgcccggtaagccgctacttccttcgtaagttctacgcacttggccttcgcctcggcaagttcttctatggtggcagcatgggctttttgaagtacgtcgatctgctctccaatgaaagcgatgcgctcgcgcaggacctcgttactctgcacagcagaaagcgcgccgatcccgtttttaagggacgcgataagtaa

SEQ ID NO: 155413 - DNA, 306 bp, Enterobacter cloacae
atgaaaatgaacgatcactcagggaacatattcacgcagttctttgcgtggttgggaacacttgccgctgcactgggcttcacaactcaggacatggtttacatgttcttcggggcggttggcctgattatctcgctggtgtcttacgtcaatgggcgtcttgatgcgcgccggcgcagaaaagaggatgaaaagcgaacgaagatgattcgcgattatctcgatggagttagtgataaaccaaaatccgagcgtccggcagcggtcagcgttgtcgcggatgcactgacaaaggcaggtgaataa

SEQ ID NO: 155414 - DNA, 531 bp, Enterobacter cloacae
atggcccaactggctaaaaaaggcggcgcagttggcgctatttgttctgttgcagcgattatcgccatagtgctgggcaatggtaacgtccgaacgaatgagcgtggtctggagttaatcggtaatgcggaaggttgtcgccgtgatccatatctttgtccggctgcaaaactcactgatggggttggcaatactcacggtgtaaaaactggcgtgcgaaagacagatgcgcagattgctgctgactgggaacgaaatattctcgacgctgaacgctgtgttaactcatacggtaacgggggaaatctcagtgatgacacgttttcggcggtgacgtccattacgttcaacatcggctgcgggacaatgcgtaaatcgacactttatgcattcctgcgtgaaggtccaaaagcctggccctcagcatgtaaccagttcccccgatgggtatacgctgggaaaacaatcttgccagggctggtaactcgtcgtgaggcagagaagcagctctgtatggatggtctgcaatga

SEQ ID NO: 155415 - DNA, 348 bp, Enterobacter cloacae
atgaaacgatggattttttcattgctggcgttagcgtctgttggcgcaagtgcaaacactataacgatgcaatgtggtaactttcgtatggacgcgatccctgactcattgtttaaaatcaatggcgaaaccgtaacatcccaaaaggttaaaatgttgggcaaagacggtacaggcatgcagatcaaaatgggtctaatgcctgctaaagatggcaacaactatgggtttgagtatatccatcgccctggtaccgaaacgcgtttcctgaacgtccaactgctacagaacagcatggacgcgccgaaaatcatcggttctttcccgtgtaaaaaagtcgctgggtga

SEQ ID NO: 155416 - DNA, 930 bp, Enterobacter cloacae
atggctacaaataactttaaacctttcgctacgggtgcgggcgctaacgtcatgtcgcaagcagactgggaagccttaactgcactgcttacaggatttcagtccggtaaagctgcgagtgcgcaggtgaataaagcccttcgtcagggaacagtgatggcaagcgttatcggacagttcatcgcagacagtaccggccaggacgttcttgataacggaaacacgtcagtgcttctgactaattttctcaatgccctgaaagccaatacaaacgggcgcctgctaaatgtgcgaactttcactgcgagcggaacgtatacgccaacaaccggaaccaagaaaatcagggttcgtctagttggtggtggtggggccggaggtggtgctgctgcatctacggttacagggaacgttgccgccggacatggtgggacggctgggacctacggtgaaacagggctgatagatgtcagttcggtatcttccgtggctgttacagttggggctggtggtaatggttcctccggtgggaatggaacagcgggaggtgtttcagctttcggaacctatatttctgcgccgggaggtcaggcgggagctgcgggaagttctacagcaaccacacagacaatagtttctgatcacagtaatggcagtccttgcactggcgcaaacgtgcttgtatctatcccagggcaaggaggttttgggcaggtttcattgaatgcgaacactgtgaaaggtggtcaggggggatcatcagttcttggcctggggggcggggcttatacaacaaatgcaaccccaaaccctggcacgggatatggtggcggtggcgcagggtctgttaccacagtatcaggtggatcgaaagctacagctggagggaatggatctcagggtatcgttattattgaggagtatgcatga

SEQ ID NO: 155417 - DNA, 393 bp, Enterobacter cloacae
atgtctacttatgcactgatcaaggatggacaggttatgaatactgtcctgtgggatggtgagggtgatattttcgagggctatgagactgtcaaaattgacggtcttggcgtgggtatcggctggacatatgatggtaagaaatttactgcgccgcctgtaccggaacccactcacgaagagctcgttcaacaagctgagatccagaagcaggcattaatcaacgacgccaataatcacatcgatagcaaccagtggccctcaaaattggcacttggacgcctgtctgatgcagataagcaatcattcaatgaatggctggattatcttgacgcattaggagcagttgatacatcaacagctccagatgtcacatggcctaatagaccttaa

SEQ ID NO: 155418 - DNA, 1143 bp, Enterobacter cloacae
atgagtgtttattactcactgtgtctattcactgcatgcctaaccattgcgcttgctcttttcagccttcccatatttcgattcattgatgaagacacgattaaagcgagatcaaacagccttgacggtatgcggttcttcctggcgtcgtttgttgtttttcatcacttagattgtgcttacacttacataacaaccgggaagtggagacctacttctgaatggttggtttacatgggtaagtatggtgttgcacttttctttatgactacagcgttccttttttggggtaaagtcaggaattctcaatctgttgattgggtggaattatacaaaaaacgtttttttagaatcgttccacttgcctttttttgctcgatgatagcattaatcatgcttttttcttttactgagagtaagcctttatcttttgaaattatatctaattccctggcttggtttgatggcggtctttggaatagcaagcccgcagtaaccacttttgataaatcatggatggcgttggcaggtgtcacctggacattaagatgggaatggattttttattttactctcccattgttgttcatgtttaataaatggtctatagagttagcaatagttttgtttggtttctccatctatttccttccggacattacccgcgacgcttatctttggtcgtatttctttgcgggaatgttatgcagggagttgaaagaaaaaattcaactcaccaagaatcaagcaaacatattgttggttgccactatattattagtattattggctcaaccagagatctttaggtctccagagaagttttttttaataacaattttcttcgcaatagtttctggcgctaatctctttgggctgttgaccacaactgcatcaaagagactaggcgcgattagttacagtttatatttaactcagggtttaattttattcccagtgtctttatattttagccatcaaaatgattttacattagatattaagtcaatgataatttttacctcctcttatgtattgatctgttttatttcttcccttacctttcacttcattgagcgtccatttatgaatggatttaaagtaaagaatagaaataattttaaaggcatgacattcaaataa

SEQ ID NO: 155419 - DNA, 309 bp, Enterobacter cloacae
atgccacgcacagcagacatgcacgccgcctttgttgcggtcactgaaccattcattcctccttctgccactattgtcgaaacgcaggacggctatgatgtcgttgatgactcaacgcttggcaagcgcggagacacattgctcatctggttttgcggccgacagcagcacgcgtattgggccggtgatgcactgatcactgacgatggcgaggccatcgaaggtgaggctcttgatgatgttcgacttgttggcgtggtcacgcataccattgtcccggtatgggtcgacgacaatccggtgatgtga

SEQ ID NO: 155420 - DNA, 414 bp, Enterobacter cloacae
atgggtatgaaaaaattgacctttaacgaccgaatttcctcaagacgtaaagagcttggattaacccaacagcaacttgccgatgccgttggtatatccgccgtgagcgtctataagtgggaagcgggcataacgacacctaaagggcaaaatcttttctcacttgccgaggcactccgatgtactccgacgtggttgctttacggaactgaggaggatgaaccactgagggcagatcaactttcacccgagcttgatgaaaggcaaaaaaagttactcgatctctttgattcattacctgaatcagaaaaagaaagacatatcagtgagttaagcgaaaaagttaatgatttccagaggttgtttgatgaattgctaatggttaaaaagaaaaaaaacaccattaagaaataa

SEQ ID NO: 155421 - DNA, 300 bp, Enterobacter cloacae
atgctgaccaaacaccggctgtatatgtcgtcaaaaccgtttgaagacccgcgcattctgcccggcgggccggggattgcctataccgtggatgacggaatgggaaataaagtaagcgggaagctggacccccgttcccctggctgggcgtggggaatggtctacatgactaagcagggactcgagggcagcacgcagcaacttaaggctaactggcaagatttacccgacagcgtacccgaggtgaagggctataccggctgggatcatatgcgctgtgatatggatgcggggcgataa

SEQ ID NO: 155422 - DNA, 657 bp, Enterobacter cloacae
atgactaaccgcccactaacacctaaaccttttcgcgcagatggcggggacattagcaccagccgtatcgaagagatagctaataacccatacggtgacgaagagaagtgctggttggcgaagcgcgtgctggcatcgctggacgttgagccggtggcatggactgatacggatgaattgcgtgatgtaaagaatggaggcaacggctatctgtttgctataggtggtgaagccaataaatttgcggatccgcgccgccaagtgatgctttacaacactccgccagctccgacagtgccgaatgaatgcccggcagaaattcgcgagctgatggcgtcgtattctgatgctctcttcgacgatgaagatgcacaggtgatatggaacgcctgccgcgccgcattgcttaaaggtacctatagcaactctcctgctgttccggatgggtgggtgatggtaccggttgagccgacagaagacatgatcgtcgaaggtttcgagtctgaaccagatgaaagctttagcgatgcagatgtttgggaagcctacgacgcaatgagcggctgtcagcaggcggcgcaccgcgtaaaactatgctgggctgcgatgattgcggcagcgccgaagtcgctaccatccaccagcagcaaagagtaa

SEQ ID NO: 155423 - DNA, 516 bp, Enterobacter cloacae
atgaaaattaatctgggtcttatcggcgttgtcgttattgctggcctttcggtcgctctcgttaagagttgctcagacgccagtagccttcagagcgataacgacgttctgcgaagtgacaactctatgcagggacaggtgatcgccactcaagctttcaactttaatcggttcaatcaggttgcagagcatgcaaacaggctaaactccctgatcgacaccagcaccgaagaaaccgttatcgaataccgggagattctccgccgtgaaaaaacctgtgatctgcctgttcctgctgatattgctggtgggctgctcgaatacgcgtaccgtttacgttccagcgccatgtacaccgataccggcagacctgacgcagcctatgatagtaccgctgcctcccgcacaatgacgtattgccaggcagtgttgtggattaaaccgctaatggctgttattgaaaagggcaacaacaacttagctggaattcgtcaattagaagatcagcgtcattaa

SEQ ID NO: 155424 - DNA, 501 bp, Enterobacter cloacae
atgaactatatttatcaattagtgataggtttggcttcaggtgctttcggggcgtgggtggctacattattcgcattaaagcggttttacagcgaaaaatggtgggaaaaaagagcagcagcattcatagagttaaccgatgctatttatcagcgtaaaactatccaggagtattattctgaactaagggaatttcagcgtgatgggccagaagagtatcctaattttgtaaagcttactgacgaacagttagaaagcttagaacaagctgctaatcgcgcaatgatcttgataacgaaatatagtcaagttggaccgcttttaataactgaaactgcctcaaaacttttacaggattatcttaaagaagagcgaaaggtagattatgaagtacactttaaggggttgcctacagatgaagcagaagatcatttgttgtcaatgactcagactcttttcgaaaatatactcacaacttctaagaaagagttaaaagcgtaa

SEQ ID NO: 155425 - DNA, 453 bp, Enterobacter cloacae
atgacagaaaaagaaaagctgattgctcggctgaatgaacttggtacccagcttaaccgtgaagtcagcaccaacggcaccattcaggaacttacgatgcgtattgctgagcttgaagaggagctggacggagacgccatctcggttgacggcgaaagcgacgggcagaatgctgccggcagcaccggcagcaccggcagcaccggcagcaccggcagcaccggcagcaccgacagcaccgacagcgatgttgcagacgcagcaaaagtaaaaacgggagcgggcacaacgggtgagcgggtatcagtagaaacgctggcaaccctgcatgttgacgcactacatgccacgcgcaacgaaccggtatcgatcgttgagcccggtgtgattatccgcgtatccgaacaggatgcagacgagctgatcgcaaaggggctggctcgcgaagtctga

SEQ ID NO: 155426 - DNA, 1341 bp, Enterobacter cloacae; identical to SEQ ID NO: 84378

SEQ ID NO: 155427 - DNA, 291 bp, Enterobacter cloacae
atgcacgataatattacgcttgttgccactattaccgcccggcagggcgcacgagaaaaggtacttctggcacttaaaactgtcgaacgcgatgtgcagggggaacccgggtgtttacagtatcagttgtacatgaaccgtgaaaatgatcaccagtttatgatgattgaacgctggcagtcagccctgatgctggaaaagcatacccaggcagcaccgttcaacacactggtccacgcaattgacggcatggccgatctgcaggttacctcgctaacctctgctgtctaa

SEQ ID NO: 155428 - DNA, 1200 bp, Enterobacter cloacae
atgcaaaatcacctgtccgcatttcaaaagcgtgcattatgggcgcttagcctggcctattttattcaggcgaccggttcgctttccgtggcgggtagtctggtccccatttcccaggaatggggcatcagtgacgctcaaagtgcccgcctgctctccattttcggtctgacatttgcactgggcgcgccgctggcgcaggttatgttcggcaagttcatgcgcagagcacaggtgctggcaggcatgctggtatttgggctgggagccctgatttttgccatcgcgccggactacaaagtactggtggcttcgcggattgtaatgggcctgggtgcctccctgatcgggccggtactgattgcgctcggtgcagagttagtcgcccctgaggagcgtggcagcgctattgccatgatcctgctgggtgtatctatggccagtatggtcggtattccgctggcggcatggctggccactgtctggggggcgcgtatgctattcacgcttatcgcgctggtgagtgttctcactgcaggtgccgtatttttgctggtaccggacgtcgtcaaaggtgttgatatccgcttacgccaggttggcatggtcctcaaggagggcaaatcactggccgcttttctggtcgtcttttttatcacttccggtgtgtacgatatgtacgcctttatttcaccgatgatccgcgatcgctggcagggtgatacgtcagctatctctgtcgctctggctgttatcggtgctgccggtattgtggggaatctttttgttgcccgtgcggcacgccacttcagcgcggaacacttactggttaccggtctgatgttactggtgacggatatgctgctcgtcatgctattgccagctcagctgtcattgctgtatctcctgctggtagtctgggccttttccactgacctgttatggcccactcaacagcggcgtattgtggagatctcgaccgcagaaacgcgtggaatttcgctggcattaaccagcgcctttatgttctgcggcattggttttggatcggctgtagcgtcatggctttatcccctgtcgggtttttacggtgtaatgataagctcagtaatgttcctgctgctggcactggccagcctgtggacttctgagcggttacgggcccgctgcgcggaatatcaatcagtccgcctgtcataa

SEQ ID NO: 155429 - DNA, 420 bp, Enterobacter cloacae
atgacaaagctcgaggaagtgaaaagtatttatcctggcgcacttgtctggcactttggcgacagcccagaacttgctgacgaactcgttcacctggttctgagtgggattaaaacagcaacctgctgttcgaaaacctcttttcagcgtgaatatgaacgaggcgaagctccctgcgctggaagttacaatatcattctcgacggaaccggacagccaatgtgcgtgattcagactgtcaggttgcaggtcattcgcttttgtgaaatgacgagcgaactcgccagcaaagaaggtgaaggggatttaagtctggagtactggaaggaaggccataaacgtttttttgaacgtgaaggcacttattctgaggaaatggaacttgtctttgaggagtttgagcttgccgagattttgtaa

SEQ ID NO: 155430 - DNA, 1239 bp, Enterobacter cloacae
atgactgcgaaagatcagtttgctgctcatgttggtttggactgggcggataaaaaacacgatgtctgcgttcagtttaaaaacggtgatcgcatattccatgtgattgaacatacgcctgaggcacttgatatctggctcaatgagttacaccagagggcgaaaggcaggattgctattgccgttgagctgaagaaaggcccggtggtgtatgcactccagaagtacccatttgtcactgtttttccagtacacgcgttgtcactggcccgctaccgacaggctttctggcccagcggcgcgaaggatgatccgcaggatgctgagctggcattagacctgatgctacgttatccccacaagataaaagccattgaagccgacaatccggatatccgattactccagcaattagttgagcagcgccgactgctggtcgaagacaagcgtcgctttgttaatcggctcatcaatacgcttaagcagtattaccctcagcccctggaatggttctcccatcgggacagctcactgttctgcgagctaatcattcgctggccgagtctgcaacaactcaaacgggctcgcagcgatactgtccgtcattttatgaatgctaaaggtggtcctgctgttgcatataccgaacagcgggttgcaagtattgccagcgctattcccctgaccaccgataaaactgtcatcgaggcaaatgccttgatggcaacagcacttgcatcccaaatcaaactgacaggcgacctaatcagaacctacgatgaacgtattgaatccttattcgatactcttccggatgcagaactgttcaaatcacttcctggaatgggaccgtgtatgggcccacggatgcttgcagcactgggtgataaccgcgaccgcttcaacagcgccgaagaaattcaaaactacgctggcatcgcaccagtaaccgagcgaagtggtcaaaaatcctgggtacactggcgttggcagtgcgcgaagttcgtccgacagacattcgtggaatggactgcgaagacggttaactcatcgtactgggccagactttattaccagggccagcgagaaaaagggaaatctcatcagtcagcgatccgggctctggcatttaaatggataaggatcatttaccactgctggaagaccagaacccggtacgacgaagcgaaatatttgctggcactggaagcacgaaagtcgcccttactgaagccataa

SEQ ID NO: 155431 - DNA, 1830 bp, Enterobacter cloacae
atggacttatatcaggaattagccaaagcaggtataacagtcgctacaacacagctgttaaatagggttttttcgcgctgggatagaacaaatttaaacgctcgtaggttagtaagggaattgactaataatgcgtatataaattaccttgaaaaacatgtatcaagagtagttcgcttgagaactattcacagttcagaatacgatgtccaactgaaagatatgtatcatcctttgagaatatgtggggtgataccttcttcagttcctcaattagtaaatgatggattttatattgaagatcaaaagatcactaatattattggtatcgcagggcagggtaaaagtacaatcttaaggaaaattttcgtcgaacaattattcaacggcgataagattccttttttcatagaacttcgcaaagtaactcaggatggtattcgaaagagtttactgaatacttttacaagtttgaatttaagtcccaatgatatcgaaatagaagagttactaaaaagcaataaaattattttgatgttagacggatacgatgaagtcaattcaaatcaaaaggataatatcctccaagagattattaatttaaacttaacttattctttgcaaatcattacaacctcaaggccaggtactgctatatgtagcgagccgtcaatcatcaactataaagttgaacttttaaacgagagtgatatcttatcaattatcgagaaacttaataccaacaatgggagtatagataaagaacaactcccaaaaataaaagatactatcagaaacaataagaacttagtttcggtaatgacttcaccaattttggtaactttgtttcatgtctgctatccatatatggacattatacccaataacactgttgaattttattcaaatttatttatgacgctatatttgcgacatgataaagtgaagaattttgaccgtgagaaatcatcttctttaagccataatgatgcttatgattgtttttgtgcactttgtttttactccatatttaagaataattatgatttcactgaacaaaccttgatagaacatactaaaactgccatgcaacttaaagggaaaatagatggctgcgatccacaatcattagctatggattttgttgatgtaacttgtttaattcagagggaaggttataacaaatatatattcatacacaagtcgatacatgaatatcacgcagctgaatttatcaaaaacatatcatccgataagaaatctaagttttactctctaataatggaagatgttaagaaaaacgattatagatatcataacaccatatcattcttacatgaaacagatgagattgattgcaataaacatttagttatcccactgtgtgagtattataaaatttccacttggaacaatctttctttaatagattataaggatttgttcaggcagttttttgttgactccactgcattaattgttagtgatgaaggaaaatatagagttcaatcacttcactactcaacatctttcttgagttggatagctctttttataggtgatgtttataatgacctttattcttcagtgattagtaggttatttgtatcagaaaaactaaaggatatacctagtgatattatcatcaatccagttggcggcgccaagcaattaagctttattcacttagtaaatgtgctaaaccttttagacgatgctgtagatattttcaaagaacatatcttgttaatccatagagacttgtatgtttattcgtctgagattataaagaatgaaactgaaagtataagtgagttctttgatttatag

SEQ ID NO: 155432 - DNA, 1848 bp, Enterobacter cloacae
atgagcgaggcaattaacgctgatgctgacacaattattcaggtgtgcctaaatctggcagatccaaagagtttttttctttacgcaggtgcggggtcaggaaaaacccactcactcgtcgaggctattcgcgaacttaaaagtcgcgagcgagaacgtctaacattcgaggggcggcgtattgcggtgatcacgtacacaaacgcagcctgcgaggagattcttcgaaggctagagtttgatccacttgtggaagtctcgaccattcacgcgttcgcttggaacctaataaaaggattcgacaacgaaatcagggagtggttaaggataaaacttgctcaggacattgagaatattgagggcgagctagcacgatcgagaggagacaataaaacatctcgagcaaatcgaaagaagctacaaagcaaaatccgcagacttgaaactctcaatgagataactaagttcatctacagtccaacaagtaacaacagggaacgacaagcactcaatcacgatgaggtcatcaagttgaccgctgcattcgctccagaaccccctttgctggatgttctggttgaccgctacccagttatattgattgatgaaagtcaagacacccacgctccaataatggaggcttttctgaaagttcagcaattggcgcagaaacgtttctgtctaggattgctcggagacaccatgcaacagatttatggacatggggtaacacatcttgataaagcaataccgggtgactggctgaaacccgaaaagatcgttaatcgtcgcagtcctagtagagtggtagaccttatcaacgtgattagaagccccgtagataatcatcagcagatcccaaagcctggtgccattcaaggtgtagtacgcatgtattgcattactcaaaatcaagaacaggcaccagaccttgaggaacgcgttgctcattcgatggctgcaatcaccggcgacggcgaatgggctatgggttctgaaggccgaaagaccttgatcctcgagcataagatggctagtcggagaatggggttcgagaagttgttctcgtccctccatgcggttgagcaccttcaaacaggcttgttagatggatccctgcctgcactgcgcgtttttagcgaaggcgttcttcctattcttacagtaaaggacgatcactttcttctgcttgaagcagttcgctctcgctcttccttgctcagcaaggatgctatgcaatcaacaggggatcaagcggaacatatgcagcgtgtagagaacgcaacgcacgccctgctctctctatttgaaaaaaacgatccaacactgagcgaagtcgcaagtatacttttgcaaacccagctacttgatgttccagaaagtctggttgaggcaatggtgttgggagttcctaatgaggcccccgatcctgaagatacgaacgcgataaccaattacgcttaccagctatttcttgagcgcccattttcggagctggcagcctttgcgacttatgcaaatggactttcaccatatggtactcatcaaggggtaaagggcctcgagtatcctcgagttatggttgtcatcaacgatgatgaggcagatggctttttattcagttacgacaaattactgggtgtgaaagaactaacaaaaactgatcgagacaatgagcgtgatggtaaggaccacgcgctggctcgtactcgaaggcttctctacgtaacgtgcagtcgtgcagaaaaaagcttagcgattgtcatatacacatctcagccagcactggcaaagcgaaatgttgtagctgctggctggctccaagagagcgaggttgaaattttatga

SEQ ID NO: 155433 - DNA, 2295 bp, Enterobacter cloacae
atgcacatccagcacatagagatatctaatttccgaaaactactttctgtgcgaattgacttctctaatgagaccacgctgcttgtaggtgcaaacaacagcggcaaatcctctgccatgcttgcactccggagatttttagtttctaaggcttcagcttttcggctacaggatctgactctttgtcatctcgccaagctggatgagattggtaaagtgtgggagcgcgcgcccgaagactttgagattcctacaaccaaggactgggctgactggctccctagtctggatatctgggtgtcggcagatcaaggggagttcaactacatacgggatctcatacccaactttacgtggcgtgggggactagtaggaatgcgttttctgcttgaacccgatgatatgaatactctatacacggactatcgtaaggagcgaacgagggttgtagagcttgaagatgctctagagaaggaagagccacccggtaggccgctgaagctatggccgcagaacctgcatgattacctaagccgtaggctgggagataaattcaaaatacgttggtaccgcctagatccgcaacaacttaaggagcctgacaagacgaccagaatggcgcaaatgcagcatttgagcactactgctctgcccttggaaaataatcctctcaatggattaattcgtgtacatgaaatcaatgcgcagcggggattcggcgaccatttagacgacaaccagggagaccatactagacccagcggcgctcaaaaactctcggaacaactgagatcttattattcccgacaccttgacccaggtgacagccctgatgtctcagacctcgaagcgttgcgggcgatagaagcagcccagtcggcattcgatacgaagctaggaagctgcttcgaacctgcgattcgagaggtcgagggattggggtatccaggccgtaatgacccacgtatcaaagttgcaagtcgcctggcaacaactgacggcatgaaccatgaagcagccgttctttttgaattggattcaatccagggggccccaggagccccacctcttcatctaccagagaccgctaatggattggggtatcaaaacctgatatctatgattttccggctgatgggcttcagggacgagtggctgagaaaaactagggcctccagcaaggaagtagtcgaccgcgtcgaacccatccacctagtgctcattgaagagcctgaagcccaccttcatgttcaagtgcagcaagtgttcgtgcggcatgcctacaaagttctgtgccgagatgctttgattgaacgctacccaaatctgaagacccagcttttagtgagcacccactccagccatgtaactcatgaagtggaataccagaaccttaggtatttcaggcgactcccggcagggatgtatggcatcggtataccggtgtcgacagtctcgaatctctctaacgtgttcggcgagggaacaaagacgcaggagttcgtaaccaggtatctgcgggcacagcatgcagatatattcttcgccgatgcagttatcttggttgagggatcagcagagcgaatgatgctgccgcattttttgcgcaataagtttccattccttgaccgctgttatatcacaactctcgatatcggtggcagtcacgcacacagattaaggcctttaattgacgcccttggcatcgtcaccctagtaattacagaccttgatgcagggattaataaatccgcaaaaccggtacaaagaaacaaaaaccaaatcaccaacaatccgacattgcgaagctggatgaaactgaggcaactgggaagcacggtggatgagctgcttgaattaccagcgaaccacaaagagcataaaatcgacgatctttactcggtacgcatcgcctatcaaacacctattaccacccatctaccctctactggtgaagcaatagaagttcttccaaatacgtttgaagacagctatgtgcttagcaacactgatcactttgcggaaaagacaaacggaactggtttgatgaaggctttcgtaaaggttttaaatcaagcgcaaacatccgaagctctcggagaaggatttttcaacgaattacgcgaaggaaagaaggcagagtttgtgttgctcgttttgggcgacaaacattttaccagcctcgaaattcctgagtacatcaatgaaggcctcaactggcttgagtccaaattgcggagcaaacaaaaagagcttctggtagttccctgcgaggacgcggaggttgggtcatga

SEQ ID NO: 155434 - DNA, 285 bp, Enterobacter cloacae
atgccaggcaaagatatcatccagatcgtcagcgctttcagccactggttgatgcaggtctttgggatattttgctggtctggcaaaacgacgattgaagtcaataatgaaggaatccagccaggcattggcatactagatgctgctgataccttcaagccgcatttctatgataagccgatcctgaagagtctggtttgcgcgctcagcgcggcgtttagcttgcgggctgttggcgcatatcaactcgattcccagttcagaaagcactcggccgaacaatag

SEQ ID NO: 155435 - DNA, 966 bp, Enterobacter cloacae
atgccaagaggattgctcattgacctcaatgacggcggcaagccgatggaaataacggcgggcctgagatgcccgtcatttggagccagttttgacagtggctaccagaaagcaaagtatgcggatattgccggatatgtttcaggggcacaggtactctttataccacacgcgacggcttatcttgattcagggctgctgcataaaatgaattcggtcaccatatcgggtggccgagtcacgcagaactcgacgatgaaagataacagtatcagcgaacgggatagcacttacacatttcccggaagtctctggcagatttttcccaaaggtcagcgaagtggtatggggttactcatcagtgatagcaccgacttcacttcaataactaatgcaactcaatcagggcagtgtatctggaaaggtaccgtgaatgttcccaccgggggctgggcggttccgacgatagcaggttatgacaagtcgaaatatatcgttttcggacgctgtaatagcggcaatacgattgacttcgacggcaacacagttagattcttcagtcctccgtcaactaatgatgacgctcccacaacaggcacgatagacatcgttatcttcgccagtggcgtagcgccgcagcctggcactggcctcaatattttcaacgctgaaggggcctgtacgttttcaactacaaagcgacctttcgtatacctcaatcaactctggtcaccttccacaagtgccgtgagcatcggcagcggctatgtaccgctgggcagatttggtctgatgattcatatggttaatggcatgtacgtgtatcggatgttcggaataaagatacagaacggcagcgcttcagttcagggcgggaaataccttggacgcgagcagtatgccatattcggtaataacaccattactccgctcagccttcccgtcttgcctgatatgtacgtctga

SEQ ID NO: 155436 - DNA, 267 bp, Enterobacter cloacae
atgtttgttgaactggtttatgacaagcgaaatgttgaggggctccaaggggccagagagatcatcctggctgaactaacgaagcgagtgcaccagattttccctgatgccgaagtgaaggtaaagccgatgcaggcgaacgctttaaacatcgacaccagcaaaagtgatcgggaaaagctcaatcgcatgctggaggaaatgtttgaagattccgatatgtggctggtttctgagtttccgaccgttcgccaggctggcctttaa

SEQ ID NO: 155437 - DNA, 366 bp, Enterobacter cloacae; identical to SEQ ID NO: 121602

SEQ ID NO: 155438 - DNA, 417 bp, Enterobacter cloacae
atgattaagctgcaccattttgtttttgcccttgccgacctgacgcgtcgggtgatacttcgatggtgtggtcagcgtgataaacatcccaacatcaccaacgctggccgcgtagcgctcaatcccggcgatagtgttcatcagctccatacggcggatttcagggttagaaatactccccatgactttgctaatgaggtcgatacgctcgccggtgactttgttttcgagctcgcaggatttcaggtattcgagattagccaggcggcgcgcgtgaacgtcgcggatcgccattttgcttgcgtagggggaacggtctttattgacctcaccggcagcaatgagcagcgcctcgcgccagcgcatacgctgcgccttgagctggttaacccaccactcatccttaatcagacgtga

SEQ ID NO: 155439 - DNA, 483 bp, Enterobacter cloacae
atgagtgataagatcatgcaaacagtagatctgctaatttcacatagtcaaatattgttacgatccagagactatgacgaaaagctgagtcagtggggaaaaggtaatgcttctcaaggcgctgttttacacaaggattatgttgtattcgatccattaccagaggacgcatttggagcaaacgtcaatatcaaaatagataatgcttttaaattagatcaaaatgcacaacgctgcattgttgttccattttttattacggataaaaataagatccagatcgcatctgcgacagagaaatttgatgtaagcattaacgtaaccggcaagatttattcgctcctttatgaggtttgtgagggggacgagatttattataattttactcttgtgcctgaaaaagaagcaatccctgctaagtttttattagacgacccttggggagggaaaaaatacaatcctctaaaagagggttttttttaa

SEQ ID NO: 155440 - DNA, 483 bp, Enterobacter cloacae
gtgccagccggtttcctggtcgattttggcgcgcaggccgagcgcgcgggcggtcgcccatgcaatgtcggtttcgttcgccgtggtgtcccatgcgagaaaatcagggtgaatgaccatcagctcgcgctgactgaaattctcacggtatttgatggcgtcagaaatggtcttgcagccccatgcgctaatgtaaccaaacgcgcgcaggctctgacaggttgccgcgagcgcggtcgccacttccagagaatccagccccggcacgccgagaatgcgcggcttgacgccggtgacggtttgcgcggccagcaacgccttaagaccggtgtatttcccgttttcgtcggtcgtgccgatgatgttggaaatggtttctttctgtgccgcttccgggtcatccgggtcgtcgataccttcggcaacgcgtacaaccacaacgaccggcttgcactggtcggcgatggcctgcagggattttga

SEQ ID NO: 155441 - DNA, 159 bp, Enterobacter cloacae; identical to SEQ ID NO: 121800

SEQ ID NO: 155442 - DNA, 426 bp, Enterobacter cloacae; identical to SEQ ID NO: 121801

SEQ ID NO: 155443 - DNA, 855 bp, Enterobacter cloacae; identical to SEQ ID NO: 121881

SEQ ID NO: 155444 - DNA, 168 bp, Enterobacter cloacae
atgggcggcaagcccgaaaatatcggctcaatgggcgatatcgagaaggtggcgcgggtatttgtgcgtaacgagctgacgccgttgcaggagcgtttcaaggaaatcaatgaatggctcggtttagaggtgatccgctttaaggattacaacatcgaaactgagtaa

SEQ ID NO: 155445 - DNA, 1041 bp, Enterobacter cloacae
atgaagcatacaaaagccgagatagttaaagtaaatggtgaattctctctgagcttacttagctttgacatagttcacattaagaaaacattagagcacaaaagaagtcttaactactactggaatactagaacaaaagaggttatttgtggttcaggctcactgcgaacttttcatgacattccttctgtagctcatctatttcattacaaaaaaagagcttgcgatctaagccgtgaagaaatacaactaggcgactccgtatgtgttttattcaataccactgccgcactttttctctttggttcaattgttggcatcgataaattaaaaaaaggaacttattttcatatattaccccatgacaaaaactttcctttccaacttaatcaagtcatcaaagttaagcaccaaaaaaacaacatttatcttttaaaagatggtaaaaatgaacgctatgagtatatggcaacgaaaaacatggtttttgcgaaatatcaataccaagttgattttgctgaaatagtcatatcatacattaacagcacgcaacttataataaattacgcatctgataagaataaaaatataaacgaaaaaaccattctagagtgccataaagctctttttgcacatatttatgattgggctggaaaatacagaaaccatcctgttgtcgtaggcgataaagaacgtccgaccatggaacatgacgaggtaaaaaaatcattaaaagccagcctcagagcctgtaccaaaaaagaacttgaaaaaataagctcaaaggagcaactggttaataagttaactacccttcacgcggaacttgcatggattcatccttttcaagatggtaatggtcgctcaatacgactatttcttcagataatagccgctactatgggttatgaatttgatatggagaagttagatggaaatattaagaacaagcgggcgtatcattatgctgtcaggcgtgcaatacataatagtaaggggaatttgattgcccttatttcaagggcaatcaaagaactttaa

SEQ ID NO: 155446 - DNA, 1269 bp, Enterobacter cloacae
atgactattgttcaagaaaattttgcaatatccacttcttataaaatatatttagatcttagggtattatgttcttttatgtctaagaacgaaatgttgccagaatccattacacgatggtcatatccatttaaggcatatgatgcttacacaaatagcacaatggattcgatgggaaatttatccaatcagaaaaaacttcctgatgaaaaggctatagattttattggtaaaatatttagctctaatccagctaatgaaagggacatatttacatcttctatttttgcattgctcttatgtgctccatctcgaattagtgaaattatgcttttggaagaggactgtgaagttatagttgaagatagtaatggcatatcaagatatggtttgcgatttctttctctaaagggctttggatacaataccaaatggattccagactgtatgattcctgtagcttcaaaggctatcatgcgattgaaaaaacttacaaggaatgcaagggttgtttcacggttgattaaagcaggggaaattaatttatacgagtcattgaacagaagtgcatttgattgtttaacaattgaagatctccacaaacttggctttgttataaatcaattaaatatctcccaagaaaatctaaaattcttgtctaagataaaacatggcactgtcagtgtaaaagcattttggatttatatagagcgaaagaatgttaattctgaaaatattaatgctaatttatgctccataaatcataatttattggactctatcaagggtgctgatattttcacaacaattaaggcatcttcaaagtattttagagcggattttcgcactgataatatgaataatatatttcataggaatatacattttaactgtgatgaccctattttaattttccgcagccatcaaattagacatttacttaatactatagctcaacgaagcgtattgtcagagatacaaattgcccaatggtctgggagaaggagtgttaaacagaattcagtatatgatcatatgtctcacgacgagttatcagaactatcaaggaaactattgaacagaaacacctacgaagaaacaaaaatttcagaatcttcatttaatgaacaatcgattattatgaattcgattaaagataaatttgaaaaactagaattaaaaatacaaaattcagatccaagaaaaagaaaatatattctggaaaaaattaaagatttaagaatggaaattgaatgcatattaatgtga

SEQ ID NO: 155447 - DNA, 435 bp, Enterobacter cloacae
atgacctatggcctgaccatgccgaccggtcgacgtccgacgccttacctgctggccgaagaggtggcactggccgcgcagcgcctgctcgctgcaaaacagccggtcgaactggcgaacctgctcgacaccattgcactgactgaacgcgctgacatgcccgatatcgtgcgcgcaaagctgcacaaaatcaccggctatgtcctgcgtgatgcgaatcaactgcccgaggcgctggcgcacctgcaacgtgcgatccagttagagcgcactatcggtgtgaaaaaggatatcgagcagctagagcgccagctcaggccaaaacccgaaccggcaccgaaaaccaaaacgactaaaccgcgcacgcgcaaacctgccgctaaaccggcggcacggcgcgggcgtccaccgaaggcggcaaaagccgcaggttaa

SEQ ID NO: 155448 - DNA, 366 bp, Enterobacter cloacae
atgcgtttagagcagaccgtttcccccgtgcgcctgcgccgggcgattaagaccgcgatcgcggagactaacgcggagctgagcgactggcgcgaaattcagctcgatgccggttacgccacgctggcggatgtcccgaccgacaagctcgacggcgagagcgtgcgcgttttccactatttcaacgccgtgtgctcgatgacgacggccacgctttatgagcgttttcgcggcgtggatgcgactgccaaaggcgacaaaaaggccgacagcatcgacagcactatcgatgaaatgtggcgggatatgcgctggtctgtggcgcgcatccaggacaaagcgcgctgcattgtggggcaaatctga

SEQ ID NO: 155449 - DNA, 279 bp, Enterobacter cloacae
atgcccgatatcgtgcgtgcgaagctgcacaaaatcaccggctacgtgctgcgtgacgcggagcaactgcccgaggcactggcgcacctgcagcgtgcgatccagttagaaagcactatcggggtgaaaaaggatattgagcagctagagcgccagctcaggccaaaacccgaaccggcaccaaaaaccaaaacgactaaaccgcgcacgcgcaaaactgccgctaaaccggcggcacggcgcgggcgtccaccaaaagcggcaaaagccgctggttaa

SEQ ID NO: 155450 - DNA, 294 bp, Enterobacter cloacae
atgaacataacctcccaacccaaagcaactagccaagtattcgatattcacgccaagcttagatcaaccaattcgcattggtcttattgccatgctgtgcagcctcacgataaaggttttgattaccaattcaatacgacatttgttggtgaaatggagttcgcagtttacgaacgcatcgaaaattatttcgtattagttgatttcttcaagtcatatgacgaggcatgtgatgatgctaaaaaaattattgatgaacatcctgacattaaaaaaatgctctcagccatttaa

SEQ ID NO: 155451 - DNA, 879 bp, Enterobacter cloacae
atgctgaatattaaacaacgcgaagaaaaagaatctctgattggcgaacgtgaaagccttcgtgaggagttggcattttcgcttgagggcaaaaagccatggcgccatgaaaattggcaggaaagcatcggtaaagctaactgcgaaaaccatggagaatatttggttcatgttcttactggaccagagttccgtggccgcgcaacagtaaaaaaatctctgtgcccggcatgcatgaaagcaaagctggaaaggattgagtctgggctgcgagctttacgggtggccgacttgatggacaatgcggggatcgcacgacgtttcgaaacttgtgagttcgataactaccaggccatcaatccggatgccgccaaaaatctcgcggcgtgtcagcgttatacagccagttggcctgatcgcctgaacgctggaaccgggctcgtcatgacaggaaattgtggtaccgggaaaaaccacctggcagtgtcaatggcgaaaagcatcatccgcgatcacctcgctaaagtgggaatcaccgatgttatgcgtctcacccgggccgtgaaaagcacttggcgccacaatgctgaaattaccgaggaagatgtgattgagcgtttcgcttcactggacctgctgattatcgacgaggtgggcgtgcagttcggtagcccgacggaaatgaccatcttgcaggaaattatcaatgcccggtacgaaagcattctgccgacaattctgatcagcaatctcacattcgaccagctgaaagagacgattggtgagcgaatcgtggaccgggttaccgatggtggccgcaaccgtctggcatttggctgggaaagtttccgcgctatcgcgtcaggggttgtagcatga

SEQ ID NO: 155452 - DNA, 1245 bp, Enterobacter cloacae
atgactaaggggaatagtttaagaagggatagtgattgtaatcatatattagcgcttggggctatagcaaaaataaatgaaatcagggaagatatgcaacactcatcgtcaagtataaaaggagtggcatatataataaattcgataaaacatcccgaagaggtacataagctaagggaggtatatggagctggtttcttacttttcggtgtgttttcagatgagcaacgcagatttgataatttgaataaaaataaaggtattcccgaggaagatgcaagaaaactaattttacgagatgaggatgagggtgctggacatggacagcatacacgagatagttttcatttggctgatttctttttaagtcaagatggccgcgatgacaaattaaataatgatatcaaaagggctttcgatcttcttttcggaaatccctttataacacctactttcgatgaatttgctatgtatatggctttttcatcagctttgaggtcagctgacttgtcaaggcaagttggtgctgtattagcaaagaattatgcaattatgtccacaggagcgaatgatgttccgaagtttggaggtgggttatattggcctgaatttaatgaggctaaaggttcatacgaagattttccaaatggaagagattatgtacgaggacatgattccaatgctaaacaaaagaatcaaataatagaagacatacttgggaaattgcctaaaagttctcaacctaaagttaagaaggttctacaagatagtttaattcaagatattactgagtatggacgagttgtccatgcagaaatggaagctattttggcttgtgccaggactcaaacaagtacacaggatgcaaatatttactgcacaactttcccttgtcataattgcgcaaaacatattattgcttctggcataaaacgagttgtctatattgaaccttatcctaaaagtaaagcttatgaattccattctgaatctataagcagtgactacaatgactctgaaaaggtattgtttgaaccttttattggtattgggcctagggtctacttcaatttattttcactcgttaatgggaatgggaataaaataaaaaggaaagatcgcaatggtgatgtgcttgagtgggatgaagcaaccgcaactttaagaaatacgctcctgccaatttcctacttggaaagagaacagatttctgttaacttatttgcaaatattataggggtttga

SEQ ID NO: 155453 - DNA, 777 bp, Enterobacter cloacae
atggtatcgaaaaaaattactgccttggctggcagcggccaaactcaacctgaaaccagccagaaggatatttatccagaaattatcccgttagatatgggggctatcggcggcaaaccggcgatggttacagatgctcgaaatctgcataagtttcttggcaataaagaccagtttgcaacatggattaagcagcgggtcgagcaatacggctttagtgaaaacgtggactacgagacttatttggaaaattccaaaaaaggtcgcccacgcaccgagtaccgtattagttccgatatggcgaaggaactttcaatggttgagcgtactgaacgagggaaagaggctcgccagtatttcatcgactgtgaagaacgcctgcgccgagtagcgccagaagaacatgaggcggcgttgttgggctggcgtaaaaatcgtgtagctgcctgcgaagatcataagagtatggccgacgcaatgaagagctacatcgagcgcaccggcgacaggcagcacggctttgcctacagcaatgaatgctcgttcctgaatagccttgtgctgggtatgcacccgcgagtgtgggcgaaacagaaagaaattccggttaagcaggtgcgtgaccatatgaacgccgatcagctggcgctgctggcttatctggaaagccgtgattgtgctctgctggatcttgatacccgtatagcaacccgtaaggcgaaactcaccgaactggcacaacgctggctggttaagcgtgttggaggtgctgagtga

SEQ ID NO: 155454 - DNA, 771 bp, Enterobacter cloacae
atgagaattaataaaaaaagtgatctgccgaaatggttctctttatcagattatgaatgttataaaaacatgtctgataatgagttaattaatcagctagaaggaaggtgtaacgcctattgcacagagcaaagcaaacagtttggtttttttggtaaaaccctatacaagggcgttatcaagtctgagtatgaaggagtcgtctcttttgggaaaaataaggaatatgataaaacattttatttaagtaaaagtagaactatctcaccgataagtattcgtgacctaaattttatgtggattaatctgatagagaaaaaagatatccatatagatggtaaagttgatgttgatttccatgatgattatcaacatgtatctgcaatagatttagcttcgttatttttcgatggtttgttttgtcgaataaatatacttaagcatgatgacattattatcgatgaactaaagattttactcaaaaaatggagagaggaattagatattaaagagcctgaaccattaataaaaaatggttgggaagtaataagaaacaaaattattgattacaacgccttccctatgattgatttgatgctgtgggagatggcgactggtcacaagataaccacaggagtcctcgctgtagccctcttccctgaaggggagtatgactcaatacaaatcaaccaaacgattaaaaagtttgtggtggcgctacttgactacagaacattagaaaaaattgagcatgaaatttctaataaatga

SEQ ID NO: 155455 - DNA, 903 bp, Enterobacter cloacae
gtgagagaaattattgtcgataactttgccggcggcggcggggcgagtacaggcattgaaatggctatcgggcgcagtgtggatattgcgatcaaccacgacccgaacgccgttgcaatgcacaccaccaaccaccccgatacgctgcactattgcgaatccgtgtttgacgtaaaccctcagctggcgaccgctggccgcccggtggggctggcgtggttctccccggactgtcgccacttctcgaaagccaaaggctcgaagccggtggagaaagagattcgcggtctggcgtggatcgtcattcgttgggcgctggcggtgcgaccgcgcgtgatgatgctggagaacgtggaggagttcaaaacgtggggtccgctcatcgtatcggctgacggtgggcagcgcccggacccggaacgcgctggcgaaaccttcgaagcgttctgcggcatgctgtccggaggtatccccgccgggcatccggcgctggtggagtgctgcgagttcctgggcattgccgccgacggcatgcaggcgcagcagctggtggccgggctcggttatgcagtcgattaccgcgaactgcgcgcctgcgactttggcgcgccgaccatccggaagcggttcttcatggtgatgcgctgcgacggggtgcatgtgacctggccggaagtaacccacgcggatccgaaatctccagcagtgcaggctggtaagctggcaccgtggcgaacagctgctgaatgcatcgactggtcgattgccgcgccgtcaatttttggccgtaaaaagccgctggcagaaaacactctgaagcggatcgcccggggaattcagcgtttcgtcctggacaatctgacgccgttcatcgtgaagtgtaaccataccagcaaccgttag

SEQ ID NO: 155456 - DNA, 948 bp, Enterobacter cloacae
gtgctggtgcgcagcggcgtcggcgtgacggtctacgaccgccatccggaaatcggcggattgctgacctttggtattccggccttcaagctggataaatccctgttagcgcggcgcagagagatattcagcgcgatgggcatccgcttcgagctgaactgcgaggtgggaaaagacgtgtcgatggcccaactgcaaaacgactacgatgccctgttcatcggcgtagggacctatcgttccatgaaagcgggtatccctcacgaagacgcgccgggtgtgtacgacgcgctgccgtttttagtggcaaacacgcggaacgtgatgggccttgatcctgccgcagacgaaccgtttatcgacacacagggtttaaacgtggtggtgctcggcgggggcgatacggcgatggactgcgtgcgcaccgcgctgcggcatggcgcggcgaaagtcacctgcgcctatcggcgggacgaggccaacatgccgggctcaaagaaagaggttaaaaacgcgaaagaagagggcgcagcgtttgaatttaatgtccagccggttgagctcacgctggataccgacgggaaggttaacggtatccggatgctgcgcaccaggctgggcgagccggatgcgcaggggcggcggcgtcctgtcccggtggcgggcagtgagtttgtcatgccagcggatgcggtgatcatggcgtttggttttaatccgcacgccatgccgtggcttcaggcgcagggcgtcgacaccgacgactgggggcgcatcagggcctccgtggagagccgttatcgctaccagacctcgaatccgcagatttttgctggcggtgatgcggtacgcggtgcggatctggtggtcaccgcgatggcggaagggcgtcatgccgggcaggggatcatggactggcttggcgtgccgccgcgcaacatgcattaa

SEQ ID NO: 155457 - DNA, 669 bp, Enterobacter cloacae
atggctgctacaaacggtatgattgatactgatgacgctgtaattttactcatcgaccatcagagtggcttatttaacacggtacgtgatgtgcctgtaccagaccttcgtaattatgtgacagcgatagccaaagttgccacgcttttaaatatcccggtgatcaccacggcctctgttcctgacggtcccaatggcccgctcatcccggaaattcacaaatatgcaccccatgccgtgtatgttccacgcaccgggcagattaatacctgggataatccggcgtttgtgaaggaagtggaaaagacgggcagaaagaccctgattattgccggcacgctcaccagcgtctgcatggcgttccctgcggttagcgctgtccaggaggggtataagttttactgtgttgtggatgcctcggggaactggtccaaaatcgcgaccgataccaccatcgcgcgcgtggctcaggcgggggcgatccctaccgatacgtttgccattgtcgctgaattaatgagaacctggaaccgcgcggaaggttctcgctttgctgagatcctggcagagcatgtctgtccggaatataagtgcctgattgaaagtttcggcaaagctcaggaaattgccagaacgggcccggaaaccaatctggagcattataagtaa

SEQ ID NO: 155458 - DNA, 171 bp, Enterobacter cloacae
atggatgtggaagaaattgtggcccttagtgtaaagcataacgtctccgatctacacctgtgcagtgattcgccaccgcgctggcgcaggtcaggccgtcttgaacctgcgccgtttccgcccccggatgtggaggcgttattaaaagcgtggctcaacgacgaacagtag

SEQ ID NO: 155459 - DNA, 228 bp, Enterobacter cloacae
atgctccccacaactaacggaagcattactaacattacgatgtgttcattagtgggggtaggtttgactgtgggccaaatgacctgctccccgttgactaagaaaaactccggtaacaacttccgcttctggcacatagccgacaccaaaaccagccacatatgggcaacggtccttgccctgatgacaggtaattgtatccgacttaaacacatattatttctgtga

SEQ ID NO: 155460 - DNA, 282 bp, Enterobacter cloacae
atgaacgcatacctcacttacgaccgtatcgaagatcggcgctgggttgaacagcagctcaccgacgagaaagagaagtggatcgacgaccgggcgaaagagctgatcgccatgttcccgaaagacccactttcaatgcgctccctcttccttccagcggcagccaccctggcgttaaccggtgataaagcacttgagcattacaacgactatatcactcgcctttgctacgaccgcgcagaaggagagtgggatcgccttcatccaacctgcccattttaa

SEQ ID NO: 155461 - DNA, 246 bp, Enterobacter cloacae
ttgcataacagcatcgggcactttaccgtaacggcggagggtacgctgacgcatcaggatgatgtctggacgcgcggcgactatccgcgcaccctgacgctcgataagcagggtcgctggctgtacgtcatgaaccagcgcagcgacaacattacccgtttccgcgtggcgccggacggcaagctgagcgccgagccagactataccccggtcggcagcccatcccagatggtcatttcaccctga

SEQ ID NO: 155462 - DNA, 1005 bp, Enterobacter cloacae; identical to SEQ ID NO: 114109

SEQ ID NO: 155463 - DNA, 249 bp, Enterobacter cloacae
atgtcggaattcaaaacaaaaccgccaaaaccagtggctttaagcaggagaattataaaaggtttaagcaggtgtgaacggtgtaaaaaaacaaggcttgaatgtaggcgcatcaacatgtcagatggttccaaaataattgcatgcaccgattgtatgggagctaaagccattactggtaaaaagcaaaagaaacctaaggcgatagaaatatcatcggctttcgagacgtcccgccgaaagcattaa

SEQ ID NO: 155464 - DNA, 348 bp, Enterobacter cloacae
atgatcccggtagcgctgaacatcctttccccagctacgtttagcagattttgcccatggcagataatgctgattaaagagttcatcgaacgtcagctcctttctcttgttttcacgctcctgcttagggtctgtgccggtggcaagggaacgtttatgctctatggcaatctgacgggcaagggtgacatccacttcaggccagtgaccaatggcgatggcgcgttttcgtccatgatagaggtagcggagcaaaaactttttacgaccttctcttctgctgaccagacacttgaggccggaaatctcggtgtcgctgtattcggcatcggtgctgcgtgcctctga

SEQ ID NO: 155465 - DNA, 171 bp, Enterobacter cloacae
atggcggcaggtatgaatacacacttcctggtcgaaaattcccgcccgacgaacgatacgctgaaaggctttaacggggttattcagcggcattccttgttttttaccgataaacaaccacggatttccacgctgtgttggcagcgttctgattacgtccatcgccagtga

SEQ ID NO: 155466 - DNA, 1959 bp, Enterobacter cloacae
atgcaacctgtaactttagatggaatgatcgcagcatcacttccttgggctaaagaagtcatcaagaataaaataatcccaataatttcatcacgagttaaagattatttagatgatgttagagccgcgagatttctaaatgacagcatggaaaaattcctttctcgtgtcggaggacaatgttctttagtaaacacattagctttccaaaatacccccgttgaactaaaaaaaatatatgaaccaatttctgtataccatgacaacgagcaatcaaactatgagtgtttgattaataacaaaattgacatcttaaattcttataatcatatattaataactgactccgcaggtatggggaagtcaactttaatgaagcgaattgcattatattgcatagaagaaacgaatcacataccaatttatctggagcttcgtcgcatacaagattatagcattgctgaacaagtaaagaatcaactaggtttaggtaaaaacatttccaattcatgccttaaagaaattccatttatttacttattcgatggcattgatgaaatacctcaagggattaaatcctccgtagtcaactctttgcgtgagtttgcagatgatttttcagaaagcaaaataattataacttccagacatgatagcttcctctctgagctgtatggattctcaaggttcaaaataaaaccattagattcttatcaagcgtatgatttacttagacgttacgataacactggaaatatttcgtcaaagttaatcaaaggtcttcgtttagaagaaggaagaaacttcgatgattttctttcaactccactatatgtttctttattattttgcgcatataaattcaaaccaataataccacgtaaaaaagaattgttttacagccaagtatttgatgctttatttgaatctcatgacctaacaaaagagcttggttacgtcagggaaaaacattctaagcttgattcaactgacttccatcagattctgcgaagattaggattttggtgtttaaaggagggtggaaggattgagttcactaaagatgatcttcaaataatcattaaagaaattgcgtctaaaataccagggttgactatatctgcatcattattcataaaagatcttatcgaaaccgtaccgttatttgtcaaggaaggtgcaataattcgctggtcacataagtcacttatggaatatttcgcagccatgtttatatgtagggacactaaagaaagacagcgaggaatattaagaacgctttataaaaacgatgagtctataagacataaaaacctttttgaattatgtgcggatattgattattcgaccttccgttcgagtgttataaagaaccttttagaagattatgtccacttatatgaaaaaatcagccaacgatcgatagcaagcaccccaaaagaagtcatttctaaagttgaacttctatttccaggtcgctcactaatttatatcttctctaagggagaagaaaacaaaaccctttccaaactaataaatggagacttcagagagtttaaagagcttaatacaaaagatggttacttaaacactacatttgcagatataggtaatgcatgggtagtaattgcacgtaatgaaacaataatctctcatgtattaagcatactaaaagtaaaaaatccagaatatttccacagtaatcatagattaacaagtgatgatacgaatcttacattggaggttcgtcgcgctataagacatgatgatgaagtaaagattgacgtaaattttgaaaacatcctaaactgcgatgaaaaaaccaatcttaacttaatttcaggaattttgacttttgataaaacacctcaattaaaatatagaaaagctcttactgaacttgacaaaataaactttgatgacagcaatggaataaatcaacttttggaagggttctaa

SEQ ID NO: 155467 - DNA, 1062 bp, Enterobacter cloacae
atgcgtaataaagaatacccccacggtttggtcatagccgttcatccatatccgagatatataaatagtgattggattctgcatgagtacatcagcgaatataaggagccctttaaatggaaaagaaggaaagagatacttgaacagtttgattatggattggtgtttaatacttatgaagaagcattgaatgctgctggggtaataaataatttcataaaggaaaaaattagtgagcttgaaatcagtcaagaggtcaaagattcgtattttttaaaggctgaaaaagcaataatctctaggcaaaggcttcaaaatgaagaaaaattaatgctttctgaagctttaaatattacttcatcactgtcaagacccaaagaagatgaagtgattttaaaattaaatgcttatcaacgcgctagtatatctatcaaggatgaactgctacaagagattaatattaacccgctgattgaaattgctcatttgaaagaaaatagaatggttattggaaaacatgcaaacggagattggggtaggtatctctattacaatgaacagaccactaaagttgcatttagagagaagatatcaagagcgtttggattttcaggtcgagatcactggggcagagtaaagtcagaaattagaatacggttattaccacgtgcaaatgaactattacagctttccagtgtaaaaaggatgcttgcagatgctcatgcaaagggccataaggtattaatggcgggtgggtatgtattttggtatgaagaaactggcaatgttggatgggttattaaagcgactaatagtagtgattcacttaaaagcggtgaaagtatctggcacgaaggaactattatatcgaaaaatcatgggagaatcgttgttttcccatatataaaagtaaatggtgaaaaagtccaagggcatacgaaaaatgctcctcatgacggaaaggctaagccacgacatcccagtgagtatgttgaattaccattccatgtacttgaagacgatttgatgattggtctttttggtgagcttaaatatgagtga

SEQ ID NO: 155468 - DNA, 261 bp, Enterobacter cloacae
gtgagaaatgtcgttgcttttgttcgaggttttcccgagcacaaaatggacggattgttaacaacggggctgagatcgacgagacacatccctgtaggaaatgatcaactagttatcctacacagccagttaagcaagtcattttttagtgataaagcttacatgcaggtttttgactttagcttggatggtgcagatttcaccgatttttatctgttggcatctgatgaacaaggctacattttccaatctaatccttaa

SEQ ID NO: 155469 - DNA, 225 bp, Enterobacter cloacae
atggaagacattatcaaggcaacaatgaaaagcttttactggcttgagggcggagctcagtttcgggttgaattgtccattgatacaagtgatgaaaatatgttcgatgtttctgtgtatttctatcgtggagaagagccattttacactcgttacttcaataacctcacagatgcttgtgcagagtttaatgggctggtaactgcggcgaagactaagatttaa

SEQ ID NO: 155470 - DNA, 255 bp, Enterobacter cloacae
atgtctgactggaacattgctgcaaagccgcaggaagagatcgacaaggttaacgttgacctgtcggcctccggagtggcgtacaaagagcgtctaaatatgcctgttatcgcagagcaggtagcgcgtgagcagccagagcatctgcgcgagtatttcatggagcgcgtgcggcactatcgcgagcagagcgttggattgcctaaatcgtccgatccgcgttatgttgagatggctgaatccaacaataaataa

SEQ ID NO: 155471 - DNA, 234 bp, Enterobacter cloacae
atggtttatgatattttagtttttcgaggccactttggaagttttgtcgattatcgatcttattctgggcgcgttcctccagaggtaagcgctatagaaattgatggcgagaagtactctctatccctctatcaataccaaggtgataagtatttagtagcccatcaagaaaagatggagtccgagtcgctagaactggcaattaacgagtttggaccatctccactgaattga

SEQ ID NO: 155472 - DNA, 507 bp, Enterobacter cloacae
gtgcgcaagaaggacaagctggatcagtacggtgtcggcaaattcatcaagtatttcgctgatgaactgaaggccaagcgccagcctggtatctgggtgcgcatggactacggcccggtcgaattcatcggctacatgaacatcacggcgctgagctctgacggtggtaccaacgacattgtcacgttctctaccgagttcaaagtcggcgatgcgagcactatcgaagtgaacgaaatcactgcggttgcggtgactggcgtgacggtaaccccgacaaccagcactggcacggcaggcggtaccagcaccttcactgtgaacatcgcaccaaccggtgctaccaacaaagacttcactgtagcgactaccgatgcgaccaaggcaacggctaccgcctctggcagcaccgttaccgtgacgcgtgtcgccaccggcagcgcgcagatcatcatcaacaccgatgacggaaactttgtggccgtgcatacggttaccgttacataa

SEQ ID NO: 155473 - DNA, 1194 bp, Enterobacter cloacae
atgaagacaagaaaaaacttgttcttgaatattgtcagaaaaattatcgttgataaagggatgattgctgatatcgctttccatgatcttgatagcgataatcctcatgctcacgttatgttgacattaaaaaccataggcccggagggttttggtaaaaaagaaagaagctggaatgacaagaagataatgatccaatggcgtgagtcgtgggccacaatgtcaaacagctaccttgaagccgcaggcagtgaagaacgtatcgatcaccgttctctcaggacacaatgtgctgatgcccttgccaaagcagaagaagcattcagcgctgaagaaaaagccttctggcttgccaaggcaaccgaaaccaatcgccctgcaatgcagcgtgttcatcgcgctaaatggcttagtaaggcagctcatgaacaaagagccaaagaacaggctgttcgtgatgctgccaagcaagaagccgttgaagtctacaaaacattcagtgaacttgaccttgaaatcgtcgttgatgtcagaagctttactgtctccgttcttgctgaaccagaagagattgtattacctaaagcacgctccggttcttctgccagtgaaccgcaaagacctgtgctggtagccccggcacctcatactcgtatgcgtggcgttaaatcctatcgtgatcaatacaaagtcagtaaggttgttgctggtaagaaaccatcggtcagtaattctgactctggaacaaatactattctgaaaacatcctcctctcaaaacccaaacaaggcatccagaagcgcccctgaacgtgttaagaggaaacaggctactccacggcaagataatatctttaaacgctttacagctcttttggttgattttatcaggaataaatttatatgggctaaaacagacaaagctaaagttgatcttatcagtgaagaacatgataaacgtattgctgaaaactatgtctttgatgaagtattaggtcatcatgtttctcgttctgaatatgagaaaaaagccaagtttaaccaagatgactataagccaacgtctgatgaaatcaaccgtttcccaaaccgccctaagaacgaacagccggaaagcgatcatcgcatggatctcataccacatgccagcaaagataaagccacacgtatgaggccaccgggatatagaaaataa

SEQ ID NO: 155474 - DNA, 660 bp, Enterobacter cloacae
atgattcagttaataatagtggttttcttggggcttctgttaaacataccatcacttacaccggtgctttttctcaaaaagacacaaaagagcgtgaaggtatcgatggcggtaagactgtttctacttaacgctttcttggtgctgtcattggtgacggtttcgcagaatattacgcaaaaatacgggctgtttcctatatggctggtatgtgttgctatcgctctttttatggctactctggtatcaacagttaaattcgtgcgtaagaatttaactgttggtaaaagtcgggctattatcctttcatcattcctgattgtctatgccaccagatttcatgccgtgttttcagatgtgtatggaagtggatatacgcttaacggatacaacaccgcatggacatttttcttcttgtttgcaagtctgttggcttatatcggttgctctgggagtaaaacatattctggttattctgcgccgtcatctgcatcgcaacctgattattccaaaccgaccaaagagtatgaaacacaatctcaaattgactacgatattgctgtaaaggggcggagtgttctgtctgatcccaatctgagtattgttgagcagcagcgttatcgagatgctcttgagaaaaaagaaaaagaagattggtaa

SEQ ID NO: 155475 - DNA, 1269 bp, Enterobacter cloacae
atgcgtaagtcattagtactggttctaggatttactattgttctgattggttgtgataaagctgttgaaaataaaagtatttctgagcttacaagtgaagaagcagatggtatttgcaaaagaccagaagttattacacagatagaaaatagcttcagaaaggggagtgttgaattcttaaatcgtaatccattaaactattccccgtttattgatagatataactctgtagaacaactttctgacaatagaagagcgtcaaggattgatgttacttataaatatagtgcggatgatttttcaaaaggattcggaactaccgataaagttaaagtaagtaatgcaaggctaactggcacaggtaaagacgatttatcatgtagtgctaaaatagagttcacatctgataaaatctatgggatttcattttcagataatttcacttacaatataaaaaaagaaaacgataaatttgtcactgacattaaactttctcttgaaggactaacacgtagtaaaagtgaacctacggtatctcaaaaggagtggcgtgataagtatgaagagaaacttaatgcagatgatgatgtgttgaggaatattcctgattctgattataaagtcatctcacagaatgatatatattacatttactttgcgcaagcaccacgtaagttcagcgatgatgaattgatgggtttctttagctctaagtggaacaatacgactgatgtctttgccaaagaagatattaaaaaagaagagcttcctaaaataaaagaaaaaattgagcaatttaaaaatctaaaaaacatattgtcttactcaacttttaatttgagtcagcaattggcagacaaaaatgctctcaaaacagaaaatggtgaaaaatctatagaaacttctactagttggttttctacacgtgatagctatgacatgaccaagaagggttatagctatgaagcgccctcatgtaatatgaacggcggtttaacaatcgaacgacgtggaatccgcttcactacagatgattctttacgtgggtgtgtagttggcgtaccggatgacaaagctcgcgaagtatctgctaagcttgctgccataggtagacaaggaggtaatgctggcttctttgttaaatcttatcttcatatctctaaggtcgatggtagtgacaataccattcatacgactgtgattaaggatgaagttaacgtttacgatcctgaaaccaatgagcttattcttgataccgtagttagatag

SEQ ID NO: 155476 - DNA, 567 bp, Enterobacter cloacae
atgggtgtatatagagatcgtcaaggtaattatgtaacaacggaaaatcctactgaatcacatcgcaatataacagatgcttacatttcggaagacacacaccgtttgaaaagtgatccaagtcgtcggcaggcggagtttgaagggaacctagctattagtagatttatcggcatcgtcatgctaatttgctttctttgggccgcgattttttatttaattctcattcccgggctgaactccgccgggatgttaatttataatggtggtattctaggcattgttggtcaaattatttggattatctttaaagctgcatttacattactcaccgttccaatgatggttgcgggtatcgtttcgccgtatgatccagggacacattatatatcgcaagcagtagtgatggccgttgtatcaggcatcatttttaaattcagaaaaaacgtaaaaaaaccgattgtttccactctgggatttctcgctatctgtacatgtgtatcagtcggattggttgcgaccaatgcggatctatggtcacaatttcaaatgttcccgaacctttga

SEQ ID NO: 155477 - DNA, 369 bp, Enterobacter cloacae
atgaaaataattcacgcactaaaaatcggaatgcttacactactcattgtaggttgcaacgacaacggttttaaatcacgtacaattactattgaaggtcacaaactagaactatccgcaaacaagtttgcaggggggtttaaggataaaaataaaacttgcgatatagacacctacaaatcagacagagaaggtgatgaaaaaatatggtccgaatatattatatataagtgcggggagcacttgtttttcagatttgatttcaaatacccagtaactagcgctgaaccaatgccaatgaggtttggcagcgcaaataatcgcttccaagaacccaagctcttcacatggaacgatgtgaaaatgtaa

SEQ ID NO: 155478 - DNA, 192 bp, Enterobacter cloacae; identical to SEQ ID NO: 104028

SEQ ID NO: 155479 - DNA, 267 bp, Enterobacter cloacae
atgcaaaccgctttttcttccccgtcttctgcccctgccgcgccactgatgccggtttctgatgccgttcaggagcgctttatccgtctgcctgaagtgatgcatctgtgcggcctgtcccggtcaaccatttacgacctcatcagccgtgaggctttcccgaaacaaatcagcctgggcggcaaaaacgtggcgtgggcgcagtctgaaatcacggcatggatggcggatcgtattgccgaacgcaaccggggctatgacgcatga

SEQ ID NO: 155480 - DNA, 417 bp, Enterobacter cloacae
atgattactcgcgcccagttcatcgacgcaggcgaccagaccggaatagtcagcgagaaggcgctccatcgcgttcggcgtggtattccagcgaataatattcacttgtcccccactacccggctcgctgccatcaccatgaaccgatgcgcccagcatcagaagaagcgttttacccgtcgtggatacgccgtggaaatgaaacatgcccacatccataccggcaggaaccagaagcatcgaagcaaaggacgcactcagcgcaaaggtctgcgcccagccatggacattttcccgaatgaggttaatccactcctccagagccccacctttgtgcagtccgggacgcacgcggaatcccggcagcagataatcaaacccggtcagagaggtcacaacaggctcatgaccatgtaa

SEQ ID NO: 155481 - DNA, 177 bp, Enterobacter cloacae
gtggttgagatgccagagcagggttcccgtttcattccagaaatcggtaaacaggtcgaaatcatcgacgggaccaaggatttcattgctgagggcttccagcgcggaggcgggcaggttgaggagaggaagactggtgggggtagtaagcttaaacatgattatctccataactaa

SEQ ID NO: 155482 - DNA, 414 bp, Enterobacter cloacae
atgaatctgctgatgaagatcctggagaaaagccttgagaagatgacgcccgatcagctaaagaccgtggcggaagaattgcagacaggctacagcaaccccacgccggagttgctgaccatggcaatccaggcggggataaaaacatccgggtttgcggcctatcagatggcacttgttgtcacaaatggtgtggcgaaagccctgttaggcagagggctgaccgttgcaggaaatgccatgctgacgcgtactatgggcgcttttgccggtcccgtgggctgggtgctcagttctctctggctgctgattgatttagccggtcccgcataccgggtgacgctaccatcctgcatttttattgcctacatgcgccagaagcatctttattcacctgagaatactgacgtttag

SEQ ID NO: 155483 - DNA, 321 bp, Enterobacter cloacae; identical to SEQ ID NO: 114083

SEQ ID NO: 155484 - DNA, 156 bp, Enterobacter cloacae
atgctggccgcgtgggtgtctctggccgcagtgaatgcgctaagcttgtcggtgatgcgctggctgttctctgcggactgcctggcggcaacattttgcagggcggtaatgactgtttcgggtttcatgttcaggctctccgtgtattcaacctga

SEQ ID NO: 155485 - DNA, 639 bp, Enterobacter cloacae
atgtcatttactagctttttcaacaatcgtggtgtaattctagggtattcgccaggacgccagcgctccagtattaaaattgtttctgagcaggataattcattatgttcatgtactgtctccttccacattcccctgaacgcatcctgccatccagctgtgattaaaggcggaaccgtaaaagttacggggatacgttttgctataaattcgcgaccagaatgtccctcaacaagaagtgattttgctacatgtcgtgctgagtacggcacgatgatccggaattgtttatgcgtggtacctgaaataagctccatatcactccagagttctttcactttctcagagcttattctgtctaaattatcaattataagtataaattttgcattatcaggcactgtagatctttctgtaaaaccggcaagtgcattcgttagttctatagttcctatctctctacttataagccatgtttctgaaatcttatctacgctattttgtttaaagagatcgccgactgttatgatatcttctaccttgccgatgtttttttgtcttctactatgtttgcctttaagccataaaagaaggaggcccggagaaagtgctgagaggagttccagtaagagaatataa

SEQ ID NO: 155486 - DNA, 312 bp, Enterobacter cloacae
gtggcagccggcggcggccgtccgtgcaaggggaaaagtgcgaaccgtgtagtcccgttacccgacccggcctacgttgatgagatgcacaggctgcttgccaacaccagggagcagtttgaggacgaccccgtcaccggtgaacgtcgtgccctgccgatgtggaatgtttctgaccggacggtcaggaactggctggtcagggcaaccgatgctgcggaacgcgacagagttaaactcagtatcagcatcagccctcacacgttccgccacagttttgcgatgcacctgctgcgcggtaataacaactaa

SEQ ID NO: 155487 - DNA, 1104 bp, Enterobacter cloacae
atgtttgatgatgatgacgcagacctggaacctgggtcccctgaactcagtccggaggttcaggccctgattaacaatggactggaatttctggacaaggcgcgggaggagttggaagcagcaaagccaaagttttccatcgttagcttctggactgcagttgaaattctgctgaaggttcctcttgcccatgagcactggagtcttgtctgcagccgaaagactcctcccaaaaaacagagttacctggacggggattttcagtccattacttatgacgaaattcgtaccctcctccgcgatgttcttcaaaaaccactaagtgatacaacccataacgtttttgacaaagtccggaaacaccgaaatcgtgtggttcacttctatcatccctcctttacagatgcggaacagcatcaaattcagaaagagcaggcagatgcctggtttgcccttaaccgtctcatgcgggatgaatggcagtcaattttcggcgctaaagacagctacagctggaagctggcgcacggtgaaacccgcctactcaggggaagtgagttctatgctgccgttcggctccggcaggttaaagaggacttggatgcgctggccaaatcaggtaaccagataggggtctgtgagtcctgcaaacaaaaggcgtcggttactcaatctcacatcaccggaagcgaggaacgaacgctgctcattacgcggtgtcgtgtctgtaccagtcagtcccgccatattttactcagttgttcaaattgcgacgaaagacagtccctacctgaaggtgatgaaccttttacctgcgacaactgcagcgagaccgtagatcgaatggaacttctggatgaggaaacatttcggagcgtcgatgagcagatgttctccgtactacccggaggttgcactaattgcatggtacctgacagtgtctgtaaacacggtgatggttatctttgcacccagtgtctcaattactacacggagctgcatgcgtgtggatactgcgaccactttagcgatagtgttccgcagtttagtcatcacatcggatgtgacttttgcgatggtgacagccgctatcatggcgattaa

SEQ ID NO: 155488 - DNA, 1251 bp, Enterobacter cloacae
atgtcaacgtggacaaatatctctatcggtaacttcactctgtacgatacgcagaatgactattatcagtggtattttcaggagggcgatcgtgtcagggagattgccgaagaggaggacggattctggtcagaagaaacgttcattggctatcgaacgaccgtggcacagatgcgccgacggttacagctgaacggatatgaccgggccgctctcgaacgggatttttcgactgccattgactcctggaaagcggattctattgcggagctggccgaacttgaaagcgaagaacatccccacggagaacattatcttcaatacagaatcacctggctgaagcatgtcatcccggttcttgaaaatgcgacgctggatgattggcttgagcggttaaacaaggcagcacattggccgagtaacgagagtgatttctcccaacttttgacgtggattgaaaccggtgatcctgtgctttccctgatggtcagctcggttgactctgattgcttatgggttcgtgattcgaactttaatttcccgtgtacacaacaagacttttactctttagcgattctgctaatcactgaggatgaagctgtatgcgaactggacctgaaatggctcatttctgccggatggactgatgattttgacgatctggaagaaaaacatgcaggagccactcaaccgcttagacatgccagacaaagcctctctgagttaagtgcactggtatcctctgcacccgaaaatcctgtactggtgagaatgtgttactccggcataattaccgttatggaagcttaccttgcagatattttcatacgggcagtaaagcatccttctgttaagcgacgtttcgttgagagctacgagacattccagaatagccctaaaaagccactttcagaggtcttcaatctgctcgattcgctggacaagactatcgagacggcattgctcagcctgtcgtttcatcatattgccacagtgaaaaaactctatcaggaatgtctccttgtcagtttcccgcccgatatattgaatgatatagcgcgttcagtgatcattagacatgacattgttcatcgaaatggccgggataagaaagggaagcaccacttaattgagtgccatcatgtaaatcagctcgaggagctcatgcacgtatttttggctggtatagacaaacagattctggatggacttcagctgcaattccataataaaaatgacgtgcaaatgtaa

SEQ ID NO: 155489 - DNA, 720 bp, Enterobacter cloacae
atgagtagaattaagcagttatgtcttgtgatactcctcgttacctggggggcatactacttcaattttggtattcacggagtactttccgccaaaactgaggtgtgggggcaattcggagactatgttggtggggttgtcaaccctatccttagttttgtaacgatatatctgcttattcagtcggttagcttgcagcgtgagtctaatgatagcttgatgaaggaaattaatcgccaggaaaaacttgaggagtataaaaagtttgagttgcgtttctttcgcttgttagaaacgcaggaagagagttttgaccgatttagaataagtattggtgaaactgatgatggcaatattgagatgctgcatggcgttgctgcagtttcttatatagaaaatgaactgtctgtgcttattgatgctaagattgaaagggaaagggttcaaggttggctcgactcattggatgatgatggggcttatttttcactcactagaaggttttatctcatattgaagctgattaatgataatactgcgtctaggagtgaacgattagaattgtatgagatattaatgaatttgactgatatcaaagtgattagcatgattgctattcttagtgtctattacgattgggatgtgatgaagtatatcaagtctagtgatattttaaatagggaagggttgaaggagtttgttgagctttatactccctaa

SEQ ID NO: 155490 - DNA, 822 bp, Enterobacter cloacae
atgtctgtaaattatgacgttgttatcaaaagcgggaatagttcggtagatatggactatgctcttgagactctttcgggtgcttctgatgtgacatgcctcttggcggaagcaatactcagaaaaaaggttatacaaagacgcactgcatcaagtccagctagggccgttttgcatcaaagttttaaaagctcgtatggccaaaattttgaattggttattgccgacccaaagctgaatgctcgattaacggaaatgacgaattcagtctttacagagttaatgagtttttatatatcagaagcattatatatacaaaacccaccgttaactgcaaaagcattggagtatattgaggagcttgcagacttagaggatgaccttgttagcaggattcgaaatccacttattcaaatgcataaggtaaattacagatgcaaatgggatgttgagtttaactaccatggggcgaaccaaaaaagaaagattgttaatttagataatcgaacggcatctaatttaacctatacagagacaaagcgcgagcaaattaatattattgctgttgtgacaaggtttaactcccgtacggggaatggccgtttagttcttcagggtgaggatgatactgttgcatttgggttctacgttccatttggagttgtacctagtgctcagaaaaaaataatgtcactaaatcttcataataacaatggaagaagagatgattttacatttcttagtatggtggttagtagggttgtaattaaaagcggtgacactgtaaaatatttagtgcattcagcaagagttctggaataa

SEQ ID NO: 155491 - DNA, 246 bp, Enterobacter cloacae
atgactacaaccgctatgttcatggtttcgacattttcaacaccaacagggattagcactgttaacatagctgactttatgaattctggtgttgcaaatgcaactagaaccaaattcactagcagagatacctttgctaactaccccatggatgagattgttgcttctatctctactgcaaatatcctcataccatcgcaactcgctactcctgacgagattgatgcatggctaatggacctgtaa

SEQ ID NO: 155492 - DNA, 1113 bp, Enterobacter cloacae
atgaataattctaaaaatgaaattcactcaattgctttcctgcgtggagtagcatgtctttttgtagctttataccacctcaaaagcagcgcacccagcgactctatattttacaatcttttcaggttcggggctttcggtgtcgatctgttctttatgataagcggctttgtgatagtcattgccacaatgaatgataaaaagtcagacagctttttcataaaaagagtcttcaggatttacccaccactcatagctgcagttttacttcaggtatttatatctaaatccggagtgtcatttaacgaattaatgtccgcaatcgtgccattacataatgactacactgctaaagctccagactttggatttagcttcttgattgttgcatggtcaataacttttgaactggcattctatgcgttattcatggtttcaatgataatatcacatcgctacagggcgctgatatgctctactctaattcttgcaattgttataggaactcaactgtattacaatggttcgttctctttaacgcaagcaggtgcatcacccgaaataaataatagcaacttaagttttattagggtatttggatgctcaataatgattgagtttatttttggaatggcgattgcctatgtttatatgaatataaaggtagatacttcatcattggtggcgagaaggatttatacaattctttcagttttggctttgatgtatttgatcccatgttacctaggcgggtataaccgaggaagtggacttgcaggttatggcacatgggcattgctgatactcttcatcgcgctcggcgctgaaaagttaaacattttcagatggaataagtcgatgctgtttgtaggggcaatatcttactcactgtatcttttccatattccagtgcatgaactcattaaacagataattcctgacaaactatctcagataaagaacatagagctacgcgcagtttgtgtcatgatgcttgagctttcagcatcgatgctggtcgcctatctatcatttttatttattgaaaagccatgcattaagtttgcacgaaagcttatcgagtttagaagtagatggccatccatggcctga

SEQ ID NO: 155493 - DNA, 231 bp, Enterobacter cloacae
atggatagtattttgccgggcgaatcaaaaagcatgccacttgaaagcgggaaggttgtcaaatactcagctaaccgggctgtcaattttgagtttttgctgacagatggcacttatattaccggtgttattcctgctggtgagacacttgagtttaagagtaacggctctattcaagaatttaacattaaaatttttgaagctccgagacgaccaactgccatagattaa

SEQ ID NO: 155494 - DNA, 408 bp, Enterobacter cloacae
atgggcgttaagatccgcggcatcgaacaagcaaagagaaatctcgaccgcatcattggcgatatccagggtaggaaggtagtcagggctatcaaatcggccttgttaatcatcgcacctgaggccgcaaggatgacacctgtagccgccacatccaacctgattaactcgcaatttcaggaaatgatggtaaatggcacccgcattaccgggcgagtggggtattcggctaattacgcagtatatgttcatgaggccaaagggactctcaagggtaagcctcgcccagcatcacagggtggtggtaattactgggacccgtctggtgaacctcagttcatgaagaaagcaggcgatgaaacgcgtaacgccgttgatgccgtaatgcgcaaggagctttcactatga

SEQ ID NO: 155495 - DNA, 174 bp, Enterobacter cloacae
atgacgtacaaatcagttaagcacggtctaccgcgctcgttcacccgcgtatgggtgatgaccgacacagggcgggagactaccggctacgtgaagtcggacggtgagtggttcatcaactgcccgcgcatccgggcgactggcgcgaaggtgctgcgctggaaggagggctga

SEQ ID NO: 155496 - DNA, 648 bp, Enterobacter cloacae
atgcgaaatcagcgaatagacagtacagggtatctttatcattgggtaagagccaacccgtataagaaaggagataaggaacataattatgaggttgcttacaaaatctttttgaatatccttcgagatggatttctcaagccgggaagcgcgagaatgaccgccgatgtagaagccatctgctttactgaatctccagaatattttagtgagtgggatcaatcaagatatcagccgtttggcttcaaatttgttaaaaaaaacatgtatgaatatggtggcaggccagtaatttacggttcttatgaagataaggatgaattgccatcaagtttgaaatggcgcttcgctccacatctacccacgacaattacaactagctggccgtatggtttggattatacatgggaaagagaatggcgattgcgaacagattatctagaccttttagaggcagtgagcgttatagttccaaatgagtcatttgcgtcaaaacttgagactgatgtgatgaacatcataagggaaaactcaatctactactggtgtggtagtggtgatgctcgtgatgacgaagagtatcgagattacttttcatcaatatgggagcgagttgagtatcccaataaattccatgatatcctttaa

SEQ ID NO: 155497 - DNA, 255 bp, Enterobacter cloacae
atgtctgatttagagaataggattaaagagttagaggatgaaaacgataagttgcggctggatattcatgccctaaaagttgccgtagtcaccatttcttgtgttgtaaatgaagcagttggcaagtcaaagggtttaatggctgaaacgatagaggactccttaaaatacgatcccgaccttgagcacagtgaggagtattttaataagttaaaggatgaagtaattcagttattaggaaaagcaccagaatag

SEQ ID NO: 155498 - DNA, 165 bp, Enterobacter cloacae
atggataacgatgacgagcgcaggccatatccgccagttaacttcatcgactccgacaactggcagccatacaccaggctggtccccgccaacgaagtgcatgagtggatatgcaggcgaactgcagaaggagataaagtttatgaacaggcacatcgtttatga

SEQ ID NO: 155499 - DNA, 270 bp, Enterobacter cloacae
atggaacgtaataaactggtaagcactttaagattcgtaagcccaaaaacagcaaactcatttaaatatgaaatctatatcgatttggatggtaatccgccttttgcggttctttacacggaagtgaaaatgagtaccgatttagacccaagaaacttaggtgaccgctatgtttgggtgaaggttgatgggtatattcgcctaaatggcccagacattgagcagttagaaagtgagtgcgagacgcatattaaacagatgcttgtttaa

SEQ ID NO: 155500 - DNA, 198 bp, Enterobacter cloacae
atgctggaatttgtggtcattgccgtgagactgttatcccactcatcatcgaagaaaatactttccaacgtgataaatgtgagtgcccggaatgtcatgggattctttatgcttgccggacacctgggtgcgatgattatgccaaaggtggaaaagcatacgatgaagaattatgtcctggttgcacaaaggcaatag

SEQ ID NO: 155501 - DNA, 1167 bp, Enterobacter cloacae
atgaatttttgggatgatgaatatttatccgaaatcaacgaaattaacgcctatatgtcttccataaaattcttcaacaaattgaaagatatgagtttggatgccattggtgatgaactatatgttgatgcagtgttaattcatgcttgggaacattttaaatacctcttaaaatttcgtaagagtgatttgataaaatacacaggctttaaccagaaacacctaagttcacgtgctacaccaatcctgtctgaattacaagataataaatatagattcttaagttacttactccgcttgatacatgaattttatttttgggaacctagcagagaagatctccctgatattattgatagttctgtattacccagactggcatcattatccaaagagaatcagtcatattcacagcttctgtggatagagcactcaatggctacatcaattactagggacttgataaactctgatgagtttcaatcaatcagaaaaattgcaaacgaaattgaagtctacgaaaacaatttatctactcataaaaatgatgtactcgacgagttcgaacacaagataaaaattcgtataaccgaatcagaatccttaataaagaaaatcgaagagctagagattgaccttgagaactatgaaggaaagctaagcgagtataaaaatgaatataattttgttttactaagcaaagcatttaaaaatatgagcactgcaaaaaacacagaattaaaaatcgccaaaaaaaccacaaggcttttcaccattttattagcagcccctcctttatttactttttgcaaccatatcttttcatggatcgacattgggacaggactaaattcactcacattttacttaccattattaaccatagaattattgacattttacttcatgcgtctttattacggagaagttaagaccctgaaaacacaacttttacagattgaacataggctcagcttatgtgagtttgtacatgattacatagataagaaaaatgcagataaagataacaagtcatcatgggatgctttcgaagcacttattttctcaccaatacaaatttcagcagagaatattccttcgttgttagatggtgcaaatgcagtcgcggatattgcaggtaaagtaatgtccaagtcgaaaagttga

SEQ ID NO: 155502 - DNA, 267 bp, Enterobacter cloacae
atgacaattgatatcgaatttaaatgtaaaagtgccacggtaagcggtagcaaatgggacgtggtaaacgtagagattgactcggttgacttacacgaattgctcgaagctattggcgataagcgagtattcgaaagtatcgaccttgatgactacatcgactcggcagagtcagcagggcataccgatgacattctggatcgccttgacgctgatgaagtaattgagtggcttcgcaggaaaggtcacctggagactgaatcatga

SEQ ID NO: 155503 - DNA, 282 bp, Enterobacter cloacae
atgagtattgacgatctttatatgaggcaagaagaatgggcgcttgaaatgcttggaagatcgggtgctttaacaccttgtacacatcatgaaggtgtgtatatcgatgagggcattgaattatctgaggcgtacaaatatgccatgacggcatataaaaatagcaacggtaaatcgccatttgaaagcgccagcgaaatgactgatgccataaaaagcgcctatgaacaacatggaggaaatgacctttgtcctttatgcacaagtcatgtagacgattag

SEQ ID NO: 155504 - DNA, 240 bp, Enterobacter cloacae
atggatctacccctagtatacgtcaataaatatacaataatagtggtgattaactctggcaagggcatgaagtccttatctatgctattgattataattggtaatttacttttggcggaaaatgtacatatggttacacgccgataccaatcactcacggaaacctcgaatttacagggatatagttatttcaacggccccgcagtggggttaaatgaaaaaccaaattcgagggtatga

SEQ ID NO: 155505 - DNA, 903 bp, Enterobacter cloacae
atgtcacacgtttctgaaaacaaagtggttgctgcaccggttccaatgacaccgctgcaggagttctggcactacttcaagcgcaataaaggtgcggtagtagggctggtgtatgtcgcaatcatgatcctgattgcggtgtttgcgaacttcctcgcaccttataaccctgcggatcagttccgcgatgcgctgcttgcacctcctgcgtggcaggatggcggtagcctggcgcacctgctgggtaccgatgatgtaggccgcgatgtgctttcgcgtctgatgtacggcgcgcgtctgtcgctgctggttggctgcctggtggtggtgctgtccctgattatggggattgtgcttggtctggtggcgggttacttcggcggcatcgtcgataacatcattatgcgtgttgtcgacatcatgctggcgctgccaagcctgctgctggcgctggtgctggtggcgatcttcggtccgtctatcggtaacgccgcgctggcgttgaccttcgtggcgcttcctcactacgtgcgtttaacccgtgcggcggtgctggtggaagtgaaccgcgactacgtcaccgcgtctcgcgtggcgggggcgggggcgatgcgccagatgttcgtcaatatcttcccgaactgccttgcgccgttgattgttcaggcgtcgctcggtttctcaaacgccattcttgatatggccgctcttggcttcctgggcatgggtgcgcagccgccaacaccggagtggggcacgatgctctccgacgtgttgcagttcgcacaaagcgcctggtgggttgtcaccttcccgggtctggcaatcctgctgacggtgctggcatttaacctgatgggtgacggcctgcgtgatgcgcttgatcccaaactgaagcagtaa

SEQ ID NO: 155506 - DNA, 936 bp, Enterobacter cloacae
atgactgaacataccaccgttggcatcgatatcgccaaagagacctttgatgtatttatcagtcctgacgggattttccttcatctggacaatacccctcagggccatcagctactcctcgacgccctttcatcccgtgccgttgcacgcatcgtgatggaagccaccgggcgctaccacaaccttcttgctgccacacttgaacttgccgggctgcctgtcgccgtcgttaaccctgctcaggtcaaacacttcgcacgggctctcgggacgctgttcaagacagacccgaacgatgcccgcatcatctgcgagtttggccgcagaatgacaccggatgtcagacccgctccggacgaacagacacagcgtctggccatgatggtatcccgccgccgtcagctggtggacaacagaaccatggagcagaaccgctacggctcctgcactgatgagcttatccggacgggcatcaaacggcatattgactggcttaatgcagagataaaggacacggatgacgacatcgaccagcagataaaagtgatgccgctatggcaggagaaagtgaagctgctggaagaagtcaagggtataggacggacaacgctggcggttctgctgtcgatgctgccggagctgggacaacttaacagatgtaaaatcagcgcactggtaggcgtgtgtccttatgcccatgacagcggaaagatgaaaggaaaacgatgtatctggggaggacgaagtgcggtgcgtgcagcgctgtacatggcggcaatgtcagcggtgcgttataacccaaccatacaggctttttttgagaaactgagaagcaagggaaaagcctttaaagtggcgatgacagcctgcgtcagaaagctggtaacaatcctgaatgcgatggtgcgggacaataaaaaatgggcggcagcttag

SEQ ID NO: 155507 - DNA, 564 bp, Enterobacter cloacae
atgaatttagctctagctatcgctactgtctttgctaccctttttagcccattaatagctgtcagagtacaaaaatatttagagaagaaatcagaaaagcaaacaataaaagttaaaatattttcgcaacttatggctactcgagctatttcatctcgtttactacctgaacatgttcaagcattaaatatgattgacttagccttttatggagatataagacgtggaaaagtaaagcgttccgattcagaaaaaaaagtcacattagcttggaaggaatatttcgcccacctttgttcaaccgtacccttaaaggaatctggggcagaattgtggaatcaaaaaagcaatcaactttttttgagcttgctttatgagatggcaaatgatattggatatgactttgataaggtccatttgcagaacgctatatattctcccactgcgcatggtgatatgaaccttgatcaaattaaaataagaaaaggtttagcctctatccttacaggagataaccccattaaggtcgaattaactggcaaacaagataaaaataaaaactaa

SEQ ID NO: 155508 - DNA, 129 bp, Enterobacter cloacae
atgccgctggacatttattgtttgcataagctgactctgtgtacagtgattgctttacttaactcttcgcacatctgctgtagtaccttcaacctgcattttgtaacctgttccgctattgtaaattaa

SEQ ID NO: 155509 - DNA, 2874 bp, Enterobacter cloacae
gtgtttttcactcaaaatggaattcgtgatgcagatgatcgtattcaggctaatttgggtcttggtctaagatattttgatgccgattatatggttggtgcaaatattttttatgatcatgatattagccggaatcataatcgtcttggattgggtgctgaatactggcgcgattatttcaagttaggggcaaatgcttatgttggtctttctgggtggaaagattcacctgatattgaggactatgaagaacgttcggcggatggttgggatatccgcaccgaaggatatttacctgcctacccccaactaggtggaaaacttcaattcgaacaatattttggtgacaaagttggcctttttggtcactcggaagacgatcttcaaaaaaatccgtatgcgattactgcggggataatctacacaccactcccattagtatcagttaatgctgattacaaatcaggcaaaaatggtaaagatgaaactcagttaggcttgaatattaattacagcttgggagtaccatttaaagatcagattaacccagataatgtagtatttcaaaagaccttattaggcagtcgatatgatcttgttgatcgtaataataatatcgttcttgaataccgcaaaaaagaagtgataaaacttagaactgtatcattgattaccggaagtagtggagatcaaagatcgttagaagtagcggtaaaagcgacacatggtttgaaggaaattaaatggaacgcaggagcgtttctcaaaaatggtggaaaaataatacatgacggtggagagagttattctatcgttctaccagcctattctgttactggcgaaaataattacctgattactggcgttgcatatgataagaaagggaatgcctcgtcaccagcagaaacacaagtttcagtaattaaggggaaaataagtcaaattacgagccggtttactcctgctcaatcttctcttacagcagatggtgcttcagaacaaattttgaggttaagtttgcgtgatgaaaaatcaaaccctgttcccgtcaggattgaagacattaatctgggtgttgagcgttcgcaggaatcggccgacgtcaaacgtattaattcgtcaaagttagaatctgttttatctgcattcagggaggtgtctgcgggagattatgacgtaacagtgaaagccggcactataaatgaggtcatcacattgattccagtcgtagaagggataaccctcccatctgctaaggttacggtcggaggctcgcctgttgttagcgagctgaaaatcagcggcacgctggaggtcggtaaagttctgaacggcacctatgtgtttaatgcgaatggcggcgagccgacggataagtcgctgtatcagtggggtcataaaggtgaaacggcaggtaacgtgggcggaagcggagcggaagtggcttctggcggcaccgtgccggcctatacgctggtttcaggcgacaccggttcagtgatggaattatcggtacaggcgaagaacggcgcaggcgtaacgggcaatacggaaacggtggattcagcaccgggcacggacggcaacgagaccgatggcggcggaagcggaggggaagtaatcgatccttcaaggagcccgctggttagcgagctgaaaatcagcggcacgctggaagtcggtaaagttctgaacggcacctatgtgtttaatgcgaatggcggcgagccgacggataagtcgctgtatcagtggggtcataaaggtgaaacggcaggtaacgtgggcggaagcggagcggaagtggcttctggcggcaccgtgccggcctatacgctggtttcaggcgacaccggttcagtgatggaattatcggtacaggcgaagaacggcgcaggcgtaacgggcaatacggaaacggtggattcagcaccgggcacggacggcaacgagaccgatggcggtttaagtggaggggaagttgaccctgtagctagaattacgtcgataatagttaccaaggatcactcactttctggtaccggtttaagtaatgaggttaaggttgaagtagaggacgcattaggtgcaccactaagtggttttcctgtaaatgcatcagtagataataatgcgcaaattaaacaaccgagcgtgatacttgatgctaatggaactgcgattttcgaggtgactaataatgtagctggagaggtaattgtctcggcatcagtcattaactcttcaaccgagagtgtagcaacaaattttgatgccgttatttctggagccaatgtgaatgaacattctttcggagttaatgatggattcccaactacggggggggaaggatacaatttctccttagagattaatggaactacagattttaataatttatacacatgggggagtaatcacgcttcagcaactgtgaataatggcgttgttactattcaatcagatgatgttgtcaatgcacctgttgagatacatttcgaatctccagatggcaaagtatctggggtatatacattcacaatcaactcatggtttgtcttgtatgccggttacgtaaacaaggctagtgcggaaaatggatgtatatctatcggaatgagtgtcccgtcattaggaatggtcacaaattctacgccaagcggaggtaccggtcctgctgcttcgagggggatagggacactaataggtgaatggggtaatttgaattcatttcctccgggagatattacatgggtatgggctcgtgaacaatatacatccagccctaaacgggattatacagtaagtgtaataaatggagcgattagtaatgacactgtaacaaacgaacgaagggttatttgccacaagtaa

SEQ ID NO: 155510 - DNA, 372 bp, Enterobacter cloacae
atgttatccattttcaacacaataaactggacatgtagggttaattttatcacagatctggaaggtataattctcgttcaccctaatgtgctcatcagaaacaacagttcgccagaaggggatgccttgattttaaaaatgcggcggtacagagtcctgagaaaattgatggcagagatcttggttaaaatgtcaaagcgtaactacattaatatcatgccaaaacccgacgggctatataccggaaaaatactaaatccgagggtctggtttgtgtggggggggggtaaatattacgataactctatattttttatgtgggtaaatacatcgctctttgttgaaggttgtttttgtttggaagggttttag

SEQ ID NO: 155511 - DNA, 165 bp, Enterobacter cloacae
atgaaggagcgtctttccgacgaacagatcatcagtatcttttgcgaggctgaagccggggtttctgcccgtgagctctgccgtaagtacgctatttccgatgccaccttttacacctggcgtaagaagtattgcggtagggagggccagaggtttagctcctaa

SEQ ID NO: 155512 - DNA, 426 bp, Enterobacter cloacae
atgcgtaatctcataatcccttttgttttttccatcttattctcattaaacagtcatgcttcagcagagcttcatatgaagttccatatgggcataggtgtcaataataaatacttaattggtggatcgcttgaaaacaagggtgataaatcaatagaaaaaggattcttggcatacacaacaagtaaaaaaaggtgcatacctggggaaataaaaatatttttatttggaagtattgcaccaaatgaaaaattagaatttaaaatcccggtagaagataaacttgacaactataaaatactgtcttttggaggcctcgatagcttcggcattcctgtaaagacagtagacaaaacccatgagattatacaaaaaaaaatgagtgatgaaacagtaaaatgcttagcaaatgaatttaaaaaataa

SEQ ID NO: 155513 - DNA, 873 bp, Enterobacter cloacae
atgaatcataaagaacttcatgtcattaatcttcttgaatggattgaagataatcttgacgaaaacatctccgctgaagatattgtattaaaatcaggttatacaaaatggcatttgcaaaaaatgttcaaatcatacacaggactaaccatgattcagtatgtgcgtatgcgtcgtctgtccaaagcagcaatggcattgaaatattcgaaaaaaacaattgctgaactcatcgatgtatatcgttttaaatcccagtcatccttcacacgagctttcacatctttttatggaatgtcacctgcacgtttccgcgaagataaaaatttacggttaggaccttttattcataaatataatcctctataccaagctcaaaaaatcacttgtgaatacgtatcgtttgatcaccttatcacttatggtattaaagcagattacgtatgtccaattagtgagataaagcaaccgcatcgctcatatcgaaaaaataagcgtaaagaattcatctctgaaaataacctacaaaacactgaagtttttaccctaggattattccaccccttagactctgaaaatttactctgtgaattctacctaggttgccagtcatcagacaagcagtttgaaacattacccgttgtgagcggcgactatataaaattcgactactatggtgttgaagatggtatttatgattttgtcatgtcaatttactttaagtacttcgagagttacaatatacttcggagaaatacatatgatatagaaatatttaaatatattaacgatgagactgtaaattatagctaccttattcctattgtttttgacgcaaatagtttattagtactaactcattccgtagactaa

SEQ ID NO: 155514 - DNA, 345 bp, Enterobacter cloacae
atgaagatgaggtggatatccatcttaatcccaaaatcggtgcggactggcagctacgcggacagcaaaaaacgcgtggtgacgccgaggcagaacgaaaaatactatctggctggcgcactgcactgcggaactggcaaagtcagctacgtgggcggcaacagcaaaagttcggcggtgttcatcagcctgctgaagcggcttaaagcgacgtaccggcgggcgaaaaccatcacgctgatcttggacaactacattatccacaaaagccgggaaacacagcgctggctgaaggagaacccaaagttcaggctcatttttcagccggtttactcgcctgggtga

SEQ ID NO: 155515 - DNA, 489 bp, Enterobacter cloacae
atgtatgttattgatgataattatttgacacttggcctaaaagaattggccagagggatgtttccaacaaaaaattttaatcgaatggtttttgtgaaaaaaaatcacttgctatcaaaatgtacatgcaattctcaaatttggcaaaattatattataattcctatttcagaaaatacacctttttatctggatgaaatatctttagaagatagtgtggccttagtgaaatggaagctaagacgaataatgcaaacaataaacgatcaacgttgtattttttgcttttatattgggttgttaacaacgcaggaacgtgaaattataactttgactgcgcaggagtcctgtgtcgataagctctcacttactttgggacgaaacaaaaaaataatttactcactgcaattaaatgtgaagaaaaaattaggtttcaagactagagctcaatttcttctatggtgcaaaaaaacatttcaacagcaatga

SEQ ID NO: 155516 - DNA, 126 bp, Enterobacter cloacae
atgaaaacgttaacggtgtttgacccggcattgtgctgcagtaccggcgtatgtggttcagatgtcgatcaggttctggttgatttttctgcggatgtgcagtggttgaaaggacgcggcgtatag

SEQ ID NO: 155517 - DNA, 1941 bp, Enterobacter cloacae
atgggtcagttaaaaatacatagagttcactatgaaggaaaaacttataatttcagctcaccacctttagatgaacataaggtaaatattatcgaggctcctaacggtagcggaaagtcaacgctattcgaccttatttactattctttgggaggtagggtttcacattttaataagaatgaaaaagttacacacaaggaaattgttagtgacagttctaattttgtggaattagagatctctgctaatggaaatcactatcgacttgttagaaaaattggtgaaaaccttataactatattttcaaaaaacgactttattgttaatggtgaaaacaccggtaactttgcttgccttgcgataaataggcatagaattgacgattatattttttctgattggctattaaatgaacttaatattccagcaattgaaatatttcattctggtaaaaattttaaaataggcttcaatgatcttttacgcttgatataccataatcaaggaactgatgcgaatgtaatttacaagccagccgatcatcacaatcatgtaagtgactctgtatttcttaggaaagctatatttgaagttctcatcggtaaaactttagtacaactatacgatgcgtatggtgtacttaagagaaaacaaagcaattacgataaagccaatgtactttataacgaatattatgacatagtgactgaaatgcataagcaattaggcattaatgaggtcataaatgataattttttaaagcaaaaaatcaattcactagcatctgatatagatcgtcttataaaattcagaaataacagcattacaatcaaaaataaagttaacaatgggataactaaaacagagaagttaaaagaagagtttagctcgagtgaaattgagcttattaagtgtgaaaatttagctctcaataaatacaaagaaattgattcaatcaatgacatcattacaagaactaaagaggatgctcgcaggatagaaaaaatcattcatacacacaaacaacttgaaatgtttacacctgatacctgtccatactgtctcaagcatgttgatcgcccaagtgataaatgtgtatgtggtaatgagattgatgaaaatgattataggcgctatttctacgatcctagtgaatattactcattactcaaaagtaaaattaaatcgctagaaactatgaagattgctttaaagtcctcaaaagaagaattagctaatattcactcagaaattgaaaagctaaggacgactaattctgaactaaaaaatgaattaagcaacgttcttgataatcttgaatatattacagatctcgatgcaattgatgaagttgaagatcatgttatcgaaaagaaagaacagataagcaatcttaagcaagctttaattttagaggaacggttgcagaattatcaagatgaaaagaatacttctaagattgaaatggataaagctaaattagcagttgaaaaacttgaagcttctgctgctcaagaacttattgaaaagattaaagattttagcaaatactataataaattcatgaaattatctcttcccgattgtagatcagcagagataagttcagatgattatatgccactaattaataatggtgattacaaagaagcgagtgcaaatgtgcacaaaagatttttgtatttcgtcactctcctgcaaatgtccttagtcgatgatataccgttcccaagacttttgttgatagatacacctgaaaacattggaattgataatgataatcttaagagaatgataggatgtcttgatgcgttagaaaaccctaacaacttggattatcaggtgattttatcaactggggtgaaaaaatacccagatgtatttaagggcaatgtcatattacaactgtcaaaggctaataaattattgaaacaaaaataa

SEQ ID NO: 155518 - DNA, 342 bp, Enterobacter cloacae
atgtccgcttcagatgatacggtcagttctttggttgttaagactgggatccctaactcgacaattcgaagttatctgaagggggactcgcttcctggcatactgcaacttagaaagctcgctgcagggatgggaattaaacccggatggttacttggggatgaagatggaaaaccacctcaagaaactgactccaatgccctggataaagaccttgaattgctcaacagtatgttcagatacatgaccccaggacagcgggccagagtattaaaacgcgtgctgaatggtgtatctgcccagctggaaagagagattagcgagagtggggaaggggagtag

SEQ ID NO: 155519 - DNA, 612 bp, Enterobacter cloacae
atgcgttgggataattgttgtgaagacttaagtcttatcagcagagtgattgctggtgtgagttgggatgcttctcagtatctgaacaaaccctccggacatgtacactctgttgggcacagactgccgcgccctggcgcacctgttaagcaggtggctaagctttcaggcttctctgagcgggaagcccgcgagcaacctcatatcgattccttgccaggtcgtcagcctgaccgggatgaaattcaaaaatttcaccattacgcggaaaaacttcatcagatgatggtcagccatatcaggctgacacaccagatttctaattacagtgcccaacaaattcgtggttgcgtgggcagggatcaataccctcagctgcagaatattgaccttatgatccgcgggctggaggggctggtttcaaacattttacgcaatctggagcgccctcacacccgctttgtgaaccttgcaaaggccatcaccgagtatcgtgtggcgctttccgatcttctgatgattctcgaccaggcctttgttgaacgtgaagtggtggagtcacgcacagggtgtgttgagcaggacatgtttgctggtttttcctttcactaa

SEQ ID NO: 155520 - DNA, 129 bp, Enterobacter cloacae
atgtgggaccacggtcccaacctgtcaggcaatcgggcgaagaaagaaattagcatcttttcagggcagaaaaaaaggggccctcagggcccctttataaaggttttcggaatcagttcagcgtcttga

SEQ ID NO: 155521 - DNA, 123 bp, Enterobacter cloacae
atgctgttggttttattgactacggtatggaagagagacgactgcgatgcgcagtgtgttcagggagaaggtctgatacgcatctgcgtgttttgtgttgatcgcctgaggatcttcaggtga

SEQ ID NO: 155522 - DNA, 597 bp, Enterobacter cloacae
atggatgaacgcaaagccatggaacacgccctgcgcacgcagagagaggaactccgccgggccaacagggcactgcaaaaaatagcttccgaggacagcctgaccgaaatcgcgaaccgacgcatgtttatggcgtggtttgaacgtgaagcttccgctcacagaagacgccctctctccctggccattgccgacattgatgtcttcaaatcctataacgatcgctacggccatcctgaaggcgatatcgccctcagaacgattgcccgggcactggctggtcgcctgcgtcaggaggacaaaattgcccgatttggcggagaggaattcatttttctttttcccgatacggacgaagcactgtgctatcaggtctgcgaacgcttgcgtcagcacactgaacagatcacctcactcagacggcctgtgaccctcagcatcgggggcgtcaccgtgttttcgcagaccgaacgggcgctggactttgacatgttatttaaacttgcagacgcagcgttgtatgaggccaagcataccggacgtaatcaggtgcggatgagggtaattcagcatgatgatcctccggacaacggatga

SEQ ID NO: 155523 - DNA, 732 bp, Enterobacter cloacae
atgtcagagcatctgtttcggaccaaccgacttcattccctgtatgaagcacttgtgcatcatgcctcctcgcctcaggtcgcctttaccactctcctggaagaaggcttagcggcgtttaatatgaggctggggatcatcagtcagattgtggataaccggtataccctgcttgccgtttcacccagccttgagggcatgtcgcccggcatgacgttcgatcttcaggacacctactgtcagctggtggtgaaaaagggacacatcatcagcgtcctcaatgcgggcaggcaccctgatcttaaaacccacccagtctaccgccagatgcgactcgagagttacatctccgcacctttgtgggtgcggggaaagatatggggaacgattaatttctcctccacagagatcagaacagaagattttacggacgacgatcgcgactttatcggcctgatggcaaaagggctcggttcgttactggaggtccgcatactgaccgaggaaaaagagaatattatctctgatctgcgcaggaataacgacatactcgaaaagatcttcgataactcgggtattggcatggccctcgttgcccccacaggccagtggaagcgggtgaacagtgctcttgtgcggatgcttggctatacagagccctatttgctgtcgatcaattttcagaaaatcacacacccggaggatttaaccacggatttacagttcctgtag

SEQ ID NO: 155524 - DNA, 627 bp, Enterobacter cloacae
gtgaaactcatttttatacgacatgccgaaacagaatggaaccagcacggggttatccagggccacaaggacagcccgctgacggcccgtggcgcgctggagacatcggcgttactgaatgccttaacggatgccggttatcccgtggacggtgtctttacgtcaccccttgggcgtgcccggcacatggggcaggcgctggcgggccattttcagtgcccgctggcgatcgaggcggcactgacagaacagtcattcggtcagtatgacggcatgacgcaggcgcgtctggcgcgtgaacatcccgatcactttctcgcgttattttcacaggatgccgcgttttgccctcccggcggcgagtcgcttgcctgtgcttctcagcgtattctccgtttcgtgcacgagaaaatggcgcttgcaacgcatcagacgttttgtgtggtcacgcacgggcaggtcatgcaggggatgcttgcgctgctcagggacggaaacctggagcatttcaaccgctacgcacagccgaacgccagctataccgtgctggaggggggcggagggcagggcatcactctccgccgggggatcgccacccacctgctgaagttgcctgagagggattga

SEQ ID NO: 155525 - DNA, 366 bp, Enterobacter cloacae
atggcgctcatccttgcctgcttttgcgcgcagggaagcgatgccgggcggctgcaagaggcgctgcgtccctggcatccgcttgccgtcacgcgccatcacgacaccgtgaccgtcatcctcaatgaggacggggtgaccccggtacggtatgaggaggtgatcggcaagggcgtctgcgccggtatctggcgcaggcgggcaccgtcgcgttatctcgcctccgtcagccaggtgcaggtgctcaacaggtaccagacccggggttatgttctggtggagcccgctgcgctgtgcaacaggatgcggcaggcaaccgggcagcgtgcgcggctgatgttgcagtcgcacacgctcctctattaa

SEQ ID NO: 155526 - DNA, 192 bp, Enterobacter cloacae
atgaacgagggcttctactggatccagcataacggcgtggtgcaggtggcttattacagtcacggcatgactgacgatcttgagacgggacagaccattcacggtgtctggcatttgacgcagggggacgacctctgtgacaacggagaagcagagatcctcgcgggtcccctttctccccctgttccttga

SEQ ID NO: 155527 - DNA, 162 bp, Enterobacter cloacae
atggaaatactttacgtgctattgattgccggggtcaatgatttacgcctgtgcatcaaaacgcccgctcagagagcaggtaggcaggcagaggttgacagcaggcacgctgtcagtttaaagcaccgtatcattcaggacctcttcgttcggaaagcctga

SEQ ID NO: 155528 - DNA, 420 bp, Enterobacter cloacae
atggagtttatcaggccagcagagttacgcgagataatcgcgcttccacttttcagtgatttagtcccgtgcggcttccccagccccgcggcggattacgttgaacagcgtattgatctgaatgaactgcttgttgctcatcccagctcaacgtatttcgttaaagctacaggcgattcgatgaccgaggccgggatcggcgacgccgacctgctggtggtggacagttcccgcacggccgggcacggagacatcgtcatcgcggcggtggagggagagttcacggttaagcgcctgcagctgcgcccgaccgttcagctcattccgatgaacagcgcttattcaccgatcgtcgtcggcagcgaagatacgctggacgttttcggcgtcgtgactttcatcgtgaaaccagcgagttga

SEQ ID NO: 155529 - DNA, 357 bp, Enterobacter cloacae
atgagcaaatccgccgacaaaagaactgcttccgcaggtttgattgcatccactgatgatgcatgggactctcgcgagcttggttccagcgaagctcacgtcagagtgtcagacgacctgtcagaaatggatatcaatgatgccttggaattgcatccaatctctatccggttgaacaaatccctgatagaagatctaaaaatgattgcagaccttcatggcttgggctaccagccgttgattcgtcaagttctgacacgctttgctgactgtgagaagaagcgcattctacaggaagtgcattctaaagaactggaaagacccaagcgtgaaaccaggcaaaaaaaggtagcatga

SEQ ID NO: 155530 - DNA, 291 bp, Enterobacter cloacae
atgaagctgataatctcaccagctatacggcaaaagctggcaagcaaacaaccacccgttaatgaagacgacattctacaatgtttttctaacaggacaggacatcttcttgaagatgatcgagaggacaatagaacctcaccaccgacaaaatggttcattgctgaaaccgattacggtgtacctctcaagattgttttcattgcacgcccggggaaaggcatctttatccgtacagcctactcccccaacgacgaagaaattcgtatatatgataaatttggaaaataa

SEQ ID NO: 155531 - DNA, 156 bp, Enterobacter cloacae
atgtgggccggttttgacgtactgagaggaacacacgggacggggaccttcgtcccccgtcccgggctgaataaccgcagtgacgtgggcaacgacgctgagcgggaaagggacgttgcctttcccgaactcgcatcgttgttgtcgtctaaataa

SEQ ID NO: 155532 - DNA, 174 bp, Enterobacter cloacae
atggtgattctgcctttgaataccgtcctgctgcttgcagtcaaattagcctgcgccatattaatcaacgacgcagagatcagtaataaatacatcagttttcttatcatctactatatgaacgcatcccgtttgcaaggctttcgtggtattgacgttgatggcaggtggtaa

SEQ ID NO: 155533 - DNA, 351 bp, Enterobacter cloacae
atggttaaacagcatcctcaggtagatatcatcgcgattaccaggacccagaagtcttaccttgccacctgtgttagtttgctttggtgccagaccgatgtaggccgctcactctcgccctgggctgcaggttcctgcatcgtctacaatggcgaccagcaggcttacgcccgcggtgtcaatgatccgctggcagccctcattctgtttagcccaagctttaagctgtttttctatgccatctacctgcttatcaagagcactgagtcgacggtgctggccataaaagtgctaaatcagaaaaggcagcaacacttctttcagatatttgaacgcccacctctgacatag

SEQ ID NO: 155534 - DNA, 1251 bp, Enterobacter cloacae
atgatggaagtggtaaagagatctggctcttcagtcttgcaacgtaagagaaaatatttgtctgcagtcatcgcgttggcgctatgctcatttgccaaaacggcattggctaatgtggatggggatatgatggtctgcgactggggagaactcagtggcaggtttatcaaacccggtagaagcctgcgtgatgttatagagccagccatagaagaaaaatttgaaaagtacgactgtgacaaaaatgggcaaaactgtaggtatcgctactattggaatatacctaaccgtacttatacggtaacggcctccgccaccatcacctgtcttaatgtgggagataaatccggaccaatcaggttttcattttggaaaaactacaattataaaccgacatttttccgcaattttacaatgcgtattacaggtgcgggttcgctatccttatccggtttggagagtccggatgcgctaaccagaagttggtcggatggaactttggcaccttgtaagactaactgccatagtctgtctgaggggcgaccgcagtatagcaagaagatgacgttcacctttagcgttcaaccgataaagagcagagttgagggatcaatcgtacctaacttcgataatattaataacgtaggtgatatctgggttcatacaagctctagcgatcaaagcgcaagtttcacaactgttagcacctctgttccgactatctgtgggcttgagttttcgaatctggctggttgcaatccgtctagcggtaacggtgagtcaggagtgattaagccgcctatcccgcagtgtaccttaaccattacgactccgggcgtggttgaatttcagccaatctcgtctgacgatttgagccgtaatcgggtaaggatggaagacttcactttaaccgtgaccaaggggccggttcagtcgcaggcctgcattggcagtacctacaacctgccgggcacaatcaagaccgagggtggatatgctatcagcagtactttctggggcattaatcattccagcggttcgccacagggaattggtttgaaactctacgatctgaataaagggagctatatgcagttcaatcatacctacccgtcttttgtcgctaatatttccaacatgagcgagactaaaaggatacgtgccgagattgtggcaaccaccaacgatctgaaaaaaatcaaggaaggcgaatatagtcaggtattgacttttgaagttaaaatgccctga

SEQ ID NO: 155535 - DNA, 726 bp, Enterobacter cloacae
atgatgcgtaactcacttttcgttggtttggccagcgggctacttattttgtttgttgcttcggcacaggcggcgatttctatcgaccggacccgggttattttgttgggcgatgaaaagtcgtctccagttaacgtgatcaatcacagtaaaaccttaccctacctggctcaggcatggatggaaaatgaagctggcgagaaaatcagttcgccgctcacctcgctgccaccattacaacgggtagaaaaagacagtaccgtgcagatacgcgtaacgccattggcggacgccgaacgactgccacaggatcgggagtcgctgttttactttgtattgcaagagatcccgcccaagtcggataaggccaatgccattcaactggcgctgcgtatcaaggtgaaaactttttatcgccctgcttccctgaagcgattggcagaaaaaatctggcaggagcagatccgcctggagcctggtgatcaggggctgaaactggtcaatccgacgccattttttgtcattttgccagaggtggtggtagggaaaaagaccttgttggcagaggatgaagcgttaacactgcgaccaaaaggtgaagttattttgcctggcgtcaaacccaaagcgcagaaaatcgtactcaaatatatcaatgactatggtgcctatcagccactgaattacagctgtacggcaacagcctgcgtgcgggatcaatcatga

SEQ ID NO: 155536 - DNA, 2532 bp, Enterobacter cloacae
atggatgataagaagaaatactcatttatttctaccgctattctttgcctcatagctgtagactcggccagagccgatggtgacaatattgagtttgaaaccagagcgcttgagttgcgtgataataacaatattaatctgagtaatttttatcgccctgattatattcccgaaggcatttacccactgactttaaaaatcaacgatcgggttatcactactgatagctttaacatcatcaatcgtggtggcaagagccagatctgttttacttctgagacgatagaacaattcggctttaaagaaacgcacttggcagagctgataaaacgtgctgcgactgaaaaaacaaattgcctattgattgcggattataaagggatcactgcccgtatcgatcgtggtaagagtgagctattagtgagtattccacaagctttgctcaaatacagcgatccagattggacgccccccgcacagtgggatgaaggtgttcccggtatactgcttgattacacgttgagcggcaataagtaccaggggcgtaataccagcaatagtgcgttttccagttacggcacacttggcgcgaattatcgtggctggcgtttacgtagtaattaccaggcgtcactgtacagcagtggttatggcaacgatcaacgccagctcaccaccaccacggcatatgtcgctcgtgcacttaaagaggcaggagcgaatctgacgatcggtaaaaactacctgcaatcagatgtttttgattcaatcaattacagtggtatggcgatcgccagcgatgaccgcatgttgccgcaggcgctacgtggttatgccccgcaattgtccggggtagcgaacagtaatgcccaagttaccgtgacccgtggtgacagcattatttatgaaaagatggtgccccctggtgagttcgtcatacaggatctcactgacgcagcttctggtcagctaaaaatgacaatccgtgaggagaacggtgaagaacgggtgtctactatagaaacatcgaacgtgcctttcctgacccgcccaggccatatccgctacaaggccatggccggccaaatgaaccagaccaatggttcaatcaaaccgatactggccactggtgaggcttctgttggagtattctccggtggatcggtgtttggtggcgctgtattaacgaatgagaagtattatgctttcaacgggggtattggttatgacatgaatacgctgggggcaatgtccgtcgatgtgacacgctctagttctcaattggaacatcaaacgctgaggggagagagttaccgttttaactattctaaagtattcgacagtattgatagccagatcacctttgctggttaccgtttctcggagaagaactatctgtcgttagacaactttgtggcgatgaaggtatcgccagatttcacctcgacaaataaggaaagttataacctggttgccagtaagaacttccgtgatttgggattatcgatcaatgccatttataaccgccaaacctattggcaggatgtctctgacagcaacagttatggcctgagtgtctcaaaatcctttgatttcggtagcctgaaaaatgtaaacgcctatttttcacttaaccgtaccgaatataaaaccagctttatttcgcaggaacaaaagaatgacaacgccgtgtattttagtttgagcataccattaaactcacaatcttatttcagtactgcgatgcggctaaacaatggcagccttttaccgagtaccacttataccaataattcagaccctcgcaatgcatggtcaatcggtagttactcgtcgggttcgttcagcaacactaatctgaatggtaacctgaatatgtaccgtgatgcctttactgcgacgttaaacacctcgatgaggcgcgatgattactatcttggcggtagtattaaatccggtattactgcaaccgagtatggtattgccgcacaccgtgatggttatgctggcaatacccgcctgatggttgataccggggggattgagggcgtttatgttggtggtcgggggaataataacgcgataccaactaattccagcggcattgcggtgatcaacaacgtgcctgactattatcgcaccaactacagtattgacaccaacctgttacctgatgatgttgagagcactaatcccaatattcagatggtattgactgagggagccattggttaccgcaaactaaatgtttatcgtggtatcaaggcattgattaaagtgactgacccgcaaggccgagccattccttttggcagctcagtggaagaaatccaggaaagacgtcaggtcggtgtggtcggtgaaaatggtgaaacctatatctcgggcgttggggggcaggcccttctcagcgtgctgaccaacgatgaccagcgttgccagttccaacttccaaacgaggggctctccttatctttttctctaccggttgtttgccgtattgattcattctctcaaggaatttcacaatga

SEQ ID NO: 155537 - DNA, 558 bp, Enterobacter cloacae
atgaaaatgaaacttcgcacacttactctgaccacgctggcaactgcaatgttatcaggttacgctttcgctgatgttcctccgggttctcaggggaacggtgaaatcatgtttaaaggttctgttattaaagcaccttgcggcttggctcctggcctcgatggcgataaccagaacatcaacttggggcaaattgccgatgcacagttgaagacggtgggttacagtgcaccgaaggagttcaaaatcaaactgattggctgtagctttgatcctgctgctacggcagaaagtaaggttaatgttcgctttgacggcatgtctgtcggtggtgccaacggtttcctgggggtaagcggtgatgcaaaaggtgtggccattcgcctgctggatgctgccaacaagcacgttaaaatcggagctacttcagacaactacagcctgcgttctggggataacaccttgcaattctccgctcaggttgtggcgctggacgggcagaatattgtcgctggtacctacgatgcgatgaccaacttctctctgacttatctctaa

SEQ ID NO: 155538 - DNA, 228 bp, Enterobacter cloacae
atggtaagcctcattcgcttggaaaacatactggcagtagcccatgctggcgtgcctatttttcctgccatgcccgccttttataaccggccagcaacaatcagcgacttcgtcaatcagaacctcggtcgcctactggatatgttctatttcgatgatcccagcctcaaccaccaggacggtttggtgggcaatcccgtttcagaaaaccaggagttaaaagcatga

SEQ ID NO: 155539 - DNA, 1104 bp, Enterobacter cloacae
atgaagccgcgtagaataaagacagcatcatgcggtatcgccagcatagtgttaacgataccccttgcagcctccgttatggcggaaaccatcaccatcggcaagggaacggggattctatgggagggcctgccgtttaacaggactttaagcggtcctctagaccatccgaggctgaatccatcgtacggactcttgtcagtctctacattcccgtctagatgtatggactcaagtaaattgactaaaattggtggctttatggcatttccgctgaacggggtgcgtggagtcgggttgatacctcgggcatcgggtagggtcatttatactctaaaaaacaattctgaaggaaggttagatggcaccattgggctgccggaaaccagaggcgcctcaacgtcacaaggcaatatcgcgtcgccgccaaactatacttggtgcctgccccctgctacatcgccgaatgaaactttttactcgagttcaggtaatcgtaccgcaacgctctcaggcagttgggtactggtggcagacggtacccaacaagctggagaggcatcggttccccccatgtattttggcagttattcctccactggttcgggggacagatcgaccactatattgccgaccaatatttccctgcgtatctccacgttggaatgcagcgtgaataccccgaccgccattaacttcggatcgatcattcgtaatacccaggccaatgcagaactggcgctaaagtccgtacaacttgttgctacctgcggacagctaaataacaagataaatgccaatatcaatctgcagtttcgcgccatcagcggtctgtacaacagcaccgcttcgcggctggcattaaaccagggaggaggctatatcaccggggaaatcgataatggggtaaccggcagaggcgactgcaaggcgacaagcggcttacgctttgataactcgctcataaaactgggcagcattaccagtgcggaaagcagcaaaaccttaaccaatcagctcacctggcgactgtgttcgggaggcaacaacgtgccaatcggagcggttacagcctctgcggaaatgctggtgacatttaactga

SEQ ID NO: 155540 - DNA, 2592 bp, Enterobacter cloacae
atgaatattccccctcttgcccttgctctttccccactcctgttgggcagcgcatggatcgcaggcacgcatccagcgtggggccgtgactattttgacccggctctgctgtctctgggtggtggcctggaagccgtcaccgatctgagtgcgtttgaaagtgccggacagacccctccggggacgtatctggtgacggtgctggtcaaccgcaacgaacgtggccaataccgcgtcgtgtttacgccgggtgaaaagggccaggtcaggccggaattgaccccagccttcctggccgagatggggatcaatacctccgcattgcccactttttacgggttgccggtcgacaagcccgtcagtgacctggccactctgatccctgatgcccgagtacactttgattttcagcaacaacgcctggaactcagcattccccagatcgcgatgaagccagacgccagcagcgtagtcaaccctgctctatgggaccagggcatgaccgcgtttttactcaactataccctcaacggcgggcgcagccgccaggacgggcagtggggtcaatccaccagtgaacagtccaacctgttcctggggctgcacagcggattgaactggcaggcctggcggctgcgcagtgacatgatctacacccacaataacagccgcactggatatggcgacacgcaacaccatcagcaaacccgtttctcaaatacctatctgcaacgtgatatccaggcctggcgtacggatgtgctggctggggaaaacaacaccggcaatgacgttttcgacagcattccgtttctcggggtgaaattgagctccagcgaagacatgctgccgctcagcctgcggggatttgccccggtgattagcggcattgcgcagagcaatgcccgggttaccgtcagccagaacggttacgttgtgtatcaggcgtatgtcgccccggggcgctttcggattaatgacctgtaccagaccggccaagggggtgacctgacggtcacagtaaccgaagcagatggcagcgtgcgtacctggacccagtccttctcggcgctgccggtaatgcagcgtccgggtggcttgaagtacgaactgaccgcagggcaatacaacggcggcatcaccactggctccagagaggcccagtttgcgttgggcaccctaatttacgggctgcctcatgacatcacattgtacggcggcgggctgatagcggagaaatacgcctcggcggtggcggggagcgggatttcgctgggggacttcggtgccatgtctgcagacgtgaccctcgcatcggcccgtatgtatgaagaaagacagaacggccagtcataccgtgtacggtatgtcaaaagcttacttagaactgccacctcggtggatctgatggcttaccgttactccacccggcactattacaactttgccgatttcaataacagcggttatcagctcaatgaaggccaggtgccatgggcactggcccgacagcgttcggatttccaggtgcgggtaacccagcaacttggggattttggatcgctttacctgtcgggggcgcgcagcgattactggggcgatgagcaggtgaataacaccctgtcggtgggttacaccggcagctggtacggcgtgagttatggcctggcctacagcgttgaccgaataaaatccaacggtgattggccgcagaatcgtcagttggcgttcaatatgcaggtaccgttcagactgttcagtgcacagcccgccctcaaccgcagttacgccagctaccagatgacgcacgacagtgaaggtcgtgtacggcaacaggtgggggtgagcggttcgacggcagaagaccgcttgtcctacagcctgatgcagggatggagtaacaacaaccagagtggcaacgggggtagcactcgcgacctgaatctgggttggcaggggactcggggcacattcagcgccggatacagccgcagcaaccgctataactcactgaatatgagtggtaacggggggctggtggtccaccccaacggggtgacgttgagccaacaactgggcacctcggtggcagtggtccgcgcaccgggcgctgcaggggtaagcgtaatcaacggcgggagccgcaccgacagtcgcgggtatgcggtggtgccgtacctctcaccttaccagaacaacacggtgagcctggacccgtcgacgctgccggaagatgttgacctgccgcaaagcagcgccaatgtctatcccaccaaaggggcggtggtagcggctacgtttactccacgcaccggttatcaggcgctgataaccctgaccagggctggcgtgccggtacccttcggtacgctcgtgacactgactgaggatggagccgagatcaacagcagcggcatcgtgggtgatgcaggccaggtgtacctgagtgggttgccggaacagggaaaattgcgcgcggcatgggggcgtggagttgtacaacagtgcctggcccacttcaacctgagcaagacggcagtttcagcaaacaatcctgtgcgcatactgaatgcgcaatgtgaggagggataa

SEQ ID NO: 155541 - DNA, 729 bp, Enterobacter cloacae
atgaaatacccgatttatcttctgatgggcctatgcctgttggtcaataaaatgtgcctggcacaagacaacgtctcgccggggatatccttttacgtgctgcgggtgatttacccggagggcgaaaaacagggcgtaacgctgaccgcctataacaaaagcccggcaccgtacctgatgcagtcatggatccgcccggtcgatccgaccaccggggacgtagatctaagctggcatggcaccccggtgatgccgtttattgtcacgcccccgctggctcgtctggaagcgaacggtgaactggtgatgcgtatccggcgcaacgatatgccgctgcctaatgaccgcgagtcggtgttttatatttctatgaaggcgctgcccacccagcagcccgacggtgagcagatggtgatgacggtcgtgagcaatatcaaactgttttaccgcccgacaggattggtgaaacgcgccgtggcagacatggctccgaagctaaccttcagccgggctggcgaccaattgacagcaaccaacccgaccccttactggctcaccttctctcgcctggctgtgggaaatgtggcgttggataaaccggctctgcgcctgatggtgccgcctttcggcaagcagtcttacaccctgcccgccaccgcgaacggaaaagtcagttggcagctcattgatgaagatggctgggatactccggttgccgaacagaattga

SEQ ID NO: 155542 - DNA, 720 bp, Enterobacter cloacae
atgacacaacgatttcatcaggtgctagcaagcctgttgctcattttcagcctgtccgcgcattccgggagtggcggcatcagcctggggcagacgcgcgttattttttcttcagcatataatgcgcaaaccctcaccgtcagcaatagcggacgccaggcttatctggtccaggctagagtggaaaacggccagggcgatacacgcccagccccttttatcgttacaccaccgctgttctcgctgcaaggtaatagccgtcaactgctacggctattacccatggatgccacgctgcctgacgatcaggagtcgcttttttatctctctatttcggccattcctgcgcaagctgaacccgtgacagcagccgatcggctatcggtaggggtacgtttcgtgatcaagctgttttatcgtccgcaaggactggcgctgcctgcgaacaacaccccttgtctgctgacgttcaggcgtgaagcacacggtgtacgggccatcaatcctaccggctattttcagaccctgggtaagctggtcgttgacgggcagaccgtggtaccagaccaacaaccggcgatggtgcctccgcacagcagtatcaccctggccgttaacgggccggcaaataaggtggtctggcagacgattaccgactttggcgggctctcccagtcctgccagcagacaggttcagcctccacggagaccacaccatga

SEQ ID NO: 155543 - DNA, 561 bp, Enterobacter cloacae
atgcgttcagcgcaacgttaccttaaggtcacgctggctgtcgtactggcaggtgctggaacaatatccgccccggtacaggccgtgacggtggatttctccgccgtactgaccaatggtacctgcacactcagtctggataaaagcacgctgcctttgggtattatcgctaaatcccagcttcgaccaaacaagcttgttaatccacagccctttaccctgtccgtgcaggactgtaccggcgttgctggcggcagcctcaaacctttcgtgactatcgccggcaccggcactatccaagacggtaaatggctgtttcgcaataccggatcggcggcaaataccgggatattggtgatccagagtacctccgtgccggattacagccagcccgaagtcacaaacagcagcgtactgtcactggcgaaccccggacaaataccggttaatcaggcgttcactttttatgccggtgccagttgtggcggcagcaccggatgtgccatggtcgcgaccggagacgtgacggctacgctgatgttcgagcttgcctatcagtga

SEQ ID NO: 155544 - DNA, 726 bp, Enterobacter cloacae
atgacgcgctttatcttcctgttttcgctgctagtggctctgctgggtgcaccgttggctggctggaccgccgggtttggcattaatgctactcggcttatttacccggaaggtgccagcagtatcaacgtaaccgtccgtaatactctcagcgataagccttatctggtgcaagccgcgatcagtagtaagcaggatgtacagactgccaccccgttcaccgtgacgccgccgctgttccgcctggaaccccaaagcaccaatcagttacgtatcgcctttaccggccagccgctatccggcgatcgggagtcggtgttttatttgcatgccaccgcaatcccgaccagtccacaacgggatccggctcagcagcacaatgacgtgcaggcccagctgcgttttggcgtgggcaacattatcaagctgttcttccggcctgcaagcctgaccggctcctctgccgaagcccaaggtgggttgcagttctcccgcgtggctggggggctaaaggtgaccaatccctctccctattttgtcaacctggccgacttgatggtgaatggccaacatctggccctggatacgccggctgcactcatgctcccccccttcggcagccatgtctggcctgttaatacgccgttggcaaccggtaagcgagtgcagtggaaaaccattaatgataccggaggcaccgatgcgttcagcgcaacgttaccttaa

SEQ ID NO: 155545 - DNA, 549 bp, Enterobacter cloacae
atgcgtaagtctttttttactctggctccggttgttacatcgctgttgacaggatctggcgtggctcaggccgcatctaacgcccagatgaacatcaccgccaacgttgtggcggcgacctgtgacgtttctgtctccaatcctagccttgacctgggtaactattccaagtcagccttcgacacagtcgccaccccggttgccagcagtgtgaaaaccttcaccgtgggtctgaacaactgtgaagccccggcagcagcaggagatacggcaagtctgatcgtttccggccagacactagggggctacccgaacatctttaacagcaccggcaccaataccggcgtcatgttaagtgaagtgggcaaaccaaccgcctatattacggctggccaaaaattattggtggccaaagcaggtgagaccccggcatcaggcgatttcaacgcgaaatccttgagcctgcaggctggtctggcctctacatctctcacgccggatatcggtatggttagcgccccaatcctgttcagttttgcctacaactga

SEQ ID NO: 155546 - DNA, 846 bp, Enterobacter cloacae
atgaaatacactataaacttaatcattgtgtttgatcctgagcatcgaacactcgctttaaacaataataatcagacgactcttgaactctcaaaaccctcttgccgagtgcttaatgagtttatcaacaataatggggttatcttatcccgtgattcgttactgaaaaaagcgtgggaggattatggttttcatgcttccagcgctggcttgagcaactgcatcagtgagttgagaaaatcatttgtttacttaggaatagaaaaacccatcattataaccctgccaaaagtagggtttaaaatggaggcggatattcaccccatacaaaaacagaaaaccgaagctaaaataaaaaaagtggaacaagtggaacaagtggaacaagcggaacaagcggaacaagcggaacaagcagtgatgaaatcagacaaggagggggttgttattgaggaaaagtctatccgtactcttccacgagtcatgtctgatataatgaccataaaaaatatgatgataccaactctggcactgctgactgttttgggtttgatcggtctggcttttctaatcagagcaccatcaactcagttaaaattaattagtacctacaaacaatgtaatgtttactccatcagaaaagaacctgtaccaggctcagaggtcagggcaaaaaatatattagagtcagaaaagctgggttgcgatcgggtcaggcaggacattttttatactgaagagcgccccgataacgaactgttgaagataacttttctggccgcctgtcaaaaagacccggcggaaggcgattatcagcattgtaaaatatttaaaattattgagtaa

SEQ ID NO: 155547 - DNA, 480 bp, Enterobacter cloacae
atgaaaaaagttattggcgcagccttacttcttaccgtcctgttgatgtgcttgtggtacttcaacgtttatcatcagggtagaaaacctttccgctgtgacactcagcaagtgtcgctgcaggtaaaagcaaaaagcaatattgtgcttaaggcaagtgctaccgtcatattttccacatcaaaatccggaatgttttacttcactggctcgattcaagaaaatgacacacgttatctactggatcgcaacatagccttctccatcacaccatcagaaataaaagggggtaacaatgttaaattcactcatgagcaagtccatcctgcagacagcacgccgaatgacatctggcgaaaatatgtcatgccggaaattgaacttattgatgtttacacggaaatagtaccattattccacaacgcagtattaattagggggtttagcaatcccttcttggtctgcataaaacaggactag

SEQ ID NO: 155548 - DNA, 633 bp, Enterobacter cloacae
atgcgaaaaaaaataaccatctcattaaatgatcatgatagctacttcttagccggtctgcagtacggcctgactgactattttgccgatatgaacacacaggttaacttttttagcggttattccgcagataaacctgacatcatttttcaggtgctgaaccaggggggaaaaactgacatttgtcggcgctttactgcagacgcacctcaaccgctctattttgtaatacgggagcgagccgaaagatatttttctcctcctctgcgctgtatcgccgagagtggtaccctataccgtgaccaaagcctcagcgacttgctgaggatggtaaaattggccttacacttccacgctctaccgcaagaaaggacgcacctttgccctgcctgccatcgccagagtctgaccgaaaatgaacgccaggtcctatactatttgcggcatgggttcagccagtcgcagacggcaaatatcctgcaactgaaagtgcaaagagtgcattcgcataaatgctctgcgatgaagaaactgaactttactcgcactagtgagttgtttcactggctgctgcaggggggcttaactttaaacttaaccggaccagaactcttgaagtgtaaatttcaatga

SEQ ID NO: 155549 - DNA, 444 bp, Enterobacter cloacae
atgaccaggaatctgactgcaacgcttacaggtatttgcctgctttcaggctgcgctggaatgaatacggattttgactgtcaatcgctggcacacgatcgctgcctgagcatggaggacgccaaccagatagcccggcacgtgccagctgaagccagcatgaaaggggaaacccgcataccggcgttctctgacatcccatcgtcaaagccatcttcgtccaatcccgacgtattggcaggtacgggagtgtattcaccccgcgggtccgacgctgtcatggcctcaaacacgcagacccgcgcgaagctgcccgggagagccggcccggttgttgcgcgcctgtggattgcggcctgggtggatgaggaagacgtttatcatgccccttctgttgtctcattcgttgcggtacctgaccactggatggggtacagaaaatga

SEQ ID NO: 155550 - DNA, 312 bp, Enterobacter cloacae
atggacgtcactgagatttattacattaagagcaatagtatttattcccttccggaagcatcttatcgtcgttttatcgttattcctgtcttacttgctatcgggcagggcacgaaagcgtatgcgaggcaggtagtgaaaatcaataatatcgaagtggtaagggtggaagctcagctggggagcgtaaactgtaccggttggacgggtgtgattgagcccaatcagtctgccagtattgcggtcgaggaaaaaatatcccacggtggaaatacaacgggtggtatcaccgttttaacagggaaagcataa

SEQ ID NO: 155551 - DNA, 132 bp, Enterobacter cloacae
atgccgggacatcacttatgggggcgttttttaaagagtattctaatgtgtgtcattatattgcttatccttttgggcgtactggcttactggatttttccttattcaccgggtatcggccagaccttttaa

SEQ ID NO: 155552 - DNA, 987 bp, Enterobacter cloacae
atgagcctgccaaacgaggaacccgaccctatccgtcaggtgacaacactttcgcccaatcatcaatacctgcccgcgctgaccggatcggaagtcccggtagatcctgcccgggcgtacctgctctcgctcaattctccgcgtagccggcagacgatgggctcatttctgggcgtggtcgcccgattactgggagctgaaaacgccagcacctgcatctggggaagtctccgccgccatcacataatggcggtcactgagcttttaagagataccggaagggcgacggcaacaattaacacctacctgtcggccctgaagggggtagccagagagacctggatgctgaagatgatggacgtcgaaagctatcagcatattctggccgtgcgtaatctgagggggagccgattaccccgcggtcgggctctcacaaccaatgaaatcaggcatcttttttctgtttgcgaggatgacaaaagctgtatcggaccccgcgacgcggccttgctggggacaatactcggatgtggtctgcgtcgttcagaagctgtcgggctgaatttaagtgaccttgtcacgcgtgaccgtgcgctcagggtgctgggaaaaggcaataaagaacgactcgcgtatatgccaaccgggacctggcagcgactacagacgtggattgaggaggtacgcggtgaaaaggagggcccactgttcacgcgaatccgccgttttgataccctgacgaatgacaggctgaccgatcaggcggtgtaccatatcctgcaggtgcgccagatgcaggctgggattgcgaaatgtgctccgcatgatttgagacgcacttttgcgaccgcgatgctggataacggcgaggatctaattaccgtaaaggatgcaatgggtcatgccagcgtcactactacccagcagtacgatcgccgcggggaggaacggctgaaagccgctcgggacaaacttgatctgatataa

SEQ ID NO: 155553 - DNA, 252 bp, Enterobacter cloacae
atgaagcaaagtaataaaggtagtaagtggtgggttgctcttagcgtaagtttttacttcgctgcggcgcctgtacctggtggggaagcaaaattgaatttcaatggcgcacatttcttcaacgtgaatgttactcaagtgacgaacaatatcactgttacaaacattccaccggtgcattctagcattacaccgcccaaaccgaagcctaaagtaaacaaggcgactcacaagagtagctgcgtgcgctaa

SEQ ID NO: 155554 - DNA, 537 bp, Enterobacter cloacae
atggataaaatcacagcgattaccacgtttgatcgttacaacctatccgggcgatatgtattcggcttgtctgatctcaaaaatatgttccctgaggaatcagagcgcagtatcaaagcttccatcagaaggcttaccgacgccggcattctcatccgtgctgcgccaggcgtctatgtcaacaaccggtcagctaaagacagctacattcttgagcacatcagtagattcattcgccgcggagaatacaattacatcagcctcgagtcagcgctttctcagtacgggataatttctcagattccggttgaccggttaacggtcatcaccacaggtcgcaaaggtgaattcaggacgccatggggagtaatagaaatgacccacacagaaaggagcgtctccgacattcttaggggcactacccagaccgctggcccgctccggatggccctaccggaaacggcacttcgggatctacgtcgtgtgggtcgtaacctgcacctggtggataataaggagatggaaaatggtcgctaa

SEQ ID NO: 155555 - DNA, 915 bp, Enterobacter cloacae
atggtcgctaaaatagagtttgatacactggttgaagacgcgatacggcaggcaaatctgtcgaacctcagacctgttgttgaaaaagagttattgcattatgacattctcttttgcctctcggaagcaggactactgagaaccttgactttccagggaggtacctcgctgcgtctctgctatggggcgaaccggttcagtgaggatctggattttgccggcgggcgggatttttgttcagctgacctcacagccatgaaaacctgcattgaaggttatgtgggctctcgctacggtctggaggttacagttaaaggtcccgatgagctcagagacgagcctgagtatgctgaagtcagaatcgataaatggcagatatccgttacaacggccccgaaaagaaaggatttgccccagcagcgaatcaaaattgaggtggcgaacattcctgcatatacccgaacaccgcgccagcttgtccggaactataccgttctgcccgacgggtataacgatattctgattggtgtggagtccctcaatgaggtgatggccgataagctgatctcttttccggctaccaccagacgtattcgctatcgtgacatgtgggacctggtctggctgcgccagcagggtgcttcggcagacacggccctggtgatgaaaaaaattaacgattaccgcctggaaggctatgctcaacgccttcaggaaagaatcgcatccttgccttcaataatacaggacggccggttccatgccgagatgaaacgatttattcccgctgcagtctatgacaccagtcttggacgggaaggtttcaacgactttcttgaaactatgctcacagagttactgacgcagctaaaaaaagacctggggaagccggacagtccgggattcagattgtaa

SEQ ID NO: 155556 - DNA, 132 bp, Enterobacter cloacae
atgtccaaggataacacctgtctttatctggccggaaacatgcgcgcagatatgcaatctttggtagaaaacgaattactctgttcgccgctgcctaaacactacgggatacacaccgctggctcagtttga

SEQ ID NO: 155557 - DNA, 852 bp, Enterobacter cloacae
atgacggatgatgcccgtaaacagccccaaaccgatccagctgaagagaatgccttctttccctccgcgtattcgctcagtcagtttaccagccctgtctccgatctcagcggggcagattacccgaaaccgtacactggcacccataagatcctcgtgattgccgcggatgaacgctacctgccaaccgataccggggcactgttttccaccggaaaccatcccgttgagacccttttgcccttgtatcatttgcgggcggcagggttcgattttgacgtggccaccctgtcgggccagatggcaaaattcgagtactgggcgatgccccgtgaagatgaccgtattatgcctttctttcgggagacgctgccgaaattcaggagccctcaaaaactgtctgatgttgtcagccggctgacgaaagacagcgcctatgccgcggtcttcattcctggcgggcatggtgccctgattggactgcccgggagtgaggacgtggcgacgaccctgcgctgggccatgcgggaagatcgtgttgtcatctcactgtgtcatggacctgccgcgtttctgtcgctgcaccagggagacaatccgctgcgcgggtattcggtgtgcgccttcccggacagtgccgacaaagaaaccccgtcgatggggtatatgccggggcatctgacctggtacttcggtgaggccctgcagaaaatggggctgaacattgttaatagcgacatcaagggaacggtacaccaggatcgtaacgtactgacgggggacagccccttcgcggcgaatgcacttggccagctggccgcaaacgcgttgctggcccggtttgccgggtaa

SEQ ID NO: 155558 - DNA, 396 bp, Enterobacter cloacae
atgcggtttaggatgaccgtttttttactggcggcagccacggtcctggcgggcgtgaaattttttcccgcggtgctcgcgcatatccatcacaacggtgagatccgcgagctggtcaaacaccctgacacggtctttcataacttcagccgctgcaaacgggaagttgaagatgccagctactgttataacgcgtacagcgcagccatacagattgcagaatcaaaagactgtacgcctcagggcattatgatgaagcgcaagtttaaaaatctggttgaacacaacgtatcgtcggttatcgaggaagaaattattgcggaatgtggttcaggaaacaccaggaggtggccgcatcgtgatgcctggcgagtaacctgtatcagcatcccttag

SEQ ID NO: 155559 - DNA, 378 bp, Enterobacter cloacae
atggtgtttaaaacagcgatagcctctcttttcacactctccgggttcgcgacagccctggcagcaacgcctgcttattatatcgcagagtttcagacgaccgatcgtgaggaaataaagccgtacagcgctcaggttgagtccactttcaggccctttggtggacgcttcatcgtcagaggaggtgaacccgatgttaaaaaaggatttggcgcacagggccgactggttgtgatcaagtttgagagcctccaaaatgcccaggactggtataactcggccgcgtaccagaagatcatccctatccgtcaccgtgccgacaattcgcgaacctatattgtcgaaagattaccggaactggctcccgttacgccctag

SEQ ID NO: 155560 - DNA, 405 bp, Enterobacter cloacae
atgaaaaagctcactaaagttcttctctcctcgtttgttctgttctcgttttcttcattggcggccgaagatttacacaataaattgactatccaggctattccttcttcagagggaaccgttgtggttgaagggaagccaatgtacgaaaaaacgttcaacgttgttgtgtacagcaaagctaaagaaccgattgaattaactggttttgtaggctgttacaaagcttttgatgaaaacagtaaggagttcgatgtgagaatggtgcaggcagatctgctcggaactctgaaggcaggagctaaagaaggtgaaatatctttcgtcagcaacgatgcatctgtctacaatgccaaatttgtaaaatggtcttcccggtgccccaatctggcagaacgtccataa

SEQ ID NO: 155561 - DNA, 456 bp, Enterobacter cloacae
atgaaaaagatgatcggtattattggttcgttaatgttaatttctggaactgcaggtgcagctacctctacagcaacttgtgtaaagacagacaatgccgcaatagaggcgctatttgatcgctggaatgcttcgctaaagaccggtgatccgcagaaagtggctgaaaactacctttccgatgccgtattattaccaacagtctcaaaccaggtacgcctgacagacgcagaacgtgaggattactttaaacatttcctggaaaagaatcccgtaggacacattgacagtcgtactattcgtattggctgcaataaagccattgataccggaacttatacatttacttttgccgataattcaaaagtttcagcccgctatactttcacttacgcctggaccggtgacgagtggaaaatttcatcgcatcattcttccgctatgccggagtcctaa

SEQ ID NO: 155562 - DNA, 186 bp, Enterobacter cloacae
atgatgacaacagaagaagaacgattaaaaaactgtgaggcaaaaggtataagtaaagatacctgctacctggttgagaaagccgacagacggcaggaaaaagaccagaatgatacccgttttcacgagcaaaacttgcgagtcattaagcaaatgggattaaagggtcttgggcttccggactaa

SEQ ID NO: 155563 - DNA, 693 bp, Enterobacter cloacae
atgaagtttttacccgccttgttgattatgtttacgtttctgcccgttgctcgggcggtggttaacgttgagggaaccagggtaattattcatcagggcgaactttcggcatcgctcacgctctctaattcagaggaacagcccacgatggtccaaatctggagtgataatggcgatcccctcacgccgcctgaaaaaacgaccacgccgcttattgctgttcctccggtatttagtatgaaaccaggtgaagttcgtgtggtgcaacttatgctgacgtctacaggaactttatcgaaagataaagagtcactattctggctgaatatttaccaaatcccacctaataccgctgctgtatctggggtcaggcaagtagtgttgccactgcgtctgaggatgaaagtctttattcgtccggaaggggtagatgatccggtagagcaagatggtaataaacttcgctttattttacagtcaacccaaaatggagaacgaatgttagtcacaaatcccacgccgtggcatatgactttgacaaatatgagttttatgaggtctggcctcggaggcgtaatggtggcaccggcgtcgagtgttaacattcctgttgaaccaggaaagggaacgcgaccgttcaagtacgaacttattaacgacctgggcacccgctgggtgtacagtgtgagatag

SEQ ID NO: 155564 - DNA, 1329 bp, Enterobacter cloacae
atgggtattttaaagatttcaggagtgctggcgctattgctaatgtgccagatgtcctgggcagtatgtagccgcgtcacgagtaacagcacgctttctcaggccgcgataaacgccggatatacggcgacaagctggaccggggcctgtgatacatgcaacggcagaaatattggtattcccggagttatcagcttgagcagcggaacatttcagccttcaggcacattgctcgccagttcatctattagctttctgaaccagggggcaacaacggcctatactgcaaatcagatcttgtttcgctgtaacgtggccgatgccgatagtttatatgaaatgtatgccacgaacggagacaatacctggacaggaatgtatgcagcgagcgaagtggagggggcttactatagctatgtgcgtaacgttgccgtccggctcactaacctgaaaacaggggcttacttttcgcgtttctggcaaggaaggaagctttctgaagaagactggttctccgacggcacctatatttatataccagccagtgcgtttagtgacgtcatgatggaaatttttcgtatcgacagcacaacttatttcagtaacgcctccaatcgatacacctatatgtattcgcaacctcatggttacactgcttttaaaggccctgggctgagcgccaacgtcacggagggggccgactccgcctcaaactacaatggttggtacaacgcttggccgggagcgtggagcctgtatagcaccggtgtgacgtttgttcgcggcgcgacctgtcgggtgagtgatttccctaatgtggtggctctccccaccattacggcagcgcagttgagccaggggggatccagtcaggcgggatttaacgtcaccattgaatgcgaaaccggcgcgttgtccagtaccagtcagtcaacaaccagcgcggcaaacgtcgcaatgggatttttagtgaatcagcctggcgcggtagccgcggccaggtcgctagggttgatcacctccggaggaggattaacctggctgctggataaccattatggtgctggtgcaggtgaggcctccggagtggggattcgtatttatatgggcagcggcagcgcgttaaatctgttgccggacctcacctcttatggcacgggcaaccctcggggatggtatgcattcagagatttaacgacccttgtgtcgagtggcaatacggacatctacacgggaagttttactgcgtcgcttgaagctctgggccagcaaccagttacgccaggtacggtgaatgcgcaattgcagattatggtcagctttcaatag

SEQ ID NO: 155565 - DNA, 2586 bp, Enterobacter cloacae
gtggtgacataccgttatagacggtccgtttgccctcttaaaaaggccgctttcttgttaattctgggtactggaagttatgttccgctttcactggcaaaggactactacttcgacccggaattattaaaaggagcatcatacgggcaggatttggccaggtttaaccagacgcaacccgctgccgagccgggaaaacatgtactggatgtcttcgttaatggtcagcttgttgcaacgggccaaaccatcatgttccatgcggaggaaagcggcgagatttcagcttgcctgtccccggatcttatgcaaaaaacggctattcgcgttcagtcacgaaaagaacgtaaatatcctgattgtttattgctttcggaaacaggccaagccgtcactgaagcgctggatatgacgactctgcgtctcgatcttcgtgtaccacaacaggctctagtgcatatgccgcgtggttatattcccgtgtctgaatgggtcagcggcgtaccggtaatgtatttacgtcataacactaactttacccgaactgatgatactcgtaatgactttagctataactatctctggagtgccgtaaacgcagggacaaacctgggtctttggcaggtacgtcatcagggtaatttacggtattacgaaagcgatgtagctggcagtgaatataaatacaattcagtacgctcctggattgagcgtcctcttcccgggatcgatagcgtgctggcaattggagaaagctataccagtaacagtctgtttggcagtttatcttttaacgggattaaattagcgacggatacgcgaatgtggccccagagcaggaggggctttgcgcccgaagtacgcggggttgcggcaacctcggcacatgttgtaatacggcagctaggacaaattatttatgagacagacgtaccgcccggtgcgtttgtgatccgtgacttgtataacacgcgcgaccagggcgatcttagtgtcacggtcaatgaagctacggggcgggtttcatcctttaccgtcccttatacctccgtccctgactccatgcgccccggcaattggcagtatgaacttgctgccgggaaagtcagggatttctcctccgttgataatcagtttgttgaaggtgttatacagcgcgggataagtaatacgcttactttgaacagtggcgtgcgtgtcgcggatgattattttgctggccttatcggaacggttgttagcacccgggtgggggcattcggattaaatgccacctggtctcgcgcagaaataatcgatcaaagcgaaacaggatggcgcagtgagttaagctacagccgaaactttaataccggaaccagtattgtcctggcggcctggcgctactccacggacggctttcgtgacctgcaggatgtactcggccaacgtcgtcaataccagaacagcgtggagtactggtctgacagtttaaatcagaagaatcgtttttctgcttcggttaatcaatcgatgaatagctggggtatgcttaacttcactgccagtaccagcgattactaccatgattcatcgcgggtaacgcaactacagctgggatacagcaatagctggaaaagtattgggtacaatctcaatgttgcacgtcagcgtactgtcatggacagggggcgttttttcaatagcgttaaagatgcagactttgatacgacaggagaacagcgtgtcactgagacgctcttctcgtttggggtctcgatcccgtttgattttggtaaaacaaaagccatcgcctcgctggacatgacacgcaccggtgattcccgttccggaatactcaatattgcggggacgacaggtgacgacaatccgctaagctggtcaggatatacgggactggaaaattatcaaaacagccatactgccacgactgctggaggcagtcttcagcaaaatacgtcgctgggttcactacgcgcgtcagccagtaccggggaaggttaccgacaatatggtgttggtacttccggtacattgcttctgcatcaggggggagtcacggcagggccttatgcgagcgataccttcgcactcataaatgcgccaggtgcgaggggggcgaaaatccgcaatggacagggagcgcaaatcaatcggtttggctacgcgattctcccgtccttgacgccctatcagtataacaccataacgctagactctagccagatggatgaagacacagaattgttgggaggcagtgaaaaagtcgtcccttacgctggcgcggtggcgaaagttacgtttgccacgctgcgagggcaagcagttttaatcaccacccatttaccaaagggggagtatcccccaatgggggctgatgtggttgatgtcagcggagatagcaagggaatggttggccagggagggcagatttatgcgcgaattgatgagcagagcgggattctggtcgttaaatggggagaatctatgaatgaacagtgtgaggtgcattacgtcttaccttcacgttccggcgagcgctttatccatttaaatcaaccctgtgttccacggggagacagatga

SEQ ID NO: 155566 - DNA, 753 bp, Enterobacter cloacae
atgattgcatcaaagccatcgtattttctgcgttgccttactctcgctctccttgcgttaatggtgagtgtgtccagctgggccaatgtgaccatgaccggaacacgtattatttatcgtagtgatgtacgctccgttgatgtcaatctggcaaacaatggaaatatcccttttgtagtacaaacctggtttgacgctggaaacatcaacgatggcccggaaagtaaaacaaatgtcccctttgtcgcaactcctgcctcatttcgtatccaggcccgggccgggcaggttgtgcgcgtctctcacaccgctttgcgtcgtctacccgaagaccgtgaatccgttttttactttaatttccagcaaatcccaccgtctaatgccggtggttctgccgctgagggcagaaataaaatgttggtggttttacgtaacagggtaaaattattttatcgtccttcacggataggtagtcctcccgcgaatgtcatttcaactattaaagcctctactgcgagagagggtaatcgcatcggtgtgacacttaccaatactttacctttctatctcaatttaacgcgcatacagctaaacggagccagtggcttgaagctgaccgctggagatatggtaacaccgtatggtagccgcactttttggtttactcgcgccgcgaattcggggaataacacgatttcgctgaccgttatcaacgatcagggagctggcatcagtggtgacataccgttatag

SEQ ID NO: 155567 - DNA, 528 bp, Enterobacter cloacae
atgatgttgaaacgatacacattggcatgtgccactttgctgcttcctggtttagcttttgcttcgggtaacactattacatttcagggcgaagtggcggctcaaacctgttcgatatcagtaaacgggaatgatgcatcaccggttgttttgttgccgactgtaggtaccgctcagcttaatgaagctggaaaggttgcgggcgcgacgacttttgatattggcgttacggggtgtaccgcaagcgatgacggaatgagtttctcaactgtctttgtcggtaatcaggtaaccaaagcaggtaatttaggtaatacggggactgcccagaatgttgaattgcaaattcttgatactaaaggcatagagattgattttacgaacggtttcactggaaaccgggatttggttcttgcatcgggacaaaccagcacgaactcaacttatactgcgcagtattttgcaacaggggccgcagtacccggcagcgtaatgtcaacgatgcagtacgcaatttcttaccagtaa

SEQ ID NO: 155568 - DNA, 486 bp, Enterobacter cloacae
gtgattatgacagaaaagaacaagaatgagcgttcgacagaaagtttcgtacggatctgttttgttgttagtgtgatgggaattggttgggtattgggtgttttaactggtccggatgcgtggtacgccagccttgttaaaccctcatttaacccgcctaatgctgtattcgctcccgtatggaccgtactttatttcatgattgcgatggctggttggcgagtctggctgcgcgccagaacgagtttccccatgttgttatggggaatgcagatgttgttgaactggatgtggtctcctgtatttttcctagcacatcaaccagggattgcgctgattattatcacgatggctttggtttcagttctcctgtttattatccttgccaaaaaatatgataaattagcctcttggcttttcgtcccctatgctttatggcttgtctttgccacaatagtgaatgcatctattgtctggttaaattaa

SEQ ID NO: 155569 - DNA, 1053 bp, Enterobacter cloacae
atgagcttcacacgcaatatctttacctccagcgccactattattttttctttttttttaattccagcccatgcagtaagtggcctgacaggtgcgggcggtacattccctgcccccatttatgagaaatgggcagctgaatatcgaataataagcggcaaaagagtaaattaccagggaattggttcttctgggggcatcaggcaaataaaagccagaacaattgactttgcaggtacagatattccactgaaagatgaagagcttgacaagctccagctcttccagtttcccgcagttatcggtggtgttgttgtggccgttaatattcctggtatctcttctggagacctgattcttgatggagctgtgttgggtgatatttatcttggcaacataagacgctggaatgataaagctatcacaaggttgaaccctggccttaatttgccagacattcctattgcagttattcgccgggctgatggttcaggtacgacatatatatttactcgttatctgtcaaaagttaaccctgaatggaatagaaagattggagccggagcaaacgttaactggccaaccggaatgggaggtaagggaaacagtggcgttgctgtatttgttcagcgtgttcgtggcgccatcggctttgtcgaatatagttacgcaaaacctgacaatatgtcttatactagaatgataaatgctgatggtaaaactgtcaatccaagtcaatcgtcttttagtgctgcagggaaaggagcgaactggggaaaacaattagctctggatctgacaaatcaaaaaggtgaaaacgcgtggccaataactgctataacatttatattaatccataagcagcaaataaatgcagccagaggaagcggagtccttaatttttttgactggtcatttcataacggacattggctggcccaagacctagattatgcgatgctacctgattcggttatcaataacatacggaattcatggagggataacattacagacggtcgcgggcagcctcttcttgataaatctaattga

SEQ ID NO: 155570 - DNA, 945 bp, Enterobacter cloacae
atgagaattttagttctggggctagccattgtcatatcagcttcttattctgctattgcggacgttagtaacgatatttcacagccgggacgttttagcggagaccttgccttaggtagcttaagcggtaagaccaaggagcgtgtatacgacccagattcaggtggacataagaacagccagctcaactggaaatacaataatgctgcaatcattaaaggttctcttgactgggatttaattccctggctatcgataggtgcctctggctggacaactattgctagccgtggtggttatatggacgatactgactggatggatgagagtaaaaaatcatggacagaccagagcagacatcctaatacacgtttaaattacgcaaatgaatttgatttgaacgttaaaggatggttgttaaacgaacctacccatcgttttggtatgatggccggttatcaggaaagccgctatagcttcaaagccactggagggtccttcaattacaccgatgaagatacaggcctgtctgacgctgggactttcccggccggaacgacggttatcggttacaaacaacattttaaaatgccatacatcggcattgtaggtagttaccgttatgagcgtttcgagttcggcggtagcttcaaatacagtggatgggtgcgcgcaactgataacgatgagcactacctcggagatacaactttcagaacaaatatcaagaaccagaagttttactctcttgttggtaatgcaggttattacttaacgcctgacgcaaaaatttatctggaaggggcatggaaccgagcaaccaacaaaaaaggaagtttgtcagctcatgattatggctcaggcgaaaaaaatagcgcggagaacagcggtggtattgaaagctatagctttatgacaacagtcggtctgaagtactctttctga

SEQ ID NO: 155571 - DNA, 2037 bp, Enterobacter cloacae
atgacgcaaagtcattttcatgatttgctcagtaaacttgagcaaccacttggcgatgcagcactatcctgggtagctgcacaaaatcacaaaactatagcgcaatttacccagagcaggcgttttcaacagatgcaacagctcatcctgacatctttaaacgatcaggcgaacattccctggggtacccattatcacaatactgtttataatttctggcaggatgaccatcatcctcgcggcatctggcgacgaacccatgaaacatcgtatctgagcacagagccagaatgggaaaccgtgcttgatatagatcgtctgaataaagatgaaggcgcaaactggagtttcagtggggctgatctgctttatcctgatttcacgcgggcgttagtatttttatctggcggtggcgatgcctgcgagatccgagagttcgatctgctcagcaagacctttatcagggacggtttctttcttccggagagtaaaagttcagttgcctggcttgatgtaaacactttactactggctctggatgcggggggaaatacgctgaccacatcaggttatccgcggtgtgttcgtcgatggacgcgtggcacttcagcccgggatgccgctctgatttatgctggcgaaactactgatatgatggtttcgagctggcatgatcatacgccgggttttgaaaaaacactggtgcattgcagtcaggatttttatcgcagtcgcacgtaccagctcactctacagggcagactggaattcatcgatatcccggaggatgcatcctgcgatttttttaatgaatggctgcttatcacactcaccagcacctggaaaatagcggataaaacttatccggcaggggctttgctggtgacagatttcattgaatttcaacaaggccagcgcgacttaaccgtcctgttcacgccggattcacagactacattacagggttacagttcgacccgtgattatcttctattgaacttgatccgggatgtggttggaatcgttgacgttttaaaaatagagaaggggcagtggacctgcgtccagacgctggcattaccggactttacgacgatttctgcttcaggtattgatatggagagcaaccgttatcaactcgtgagttatggttttttgcagccctattgcctgagttatggcgatctggacaacaaaacgctccgtgtggcgaagcaagccccagaatgttttgataaaactgattttcaggttactcagcattttaccaaatcgcttgatggtacccgtattccctattttcagatagccactaaagagcttgcgcccactggccagcatcccactctgttgaatggttacggaggttttgaagtctctttaacacccgaatatatgggctctaaagggggcacatggttgcaaaaagggggagtttacgtcgtggccaatattcgcggtggtggtgaatacggcccggagtggcaccaggcggcactaaaacagtatcgatatcgcgcctatgaagatttcgcggcagtggctaatgatctgattatacgtggggtgacctgtgtaacccgcctggcagcacagggggggagcaacggaggattgttgattggcaacatgctgacagactatcccacacagtttggtgcgctggtatgtgaagttccgcttctggacatgaccaattatcatcgctggctggcgggcccctcatggattgctgaatatggagatccgtatgttgtcgaagaaagacaatggctgcaaagatattcacccttcgacaaagtttctcccgttgaatgctatccaccagtgctgtttaccacagggactcaggacgaccgtgtcagtccggcacatgcgcgggaaatggtggccctaatgcagcagcagggccatagcaatgtctggctgtatgaagaaactgaggctggccacggtagcgcgccagagaatagtcaggtcgcattttaccatgcgatgatcgaagagttcctttggcaaatactgactgaacggtaa

SEQ ID NO: 155572 - DNA, 330 bp, Enterobacter cloacae
atgtccaactatagggcagggtgggcagtccatctggggtatttgagaaacggcagcaatgccgcctcgccttcaaataaaaggacaaacacggtttcaagaagttgttatgaaaggagtaaaggcccccattggaagccttacttgttgatccggatcatgactattatcggaggcatactggttttaccgttcagtcagtatttgccaaaggaactcttcgatcatcgcatggtaaaatgcgacctgactattctctggcgcgctaccgtggccagcctcagtttcttcatacagccagacattgctatggccctgctgctgcattag

SEQ ID NO: 155573 - DNA, 177 bp, Enterobacter cloacae
atggaacgtctgccgttgttcggactggcggcgcccaacctgagctggtcaatgaacttcgtcatggacgcgctggcccccagtcgctggagcaagtgcctgacctgtgtggacgacatcacgaaggcgtatctaaccattatcatcgtattcgggattttgggggcgttcaggtga

SEQ ID NO: 155574 - DNA, 327 bp, Enterobacter cloacae
atggacgattttctgaaagattttggcaaagtggtggagggcagttcgggggctttatcgtttggactgatacagtgcctggtcatggcgggggccgtcaccagtctgtcacgacagaccggtgtacagtactggtttatgttagcggcagctctggttgctacggtgggattcttcttgtgcatttttagcgtggccagagtcattaaagacgtcacatcaaccaacaaggtgagacgtttgcagctttacattttgttgtatccggccgctattggtgccttgctgtcagcgaaggtaagcctgatatcactgctgggtaagtga

SEQ ID NO: 155575 - DNA, 258 bp, Enterobacter cloacae
atgagagaatcagctgtcgttatgttttctcggcctttcgacgttaatgtttgccatgaccatgaagacaatgtgtgggtggctcagtgcgatgctcttggtcttgttacagaagcagcgacatacgaagaactgaccgagcgagtatgggaaatagccccagagctttatgtaatgaacggcctgggtagtaaccctgcgcgtatcagtttgtcgtttaatcaggaacaatcttactctgacaggattgcactctga

SEQ ID NO: 155576 - DNA, 198 bp, Enterobacter cloacae
atgggaaccggactatatcctaagctcacggaattgttgtcagcggctggctgttactttgagagacaggggaaaggaagccatgagatatggttcagcccaataagcaaccgtaacttcagcgtaccgtacaccatcgtttcaagacacacagcaaacggcatcctgaaacaggccggtctgccaaagaacttttga

SEQ ID NO: 155577 - DNA, 297 bp, Enterobacter cloacae
gtgaagctgtttaatcgaaaaagttggctcacggattacatgcagcgacaaaaagtaactttgcatcaggatatctggcgaggctctgctgcagaactggctaaccatgggaccttggtcgttttcccgggccagggctggtggaaaacacggcatgctctgaacagctatgatgctgaagcgcgctacagcctgatcatctctctccatgtaccggagaccgatgtcgatctgctggcgccggtaaagagtaaagtggctgcgctcatcgccagtcagatcgaaattacaccctga

SEQ ID NO: 155578 - DNA, 1509 bp, Enterobacter cloacae
atgaacatgctccatctgtccgtcgcggcggctattgtggccgttatggctgtctttaccgttttcgttttactctccagaatgcgcgcactgaaacgcgcagacgccgacaaagcggcccgactccagcgttacgcgataatcacggatgctgaagccgaggccactcggctcatgcaggaggcggaggagcaggcccgggccaccgccgaaagtgcccgggcggtagccagcgccctggaagaggaagccaccgccttactaggtgaagcgcagtcaacctctctctcgctgcaggaacagatagccacattgcgcacatcgtattcagaaaaaaaagaaatctatgatgcgctggaaaaagcgattgccatgtaccgcgaggaagaagcgtttgcagagatgggcatgtttgaaccccattttgatttcgatacctcagaagaatttaaagacgccgtaaaagctaaccgggcggaacagaaggcgctgctgcggatcaagacccggagcggcgcaatctggtgcggcacggactggacggttcacaactcgcgtgctgaaggaaaaaaaatgacaacccgcaccattaatctgaccgcccgggctttcaacggcgaatgtgacgcagcaatcgctaactgtacgttccgaaactggtccgttatgcacgatcgcattcaggccgcgtttgataagatcaacgccctgaatgaggtgaatgatgtccatatcagtcacgattatctgaccctgaagctcaaagagctcgacctcgtacatgcataccgtatgaaaaaacaggcagagaaagatgagcagcgtgaaatccgcgctcagatggccgaagaacgtaaagcgcaacaggagatagagcgagccatcagagaggcggaagcggaagagttgcgggcgcaaaaagcactggataaagcccgtaaggagatggacgcaaaactcgcgcagatgacagccgaacaggcggctctctatcagacgaaaattgataccttacaggaagcattaacggaagcagaacttaagggccagaaagccctgagcatggcgcagcagaccaaacgtggccatgtctacattatctcgaatgtgggctcatttggtgaaaatgtttacaaaattggcatgacgcgtcgccttgacccccaggaccgcgtggatgaactcggcagcgcttccgttccgttcctgttcgatgtgcatgccatgatccacagcgaggatgcaccggccctggagacggcactccatcaggcctttgatgccagacgaacgaatctcgtgaaccgtcgtaaggagtttttcagcgtcagtctccaggacataaaaaaagccgtatttgagctggcgggcaacgatgtcgattttgttgaaacagtcaccgcacagcattactacgagacgctggcgctgcgtaagaaacaaagcggaaatacgagcaccgaaaagtccgtgattgtcagccagccacggtttgccgaatcactttaa

SEQ ID NO: 155579 - DNA, 1257 bp, Enterobacter cloacae
atgttgcgcccccctatatcagatgttctttactttgccctccttcacggcgatctggcagcgctggatgccatcggtaaagagagaccagaggacatgattcacttacgtacaatcctttgcaccaatgaacctggagcggttgatattaatctcggacttgggccagaacttgcagagaacgaacagatcatttctttttttgaaggccctcgcgcctactttatgtctgcaggtgcaagtcttcaggcatatttgacgggcggaaaaagcaacgtattgtttgattattcactcagctttgattccaattttgctgaaaaaatgcgcgcagtcgtatcaggagagaatattcaggaaattgaacgaaaacgcgttatcgcaatattgatgttgaaggcatacaaccccagagtgcagttcgatttgatcccatttctcatcgaaaatgttcgcctttcgcgtgataatccgcagaacatacgtccgcttaatacgcttattgccttccgcatgctcgattacctgaactgggagcgcttcagagaatcgccaggcacatttgtttttagtaagcctgcagaaactcttcggtccgaacttcttgaagatgcgaaagcgtttatgcaaaaactctacagtaacggcttcatagcacagcaggaagctaagagcatattcaatcaggctctattgttacgctttgccacactctggcaccgtgatagcaagcctgattacaagctgatcatgcgtgagctcttcatctattctgttaagaaacttggggcgataccgctcacggagttgcagctcatctggagaggcatgacctcatcgccagtagcgcccttttttggccctgtaacgggaaagtctcgcgacatgcttaaggcaattcgcggcatggcatgggatatggttttgctgcgtctgctagagcaggctgctaccgcgactcagaatggatccttctttattccctatttcgtcactaatgatggtcgctggcgtgaattattacggctcagcccggtaaagatgatggtcattgatgaccgggagcaccgagtacaagttgctcgccagaatgaaaaagagtttagagcgatcttcatcgaatgcctcgagggggaactacgttcctgtatgacacctgaaatgatcgagaagcgccgtttggccgcaaaaaacctacagcctgatgcattaagggcactcatcgcgcaagaagaggcattgtgggccaccccttag

SEQ ID NO: 155580 - DNA, 894 bp, Enterobacter cloacae
atgtcacagcttaattttggtaaccagaacccttttgaacgtgcgatttctccttttgaagaaatggcggcgtacgaagcgctgtgggtcgaaaaaggggggacgttcaagaccattgccgataagtttcgccaggctccggaaggtgccgttccttctgatttagtctccgacaaaacgattgcaaccttcaagaccagactgaaagaaatcatgtcccgctacgctgtcgaaaatatcggtgttcgggttcatggtgccggtgagtatcccgagaagctgagagatgcccgtcacccgctcgaagtcctctattatcagggatggtgggatctggttaacacccgctcagtcgcagttgtcggctcaagaaaagtatcggaagacggcgctcgtcgtacccgtcgactggtaaaatgcttagtggaagatggctttactattgtctcagggcttgccgaaggcgtggacactaacgctcaccagaccgcactggcgcttggtggcaagactattgccgtgatcggtacaccgctctcccacaattacccgaagcagaacagcgagcttcagcgcactattcgtgataatttcctgctcatcagtcaggtgccattccagcgctatctggaccaggattaccgtagcaatcgaattttcttcccggaacggaatatcaccatgtccgcgctgactgaagcgacgatcataatcgaagcctccgaaacggagggtacgctgactcaagctcgtgccgctctcgctcagggccgtaagcttttcatcctcgaatcctgtttccagaacccgtctattacgtggcctgcaaaatttgaggcattgggagctatacgagtgaaggattacgaagacatcaggaaaaatctcggatga

SEQ ID NO: 155581 - DNA, 135 bp, Enterobacter cloacae
atgacattcaggctgacgcaaattgatgagttgatcaggggcagcattaccacctcgaagttggtgatctatgctatttcttcgaagaatataccgccagacaacgcgcagcctacagcgaaaccaaccagttga

SEQ ID NO: 155582 - DNA, 222 bp, Enterobacter cloacae
atgtcgtcacgactcaaagttactaatggttatatgacctccgcagaacgtcttaccctagaaatgggagaacgtctccagaaagcggcgggccaggatttgaaaaacaaaattgaatctggcgaggtcaagattgtcaatggtcgctatgtcggccttggtttaacagtttctcgtccgaagaggacgcgtgttaaaccaacatttgctgttgttaaataa

SEQ ID NO: 155583 - DNA, 558 bp, Enterobacter cloacae
gtgaacgaagcaatacagtggatgccgccgttttcaaatttttatggcaatggcatgattcatcgtcttttcttggcgagcggtaaggtgtatggcgttggttttgagttcatcgagactatgcaggacttcacccgtaagaatgtcgatatacttgccgttaatccggctttcagataccccaggaatggtgtgtgggctgtactctttgatgaggttgaattagacccgctgactaatgaagtccttgattttaaaggttttcagcatgttaagcatcctggtcttagtggtggtcgaattttgttcaatgttgcaagcataatccttgaacactataatgtttgcaatgcaggagcttacgttttttcagcagcagaagacagacaacatttacgtaaaacagatctggttgacatttataatggtattctgggtcttaatggtaaagctaaaagtaagctcttttacgaatactttgaaggttgggaagcgtacagtgattcgatttccagccaaggggggagaggttatgtcgtcacgactcaaagttactaa

SEQ ID NO: 155584 - DNA, 867 bp, Enterobacter cloacae
atgaaattttcctaccgccatggatacgatcctgagtttgacgatagagtagtccgtgatgaagcccctaaatgggtcagaaagctctttttttcgaaggtactggaaaggttacttcaaactgatcaactaacggattctggcaagcagcctataccagtatatgacctgatatatgagttattggctatggatgatgaagaacccgatgagtatcacttaagccacacatctgccctggaagttttgcgaaatctcgtgatgggtatgccctggtaccgcttctatgacatggtcgagaccgtagcggagaggctgattgacaataacgatacgtttacgtggggcagcccaaaaaatgagtcctattcttactccgcatatcgtcagagggtgaacgagctcttttcggaatacaaagttgactggagaatgaatgagacaggtcagctggagtcacccctgccactttttctcgaagaaaaattaagaagcacggaggagaagcttgccgatcgttttgaaccggctcgggcgcactatgtaaaagcacgggcctatgcactgggtgcgcatcgtgatgctgaaaattcgattaaggagtcagtgagtgcgatcgaaagtgtttgcaggaccttttatccggatgccgccacgcttggagaggctcttaaactgatgaggaaagatggcagtgtctcacccatgctcataacggttattgaaaagttctacgcttatgccaatgcagagcctgccgtcagacatggtagcgacaaagcctcatctgttctggaacatgatgcagagctggcgctgcatttcgcagcggcttttatcaggacgctgattttacgtaaggaatga

SEQ ID NO: 155585 - DNA, 606 bp, Enterobacter cloacae
atggtatcatgcacgaaaagcctggaggaatggtggtatatgaactggtcttcattggtaaagataacccttggcacgtttttgttagcggggatgtcgttttctgtttacgctaaaaactgtaagaaaggtattccctgcggtaactcgtgtatagcagcatggaaaacctgtggcggaagttcgcactctacctccgctaacaggcatttatactctaatccatcaacttcgcttcaaagcacaattccagaatcatccgttgaacgctctactaacaaagttgaagacagaacctcgtccgcaaccgcgaaaacgtatctttgccaatatgctattgcagcagtacaaaatgccaaaattggttctttacgtgttttaggaaacgctaaagtcacgttatatacggatagtttcaaagctcaccgcatgaacggtacatatctgatctccccgaatcttaataccgatggcaagctgatgatggcggatgataaaagcaaagtgtatgcctatgatccgcggctgttgaacttcgccattagcgaccgcattgccagaagtacagagcaatgggatcgttgtaaattggttcccaacaactaa

SEQ ID NO: 155586 - DNA, 480 bp, Enterobacter cloacae
atgtgtgatgtgactggtctgtcgcaacgtcatgccagcaggcttacaggtttgtccctgtcgatctgccgttatgatgctcatcgtccggctgctgatgcacatttatcagggcgtattactgagcatgcacctgaacgcggatgttttggttatcgacggcgcatctggcagtttctgcgtagggagggccttcacgttaatcacaagcgggtataccgtttttaccaccctaatggactgagcgtaaaacgcagacgacgctgtaaagggcaggcgaccgaacggtttccgcttctgcgcccggatgcgccgaaccttacatggccgatagatttcgttatggacgctctggccaacggtcgcaggatcaagtgccaaacctgtgtacgatcaccgctattttcggtatttcaggcgttcacgtcacgcgtattctggacagcatcgcgctgttttgtggtcccccagctacgataa

SEQ ID NO: 155587 - DNA, 1170 bp, Enterobacter cloacae
atgaaaactgcttcacccgaagatgtaaacagcgcattcattgtaacccacgataacccgcccagtttatctaatctgaaaagattgagtttaatgaatgacgtggtctatttttcagatcttagagacttagcattaatttgcgatgatgagacatcaagcgttgataacggtgttacgttcagaatgggcgagacagctccgtatcctagagttagtgaatacgagaacgtttttaatgaaaatttaaatcattctttacaaatgattaatgaaaggattcttttccctataaatacattaagtatcaaaaaccatacgccggcccttcactggatagcatatcaatcggctatcaaagataaagagttagttcgaagtgcttctgaggaaatacccggcgtcagtttaattgatgggttttattctccgttcactatagccacaagtcagggtcgctcaaatcactggtatcagccggaacaaatagaaaacattgagggtatgtctccttcaacgcagatgctctcgcagataagggttggtagggcattgaaatctctatctatggcaagctctttaggcgcaaatcctgtagttctagatgacataaacagtaaggtaattggcaggttactgcgggacaagagcgctctgctagatgttgatacttacgtaaacagtgccattgaacacgaactattagatattccccttcttgagaaggaactggaggatgtaccttggcaggatattctccagatgaggagagaaaccctacctgctataaataaaactagacgttttctgatcgacagttctaaggcgtcattcctatttccttcttccagccccagagaaatacgtaataaagcaaccgagttaagaaatgaatactggaaattaaagtttgaagaaaatattaagtggactcagctaggactaagtactgccatttctaccggagctagtgtggcaggagtgacggttactgttggtgcaggacttataggtttactagccgctcttatcccagcagccggaatggttctcataaaagaacaaataccaaacatcatggatatcgttaaactacgtcgggaaagaaagtcgaactcattaattcaaatagatagttgtaactatctgaatttgaaaaaagggaattaa

SEQ ID NO: 155588 - DNA, 903 bp, Enterobacter cloacae
atggatctctttcctgatattgaacaggctgtacctttaccccatgaagaagtgcttcgctacatggtatgtaaaatccgtgataaccggtcggaagaatggcttacagagatgtgcagcaaaaataacctttctgatgtctgtcaggattatcttcaaaaaggagtgctgaaggctctggagggtgaacctgatgtgagcttttacccaccaagactcacgattgagctggtgccccggacatgctggttcgataacgtcagaagtgcggtatcttcaacggactggaaacggctacggcaacaaacgtccagaacagcagggtggaaatgccagatttgcggcggaaaggggccacgatggcctgtggcgtgccatgaaatctggcattacgatgatgacaggcagtgtcagaccctcaccggtctcatcgcgttatgcccatcctgccatgaagtcaaacacatggggttcagtgagctccggggtaaaaaggacgaagcggtggctcatctggcgctcgttaacggctggtctcttcagggcgcatttgactatgtggatgaggcctttgacgtgtggcgggcacgctctcgtcacgcctggcagctggatatctcgtggctcgaaacgcaggggattaaacgccaggatgggacagcagcagagggcgacaacattcctgctgaggatcagctttcgctggagcttgaggttacgcctgtcgcgaaggagagcactctagtgcccgccgtggtggaacaacagagcatctcccgcgatgagaggcaaatccttaagggcaaacctgtatcccgctcatcgtccgtatggccagtgttctggtcagtctgccagcgggtgttctgccaagtgaaaaaggtgatacgggagcagtggtga

SEQ ID NO: 155589 - DNA, 1041 bp, Enterobacter cloacae
atgagtatgaggcagaaaggatatccaaacggtcccctggtgagagcaatatgggattgttgtgatgagctgtatgaacgtttaggccgcgttcctgaaagacaggaactcttgcaggaaatgaagttacgggaacccgaaagggcaggtctaagtacttatggaagacagagaattgaatggaagctgtaccacggttttgaaagtacggagaaagcagatagttgccttaatatgattcccgaggaatttttagagccacagctacgccgagttgtttatgccgttacgcaactgggtgaagtttcgatcccacaggtcattgaatggcttgattttagcaacgccccgctaaagttgaatgaaattcgatcacaattccaggcgctcactgtcaatgataatcagcgtgcccgatatcgtgcatcccgtacaagcatggttagcgatcaggggcattatatggacaagctcttccgcaccggaaaagggagggcgacccgctatgttctttatgatccaaacatacatggtgtctgggatattggcgatgacggaaaaacgccagtagagattctaaaacctacttccctggagaggttaaggattttgcatgaatgtactgaatgtcatgagttaaaactggaggatatgcgtgcaagagtgctgagggaaattgtggatcgtgaaggtcagcctatctttcggaaaagactactggatgcttacaatcgagcatgtgcagttaccgactgtgcgatcgctgaattacttgaagccgctcatataattccttattcaggggctcagcattgtaaggccatgcacggaatacttctcagaaccgatatacacacgctatttgacaaaggactgctttggatagatgagaactttagggttaacctcgaccctgggttgctaaacagcgagtacggtcatttacagggtaaattaatgagattgccggaggcacgaatggatcgcccgcttaaggctcatcttgcctatcatcgtgcactttttgtaagtaaattatga

SEQ ID NO: 155590 - DNA, 825 bp, Enterobacter cloacae
atgtttgggagcagaacaaatttagtaaccaagtggtttacagttttcgaggcaaagaaaacccccgacagattctctctttctcgcgcctccatgcaagacgccgacatgtatgaagtctatctacgtaaagaagggaaagacaatggctacttgttcgataggaaggatggcgacaagcttgaggtcaaagaatattgcgagaaaagagattcattctgtatcccaactatcctttacctttcagaaattacgcctgaacaagtatatggtacacattactttcagggttaccgaattgattttaacgatctcaatcatcttgaaaaattcgccagccgaaagttcctcaatgatataaggaaagaccgcaagaaggaagagaagcaacagaaaaggtataacgagcaagaacggcgtgttaacgatcgtatggatgtgctcaatgctgtaattgagctgtatatgaaagacggaagtcaccatggcctaccaaaaattgcaacccgtatccatagtttccgctgggagctgcatccgaggaaaggtgaaatgaaacgtgagctcgagcttgtactcgaatcctttgtattggatggagagctgaaaaaaggtgaacagggtggctatagaccgacaggtaaagcttttacaacactcggcgaatactcaacacagtcacgaaggcatgcagaaatcagcaagctccaatctggtacagttagggctacagcattagctgcggtagcagcaattgctagcgcaacgcctgtcataatactctacctgacaaaactatttaatacaattaaggcgctactttaa

SEQ ID NO: 155591 - DNA, 3642 bp, Enterobacter cloacae
atgatcgaaaatcagcctattgatgttgatgtgaactcgagactcgtatcgcttacaccggagtatatcgaggaagaacatgttggatatgttctggcaattgaagctgctcttgctgataagcagatccgtaacatcgctctttcgggtaactacggagtgggtaagagtagcatcttgcaagaagttgctcgaagaaagaaagatcatgtcgtcgaaatttctttatcaaccctgtcacctattgaagtatcaaagctggacgaatcggtaccaaagcaggcaacgacgccaacgaaccgcattcagcaggaaatcgttaaacaactgctttaccgcgaagaaccgagtaaaacaccgggctctcgctttaaacgaattgagcgatttcgatggcaaagggaagcagtgtcggcttgcttgctgggattcgctgtcgctgtcatttttctcttgtctggatggacggcccaagttgtatccgcgatcccttccttgaaagcacttggagcctggatacatgcagtgacctttagtgtcgcatcatgtattgcctttctgattcgctggcggttctacggcaagcttcatattaagcaattttcagctggtgccgcgacggtcacactcgatgacaattctgtatcgtacttcgaccagtatttagatgagatcgtatatttttttgaagtttctgatcgcaatatcgtcatttttgaggatattgaccgttttaacgattcgcacatatttgaaacgctacgtgcactgaatacattactcaatgcatcgcctcagatcaaaaggccggtctgtttcatttatgccgtcaaagacagtatctttgacaatattgccctgaatgaggaagggcgtaagcttgaaaaagctatacttgaaaacggcgacccagcgctcgctgaggtggttcgtgcgaaccggacaaagttctttgacctcatcatcccggttgttcccttcattactcacagaagtgcacgtaatctcgtgctgaaacagcttgggaacatgaagaatcagatagcacctgaacttatcgacctggcatctcagtatgtcccggatatgaggttactcaaaaatatacgtaacgagtatatggttttccgtgcaaggattttttccggtgatggagaacagctcaatcttagtaaaaccgatttgtttgcgatgatgctttataaaaatacccatcttaccgattttgagacaatcaggataggcaagagcaaactcgatgtattatataaaattagccgagagttggtggccagtaatattaaaaggctggagggggagtacgctgctcttcgttataagctagagcatatcaacacaatagcctcaaagtgtgaacgattaggtgaagaattgctagctcatgtaaagagaacagcagaggccgttgattataaattaccgaacgcaacttttagcttcaagggcgtggcattttctcaggaagagctgaaaggagagtcattctggcaggacttagtattggctgatggtgatacagtattccaggttcgtactcggcaaaactatactatggattttactcgggataggcttgctgaagtcctcagtgagccattggacgcagatttatgggaaaataaagaaagggaatctattactgatgaaatagaggatagaaattccgacattcagtttctgagaagcgcggatctccatgatctcctaagatattcggaatttctggtgaagtacgagaataataatgtacctctcgacacaattgcacggtctctgctgaagacaggtctggcttaccaattgatccgtgcaggatatattaatcgtaatttcacactttacacgtcaacgtttcatggtactcgtgtcagcacgacggccactaactatattattcatcatgttgaacgtgacctgatggatatctatttcaagttaacgccaaaagatgttgatgccgtcgttcgtgagcgtggtaaagagtcgctcaaagattctgccttgtacaacatcgatattatggaccacttactcgttaaagatagcgagttagcagatattatgatccattctttattggattttagtgagaatgctgaaaagttcatgcaagcatacctttcttccggagaacagcgtccgcatttcattgcgcggttaacaaatgtattttcgaggatcattccgtatattgtaaaccagacggctctggatgacgtctcccgcttggagtttgtagatattgccctgactcatcttcctaaactcaaacaacggactgattcagtttcatctgtgtacctcttaactcattacgctgagctcactgcccttacctcagatgccatttctatgtctcaggcagaacgcattggaacgcttttcaaagaagcacatattatagtgcctcgtttgcagcctctgggcagacaggttcgtcaggctttccagtcccaaagtatttatgaggtcacctatgagaacctgttaactgctattgatagtgcaaaaagtgtcgcgctggacgtaataaacactgcgagtaagacagtctttagctatgttcttacaaatctgggcacgtatcttaaggctattgaaggcaaatctttaacaattgatgtccccgattcttttatcaccataattgaagaggtgcttgctcaggatacatctcatcttaatgacgtaattcggcatgctcatactgattgtcatgtaagggatcttacgcaggtgtcagaggctgcctggcagccactcgctgaactttgccggttccccgcaacatttaataatgtcagtcgctatcttgcagtctttggtgctgtcgatgcgcacctgtcccatgtgctttcttcatgcggcacgattattgaggctgaagcagcggaagaagaacaaaagacatccctggcgacagcaatcctcgcagccagagaatatctttctcctgcatctttgcgggtagagctggtgaacagtttaaaccttgaggattaccttgatatcagtaaagtttttgcggaagtaggggatcttttcgcgctattgctcaggcacaacctcattaaggatgactcggaatcatacgaacatcttgctgggactgactggccgacccggcaagcattcattagtgagtcagcggattttgaaaaatatatgacgcctgaacttgtctgcgctgacttggcagagattttggccagcgatgttatcaatgcatcgataaaatcaaaaatagtcgatgacgcaaccttatacgtagtattagcagattttgctggtcttaatcaactggcaaaatatgccacacaccatggttatgcctgtgatctgtcagtagttcagaacatggcagaggagggggtggcggcggagctggttatccctctcttacaaccgcacctggaatcgattagccgccaacagctgttttctgtgctgcgattacttgatggggattaccctagcttgacgaacgttggttatgacaaaccccgaattccaaatactcctgcagatctggcactgctcgagagactaacgctagaaggtattgtaggtaaatacgattcgcaagagtcgccgattaaggtcaataagaagtataaatag

SEQ ID NO: 155592 - DNA, 903 bp, Enterobacter cloacae
atggatttatttcctgatattgaacaagctgtgcccttaccccatgaagaagtgcttcgctacatggtatgtaaaatccgtgataaccggtcggaagaatggctgacagagatgtgcaggaaaaataacctttctgatgtctgtcaggattatcttcaaaagggagtgctgaaggctctggagggggaacctgatgtgagcttttacccaccaagactgacgattgagttggtgccccgaacatgctggttcgataacgtcagaagtgcggtatcttcatcggactggaaacggttacgccaacaaacggccagaacagcagggtggaaatgccagatttgtggtggaaagggacccagatggcctgtggagtgccatgaaatctggcattacgatgatgacaggcagtatcagaccctcaccggactcatcgcgttgtgcccttcatgccatgaagtcaaacacatagggttcagcgagctacggggtaaaaaggacgaagcggtggctcatctggcactcgtcaacggctggtcccttcagggcgcatttgactatgtggatgaggcctttgacgtgtggcgggaacgctctcgtcatgcctggcaactggatatctcgtggctcgaaacacaggggattaaacgccaggatgagaaagcagcagagggcgacaacatccctgctgaggatcagctttcgctggcgcttgaggttccgcctgtcgcgacggagagcactgcagttcccgccgtcagggaacaagaaagcaattctggcgagatggggcaaatcctgaaggacaaccctgtatcccgctcatcgtccgtatggccagcgttctggtcagtctgccagagggtgttctgccacgtgaaaaaggtggtacgggagcagtggtga

SEQ ID NO: 155593 - DNA, 1332 bp, Enterobacter cloacae
atgtacaatttttcgtacttatctgatagcatcaaaaaaaccaatcaactttgcaagcttatgaatgtaaaaacaataaatcgagaagcaagtaaaacatctggccgtggtttatcttttcagcgcactcgcgctgtgcaacgtcttttaaagcttataaaacaaaacggctcaagggtatgttattgcgcaacagagttcatagaagactctgcaacgctggtccctatagatactggtgttgacattacaattgaagaaaacaaaaattactcgagtggtctaagcttcaatagcgatccaataaaaaacactatcgtagcatttgccgatcaatacttagcttatttcaatgataataaaaccatagatttttctattttttgtcacgctaagatttcggatgagcagctagataacacatatatacaaaatcatattcctggttttacaccacaaacagcaaaacaaactagatttaaaatattaaagaaactggcatcaaatatttatttggatgagaacgaaataactttagctcgtaatttatttttggaagaatacaagaagcaatacgcggtttacaaagatacccaaaaagcagctatagattatataggcggcaattataacaaggtagtatcttggaaaaatgatgattttcgggagtttatcaaaggtattactttcattatcgatgacgcagatagcgaggatttagaagagtctgtaaaagatgatattaaaaactgtgagttctataatcaacgccattctgggttagagaatataatacttagtgccatcgagatattgtttgataaatctcaacaggatgaaaggaaatttggtcgttttgttagtcgtgataaagtacaagttgtttttttacagatcgctgctaataacgatgactataaacctgtagatccttcctgggaatcctttgccgctattgacactgaggatcagcgcaatttaactgaaaagtatttgagcgtatgcaagactattactacacgaaaattaacaagactcagtctgtctgcaactaattctagggcaaacgaacctatttttggacaagaatatgcatcgcttcgttgtaaaatctttgaatggtgtgatgaatacctcgagaaaatatgcacgaaagataactttacgattgatgagcttaattcttttttagacgaaatgattaacttatgttatgataatgtacaagatttaaagaaaacatatagaataagaatcaatgacagggaaaatattaagggaataattttaagtctattcgatgattgttatttagcatatgatgaatattaa

SEQ ID NO: 155594 - DNA, 873 bp, Enterobacter cloacae
atgaattcattccagacagtgattaaatcattaaatgatttgaccgctgcaccatatgtgcgtaactctatctcgcttatatttaatgatgagaaacttcagtatatagatacgttatcttatgttagtaaatattatcaggccattaaatcgttacctaatgatgttgacgtgtttaggcctctggctgacagagataatgcattggctgagcgaattaatgacaaaaacttagagtctctggattccaaatttattgatgatgtatttagcaccgattctttgcctccggtaatgggaaaaatcatcaccctaagccagtcttgtttcgctgattcagattcgctgtatgctgctttcaataacttggaagctaacaggaaacttattcttaccaaaatgaaagaatcagacaaatccgtgtcatctaattctgtcgcgcatatgtttgctgaatggtatcgttcaaccgacgtgaaacagctaaaacagagcgaaaatgtaaattttttatggacagttttggatggtgatcaacgtactgagatactacgagagcttcatgatattttgttggaaggtgacagaagtatcgaaagaagaattgcagttatacaagattttcatgatgtcttagtcttcaatgaaccagaaaagaaaacttcacgtagagccatagctgcgcttttccctcgctctctcgaagataaagtgcttcgtgagtggcttgatgctcagactctgaaattaagtagctggagtccagaagatgcagaaagtgttagtcacgtagtttgcgagaatcatgagttgtttccaggattatctaactcgtcgccatacataaagaaaagattgaaccaagaatcataa

SEQ ID NO: 155595 - DNA, 1137 bp, Enterobacter cloacae
atgacggttcataacagtactacaaacgataccccacgcggtgaatcaactgacgtaaccacccggtcaacgctgaccaaccgtatccgaaccgaatatacggaggtcgtcaacgatagaggcattcgaaaaattcttgccaagatcgttaaatcgggagcaaaaaaaataccaggcatcggtaccgcactgacgctgctggaggaaggttatgcggaagtaactgcaatggaggaaaagcaacgacgagcccgcgtcgaaaagttcgttatcggtatataccagacgctgccggaactggctgatatttcatctgaagactttcttgccgtactccgcaaggttctgcaggacgatgaggacgagaaaacctggctttatgtacgcctgctcgttcagttgggcagggggacactggataaagaaattcgtttccactttattcatatgacgcacaacctgaccttcggacagcttaaatttgcccgggagctatatcttcgcaaatccctggaactcaagggatataacaccaaaggagacgcagagctggcgctgacagatagaccggaggggatgacacagcgtgccatcaatactttaatcagctggggtctgatcagggaagatcgtagcggcgaactccggcgtgctcctttttatcttatgaatgatgatatgcataccctcattgatctgttgtttgacaacagatcgctgcagcctgccgagataggaatggaagttaaagaccagcccgatgtcgtgatactcacctcgacccgctcagacggcgatctgtatgtcactgaattgcctgaaaagctggaacgtcacaaattgaaggtcgcaataatggaaaagaacagtgaccatcagaaaacaactctcgccggcttatatgttttcctcaccacaggggaagaggagctccattttcgtcgggaagaatgcacctatatccaggtcagagacaccccggaaaaggacggtgacagccttttgagagtaagagtcaagtcatcgatattcaacggttcagacatctcaaaaacctccattggcatattacgggacattatcaacagggttgcggatggtgtgttacgtcttcatgaggcgaaggccagtaagtaa

SEQ ID NO: 155596 - DNA, 561 bp, Enterobacter cloacae
atgaatagtcgagtatccaaccctgagtcgtacatattttctgcaataatccacattggcaaggataacttcaccagtaacgatgtagcaataattcttgtcgagcgattctcactcccgaaaacctacctaaaggcaaaagcttttgcttataaccaaattcaatgcctagttaaaaaaggattattaaataaagtaagaaaatcaggcgtgtatcaatatttatactcagccacatcagaattcaatatcgcaatggaaaatgtgcaattaattgaggcaacccaaaaaacttctcgccagttttcaagtgctaattcaagtgctaatagctatgaacacaataatgtaaatattcaaataagaactcttattgaaaaatacagcagtgaattggaaaaaatatcaggagcaaaagaaatttatgaagaactgataattgccgtaccgagcaggggaaatgaattccggaaactttctctagagcaagacaagaaacatattaagataaatgaaaaaataaatacattgattgagattgttaatcatacatttcaataa

SEQ ID NO: 155597 - DNA, 498 bp, Enterobacter cloacae
atggcatttaccgtcggtgaaaactatgcgttcagggacatacagaagcgttataaattcctgaaaccgggcgaaaagggactgtcgcagggcggttttttaaatccctcgcgtggcaattcctccacattaattcgcgccatctttgcgcgcagagaggtcaatggacctctggataatctattgttcgtttctggcgataatgagtaccgaaactacttcacccgtcttgagaaagtgcaaaaggaatgtagcccattcctctattttaaagaaaagaatggcgagtggtcttatatggggcacagtaaggtggatcgtttactggagcccgactcaaaagaattaaccctcttgcttgatgaaatgggttgcacgctggaaacggttgatgaggtggatggcaaaccattgtggcagcttacagcatttggagtgcaaggttttatcagaccgcgtagactggaatttatagtggtcttagagcaggatgcgtag

SEQ ID NO: 155598 - DNA, 1713 bp, Enterobacter cloacae
atgaaaaacattcaacaaattgagaatgaagttgatttattctacaaatcacttgatcttacgacagatataaaaggattagcaatttggcgagcacttaccgtctcggaagacacgctctttttcgcaatgaatgacttatataaaagagggtttggtaaagcaacctcgagtcacttgctctggataaatgagttatttgagaataataaaattgctataaagcatatgctgtctgaaatagataaacagtgttttgatagtcatatatgtgtttatgatgagattatttccccagaggtttacactcaattattaaaggtttacagagcatcttgtgattatagtcatatttgtaccctatttatatcacttcataaaaaattaacaaatgctatgcagcaaaatgacgagatacacttcaattataataaaattgatttggggtactccattctccaccaccacttatcttttgaaccatctcttgtagggaaatcagcatttcaagtcttatatgaactaatgtttcttgattttgatgatggcttaattcaagagatactgtcagatgctcatttcgaaggtgagttgataaattatcctcacagccaaaaactcatgtgctacttgtacagccaaatagccccgttttacgttccggttgatgagaggtggatattcccttatttttccctgttggagtttagagcgtattttcgttctttaatttgcatatgtattcatcatactgttgctgtactgtttaacagcaggattcatgaaataaaaggaggagggttagagcaaagagtattaagaataaataaatccctgctcaaggagaatatctcaaaatattcaggtctatcgaatgagacaattgaaaaaattaccgaattcctgacctatggaaaaaatgtcaaatccccagatccggctttgcaacctcttattgacgtaggaaatgagtatgtcatacctaattacctcgtaattacatcaaactttgaccgaaatgcgttgactcttcatagtagaattgatgaaaaaggattcaataaaatcagtcatttatttgaagttgaaatgaccaaaaatattctcagtgaaattaatggtaaatttacacctctaacaaatttaatgcttcccaaaaaagaaggtggtgaaattgatctgattcttttagatgaaagctccaaaacaatattgatttgtgaacttcggtggatgttgcagcctagtgatccaaatgaaatttttaatcgacaaaaagtatgcatggaaaaagtagagcaggctcagaaaaaagttaacgctgcaaataaacataaaaaacacatcttgcgaatgggatgttgtagcattaaagatttgagtgaatggaacgttaagggagtggttatcttagatgggtttacaggtgtgcaatctgatacagatatcgttatcctccccaaaagagtattcactaaaatagtagagatgagtgaatcacttcaagaggtatatgatttttgcgctagctataaatggctgcctcatacggatcactttggcaaaataaatattaggaaaactaaattttccgattacacattctttagtcaaggcataaattcatttgattcgatgcattatttaaaagagtttctgcccctgtcacttattaatcatagatatggagcagttatgctatatgaaaaataa

SEQ ID NO: 155599 - DNA, 1350 bp, Enterobacter cloacae
atgaaacttatcgctaatggattaaacaaagcattttttaggtctatacttcccccggcagaaactgaaattgacggcgttgttgccgccattgcctatggcgatgataaaacacctctactcgagcattgtctcaaaaaccatcaccggttagatatctggatgcggtatgaccatactgttcctgttgctccttcatttttatctaaactgcttttccatactaggaataatatcttttgtaagctggtacccgactgtcttcacagtaaagtcatctggtggaaaggttatggtgcatacattggttcagcaaacctaaccgatcgcgcgtggaataccaacattgaagcgggtgtcttctttagtgaaagcgacttgtacaactcggatttaatctcacaattagacgagtttttcgataatttagcatctcttgattgttgtattagcctgagccaagaaatcattgatgaacaaaaaaagttacaaaaattaaaaatagagcaagataaaaaagaacaagagcttatcaaaaaacgccttgtacctgaatggggcggagtcagtaattatgacaagctgaaggcgaatgataaaagaaaagacagcttccataaagaatgggagagtacactttccataatacgaaatatatcctaccagataagtgacttcagaccacactgggtctcagagaacacacctcttttctggcaaaccgaccagtttttacacgcatattattacaaccaggttcatcaaagtgataatacttatccttttgaggattatcatcagataaacagtaaagatcctcaagctgcactaatgaatatgttgtcatggtggaagaatctctctttccccccatctcatgaagataccaacctgggaatttacgctccttatattcgtgagcacttatcaaaaagcaaaattagttcattgactgaggataatctccataacatattcttctatacgcatgcaacgatggaccatgtgataaaaatgagtactgaaacctttggcctgtctgcccaaaattccataaacagggaagaacgtgccattttattcaccaaatggatcatgggccagactaatcaaaaaggtatgactattgctgaattactcaactatgtcctctacggtggaaaaccttcattaatgtgggaaaggatataccaggcaggaaaggatgaagagtacaaattccagcattacggtattaactctattgctgaagtggtcggttgggcaaggccagaagatactccgcccagaaatggcagaactaataaagcattgcgggccttgggttatccagttcacgtgaatatttga

SEQ ID NO: 155600 - DNA, 3609 bp, Enterobacter cloacae
atgaataccaataacatcaaaaaatatgctccacaggctcgtaaccagttccgcgatgcagtgatccagaagctgaccacgttggggatttccgtcgataaaaaaggcactctgcaaattgcggatgccgagatcgtcggcgaaaccgtgcgctacggccagttcgactactctaaatctacccttacccgccgcgatcgtctggtcaaacacgcccgtgaacagggctttgacgtcctggttgagcactgtgcctatacctggttcaaccgcttatgcgccattcgctatatggagatccatggttaccttgaccacggtttccgcatgctctcgcacccggataatccaaccggctttgaagtgctggaccatgtgccggaagtggcggaagcgctgctgccggagaaaaaagcgcagctggtcgagatgaagctttccggcaaccaggacgaagccatctaccgtgaattgctgctgtcacagtgccatgccctgcaccgcgcgatgccgttcctgtttgaagccgtcgatgatgaagccgaactactgctgccggataacctgacccgcaccgactccattctgcgcggtctggtggacggtattccacctgaagactgggatgacgttgaggttatcggctggctgtatcagttttatatctctgagaaaaaagaggccgttattggcaaggtggtaaagagcgaagatattcctgccgccacccagctcttcaccccaaactggattgtgcagtacctggtgcagaactccgtcggtcgccagtggttgcagacctacccggattcgccgctgaaaggcaaaatggactactacattgagccagccgaacagacgccggaagtgcaggcgcagctggcagctattacgccttccagtattgaaccggaaagcatcaaggtgctcgacccggcctgcggctccgggcacattttgattgaagcctataatgtgctgaaaaatatctacgaagagcgcggctaccgtgctcgcgatattccacagctgattctggaaaataatatttttggtctcgatattgacgaccgtgctgcccagctttccggctttgccttattaatgatggcccgtcaagatgaccgccggatattcacccgcgacgtgcgcctgaatattgtctcccttcaggagagcctgcatctggatattgctaagctgtggcagcagctcaacttccaccagcagaacaagaccggaagcataggggatatgtttgccgaaaatactgcattagcccataccgacagcgcagaatatcagctactgatgcgtacgctgaaacgctttgtgaatgctaaaacactgggctcgctgattcaggtaccgcaggaagaagaagcggagctgaaggcgtttattgatgagctttatcgccttgaacaggaaggggatttccagcagaaagccgcagcgaaagcgtttattccgtatattcagcaggcgtggatactggcgcagcggtatgatgcggtggtagcgaatccgccgtatatgggtaatggtgggatgaatagtgatttaaaagtattagctaaaactcatttcccgtacagtaaatcagacctctttgcgatgtttatgcagcatgccttttatttgcttaaaaataatggatataatgctcaagtaaatatgcagtcatggatgttcttatcgagttatgaagattttcgcacctggctattggattgcaaaactttcattaccatggcccatcttggtgcaagagcattttcacaaatatcgggtgaagtagtacaaactacctcatgggtaattaaaaatagctctactaaaaactataaaccggttttcattcgtttagttgatggtaatgaagaacagaaaattaaagagctactctcatataaaaagcatttttacagcattagtcaaaatgatttaaaaaaaatccccggatatccgatatcctattggctaggccagaatataaatattttcgataatgacaaaatagctaattcatggttctctggtggtagaattaaaactcacaatggtgataaatatataagatatatatgggaaactagtcgtctttcgagtaaatggaaaaaactaatcaaaggtggtgattacaaaaaacattttggcaatgaaatctttctggtagattggtccgtaaatgctataaaattttatgaaaaaaacggtggcatttatccatcaaaatttagagataaagctggtatttgttggtctaaaatcacatcgggccaagctagctttagagtcaaaagtgaagatgtagaatacgattctgcatcacctgtaatatttaacgataaatttaacagtgatctttatacgcttgctctcttgaatacaaaagtttttaatgttctacttaaagcattgaaccctactattaatacccaagttaatgatgtcatgtcattaccattcatcaaaatggaagcagctgttcaagaaaaaatcgaaactaatgaacagctgctgataaatatagcgatgcacgattggaattcgcaagaaatttcttttgattttatggttaattatttagtcagcgaatcgagagcatcatctgaagtagcatcaagctatgctatagcaagaaaaaagtggcaagatgcttttaataaaacgaaagagttggaagaagaaaataaccatttagtcattacaagtagcaactttaatgggataaatgaagaattaattgattcagaaataactttagtcagcaacccatactacaagtacggtgattcaacgactaataatgaaactcgtttgttatcggattcaatagcagatgtattaagttattccatcggctgcatgatgggtcgctactccctcgatcgcgaaggcctcgtctacgcccatgaaggcaacaaaggctttgccgaacttgccgctgaaggtgcgtacaaaaccttcccggcagacaatgacggcatcctgccgctgatggatgacgagtggtttgacgatgacgtcacctctcgcgtcaaagagtttgtccgcaccgtctggggcgaagaacacttgcaggaaaatctcgaatttatcgccgaaagtctttgtttatacgcgatcaagccgaaaaaaggcgaatctgcactggataccatccgccgctatctttccacccagttctggaaagatcatatgaaaatgtataaaaagcgcccgatctactggctgttcagctccggtaaagagaaagcgttcgagtgcctggtctatctgcatcgctacaacgacgcgacgctggcgagaatgcgtaccgaatatgtggtaccgctgctggcgcgctaccaggccaatatcgatcgcctgaacgaacaggtcgatggtgcctccggtggcgaagccacccgtctgaaacgtgagcgtgatagccttagcaagaaattcaacgaactacgcagcttcgacgatcgcttacgccactatgctgatatgagaatcagtattgatctcgacgatggcgttaaggttaactacggtaagtttggcgatttgctggcagatgtaaaagccattactggcaatgcgcctgaggtgatttaa

SEQ ID NO: 155601 - DNA, 423 bp, Enterobacter cloacae
atgcgcatgctgaaatgttaccttggcaataatcgtgacgggcacgttgtcactgctaaagacgctatgcagtcaccgggtaggatatggacctgcacttcctgcggctgtcaattgatacttcatgcgggttcatctggtgaggccccgtggtttgaacatgaccagcgaacagtgacgacaaacgttctgatgcaatgtacccatctcgaccctgaagttaaagccgaagcccgatgccaaaaattacgcagtatcatcggcggactggatgcacctgttacggtgccatcctggtactgcgtatggtgcggcagtcattatcaggggcggaagcactgcggccgctgccactcggggatttacagtattgaagagaccagctggcagagaaattactgctgtaacacactccccggataa

SEQ ID NO: 155602 - DNA, 135 bp, Enterobacter cloacae
atgttaggggggattctcatccctcggttttccacattttgttgcagattcagccagaattcagcgctgatatcgaatgctttcgcccgttttaacgccctatcggcggtgaattttttctgtgttgcggtctga

SEQ ID NO: 155603 - DNA, 267 bp, Enterobacter cloacae
atgcacacgactttatcagttccagcttcccgctctggtgcacattcaacgccagtttcagcccagacgcaggagcgttttttacgcctcccggaagtgatccaccagtgtggcctgtcccgctcgacgctctacgatttaatcgcccgtgatgctttcccggcgcaggtctccctcggggggaaaaacgtcgcctggctccagtctgaagtgaccgcgtggatggcggaacgcatcgctcaccgcaaccggaaatatgacgcatga

SEQ ID NO: 155604 - DNA, 507 bp, Enterobacter cloacae
atgataccagaaaatactagccaagctctagatccaaaatatattgccgtgattatttcttcaataatcgcggtttttggatggctaatttcatcttatatcaatacacgaacttttaagcgaaacgaaacatctaagctcaaagataaaatttcctccatggttgaaaacttctttgattctcttgaggaaaaaataaaatcaaggagtgttaaggaaacggaactcgatgatttaattgcaggaaagcttactttaatcgaactacatctgaatcatttagacagaaagataaacatcaagctaatttctgatgagcatataaacaaaatcagaagtgaaccatatgattatttaacatcatcgaacggtgattatagaaaaaaactaaatgagttgaagttcaacacactagaacttatagaggaaaactatacggaatggtatttcagaaactcaactaaatatcactggttaaaattcaaatcgttaatccttcaaaaataa

SEQ ID NO: 155605 - DNA, 336 bp, Enterobacter cloacae
atgaacttgaaaaaaattagtatcgtcaatgacttcagcaagagcccctacggccgatatccttctgatggcaagtggaatggtcaggtttttcgtcaggaaatcttggtaccagccctgaatagctatgataaggttattgtagacttgacgggttataataggtacgggcgttcatttattgatgaagcctttggcggacttattcgtgaagaaaatttcactaaatctgatttagacaaaaaactcgagtatcaccataatgatctaaagagttttgaattgttaattactgaacgtatcgagaaagccgcaaatgataccagaaaatactag

SEQ ID NO: 155606 - DNA, 1113 bp, Enterobacter cloacae
atgaaaagaaacaatgagttaataagagctgcaatcgctaaaaagcgttggcaaaatgaggtattgcgtaaggacatagaatattgtccttatcgtcctaagaaaaagaacaagtcaaaaaaagcagttgaatacattagatttcctgctaatttcagtatctattctgctgataaaaacaaacattataaagataccatgaacatcatatatgctatttctcgtatggcagatatgaaaactaaaaaggttcatcttgatttttcccaaacggaatatattaaagctgcatctatattaattctttatgctactatcgaacaagctataaaatcgggagtaaattttagaattgttgcttttccgaaagattttaaagccacaagaataataaaacgttcaggcttagaagtattatgtaaagaaaacacacaccaacctaattttgacggggatttcataccggtaataagtggtagcggtggtgatttccgtgatgaaatcgtagattttattcaacataaaatttacaaaaacaagatgacacctgacactgaaagtaaatatggcggcgcagtccaggaggctattaacaatgttgcatatcatgcatacccagaaatccctgaatctgacctgaaaaaatggtgggtaaaatgcgatcttgcaggcgatcaattatttttagcaatatatgataaaggtgtaggcatacctaaaaccgtcatgaacagaacatggtttgaggagattcttcaaagcacctacccagctttagtatctaaaattaagcgagaattagaaaaagaaggcattgcgaaaaaagatttacttagttacaaatttggcattatcagcgatgcgatgaaaatagccatttctatggttggtgatgttacaggtacagaagagagcaaacatggacaaggaagtaaaagcattaaagctttagttacagaaaatgaccaaggaactctgtggatttacagtaacaatggattatataagctaaactctggtatagttgaaacatatgatttgcaaaagccgatgccaggcacattgctacagtggaacattaaggttgatctagatgaacttgaaaaaaattag

SEQ ID NO: 155607 - DNA, 609 bp, Enterobacter cloacae
atgcaaattattaaaaaatggtgggcagtacttgctgtagtgggatcttctttgttcatggtggcaactatggactccaaacaactcattgataattaccatcttgctgaaaaatgggttatgtctagtccgacacttgaaggctcatggtcctcctcttatccaggagaagattttgaaggcttgtctgaaaataagtggattgaatcgccagagcaaacagttgttgaagtttctataaacggacgtgatgtttccggaatcatatcaacgcctcagattagagagttcatcgataatacccctcaaatggtagattattttatgcttgaaggccatcgaacaatgttcagccactcgtctgaagcaagagcctttgaatacattggcggccacaaatatatttttgcggaattaagttttaccctggaagatgggcggcttttgatgactgatcaaagtcccggaaagagtaaatttgtgcccccagaaactacactcctaaagcggtcagaaacatcatttgacgagcgcttgcaacttcatcttgacgactatgtaaaagaaaaggcgaaaaagctcattccgatgattaaaaagcttcagtag

SEQ ID NO: 155608 - DNA, 684 bp, Enterobacter cloacae
atgaaaaaaataattctttatgtctttcttatctttccggtaattacttttgcaaaaaacactcaagtaaaagatggtttgtattatggttattgggtttataaagataagggagtgttaaaagaatatggggtattggctaacaatccaagaaaagatgctggtgaatacattttaagccccacctctgaacttgccgccactgatgaaatatacattcaaataaaagataatgtacctactatattcttttatcatgaaagtagtgatgccgatttaaatgttgttggttgggcgagtgctaagttttcagagggcgaaatgattgtttcagcaaacactattcgttttttaaaagaagattcgaaagaacgaatttctgttggtgataaatttaatggtaaagttgttcgccttgatattggagagaaggcaccgatagaagaagtcaatgataaagggtttagtattgattgtaatcaatatttaaaagctaataattacgcagagacggggcttcctgatgttgaggagccagacccatcaggcaggaaaggtatattggttgggtatcctgctacagttttcgctgtcggtgagctcggtatttgttctgcattcctcaatgatgatgttgttccacaaatcaaaaaaggatggattcagttccgtcggctcaattaa

SEQ ID NO: 155609 - DNA, 534 bp, Enterobacter cloacae
atgatccattcaattttactcaaccattatcagacctggctggatgattttacccgcatcagtctgtcccacggtttatgccagcagcacataacgcaatggcaccgactggcgataaccaccagcccaacattggacggaagcgtaatagaaatcgtcattccacagcgcctgctaccgatcacccgtaccgctcgactggaatccagtactgtcgaccccggcctaactaaaaacacagactatacccttctacccggcgtgctgctcagcgagtgttaccggctggggaagagccggttggcagatcagttacaaatgttattccggcttcatgtacagcccggtatgcgacagacgctgaccctactgtgctggtgtgagcttgcaacaggaaaggatatgagggaatggtatgcgctgcatctgccgctacctgaaatgctgaggcaatggcttacgataaaacaacgggcataccggggtctgaagacactgacggaggattacattcgtgccacccggccactataa

SEQ ID NO: 155610 - DNA, 213 bp, Enterobacter cloacae
atgaccattaaactttctctgtctgaagaccagtttgtcaatatggctttcattacccgtctcaccggattaaccgataaatggttctacaagctcatcaaagacggtgagtttccggctcccatcaagtttggtcgcagttcccgctggcgacagagtgaagtagaagcctggctgcaggcccgtatcgatgcatcacgctcacagcgctaa

SEQ ID NO: 155611 - DNA, 582 bp, Enterobacter cloacae
atggactttccctggccctggaaccgcaaatacacgatgaactggttcctgctgtcgttactgaaccaccatcttgatcagctactggaacgttactcccgccttcagcccctcagactcgatttgttctatcagaatgacacatggcgttataaccatcacggatggtacgaaacagaaagggaagtacgccagttaacagaatatctgatgttagagagcaacatcgttggtcacttctgggtgctggagtgtacttcccgacacaaatgccatgcacatatcgtgatgtatcttgatggtcactataaccaggtcacgtatccggtggctgaacaggcaggggttgtctggcagaagattacacagggtgaggggtaccacaatcgctgtgatcgtaagaaatgctacgaagccgatatcacccgccccgtcaattacgatgatgcagcagccatcgacaacctgcgctacatcatcagctatctcgccaaggagaaatcaaaacacgggcagacttactacggggccagcgaggtaccacccgcgagtggactgggcagaccgcgagggcttcgataa

SEQ ID NO: 155612 - DNA, 798 bp, Enterobacter cloacae
atgtcagaacgaatcactttcaatgtaaccaattctgagactctgcgtgttgtggatgaatacagcaaaaaacagaagatctcacgatcgcaggttatttccacattgctggatgccaccgttccggtactgaaagatattaatcgctattatcagcttgcggacgagcttaaggcccggctactgtctggtgtctaccagcaggatttgcctcgccgaagaaatgttgtagctgctgaaaagtattgtatggagatctgggagagtaagcttcaggttgggaaagggtatgactttgacagcgtcaatggcaaggtgcatgttcgcgaacataagcgacacctccgtcgagataatgcagttgggagggtcgaaaatcgacatatcaaagagttctgtcagtcgctcctggaaaggtcagaacaggatgcccgctatgcttgttttatctataccgaaaggattatttttactgatgtagaaacctctgaacactcttcatcgccagtaaaactggcggcaggtgacgctgtaattttgctgacaaaagatgtggtttttaacgagtttttctttgatataggtaaggcgctttttatcaatgtggttgatcttatgtcatacggtacaagtggtattccggagacgacaagagacccacttgttcactgctgggtgccaatcctggttagtgggaaaaatgccgtgatagtgcctgtgtatctgattgacccagctacggcaccgacgttaagaaaaccagacaacatcacagtggtctaccagggcaaaaagtaa

SEQ ID NO: 155613 - DNA, 807 bp, Enterobacter cloacae
atgaacaaagccggaaaaatagcgtattcatggctaaatgcacagagcgatagcgaaaaaattcgatttattgcacaagcgctggggagtgtcgaatatcaggcgtttataaaaaaacatcagcctgaaaagcagcatacccacaatctacctttaagttttttgaaatggtatttgcctcagaaactagtggcctcttttcacggcaaggagatcggcctaagaagtgtgccgaagacggttggcgataagctggaaattcggcatacctggatgccaacaggacagtttgctccttcgcgtcatggatcttacataccactgggaacccactttgcttgtactgctctgatgcaaccctttttgcaaaagcagcaggaaaaatgtctggagcaggcctggcaggcagcgcttcccctgcttctgtcacctgacatcagtaatggcaatgaattcaccgctccatggctggattacgagccctatctcaatggtgaaacggatgtctactttttactggatgaacctcaggaaagagtcaagattggaatatcaggtaatctcaggcaacgcgtggataccttgaagcaacaacataataccagcctgagtcttatctccataatacccgcagggggtattgagacagaatctgcattacatcttttctttaaaaaatacaggttggatcagaagggacttggtagagagtggttttcttacacggatgaattatgcgaatttatcaataccctgaacacctatgcaatcaggagccactgcctaagagcttacggcattatctga

SEQ ID NO: 155614 - DNA, 909 bp, Enterobacter cloacae
atgaaacgactccccacatgcgcagaagcaaaagcccacgctaaatacctttcacggtcgctcaatatcaatctaagctacgcccgggatgcagtggcattacgttataactgccataactggtcggaactcagcacagtatttggtcagcttagcgataagtacatgtcgtgctatggccttgccagccatgaagaaaagcgtgtttttagccagcttctggcaccgtatatcgcagaattgcaaaatgccattcatcctgaccgccatgtgccggaaagcttgatacgtaagattgctgaaggccatatttcccgagtatccggtaaagtcatgtcggctgtaatacgtgaatgcgaggattttcctcccacgacagttaaagacatcattgaactgcttgaattttatgatgatacggccagccgggtattagcaggacaccacagacagatcccgaccaataatccttggctggaaccttgggtatttggtgtgcgcttttatgcctattaccactttaatggcaagcaggtcaccatcttaagccgggagtgggatttagatattcatgatgcctacctgccacattcacgtgacagagtattttcacgcccatggtttcaagactatatgatcggctatctggcctacctcgtgaagcaatttatcggattgggttacgacggtaccgttaagatttgttgcattaataattatagcgcgctggattaccatcagaaaaaagcagcccccaacggtcgtgtggggctcaatcacttatacagagagttacttaatcgcgggggagaggaaaagtggtcgtttagtcaaaatggtcataaacatgattttggtatcgagctcccgtttgccacattgatctcattgaagaaaggaagaaaatga

SEQ ID NO: 155615 - DNA, 1128 bp, Enterobacter cloacae
atgaaaaaagatatcacagtaactattgattcttcttcgtttcccaaaagtcaagtacagtactataacccgttacttactgttaacaaaattgatgtgaactgcatgctaattcacacagctctatggactcgcccccccaaacttactggctttcatttgtctgatttctgggcatggctaagatacttccctgccttttcgaaaacctcatctgacttgcgacttcgtaaagaatggaaagacatagatccccatcaaaaaaccattttaagtgatgaaataggggtcggttcaaccacgtatacattaatcaatacattaagttttcaggggttcattgatgcaatttacgtgttggaaacattaaaccttactcaccttcttttaaagaaatctaaaaacggtaaaggtaaaacacctgattatattggtttggataattttggaagggttattgctcttgaatgcaaaggaacacaaaataagataaaggatttgtacaaggctataacaaagggcatagagcagaaggaaaatttgacaaaaaaccctactggcccaataaagactgggttggttggtgggatatttattcctcagtttgacaatcctgaaagtgcattaatacatttccgagatccagactggaatgaatttaacgagattatttctgaggttgcccccgaggaactggctaaagccatcattcgtggggcggtgattaaacaattgtatctcgcaggtgcaaataattctgcgaacgagttgtcaaattatattaaaggtaacgattttgaattgtctgcacaggcaactcaagaactaaaatcctttgagcgagaaataattgtgtttagtcataatttcaggaacccagttgaaggaggggtttcgaatataaagttcagcgcccaaatagataataaaatccttccccttattgaagggttaacctcaaatagtgccaaggcatctgtattaattaatgagctaagtgttacaaagaaaatttttgaccgacggcataatgatcgctcatggatttcatttgaaaatgattatagtggaatgattgtttctccacacggttttaagtttaaattaaattataaaatgaatgattag

SEQ ID NO: 155616 - DNA, 426 bp, Enterobacter cloacae; identical to SEQ ID NO: 82829

SEQ ID NO: 155617 - DNA, 2529 bp, Enterobacter cloacae
atgactacacgcacacatcaagaacaagtttgggagaccaacttgagaataaaaatcaaaaatctgcttaagcgaggatttaaaaaatttgatgagatattaccactgtgtgatggagcccaacctaaagatgcgtttcgcatatttaacgaactgaaagataccaattttggaacatctactaattcgcttgactataaatctaaatttttcttcaaactccctgcggccaaccctaaatttttccaatggtggtatactcttgaatcacaggagttaatgacaactaggattctggatattcataatgatcatgacattgcctgcataggcactcctactttagccgcaacaatttcttcatacaacaaagaagtaacgttacttgatattgatgaagatgttgtatctttatttaataaagtatttaaaggtatatcaaatgccgaggtacatgatgtaaatgtcggcaatattggcttacatagaaaaaaatatgactgcataacaatagaccctccttggtacccttctgaatttaaaaagtttatttctagagcaatagagttatcaaaagatggagcaacaatctattgctctatcccacaaaatcttacacgaccagggattggagaggagagagcggaactaatttcatctttgcaaaaatgtggtcatgatatattatacattgagcctggtgtgatgaaatacatagttccatattttgaagaagaagcattaaaaaatagtggtattgagacaaagaatcaaccatggagatcttctgatttattagtaataaaagtcaatgggactaaaacactaagctttgagtccgaagtgattaacaaggtcagatctttctctagggttgggaataatcatgtttttcgggtgttcatagaagaaaacaatgtagaatctagatttccaattagaagagttgatggcttttccaaatctattagcaatagagataatgttgaaaaagtaaacttatggacttcggaaaaacaaggattccaagttgacgatatagtcttttttaacgaagtaatccaattatggagtgatggtaataatatagacgagacagtaaagattattggtgagaaaaataacgacaaagctaatataaactcaattaaacagataattgaacagctagaagaatatactggtttttgggcgatgaccccagaatcttcagtacgccgcacatctgaagaaataaaaaagaaaaatgatgctttgtctagtgagtgggcagccaaagcctctgaaagagaacatggaagcagaagtgatggctttcgtatagaatttcaaagggatcgagatagaattatctggtcgaatgggtttagaaaactcgctgataaaactcaattattccctattgaagaagatgaacatttaagacaacgactggcacatagcatagaggtaatgcaactagcatcgactattggtgctgctttcggtttagataagaacttaatagaagctggctcattggctcatgatataggacatactccatttgggcatgctggtgaacacgcaatagatcaaatgtttcgaaaattaggttttgaaggtggctttaaccattatgagcacggtgtggatgttgttcgatttttggaaggttcatatcaatacagcgttattgaatcgcacaatgggctaaatttaacaccagaggtatgtgattgcattttaaaacatacgtattgccacaatggggatggacctagtcaagaaaatatatggaaacatacaaaacatcaaaaatatctgaaatgtggaggatacagtcaccttgaaggtcaggcagttagagcagctgataaaatatcttatctactatcagatatagaggatggaataaagttaggagctatacaacttcatgacctcttaggttcaagactgtttcatcgagctccaatagactttaggatgagaagcggcgaaaatctatatggtaagtttatagagcaaaggggatctataataaaactcctgatggaagatatcattctggagtcaacaaagaggatcagtaaattaaaatccagagccgatgtttttaatgcgggccattactgtatatttcatagtgaacagatagataatgacatgggagagatttggggtaaaattcaagtcaacaaacttcacatggatccgagagttttatctgctaatatgaaggcttcaaaaatggtaagcgagttattgttactttttacattattccctgaacatataaatacacaatttagaatggagcatgagagattaaattcaactgaatacttgaagtattatagagaccaacataaaacaattgaaataccttatgatcttttaaaattcttgcctttggatatgatgataggtttccatccgggaaatactaaatatatagatgtatatcagttaattttggccaaggattatgttgcaagcctaacagataagaaactgaagagggtttacaacgagctattagattaa

SEQ ID NO: 155618 - DNA, 1362 bp, Enterobacter cloacae
atgaagcggagtaaaataaacgtctgggatgtgagacgaggcaccaatagtcctcgagttgaggagattcgatctgaagctcagcgcgacctttctcgattgattcactcgtctcctttcagacgattgcaatccaagacacaggttcttggtctgggtgaaagtgatttctaccgcacacgactgactcattctatggaagtcgcccaaatcggttcaggtcttcttgctaagctaaaaaaaatatataaaggtaaagaggaagagcaatttttaccagataacgatctgatgcaagcagtatgtctcgcacatgatattggacatcctccatttggtcacggcggtgaggtagctcttaactactgtatgctggattacggtggttttgaaggaaacggccagacgcttcgcattctctcgaaactagataagtataccttagaacacggactcgatcctacacgcagacttcttctaggcgtactgaaatatccggttagatactcggatctagtggttaaaaaagacagtatcgcggccactatcggatcgccgaactggctctttaagtcatctgattttaaacctccaaaatgctatctagattcagaatgcgatattgtagaatttgctctctcaccatttactgaacaggatcggaggctttttacttcctttaaagatggtcaaaccaaatccgatcataaaaaagcttcttataaagctctcgatacaaccatcatggatcttgccgatgaaatttcgtattcgctgcacgatttggaggatgctatttctctcggaatggtgacacgagcaatgtggatggagcatttcagtggacatgaaaccctatttactgactgccatggaaaaacattttccggaacatgcgaatctgttgcggatagcctttttggtaaaagttacaagagaaaagagtgcatcgggatgctggttcaccttatgattacaagtgttgagcttaatacaaagaatgcagcattcgaatgtggcatgctcaaatataatgcggtccttccggaagcggtcgaagcactaaggttgaaaattttcaaactggtcaaaaacaaagtaattaagcatgaaaacgtacagcagcttgaattcaagggacaaaagttgattgttgagcttttcggtgtgctggctaacgatccgtgtcggtttctacctgcctcaacgagggaaatttacgagcagcagattagcttagacgagaaggctggtatgcgagtcatttgcgactatgtttcagggatgactgatgactatgctacaaagctttatgagaagatccttattccacgcaaagggtctatttttgaccatctctga

SEQ ID NO: 155619 - DNA, 141 bp, Enterobacter cloacae
atgactggcagtaaaaacaataatttcaattttttcattgcattaaccttacattcaattatggagatcatctctaatcagtttgtccggattgcccccgactttctgagggagaaaatgaattcagcagttgctgaataa

SEQ ID NO: 155620 - DNA, 381 bp, Enterobacter cloacae
atgccgtttgttcgtatcatgacgggtgtccgctatagcgagatgcagaaaacacagatctcggacattttgcaccagacgctgacggagaccttcgccgttcccgagcaggacaggtttcatttttttgaatgtttcgcggccggggatcggtacatagaccagcactatctcagcacgggcagaacggagggggcgattttatttaatattgttgccggtaagccgaggagtgaagaacagaaagcggcgctgtaccgccagctggctgcggaattgcaacagaagatggcgattgacggcggggacgtgatggtcgttattcagtttacggccgctgaagactggagcttcagcggcggcaaaggctatcaacgctga

SEQ ID NO: 155621 - DNA, 309 bp, Enterobacter cloacae
atgagcacaacactgaatcgcgacacccttacgcaggtctcccctaaactggcggaacttagccagcaggtgctttttgacgatatctggcgacgccctcagctggccccgcgggagcggagcttgatcacccttgcggcgctggcggcacttgggcgcaccgcgcagatcccctggcatatcgacttcgcccggcaaaatggcgtcactgacgaagagatcgccgagtcgttcacccatctggcgttttacgcagggtggccagccgcggtcagcgccctgacctgcctggcagaggagccacgataa

SEQ ID NO: 155622 - DNA, 864 bp, Enterobacter cloacae
atggatagacaaccttcggcattagacttggacgcgctgcgcagctttgtggagggctttcagtcatccagttttgccgaggcggcgaaccggctgtgccgatctacctctgcggttagcgcccagctaaaaaagctggaacagcagtgcggtgtcgcgcttaccgtgaagaaagggcgtacgctggcattgaccctggagggtgagattttgctgagctatgccagacgcatgctggcgataaatgatgaagcgctccgggcgattaaaggagagcagttgcggggcgaagtgcggctgggcatgcaggaggattttggcgagtccgtgatgccgcaggtactcggcaattttaacagacagcaccctgagctccggctgaccgcacgcatcgaacgtaaccaggcgttgctgcgcggcgtggcggcaaacgaactcgatcttgcgctggtctggcaggaagggcgagagggcgactatttgcgcagcgaaacgcttaaatggatttgtcggtcccgtgacgatattgaggggtatttgcaccggggtgagccgctgccgctggtgatgtttgatgcgccctgccagttgaggagccgggccatcgcggcgctggattcggcaggtattccctggcgtattgcctttaccagccatagcctgagcggactctgggcgggagtcagtgcggggctcggggtgacgcttcgcacgcgtattggcctgcccgagacgttacatgtcgtcagccacttgctgccagacgcaggagagctggggattgtgctgcatcagagaaccatcccggctgatgcagtcgtaagcaggatgcgtgaactgattttcaggacgctcaatggataa

SEQ ID NO: 155623 - DNA, 510 bp, Enterobacter cloacae
atgaaatatattattgcgttattattgtgcttcccgggggccttatttgccaaaagtcacactcctgagcaactgttgcagatgataaacgaaaaaggggctaggcatgttgtagcagaattgtatgctaatgatagcggagagtcggaatggtggaatcatgtcattcctgggattcgtaaaggaaaccaggaatggttagctgtcgcgagtgctcttgaaccgggcgtggacgccagttcggctgaagatttaaaagcagcgctttccgaagccatcccgcttaatcccgctggcgttttggcaatcttaaaagacaataaaccgttactcactgttgaacaggtctgtgcttttgcccattatccagaaacagaagcagagagtaataagctatttgtcgattcaatcagggcgatgtttaagattaaaagtccgcagggtaaaagatgcctcgctgttatgatcgcgaccgttgaacactctgttccattcgataaggatatttaa

SEQ ID NO: 155624 - DNA, 771 bp, Enterobacter cloacae
atgtttaaagaacttatagagcagagcctaaacgaggcaaaagccgccagagctgcgctgaacaaggttaacggtgtagttgtcggaaagatgcataatcctgatcaggggttgtatctcgctaactatgcaaatttgctaatgaacaggcagatagatatctttgatgatgcgcttctcctcctcgaaaacgaacgataccaaaccgcttgtgtcgttagccgggggatgattgaaacacatgctttctcacgactcttaaacaagaaagtggagaagatcctgacgaaccaaagcggccgcgaaagtgtagataaagctctcgatgtcatcctgggctttacgaacagttcccgatttaaaaagtcagagcaagaaaagattcagaaaggagtatttgaccctaacgactacatgtttactgaagagactaagcatcgttttgaaaacctacttgctgtcagtcagcatgtgatgaatgctttacgcgatctctatgaagatgagatgaaacagactaaggggagagaaagcgattttgaactgacgtatgacatacttagcgaatatgttcatccttcacaaacgagcatctaccaatactacacacctgaaacccacttagttcctacttcagttggtaatatccatgcttatgagtctgctcagatacagtgcgcgagagcgctacacttcatattagatgcgaagaatcaacattattggtcttcacagttagcagatgagatgactaaacgtggtaaacagtaa

SEQ ID NO: 155625 - DNA, 888 bp, Enterobacter cloacae
atgaaatttttgtttcacgataaattaactaatgatacaacatgggttgagtcggtaaatggctgcaagaaaaaaaatattaatgagtttaatttattaaaaccaaggattattacagcatgtcagatatatgatacattgatatccaattttgaaacttctttacctcctggtattttttcttccagttggggggttgtaagtcctggaaaaatgctgatgatagattattatgaaacacccccaaaagacttggccgcactaatgtccaccaggcgtagagatcatggtttaaatgaatgtccgtattgcggaaatcctaaatcacctgataccttagatcatttcatccctaaagatctctggtctgaatttagtatttacccagacaaccttgtaccgcaatgtagagaatgtgccccgataaaaggggagaaatattacagcacagaaaaacgaagtgcaatgtatatacatcctattttttttgatttgatttcaagggtaggttttaaaatcattgtcaattttgaagatggtcgttttagctatgatgtaagatgtcttattatttctaatgttacgccggaagagaaaagtagaattcaactacatttaaaaagtttagatgtgaaagatagagttttgagatattgctcaaaaacgacatctcactggcttaagattcaaaagaaaaatgtgaatgatattaaggaatcgtttaaaatgcgcattagagaaaatggagataggactcatgataattggaaggttgcattatataaaggatatcttgataatgaaaatgccttaacgtacttcaattctttatgtccagagcatcacgaggcacgcgagagtattgttattgatgagatagaaatataa

SEQ ID NO: 155626 - DNA, 1401 bp, Enterobacter cloacae
atggtttcattacctacggatatagattactataaaataataagcaatattttcccaagggatcaagctgacgaattactgaggctattatgtgatgcatcttattttattggcaataatgatatctacaagtcttggaatgggtttagtggtgctttatttagagataattcaagtggcgatgctctcctcaaaactggctattcgatagcgacaggcagttataatataaacagacgtataacgttcactgctgataatttcattgatacaattgagccgataaccttttcattcgataatgaagtctcttttttaagagaagatgtaaatcttttaataggtaaaaatggagttgggaaaacctcattacttggttatattgcggattctatattagggttgaattcgaatgacacgttcccatactttaataaattactagttgtagcatattctccattcgaatcatttaagacagagttagacattgttaaaagccgtgaatctaaatacaaatcaaataacaatagatttagtcttggtcgaaaattgcaaggtgtaaatgattatacttatattggttttaaaaacaagagtggtgtttttgatctcacatggcctaaggaatatgcagctaattccatagtgaatatcataaagtatgataacgaaaatttctggtggcaagatgaggaaaaaaactctcgatttaaacttctcatagaaactctatcattagctataaattttgatagttttaggttatggactgattctggcgaggaggttattttaaataaagactctaaagaaaagcgtaagatattaaagaagatagattccaaaaaaggttttgaaattataaggcagggtaaacctattcatttaagctctgggcaattaatgtacgcttatatgatacctgctatcgtttctgaaatgaaggatgaaagtttattaattctcgatgagccggagctttatcttcacccaacattggagatgggattaattaagatgctgaagagtcttttaaaagattcgtcatcttacgcaattatagctacacattctgcagttatggctcgagaagtagttaggagtggagtcaaaatattgcgagagaaagccggagtaacgaaaaatgatatgccacgaatagaaacttatggtgagtcattggatgcaattgttggcgaagtttttgacgattattttcaggataggccatatgaaatagagttagaggaactattaaaaaaagaagatctgaatgaggtgctggataaatattcggagaaccttggtgatgaagcattggcatatttgacatcaaaacttccatataaaaatgatgaaaatgaagatgacgagtatatcaaaatggagccaatttga

SEQ ID NO: 155627 - DNA, 777 bp, Enterobacter cloacae
atgactgaaaatcagcagaaaatttactttatagaggtcctaagaggtatcgcaccacttctagtagttggatatcatgctgcagggccccttgttaatgcgtatgcgtcattcccaatgttaggtcttgacattttcaggaatgggaatattggtgtagatatattctttatgattagcggctttattatttgctatgcaacccaaaaggttgagaccaggccattgctatcatttgttatacgaagattttttagaatttatccattatttttattttgcttgttatttgtatggttttcttattcctcatggaagccagcaagtgaattcataaaatcagcctttctgctacattcaaactactctctaagagcgcctttttttggttataacatgctttaccctgcatggacaatttcatacgagatattattttactctatcttcctgatcggaatggcatttagtcataaatggcgcgctctgattacgtctcttataatattaacttcaatgttagcaattcagctacacttcaaaagtagtatttctgtttcaggtgatttttcagcatattcagttgagatgggagcatttgcaccagtgtttacaatgcttggctccccgatgttattagaattcattttgggaatgtttttgttttttgtctttagaacgtttggggaaataaaaaacaacgccattaagttcacgatgatatccacctcagtagctggcagacatgattggacaacttatcgcaaatatttctga

SEQ ID NO: 155628 - DNA, 975 bp, Enterobacter cloacae
atgcgcaactacgcacttgacgtagctaaaatagtggcatgtttcttcattgtgtccgttcatgtaggaaattattccgagttttctgctccctggggagaaacattaagggtaatgactcgttgggctgtgccattctttttccttgcatcaggttatacaataggaaatagtgatgcaggggcattacttaagagagtaaacaagctaatatctattttgttttttagttcagtaatatatttacctgttgtgtattttcaaagtggtgaaaatatattaaaaacacttaataaagttctttctcaagatactgttcattacggcttgtatggtcatttgtggttcattggatctctcattgctggtcttataatatttggatttgccaggtcaaacttatcgcataggaaatcattagttttatccgtctttattatttttatgtgctggtttggagatgcgattaaatcattcggtgcacaggtgtggtttttctatgttttcagatatcttgctggatttgctttggtttacattggttggtgtattggttctggcagagtgcaaattcccaagaataatatacaattgattttgtgctttgtggtatgcttaatggcaatgggaggcgagtattacatcgcattttcatactttgacggtacacacggagaaagacaattccctttagcatgcatacccgcatcaattattttactgatgttatgtgcaaaaattaaaatgaagagcaattatttatcatatcttggggaaaagtattctcttggtatctatttaatacaccctctcgttatatatatattaggaaaatcctccgggtatctccgaatgcatatattctcatcggaaatgttggttttaggtttttcaatatcactgcttgttcttatgtgtattagtaagtattgccttgcgtttttcaataaactaaacggaattggtataaaataa

SEQ ID NO: 155629 - DNA, 357 bp, Enterobacter cloacae
atgaaaactaaagtgttgttgattggcatttttactttttattcattaaatgtttttgccgcttttaacgatgctgaaaataaacaattattggaaattaactccaagtccgagagattgaagaaggatgctatatcgttattaacgcaagcccaacaaaatcaagcgaacgataacccagagaaaaaacatttaattgattcccttagggcgtcatgggatattaccattgaaaaaagatgttcactggagacatcagaatcacatggtactgatgcggaaatttctgaagtcaataattgtttaactaaaggttacaaggaagaaacggaatattttaataatatgcaaccttaa

SEQ ID NO: 155630 - DNA, 279 bp, Enterobacter cloacae
atgggattaaagcaggttaagcgcttcaaggaagatgacgaggttatttggtctagccaggcaggtggcgctgagaaggtaaagattggcactgtggttgaggtaattccggcagggaaaagcattctgcattcccggttccgcaatgaactcgatgcatcaacgctgccgcgaaaagaagaaagttacatcgtctgcgttggcccaaagcctgggtcgagagcgaaaccaaaatactactggccgcgaacatcggctctttcattgaatacgaactaa

SEQ ID NO: 155631 - DNA, 447 bp, Enterobacter cloacae
atgagcaacatcgacaaacaatggctgcagcagaaaattgccgacatggaagctgcccgcgatgaaatcccgttcggcctggacgaagacgacagcaacacgctggcggcgctgcgtatcgcgctggcatcgctcgaagcggaggtgtcggggcgaaatccggtgctggcctatgcagacagttatcgcgatatggctaagcagggtgttgaatcagttgcggtatggagcgtaattaccgacctggaaagaaatatcgctccgctattcaccgccccgccagcgccggtatctgtgcctgaggaagttagttgggaagatgtgccagaggaaatcactgaagacgatatggctcttgcgtcagcatgggcgcatggcttcaatcagtgccgcgccgccatgcttcagggtgccgaacaacaaaatcgacaacaaaatattccgtaa

SEQ ID NO: 155632 - DNA, 273 bp, Enterobacter cloacae
atggctaattacacgcgcatcttcactttcctaactgggtgctgggcgtttgtcgcatccatttcattcgatcatttcagtgtaagccgagcgctgtgcactctccgccgtgtggtagaacgcgtagtcttttccaccgctaaccatgccctgcctgaaaaggctgattggcgaatcgtagagcgaatgtgcagcgaaagcgtccgagagaagattaacgtctttgggtgccaccctcgcaataccggcgcgctatgcagtccactgctgtag

SEQ ID NO: 155633 - DNA, 177 bp, Enterobacter cloacae; identical to SEQ ID NO: 78474

SEQ ID NO: 155634 - DNA, 264 bp, Enterobacter cloacae
atggcgatcggcagtatgatcggcgacgtcagcgggatgatctgtgacggggcgtctaacagttgcgcaatgaaggtctcgaccagcgtcaccagcgcctggaaagccgtgatgatggcgttggatgatactgccgtgacgggtaatgaggggattgtggcgcacgacgtggagcagtcgatcgcgaacctgtgcgcgctggcgtgccgctcgatgcaggcaacggaccggcagattattgagattatggcgagtaaggtgtaa

SEQ ID NO: 155635 - DNA, 684 bp, Enterobacter cloacae
atgctcagacagttcgaattcagggaagtaactgaaattggaacaatgttacatatgtttcatctaatgtttttaatgtcatcaattgatgtcataaaagaatccttcgatgaggtattggaggattgcaagaaatatctggatgatctggtaatatcaaaccgactgcaataccatgatgataatggagaatatcagcatatacatttaaactctagtgctcatggccatggtttctggttgcatacagaatataaaaaacatattgatgtgattaagtcatatattaaaacaaaacaaaaagaagcactgcggaataattaccctgagtttgccaatgaaataatgaatgctctaaataataacttagatgaattcaaaaaccttttagttggcgacggctcaacacttggaaagtatgcgaacattgatgttttagcatcaataccctatgaagactttgttctttcatggttatgccgtccttactctgaatgggacaaaattagaaatatcctactcaaccgttacacaagaggcattgctgtcaacctacttgctaatgagaaggattggttatattccgttgtcataaccttaaaattagaagcgatcaagctgaaagggtttgaaagattgcgcgtagagagaatcttcccaactcgtgcactcgcacatctttag

SEQ ID NO: 155636 - DNA, 576 bp, Enterobacter cloacae
atgacggtaccattgttggtgagcccaccgctgagcgtcgcagttttttcgccatcgcccagttgcagcgaggcgtctttggccacccgcgtattaccggtattcgataccgcacccgacagggttaacgcgccagtctctatcagcaaggagtcgccagagccaataatgtcgagatcgcccgatagtgcccagctttcaccctccatttttacgctggcgaaaccgtcgccttcattcagacccacgaagttactgtcttccgtaccggtgccgatcaacgtcagggtatttcctctggaatttgtggatattacgtcaccgatgaggttggagccagtgtcgagcagtagcgtgttatttttatcgctggcaaacataatagcgtttgtttcaccactaatcgttccgctatttttgatatctaattttgctgtatcttttacattgattccgtactgggttccctgcacagtggcactgttaaaaatcttagtgttgccatcatttgccgtaatagcatcaccgtttgtaccgataatttcgccactgttattaatgccaatgccaacctga

SEQ ID NO: 155637 - DNA, 582 bp, Enterobacter cloacae
atgacttttaaattttctgataaagaccgaacaattcgaatttataacctgcgagcagatacccgtgaatttatcggtgcgggtgatgcttatattccggccgggacgggattaccagctgactgcacagatattgcgccgcctgatatcgcaccgggtatggctgctgtatttaacggaaaaaaatggtcgctttatgaggaccatcgtaatgatacggtatacagcaagaaaaatggccagcagatatttattaccgggttaggtgaattaccttctgatgtgacgactattgcaccggaaggcgattacatgcgctgggacgataataaatggattaaagattctgatgctgagcgagccgctgcggtatcacatgcaattgatgaaaaaaaacagcgtcagaaagaagccaccgaaattgtcagcattttacagggcgcggtggatttagatatggccacagatagggaggccgctttactgtctgaatggacaaaataccgtgtgctgcttaatcgtattgataccagtttagcgccggaaattgagtggccagaggtgcctgataatgtggcgtga

SEQ ID NO: 155638 - DNA, 1035 bp, Enterobacter cloacae
atgagtaacgcgaccacgcaaaccttagatgcgcaaaaactttatgaaaatgccattgcttcaattcagttaggtctagaagacttccagctttcgcaaaaaccctcagaagaaggaggcaatcccgcacgtactctttcttcagtgcggaatctttatgcagggatgcttctccttttcaaatacagaattgccatatcggttgaatcagaagatgatgcctatcaacttattcacaatcctccacacaaaatccttccgcatccagatggtgccggtggtgtcgaatggaagccggatggaaaattcaagcaaacaacaatagatgtttctgggattgcagagcgctttgaaaaattcaagattgcagtggactggaaagcgatagataaattgcagttttgccggaatgaactggaacaccttcatcctcgtaatacatttggtgaattagctggctttgttgcagaactgttccccgtcctgagcgattttatcaccaatgaacttaatgaagttcctcaagaaacattaggccattcctgggagataatgcttgctcatcagactttctataaccaaaaggctgctgaatgcgaaacatcatgggaggaagctggtattcccgaagggatgtttgagtttttagaagattgcggatgtggggaatgtggctctaaattacttagagcttcccagcgtagcttggaagatgggtatagtgttgaccgtgacgaagaaaaatttaattaccaatgtatatcatgtggatatgttgacctcatagcacccatgctactggaaaaatttgataaagaattcttttattggcctcctgacggagaggaaccaacatatgaggaatgctataactgccgtcatgatacttttgtgatcggcgagcaaatttgccgttggtgtgaacacacccttgattatactgagtgtagcctatgtggcgcagacttaatgcaagatgaccaagataatgaaggtttgtgcggatattgtaactatagagtgcataaagattaa

SEQ ID NO: 155639 - DNA, 639 bp, Enterobacter cloacae; identical to SEQ ID NO: 152722

SEQ ID NO: 155640 - DNA, 849 bp, Enterobacter cloacae
atggttacagcaccagagacgtttatttcgtttctatggggaattatcgataataaaattgtatcgctgtttataattgcgattttactattaacctttctttattacgtgaaacgaaaagcacagtcgggtttctccattgccaaccggatctttatgctttttcttcgaaacaaagaacgtaatacaaaggagctaattgacgaaatcattgatattgagcgatttaatttctattacaacacccaagcaatatctctgagacaagcaactgcatttgagacatggataagaaagtatgaacttgatttcagaatcatatcaaaactaaagaacaaactggatatagaatatcttaaaatcaccaaggtcaggagaaaatcagtaattttctatttagcttcatctttacttgtcatcgcattaggcttgcagactttaattatcgcgaacacaaactctttgctaataaaaattgatgacagtaattggttttgggttaataaagacaaagcaacatcatttagcattcttcaatataaaaacactccttgggttattacagacgaatcctgtaaaaccaatgcaacaatttcatctttaagcaaagaacataccgctattatttgtaagtttttagatgatcataaaggcctccaccggctgaatgcattaatcaaacagcaaaagttattttttagcgtgctatccgtctttttaattatattttttattatgttagttagaacttggttacatttatcatatgctcttgatgcaagaacaatggtttatagaaagataaaaaaattcagggcgaagcgccgaaaaaaaataaacataatataa

SEQ ID NO: 155641 - DNA, 306 bp, Enterobacter cloacae
atgcatcgtcttggcgaaataagggatcgaggcctggaaaaccagagttaccgcgccagtggacttacgctaattaccgccgcgatcacattgtggaataccgtatatatagaaaacgccattaacctgctgaaaaggaaggggctgcatctcaatgagcaattgctgtcacacttgtctccgctgggctgggagcaaattaatcttacgggagactatatctggcgaaacaataaaaaactggcagaagggaagtatcgacctttgcggccagttgatgtcagtcagtacaaaaaacagccttaa

SEQ ID NO: 155642 - DNA, 924 bp, Enterobacter cloacae
atggaacaatgggggcgtatgcaggatctcaatgatttcgtatggtttgtgaaggtggtggagcatggcggctttgcggcggcggggcgggcgctcgatcagccaaagtcgaaactgagccgtcggattgcgcagctggaagaacgcctgggtgttcggttgatacaacgtactacgcggcagtttgcggtgactgaagtggggcagacgttctttcagcactgtaaagccatgctggtggaggctgaagctgcggaggaggcggtggctgctttacaggctgagccgcgcggtatggtcaggatcacttgccccgtaaccctactgcacgttcacgtggggcccatgctggcgaggtttatggcgcgctatccgggaattaacctccagcttgaagccaccaaccgccgggtcgatctggtgggggagggggtggatgtggcgatccgcgttcgtccgcgcccgtttgatgacagcgatttggtattaagggtgctggcggacaggggtcactgtctggttgccgggccgacactgattgaacggatgggcaacccggcgatgccttctgagctcagcgaatggccgggtttaagtatgggcgctggtaaacacctgcataagtgggagctgagcgggccggagggggcgaaagcagacattcacttcacgccgcgcctggtgactaccgatatgctggcgctgcgggaggcagcgatggcgggcgtgggcgtggtacagttgcccattttgatggtgaaggatcagctggcttcaggtgagcttgttcgggtgctgaacgcgtgggagccaagacgggaagtgattcacgcagtatatccttcccggcgcggtttactgccgtcggtcaggacgctggtggattttctaaccgaagaatatgcccggatggtggaggagtaa

SEQ ID NO: 155643 - DNA, 414 bp, Enterobacter cloacae
atgaaacgcttatccgcgctcttattgacttgcttgctgtccgctgtttcaagtttgtccgccctagcggccgatgccgatccggatgtgctaaaggttgccctgctgccggacgaaaacgcctccgagctgatcaagcgtaaccagccgctgaaggattatctggaagagcatctggacaagaaggtgcagctgatcgtaaccaccgactattcctcgatgattgaggcgatgcgctttggccgtatcgacctggcgtatttcggtccgctgtcctacgtcatggccaaaagcaaaagcgacatcgagcccttcgctgtcacggtcatcgacggcaagccgacctatcgctcggtgattatcgccaatgtggcgtcaggcgtgaatgagtatgccgggcactgttgcaaatag

SEQ ID NO: 155644 - DNA, 156 bp, Enterobacter cloacae
atgtggaatctgtattacaccagtaaaaccgtaatacttattaagtacatgatctattgtcttccatgcatcatcatgaacctcatagtctccaaaatatatgcagccagcatcagtcgagatgaatggaatgaagggtgggaaatgtatagctaa

SEQ ID NO: 155645 - DNA, 1365 bp, Enterobacter cloacae
atggatattttagcgttaaaagaagtacttcgccctgcggtgggaaacttgaaagatcattgcactaacgaaaaaatccctgatctctgtcgtcagttggggctacctgtgcccagagaggaaggatgcaagcgcgagcgcttgcatggagcctttgatttacttaatgacgcagatatgccggagttggcaagaacgctgttgtcgcgaaaggttttcaatccaagtatacgcaacaatatccaagacatcctatgggaggacgagccctgcatcgatatacccaagcgacatcgtcgcgagctagcagaggctctgcaaccatttgaattatttagccactgggaaaatttcaagcgattattaaatgatttgtttgtttttccggtggatttaagtgaaatattttcgatgcatgagacagggattcttggcgaaattcaccgacattttgtacgaaatcctgaagacggtgatgtggtatggttatttgaaaaactgcagattgtcgaacaatcagctccacgtttccgtaggtggctcgaaggtttagtctctgcggacgtgcagatcagtatcgaaaagcaggtagcaaaggttgaggccattaataaagttttaaggacgtgtggagccgggcttacccatagctcagatgctgaaggctatccggtttttagcctgatatcattgcgggcgtttcgtgggcgccctaagaacattattttcgcctctctcaccaaacctgatattcgtttgagtgactctcttaataacgaaattgaaattctttcaaacccaaatgaggttttgatctatgatcgtccattaagtaccgagggattgagttggcgtgaactgcaggcatggtgggcagattttacttgtgaagagaatagcgaacaggcaaaaaattcgctttatcgacgattgcagcaaagtttgcctaactcgtctccgcctcagcaaaagtttttcaaagaattctttcgacaatatagttcagcaatttatgacttacctgcattgctacctgaagtttggctgcactgggatcccaaaaccgtatcagagagaggcgctgaagcactactcaatcataggatggattttcttttgctaatgcctgatggcggtagggttgtgatcgaaatcgatggtattcaacattactcagatgaaacaggtagggcgagtaggagtaaatatgcagatttggttgcaggtgatcgtagcttaaaattggcaggttatgatatttatcgttttgcaggtatcgaacttcatcgcgacgatgcctcatataaaataaagtgtttttttgattctttgtttaaatgtcatgggataaaaataaatttatag

SEQ ID NO: 155646 - DNA, 840 bp, Enterobacter cloacae
atggttaaaatgactgttggacaaccgtactcagcttggctcaaaaaagctgaacataacgtaaccacttctgacggcaatgaggtagaggtatacgagctcgaattcgatcttgaagcggggcatgtactatccgcatgggccaaacatttccgtgagcattactgtctggacagccaaattgatcgcctgcgtagagggactaaaaaaacgcgagccgagtatttgagagacttggtgtttcctgatgagtctgaagattttggccctgcaacgcgctccggcgattttgctgaaattcttatcgcggatctacttgaaagccattttggttattgggttcctcgtactcgatatgacaacaaaatggttcgcaacgagtctccaaagggaacagatgtcttagcgtttaagtttgatgacataggcgcatcacggccatctacaaaagacatcttgatttcttttgagtcgaaagcacaactcagtggtaagaaagcaaagccgagattgcaagacgccgttatcgactcgataaaggatgtgtatcgaatatcagaatcccttaatgcgatgaagcgccgtttaattgatcgccaagatgaagaaggtgcagatcgggtggaacgctttcaagaagggttggatgtcccttatgtacgaatgacaggggcagcggctgttttttgttcaagtctttatgattcggctcatatatctgaaactacagactgcacttcgcatgaaaatattaaaaatctaatgttggttgtaattcatgctaagacgcttatgaaatttgttcacgctctctatggcagggcagcaaatgaagcctaa

SEQ ID NO: 155647 - DNA, 3192 bp, Enterobacter cloacae
atgaagcctaaaaaacgtgctcgttatgcagcagcagttacgctatcaaaagggaaaatgtttgagtatggcgttccagaagaagatcatattgatcttcctgaagatctcgacttggagatgcagtttccattagctgttggtaccgtcggcgactttgcatcagaagtggtggctaaggccatcggcaattcgattgaagctcaatcccaaaccccactggatgaggttattttttcggctcaagtccttcaggcttatgacaactccctgctgaacaaagaactctccttcaatcttcgcatacttgccgctgctggtttctatcttggcgatgtacccggaaatgctgcagtccaattgtctaaactgggccaactcgagtttcctaagcacgatactttagctattgcagttaaagcagcgatggatcggccttgggagcagaccaacgagacattagtatcttcacgtgcaaaagatattttggatgtattgcgccaacacttcaggtatggccggagtggcggacagaaagcctatgatgctattaaatcactgcgcgaatgggcctatagccatgcgtctgcacatgacctacttatggccgatttgctaggagcggttagtgccactcgcatcgctaattctgcttggacattacttccgcattatagcaaccttccgccagaaaagtgggagtcatacttatcgcgttctatgtcaattaaggaaatgtggccatctcagcgcttgctaggagaggcaggattgtatagcggggcatcaggagtcgttcagatgccgacgagcgccgggaaatcgagagcgaccgagcttattatccggtcggcatttctttctgctcgtacgaaattggtcttagttattgcacccttccgcgcactctgccaggagatagccaacgatcttgaaaaggcatttaaggatgatggctatgacgtcaatcaacccagtgacgcgttacaaccagatgtcgagttcgatttttctaccttatcagattttctcgatgtggaatctggaatatttgactcagagatagaggtcgaatcgaagccgcaggtcattattcttaccccggagaagcttctttatatacttcgacaagagccagacattgttcagaaagctggacttgtagtttatgacgaagggcatcagtttgatacaggcagccggggtgtaacttatgaactgttactaacatccattaagcgaatgctacacgaaaatgcccagagcgtgttgatttcagcagtaattcagaatgctgcttcagttgcagcctggttattaaatgacggttcaaaggttgtctccagtaaatccttacaggctagtagactcattgcctttaccagccttccgaaaggtaaagatggtcagctacagttcaatgttgcctatgatagcgatcagaaattctttgtcccgcgagttattgtttcagaaaaaatgccacgactacctaaggaaagaaaggatcgttttttccctacccaggaaagtggatccatagcgttgtatcttggtttacgcctgctaaaaaatggtggggttgctattttcacagggaggaaggcttctgctgcaaaaattgttcgtgaggccgccgaagatatttttcgtcgtggaatttcacttgaaccaccttctgctaatagtgaccctaatgagattcgtcgctttgtttacctcttcgaacgtaattttggtgctaatgcatatttgactcaagcagctactttaggcatttttgctcatcacggcaatactccccaaggtgttcgtctggctattgagtatgcgatgaggcaaagccttattcgattgatcgtctgtacctcaacactcgcacagggtgttaaccttccaattcgatacctacttgtaacaagtgcaatgcaggggcgtgaatcgatcaaagtacgcgacttccataatctcatgggacgtgctggacgtgccggaatgtacggtgagggcactgttatattcactgacccccgtctctatgacgagcgtttcgcaaagacgcaccgctggaaagatacaatcaatctaatcaatcctgatagtgctgagccaacgggaagtacattgctttctcttttcgatcctctgcgaaatgacctcggaacagttattctaagctcaccaagctctgctgaagtagccacttacattgtcaatgactgggaggctcttttaaagtgggtagagagcgtccctatcaatctccctaaagagaatttttcggtcgcttcattaatcgaacaacttaaatctaagaaaaagattattgaagcagttgaaagcttcttaatgacatatcgtagtgatgttcagcccgaaacttttgtgggcaattctcgagaattggttactgaaacacttgcctattcgcttgccactgaagagcaaaaaatactcctgacagatatcttcgagtctgtggcgcgaaggatcgaactttttgttccagatacagcgatccagcagcgttttggtcggacattgttaggtattgaccaagcgttggtgatcgaatcatgggtcactacaaatgcaaacgcgctcgagggaacaacctctgccgatcacctgtttgatatgctatggccgcttttagttctcttatccagtgaaaaacggttgagtgatactgttcctaatggggctcttatgacattagcattgggatggctggctggagattcgtttgctgctctccttcaacggcttgacaaattgggtgcgtattacccctatggcaccaaccaaagaaaatttgatcttgatatggttgtagacctgtgtgaacaaacatttggctttgagtttgcactcttgctcgcagcggtaaaggaatcatttatcgcatcctcttcagaacaggctggtgatgtatttagaggatacgctgatcttcttcagaaacgattgaaatatggacttccgaatcagagttgcattgccttttttgaagcgggatttgctgaacgcgtgattgcccagtgtcttgcagagggaatgactcaagatgctattcaagccagttttgactccagaaacatgattcgagaaaatccagagagattcgaaataatactgcaaggctttccatcttatttttccgatgtatttaaaacaatcactgcaccttga

SEQ ID NO: 155648 - DNA, 966 bp, Enterobacter cloacae
atgagtaagtggctattagacaggttatttgaagccggtgatcaggcagagccccggtttgcgtttcaggggactgtaaattggatgagggcccttgccgaagtcgttaacgatggcgcttgtgccgatgataaactaaatgatttatatgctcgggtacaacgtagacctgtcaatcgtgaagctgatacgcttgtgtttgagaacacaatgatggccttacataatctgtcatctttgaaaagtatgaataaagatgtcgaagataaatatgacatatgtcgttcagctattatttcttggtattacagtatctatttttccgctagcgcgatggttgcagcatcttctggttctattcaagagacacatacagccacagcaaaagtttggcagtcagatatcgcggaaaaagaacttatcccatatccatttaatcttcttctaactagtttagtttcaaacactgctgatgccgagattgctgcatatagaggtgctaaccgtttcgacctgaatgatagagcttatgataatgaaactgctcatggtgcactggtttcctatctaaaggggactcatggctacaaaaagtgggaaacagaagagagggtgagagcttctcgtgaattcaaagctcttggtgttgacaactttcgcacgaaagctgctcgcgaagttcgcgatcacgcactagaaaaaggacaagttaatttccttattcaggcatttagataccgtggtaaagcgaactatcgtgactctatatttttatcctacggtgacaacaacgaagctattatagaagaatttatccaagatttgtatgacgtcgctattggcttcattagggctacttcgcattattgcagtcgaagagtcgagagaggtacgtgggctgagtttgtcgaggatatttctgataactcaaggttgtctattgactctgtcgtgcttgaaatataa

SEQ ID NO: 155649 - DNA, 906 bp, Enterobacter cloacae
atggaagataaagattacactgaagttagagagttttggaaaaatgaaattattgcgtttcttgctttaacttgcctaaagggtgttgggtattggacgcttcgtaaaatctatcaatcaaaaattggatttaagaatatattaaaagataatacggctgatgttttggctggatatctaagagtctctttgccaaaaaatatatcttgggaaacattccaacaagatctttggatgaaggggttagagagagcccgtgaacttaataaaagtggcattgttctgacattttatgatcagacaacatttcctcaatcattaaaaaatataagcgatccaccattttggatctttgttcatggtaatcatgatattcttaataagaaatctgttgcaattgtgggtacacgaaagccaacggatgatggtatttttttagtaaagctaattgtggcttcgttatattctaaagatattgcaacagtcagcggtttggcgacaggaatagatcaatgctgtcattatgaatcgctgagatatggtatcccaactattgcggtattgggtaatgggattttcgttgaatatccgaaaggttctaaagatttatatcgtgaaatagtctctaatggtggggctattgttactgagtatctgcctgaacaaacatatagtgcagaaaattttgttaggcgtaatagaattcaggctgctttatgtgattctctagtaccagtcgaatggaagattaaaagtggaacatcccatacagttgaatatgcttttaagtatgcgaaaaagatagctagtccatatcttcctactacttatagctcacccgcctgttttctgcctatcagcagtgggattggcctgcttaatcaaatggatattcagtatcggtaa

SEQ ID NO: 155650 - DNA, 774 bp, Enterobacter cloacae
atgatgtttaaaacccttcaaagcagagccatcttgctggtctccgcgttctttttattgcttatctcgcttaccctctgggttgtcatgtcctttgttgcgccgccgctgctgaaagatgagtaccggcgggtgcacctgcagattggtgagcaggccgccgctatctcgcagatgatgtcacgcgtgcaggcccagcagcgcgggctgactgaaaccgtcgcgcagttggacagcgccgatatcgaccgtctgttacccgcgctggtgaaccagtacggcgaccggaatctgtttggcggcggcgtctggccgctgccgggaaaacgtgagccggggctggcgaaattcagcaccttctttgcccgtgacgatcagcaccagctgcgcctgaacaccacctggaatacgcctgaagcgccagagtactggcagcagccgtggtttaaggccgggctgaaggcggagaaagggcagtgcgcctgggcggctgcctacgtggatgccgccagtccgcagccccgaaccaactgcgcaatgcccatctggcgtaacggggagctttggggcgtggcaacgctggacgtcacgctcggctttttcggtcagctcgcgcgcaaaatcgccgagccgctggaagggggcgtgctgattgtcgaggccaacggcaatattgtcggctacagccgcaccacggaaaacgcgccgttgctgaaaaacatccgcgagctgccggggcatgaaatcaccattctgcaggagatgttaacctag

SEQ ID NO: 155651 - DNA, 318 bp, Enterobacter cloacae
atgaggaaaatgatcaacaccttgtttttatccctcaagaattctacgggagaatccgctttttcaaatccttattatgacacgaaattaaataaagtattgcagacttttagaattaacattcctgttaaatcaactttaattgagctaaaccatcttgtagagcatctgagatcgtattactttgaagttggtaatattaatcatggtgccaatgaagatgctctcattatcacagtcatcaacccggcaaaaaacgcagccgagcatcttaaagacgcagttacagactacttaaataccattggattgctctaa

SEQ ID NO: 155652 - DNA, 177 bp, Enterobacter cloacae
atgaacacgccgtatctggaatatattcgcattcaattacgcgatacgcaggccgaggattcaggcggcacgaaagggcaactaggggcatatgccgagcatccgtcagctgataaaaacttgtacccacgtaacagagtcatgcagtggaactcgataacggtcgtggcggggtaa

SEQ ID NO: 155653 - DNA, 1380 bp, Enterobacter cloacae
atgcctttgtctgcgctaagtagagatgaattttataatcggttgtacaaagttgttaggccctcacagcccattgatgcctcagagtttcttttcgggagagatcggcaatatgaagcgatgagggctgcgctatacgctccagggcgtcatagttttatctttgggaataggggggttggaaagtcatcattggcgcattctctggcatatgaccttcaagagcaaaccgaccccattttactcagctgcgacgaagatacaacgatggtttccattgtctcggatgcgcttcgcgaagcgggtatgtatggagtacacaaaaatgaatggacagtcggagtcagcctgggagtaggcggaactgcagttaagtttgagaaaaaaggaacatctacgccacaagatataaaaataattgacacatcctcagcggtgtttgccttagagtatcttcagaagattcactcagataaaccgtttataataatagatgaattcgacagaatcaaagatccaaaggaacgcgagaaatttggtacgctgttaaaacaattaggtgataaaaggtcgtcagttaaatttatttttacaggaatagcacaatcatatgaagagttattgatggggcatgcatcaagctcaagacaaattcatgagcttaaattggaaccattgcattactctggatgttttgcaattatagacagagcctttagcgaatttgggttgtctgttccagaagatttacgcattaggattgcgggtattagtgatgggtacccacactatgtgcatttgatttgcgagaaaatgctggttttagcatacgaaagagatgccgaatgtgttaatgaccatttatattttgacggtcttaatgaagcagtaacctctgttgctcaatctttacgtggcccatatgataaagcaacctacgcaagagatagaaattattcttacttgctttgggctgttgcagactcaagagatttacttagaacaatttacgggattagacattcttatcaggatgtcatggaccaagtttcctggagaaagaaagaggttgtgacccctcttactgaagcaggaatttcacgtatactccgtaattttaaatcaccagaatatggacaggtagttattcctgcttttgatggaaaacgtaaggggtggtatacattcaaagaaaatatgttgcgtggttatataagaatgtgtgctgaagcaaataggataaaattggacttcgacttgcatttctcaacagaaccaacggcgcaagcccgagtgaacacaaaagtgggtaaaaccatctcacagattgaagctgagatcgaaaaagaagaaagcctaaagaagagcgctgatgattga

SEQ ID NO: 155654 - DNA, 666 bp, Enterobacter cloacae
atggctttgcaaggttttccgtttcccgcccgaaatgatgaaattttttatcatgctaatgttttgttagaaaaaatacctaaaataattgtgcaactacctgaaaaagggatgagcttagaaggtatactcacagctgtcattgcaggtgggattccagccttggttgcttggttagcgatgcgagctaataacgaatctttaatacaacaacttgcacaacaggagcgcataactcataagaccttaactgcagaattaataacatcacataggaaaaaacttgttgatgactttcgtgattcagcatcgaaatttttggcatacttgcaaagtgcaataaatgtgtcaaacgatataatttatgagcaaaaaaaacgtagtcctgatgcagacaagatgaacagtttgaggttatttagacgggattattttgaaaaacttgctgtcgaacgatggaaaattaaaatgctcatggattcaactcatccagattatgaaaaagttgtaaatacaatgtctgatattgtatttaaattaaataatactggtttgtatccaagcggatatcagccacaggattttaacgacaactacgaaaattttcagaatggaatttcaggggtaattaaaactgaaatagataagataaacactctgaattag

SEQ ID NO: 155655 - DNA, 228 bp, Enterobacter cloacae
atgcagaactacaccccgccagggggctggggtccggtacttcattttttacatgagaacaggctggcattgcagggcgctttgactgcgttctttattgccttgcttttctcatggtgggacgggatagcctggcgccgatcattcactgctgggtttatctgcggattcgccgcacttgcagtagtgagcttttttaaacagctgggcgtatcagacatggactag

SEQ ID NO: 155656 - DNA, 285 bp, Enterobacter cloacae
atgaccaaagatgaaattattaatggtctgccggagcgtgaagcgggttacgtaaaccatccctctgataaaggcggtcccactaatcgggggatcactgcaaagaccgccctggctcatggctacagtgacgtccgctccctgacaaaagaacaggctcgcgctatttacgaggctgattactggtatgggccgcgattcgatcatttacataaagctgttttaaaatatacaatacccccctatagtatcaggagggcgtatgccgcattcacccgcagataa

SEQ ID NO: 155657 - DNA, 135 bp, Enterobacter cloacae
atgaccgccactgaatctgaaattatcccggtgactgaccatctcgagcttcgcgccgtcgaagagcgctataccgccgatctgcacaacatggtcatcagaaacaaagcctggctgcaaaccgcctttgactga

SEQ ID NO: 155658 - DNA, 2991 bp, Enterobacter cloacae
atgcccgttaattttctttccgaagaccaaaaagcaggttatggtaattatcatggcgaactgacaaaggaaacactggcgcgttattttcatcttgatgattttgaccggatgaacatttcagaaaaacggggagagcataaccggctgggctatgccgtattattatgtacagtccgttatctcggacgtttcccagatttaacgacaataactccggttgctgttattgattttctggcagagcagctgcatattgagagtggtagtgaacaggttagtatatataactcaggaaagcagcgccgacagcatatagatgaaataacaaaaatatatggttacacggaatttaccgacacccgtgtggcgttttcactgacccgctggttatattctttatgctggaccggaacaagtcgtccgggtattctttttgaaagatgtacaggatggcttttatcacacaaagtcttattacccggatattcgttgctcgaacgttatatagcccggttacgcagcagggttgaaaaccggctctggcagtcactggcgacctgtattgatgacgctcaggcacaacggcttctggagctgctttcggttccggcagggagccgctattcgttactcgatcagttacgtaccggccccactaaagtgaatgccacatctctggtgcaggccacgggccgtcttcagaccatacgtaacctgggcgtgacattaccagcaattacaccagtttcggatacccgtattgctgccctggcacgttatgcctcaacggctaaaacaacagcgcttcagcgcttaccagaaaaaagaaaactggctacgcttgttgcattctcctgctgtatggaggcgacggctcaggatgatgcacttgaattacttgaagcactactccgggatctgttcaatgaagcggttcaggcagataaacggaaccgccagcgaacacttaaagatctggatcgtgcagcagaaatactggcaaaagcatgccggatgatccttgacgaaaagttacccgataccgatgttcgtgataatatcttcaacattatccccgaagatgtactgaagcatgcagtcaataatgtgacatcaattattcgtcctgctaataacgtttatttcaatgaacttgatgcgaaattcaaaacgatacggcgatttttacctgatttattgtccggaatacattttaaaggtaatgtcgctgcagaggcattaattaatgcgcttagctggattgaaattaatttaaaaaagaaaaagacagataacgatgcaccacgtgaaataatcaataaaccatggcagcaacatgtggtgagaaaagacggcagcattgattttcacgcctatacgttttgcgcactcaaggaacttcagcttacactgaaaaaacgggatatttatgtcacccccagctggcgttatgcagatccccgggcaggacttatcgaaggtaaagaatgggaagttctgcgcccggtaatctgtcgctctctgggattatcatcagcaccaggggccactctgtcggcaatcgcaacagaactggattcaacatatcgtgatgtgctggaccgtctaccggaaaacccggcagtcagatttgcggagaatggcgataaaactgagctgatcctgagtcctctggatgccattgaagaaacaccatcattgatcgcattgcggcagcgggtggccgacatgctgccacgtgttgatttgcctgaactgatactggaaattgatgcccggacacatttcaccggtgcctttacccattcatcagagcaaagctcccgcgtctcggacctgaatatcagcatctgtgccatgctgatggcagaagcctgtaataccggtccggagccctttatacgtaatgatgtcgcggcactgaagcgtgaccgtctgacctggacagacagcaactacatcagggatgaaacgattcgggcagctaacgccattctggtcgcagcacaaagtggcgttcccctggcgaacatctggggtggtggtgaggtggcgtcagccgatggtatgcgatttgttgttcctgtgcgcacggtgcatgccggccccaacccaaaatacttcaaagaaggacgaggggttacatggtacaacctgatatctgaccagtattcggggataaacgacatcgttgttcctggaaccctcagggatagcctggtcattctggctgtcgttctggagcaacaaacggatcaaatgccataccagataatgaccgatactggtgcatacagcgatgttatttttgggcttttccgcctgctgggatatcgtttttgtccaaggatcgcggacacggggggagccagattctggcgcaccgaccctaaagcagattacggtccgtttaacgcgatatcttcgcatcgccttaattttgggaaaaaaacagagccacactgggatgatattctgcggctgattgcgtccctcaaacttggacgactgaacgtcatgtccatcatgaaaacactgcaaacgggcgacaggccaaccagcctggcacaggcaatagccgaaataggccgcgccgataaaactatccatatgctgacttacctcgacgatgaaaacaaacggcgaagaacgttgcagcaactcaaccgtggagagggtcgccacgcagtggccagaaatgtctttcatggtaaacggggagaactgagacaggcttaccgtgaaggccaggaagatcagcttggatcgttaggtctggtgctcaatattattgttctgtggaacacgatttacatggatgccgcgattcagcagctcaggcatgaaggttatccggttcaggatgaagatgttgaaaaactgtccccattgcagtgcggacatatcaatatgcaggggcgttattcctttacggtgccggaatccgtcagtaagggtgagctgagagctttcaatgaagaattgtaa

SEQ ID NO: 155659 - DNA, 624 bp, Enterobacter cloacae
atgaaaattgctcgcatctatgaaagagtcagtacatcagagcaggatctgacacgccaggctgacatcgaaaaaacggccattgccagtggtttttatatcgccggtatttatcgggaaaaagcatctggtgccagagctgacagacctgagcttctccgcatgatcgccgaccttcaacctggtgatgtagtgatagccgaaaaaattgaccgtatcagtcgccttcctcttcctgaagcagaaaaactgattgcttctatcagagacaaaggtgccaggctggctattccaggcatagtggatttgtcagaagtggtagcagaaaatgatggtgtctcccgcattgtcctcgaatctgttcaggagttgttgctgaaacttgcccttcagaccgcccgggatgactacgaagtacgacgggaaagacagcgacagggggttcagctcgccaaagttgcaggcaagtacgcaggcaggaaggccgatctcgtgacccatgagcgcatcattaccctccggcagtccgggttaaccattgagcgcacagccacgctggccggatgcagcatcagccaggtcaaacgcgtctgggcaatccatcagtcgcaaaaaaattcgtga

SEQ ID NO: 155660 - DNA, 4455 bp, Enterobacter cloacae
atgacaatacccggaaagctctctctcctttctacatgtgtttacctggctttttcttctgcaagccagtcttatgctgcctgcgacaattatctccccggcacggggcaaaccgtggagtgcgacgtatcagctccgaatcccgatcccactgcgattgtcagcgccagtggcgtgaaaggcgtcaccgttaatattgctcccggcagcgaacataatgtcgccggagcggaagctatttctcttggtgatggcagcaatatcattaacgccgggcagctgacaggcacaaccggcgtactgctgcgggaagggacaagcgtgctcaataacagtggcgctatcaccggtactaccgggccaggggctcagtttaacggtagcggaaataatcaactgacaaacagcgggactatccagggcagcgccggtagccaggcggttgtctttggcagcggtaatgacgtactcatcatgaacggtggcaccattaccggtgatgttgattctggcgacggggccgacagtgccaacatcagcaacggcactatcaccggcaccctcctgcagggcaatggaattgacgattttttcatgagtgggggctcactgggcgcgcttcagcagggagataaccgggatacgttcaccatgacgggcggcaccattgtgggcgctttcgaagatggcgacgtggcaaagatgaccggaggaaccattggccgcgtcaatatgaagctcgataacaatatttttgatatgtccggtggtgagataatcggtaacctggttaccggctttggcaatgacaccattcttgtcagcggcgacagcgtaatcggcggaaacattagcgtcagcggtggcacagacagcgtgacggtcaccggcggcacggtcaaaggcgaaataagaatgagcaccgggaacgaccttttccactgggagaaaggcaccattctgggcaatattatgatggaggccgataacgaccggatcgagttgacgaacctggacgccgtctctgcggcctcctctcctcttatagacggaggcgcgggcaatgatattttagttatggacaacagcgtatatgtccacagcacggcaaacgttctgcaaggtattgagctcattactctcaataacggttccaccctgacgctcaataacagtccattgccgctgggcgatgccaaagacgataacgccagcaccggtttcaccctcgacggtaccagcaccctcgcgattcaaaacgccagccagacagcgtttaacagtcatgtcagcggaacaggtacgataagtacggacacaaacggcagcgcctttagctttaccggcaacaatgccggggataattttgccggaactctggcgctgggcgacagcaccttcaatctcaatggtctgaatacgcaggcgctcggtcaggccacgttgcgggcaggaactgacagcgtgacaaccgtaggcgctggtgaacagcatatcggcggcctgacgtttgcaggcgggaccgtcgattttggtagcgtcgcgccgggaaataccctggcggacaacaccattcaaaccagccgtgatctcgatttgaacggcagcggtacggtgaaagttggcatcgacaatatggtgaatgaataccctgcagccgcaaataatttgccgctgctctcccaggatgacgtaaacacgaccatcaaactggccggttcagatggcacagtcaccggtaacggcggcagcctgacgctgaccgatgccagtgacaatgtaattaccgacagtattaccgatgccattcttcagaaaggcaacgtggttgctcaggggacctgggactggcgtttaagctcaggtgaaaaccaggacgggctgtatatcgcctacgctctgaaggaggtggaactccagggtaccggcgccgatgccctgatcctcaacggtcagaacgcctcaggcaatgcggcagacctgagcgcaaaaattaccggcagcggcgatttggcatttgagaatgctgcaaacggtacggtttctatctctaataaagataatgactacaccggaataaccgatgttcgcagcggtaatttgctgatgaataacaacagcgttctcggcaaaacatcccttctgaaaatggccagcgacaccgcgctaaatatgaatgggttttcccagacgattggtagcgttgataccgctgaaaattcgcagattgatattgctggcggcagcctgacggttgaccagggtggcacaataaatggcagcctgattggcgccggaaacttgacgcttaatagcggcacgctggacatcaacggcgcaaacgccgcgctgagcgccagcacgcaaatcctgaatgccgccacggtcaatctgaccagcgcggagggtctgggaagtggcgatatcgataacgccggtctgcttaacctcaatggagtcagcggcacgctgctcaacagcttgagcaacagcggcgacgtgaatttaaataccagccagattaccctggtcggggataactcacagttcagcggtacgtttaatattaatgcagacagccaactgacggcgggagaagcacgacatcttggcactgcggccatcaacgatgcgggcacattaaatctgactaccggcaccaactggacgctggctaacagcgtaacgggagcaggcaacctcgttaaaaacggagcgggcgttgtcaccctgacgcgggcgagcgccgcctatacgggaacaacggatattaaccatggcggcattacctttggtagccgcggccagccgattacgctggcaacctcagaagttaatattaatgatggtttcctcgcgggcaacggcgcgattgccggggatgtaaacaataaaagcttgcttcaggtcgggaatagcacagcgtcgcaggacagtgcagcgcagaatatcgcgacctttgccgccgttctggctgagccaacaactgatgcgctgacaacaggcggcaatctgaccaacagcggccagattcaggtaggccagaccggaagcgatgccctggctggcaatacgctcactgtcaacggcaactatacaggtaacggcggtcacatcgcctttaatacggtacttggaaacgacgcctccaccaccgaccatatgaccgtaaacggcgacactagcgggacaacttacgtagccgtggctaacgccgggggaagcggggccagaactctcaacggaattgagttgatcaaagtcggcggaagttctgacggtgagttcttacaggacggacgtattgttgcaggggcatatgattaccggctgagtcgcggtgcgggcgctaaccaaaaaaactggtatctgactaatggcgctgatgacccgcaaggtgaagtggccccaaccgatcccactgacccaacagagccgggcatccctgaaccgtcggcaagtaataatgtcatgctgcggcctgaagcgggcagctatacggcaaacctggctgcggcaaataccatgtttaatacgcggttgcacgacagactgggggaaacgcagtacaccgacgcgcttactggagagaaaaacgtcaccagcctctggctccgccaggttggcacgcataactcctcccgctcaaatatcggctcgctgaaaactactagtaatcagtacgttgtgatgcttggtggggatctggcgcaatggagtagcgatggactggatcgcggtcatcttggcattatgggcggttacggcaacaaccagagcaacacccgctccagcgtgacaggttattccgccaaaggccaggtcaatggctacagcgtcggcctgtacggcacatggtatgcaaacgatgcggacaaaacaggtctgtatatagacagctgggcacagtacggctggtttaaaaacaccgttaagggtgaagaccttccccaggaaaaatacgattcaagtggactgagcgcctctctggagagcggctatacatggaaagtcggcgaattcagcggcagcaagcaaagccttaattcagtttatatccagccgcaggcgcagataacctggatgggcgtcaaggcagacaaccatacggagggtaacggaacccgaatcaacagcgacggtgacggaaatatccagacccgcctggggacccgcgttttcctgaaaggccacagcaatattgacgaaggcaaaggccgggagtttgaacccttcgttgaggcgaactggctgcataatacccgcagctattcaaccagtatgaacagcgtcagaattagtcaggacggtgcccgaaatattggcgaactgaaaaccggcgtcgaaggccagctttcacgcaaccttacggcgtgggggaacgtgggtcagcaggtgggggataaaagttatttcaatacggaggctatgctgggagttaaatatagctggtga

SEQ ID NO: 155661 - DNA, 1119 bp, Enterobacter cloacae
atggcgaacttgccctggcgtatcagcgtgcgcctgatggcgctcgcaaagaaaatggcgatgatcgcaggagtggtactgatcgtcctgctcgcggttcgggtttatctctcgcagcaggggccggaactgcatctctggcatacctggcgggcagatgagatgtccgtacgcgagatagataaggcgaattttgcccagtatgtcgcccgggaaaacgccattttcaccgatctggataacgcggtaacgcgcaaaacccagggtgaggaacgcacgccgttaaaccgctactaccgtcagagcctggtttggcccggtaaattttcacccgatgctaaccgctcctttgtgctgatgcccgccggaacgccacgcggcgcggtggtgttgctgcacgggctaacagattcgccttacagcgtccggcatcttgcccgtgattatcagcagcacggttttgtggcggtggtcccacgcctgcccggacacggcaccgcgcccggagcgctgacggacgttgactgggagaggtggctggcagcgacgcgccttgccgtgcgtgaagccacgcggctggcgggagacaatgttcccctgcatctggtgggttactccaacggtggggcgctggcgatgaaatatgcccttgatgcgctggacacgcctgcgcttcgcaaaccgcaacagctcattctgctctcgccaatgattggcgtcacggcgttcgcccggtttgcaggattggccggattgccggcgatgttaccgccgtttgccaaagcggcatggttaaacatctcgccggaatataacccgtataaatacaactccttcccggtcaatgcggcgcgccagtcatggctcttgacccaggccctgcaggagcaaatggggcgggatgcccgggagcacagactggaccagctgccgccggtactcgcattccagtcggtgatggattcaacggtcagcacccgcgccgtggtcaccggcttatttgacctgcttccggcgaacggcagcgagctggttgtatttgatatcaatcaggccgccagcttccgtcctctctttaaaccggggtttggggagcaacggaacagtaaacgctgttaa

SEQ ID NO: 155662 - DNA, 555 bp, Enterobacter cloacae
atggatgagaaagtaatggctttagctactcttaaagctgcaaaagatgcggccgattgggcgttttggtcaatgattgggacttggttcgctggtatagctacttttttagctgtctgtgtttcgctgcatttggggttgagaaaaccaaaagcccatataaattgcaaaacttcaatatccgtcttttttagtgggccgtataaaaaaaagggtgtctcaattattattacaaatctgtctctctacacggtaaaaattacgtctgtagtatgggagttcaagaaaagtgtaaccttttatcagcctttctattctgaatactccatgaaattacctcaaaaattggaatatggcgagcaggccactctatggatagatttggaaggggatacgaattggattgaagaaattgccaaggggttgaaagaacaaggtgccaatccaaaagactttagatgtgtagtaagtacgacaactggcgaaagcttcacctttaaagttaataattccctgcttgaacaaatcgaaagcagctatcaccaggtctcctag

SEQ ID NO: 155663 - DNA, 516 bp, Enterobacter cloacae
gtgaaatttaatattttcacaatcgtgatagttgttattgctggtctgtcagtcgcactcgttaaaagttgctcagacgccagcggcctacagagtgataacgaggttctgcgcagtgacaatgctctgcagaagcaggtaatcgctactcaggcattcaacttcaatcgattcaatcaggttgcagaacatgccaataggctcaactctctgattgacaccagcaccgaagaaaccgtaatcgaataccgggagattctccgccgtgaaaaaacctgtgatctgcctgttcctgctgacattgctggtgggctgctcgaatacgcgcaccgtttacgtgccagcgccatgcacaccgattccgggagcactgacgcagccggtgatagcaccgctaccgccggctcaataacgtactgccaggctgtgctttggattcagccgctgttggctgttattgagaaggggaacaataacttcgctggcattcggcagattgaagaaaatcggcaatga

SEQ ID NO: 155664 - DNA, 678 bp, Enterobacter cloacae
atgaagcctgaggccgttgtcttcgatcttgatggtgtgatcaccgataccgcacatctgcattttctggcctggcgtgccgtggcgcaggaaattggcatctcgctcgacgtggcgttcaacgacaagctgaaagggataagccgtatggaatcgctgcagcggatcctgcgccatggcggaaaagagggggagtttaacgaccagcagcggcaggcgctcgcggataaaaagaacgcgcgctacgttgggtctctggcgtcgttgacgcaggattctctgcttccgggcatccgcgaggtgctggcggaaattcgtgcggcgaacgtcaaaatcgggctggcttctgtgtcccttaacgcccccggtattttgcaggcgctgggcattgagagggcttttgatttctgcgccgatgcctcgcgcattgcccgctcaaaaccggacccggagatctttcttgcggcctgcgccgggctgaacgtgcgccccgagcaggctattggaatcgaagatgctgcagccggcgttgaggcaatcaacgcggcgggaatgctctcggtcgggattgggcctggcctgaaccatgcgggattacaacttcattcaacgcaggaactgacctggaaatgcctgacggatttctgggcatgccgaacggtaatgataaggaattaa

SEQ ID NO: 155665 - DNA, 555 bp, Enterobacter cloacae
atggtatacggtggctcagtcatgaaaatattcaaaaattttattccttactacccggagtcggatgaactcccggaaaatgttttatttttagtatctgctgacggtatggactggtatgaagcgcaaaaggaatttagtgataactctctcaagataatgtttgattctgatggggtgatttgttgcgccgaaatggatgcatcacgactctggccggttaattgttctgtggccgggattgaaagcaaaaaagtacctgatggttttgaagttggtgcaggtaagtggatatttgatggtgaaaaaattactgcgcgggaattgagtcaggccgaaattgaaaccagagcgcaagccgataaatcgcgccttatgaatgccgctaccactgcaatttccaccttgcaggactctgtagatttgggtatggcgacagccgaggaaaatgcgcttctacctgcatggaaaatttaccgcgtgctgttaaatcgggtagacgttaccgcagcgccggatattgactggccagaggtgcctggcaatgtggcgtga

SEQ ID NO: 155666 - DNA, 531 bp, Enterobacter cloacae
atggataaattaattttgctcgtcaaccatcctttggacgggctgatgcttttgatcggcggtgcgatagcctctatctttggtactgtcataaaagacggcattttgaaaattttaagccttttctcctcaaaatttaaaaaaaggagaatgagcatccgtagaaatttgcatcagctagctcacctgttgatgcaggactcaacttatatgtcattgtacctattcagaacagtacgtatgtctgtgctttggagtacataccttttactctgcattcttgtaagtaatttgatgtatcaaaagttagatttttttgaagtcaaatcttctcttggactcgaaatgccgtcctttacggactttagcaatagtgatgtggttttagttcatttcttgatggttagcatacttgtaacggcttacttagttttttcatgtgggtataaggtatctaaccagttgcgcattattcaaaaagccctacagataagagcaagacaacttcgatttgaccatatacttaagtag

SEQ ID NO: 155667 - DNA, 540 bp, Enterobacter cloacae
atgcttttagcaatggaagtaatcctaatgattacctgcggcgttgtcgtaggaatgaatttgggaaataaaaaaaagacaaacagcactttgattaattgcgtgattgttgctgtattttttatcggcctttattttatattcaggtctttacatatcattgccgctcatatttttaccggatttgctttattcggaactatgggaatactttttgataacaagaccaaaccttccaatgcagcgcctgagcagtcagcaatagaccaaccaatacaaattcctgcatcgttgaattcgtctaactatcaacttatttcttttagttacctcaatgcctttaacgaaaaaagcttcagagaagtcgatgtgaaagaagtagatgaggtgcatattactggttattgccatttacgcagacagttgcgcacatttcgtattgataggattgagggtcaagaaattgttctccgcgactctggcgaagtcttcaacgtatacgactggattacgctgctttatccacttccagaggtgtaa

SEQ ID NO: 155668 - DNA, 624 bp, Enterobacter cloacae
atgtcaacaaacaacttcgcaaaacaggatgatttaaacctgattcgagattgcatcgcacagaatcgcggcgggaaagaggtcatcgcccgcatacttgaggcgtatggatttaccactcgaatcaccctctgcaggcagctcggcgtgtctcaaagcacaatggctaacaggtatgcgcgtgataccttccctgcggattgggtaatcgtctgtcatcttgaaacgggagcttcgttaatctggcttagcaccggttctggaagcaaatttgtagataacagagatgaccgttcaatccatctgaaacacatcgacatcacaaatgggaacttaacaacccagaacgacgtgatagttgacgtttcaaccattcctgagggattgaaatcacctttcattttgacgtctgacaaaattagctatatggctgatagctatgacggcgagttagtagatggtttctggtttatcgagatcgatggcattgccagtgtccgtgaggtgtaccgctttccagctggacgtgtacgtatagagaatggaaaggcatcttttgaatgtgccgtaacagacgttaaagtattggggaaaatcatcagtaaaactgaattcatggattaa

SEQ ID NO: 155669 - DNA, 528 bp, Enterobacter cloacae
atgagcgtaacgtaccttattgcttttcgccataccacacatgaaaagtcattttttagctttatgtgtgacttcatgacatcctggcgttggatcgccaggcagaatttgtcgccgatcacatccggagaattctgcataaaaattttttgtgaaattaatcacaatccagaaacaaactcacgacaatcaagtgtgattcatatcacagaagtgggtggtttttgcgttatttatcgccatcgtattttttttatccaccgtttttgtgacgaagatcacttcattcatgtctgcaccccctacatttacgtgattcatatcacacaaatttccatcgtctggacagttgaacgattcagtgccagatttcacagcatcagaacagggcccggctacctctgccgcctcattaacaataaacctcgggccgcaagcctaagcgtaaacagaagaaggggtgttttatgtcatccgatttcaagatcaaagttcaaagctttggtcgtttcctcagcaatatggtga

SEQ ID NO: 155670 - DNA, 738 bp, Enterobacter cloacae; identical to SEQ ID NO: 85991

SEQ ID NO: 155671 - DNA, 909 bp, Enterobacter cloacae; identical to SEQ ID NO: 85989

SEQ ID NO: 155672 - DNA, 222 bp, Enterobacter cloacae
atgcgtcccaacattacaatcgccatccccacaccttacctgcctattgatgaatactgtcggatcaccggaacgcctatgggtactgcccgcgatatggtacgcgatggtcgtctgcctatccgtggaaagggcgacaagccaaaagcacgtgttgaaatcaatatggccgcgctaaccgtccaggcattaagcgaatgcaatatttcgcttaacgcgtaa

SEQ ID NO: 155673 - DNA, 591 bp, Enterobacter cloacae
atgagtaaatttcctttcgaacaaatagggcacagtagcgatgtgcttaatcgcgtaatagaagcgtatggttttacttcaaaactacagctggcagatcattttgaaatggcatcaagcagcctttctgcgcggttcaaacgtggcatttttccggctgatatggtggttaggtgtgtagctgaaacgggcgcatctttagaatggttatctactgggcatggcaaaaaatttgatgatgaagaactggatatcatgaagttcccacgcaaaaagcttgttgatgggcagctttatgattccggctatgtcatgtttgataaagtatttttccgtgcaggtacgccactgccaacaacccctatctgcgtgcaggaagaaaaagctcaatacatccttgatcaacaatattctgaagtttttgatggtgaatggcttgttaacattgaaggcaaaactagcataagaacacttacacgaattcctgtaaaaaaggtacgagtcagcggagtaggaatggcttttgattgttccatagatgatatcgaggtcattggtcgagttgtgttagctatctcggagaataattaa

SEQ ID NO: 155674 - DNA, 873 bp, Enterobacter cloacae
atgtctacaaaaaaaaccaccccggattctgaagttattcccgcaaaaactaaaacctgctttgtcatgatgccaatagccgaccacccagactatgagcccgcgcatttcaatcgtgtttaccaatatttgattaaaccagcatgtattaaagccggttaccaacccatcagagcggatgataacaaagcatcaaatatgatcatgttcgatattctcaaaaaaattgttgaatgtgatatggccatttgcgatctgagctctcgtaatgcgaatgttttctacgaacttggtctaaggcaagcatttaataaaaaaacaattttaattacagacaatcggctaccagccccttttgatatttctgcatttagatacgtatcttattctcatactttacgggtagatacggtagaccgtgagatccccggcattatcagtatgctaaaagagacagaaagtcttcctgctgatgatgttaattcaataatcaaactcttacaaattcagccttccaaggttgaaaatatagacttaaataaagaagatagtgtgatgtatagtatgctgattaatatacaaaaacaaatagcagaaattaaatctccttcattaaatttgcaacatagatatgtggatactttcacgaaaactaaacgcccaattgaaatagcggacatgtctggcatcaacttcaatacaataagaaactcattccctaaccaactatttaaccatgaatatatgtttgatgaacattatattgggttcttacacagcatagaagatggagaaattacattttcgaatgaaggagagttaactatttaccctgacgatccaaaccttcttggtaaaatatatgtagcttaa

SEQ ID NO: 155675 - DNA, 483 bp, Enterobacter cloacae
atgagcacttccgatataattgcaactctaagtttaataatttcctgcgcggcttttattatgccttattggcgtgatcacaaggctaagaagaaagaaagacgaaaggaatttcttgagatttttactcgttcaccttggtcgaacgagggggatgtactcacaactcccaaagcacattacacattagatttaaaaaagggagacggtctttctaatgtctatggaaccctatggatcaacgttgacgaacgatattatgaatttagtggtgatattgactcaaaaggcgtcctgaaaaccaaaatgaaaattccaattggaaaatggggagcttacatcgcaaaagcaaaatttagctactctgaagaaaccgataaaatcacatacatatttgatggttttattgataacaaggagatggcttcagaaaatgatgttttagacaccgttcagcaactttggcgagctacgacagcataa

SEQ ID NO: 155676 - DNA, 288 bp, Enterobacter cloacae
atgaaaggtaatttattgatattttgcagtttgttgttgccgttcagtgccaatgctgggcgtataactatgagcaaccccgagcagacaaccacggcgaacgggcaaaccttgtgtgtatattccaacagcatttacactttcacctacgtcaccaaatcaaagtactgcccctatagcaggaccttcgatacggctgacggcgagtggggtctcagggcttttgttgcgatacaaaatgggatacagtctgtaacacaagacaactccagcgccgcagatgcctga

SEQ ID NO: 155677 - DNA, 282 bp, Enterobacter cloacae
atggtgtactactactttttagctaaggaggctgttttgaaaaagatttttgcggtgtttctggggcttggtatatgcaatagtgtgctggcggatgatggctcacctgaactgaaatcagaaagtcaggctgttgttcgtgatgctggttatcaatgtgacaaagtgaatggtgtcttccctgcggcttttggtggctcagtctctgtgttctgcgatgacgtatatcagtacacaattaaggacaaaggcgggcggtacattgtcgaagttgatgattaa

SEQ ID NO: 155678 - DNA, 633 bp, Enterobacter cloacae
atggcgatgaaatcttgcagggagtgcggacagagggtttcctcagaggcgaaagtttgccccggttgtggagtaaaaaaaccatatcaatctccggttcgcgggttaattttcattggtattgttgttatcgccatctataaagggtgtagcggtgaggggagtagcacaagtaactcatatcattcaaatgatgttgccagcagtaatgcaccaacaagtcagccatttgtttcgccggacgttgttaaggttaaaaaggcccccccagtcaatctgtcgccagctagcaccgcgccctttacagtggctcaggtgtgcaaagccacgatagcgggaatgtttggacacgatattggcagcattaaaacagctaaagcggggaccaaaggggtctttactattttgtatcgtcgtccgtcggatggtcaaaatttctcattcgactgcaaactctctgatgacaatgtgatctggaaagaatcaggtaaaagtagcaatcgctggaatggtacaggaaatgttgaatttaacgtggtgttcacaatcaaggattcaacgctcactattaccgagttgcatgcagattctgatgacgtaacgtacaaattttcaaagaaagatttccggtaa

SEQ ID NO: 155679 - DNA, 1005 bp, Enterobacter cloacae
atgaagatgagcatgctacgtaaagaactccaagttaagaagcggcatcactacgtatgggcaaattatctcgcccgttggggaaatggaacaagcaatgttttttacactaccaagctcggtaaaatcgcccatgatagcgtgcgtgggatagcagttgacgattacttttatagaacgactgcactgaataaaaagcatgtatctgtaataaaaggattttcaaaacaaagccctgaccatcttcataaacagcacatgtcatacctaaatgatttcctcctgatgcagcatttagaaaccatctatcgcgcgtctggcattcaagatcaagaagccgaggcacttttaaacgcatcacaatgtaacttgatggagaatctccattcatctcacgaagatgctgcgttagaggtgctcacagcacttgctgacgagcagcttgaaattctggaagataagcagcacatgcttgagtttatgattttcttgggccaacaaatcgtccgaacaaaggcttaccgggatgaggtattgaggcggttacatcgtcgtagtgatttagaagttgaagtcgctgacgcggtagcacattcatggtggttcttaagttacatgttcgggatgaatattggattcagcctattttcaagtcgccatgactcaagacatgcattgctagtaaatgataccgatatcccttttatcacctccgatcatccagtcgttaatgtacatccgtgtgtctcagagacggagttgtcagtaccagagcatgccgatttctattacccaatttcaccgcgtattgcctatatcatctgcgattcagaacgctttactcctgggaagcatagtgtccatgaagcggttgtgaacgagtttaattccaaagttgcagcccaagcaatggtacatcttattggtaacaacgacgccgtcattcggcctttaaagaaacatattggccgtcgctatcagaagaacgatagcacctccttataa

SEQ ID NO: 155680 - DNA, 309 bp, Enterobacter cloacae
atgggatacaccaacggttgcaccatcccccatacactccgccgccacgacatttactatgtctactttcgatttactgaacgtcagttttttcgttgttctttggagactgatagccctcgccgctgccggtttatcatttctcgccttagcccgtacataccgctcttcagacttggtaggatagggcgcggacaacttctcaagataataaaaacgatgaaaaaactaacggcgcaggacattgatttattcgtagcgggtatgaacgctgagatcttgcagtatgtggaagatattcccggctaa

SEQ ID NO: 155681 - DNA, 1119 bp, Enterobacter cloacae
atgaacaactactcagatgtaacacgtttatacactatggaaggtgcaacgcatatttattcaagtgagcctgccttactgaccacggctgatctttaccaagtcaatcgcaatcctgcctatctgaaggcattagaaggctgtaatatttatcttattacttgtcgtgagcggatatttattaagccagaaaaatttttactgaatggtaggactgttattggttcatttcttgttaaaagagtggctggctttgttgaggtaccgtttgaatattacatctctaaagaaattgtgccggaagaataccaaatcatcgatattgctgttgatttaaacggaactaaacttgttataataactgaaaatataaaacagattgtatctgttagtaatctgattgcagaggcccgttcaaaattacttcccactgatactgatctaagagttatgtatgttggtcaaggtattgggcgaaaagggacgcgtactgctgttgacagattgcgagctcattcaactttacaacgtattcttgcagaaatgagtactcattttccatcattcgaagtattactgctactttatcggtttgagcatggacgaaccattataagcaatggtggcaatatgaatgtagaaccgctttcttcaacaacagaagattcgctccatttcaacagactaagtaatgtgaaattgactcgtgctgatatagtttctttaaccgaagcgggattaataaactattttaaacccgaatataacgttttaattaagcattctgattttgcatcaaggtcacgcttgaaaattcttaatcgccttctaaatattggtattaccggtctgataatagagatttgtagtgcgaatattcgatctagaattggaactgaacatgctataccaaaagatctcgcggatttgtatacatctgatattttagaaggaaaaaatatcaaggatgcagaaatacgtaaacaatggcaatccgagttatatgtccagagccatagtcattgtgcctcatttcctttaacaaacacatatgaaagaaatacctttttgcatggaactatattcatcgatgatagtgaggttccattcaatacttaa

SEQ ID NO: 155682 - DNA, 210 bp, Enterobacter cloacae
atgcaccgcgacgccgtatcatcgtcaaacattatgtctgctggttatgattccgccagtgaaaccatggaaatcgaatttaaggatggggctgtttaccaatactataatgttaatgagcatctttacgagcaattcaaatcagccccttctaagggacaattttttaatatgtatataaagcatgctgttccattttcgagagtttga

SEQ ID NO: 155683 - DNA, 1833 bp, Enterobacter cloacae
atgagtggtaatgatccgacatatttaggtgccgttagtgctgtctcaggcgccaccctcactataaaacttgctgagtccttagactccggctttgccgtcattaaaggacatacatatcgagttggccaagtaggcagttttgtcagaattcctcagggctatcaggacctatttggtatcgtttctgagatcggggccactgccgcaccctcacaatctgatgtttctgaaattgactcaggtagatggatgacagtccagcttgctggtgaaacagtcggtggtcaattcgaaagaggcttaagccagcatcctaatataaatgactcagtacacttggttactgaagctgatctaagaagaatctacggttcaatcggtgacgaccaagtgagcataggacatcttgcgagcgcggaaaacattgacgtacgtctttctttagatgctcttgtaacgcgccattcagcaatactagggtcaactggggcaggtaaatccacaactgtcgctagcctcctgagatcaattattcggaaagatgaaattcagggatcacctggcgctcgtatccttatgctcgacatccacggtgagtacactaaagctttggaagacgtatcgactgttttcagtgcaacccctaaccaggatcaaaaacctttatttgttccctattgggctttagaggctggtgaacttttagatttcataacaggagggctttctgaagctcacgaaattgccttcacagataaaattgtggagttaaaagacaagggcattaaagtaaatccaagagcaggtattgattctagaactcttactgtagatagcccggtaccgtttagcttaaaacgactttggtatgaattagttgattttgaaacaaccacctatatcggtgcaaatcgtgatgaacctgcgcttgaagaatctggggatgcagaaaccttggtcgcgccaaagtatcaacctcatgcaatgggtgccaaagggccattcaccaacacagcagctagaggtattcgaagaccattaaatttacttcgttcccgcctactagatcgccgctatgattttcttcttcatcctggcgattgggagcctgacctaacgggagcagttaaaacagatctcgacaaactgttagaaggttggctcggccatgataaacaaatcactatattggatttgtccggagtccctagcggagttttgactcgactcatcggttctattttacgtattgtttatgaagcacttttttggagtcgggaaaaatcagagggaggtgtagagcgtcctcttttagtagtgatggaggaggctcatcgttatcttggacctgatgctggaacagtcgcctctgaagtggtaaaacgcatagcaaaagaaggtcgtaaatatggtgtaggtgctatgattgtgtcccagcgaccagcagaagtagatgagaccgttttatctcaatgtggcacgatcatcgcgcttcggttatcaaatcccgtagatcgtgcgcgtgtgaaaggaactttgccggataacttagccgggctgatggaccttttgcccgtgttgagaactggtgaagcaataattaccggggaagctgctcgactccctgtccgctgtcgcattactttgccctgcaaaaagcacttaccacgtagtaatgatcccaaggtaacccaagcctgggcgagtaggcgttcagccgaaggctatgaccgtgtggttgcctcttggcgtagtcagcagactaatgcagttgtccaaaaacttgaaatcacccgttcaccaatcgaagatgaacctgaggagagctaa

SEQ ID NO: 155684 - DNA, 1263 bp, Enterobacter cloacae
atggaaacgttccacaatccagatcggtttatgtctgatttgcgccaggtactatcacagggtaggaagcgtattggaattcttgttggcgcaggagcaccactcgcaatccgcgtaaatgaaaaaaatgaaatcgacccaaatggaaaatcgcttattccgggcgtcgaggcattgacattccaagcaacctccgggttgacagagattcaaacgaaggcggtagaagcaataaaagcaagtttgggaagtaccgctaatattgagtcagttctatcacgtatccgtttattagagcaagcgctggggaaaacgaaagtcgaggggctagactcaaaagagtataggcaactaggcaaagatatttgtaaaaaaatttctgaaatagtcggagtttatttacccaaagaacgaaacgcatattctgatttaattgcatggattactggtaccgttcggtcgaactctgtagaaatattcactacgaattatgattttcttttcgaagaggcatttgaacgcgttaggtctccttattttgacgggttttctggcggcagcaagcctttctttgaccctgtatcagtagcaggcgacgacttacctgctcgatgggcaaagctatggaagatgcatggttccctaggctgggctttggaagacggggcggttgtccgaggacatggtagagaggccgccgaattagtttacccggaccatttaaaatatgacctaactcaaaaacaaccttattctgctctctttgagagacttaaaaggtttttacttacccccgactctttgttgctcacggttggattttcatttagggatgcacatatttgtgccgttcttgatgaaagtttggctatgaacgccaatacggcagttttggcgtttcaatatcaagatcttgcaaaggaagagccagctgtaaaattagcaagtgacagacctaacctgagcgtctacgcagcagatggagccgtcattggaggagtttcaggaaaatggcgtccaggggagttacctaaaaactggggaagtattcgtgaaagtttctgggcagcacggtggccgaaagagccaaataaatttttattaggggactttgcagcttttgctcgcttctgtgcattagctcaagcaaatgacttgatagcacaatctttgaaaagggatgaaccagataaagctgaggatgaaaccaatggaagcggcagaaatgcggttgagctagaggaaggccaagatgagtggtaa

SEQ ID NO: 155685 - DNA, 876 bp, Enterobacter cloacae
atgtggacgctagatgatctacgtatgttggataaaaaatatgctgaggaaggtattcacgttcatcaaagaccgctgaacgccgcaattgaacttcttggaacaagtttcagccttggtattattagtaatcccgaggttcagcgcatcgtagatgcttacactaccatgatacctgaagtcgaaacaagttggcctggtgcaggaataggtctaattgcatctatggatcaagtgaggaaaacaacttttcctattttatacggggagaacaatctagaaatctggaaaatagcaggattttcaagtgacgaagaatggtgggaatggtgtagaaaagaacgaactattgctgcagaagtttcttttgctattgctgatattcatgatttcactatggggctaaatgaaattgaaaattgtgcatcagaggctttgacactctggcaaatgtgcagatccaatctagaagatatggcaaatacactgcctaatagctttagccatgattcaattatccagccgatctgtatggtagcagagctttccttaaaagctgttttagtttggcacggagtcgatctaaaaactttgaaaggaaagaatggccataatctggcgtatttggcacaaacagttatggataaaaaaccccatcgtgacgatagtcaaattaaaaccgtgattgataacctccccccttacgtagccagtcgctataaaccggcaggacttaaacgtctacaagttgttcggttagctcttggagttcaatttattgcagcatctagtttacgtcgaatcactacgtcagatttagctatacaaatggaatcaggagggtttccggggccacgtcaagtattcactatttga

SEQ ID NO: 155686 - DNA, 165 bp, Enterobacter cloacae
atgtatgacgttcatgtgattttcgacgctacgccaggggaactggcgcgatttggccagctgctggggtgtaatggtgtggggctggagggcggcggtgtgtttggtaccgaagcccatttcctggtggaagagggcgaaaaaagcccatcgcgtgctgcttga

SEQ ID NO: 155687 - DNA, 1092 bp, Enterobacter cloacae
gtgctgaccctctctaaggaactgaacttgttaaacaaaaaagtactttctcagatacaggatgtggctggtagcggcaatatgtctcccgcagagatggctgagtggttagatactcattctgaagacatagagcatttagttgcgttgaaaatgttcgagtatttggatgaggctaaaggggaggtattaaaggatcattacgaaaatttagatgcatttacaggaagactatttacaacatgggagtcccctttaaagcggctggatgcattaatttatgggtgtactgaaatcagtaatgaggtaaacagtgagtatcgcaccggttctggagaaaggtccgcaaaactgaacataaccacccgactgcacgcacgtgctgtccaggtttcctgcgagatatctcatcttctaaagggtggctttgcagacggtgcaatggcccgttggagaacgctccatgaaaccacggccatattgatatttattgcagaaggcgacgaagacctggcgaaaagattcacggattttcagagcatacagaggcgaaaagctgctaatcgctataataaatatagtgaagagttgggttttacttctttctccccagaagatttaagtcggtttgatctcgaaagaaatgatatcgttggtaagtatgaagcgggtttcggcaatgaattaggttgggccgcaaaagctttaggaaaagaacccagtgccagaactaaggttcgctttagtgatattgaggaatttgtcgagctggactttttgcgaccgcactacggctttgccaaccagtatattcatgcaggaattgacagcattggcttcaagctcggtacatcgctttcaaataaagatctcttgctatgcggaccatctaatgaagggctgttagagccgattcagtgcaccagcttgtccttaatacaggccactcaggcgataatctcagtttcaccaaacgatcaacgtttgctatatagctccgtgctctggttgtggcatgagaagttgaaagaagaagttattgccgcatctgatgccctaatcaagaaaggtgaagctgataattttgaataa

SEQ ID NO: 155688 - DNA, 1419 bp, Enterobacter cloacae
atgccgcctgagtacaatttattcgcttttcgtcgaggcgcgatcacggcccctgctggttgtggcaagacgcaactcatcgccgatacactgtcccaacatactggggcaaagccggttctcatcctcactcataccaatgcgggtgttacaacactgcgtctgcgcatgcaaaaagccggagtgcccgcttcggcttaccacattgccacaattgatggtttttccatgcggctggtggcgatgtttccgcagcgaagcgctgttactgctgctgtccttctgctccagaatcccggagccgactacccagcaatacgcatggctgccaggcatttacttcaaagcgggcacctcaatgaggtcctcgcagcaagctatgcccatctgattgtcgatgagtaccaggactgcaatttagtgcaacacgatctcgttacagcactttccatggtacttcccacatgtgttcttggcgacccgatgcaggctatcttcggctttcgcggtaatcagcttgtggactggaatacccacgtgcttccgcattttcctgctatcggcgagcttaaccagccttggcgctggacgaacgcaggcaagcccgaatttggccaatggcttctggagtgtcggcgaatactcctagcaggaggtggcattgatttacgccaggccccgccggaggttgtctgggtcgagttgcaaccggctactgccattcagcagcggctcaccgctgcgttaacacaggctgttacgcgggaaggagacgttctggtgattggcgatagccgtaaccctcgtggccgccagcaaatggccagtcagacaccgggtgctgctgcagtagagcccgtcgacctcgccgacctcacgttgtttggaacgacattcaacctgcagtctgctgacgcactgatttgtttagtggagtttgcctcagaggttatgacgcaggtcggagtagctgttttgcagcgccgactggagagcttacgcagggggactgcacacaatccagcgactgaagcagaagccgcactgctcgctttcactaatgccccaagttttcccttggccatcgaggcactacgcgcattgaccaagcaaaacaatgcccgagtctatcgtccggatgtgttgtattgctgtctgcgcgcgatgcaaatagctgcggaggggagttgcagctttgccgaggccacggtgcgggagcgcgaacgaaaccgacacgagattcggccccttgcgcaacgtgccattggtagtactctgttgctgaagggactagaggcggaagtggccgttataaccgccactgaggagatggatgcccgacatctctacgtagccttcactcgcggatcgaagaagctggttgtctgctcgtttactcccgtattgatgccccgctag

SEQ ID NO: 155689 - DNA, 1737 bp, Enterobacter cloacae
gtgaccagaatttgtaaagtcgagatccagaatttccgaactatccgtttattgaactggctaccttcaccaggcctcaactgcctgattggcccaggagacagcggtaagactactattctcgatgcgattgacctttgccttggtgcccgccgcaatatcagttttgccgatactgatttttatgggctggatgtcacccagcccatcagcatcactctgacgcttggttcgttgcccggtgctctgatgcgcttggattcgtacggaaattatttacaggccttcgaccgtgcaaacgggttagtcaccgaagaacctgaacagggtctggaaacggttctttgcttacgtttgacagtggatagcgagctagagcctgtctggtcgctagtatcacagcgcgctcaggcacaagggcaggagcgcaatattgcttggaaggatcggttactgttagccccagcccggctcgggacttatgctagttccaacctgtcatggacacgcggttcgatactcaatcgactgaccgcagaacgaccaaatcttggcgctgaattggccaatgcggcacgccaggcccgaaacggtttcggcggtcaggctggtgtacagctggccgcaacactgcaaatcgtgaaccagaaagccaatgaacttggcgtgccagtgggtggcggcacccaggcattgctggacgcgcacgctgtatcgatcggcgacggagccattgcgctacacgatgctacaggagtgcccttgcgctcactgggaacaggctcatctcgtctactggtcgcaggaatgcagcgtgcagcaacacagcaggcgtctgtcgctctggtcgacgaagtagagtacggactggaaccgcatcgccttacccgattgttgaactcccttggtgcgaaggaaaattccccacccctccaggtatttctaaccacccattccccggtcgctgtccgcgagcttaacggcaatcagctcttcgtggtacgtaagtctccggatggtgcacatcaggttctccaggtaggtgtcgctgatgatattcaaagcaccgttagggctgatccggaagcgtttctcgctcgtagcgtcatagtctgcgagggtgccagtgaagttggtctaattcgtggcctggaccatttctggacgaacataaacggagcgtcgatgctagccgctgggactgcatatgtgaatgtcggcggcggagagcctgaccggtgctttgttcgcggactcgcattgcgccagcttggctatcgggtattggtcatggttgatgcagataagccgcccactgcggcgaccgtacaggcctacgtggatgctggtggggagtacatcacttggcgagaaggacgtgctctggaagacgaactgtttctgagtctgccggatgcgggtgtggatgctctgcttcagcgagccatagaccttgtggaagaagatttggtggctgcgcatatccagactcagtcaaacggacaactggctctcgcccaaatccggctgcagcgacaacagctaggtatgccatatcccctcgcaacgcgacaactactggggctggcagcgcgtaaccgtaaaaacggttggtttaaatcggtcaccaaattcgaggatgtggcacgcgatattcttggtccctattgccaaatctcagagccagaatttgtcgctatgatcactcgcctctaccggtgggctcatgccgcctga

SEQ ID NO: 155690 - DNA, 903 bp, Enterobacter cloacae
atgaagtccagaaacgggccaaacggagtgcatttcttcgatcggaatacaggtttgaacatcctattagacgaattgcaccttcagggggcagtttggtcgacgtctccccgtcaagtctcaatagcactcaccaatctttgcgatctccattgcgcgtactgttttgcgcccaaacacaaggcagtgctgcatactgaccaagtacttagctggttaaaggaattggatactgaaggatgcttcggcatcggctttggcggaggggaaccaactctccatccagatttcgtcgaaatatgcaaacgggctgccggggaaactcagcttgccgttacattcacgacccatggtcatcgtttgtcgcaacaattagttaaacacctcaaaggatcaattcacttcgcgcgtattagcgttgacgggacaggcagtacctatgaagaactgcgcggaaaaccttttgccaatttacttaagggaattgaatcgattgcaacattgtcgccctttggaataaacgtcgtgataaacgaacgtacagtctttgagcttgatgcagtaactgagctggcgcaacagtttggagctagtgaattgctgttattgcctcagcaagcaactaacgcggtcgcaagtatgaatgaagtggtcggccgagagcttaagaactgggtctccaactatagaggagaggttcgacttgcagtaagtgaggtgggagcgtcaggactacccatatgcgatcctcttcctgatgaaactggccttcgagcctacgcgcacatagacgcttccggcatattgcgtatgagttcttattcaaccaccggtgtggatattggcgaaaccggtgttctgtcagcgcttaagcgacttcgtaataccttagagatgaaataa

SEQ ID NO: 155691 - DNA, 408 bp, Enterobacter cloacae
atgaaaatttggaacggatatggttctgagcattcgatgaacttagttctcatcggaaaattcaagcaagagcaagatgcagagaaggtcgagaaggatattaaaacgctcagtactcaggctgagaaagatgaatgttactcgatcccttttgatgagccagagaatcaacggttttcagatgaaatgctctcattactatgcagcctaaaactccacactttaggaccaaccgatcttggtcaattggtgtcagatcatcatctagatcgagaaggcgatagaataacaataactactgatgaggcagaggtatccgcgttcgtgaagctgtttgtcgaggctggagcaaaggtcgagattttctcagcgcatgactatccgtccgattccagcgatgccagttga

SEQ ID NO: 155692 - DNA, 4026 bp, Enterobacter cloacae
atgcctgaagtaaattggaaagtattcaacgaactgcccggtgcagcagatgtgaacttcgaaaacctttgccgcgctctggtacgccgacactatggtcgtttcggtcgctttaagcaacttgcaaatcagcctggggtggagtttcacctcgagctgacggagccttgtgatctcggtgcgccaccaggctggattggttggcaatgcaagtggtatgagctggtgaatggacaagatttgggagcctcccgccgcaacaagatcatcgaaggtatcgaaaagacgcgtaagcatgtccctggagtaaccaattggaagctttggactcatcacacgttaacaaaaggtgatcaagagtggtttttcgcgctagagcgagaccgcttccccgaattgaagttagaactgctcactgctactgatatcgaagatcttttggtcggaccgggagcgcttttacgggaaacctactttggtgaactggttctaaccccagagctaattgctgagcagtataagcttgccgtggctccatttaagaaccgctaccagccagacgttcatgtatcggtgggggctgaggagaatatattcaggcatctgtgcagccaaaacgcatgggaatctctggaagaactctcaaacgctttaaaaaagaattatacgagcattgcttcggttactgagcaactcaaaattgagctcaggactgaagttgaattactcctgtcccgggttattgggttgactgagtttattgatggtttacacacggcgctcggcaaaggtgactttaactctgtacatcaagcgttggtttcaaatcctcgtcagccggtacgttatgacaggctactttcgaaattgcgtggagctcgctttgacggggctccgttaaccgctaatttggttgcagatattcacatggtttcgtctgttctccgcagtctggagcagtcaattggtgctcgggcagttgctgtacttgcggcggcaggtgaaggtaaatctgaacttgcagtcaaggtaacccagccagaaggggaattcccagggggaattctcctattgggtaagaatcttcattcaggtcaagggcttgatgatctcgtaactgccttcaagatttctgggaggccagcagaaagtttcgaccgcctgattgaggccgtagatgcggcaggccagcgtgcaggcaaacgcatacctattgttattgacggtctgaatgaggcggaagatccgagaaattggagggatgaattatcccgagcggatgagcttctaaagaattttccttatgttttgttagttgtcactcttcgcaatgaatttgcccagatgtgtctgcctgaggggtttccccaagttgaacataacgggtttcaggaagatccgaagacagcatttgacaagtactttgagtactacaagatcgatgctaccgatgcggatctaccagtcgaactcttgcagcaccccttaacactgagaattttttgcgaagtagcaaattctcctcgtcagcatattgtcggagtggaagcattgccccgttcgcttgcaagcctgttcgaagcacattttaacaaggttgccgcacgagtcgctgagctttcaccggcgatgcatcgcatttatcaagatgacgttcaggatgcactactgacgatcgcgggtcttctttgggataacaatgcgagaagtgtggattttcaagctacacggacggcagttcgggatatggggtggaacgatagtattattcgtgcactggagtctgaaggcatactagttaggactatttctcaagaaggtaggcaaggagttgcgtttgcatacgacctaatggccggacatatgatggcgcaccacctgctcaggaagcctgagttggtccaatggttaaaaagcgatgaagggagcgcaaaatttaaatctcatggacctgattcgcataccttcgcttatgacgtattccgggctctggttgatctgtatccgcaacactctggtaggcggcagctttggcaagacttgtcggatgatatactcgttatgaacgctctgttattgacgacgcaatcggacccaagatatatcgggcgggctactgttgaacgatttgctcaagctatgcaggagtcgaagcgatttgcacaatttgccttcgagaagctacggagcatcagggctgcactagcacatccgtttgatatgagctttttgcatgatgtgctaatggcgatgtccaatactcagcgcgatcttttttggtccgagtggattcgtcaaaaatctgaacaagttaaagatgacttaaaattcttgtcgacgagatggaaattgggtcatctggatgagcgtgaacttcggagagttcgctgggtgatgtggacattgacgacgacatccagagctttgcgggatatggctaccaaagccctgtatgaatttgccatcaggcggccagaagagtttttccggttggcgatggagacaaatgcagtttcagacccatatgtccccgagcgagtgttcgccgcagcctacggtgcagtcctgaccacttggtcggatatcgatgcagtagagttacatgatgcgttgccacggttcgctcgtgagatttaccaaaccatgtttgtacctgatgctacagctcctacttggcatgcgttatatcaacagtactgcctgggaatcattgccattgcaaggatggtagatccaaattgtttttcagaggatgaagctgctcatcttgttccgccttttagccatctgcctaacgtatttaaaagcattcgtcagtacgatacagcagtcatcaagcaagcgcagagcgcagcgattcgaatggacttcggtaactatacgattgggagacttattccacatcgatcgaactacgatgacagcaacccagagtaccaacaggtgttgaaggcaattatttctcgaatgctggtgcttggttatgaccctgagcagttcgaagctattgatcggcaaatgtattccggctctcgtatgggagaagacaaacacaaaatcgatcgatatggcaaaaagtacggctggatagcttacttcgagatgtggggactgcgatacgcgcagggcctcctttccgaagaccgcagcgctcgtccatcggacgcagatatcgacccgacgttcccgctagacgctatgagcattgatttgccacttccagccttgttcagcgaacagtcgtcggatgatggggattggatcatgaggggtccgcaacctgactaccgtagcatccttgagattacggaaattgatggtctgacggggccatggatcctacttgacggttttgttgagcaaaatgctacctcggatgaccggcagattttcactttcctgcgaggagtattcgtagatagccaagaagttgacaatttatgtaggttgttcactgatcttgaatatcctggcaacagcgccatccctgatgctcctggctactattacacctatgctggtgagatgcctttctcgtcgattccggggctgctagtcgcaaatgaacaagaggatgatagtgatgaaaattcggtgtccgcagacagatggtcaggcaatggcgttgcggtagatatcactgtgcaggactacaactgggagagttaccatagcgtggagaaccaaagcagcggtgcgagcctaccctcaaagcaactttgtgaggctttgaatctcagataccgtgcaaacacatgggatttgcatgatgcagcaggtgtggcttcactgtaccgcaaagttagcgagtatgattcggctgtcagtggctcagtcagttatctgcgccgtgatctacttgatcgttacttgatgcaatccggcaaggtattggtatggcttatgtggggggagcgtggttttcattaccgctccaacaagacgcacaatttgcacaggtattacgtgaatcaccaacatattcacaagcgtattcatatccatcaggtagcttctgagtgctag

SEQ ID NO: 155693 - DNA, 906 bp, Enterobacter cloacae
ttgccacattctcctgttattgagcttcagtctcttgcaagtgatcctaattcggatattgttgcagttttaatgaaagctaagatgattgcagtaaagctagaccttatagaccttgccgagtggatagaattagagataaacggttaccctacgattgcatcagtaccagagtatagatcgggacaaggtcaattgaaggcattcaaccctgtcaatggatggattccggttgatttaggcgtatctgacccgaaaattaccaccccctttacaaccttcaaacttactgaatcgatagcatcaatgaaacggttaagagataaggatatagggactgtaagcctcccaatacctgtaggttatgcccaaatgctacacgctggacagcgttcaaggtatgagattcgctggtttttcagttcagggaaaatcgaccatgtcataaccactgttcgaaataaaatcctcgactggtcacttgaattagagaagcagggtgtttttggggaaggattgatttttaccactacggaaaaagaggttgcaccaatgacagtcaataataccaacatttttcatggagctgtaaacaatgctggagcaatcggagcaggtaatactggtgacattcaacagcaaaattctataagttcgggtgacattgcctctctagagaatgaacttaaaaagtacggcattgcggataatgatctttctgaattgaaacagcttgttgaacaatcaactaaacctacgtctaaaacagaagttgaaaaaagttttggggcatggattggtaagattacagggcaggcgttcaccggtgtgctcaacattgctggcgctgctgctcctgctattctgaccaacgcactatgtcatttctataacatccctgtttga

SEQ ID NO: 155694 - DNA, 903 bp, Enterobacter cloacae
atgattaattcaccagttcttgagcttcaggctttggctagaaatcgtgaaagtgacattattgaagttcttttgaccgccaaaatgatagctgtaaagctaggtttaaaggaccttagtgaatggatggagtatgagattgatggctatcctggggatgctgatcttccagaatataggacggggcaaggtataatccgttactggaacccttatcaagggtggcaaaatctccagttcagaaatgtgcctgcaagtgtcattactacgatacaaacttacaccttgagcgaatcaatttcatcgatgcagtatgctgactctgaagatggcatgtgccgtttagtcattccaccacgtttggtggagctaatcttgaaagggcaggaaacgccatctgaaatttgctggtttttcagtgccaataagttgaagcacattgtcacaacagttagaaacaaaatacttaactggtcattagagcttgaatctcaagggattttaggtatgggtttgttgtttactcaaaatgaaaaagatgccgccccccttacagtcaataataccaacatttttcatggggctgtaaccaatgctggggcaatcggggcaggtaacgcaggcagcattcaacaacacaatgccattaaagccggtgatttcaactctcttgaccaagaacttgaaagtcacggcttcaatgaagaagacaggaaagcactaaaacgaattgtcgatgcattaccagcaccaacaactaggggtgaggtagagcaacgctttagtggctggattggtgacatgactgtgaaagcactgaaaggtgaccttagaatcacgggtggagttgcaccaaatctccttactaatgctctatgcgaatattttaaaatacaactttaa

SEQ ID NO: 155695 - DNA, 876 bp, Enterobacter cloacae
gtgaaaaaatcagaaggtctgcaggccatcgaaaagccactggcatcactcccccacgccattggcaaacatatttttgaccatattcaaaagctcactcactacgaaccggtcatcggcattatgggaaaaacaggcgcagggaaatcgtcgctctgcaatgctctgttccaaagtgaggttacgcccatcagcgatatcagtgcctgtacccgcgacgtgctgcgattccggctgcgcagtgttcaccacagcctaatactcgtagatctacccggtgtaggtgagagtgagcaacgggataaagaatatgaatctttatatcgccgaatcctccctgggctggatttaatcctgtggataatcaaagccgatgatcgtgctttctccgtcgatgaacgcttctacaagcgagtgatgactgaccaccagcatcggacactttttatcgttaaccaggctgacaaaatagagcccagccatgagtggaatgtcaccggcaatgcgccatcaccggaccagtcggttaatatcgaggccaagctggagtccattcgtcagctattttcgccacaccatcctgtgtgcgttgtctcagcgagaacagaatggaatctcccatcaatggtagaaacggtaatgcgttgcctgccggatcgtgccaccagcccattggcggcacaactgcatgggaggttatgcagtgaaccgataaaaaagcaggctcgtgaaggctttggtaatgcggtcggagaagtgtttgattctgctgaagcggcatcatttataccctcgccactaaaagcggtcatccgtactgtccgtgaggcggtggtgtccgttgctcgtgccgtttgggactggattttcttctga

SEQ ID NO: 155696 - DNA, 630 bp, Enterobacter cloacae
atgaaactgcttactactacagcgcttgctgccagctttttcctgggggctgttttcccaactgaagctggaaatattgtcggaactgttaaagcctggcaatacatgcaggctgaaggctggaaatctgccgatggtatggatgacaacatactgcacaacatgctctataaggccagtgtgattgataactatccgtggacgaaacagtttctgttacgtgtccgtggtggtggtgcgctttttcttgccgataaaaagacgcacacgattcgccaactgaaagtggagcctgtaggtgaaacctacaatgacattgaaacggtctatcagggagaagacaaaggtgaaggatgctatttcgctattatcgacaatcaatcttcagcacgacaaaaagcgattgatgatcttcttagctacccgccagttgatgatatcgatgctaaagcaaaaaagatcagacagcagatgaccccgaaagtcgttatggtcatgccggataattgtgtgaacaagcagcagcaggctgctctggtagctaaacgttcggaagaagatcggaagttacagcaatgggtagcacaacaaagtttgacggagctatgtcgtcgtactggcaactgctaa

SEQ ID NO: 155697 - DNA, 552 bp, Enterobacter cloacae
atgggtagcacaacaaagtttgacggagctatgtcgtcgtactggcaactgctaagggccttccaacaacaccaaagcgaccccttaccaaaatcaggagcatcatttttgaaccaatttcttaaagccctacctttcatcgcaggtttgacgtggtgccattcgcaacccgcacaggccgacgaacaacgctatatcagtatccgtaacaccgatacagtctggactcccggcaatatttgtgtttatcagtttcgcctcgataacggcggaagtgggacaggtttcggccaactgaatgtgtcactggatttgaaagacaaagctggcagaacgctcgcgcagggcgtcatggaagttggtccctttggagaaagcgacgcaacacgttcacaggacgcttttctggagcatgaatgtgttgaaggtgtcagtgccgttgaaattttgaaggtaactgaattacatgcaggtcatcagactgatctgccactgtccatcttcgatccgcaatattaccagccattgtcagtatcagttgccgtgaattaa

SEQ ID NO: 155698 - DNA, 420 bp, Enterobacter cloacae
atgaatcaaaccacatcacccgtcaccgcttcacctgtacccgacaggcagcgtctcaacttctggcccaagcacttcggcaaaatcccccagtggatgctgctggagccccgcgccttcgcctggatggatcgcctgtgcgaatcctacaacggtggatactggaattattacacgctcagcaacggcggtgccttcatcgcacctgacagtgaggataactgggccattttcaacaaactgaatggcaacagcgcggagatgagaagcgaagccgctggcatcgccgtctgcctgctgaactggagccaccacgcctgcagaaccggcagccccgccatgagcgaacactactatcgcctgcgcgaatttgcgctgagccatcctgaaagcagcgtcatcatgcacataatcgactga

SEQ ID NO: 155699 - DNA, 318 bp, Enterobacter cloacae
atgcattctcaacaatgggggcttacgtgcagtaaaacaccgagcttcgatgccaggctggtgcaggaaggcaaccgactgcactttctggcggaccgggcaggatttaccggcgacttcagcgacgatgaagcactacgccttgaccaagcttttccgctgataatgaaaaagctagagcagatgcttacaaccggtgagctgaatcctcgccatcagcaacgtgttatcctgaatcacattgaactgacctgcgaagccgacacgcttggctcgcacggttacgtttacatcgcggtttacccgacaactcagtag

SEQ ID NO: 155700 - DNA, 330 bp, Enterobacter cloacae
atgccaacctcagcaataaacccggggcgggcggcatcgtgcagcctgtcacctatagcgcactggcgaacactgcttgtctacctgctggaaaagcactacgggctggaattaaacgatacgccattttgcagtgagtcagtaatcctgcaacacattgaggcgggtattaccttggccgacgccatcaattttctggtggaaaaatatgacttggtgcgtatcgatacccatggcgatacctattcagagccagaaatcttcctgaccgccgccgacatactgaaggcaagtcacgctaccggattaacgcagcgtaatctcgattaa

SEQ ID NO: 155701 - DNA, 849 bp, Enterobacter cloacae
atgcaaacaaaacctgaagtgattaccgaacatactgagctgattaactcgaccagcatcgaacgcatcgtcaccgggcgtgatgcagcgctgctgcagattgaacagttgattcagcagctcaacgccatttcccagctcactgccggaatcggtggcggcaacgctgccgactgggcgatgaagcaaggacatcgctatgactgctggctgatggaaaagccggagaaagcgatgccagcaatcacccgcaatgttgaccgcagcctgtggcgcgacctgatgctgaaatccgacatgctttcgctaatggatgcccaggcgcgtgaccagtggtatcagaacctcgaagatggcgacctaccggccatcagtgaagccaatattctcagcacgtttgagcagttgcaccatagcaaaacggaggtgtttgagcgggggattatcaacgtttttaaaggtctatcgtgggattacaaaaccaacagcccttgctactttggcaagaagatcatcatcagcaaccttgtaacgcacaaccgctggggctacaacctgacatgggggtttcgtcgcgaccagttggcagacctagaaaggatgttgttcttgctcgatggcaaagcgatacctgacaatcgtgcaaatatttccattaacttgatgaatcacattcgcgataaccctggcaaggatgtttatgacgattcatacttctccatccgctactttcagaagggtacagcgcatctcacgttcaagcgccctgatttagtcgagaagatgaacgacattatcgctaagcattatccggaccagctcccagcttctactaaacagcgttgttag

SEQ ID NO: 155702 - DNA, 207 bp, Enterobacter cloacae
atggctaatcaaccagcaacgtggagtatcacactgcacactgaatgccctgagtgtggggagtacttcgatattatcagcgtgcaagatgatttctgggtcgactctcgttttgacgcttgtgaacatgacactccggcaactacaggtatcgaggtcgagtgccctgagtgtgagcacaatttcaaagtcgatttcgattactga

SEQ ID NO: 155703 - DNA, 417 bp, Enterobacter cloacae
atgagcaacatcgacaaacaggtgctgcgcaaagcggcggataaggctggcgctgatgagtggcgagccttcattgacacaaagtcaaaaacatatgcggttcacacgccaggcgacaatcgttgcggagatgtagttaagtgggctggttttgacgggcagcaaaaggcagcaaataaagctcgatatattgccgcagctaacccagccgctgtgctgtcgctgctggacgagcttgaagccgcagagaagcggattgctgagctgcaggagagtcacaacaatctacgcgaggcaatggccggaattcacaacacaatcacaggcggaggcgcttacacgccgctggctgcaattctgaatgcctccaaacgcgcatacgaagaatcggccgccgcagccggtaaaggagagtga

SEQ ID NO: 155704 - DNA, 1233 bp, Enterobacter cloacae
atggatggtgtctggctggcagagcgaggaacgtctgatgaaatactcttttcttttcactctatcagcgacgggcgtaagcgactttttggggttaaaaatatgacctatcaattacacgtaggaaggtgcgaagaggtcctcaaatctctgcctgataactcagtggatgccatagtgacggatccgccgtatgggctgagcttcatgaaccacaaatgggattacgacgtcccgactgtagaacagtggcaggaatgcctgcgcgttctcaagcctggcggccatcttctggctttcggcggctcacgtacctatcaccgccttgtggttaacgttgaggatgctggtttcgaaatcagggaccaaatactttggatttacggcagtggcttccccaagtcgcataatctcgatggcgattttgatggttggggtaccgcattgaaaccagcccatgagccaatcgtcatggcacgaaaaccattcaaaaatacggtgtcggcgaacatggctgagcatggcaccggtgcgatcaatatcaatgcctgccgcatccctaccgacgaggcgctaaatggaggtgctggcagcctgctttcacaccagcgagacggtaccgaacctgtttctgattacgagcaggcaccggaggggcgctggccagcaaacataattcacgacggaagcgatgatgttgtgtcagcgttccccgttgcgaaaggccagacaggatcgcttaccggcaatgaaccaagctcgaaaatgggtgctgcgaactgctacgggcaaatgcaccggcggcacgaatcaactccacgaatcgatagcagtaagagcgccgcgagattcttctactgcgccaaggtcaaaccgaaagagcgcgatgaagggttagagagatttattgcgacgtcagccagcgacatgaccggcggacgaaaagaagggagcgtcggcattaacgacccgcgcgccggtgccgggcgtaccaatggcgcgaagaacaaccaccctaccgttaagccaatcgccctgatgagctatctatgcaggctgataactccgcctggcggtaccgtgcttgatccgtggatgggtagcgggagcacaggtcgtgcagccatcgaggagggtttcaacttcatcggaatcgacctcaaccccgattacgtaaccattgcatctgctcgaattgctcactccttcaaaaagacgacggaggcagcatga

SEQ ID NO: 155705 - DNA, 390 bp, Enterobacter cloacae
atgaggctggtgctcccgttcccgccgagcgtaaacacctactggcgtctacagacaaaagggccaatgaaaggccgagtgctgatcagtgaaaagggtagggcatataaatccaatgtcagaagggctgtgatagagcagctgcaagctatgccaaaggcatcatctgcgttggcggacattgacatggttttttatccacctgattacagagaaagagatttagataattttaataaagcggtccttgatgcccttacgtatgcgtctgtatgggttgatgataaacaggtaaagcgcatgaccctcgaatggggcgagaaagtgaagggcggtaaagttgaaataacgatagttgaatttaaaccgagggcgggtgcagccgcctga

SEQ ID NO: 155706 - DNA, 138 bp, Enterobacter cloacae
atgcacctaatacttatcctcttgtcgatatggctctgtcggcagcgtgaggaatattactggcatcaagtcagtttctatctctccttgccgatactcgaagcggagtatctggcacgcagtaaggggctgcgttga

SEQ ID NO: 155707 - DNA, 216 bp, Enterobacter cloacae
atggatgattttaaagacctgtggataagcgtagataatcgcactcctgaaaatcaggaaggaagatggtcagaagatgttatagcgctgagtgatacaggagacgtgttcaggctggcctgtatgggtggctactggcaaaggacgcaggcatttattgattcaggggctgccaaagtaactcactggatgccgctgatttacccagatgattaa

SEQ ID NO: 155708 - DNA, 336 bp, Enterobacter cloacae
atgaaatatcagctcgcaaaattatatcgcggtgatcgtttcttcgggtacggcattgctgtgggtggcttgcttcttgatggtcaggtttcaacacgggtagaaacagagccaaacgaagtacctaaagttattgcgatattcaatctcggtaatgatcattctgaaaagcagccacgaattgatttagacaatcccggcgtttctagtgaatttcagattgtaatccatccagataaaccattaaccgttgagcagttagaagagcttcgagagacggtaaaagagtttcttaccaaacataatttgtctgatggtgggatatggaagtcttga

SEQ ID NO: 155709 - DNA, 591 bp, Enterobacter cloacae
gtggaaacacaagtgaagtttgttgtggttggacaccatgatcgctatgcctcagcacttcttttggcaagcgatttaggtgctcatcttcttctggatgaaggcgatcatggagctaactggaatcatcgccgcgcccttgaatgggcagccaaccaatcatgccgtgttgttgtgcttgaagatgatgctatcccagttgttgggttcagcgacaaggttgctttgtggcttgctcgtttcccggatgcgctatgttcgttttatctcggcaccggacgacctccacagtatcaactggagatagcttcaaagttgatagcggctgataaagcgcgctctgactttattaccatgccacgcctgattcacggcgtgtgctatagcgtcccgccaaagcatataccgaaagttcttgatagatggaattacgccaaggcggctgactatgctgtcggtgatgcttatggtggtcccgttatttatccgtgttactcactggttgatcacgctgatgctcagccagtagagctcgcacgagataaccagccaaggtttgagcgtcgaaaggcatggaggttagatggttaa

SEQ ID NO: 155710 - DNA, 366 bp, Enterobacter cloacae
atggttaagttaaagacactgaagccaagactgaaggctattgatactcgccgcattaagccagtctatggtgagaaccggcgtatcagtggtagtgccagggtaggccttaagcgtcggatctatgttcgtgatggcggacattgctgcatgtgtggccgcgtagtggatctgcatgacagtgagcttgaccaccgaatagcactgcagtttggcggtgacaatgatgagcgcaacgtttggacgctgtgcattgagtgccacacaggtaagtcatcacgtgaggcttcaatgaatcagcctgatagcgaagcgctaaagcattcagtgcctgatggaaatggcccgacagttacaattctatga

SEQ ID NO: 155711 - DNA, 903 bp, Enterobacter cloacae
atggatgagcgcgaattatctatcattcaggcaatcggtgaagaggtcagggatatcatcaccgctatgaagtctcaacttgaaagagaagtgaagagtctcgtggctgatgcggttaaggacgccgtggccgaaattcctgaaccggtagttcctgagttgccagatgttaagcaacttgtcaccgaggcggtgaaggccgccgtggccgaaattcctgaaccggtagttcctgagctgccagacgttaagcaacttgtcaccgaggcgatgaaggccgccgtggccgaaattcctgaaccggtagttcctgagttgccagacgttaagcaacttgtcaccgaggcggtgaaggccgccgtggccaaaattcctgaaccggtagttcctgagctgccagatgttaagcaacttgtcacagaggcggtgaagttagctgtgtctgagattcctgaaccggtcattccgagcgatggtcgcgatgcactgcaaattgaattagaaccgtgcattgatgaaacaaaatcctacccgcgtggaacatatgcgactcacaaaggagggctatggcgttcatatcagaagaccgatggaatgcgcggctgggaatgcattgttgatggcatttcagggataaacatcaaccaggatgaagagagaattttcactatatcacttgaaaaggcaagcggtctggttgaagaaaaagcgttttcaatcccggtcaccatctaccgcgatgttttcaaggccggtaaagagtatgaacccggagataccgtaacatgggctggctcattatggcactgcaatgagacaactacagataagccaggtgaaccaggtacaaaaggttggacccttgcagttaaaaaagggcgggacctgagggataaaccatga

SEQ ID NO: 155712 - DNA, 471 bp, Enterobacter cloacae
atggcaatcacaaccaacataaactatccgcacgattaccttcctgttcctctacaagatgggtatgggttaaaaccagtaagcccgcttcttcgtaccactctgacatcaggacgagccagacagcgccgccgttatatgtccaccccgactatggccagcgtaacctggacgcttactgagaagcaggcccagacctttgaagcatggttcagggatgccctaactgatggtgcggcatggttcaacatgaacctacgtactccgggaggtgaatcgcaaaaggtctgccggttcacggatatctacgatggcccgagtctcatcggcggaaattactggcagtacaccgccgagcttgagctatatgaacgtcctctgctgccaccgccatggggtcagttccctgagtttattgcaggtatggatattatcgacattgctcttaacagggagtggccagaagcatga

SEQ ID NO: 155713 - DNA, 1038 bp, Enterobacter cloacae
atgaataacagatctatgctggcaatttttttaaatgtttgtcttttaatattgccaatattacttgctggtcaatactacattgacgacatgggtcgagccactagggggtatatgtggtggggtcttgatggaaggcctgcgtcagacttcctgatgtctaaattaatgttcagtaagaacatggttgacatattccctttgcctctgatcatcggtgcgtctgctcttgcgtgctcgatgtatatgttttatttgaaatacattaacgcagggataggtggagttctgattgttgcttgctacatgatatctccatcaacgccagaaatactgtcatacagatttgactctctgccgttacttatttctatctcaatacctttggttgttatatctttcaaagatcaagggaaactgattgaatttgttattggtagcgttctttgctgcgttgttttttgcatttatcaggcatctgtcaacctattggtgatatgctttatcatcgaatgcactgcaagaatgtggttagggtttggtttggctgaatcattaatcaggcttgctttgcgagctgttcagatttctgttgctgctgttgtgtatatgaagctgattctccctcttacattctcaggggatcacagtgctaatcatcctgcgatggaaagcagcgacatattaacccgcgttatttctaatgcaaatgaatactacaactttcttgacgtgcgattctttaatggaagcttgctaatttttattttggcagtttttgtaatttcatttgcatcatctgtatttctaattttaaatgctagaataaatagcgttgattcacccgtttcgatttggttatcatctgcattcttggcgctatcaccttttgtggtagtaatgttttctcttggtgtagttcttacattgcagaattcaatgacatatttttcacgtctatatcttggcataggaggtgtgtcattatacactgcattttgcttccattggctcagtcagaatatacaagcacaataa

SEQ ID NO: 155714 - DNA, 414 bp, Enterobacter cloacae
atgaatatagaattaattcctttacagcaacatggggataaccgtggtctgcttgtggctttagaggagcaacgaaatatcccctttgctattaaacgcgtttattatttatatgacacattacaaggtattcgccgtggttatcatgcgcacaagaaaacaagacaactagctatcgctgttaaaggttcttgtacatttcatttcgacgatgggaaaaataccaaagagattgttttagataacccagctcaaggtttgatgattgagcctggaatgtggcatgaaatgtataacttcagtaatgattgtattttaatggttttggctgatgatgtatacgatgaatctgattatatcagagattatgaagaattcattgggcatatgaataatgaaaattcacaaatttag

SEQ ID NO: 155715 - DNA, 468 bp, Enterobacter cloacae
atgaaaattcacaaatttagtgatgtcaaaagtaataagatcggtgaaggcacatccatttggcaatttgttgttatcatggaaaatgctatgataggaaaaaattgcaatatctgtgcaaactctcttattgagaatgatgtaattattggtgataacgttacagtcaaaagtggtgtctacatatgggacggtgttgagttagaagacaatgtttttatagggccttgtgttgcatttacaaacgataaaagaccccgttcaaaagagtaccccgaatctttcttgaaaacaatcgttaggaaaggcgcctctatcggtgcaaatgcaactatcttacccggtattgaaattggtgaaaaagcaattgtaggtgctggaagcgttgtcacaaaaagtgtacctccttacgcagttgtcgttgggaaccccgctaaaattgtcgaatggattgaacaagatgaataa

SEQ ID NO: 155716 - DNA, 249 bp, Enterobacter cloacae
atgaataaagtagattttttggatctgaagaatatcaacctcaaatatgaaggcgagttagtggaagcattcactcgagtcttacattctggttggtatattatgggtaaagagttatccgattttgaatcaaaatttgctcagtactgcggcgtcaaatattgtgttggagtagctaatggtttagatgcacttattttagttatccgagcatggaaagaaatggggaaattaaaagatacagagtga

SEQ ID NO: 155717 - DNA, 174 bp, Enterobacter cloacae
atgaacagtaccattttcatgattttttgctgtataccgtactactccattccctactggagcgttgacaacaccgctaagtatgctaattacactttgcaattgcccaatcattgcaattccagatgggccagtatatattgcgaccactttaccgatgacaaagccacttaa

SEQ ID NO: 155718 - DNA, 720 bp, Enterobacter cloacae
atggaaaacaaaaccgtactgaatagtaccttaattaccgcgtatgccttgtttattagcatatcctacctttggggtttttgggggcactttgatatcaacatactaaattacataagtgtttctgatatcattaaatcagcaatatggccaatgataatcgcgctagctatgtatctcgttcaggtagcgatgaacaactacaacgggccgcgaacagacgtatctgcaaaatactccgaaatgtcaaaacatgagaagtttgattatattttaagatatagctacgtaatcataatggtatgcctcgttttagggagtgtaatatacaaccttgtcacaggtaataaaatgattcgatatgctgccattggttggatattggcttcgattgttttttttactacatgtagaaatcaagagttaatggcatatattccgttcaaaaacaaagctcttttttatagcatactttgctttatgcctgttttttttctttcgcggggtgtcttagaaggagatagaatccttgcgggagaaaatacttatttagtcgaatcaaatgctttatgtagtagtagcgaaaatgacaaatacagatatattgatgttatggcagataaagcttttgcgctgtctttgaaagataactcaatttgtatttttaaattcgaaaacctcaagttagttaaagaaaaaagaaataatgttgttaattaa

SEQ ID NO: 155719 - DNA, 579 bp, Enterobacter cloacae
gtgaagctacaactggagttctcaaaaggtggatcagaagtgcttgacagggtcattcaggcttatgggttcacatcaaaactagccttggccaatcatcttgatatcgcaagcagcagcctggccaaccgttataagagggattttttcccctctgacattgtcgttagatgtatcgcagagactggagctacgcttgaatggcttgcaacgggtcagggaaaaaaattcaatgatgaagagctagacattatgaaaatgtcacgccagaaaatagttgatggaaaattatatgacgctggctttttaatgcttgataaagttacttttttacccggcaaaccgttaccccaaagcccactctgtgtaatcgaaggttctcaacaatatatcattgagcaggacttctccgaagtttacgacgatgaatggcttgttgaaattgaaggtaaaaatagcattagaactcttacacgaatccctattaaacaagtaagagttagcggtattggtatggcttttgattgtggcattgacgacattaaaataattgggcgggtagtacttcaaataagataa

SEQ ID NO: 155720 - DNA, 501 bp, Enterobacter cloacae
  misc_feature (473)..(482): n is a, c, g, or t
atggaatctgcacgtgataaacatacccgtgagattgtagaagcagaggatctgtggctacttgatagtgttgatactgaaggttacgtgtgctggggatgtggtataaccatgcatcctgctgcatgggaaaaagataaaaaagtcagagcctattttaaaaagaaacgccatattcagcatcatcctgaatgtgatgctgatgctgaaagcatagtaattcgccaaggccagaaggccagtgtccgcaacatactggacagtgctccggggttaatgccctcggggctaaagttgatcgaaaaacgcccagttgttgaaccaagtttctctggtgatgaaagtaaatccagttcgacacgttcagcatcctcacaatctggtgaaggtaattcacccgaacgacaatcccggcgtcaagtgaatgctattcgcaatatttgccgtgccttcatccgtttcccgcatgaccnnnnnnnnnnaccggggaatgtcgcttaa

SEQ ID NO: 155721 - DNA, 438 bp, Enterobacter cloacae
atgtcgcttaacgttcccggtatcagtggtcaaatctacatgacggcgtttaaaaagctccggaatgaggttcaaccttacccggagccgaagatcttttatgcaccactgctttggaacaaatttactgaaaatgatgaaaacctcatcattcccttgtctggtgaatggggggaagatgagtcaggtaaacctaaacctacccgaagctaccagatctacatcgattgggctagctggtcaaaagccaagcgtaccgtggttcgtaaagagctggaggctgcccgtaccgaggcaatagaagccaaaggcaaggggctgaaagataaagcatgggtattctttatcggcgagcaagatactgaaaatccggagatcttctacgttagcgattatcgactcatctgcgcgattgtagggcacatcacttatccctga

SEQ ID NO: 155722 - DNA, 603 bp, Enterobacter cloacae
atgaattatgttgaactttaccgatcaataatcaatcgttcattgagtttgattacgaacaggcaccaaagagttgctgcgttcagggttgatactcattttccggggatagttgacaacggtgataacatttgctgctttcatagcctgaaacctggtgaaattagccgtatgtgcaaatcaatggaggctaagctcatagccgatattcagagaaaagagcgagaagggaaacgtgtataccgaggaacagtaattattatatgggcgagagaattttcattatcgggtaaatgccattaccacctttgcctcctgtttaacaaagatgcctactatcatctcggggattatgagcaagaaaatacgctaagagcaatgatcactggagcttggtatagcgcgatgggattgcaactggacgatcacccaggtttggtgcattttccagagaactgtcgatatgtgttgaattccagccatcttgatttccaggaaaactaccaggaattactgaaccgcttggattatctcgctaaaatagagaccaaaatctttggtgaaggatatcgtaatttcggttcttaccaaatcgacctttaa

SEQ ID NO: 155723 - DNA, 573 bp, Enterobacter cloacae
atgaaattttttgcttacttcgcttgtgttgactctgctggagcaaaaggagttagagagcatactgtttttcaagaaatatgcgattttttccatgtagactcagagaatattgttattgaaattgttgacattaaacgaccattttcagaacaacggctattaaaggagctcattaatacaaaaatgaaccgtggtgacaccattgtaattactgatttaagctgtctgggaagaaatgttgaggacatagaggaggctttatttttattttttcgaaaggagataaatgtctactgttaccatcctcgcactagaattgagccagcaattgaatgctgcatgtcatttctgataacagtccaaaaaaaagtcgacattcataatcttaagtcaacaaggagccggtatcggacaatgaaaaaagcgttaggaagaaaaaaaggaagtaaacatgagttgggaatattaaaacttaagctgaaaggacatacacagatacaaacggctaaaattctaggtatcagtatttcaacagtcaaacgccactggaaaaacacatttattacttag

SEQ ID NO: 155724 - DNA, 213 bp, Enterobacter cloacae
atgaacacatccaacgtcagaatccttcgtttaaccgacgtcgtcagcaaaatgggcataagccgctccaccatctatgattggctcaatccaaaatcttcgcgctacgatgcatcttttcccaaacagcgtcgactgggtaagcaatctatcggctggctggaagctgagttagacgagtggcttttactccgtagtcaagtgggttattga

SEQ ID NO: 155725 - DNA, 894 bp, Enterobacter cloacae
ttgatatatggtgaattaatgttttctatatctgaaatttgtgaagaaattagccagaaaagaaaggaagtctctgaggagatgtcacactgcaagtgggagagatatgctgaaatacttgatgaaagctactcggtaatgcaagaagaactagccagaatgagagaacagtactggaaatctgcaaaagtgggtacgcgtgtaaggttgtactcagaacctcatcttcgggattatcaaagtcacactgttaatgggatgttacagctcaaagaggagtacacagaattatatgatcctgtacaggagtgctggcgagacttacagagtcgtatttatcgggagactttttttccattaattatcgagcccatcagaattgatgacatattttttgcgcatctttttaatgcttcaatgttgtatcaatgggggcagtcggtagcatcggaaaatgaatgcatcgcgctaagggcattaaatacctcttttagtctatttgataagtgtatcggaatggtttggttcaaggtttacattgataaacaatcagaactatcaggcgttagagttaaggctggaaagaaggggggagagaagaaaacagaggtatacattgttattcagaggaaattagtagaccttataaatgaacttgcaccacaaggtggttggaaaagtaaagctgcggcagtgaatgaccttattgaccccttatgggaatatgttgaagaatcagattttgtgattaacaatcaaagtaaaaaataccgattagcaaatgcaagccaagatgctttagcggatactattctaaaaaattggtcacgaaacgttgagagtgtcagactagcatttgattctcatgtacacagaaaaaaaatcacctcgtag

SEQ ID NO: 155726 - DNA, 888 bp, Enterobacter cloacae
atggatatgaactggtcttcggttgtccccactctggtcggtggcattctggccatcagtggtgcgattctcgcacagatctatatcaagcataaggagagagaggccaaaaaagagcagatggattcagacagacggcttatgggtgcgctacttagcgtgcgtctggaaacctggatatcctcctgctctgttgccgcagctgacaggcatgatcctgtaacgcaatatcactacgaccagctggagttaacgtcggttggcccctttgttcttgacgatattaaggggaactggttaacactgagcccgaaactgataaaagagatccatgaactcccggtgaagctggagcagacaaacgatgaaatttacgagcatgcaaaagccaccagggattcgtccaagcagaggtggggcaactttttaatcctgcgggcagaatcatataatcacctgtcaggtcaaatcagggaagtttgctctcagctatataatgaaacgggcatggggatccgatcgttttttcccggtcattcaccgcataacgcatcacctgaaaaacggccctacacgcaatggctacgttggtggctcccaagcggtgcctttgtggtgcttattatcgctttgctgatttatgtcctcaacccggggctggaatcccgtatcaatcaggggcactactgggcagactgcacgattgcccgccataacttggacggtggtatgtttacggaaaatcagcatgtactgaagtgcggtaaccgctacgaggtggtttcagtcggggactacgagcacgcagctcgggcatggcagcagatacaggagcccgtgaaggttcccgaatcagctgcagcgcgcgctgcacctagttcagattaa

SEQ ID NO: 155727 - DNA, 1404 bp, Enterobacter cloacae
ttgaaatctacttttgctggattctacagcaccccaagcgaatcattaggaaaaatttggttatctgaatcaactttgtttgtatttgatactaactgcctacttaatctctatcgttgcgaagatcatactagagaagacattctcaaagtaatgaaagaaatttcatcaagaacctggattccatttcaagtagggtttgaatatcaaagaaaacgacgtatagtaattgaagatagcatttccagcctaaccaaaataaaaaaagagttagaaaagatacattcacaaaatattttatcttcaggtggtgttaaaaaacatctttataattctttaaatgatgagatatctgaattacagagtaaaataaaaagtcctattgaggattacataaaggataaaatcacgccacgtattcaaagcaaacaacaaatatcgcaacatgattttataagagatgaaattgactcaatcattgggaataatgttggtatcccacctaccatagaacagataaaagccataaacactgaaggtgaagagcgttataagaataaaataccacctggctttatggattttaagaaaactgaaacatatttcttttcaggtgtagagattcacgcaaaatatggggatctttatctatggaatgagatcatagaaaaatcaaaatcagataacatacataatgtaatatttgtatgtgatgatctcaaagaagattggtggttcatccatgaagggaaaacacatggtgctttagctgcgctaaaaacagaaatatgtgaaaaatctaaaatcgaaaacttcaaaatagttaatcagcttacctttttacatgaatcaaaagaacaccttgcaaatattgaaatacgcgactcttctttaaaagaggtcgaagaactctctaatactatagtgccggatgttgatgatgaaaatatgacattatggtcacgagacaacgtagagaaaataagaaaaaaccttgaggataattcaagcatattcaaaaaaattgcgactaaccaagcttataaaaacatttctaaatcatcatcatttattgtatccaatagtgccaatgaatccttacaaaatgcatctaatttaaagcatcaatgcctatcattgttgtcagacattcaaacatttgaaacagagttaaatgaacatattgaacaggacgttctgacaggatttattaaaaccctgaaaataaacttatcgcaaattgacaaactctgttccaaacttacatcgatattaagtcaatcatccattggaatatatgacatatcggaagcagataatattatacgagagttgcaactttatcattttataatggactcaatgattgataaaggaaatgaatatttgaaacatattctataa

SEQ ID NO: 155728 - DNA, 1902 bp, Enterobacter cloacae
atgaataaccttgaacaagcgttctgggttgatcgctttggcatagaccgtcgctcctggttcggtattgaagagatggtcgccgaggctgccgcaaagtatgggtttatcattttaagcgggaaaacattcacgacaggagcgacggtaaacctgaatgaaattctgcttgatactgcaagcggggaatattttcaatggacaggatcattccctgatggtggtaaaatagttccacccggttctactcctgatagcactggcggacagggacccggtaaatggaaaagcgttggtgactctgcacttcgtagtctgcttgcgtcagtatccggagctgggatgatcggctacgacccatctacagattacgcagcaggaaccattggctacgaactgaataaaaagcgtaaaaacgttgtttatgcgactgcagatggaggcatccccaatgatggttctgatgtttccacccaggtttcaacgttcctgaacgccaacaaaggcaagtttattgttttcgactcagggacatacatgtttgccggtgttgttctttctggtactagctgggaaggaactaccatttacttcaaaggcaagcacctgctgaagcctgatactaccggcacgaacacaccggggtatggtgcgttcatagggcttatcatccctaaagatgtgaatggccttaccctgtattatcggggagacggaaacagagctcttcagtataatagagaacatatttttaacgttgcaattttgggctctacaaatatcaacattcctaagtttgattgcaatgagataaggggcgatgggtgctatgttaacagcgaagatcaaaccgtatcaacttctcagaacgcaacaaatataacttttggtgttgttaatgggaaaaattctgctgtagatggtcgtaatttggtttccattgtttcttgtaatagaggtggcatagatacattaatttctgaaaacataggtggtattgtaggtggagttctccagcccggagctttagatatagagcctaacagtcagcctggatgtcttgttcgagacttcattgtaaagagcgctacagcaattggcgctggaaacttacagatggtttcaccaatgaatatttcacctaagaagattcagaattgtcatattttacaagcgaatctaaggggatctaatcagtcattgagaatgtatggatgtcaagactcatcacttacaggtgatgcaatgtcattaacagacaatgcaggttacattgatggctgtctcaactcaagatttgatgttcatgcaagctcatgcgaaacagtagttttagcagggataacatatgcaaactatgattgcaaaataaaagcatttggaaggaatatacgcaatgctgggataattattgctggatctgagcgttgcgactatgacgttgattttgacattttcacaacaggaggtcaggccaatttcattgggttgtggttcagagatctaaataatattggatcacttgttcatcgtagtaataggtatcgcataaggtgtaatcaaggaggaaacggagcatacgccattcagtatacccctggaacttctccactaacttttattggtgacaataaaattgagtctggtagcacttttgatggatggccagactttgcacatataactggcaccgctggtcagtacctttctaagggtgacgctatagccaatctcacattgaatagcagcatacctacaaatggaacatggaaaattggagacgttgtaaaaaacactcaaacatcaagctcttcacttgtgtacgggtgggtgagaatggttggcggggtagggaatgtagccggtatagactggggtgtattgaagttcacaaccacctaa

SEQ ID NO: 155729 - DNA, 129 bp, Enterobacter cloacae
ttgaatattaccattggaatagaaatgattctgagcacaatagtttgccatattacggaaactggtaatatcaatatcatttggatcaagaccaaaaccaaattctgtattcgtgataaagtcatatag

SEQ ID NO: 155730 - DNA, 195 bp, Enterobacter cloacae
atgggcaataagaacggttacgatccatccatacgtagaggtgttcatcagttctcacacgctgggatttggttcacggtctgttatcggggaagcattcttgaacaattcaagtttggtgatcgggtgatatttgaaggttctgtaggcgggttgttctggttgggccctttagcaaggtgttggatgctctag

SEQ ID NO: 155731 - DNA, 207 bp, Enterobacter cloacae
atgatttttattctgtttcattcttatcatctgtttgtggtgagtttggaatctaaatatgttaagtgcgttattttaacaatcttcaggcatgttacattttttttggaccgggatgaagataaaagtagatctctgactgcagcgcttctccttatcggcatgatactgctcagcggtggctgcatccttactgcgaccttctaa

SEQ ID NO: 155732 - DNA, 315 bp, Enterobacter cloacae
atgaggcaggaaaacattgctggggagaatataaaattttttgtgcttacggatgttaacgcataccgctcgcgacgggtgggcgctatgcgtcgcctcccgacatatcacctcgtacgaaacattcgtttaactaatgcggtagcgatgacggccagtatgattgccaacaacgtaaggaagatgagtgaggataatagcgtgtttagcatgccacctaaacgggtgaagtcgctggtcgttaaaaggcttaaagtcactcataccatatgcttacctattcgccgttggtatagcgctcttttcgccgggtga

SEQ ID NO: 155733 - DNA, 339 bp, Enterobacter cloacae
atgaatgcagatatttataagccatgtgaacttgataatctggttgtgatctatttcggccaggattgcgatatttttgatgccgattgcaactttgataatttgttgaatgaatatctgaccacttcgcctgagttcagcctcagaatgctcctggcgaatttaatcgagatagagtctcagcccgatggcgttcaggttttttcggagcgttaccgatatgagtttgcacctgagggatggaatatgacggcgcaggaatggctcagtactgttaaagctcggctgatcagctacatgactgccagcggttactcgactgagttatctaatttttag

SEQ ID NO: 155734 - DNA, 816 bp, Enterobacter cloacae
atgcaaaccgaggaaggacttaccgttacgttatctccggtacagatggccgctatattgcacggtcaaaccatcagtgaaggggagaccatgagcaaccgtttatggggcggtctgggtgtccttaacggcgttgtagaaatgttcggtgcaggtgtattgtgcgtagttcctgagcccacaatgctatctaaagcgggatgtgttgttgttggctctcatagtcttgataccataaccacatcatttaaacaggttattaccggtagacagacttctaccgccaccgcgcagctggtagagatcgctgctggtgagctgggtgcgagtgcggatacagcatataaagttggagtgacctttgatattgcagtgccttttgcgtttgcgggagcactcggagccgctcgggttggatccgtatactcggggcgcattcgactgctggagcatgagggaggtaagctgggacatactatcgctcggcatgtaggtaaaacacctgagcagttgaaagccagatttctggaaccacgcgccccagttgcatccagctcattttttaatatccgacaagctgaactggtaatttcagaggttttgactgtaaagaaatctcagattgaggcggcacttaagtattcgaatgcgcgcactaccctagcctatgcacacaatttcagacttcctgtgggctatttcgtcgaaaaaggttcagatacggtcaggaaagtatatggggtgcgattagttatcagaccaactacatataatggtaagctttattatattgtgacggcatacccgataccgtga

SEQ ID NO: 155735 - DNA, 639 bp, Enterobacter cloacae
atgggaatgttatctatcaatgacacatgtccgcattgcctgaaagaaaatgccgtcctcagctctattaccgaagctccccttgttcccggagtttactcagtagtttttcagtgccagtcttgcttgaaattgcttatcgctgaaattcaaactggctcccatagcagccctgagaaacaggcaaacaacacaatatatcctatagaggccaggtcagctgacagaatgcatgtacttcgaacatacccaaaaaaaattgccttagatgcccctgcaaacacaccagaaagagcagcaaaattttttatcgaagcaaaagatgacttcacacgcggaaggtatgaaactagtgcaatgaattgcagaaaagtgattgatatagctacgaaagttcttcacttaaaagaggaagataagcttgtaaggcgcatatcagcgcttagggaaactggtttaataacgcaagaaatggctgactgggctcatatagtacgtattgatactaatggtgccgttcattctgacgaagaatttactgctgacgaggttgatcagttgcttaaatttacagaggtgtttttgacgtactcctttacgttacccgcaatggtaaaagccaagcgagaacctgagtag

SEQ ID NO: 155736 - DNA, 231 bp, Enterobacter cloacae
atggttactgttagcgaagtctatgacgcaggctgcaagtattttaagggtggtaatttctttgtagagatacatagaattggcattcggtttgtgcacgagaccatcgttgatgggcaaattaaaaccgaaagccattttctacagcgcaatctggatgatatttcagtgccagaattgttaggcttccttcaggcctcaacagaagagcctaaatacagcgataactaa

SEQ ID NO: 155737 - DNA, 216 bp, Enterobacter cloacae
atgataatcgagttaaccattgatcgcatgaagaaacttcctcatggagctatacctgcgctagagtcagaactggccaatagactcagtaagcggttcgatgttagccagcttacgattaagtgtgccagcaatgatgcactgactgttttcggagacgataaggaagagagcgagcacatactgcaggagacctgggaaagcgctgacaagtga

SEQ ID NO: 155738 - DNA, 459 bp, Enterobacter cloacae
atgaacattcttggtgttagagcggctcccaaagtcgcttcattcattgtttataacacggaaagctgtcaagtacattgctcagatgtcataagaatcccggcgacactggatatacccgaaaaactaaaatatgttagaaataatattttagatatattacgattttacaatgttgaagttgcctccattagggtggctgagtcaaattcacagaaccttaatattgaacgattatatatcgaagctgttattcaggaagcattctcaagtagcgaagtaaaaaaatatattacaattcgccagaacggtattaaatcatcactaaacctctctcaagaaaattacaaagcatttttaaaatctgaactaacgattcacggaatagacaattctaatttcaattctgaaaccaatgaggctttgttatctgcattagcagcaggggctagattatga

SEQ ID NO: 155739 - DNA, 1044 bp, Enterobacter cloacae
atgattaatccacataagcgcgcggacgtttcattcactaaaatccgagatttagatgaacaaggctgcttttcaacggtatatttagctcatgaccagaatttagatcatgaattgattataaaagagatacctaaatctgccggggcaagtaaggatgagtattttactgaggcacgacttctttataagcattctcactccaacattgttcaagtacaatatgcagcagaatgtaatgataatgtttacattgcaatgccgttttatcaaaatggttcgttacagaaaaagattgagacatataatttaacaagccgcgaaatcataagatactctatacaatttttaagcggtttataccatatacattcaaaggggcttatgcactttgatataaaaccaaataatatacttatatctaatcgtgatgaagcattgctttcagattttggattgtcaaagctaataaacactaatggcagagcaacccctgataccggttattttttccatattccacctgaatacttcactcttgcagcagcggaatttaatttaacttacgatatttatcaggctgggttaacaatgtacagaatgtgtgttggaaatatagcatttgaaagtgagcgttctcaataccaaacagaggaccaactcgaaaatgcgatttgcaatggaaccttccctagcaaaaactatcctccgcatattcctaaaaagcttatatcaattattgattgctgcttggaagttgatcctaatgacagatatcaatcgactttagatgttttaaatgacttatctgatatcagtgatggcgcgcttgactggagatatcagccttcaactactgccggtcagcatgaatggcacaaaacagataaggatgttatagtatctatagttttcgatgcatcaacagcatctacgacgggtaagcggatctatcccgacaactcagtacggaaaattacagctttgtcgatttcatcagggtgcaccccggccaagctgtataaattgttgaaggacaattag

SEQ ID NO: 155740 - DNA, 168 bp, Enterobacter cloacae
atgaaaaaaaacgagggagtagttaagctgcctcgtcgcaggcgagaagcagccctagcaagcccttatacaaaagaagaatttattgatagctctcaagacgctgattgcaaaaatcataaaaacttctccaaaggttcacttgctttaaaatacttcaaaatgtag

SEQ ID NO: 155741 - DNA, 804 bp, Enterobacter cloacae
atgagtgagaagccggattactgtcctgactggtttgacttagaaaattaccgcgtatgtgaaagttacaccagaaaccactggtggaagtcgatcatgatccgcaaagttgtactgtataacggtattaaagatgacgtggcgaacggcatcagtaaagatttcctattacaatcgttaatccatctttccaaaaacaatgaactaatttttaagggacaagatgttattgagaactccagtattgacgagatgggaatgtttgacttcattgatctctatgccgagttatacgagcagtctcctgaagttatgaacggcgtcaatgacatgcttaaaaagcatttcgataaaagagatgaagtaattaacagcatagatacgttttgggatgactttgatcatgatgttaactctaaatccggcatggatctgtattcaccattgagtgaaaattatcaagggataaggaaatttatttccatagatttcaataataatgacgaaaaaataatgcgtgatttttccaattggctagcaaacgaaaggaaaataaacaatgagttaaatagatctcagaaaaaaactgataatgacctcaaaaaattacatgagtacagagtattgccattcatagacttgtttttctggggagaaatcaccggcattacactgactcagtaccagctggcgcagttgctctttccgaatgagtttgaggtggatatcaaagatcgcctgaggtctgtgacaagaccgaaagccatggagttgcttgaaagtcgcgttgacccattcatgtaa

SEQ ID NO: 155742 - DNA, 222 bp, Enterobacter cloacae
atgtctgagaacgtacgatcttttatccgtttgccggaagtgatgcgtagaactggttatagcaaggcatggctatacaggttaattaatcaaaatcgttttccaaagccagtgaagattggtgaacgcgcaattgcattcgtagagggtgagattgacgattggataactcagcgtattgaagctcgcaatgctgtaaacaactcaaaacctcaactgtaa

SEQ ID NO: 155743 - DNA, 123 bp, Enterobacter cloacae
atgaaaatggttatccaattttgccgtctcggcgcttttgccgatcacgtatctgagcaattaaatagtgcgcgatattgttttgccagccagtcattaagtgaaggggaggtgaaattatga

SEQ ID NO: 155744 - DNA, 516 bp, Enterobacter cloacae
atgctgttaagtaaatcagcctacgccaggcatatgggcgtcagccggcaaactgtttacggctggttagcccgcggtgaaattgtaatttcaggcgataaagtggatgtcgaagcatcgcaggctaaacaaaattctgctggtgctggtgctggtgctggtgctggtgctggtgagcatcgcaatgcactgacgtgggcccaggccgcagcatgggtatggaagcatgacggtgggaaagagctaccggctgatattgatgctgctcagcgaatagatgccgcagcctctgagctgggttttgatgttcagcacgagcccgaggaagaattgctgatcctcttccggttggatgaagaaacccacagcttctatgggaaagatcacatggctggtggtctgcgtttcctgcgttccgagctggcctatgtggccgcaatgcatcccgacacccaggatgactggagcgatacaggattaaaggcactctgtctgctggcaggtgagaaactgtaa

SEQ ID NO: 155745 - DNA, 1743 bp, Enterobacter cloacae
atgttgatagggcaagaggaactggacgaattcaataaagctgcggatgagtatattgactctggagatctcatctcattacatgagttagcgaacagattttcggaacatgattattcttttgctcatccgttttttgaggctagttatctttattctttaggtaattgttattctgcgctttacagaaggggaaatgttgaatggtattctgatgatttgatgaagtctgttatatcctacaggaaagcactttatgcccttccagatattaaatttggagatgcaaagggtttaattgatgctataaatgaattgaaatcgatgatagagacaaatttagccaactgtctttcatctcaagggcgcgtgttatgttgtataccacattataataaagcaattatgttagataacaatcctgttgctatcataagtaaagctagaaatgagttatttgtagcggattcgatctttgactttagccattctgaatatcactattttaccgcttacgagttaatccaaaaaggcatttcgaatgttgatagactatatccggaacagagacatcctttagaacccggtggcactttgtttaaccataaagagatatttgaagccaattataaattaaatgattttgattacttcaaagaatttgaagagaaatttaagtcaaagaaacaaaaggaatatttggagtggtgtgctgaaaacacactctttcttaatgatttgaatgactgttgtgattatcagattgtttatcaggatgttttttcattgcccccatttattcatggaattaacggcgcacttacgatgcacgaggagttatcttatcatggaaattatgatgaaataaaagatgattattgttatgcaaggtttttaattttttcatctaaagatatctctgatgatgcttgccatatgtttaattcaacctttcaacatgtagatgacatgagtcattcaataaataatatgaaggtggctcaatataaatcagcattcagagcaatatattcattgtttgataaaatagcatacttgctaagtaggttttttgacttaaatgatatcaaacatgacagaagactcagtattgataacctctttcgtaattttaattataagggggatgattggagaccgcatgataaattaaaggatagtgataatcattttatgcacgctttattttatatccttaaggatctacgtaaggttggtaagtctgatgttgtgtctaaatggtttgatccaaacgcagttgctttttctgaaataagaaatgctatggagcatcgttctttaaaaatagttgatgactttggttatgaacttgcaatgaattacaatggcaatgctgacgcagaatttaatgcgttgaaggaaaaagtgataatattaaaatctgagataaatcagcgtgaagttatctctaaaaaaataaaaaataataatgacaaagtagatggccagaatatagatgatgaactcgttaaattgaatcatgagctagatattttaaatgaaaagatttatgaaaaacaaaagttatcatcccattcacttctgatacctataagtaaatttgagtcacgtctaatgcaattaattggattagcacgtaattctataatgtatttatcattggctatatattttgaagagcgtagacgtcctaaagagggtttttacatgccgagagaagtaccattgaaaaagctataa

SEQ ID NO: 155746 - DNA, 1818 bp, Enterobacter cloacae
atgatgccccaaaatcatcaaatgaaacggggtttcattatgcaaggaagagacgaatattgtgatgtagcacgggattggatcgccgctgccgtatctcgtctgattcgggaaaacacgcggttgcatattggggagacagcagcgcagtactcagctgatattgcgggtattgaaggatttgctcgactcctgtgggcctttgctcccttgttgagtgggggcgaggcgcagacgtaccgggacacttttctgcatggcatacgatgcggttgcgatcctgaacatccggactattggggggatcttactgacaacgatcagcgctgcgtcgaaatggcggcatttggacttgctctggctttaccggatacggggctatggcaagcattgtcggcaatagaacaggacaatcttgaacgatggctgcgccagagcgctgagatacggatcccggacaataactggcatttcttcccggtgctggtacaggttggtctgaagcgggcaggacgtcattacgacatgatggtgatcaacaaacatctggatgcagtcgacaatttctggctgggtaatggctggtattctgacggtgtcggaaaaccgcgagattactatatttccagcggcttccatttttatagtctgctgtatagccactttatggaggatgttgatcccacgcgctgccagctttaccgccagcgggcacgtcagtttgcgaacgattatgtgcactattttacatgcgacgggaatgccattccgtttgggcgcagcctgacctatcgcttcgtacagggtgccttctggagtgcggtagcctataccggacttgatgtctttacgcctgggatcgtaaaagggttgatcgttcggcaccttaattggtggatcgttcagcccttcatcgatcatgacgggttatttacccttggctatacctacccgaatctggtcatgaccgaggactataacagtccgtgctcaccttactgggcatgtaaagcgctgctggttttggcgctgccggaagagagcccattctggcaagccaaacctgctcctctccctgcgcttgaaactgtccacccgattaaagaggccgggcaaatcatcgtccatgctgatgagaaccggcacgcatggatgctgatgtcggggcagtacgatcgcaataacttcgtcaacttcgactctaaatacgcgaaatttgcctattcaagccattttggcttcacgcttgcgcgtggagatcgcctgaatcatgtggcatgtgattcgatgctgatgtttagcgagaaggataaccgctggcgcggacgtcaagaatgtacctctgttgaaatgttcgataacgggatccgcagtacctggcagccctggtcagatgtgcatgtcaccacctggctcattgcgcatgagcaaggtcacgtccggcttcatcgggtggagacccgacgctcgcttgactgcgtggaggggggatttgccgtcaacggccatttgcttaccgaaacgcatctttcagctaatgaggtcacgctcattacttcgtcaggggctagccagattgcagatcttctctttgagcgacgagcgatgaccgtcacgacgccaccgaactgccatattttacacgcctccccgggggagatcccttgcctggtttcctcgctggagccgggtacacattggctcgtatgcgctgtcgcggcaacgttagcctctttcctgccgtcaccggtgacgccggtcttcgataggcaaaaccagatgctcacgctgaaccacaaaaccctacacataaaataa

SEQ ID NO: 155747 - DNA, 1191 bp, Enterobacter cloacae
atgtctgaaaatatccacaaagaaccaattattcccattgtactacgcaacggtgagcgtgcggcgattgccaggaagctccaggatgccagactatgtattgtcagcgcagttgagcgaaatatgcccttttttggcgggcgctttcccgatgcggcctgttgtaacggaatctatccggtgattgataatcaggaatggaccaccagtttctggaccgggcagttatggttagcatgggaatggagcggtaatgatgtctttcgtgagctcgccgggcagcatgtccgctccttcggcgagcgcattgcaaaacgcgatcatacgaatcatcacgatttgggttttctgtatagcctctcatgtattgcggccagcaagttaaccggggacaggcaggcgaaatacatcgctctacaggccgcagatgctctgatggaacggtataatcacatttgtggcatcattcaggcgtggggagaactggataatcccgatcagcagggaaggatgatcattgattgcaatatgaatttgccgttgttatatcaggcaagtcttgcaacgggtgatgcacggtatgccgacgcggctaaaagtcatattgaacaggcgcggcgttatattgtgcgtcaagatggctcgacttttcatacctattatatggatgtcaaaacaggccaaccgcgctttggtaatactcaccaggggttctcggatgattcgtgttggtctagggggcaggcctggggagtgtatggcttcctgctgaattatctctataccggtgataaaaagttgcttgagttgagcctgactctggcaaattactttatcaatcgactgccggacgacttcatttgctactgggatttggcgctgaccgacccgaccaccgagcgggacagctccgccagtgctattctcgcctgcgctctgctggaattggtaaaacagcttccggtgacccatccggaccgtgagagttacgaggctctggggctaaagataattgacaatcttattgagtattatctcaatcagacccatcagcctggagaaggattactcaaacactctgtttattattttaaaggtaacgttggcgtaaatgaatgctgcgcctggggtgattatttcctgatggaggcgatcacccgggctacgtctttatggaatagttactggtaa

SEQ ID NO: 155748 - DNA, 798 bp, Enterobacter cloacae
atggaaaaggataatattgtgaatataaattgtgtcatattaatagctgcaataatgttttcctcattgggtgtatgtgcgaaaactaatgatttagtgactgcagttccgctaaaatcgatgccctttaccactgtcttttttgcgccacgtactcaataccgtactgccagtgagacatttttacagcgtcttatgttaacgggagttgtacaggatccagagagcatactgaaaaatctgtactggagttttgagacggatgccgatctgggtaagcacatggatcaatggaagagtagctaccaggaagcggagttcaataaacctttcccgttaggttcaaccgcattctggctggaacctggaaccgtattccactgggaagacgcagggtcccgcatcgatccttatattggcattggatatcattttgacccgaccctgggggcagtgcttcgctatcgttataatcaccagaatcatgatagcaagacgctccatggcgactgggatgactcttctgaacatcgcgtggatatttatctgacgaaatattttacaccaaatttctgggtgcaatataaccctacatattatagcaaaacccattcagatgaatttgtgtatgcaaatggtaaaaaccatacccttcagcataacgttgtgtttaattttcatacatcaccgcgattctaccctttctttgaactgggttatcttgatgaatataaagacggggatgatacgaagagcgaataccagatccgcataggttttaaatataatttgaactaa

SEQ ID NO: 155749 - DNA, 1191 bp, Enterobacter cloacae
atgatatcatttttaagattttgtacgttttcggatattacaaataacctttggtgtagtatggataatcaaaagcagcttcacatagccttagtcgcaaatactttatggtctgtatataattttcggaaagggcttatcaacagcttcattaagcgtggatacaaagttactattgttggtccagtcgatgattatgctaaaaaattaaaaaaattaggttgtagcgttgttgatgtgcatatcgcatcgcagggaatgaatccgtttgtcgatcttaaccttataatgaaattaaaaaaaatatattctcaaattgatccagactttatttttcattatacgattaaacctaacatttacggctcaattgctgcctggttgtgcaataaaaaatcaattgcagttactaccgggttaggttttgtttttaataaaagctcgttttttactaaggtcatctctcaattgtattccttttcatttaatttccccaaagaagtttggtttttaaatgaagatgataaagctgtttttatttctaaaaaaattatcaaggaatacaagtcatatgttttagatggcgaaggggtagatacacaatatttttctcctggaaagttgattaaacaacctgatgatggcgtcacatttctactagtagcgcgaatgttatgggataagggggtagggatttatgttgaggctgcacggaagttaaaggttcaatatcctaatgccaaatttcaacttctaggggcatgtgatgttgagaacccgagtgcgatctcaaaagatgtgattgattcctgggataaagaaggtgttatagaatatttgggcgttacaagtgacgttcggcaaatcgttagtcaagccgactgcattgtcctgccttcatattatcgcgagggtataccccggacgttaatggaagcagcttcgatggctaaaccccttgtaacaacggataatgttggttgcaggaatgtcgttattgatggcgtaactggttacctgtgtcaggtaaaaaatgtggacagtttagctgatgctatgcgcaatattattcaactaaccccagaagccagaaacgaaatgggggctaagggaagagaatttatgcttcgtcgcttcgatgaaaaaataatcatctctgactattacagagctatccaaaaatacatttaa

SEQ ID NO: 155750 - DNA, 1917 bp, Enterobacter cloacae
gtgttctcaaaagggaagcaattaaaagttggttatcgtccagatattgatggtattagggcaattgctgttttggctgtgatcttctatcattttaatattacgggattttctggcggatttgtaggtgtcgatatttttttcgtaatcagtggctatttaattacaagcggcattgttaaaggggttgataacaatcgcttttcatttggtgatttttatatccggcgtacgcgaagactaatcccggcattgttatttgttataaccataacatatgtaggctctttttttatacttgcaccaaaagatttttcttcactttctgggtctgttgtttatgcgttatccggtatctcaaatatttttttctggatgcagtctgactattttgataacttctcaactctaaaaccgttgttgcatacgtggtcgctaagtgttgagttgcaattttatcttttatggccgctatatttgattgtattatgtaggattaccaaaaacattcattttcgggcgtttgctgtttttttgttttttataatttttgctttcttagcgatttattatattagtgtggattctagtggggctttctatttgactccattccgcatgcatgaatttgcaattggagcaattggggtttttattaatcatttatttaatggtaagagatttaatcaggtgttatatgtttcaggcttttttttagttctatattcaattttttcttttgatattaaatcaattattttcccgggttattatgcattaattccttgttttggtacattgctaatgatactttctggggagaaaactgctatttcaatgctcctctcatgccgtttcccgaaatatattggagaaattagctattcattatatttggttcattggccagtttacgtacttgggagttatattgttgttttcacacctagtacgatgcaaataactttaatgcttgctcttactctaatattgagtgctgtagtatattatactattgaaaaaccatttaggtcgtcaaatccagagaaaatgaatggttctacattttctttggcatgtgcagcagttgcattaattgtaattgtaccttctgccagcagttgggcaaataatggttgggaatggcgaattcctgaggagattcgtatgatcaatcaaatagataagaaagatgccgctgattatacatggaccaaacaacgtatgcttacccataaaagtaatttttcaaatgccgatgggaaattaaaggttctggtcattggagattcccagtccgctgatctgattaacttattggaagagtctggggttttagaaaaagaagatgtaatagccaggacagtttattttgattgcggtacaaattacgtcgaaacagacaagatgcacgattttttctataagctaaatgcgctaacaatagcaaagccagatttgatccctgtctgtaaggcacaaatgatgaaagctatgaaccaggaccttcttcagcaagctgataaaatctatatagcctttcattatcaacctaacctagttgagtatgttactcatggtgttgaaaaaatacgtgcgatgactaatgcaaaagtatacgtggttggtcgtaaaaatctcaagaaaagcagtattgaaatcattaattctttcaatcgtttggtcggtgttgaacgattcgcagcaaagtttaaagataatgaaactgtaataattaacgataaactttcaactatacctggcgtgcatttcataaacatgatggattatatctgcccagaaaaaaataagtgtttaactgttactgataacaacaagccaattttttatgatccagctcatttaactcgatttggtgcgcagtatttggctgaaaaaataattcccgatttataa

SEQ ID NO: 155751 - DNA, 210 bp, Enterobacter cloacae
atggctgtgtcgatggataaaacaagaatctccgtaacgatcgataagatgacatattctttattatcagaaataggaaggcaaaaagatcgcccaatgtcatatattgttcaacaggcagtatctttttatttaatgaaacatccggatgctcgtttaattacggggacggggatgttcgaaattattgaggcgttaaatgattgctaa

SEQ ID NO: 155752 - DNA, 1305 bp, Enterobacter cloacae
atgattgctaagcaaaaaaatgccattgaattattttgtggtgcaggaggaacttctttagggttccaaatgtctggttcatacaaaatctcgctaggtatggatatagatcctgatgcaatggcgacttataaagcaaaccatgaaaatgcagattgcttaataggtgatattactaaaatcgctccttctgacgttgccaaaaggattactgactcaaatattgatattattattggtggcccgagttgccagggttacagtactatcggaaagcgaatcgctgaagatcctcgaaactcccttttttctcaatatctaaattatgttgatgagtttagaccaaagtggattgtatttgagaatgttcggggatttattcacagcggtaaggggcagttttatcatgagttacaagactccttagctagactaggatatgatatttcagctggggttttgaatgcagctgattatggtgtccctcaaagaagagagcgagtgattatagttggtacaaatacagggttaacgccttcattacctctaccaacgcatgaagatccaaggtgcccagtttgttctcgtcctgataaaagtaacaggataaggtctcgtattaaacctagcgaatgttcattttgtaatggtaccggtcactggcatagtttgaatatgaaaccttgggtatctcttaaggatgctattggcgacctcccttggctggatgggcagttaggtacgcaagattttattgaatatcaagttagtgcatcaagtaattatcaagaattcgttcgtgagttatctgacggatatacactgcataaagctaaaaaagtatctgattttgcattgagtattataaaaaatataccaccaggtggtgggatacggagtatcccagaagatgatctgcctgaacgatttagaatcatgcgaaccgttaaggacggtaagttaaggaaagattgcaccacactttatggtcgtttaggatgggatatgccatcttatacaataacttgttattttggtaatgtttcatcaggagcttttacacacccagaagttaatcgatcattaactcttcgtgaggcagcaaggctacagtcgtttccagatcgatacactatttgtgctaaaaatgcgatgcgtcagattggaaatgcagttccaccgttgcttgctaaagctatagcagatcatattgaaaagattgaacttgataattttaatgtcaaaaccatcaaccccttgaagggagaaaaggatgactttgagcaaataagtctattgccttaa

SEQ ID NO: 155753 - DNA, 1257 bp, Enterobacter cloacae
atggcaagaagatcttttgcatttgattccatgtcattacaagagcaaagtaaagcaccagttaaaagcgatactattttaaaaactcttaagtcaataaacataaatgaattagatcgactgggcctttcactcagcgctgacattgaaaatcaagacatcatacaaaatgttgttactggtaacattattggctcagcacacttgacatcagatcttggagcagtttcgataattattgagcccaaagtttcagcagctagactagtttcaataattgaattcctccagaatgacagttttttttcaaatgaagagtcggaaagctacagcggacaaactgatatactgactctgcaaattttgcggtgtatacaattagtatccaaatcattagcttctgggtcaattaggggatataagtccttatcgaaaaagttaccttatattaaaggacgggcaaattattgcgattatctcctaaacaattggtctcaccataaagaaatcgaatgcaactattcagaattgaccattgacactcctagaaatcgagtttttcgtcttgctctagtgaaaagctcaagagtcatagcaggaaaggaaaacaataggatatttaataccctgcgcatgattcttttttcattgacgtctgttaaagaacaggaatttacacagctagaaatagagaaaatagcgagagaaaaccctcgtgatgcctcagctttattggcatgtagagacataatttgcaatttatcaattagccctcaccccgggcattcacgaaatttcttcagctatgctataaatatggcccatttgttcgaaaattattgtcataaacttatgtcaatagtacttttcgaaaaaaattacaaaccatgtgaggagttattatttcctattgaaggaattgatgaacctatccgccttgacgggctttatagtaaaaacaataggaaaatactaattgaatgcaaatacaaaatcatcaatactttaaaggatgtaaaacgaccggatatatatcagactgttgcttattgcagccactcagatgtcgatcctgaaatggcacttatgcttttcccatgtgaaaattcagatgaagcggctaaacttattggcacaataggcggttttaacatttcttgtaataagattcatgtagttactgtaggcctatgctttcatcctgaaaaagtagtcaaaggcctacagttcatattgagtaaaattttaaggcaatag

SEQ ID NO: 155754 - DNA, 1614 bp, Enterobacter cloacae
atggtttcgaagaagcaattatcagttcaaagtatacgtaccgctgcattagggcttcgtcgttggcgggagtccaacgattcccaaggaacaatgcatctcattcacttccttgctgcaaaattcgctggcgcaaaaaaaggcactccgattttatatactgagaactccgttgattttaatttttgtgataagttcttacgagtcaacaatagtaacactccatactttgacccattaggaatgagccatcgaataagtacacatcctcatagcaatgtagcaacagctaggaagaaaaccttctcagataaatggaaagctggtgttttcaccaaaaaagatggtaatgaatattttcaatttgaagatgattatatttccattcttactaaaaacatggcaaaacaggggcgttttactaaaattaacccagaggaattagcctgctggctctaccgagaatatgattttgaaaatgacgatgacattgacaatgttgtctcaaagatgaaatctgatttcaatttcgatgaggaagagtggcaggctttatttgcagataaaaatgctgtgacgtcgagtaagttagaacaatgggtcaaatacaataacaaaaacgattccaatgtcattattgatatattgactagagatgttgacggatttaacatttataatacattaatggctattagagaggttgaagaaatgccaatagtaagccctgatcaaattattgatgcaatgcataagctaaattgcaagcaggttgttcttcaaggtccacctgggactggaaaaacatatttggcaaaacaaactgcgatgcagattattcaaactgacctaacaacctgcagatctaatctatcatcagtggctcctgataaatattggggtatattacaatttcacccgtcttatgggtatgaagatttcatacagagaatggtccctcagcaaaaaactggtgaggcgatgcatattgaaatcgtagatatgccttttattatcgcatgtaaaacagctgaatctatcaaaccaaagccatttgtattaatagttgatgaaatgaaccgggctgatttacagaaagtattcggtgaattaatgtatgctctcgaatacagagaggaaccattgactttgcaatattctcgcgaaccattactaattcctgataatttatatgtaattggaacaatgaatactgctgactcatccgtcgttcaagtagactatgctatcagaagacgattcgtattcttcgatgttcctcctgactcgcaagttattagccagtcaatagaagacgaacaaaccaaaaaagtagctattgagctttttaaagcaacaaatgcagcttgtaacaatcatccacgattttcaattggacattcttattttttacatgctgatttggctgggttagttaacagctttgtctatcaagtacttcctgtgttaagatcatatcaagaaaatggtgtgatttcagaagagatggcagtttatttaagcggttgggatgctgaacccatttccacccgaccaagccgacctgacgtgcttattgaaacgttgatgtcatgggctaaaacatatgaatag

SEQ ID NO: 155755 - DNA, 1923 bp, Enterobacter cloacae
atgagtgctgtccatctatctccaaacgacttagccgaattgacgacactagccaaagacctgaacttcgacgatgctgagcgtcgttctgccctacttgaaaacggatcgcgtgattttaatgcagtacctgggagtgggaagacatcgctgcttgctgcaaaacttttgttgctggctaggaaatggcctcatgcaagaagaggcatatgtgtcctaagtcatactaacgttgctcgtaatgagatagcacatcgcctggcgggaacggtcgaaggatctcagcttctgaactacccccatttcattggtactatccatagtttcgtcaatcatttctttgctatgcccttactgcgtagctcgggagagaaaattgatgttattgatgatctggtgttcgcggataaagctcgttctctattgctgactagaaaatttgcaggccttcgcacttatctggaaaaccagaggaatggggaaggtatcgccactacgcttttctatcgaacggcggcgcttagcgtgcatgttgaaagtggcaaccttcctgcatcgcatacaaagtcttacaactcactgatagagctgaagaatattctttctgctcagggtatttttcgtcatcgtgacatgtttgcatttgctgacctagcgctccagacctgcccgaggcttcttgatgttgtccatcgtcgcttcccgatggtgttcatcgacgaaatgcaagatacctcttgggatcaagagtcattgttaaatagtattttcgatagccggtcagtgatgcagcgttttggggacatcgatcagaagattctttccgatgaagaacaggctgaattactcacatttcctagggcgggatatggatgcataagtaccagcaaacggtttggtaaagcaatttccgatgctgtagggtgtgtccgcgtcagtggcgaggctgttgttggtgagggcgaagatgcccatgctcccgtcctcatcctgtacaaaacggatagtgcaatcaaagtggttgaacgcttcggtcgaatcgttattggccatttgagcgaagacaacattggtgaacgagaggttaaggcgatgagcgctcgcaaaaccggtgagagcaacgttgatgcaggtcgtcaccttcttgattactgtccaacatatggcggagacaaactaactgcgggaatacgttccgaaagtttctggagtcttgtcggagacagtaaaggaactttgaaagaaacatcgttgagttccagagtttctgacgttcgcagagcattattgcttgttctgcgcgcagctggagcatcgtttgtgcaagacattcgtgatgcacgaatgcttccacgagcggcaaaaactattacgcccgcagggacaattgataagttaacacggcagctcgcattgtccggagaagaactttgttcagatggccatcaagatgcactaataaagctgctttacacgcaactaaagccatactttcccgatgagctaagccttgaaatattcaaaggactgggcatttttaaagaagcaggtgagaagcagatactgaacacttctacctcagcgagatgtgaaattagttttgagggaaggaccctcgacattgggctcggtacggttgcagggatgaaaggcgaaactcatgctgcatctttgatactggaatcctatggcgggaccagtcgtaagttcgatgttgctcttggactcgagtatttggcagggacggcgaccaaaaacatttcgaagcttccaaaaactcagcaggcacaaatgcgcaacctttacgtagcaatgtctaggccaacgaaattattatgccttgcagcgaacgaaaatcgagtttcacatgaactacgtgatgcgcttgtatctaaaggatggattatcgaggaagtaacttga

SEQ ID NO: 155756 - DNA, 747 bp, Enterobacter cloacae
atgacgcaacggtatacgccggaacaagccgaacggatgaaaaaaaggcgatattgggtatacgtggatagcgagcgtttcagcagcgcagcggcagcgaacaaatacgtgggtgaaaacatttttcatgccgcgtggcgtgccgaccttattgctgaatccggcggagaggcgatgcagatcggtgacaaaacaaagtctgtcaggcgcggcaatcataccgttgtgctggagcgtcggggtgacctgtcggataaatctgtccgtgattacaacgccgcgcgcaggaagttgttgaatgctggctggcgcgacgatgagcttgacgagatggaaaatggcgagctttattcgcaatataaaagcgagttagagcgcgagcggttattggtaccgcatttttctggttatgaaaaaaagtactctcgagtggagatccgcccggcacaagcgcgtttcagacgcgaagtgatgtcaaactgggaaaatcagtgtgccattactggtacacgacttgctcttgaggctgcacatatcgtaagtcacgcaagcggcggcactgcgagtgtggaaaacggcatctgccttgctgcggatttgcatacactgctggattctggccacctgcttattcttgatggcattatccacctgtcggatgaagcaaaagacgatctccgctacgtaactttggaaggttctttgctgcgagtcccgcgcgtcaaagttcatttcccggcactttaa

SEQ ID NO: 155757 - DNA, 1353 bp, Enterobacter cloacae
atggaaaggaagcaacagccaaaggtctgcgtacatcttcttgataaagaaaagccgtattacttttcgcctgagcaacaaaaatccacgccacccaactttttccagcactcgcttaaactggcttgggataatcgcaattacattgcgacctgctgctgtgatccgtctcaggaacttaagctttatgtcagaagcaacaatggctccggtccatttactctctgtcgtaacccaaacaccggtcctcggcacaaaccatcctgctcatactactctcgtataaatactgatggtggtgcaaaagcatattcatcagcggctgtcagggaagaggaggacggaacccttcgtatcggattagatttttcgttacgcgtatcgacggcggcccctgaacgcacagctccggctgcaatacatcctccaagggaaagaaagcaagtcgaacgtcttaggaaaatgaagatgttaggtcttcttcatttgctttgggaaaatacagggctaaacgaatggtctccatatctggaaggaaagagaaaactgacaacagtaatgaaccgtttgtataaggaagccagtagcattaaacaaagccgcacagttctggccgatgttctattgcgacaaggaaacgagcacgccaataagaaggctgtgaattacgcctgtgaaaaaagtcgccgtctgatcgttatctcagaactgaatgaatggtctgcagctttgaatgttggcaataacctgcctctggcaggaaccacgaagagcagacctcctgccgggatgccttatctaacaatcgatagttcacgttgggaaagttccttagccagatttccacgtgatgtagcatggtggcagcgtggaggtaaaatcatcgctatggctgtcaccgacgtacctgtaaaaaaaatagctgaaaagtctggccaggaatatttttccgcaagtgttcgtcaggttgttttaatgatggtgagtgaacggtggatcccactcgattcatcttacgaagggatcattgaagaaaaactagctaaggaacgacgccagtttaccaagccattgatctatgattcagccgaagatcagtaccatcctgatttcatactcacggatgttaatggttcagacttcgctccccttgaagtctgggggcgggatactgaagattatttacagcacagggctgtaaaagaagaatggtatcagcaggagtttggtgacacttggtggtcatgggacgctgtaaggtatccgagaggcgatgaaataccgaccttcccacaacgaaaaaaacattacgaatccaagtatccagtagaaaaaagggaaaccaagtgttaa

SEQ ID NO: 155758 - DNA, 423 bp, Enterobacter cloacae
atgtatgaacctgtctatgcgccctgtgccatcacctatcatggcgaatgggtcgtaccggaaacggtggtacaagaggattacgatatcctgttctgcgaatgctgcagactgaaaatcagcgttgttattgatgaacttacaggagtaaaaagctttgttcatacgccactgcgtctggagactgcaaaattacttacaacttgcccctacagcaaatctgcaaataatttagccatcgggagtaaacctccaaaacagacgctacgcgtatcgttcgctcctctacgacctgggaactcccgtcaccttccttgcaaaacgactaagcaaaattggcgttgttgctggtgccatatctattggaatggtgaaaaggtatgcccgcaatgtgaagattggatctatgccattagtgcctag

SEQ ID NO: 155759 - DNA, 1044 bp, Enterobacter cloacae
atgagtcagtcaactgatatcctcctcaactgtgctgaaatacacaatgataattacaccacagaaataacaatactagaaagtagtattcacactgagaaacttcatcacatttacaggttattgcaaagggttattcgcaagaaatcactacccttctatatactgacgaacaactcaggttataaacaacccagtcgcattgttgaggtgctggatatcatccatcttttagagcagatacctgatgattttctgaagtaccgtaaactccatcctctaatcacgtgtttccagcaaacatttaaacggtatgatttttattgcagaatttacaatggcgcaatcaacaattctgatgcgactaataccgctatgatgctgaatcagcttgtaactgaatatcgtgatgaagtaaataagtctgcttttaggcaagacctcagaaaataccaaagaaattcaatgaagaacctaaaaggggtgacgaattatatccagcatctttttaataatcatgtacgactgctggttctccgcctggacctgtcatgggcgaaaatgcactcaggcagcattacgccagaaatagcaaaacaacaacgtcagcaactgcttcgcaacatgaaaagaaaacgattgttcaaaaatgtactgggcatggtgtggaagctggaatatggacctgacagaggtttccattaccacacgctgttcttccttgatggtaataaagcccgcagcgatatcaatatctgtaaacagtttggtgagtactggacgtcggttattacaaaaggcaaaggcacatacttcaactgtaatgcacagcctgagcgttatgtgaaatcaggtatagggatggtgaagcatgacgatatcgttaagcaggaaggactacagtgtgctgtggggtatctaaccaagatagatacgttcgctcgtctggcattacctggcaacatgagaacctttggcaggggtgaagtgaaaacactcaacaaaacaggcagacccggtaggaaacgtgctcaaccttcgtag

SEQ ID NO: 155760 - DNA, 207 bp, Enterobacter cloacae
atgagcatgattgatattcataatgaccagatggttgatatggcgttcattgtccacttcactaaaatgaccgataagtgggtttataaattgattcaggaaggaaagtttcccaaaccgattaaactgggtcgcagttctcgttggtttgagagtgaaatagttatctggcttaatgaaaaggttaaagcatcccgcgataaataa

SEQ ID NO: 155761 - DNA, 210 bp, Enterobacter cloacae
atgacgaccgttaacggtatcggtgcttatttcggatcggtattgagcggcgcggcggtagattatttctccgtggacggggtgaaagactggcagaccatctggctggtatttgcggcgtatgcgttggtgctcgccgtggtgttttatttcagctttaactatcgccacatcagtaaaaacagcgagttgcgcacagttgcgcattaa

SEQ ID NO: 155762 - DNA, 1377 bp, Enterobacter cloacae
atgagtagttctatatttaaggatgttggtagttataaaatggatggattccatctaacaatcaatacagataactctataaaaacatttactccggaggagaatcaaactcttgtccatgagtatacacatttcttgcaaagtatttcgactgtatatggttggtatcgtattagtaatctggcgattattacacaacatttagtttatggcatatatcaaaaagatgatggggttgttaggcgatttcctttttttgatccttccgggaaagatggggagttaattgaaagtgctatgtctcttaatactatgctcgaaggaagtaacggtgaagaaaatcacattaaaaaaataaatcaatcccccggattttatgttgtacaagacgtgaaagctgaatgctttagcaagcatcctgattttgatgaagatataatggagctacctgcgggggcaacattatcaaaaaacattagagttacatatctttttgacccaactggccagaggaaagacaatcctaataaaattgatgttatgcttggtgcggtttgcatttatgaatttatggcatatgcgatagaaaaacatgttgcagaaaaaaatgttgatctaccacagataccatattacgtcgcaagagatgttgccagattcattttagagtgtgatgttgatgatagaatcatcgcttcattatgtgagtttgctctacaaagtagaagcccaggtgaaacatactacaatttactgatagggcttaaaaaacaaaagattgattacaatcttttgaatcccaatataatgacgcagtgttttaaggcagattatattgtcaaggaagacggtggcgatgtaagttatagtccaatcgaattattaaacaagtatgctgatgaaacattagaagaatataaagtgttattctcaaaccttaatgattataaaggggtttctgatattatttcacatttaaataatgtggttaaagagcatagaggaaaagacttatttatgatttcgaagcttctctatctaacgccagaagaggcagtgacaaatattattgaaaaaatgagactcattggtattccaccaatttttaatgattcaggttatatcggccatgctatatccgataataaccatgaccgttattatctatttattcccatgctaagtgagtttgttgactttactgtaaaaggtaattttcgatgtaatctcattggtacttgcgaaaagtactcaccagaggtagtaaacgataattgtcattcaaacgtatatctcaaggggaaggataatattctatgtggtgtcgggcagatcataaaaatgtggaagcttaacgattataaatttgaacaatga

SEQ ID NO: 155763 - DNA, 441 bp, Enterobacter cloacae
atggataaacaaacaacaatgtcttgcattgctaataacatcacacctttatcaaatgaatcttcaaattttgccagtctattgccaaaaacacttagaactcattgtgtaagtgttcggcttaatgtcacagaacttcaactgctcaacgctaaacgcggtcctacctctaaaggccaatggttaagaatagcttcacttcagaaactccccactatcgtgcctactgtaaacatcgatacatggaagactctgggtgagatcaatcagaagctaaaccgtattgctctccatatcgacagtaagagtaaaggtagccagcttactcatacagaacttttcgctgtgaagcgacaactgcaagagcttcgccagcacctgctaaatgctgacatatggagcaaacccgatgaagggtatgcagaagatcaagagaggtaa

SEQ ID NO: 155764 - DNA, 639 bp, Enterobacter cloacae
atgaagggtatgcagaagatcaagagaggtaagaacttctcaggtgtggttctctatgtgttaaagccaagttcacatcataaaagcgatccaatcgtaatcgggggcaacatgacaggtgattgctcacaagagttaatcgacgaatttaaccttacgaaagagcttgggccagatatccagaaacctgtttggcacaactcgcttcgcttgcctgatggtgaatcattatcgaatgaccaatgggtaatcatagctgacgactacatgaagaagatgggattcagtgatacccatctccgttgctatgtcttacatgacgacgaaggccagcacatacacattatcgccagcagaatcgacatggccggtgggaagctttacttaggtaggaatgaaaacctcatcagcacccggattatcagtgaacttgaaatcgatcataacctgacagttaccgagactgctcctgcgattgcaccaaagcaaccgaagcggaaaaaaatctctcgcaacgaacagatgctatcggctcggaccggtgttccctcccctaaggaagctctccaacatatcattgataaaagttttctattatgtacacctaatacttcgaaaactatctcactgccttgctaa

SEQ ID NO: 155765 - DNA, 240 bp, Enterobacter cloacae
atgtataactgtttgtttttaaaattaaaaaccaaaagcatcattgtaaatgatgcttttttttgcgatttttactttgaaccggccattttgccactttccataaaacaggggaatttcagctactctcaagttcccctgttttgtacggcaccaacttcgagaaaactatcctgcatagcagcgaagaacctccgcttcaggagcttcactcctttctttccccaagtgttcgtatag

SEQ ID NO: 155766 - DNA, 987 bp, Enterobacter cloacae
atgaacaaatatggaatttggctattagctccgctaatgctgggcgcctgcgataatgatgcgttcacaaaacccgcgttggactcggggcaaaaccagcagcacagcgcggaattacagagcctgattcgtcaggtaaaagcgaatctggtgtttgtggaaggcggtaattttctgatgggcgacttcggagcaaaatacggcccagaaaagattcaactcgacgcccaacaggacagtaaaccactgcataaggtgacgctgagcaactattccatcagtaaatttaaaaccaccaatcaggaatatcagctttacctgaaactaaataaactgtatttaagagaaagtaataatccattaacgcaaaagcgaatggatgcgttaaataagttgcctgatacgccagcgcacatggactggtacgatgcggagaaatattgtgcctggctgggtaaggtgagtggtctgccgtttgccttaccaaccgaagcccagtgggagtatgcggctcgcaaccgggggcagttcattattgctggaaccaatagcggtgtactggaaatggatgggatccagcgtgggattaatatttctggctccctggatcgtaaggagtttgcccggaagatggggcttagtactgaaatagatacagcaatgccagtggatcgttatccccccaacccactggggctctatgatatggcaggtaatgggtatgactggatcaaggactggtatgatccagattattataagaattccccggttgttgatccccagggaccagaaaaaccggtatttaagcgtcgtgaggggatttacgatacagaagaaaaatatcagaaggtgctgcgtggtgcgggaacttcaggtccctttaacggcttgacggtcgcccgttttaagcgcagccaggatacaaaagttacctttataacgacggttcgctgtgtcgttaacagtccacagccggtgaagtag

SEQ ID NO: 155767 - DNA, 990 bp, Enterobacter cloacae
atgaaaacactaatgagaaaaataaaaggtaaaattgcttctttaataggtcttgagataaatataatttatgattatctcaaatttaaaaaatattatactaaggcatcacaggcctcacaagacaaacaaaaactgcaatcttggatactacaagataagcatagaatagaaaaagcttttactctcccagaacctaggcctggttttggaaaagaggttataccaagattaattgataatttggccagttataatagttcatttaacacagattcagtttattatattggtgttggggcattgaaggcttatattaaatttcatgaggaaattggacacgaattgccttctttctttttaaaaaatattggtaagatccctgcagatgattttgattgtgaggagtgtgaactagcaggttatagccagggtgttgtttatgacaaatcatcgaaacggtcgttggcggattttattcgcgaacgaaaaagttgccgtaattttgatattaataagtcgcttgaaataaataaagaattactcgaaaaagtagtcgacttatcaataactgcaccttctgtatgtaatcgtcaacactggagagtccatttttttaatggtgacttaaaaaataatgtattaaatttccaaaacggcaatgctgggtttcaagaaaacattccttatatagcagtggttactagtgatttacgtgcgttttattctcatgatgaacgtaatcaaccatatacagacggtggaatattttcgatgaatctaatgtattctatgcagcattttgggctggcaacatgcccgctaaattggtgtaattcagcccgtgttgagcaaagatttaaaaaacttaatctaattcccgaaaatgaatccatcatactggttattgcttttggttatccaagtactaatgcaatatatgcaaaatcacccagactaccagtagataccttctaccaggtacattaa

SEQ ID NO: 155768 - DNA, 360 bp, Enterobacter cloacae
atgactaatcatgaatcaataaaactggtaatgggattctcccttactgtggttactggtatagttttttatatatacaaacctataatatcattaaaagttggtgcggaaaattattatttaatattggcatatgcggccgttattccgccatttattctaaataaaacttatgatgcaattatcaaaaaaatgcaagatattgttcaaaaaaaactcgctcttgacatagatgaaaatgacaaagcactggatgatgaaagtgccgaattcaaagaaatgataaaaaaccacaaaaacggaactaaagaaaaaataaggaaaataaaagagatacaggaaagtaggaaaactttatag

SEQ ID NO: 155769 - DNA, 489 bp, Enterobacter cloacae
gtgattgagcgcttggttgaggcatacggcttcaccactcgacaggctctgtgcgaccacttaagtgtgtccaaaagcactatggcaacgcgatacgtgcgttgcatctttcctgctgattgggtgcttcagtgcgtaatggaaacgggcgtctcaatagaatggcttgtgtctagcaagggtagtttgaagactaatgctgccacgacgttaattgatgtagaagtgcaagaactaagaaatggtgaagccattgttctaggaacatataaaattgacccatccttacttcttaagaaaataaaatctccattagctgtaaaatcttaccaacatgtctacatttgtgatcgtgaggactccatcacttcagatggtctatggctagttcagattgaagaaaaaatgatcataaagaaaataaatcttataccagttaaaaaaatcaatggtgtcaggagatggtttttctttcgagtgcgacgttaa

SEQ ID NO: 155770 - DNA, 1452 bp, Enterobacter cloacae
atggatattgaatggaactgggcgcaaagtgataaatttcttgatgaacaacttcctgccgacactctcgatcgagagaaatatgcaacttatctctataaaatttgttcagctcgcggagaaaaatcgagcttggttgtaaacataaatgcggaatggggggcggggaaaagctattttacaaagcgtttagctaattcaatatctgcacatcaccctactgtatatattgatgcttggaaagatgatttttcagaagacccattacttactgtattcagctcaattaaagatcaattatctggacaatctgatgactttactcgtaagattaataaaactgtcgagaaaattggtcctcttttgaagtctgcaacaccggtcatcattaatgggctggtaaagaaactaactggcattgaagatatagctgaattaacaaaggatctatccactaagttattagaccttcacactgaaaaagcatcaagtatctcggcagtaaaacaaggcatcagtacttgggtaaatcacatagaacacaaagacctcatcaataagaatctgcctcttttcgtaataattgatgagctagatcgatgtagaccagactttgcaattaatttactagaaataacaaagcatatttttaacattcctggcgtagtatttattattgcgacagatacagagcaattacaacactcaattaaagttgtgtatggtaatgagttttctgcaagccattatttaagccgcttttttgatagacgatttctacttcccacgccaataatgagagattttttaaagaccatctctgctgatagtgttgttgaggaatttgacaaattaaaaatacacatgtccccccaacctcccaactttgatattttcatcgataattgtgctaatgtttttgaatccttacgtatgaaccttcgagattcaattaaattatatgaaaaattaattgacacacttataacaacccaaaaaaactttgaccctatttttcttttgctattatcaatcataaacaataagaacaatgatatatattcactacttaaacaaaaaaaaaccgaaaaagcaacattgaccaaaatggactcatcattaactttatgctttgacctatcaagatcaactacacgggttaatgttttaatgaataatggtgcgagactcgtgaatgaattgcgtgatgaaatgatcactgtaaatatttcggattacattttcacagcccaatcagtaatagaaataaaaagtcctgtaaccaaaaatggctcacattatccagaagaatggattgatggaggattacatctaaataacactttgaataatttcctaaaaattggctgggccagtaccaaaacgcatgatttgtctctaaacctgaaccaatattatgaattgattgaacttagtacaacatttgaataa

SEQ ID NO: 155771 - DNA, 861 bp, Enterobacter cloacae
atgaaaaaagtgcttacctacttttatgaacgtcccgtgttcgctgcattaagtacattcagtatttatttattgatagtattttttttaacggctttctttccttggttaagcattcatatactaccaaacacctccaccggcctttataataaacaattctgggaaggggttttagtcaacctaaactcatcagtagttgacttttttgtgtttggggtaatcttattctattttcacaaaaagggagagagcaattcaattatatcttcgatgcttaatgaattaagtgacattgctaagtacgacgacatccagctaaatttaaggaaagtcggaatattaaaaagactgtcatcacttggtcatgatatatatacactacatcgaatcgcaattggaggcgctggcgttgaaattcgtgatgttaagataagaaaatcggattttactgctttgaatgcgaaaaaagtatatataaacacactttctgtaattgaaacttctttaagatcatcagacttttcagaaagcaaaattagaaacgcaaggtttgactcttgtaactttagaaatactaattttgaaaaaacgacatctgtgggtaataaattcaatgattgtgattttaaaaatgcaaacttcaaaaacagtaattttaaaagttctattttttcaggttcgagttttgaaggcgtaaactttgaaggttgtaatttaaatcgtactaacttaaaaaatgctacaaatatagatattactgaactatgtaaggcggccgatctgaattacataattgcggaacaaagcataattagtcaaattaaaacaatgaggcctgatgttaaattttcaaaatga

SEQ ID NO: 155772 - DNA, 264 bp, Enterobacter cloacae
atgcgactaatcggcaagcaaaggcttcaagtgctaagtggtactaaccctgaaacggatgtttggctttccgcttgggttgcagagctcactaacgcttactggaaagatgctaagggagttttagatgctttccccagagcacagcagattgataatttgtgctatgtgttctttgttcgaggcattaaatcgcagggcataaaagtaacatttcagtttgaaaggagcattgcggtgattaaccaggtggtatctaaatga

SEQ ID NO: 155773 - DNA, 1230 bp, Enterobacter cloacae
atgagtaaacttactgaagttcgggttattcgaactgaagaacaatatcatgcggccctttcagaagttgagagattacttagattggatcttcctgcaggatctgaagaatcagaacgtcttgatttacttacggttgttattgaaaattatgaaaatgctaactatccagtaacaccggtagatccaatcgaggcaatcaaattccgaatggacgaacagggcttacgccaagcggatctgacaccatattttggaacaaaaagtcgtgtatcagaggtgttatcgggaaaacgtcctttaaccgttgctatgatcaaagccttatcaataggtttaggtatgtctcctcaaacgttattgggcttagaaacagaaactggatatgcaaatcgttctccagttgaggaagttaattggtcaaaatttcctataaaagaaatgctttctaaaggttggatagaaaacattgtctcgcaaacaaaaacgacaacagaagaaaaagtcaaaaatttcattgagggtttaggtgcgaatttttctacagcagccttcaagcgaacacttaacggagagtcttactcacctacaactgtttataaattacatgcatggattgcaagagtagtccagaaagccagggaaaaaaaactcgcaactaaatttaagcaagattgcataactaaagattttttaaaagaggtcgcacatttaagttggtccgaatatgggcctctattagcagtggagttcttagaaaaaaatgggatttgtgtgatcattgaaccttgtctgactgggactgctgttgatggggctgctctgagggatattgacggtagaccaattattgcactcactttaagacaagatcgtttggataatttctggtttacacttttacatgagttagtccatatctggaaacatgcagactctactaacacatttatcgatgacattgaaacactcaagaatagtacagacaaaatggaagcagaggctaatcgaatagccagagatactctcattcctcgcgtcatttggaaacggagttcagcttacttaaatcccagcacaatcacgatagatgagctttcaagagaattaagaattcatccagcaataatagcaggaagaattagaagagaaactggaaaatacaatcaattttctgatttagttggtcaaggtgaagtaagaaagcatttccctaatcatatttggtag

SEQ ID NO: 155774 - DNA, 303 bp, Enterobacter cloacae
gtgaccatgaacataacttcaacagtcactctgaaactggagcacgtaacacgctgggacggaatgcaccgacacatatttacagtgatccggacacatctaggtgtggtgatgctgtgtttagtgggatggtcggtggtgcaatcaaaggtggccttgttggaatggcaagaggaactattggtggagcagttaccggccagtgtctctccggtggtggaaatggtaacgggggaggaaatacagccggttccagtcattgttcaggaggtgacatcggcggtacttgtagccgataagtaa

SEQ ID NO: 155775 - DNA, 198 bp, Enterobacter cloacae
atggttattaaaatattgtcttttatattaagtttattactgggttttgcgctattaagtggctcctccattattgacctatcctggttttccttacctgaggagttttcaaagatagtaattacattgattactctgttttccactgctaaatttacagatatgattttagcaaaaataaaaactttcataaagtga

SEQ ID NO: 155776 - DNA, 651 bp, Enterobacter cloacae
atgaatgagcgtacgggccaagttatatatagtaaacaaagtgctatcgtttttcttatagtggttgttatatcaaccgttgtaaccctatccccggcttttatgctgcgctatgtcggactggatactgcttttactattatatttattaccgaaattctaatttcaactttcgtttattttttttatctgaaaaagattcctggatgtataataaaaatgagtggaagtccggcttcagttaaattttcagtattttcattcctcataattatttttatacaacttactgtttattgctacagaaactatttataccattacgaaccatcacagataaactggataacggttatagtaatgacattagtagttccctattatgaggagatcatctacagaggctgtgccttcgaggttgcatgctcaatttacagaaaaaacctggtcattccgtgtgtaataacttctttgtttttttgtctaatgcatgggcagtattacaatatgctggatcagatgattctttttgttgtatcgatgttattatttgctgttaaaataaaaagtagatctcttttctaccctatattaatacattcaagtatgaatgcatttgttatattattaaatattcagagtgttttataa

SEQ ID NO: 155777 - DNA, 180 bp, Enterobacter cloacae
atgcgtgcggaaggcaaagattacatcgttaaagatggcgatgtgatgaactcttgtttaacgtttgattttcttacggggttaaaacacattttccaggagttctgtcttcacactggcctcaaaaggtatgctttcaacagtcgcaagctttattttcgacaccccatcattaaataa

SEQ ID NO: 155778 - DNA, 888 bp, Enterobacter cloacae
atgtttatcaggtttacaaggcgacaacccccacggatccacccaccccagcgcattcggcgcatactggtaaaggtttatcccccccgccagccatatcgggacctgctgctcgctttcacgcagcagcttgccccaggcgctgttcaccccttcccagcgcacctgcccttcgctatccgtcatccgctccgtcgtgccgttgggctggcagtggaaccagaagatctccggggcatccacgccgtcaatgcgcgccagcgggtcctagctgtcctgatcgctgtagacacaggtcagcggcacgtccccgtgcacttcctgcagcagacggaacccttcccagacaaaccgggtagtgaccggcttgccggttggctgtccgcccagcatctggcgtcgcgttttgctgatgcgtcgtccgagcgaatcgtagcggtagtgccagcgggtctggccgttatctttctctatggtgcggccgtgaacgtcatagcgccagcgaatgccgttcagctgcgtcaggaggttgtgcgtaaccttcgcagcagagccttccagcgggttaccggtagcatcccagcgccactgcttctgtccgggcagcgtgccgtcctgaacaagctaacgcccggcgctgtcgtactgccagcggtaccagctaaacgggttatcgtcacgctattcccgtaccaggttattacggtaatcgtaatccaagcggcgagaccagcggcgcggcgacggtcgctgggcattgccagtgaattcatcccggcgatgcagtcgaccaagatggtcatactcgctgcgggttgtaagcagtccccgggggcggcgattctcaaggtggagtcgttcgtcgcgggtatactgacaatttattga

SEQ ID NO: 155779 - DNA, 357 bp, Enterobacter cloacae
atgaataaaaccaattttgaagaaaaacttgagaaatcattgtcaattatgaagcaaaagaatatgtgggagttaaattatgcaccacctttatataaaaggttatggaaaaaaggctatcaaatcccgccacctccgtttgcatctgtatggctaaatgcattaatatttgggatgtatttttcgattgtatggggtgggcttatgttagtcctgctattattgcttgatctcttcgagattaaaacttttctaatatattcagtctcggcaggtttcctttttggtatatcaatgagtatttatcatttatggcgaagagtggtaaatgaattgcctgaatgggacgatttataa

SEQ ID NO: 155780 - DNA, 1272 bp, Enterobacter cloacae
atgatatggcgaccggcattatggcttattgattttcctatgagcttatattggtattgtacgcattttactgcaattgctataggcatgcttggttgttggtatttagcaaaatacctaagcggtaacgatcaattggcatggctagcattattaactttgaacctttctggcattataaatttcgacataataagttacaacgacaattatttacttgttatgttgtggccatggatgtttttatttttttatttttcaattactcgtcatccggcgtggtggttattgttctccattgcagctggattgggaatgatggctaaatattctacttttgtattcgtctttgccatcttcatcgccacaatttttgtgccaaaaattcgctattgttaccgttcgccttttttctacctcgcgatattcctctgtgtatgcattgtaactcctaatattttatggctttggaatcataactttgctgctgtagattgggttgattcacagataattagacaatttaatcctaaaatcattgtaaaaataattagcatattttacccacttttgtttatgctattaatattgcatcattataagctccatttaaaatggcccactgaagtttctatactcgtcattatatacatcgctttcataccacagttcttcatttggctatggttcctttttcatcacggaggtcgtttaacagagtggcttcagccttttttcattatagcacctcctattattgtcgcttgcgttagaaattataatggacaatcttttagcaaagcatttttagctttatttgcagcaggtttactttttctaataggatatatatcagtattagcattgaacatcagcaattctggtcaaaaaatgcaaggagtaatcacttttagccaaaaagttgaagcaatatggcagaaacattataattctcctttcaagtatgttggaggcgagtatctttctgaatggatcactttttatgcttcttcacgaccacaagtcataacccgctgggatgaaaatacccaacctaatatttacaacaaaaacatcgagtttagtgacattcagaaatttggtgctttgattatcggtcatgcagatggacaatgtgaaaactcaagctttactaaagcaataactcaatggccacaacttaagatcgattatattatagatttagactttcagaaagataagcaaagcagtatttacacggtctgtgttggattagtgaatcctgtatag

SEQ ID NO: 155781 - DNA, 1053 bp, Enterobacter cloacae
atgcaaaaacattctatactgataaaattaaccatcctaattattgtatatgtggtttttccgttaggaacaacttcttatgctgccatctctgatgcaaaaataagcaatccgatttattcagaaaacaatgattcagtatatttaaaatttatcaataacgacaatctaaatattgatgcgactacgccgaagttatttgtctcatttccagacggcgctgaacgagaggtggtagttgatactggctccacaggcttagtaatttcagcttctgcaataccaaatgcaagtaagctatcacctaggccaggtaaaatcacgtacaacagttccggacgtattatgattggatcttggctcaatacaactgttactattggtgatggggataaatacatttctacgaatattatcccagtattggctgttaacgaaatccagtgccttgctcttgcaagaaattgtaaacctgaactaaaccctgagcatgtatcaatgatgggcatcggttttgatcgagaaagtagcttgcagagcgaaagtactccaaacacaaatcctcttttaaacacaaattcaggaagcaataatggttataaacttacgcgcaacggcatatatgttggaattaataaggatattgccgaagggttctcatttattaaattacaaccttcaaaagaaaataaacatgaatggatagcaccgccagcatgtatcaaaataactggttggcaagggtatcagtgtggtacggtccttattgacacaggagtaaaaagtatgtttttaacaataccaaactacactttaaatggtggacaattacctaacggaacaacattagatattaaactagcagatggaatagaatatgaaattaaaattggggggcacaaaagaaacacttctcctaaagaaatatttttaaacacaactaggcaacatatattcgttaatacaggattcaattttttaaatggatatgacattttgtatgattatgaaaatggttattttggatacaaagagaatatatctcttccgtaa

SEQ ID NO: 155782 - DNA, 189 bp, Enterobacter cloacae
atgatcattgcggccccaatgcccaataaagttcttgcacaaattaacattatggtattagaagatatatatgctaaacatgatgcaatacaaaataatagcattccaatcagagatatctttttgaacccaattttatcggcgaatacccccatcggcagcaaaagacatgccataaccaacgaatag

SEQ ID NO: 155783 - DNA, 231 bp, Enterobacter cloacae
atgcaagatttgtgtaagatactggtttcatccccccattataaaggtgagaaatttagctggggtgataaaaagatttatgaatgtgccaatgaggaatttgttggcaatactacgaattgggtatcaatagatacaacacatcatgtaactcatatagttgcagaagttagagaattcgaattgattcttcaacatcaaagagactatcaaaagcaaaaacagaactaa

SEQ ID NO: 155784 - DNA, 870 bp, Enterobacter cloacae
atgaaaggaattgtactagccggaggttccggcactaggttatatcctcttaccaaagcggtatcaaaacaattattaccaatttatgataaacccatggtttattatccgatatcagttttgatgctggcaggtatacgtgaaattattattattactactcctgaagattgtgatttatttcaccgcctgctaggcgatggatctcaatttggtgttagctttacttacgtaatacaaaaatcaccagatggtttagctcaatcttttatattgtctgaacagcatattttaaatgaaaaatgcgcattagttctcggggataatattttctttgggcaaagttttggtcgtaaactcgaaaatgtcgctgaaaataatgatggtgctaccgtatttgcgtatcaagtactggatcctcagcggttcggtgtggttgagttcgatgctgattttaaagctattagtattgaagaaaaacctaaaaaacccaaatccgattgggcaataactggcttgtacttctatgatgaaaatgttgtcgattatgctaaaacagtaagaccttcagcgaggggcgagttagaaatcacatcattaaacgaaatctatcttaatgaaaataaactatcagtagaaattcttggacgtggatttgcctggttagataccggtacacatgatagtctgattgaggcatcgcaatttgttaacaccattgaaaaaagacaaggatttaaaattgcttgtttggaagaaattgcttatagaaaaaattggttaaccgctgaagaagtactcaaatctgcacattcaatgggtaaaacccaatatggtcagtatttattggatcttgtttccaaaagttaa

SEQ ID NO: 155785 - DNA, 1530 bp, Enterobacter cloacae
atggcacaggtcattaataccaacgcgctgagcctgatggctcagaataacctgaacaaatcccagactcagctgggtaccgcaattcagcgcctctcttcaggtatgcgtattaacagcgccaaagacgatgcggcaggtctggcaatttctaaccgcttcacctcttctatccgcggtatgacccaggcggcacgtaacgccaacgacggtatctccctggcacagaccaccgaaggcgcgctggaagaagtgaccgaaaacatgcagcgtatccgcgagctgaccgtacaggcgaaaaacggtaccaactccgccagcgacctggactccatcaagaaagagatcaccacccgtctggaagagattggccgcgtagcggaaaccaccaacttcaacggtgtgaaagtgtttgacggctcgaaagagaaaattaccattcagatcggcgataaagacgaagacaccatcgatatcaagctgagcaagctggatatggaaaccttgggtctggataaatttatggatgatttcgcggatatcgggattaccttgaatggtgcgggtattgcgggttctgattatgagggtccagcaaccaagcttgtaaatggcactgataccggcgttaattcaccagataaaggtgagtggaaattctcaacagcagaagcaagtatttttaaagacgctataaaagctaaaaacggtggcaccgctccaggcggtgccgttgagatttatcagcttgatggcgaagtttttgctcatgatgttgccgctgacaaaatgtataaagttgatgccagcgcaataacatttgatacacacgacactgataacacaaaagctaaagtgacagctgttgcggaggctggtttgacagaacttagtgctgaagatactgacatgctggtgaaaggcccgagccagttgaccaacccagtgaaactgaacctgggtgacacaattaaagcggcagacaatactgatgtgacgctggatgaaacgcagctaaatgccattgccaattcggctttcaagcaggatgccgaggcagctggaatgcagctcttctccgtgacagagggtgctgcaactaaagtcttcgcctatggtaagaacgcagcaggcgatacaattgttaccgaggttgaattcgcaactggtggtgcgacaccaggcggtctgaatacaccagcagcccgtcccgctgacgttgaatttatcagaaaagaagcgggcgattcgctggccgatggtctgctggccaagctggatgaagctctgaccacggttgcagacttccgcgccgatctcggtgccgttcagaaccgcttcagctccatcattgcgaacctgaacaccaatatcatcaacaccaccgaagcgcgctcccgtattcaggacgctgacttctccgtagaagtgtccgccatgagccgcgcgaacatcctccagcaggcaggtgtttccgtactggcccaggccaaccaggttccgcagaacgtgctgtccctgctgcgttaa

SEQ ID NO: 155786 - DNA, 1122 bp, Enterobacter cloacae
atgaaagccgacaataaaatctattcattacattatatgaggggcatagcttgtgttttggttgtgctattccattttagaggggcagtgaacggcgtatatgcgcaaaatgatctaggtaatcttttattcttgcacggagcgataggtgtcgatttattttttatgattagcgggtttataattgcctatgctactcaaaaaaaagagtctcaattgtcatttctttccaagcgattctttaggatttatcctgtttatataacatgccttctgttattattttttagcacttcccaaacttttgatttgaattttattaaatctatattttttatacatttaaattatgacgatcatgctccagtatatggttatacggccatattttctgcgtggacattaacatatgagattgcgttttatgtgctgtttatggtggccatggcattaaatcacaaacatcgagtaatgctatgtattctcattattttagtaattaatttaactcttcagacatatttcaataatggagagtataatcttacagcttcaacgtcagcgaattatgatggtccatttatagggctaataaaaatatattcctctccaatgatgctagagtttgctataggcttaattgtcttttcactccataactgcttagattacctaaaaaacatcaacaacaaatatatttttaatttttgcatttcagtaggcttttcttatgttatatactgctacatgtcgggatatggtacatttattggccctaaaggatatggcgttatctctctgattttatttgtatgtgttatttcatgggagaaggtttatgggatgaagaaaaataagacgctagagtttttaggcaatatttcatatagtctttacctaactcatataattacacacttcatatttaaagaatatcagtcaacgatccctttgctatcaactggggttggctttagtaaactttttattatgatgtcaatatcaattttactggcctcagttttatatgttacaattgagaaaccatttattttagctggaagaaaattactaaacaaaaaacagcatgaaagatgttactcgtctgctcatgaaaaataa

SEQ ID NO: 155787 - DNA, 168 bp, Enterobacter cloacae
atgaagtatgtgaatctgggtcgtagcggtttgcaagtctcccgtctttgtctcggttgtatgagctatggtgaacctgaacgcttgcctcaaccctggtccctggatgaaaaggcgtcacgtccgctcattcgtcaggcgcttgaagcgggcattaattttttttga

SEQ ID NO: 155788 - DNA, 654 bp, Enterobacter cloacae
atggtcattggagattttgatgatggcggcattcttcgtacagcacaaggtcctaagtctaaggctttccatttttcggcacgaatgtgctctttatgcaatggctctcgtacacagcctgcagatcaggaatttgatcgatttcacactttagtttcatcgctgttatcagaaggcagggacccttctgaggtgtttaatatgccacagtataatttggactcagaagcctacctcaatgtgtttagatacttttccaaaattttatgctgccaaattgcagaagcaggcggccctcgcccattagaagcttgcgaatttgctataggaaaaacgagtaggaacattatctttctacaaattgatgtagatccaatctacctgacttatcgagatacatgcggagaacatggttttgctagacatggaggacttattgtcctttttgactcaaaaacacacaatccaacatgtttccagagcttgttaagtttgggtgctgtgagatatcttttttgggttagatttgatgcacttgttggagctgagttacgtatatcccaccatgaattttggctcaaatgtgaggccgcgtatcaagaggctataaaaaatccactatcggatgaacagcgatatcgcttaggtatttaa

SEQ ID NO: 155789 - DNA, 528 bp, Enterobacter cloacae
gtgacgctgtctcagccgctgggggaaaccaacgcgttaatcaaagccccgggcgcgcacggcgtgaatattcgtaatcagtccggcgtgcgaacggatttccggggctatacggtggtgaataacctctccgtataccgcaaaaacgatctcactctcgatccggaaaatatgcctgacgatgtggaactggagatcaacacccgcacggtcacgcctacgcgcggcgcggtggtgaaagccgattatttgtccaaagtcggacgccgggtgctgatgacgttgacgacgcctgagcagttcgtgccgtttggcgcggttgttaccctggcggatgatgacaagagcagctttatcgtgggcgatcgcggccaggtctatttaaccggcctgcgcgaccagggcacggtcctggcaacatggggacatcaacctcaccagcagtgtcgggcagattttagcctgccgaatggagcgcaatacggcggcatcacggacatcagcgtctcgtgtcgccaggagcattaa

SEQ ID NO: 155790 - DNA, 321 bp, Enterobacter cloacae
atgggcttcccgtctccggcaactgactacctggagcaaaggctaaccattgatctgctttgtggtattaatggaaactgccggatcatagagacatcatgtggatgggcggtcattaacgttgccctgagacctcagcagggagatacattactggtcagcatggatggacgaaaccagttcgtcaaacttcatggggaagcactcataacggaagagggcgaagcgattgaaggtgaggcgctggatgatgtaacggtgtatggtgttcttacccatagtataaatcgggtcggaaacgataattgtccatcaatatag

SEQ ID NO: 155791 - DNA, 240 bp, Enterobacter cloacae
atgccgcgccaatcagatattcattcagcctttatctcagctatacaactaaatccaaaggggtttcgttgcatccatacagatgattttattaaagctctgcgattgtgtaactggcattttacccaggaagatgcaaaccagtggatcgaacgttatcagcctgactttgctgacaagacgacagacggcagcgataaccgttactggattcttcgtaatatggggaggatattctga

SEQ ID NO: 155792 - DNA, 582 bp, Enterobacter cloacae
atgggtcagaaaattattacgttgtccggcgcggcgacggatgttctgtatgcgctgtttttccgtggcgcgcttcagtctggtgacctgccagctaaatctggtgccgctgagcttcgagagttgggattcgctgaaacacgccataccgcgacggagtatcaaaaggaaaattatttcaccttcctgactgctgaagggcaggagtttgccattaagcatctggtaaatacgcgctttggtgtgccagtgggtaagcagtattgcagcgcaatcaaaattgatgttgagctggacacgtcagacgcacaaaaggttcttgacgaattggacgacaaaatccgaaacaacgatgcatttaaggccatgaaagacggatggcagctcgaaaaaaacggaacgatgattattaataacggccaggtattcataaaagatgccttcatcgatcccgaaattaagaccagtgtgaagctatcccctgaaatggaaaaagctatttctgatgctgtgtcagccgaacttaaaaagaatcttaagcccggtggcataatctgggattgcttacggcgtggaatctga

SEQ ID NO: 155793 - DNA, 309 bp, Enterobacter cloacae
ttgtccgcgataaaccacataaaaaacccgttaacgattatcggtatttttgcggggatagtagaggtctctgcaaacctcgtattaccttttcttaatgattcccagcaaagtacatatctttggtttttaatgtttttcccggcagggcttgtaatagtgttttttttgacgctgaattttaatcatgttgcactttatgctccaagcgattatagcaacgatagaggattcatgcaggccaatggtaaaatgatcggtaatgatgttcaggatactgatgcaacacaaggctttgaattaacatga

SEQ ID NO: 155794 - DNA, 288 bp, Enterobacter cloacae
atgaacggcggcaactacacccgagccaataccgaagacatgctgatcgccaccagaggtaatggtcttgagcgcaagaacgccagcgtgaaacaggttatctacagcccactaggtgagcatagcgagaagccagcagaggcccgtttccgtctggaaaaactctacggtgatgttccacgcattgagctattcagccgttgcgccgcgcctggctgggacagctggggcaacgaatgcgaaggaccatcgctaacttacatcaacggatggtggaccgaccaatga

SEQ ID NO: 155795 - DNA, 336 bp, Enterobacter cloacae
atgggaaataaggttcaggaacgtcatgagagtaaccctgaactgatatgcgatatcgttaagactttgccactcgctccggtcaactacaccatcttcaatgtaatgacggtaagcattgaccagctcaccaagcctccccaccagctcggccagtttcaggccaatctcttcgttttcatcatcaggcacggcgccgggaacgtgagttccgttatcagtttcacgagagaacgcgtcagcgatgtaacttactccagcagcgctttgcagcaccattgcccagcccattggaaagatctggtcgccaccagcacgaaggcggttaaagagtga

SEQ ID NO: 155796 - DNA, 180 bp, Enterobacter cloacae
atgtcagcagaaaccttgtcgtatcaatgcagagactcccattcacaagaagaggtgctaactacatacgagtggcaggcattgtactttgaaagcatatttcatcatgaaatggcggaagcttgcagacaggcagcaataatagtttcagcagcaccgctgcaggaggtgaatccgtga

SEQ ID NO: 155797 - DNA, 546 bp, Enterobacter cloacae
gtggctgcaacagagcgtgtacttgagcgtcaaaatggtaacgtactgctcgttggccattcatgggcaggggcggtgatcacccaggctggtaatgcgaataacgtaaaggggctcgtctatttgtccgcccttgttccggacagcaatcagtctgtttctgacgcacttgcgcacttcaatgcccccatgaaaggtatggaagccgataaaaacggcctcatctggcttgataagccacagttgtttcatcaggttatggctaatgagctaagcatgaaacagagccttctgatttctgcggtgcaacagcctatcgccgctgccgcttttaacgaaaaagtgaacgcggcagcctggagagagaaaccctcctggtatctcatcacagaaaacgataacgcgctgaacccgttagtacaggcaaattttgcccgtgaagcaggcgcacatatcacacgaattcactcagatcatctatccatgatttctcatcccaaagaggttgcagcactgattgtaaatgctgcgcagagtattcactga

SEQ ID NO: 155798 - DNA, 759 bp, Enterobacter cloacae
atgacaaccttcgaaaaaataattgaatatataaaagaacacaaatttctttctacaatggtggctcttttaaccatcttcattttggcgctccctcttatattgtatattgcgaaaaccaatgcatcgctttccactgaccccaacaaatgggctacatttggaacttatgttggaggtgtatacggccccatagcaactataattagcgttttagtattaatcattacagttctagaaataaatgaatctaataagataagcattgcagaagctagaaacaacaattttataaatgaaattgtaaaacttacagagatcctatctaactgtattgataaaaaccctctaataaatgatagagcctatttatttaaatggcttaatgttcagatggtttcaaatttaaaaaaaagcccccctagcgatgaatatgacatttggaaagaatgtatcaaaaaatttactaaagatgaattttctctcttcgaaaacgaagttgctattatagaagagatactattaaggatccattttgtagaggatgaaattctaaaagctagagctagaagtatcttcaaggggataatgactaataatgaaagattctggctcgaatgctacatacgtaggtttaactacccattagttcattttttgtccctctggaactccttcagtacagttcctcagtcgctagctgatacaatcgtagacaagggcattgaggatttcattcaagaactcagtggcgactaa

SEQ ID NO: 155799 - DNA, 1167 bp, Enterobacter cloacae
gtgattacaggtatgaatattcaggccggggcaaagatagccccggcttttatgctcaagcaggataacgaagatattacgcaggattttagcgaccggttaatcagcctgaccatgacggacaatcgcggattcgaggccgaccagctcgatatcgagctcgatgataccgacgggcaaatcgcactgcccccgcgcggcgcaacgttaacgctgtggctgggctggcagggtagcggcctgataaaaaaaggcactttcacggtcgatgaaatcgagcaccggggtgcgcctgatacgctgaccatccgggggcgcagcgctgattttcgcgggtcgctgaactcccgcagggaacagtcatggcacgacaccacgctcggcgtcattgttgagaccatcgcggcgcgcaataagctggaggccagcgtagccgacacgctgaaagcgatccccgttccccacattgaccagactcaggaatccgacgcggtgtttctgtcccgcctggctgaccgcaacggtgcgtcagtatcggtgaaagcggggaaactgctattcctgaaagctgggagcggtaagacggccagtgggaaatccattccactgatgactcttgagcgcggcgatggcgatcatcatcagtttgccatcgctgaccgcgaagcctacacgggcgttacggcgaaatggcttcacaccaaagacccgaagccacagaagcagaaggtgaaacttaagcgcaagcccaaagagcagcaccttcgagcgctgcagcacccgaaagcgaccaaagccccggcaaagacaaaagccaaaaaagagcaggaagcgcgggagggtgagtacatggccggtgaggctgacaacgtgctggaattgacgacgatttacgccacaaaggcgcaggccatgcgagccgctcaggcaaagtgggataagctgcagcgcggggttgcggagttctcaatctcgctggcgattggccgtgctgaattatttcctgaaatgccggtggcggtaaaaggctttaagcgcatcatagacgaacaggcttggataatcagccgggtggtgcataaccttaacgggagcggctacacgacgggcttagagcttgaggttaaggtttcggatttggaatacacaacggaggagatgaaatag

SEQ ID NO: 155800 - DNA, 672 bp, Enterobacter cloacae
atggcttttagagcagaagaagcagcggctgcaaacttcgaacgtgcttatcgatacctggtaccacagggagctacgcaagaaatgcgcttcaaaattagggagaaacttaaagagattgttgaagagtgtggtccagttgttgagggatatccggcttggcatccttttatgatggaagcggataataccagttgggctccaacgacgcccaagagcaccaacagctttaactatctagatcatacggtgtattttcggaatggcattcttacctgcccttacggccatggcgttgatgaatttattcaaacaatcagaaatttaaaacatcgagatgctttcataacaattgagagagtagaaaatgttgtactctacaatgatgctgcagttccattactaatcaaatgcgattggaatatctctgaagagatggaggcagacggcaccattcccccaaaagtagcaattggattgatgcttgaaaacgaagttccaaactggagaaatgccgtttattgtgagagttgggaggatatgagaggacaattaatggggtatccttttggagccaggtcctctctgtttgtaaaccaacagacgggtcagaagatgaaaaatttttggaatcacttaataaaaacaggcctgcttggggaagaacgataa

SEQ ID NO: 155801 - DNA, 579 bp, Enterobacter cloacae
gtggcaacttcaatagtgttagtgacacaggatcgctacctcgtcagaggaatgaggatattttttccggatattatcctgctggactcgattgacagaaagatatttgataacagtgcagatgaatattctgtgctgattgacagccgttcaccgctccgtctgtatgattatctgatacgccatccggccagaacgagaaaaacaatcggctgcgtcatgctcgatatgcggcaccgggaggagaatcagctcagcatgaggatgtttatgaatactgcgcttccggtggctgacatggcgtcgttgtttaatctggtgctgaatatgaaaggcaggcgcctgacgaccaaatggctgcttaacttacggttgagtacccatgaagcgattatgctgcggttgctcagggcgggcatgtcgatggaagaggtggcggacgaactgaacacctcgattaaaagcctctaccggacgcgaacggcgctctctgaacgactgggggcggagaattttaacgaggcgtgtttgtttatctttaaaaacaaactgctggatggagatgggaacgatccctga

SEQ ID NO: 155802 - DNA, 729 bp, Enterobacter cloacae
atgtcccaacaagaaatcagcgtcattaacctcgaccagcttgtctccatgacctcagttgaaattgctgagctgacaggcaaggagcaccgaaatgtcctgcgtgatattcgcaatatggctgaggagcttaacgcgctcaaaactgagcagtgctcaaaactgagcagtcatatcggggtgactgaagatgtctatctaaacgcgcaggggaaacagcagccgctgtatcgtctcgaccgtaagcatactttcattctggtcgctggctattccgttcacctccgcgccaagtgttacgaccatattcagacgttagagcgtcgagtccttcaactggaagaccagaagaagcgagcagccattcagtccgctaaccgccgaggcgtgacttggggcgactactgcaaaacctatggtctgcccgctcagaagctaatgaccgcacttctccagcatcgtggcctctttcgtaagaacccaatcagtaacgagtggtctgtaaatccgaagtattccaactgctttcgtatcattaagccgtcagaccagaagttctcagcaggtgggtataacttccggttcaacgctaaggggctggaggtcttcggtaagcctgagatggttgacaagatgcgaggcatccttattgcattcactggcaccgaccagcagaagcaagagcacctcctgaagctggcacaatccggtaaggtggagggaatctaa

SEQ ID NO: 155803 - DNA, 948 bp, Enterobacter cloacae
atggttaagtttacgggaaaagataatgaagggcaaaaatttcgaatactttctttggacggcggtggagcaaaaggtttctatactcttggcgtacttaaagagatagagtctttgatagaaaccccattgcatcaaaaattcgatttaatttttggtactagtactggagcaataatcgcatctttaatttctttgggttataatattgactcaattttagagctttatcgaaaatatgtccccgctataatgtcaaaaaagagcgcttatgaaaaatctgtcgctttagaggcgttagcacacgaggttttcggtgatgcaatgtttgaagatgtaaaaacaggcataggaattgtgactgctaagtggttaactgaacgccctatgattttcaaaggaaatataatgcaggctcatggacggagaaaatctttcattccgggatttggtgttagtatcgccgatgcagtcaaagcgtcttgctccgcttatccattttttgaacgtactatcgttcggaccttcttaggagaggagatagaacttattgatggtggatactgcgctaataaccctactttatatgctatcgcagacgcaatcaaagcttataatattgaccggcataatgttcgtgttgtcaatattggtgtcggtaattacccagaacctaagcctaggttactcatgcatctggctaaaaaatacttggttagtgtacaattattgcaaaaaacattagagataaatacgcagtctatggatcaacttcgtcaaataatgtttgatgatgttccaactattaggattagtgactcatatgttgcacctgaaatggcaaccggcttactcgagcatgatatcaaaaaacttaatattctctttcaacgaggaagagagtcattttcttcgcatgagaatgaactcttaagatacgtgatgtaa

SEQ ID NO: 155804 - DNA, 534 bp, Enterobacter cloacae
atgcaattattattcagaattattgctggcgtggcaaccgccgtcggcgcagccgtatcgggtaagctcctttacaacaagggcaagaaaaacggcgtggctgaagaggcccaacgggctaaagcagagtattctcagcaactgtctgaaactttaaaggatttattcagcattgccgcaagagaaggcaaacgagatacttttatcctgataggttttgcgctggggcttcgttgccttaaaagctttgacctgtacacgcctggcaacattgattttctggatgagtatgtatcaggcttgagtggcagcggtatgctcgcaccgttagttcgagcaaaaatgaatgaatatatagttagcccgcctaatctgcccaccatttgggcgatgattgaagataatgagcttatggccaaatactacacggacaggttcagcgctgtcatagatgctatgtacgagatggatgagactaaaggtaaagcagcttcagactttatcgctgcctggcaaacacttgttgcggcctga

SEQ ID NO: 155805 - DNA, 1680 bp, Enterobacter cloacae
atgagcgaaagaaacgatcgccaggttagaagtattaaacggcgtatgaggggttcattacccaagctcccccctctggcttcaacggactcaatagcagtccatttatctggtgagatcgatgctgaacttgtagcaagcaataatctgagtaagcaatacagccaaaaattcagcctggaaaatttgaatagagccatcagtaacgacgaagtgctgtcgcgtctggagtttatttcgaaaggcaatgctatcgacaccgttcttgagccggtgtttatgagtttaatagacggcaccatgcgggcctgcaatatcggtgtgcgccagggcataaccccgtctaggctgtaccaggaatgtaagttctttggatatgactctgaccccaaaactgatttcatgtttgacggttacactgagcagcttttagaacgggaaaatatcactgcttacggtaaaaccgccagttataacgaaggaaaaatgacgcgaaacggcgaaactgtcgacctccgtaatggtaagaaaatggataagcacaaagaagcttacttcggtgatagttggactggctctgacgaatacggcggtgaagacatttacaaaacaaaaacgtatgccaaaagtaaggagcaggatggtcaggccgcagaaactgaccatgctatttcttgttcagaaatatttgaacagcttaaaggcaataaagcgcttaatcctgaggacatcaaaaacattgcaaatattgatgagaattacgccgtcacttccaggacaaataatcgtggaaaaacagtaggtaagtttgcaaaaacagtcaaagaaattgagcgggaagtaaaggaaggatatgttgaggataaaaatggcaaaaaaaaacctctcaccccggaacagattgagaccaggaagaatcaaatttacaaaatgaatgcctcgcaagaagcggtaaataaaaaaacaaatgaaatagttgcgaaaaatatcaaatctgaccggggagtacaaaaggtactttcgactgacgcggctaaaggttccgctcaccagtcgctgggtgatttgatcatgtttgctatcaagccgctctattacgagctacgctcatgcttttcagagggtatcgaggccggggtcggggctaaagatttcagcgaagctcttaagatccgtatggcccgtatgaaaaaatacgtgttggtaaatgcggttgcacttattaaagatgtcgctgtcggttttattaagaacttcatttcactgcttgccgaaggcatcgttaattgttttgttggtgcattcaaaaacatcatgaaactggcaaaagaggggctgagaatattaattcagtcagtctccatttttgccagcaaaacaagctcaatggctgaaaaaggcgatgccatactgaaactcgtggcaggctctttatcaatattcagcgcaataggaattgaaacatggctatgcagcctggggcttcctggtccgatatcaatcctgctggcatcagtcctgaccgccgttatcacgtccattctcatgctttctctggataaactagatttgttcggcacaaataaaaaactaaaagggcaacgtatagacgaattgctgactaaggaaatcgctgccacccaggccgggattgacgtcctaaaagctcaactaagttag

SEQ ID NO: 155806 - DNA, 534 bp, Enterobacter cloacae
atgtcgattcgtggtgcagcacctattttggagaaactttcatatatgacaaagctaggtaccatcaattttgacgatcgtattattgacgcccttcgtgatggtcagattgttgtcttcgctggtgccggtgtttcaatggggccgccgtcgaatctttccagtttttggaaattgaccagtgatattgctcagggtagtggatacgttccctgcgaaccattggatcggtttctaggacaattgcatccacaccttggagacgaatttccggaggccgtggctttggctattcgcagccccaaaatccgaatagggcacagtcatgttttttatgacttgcgcaccagtgagctggtaacaagattcccaactgaaacagcagagctgctggtttatctttcaagctgtacttttggttataatgcgaatgacctgataaaaatcgagatgcgtttaccccttatacctgcaaatgttcgtcgtagcctcgatgaagcatttgcccacgcaggtctgataaggggggaatag

SEQ ID NO: 155807 - DNA, 189 bp, Enterobacter cloacae
atgagattattaggccagaatcatcttccaagccaaatcctattaatcccttcccctctggagaaattcaattcagatcaacccccgcgtcggagcataaaattgtccattgcgttgcgttatcaggccgctcaccgccaggatcatgcagatcagtttaaagactttgtcctccggtcagcggcataa

SEQ ID NO: 155808 - DNA, 171 bp, Enterobacter cloacae
atgagttgtgagatcctaaagacagaggtccgcgtgatgatatcggtttctattaatgtgttttcacggctatcaacaactaagggaattacggccatgaaaagctggattcgtcctgattcaaccttagtgcgcataatgtatattatgttaaatcatattgattgttaa

SEQ ID NO: 155809 - DNA, 1065 bp, Enterobacter cloacae
atgcttcatcacagccaggccatgtcactggacgacatctaccttgaggacattcctcacattatgcacccggacaaggcggcagcagacctggcagatacagcactcccaaaccgcatcatacaggagtggaatttaccgcagggctacacgcggtttgtcagccgttatcaaccgttccactggcagcaaccctggatggcttaccgtgacacgcttaacgacatcaaatccggaaagctcgttctgctgagaaaagacgtaaccgggcatgccatttcgggcgtgctgacaacatccggtgaccttcgcaataacctgcctttgttccttcaaacccggctcagttacctcatttcccggcagctgaaacgccctggttatcacgttcgtacggcggcaccgacgcaacatgcccaggcagcaaagaccatcaacagcaaaactgcaggtcgattgctggccgcgggtgggatttataatggcaacatcgagggattccaccagaccgcccagcagctcggtggcgatgcgccagcgggttataatcaggttatggacaataaagggatgattattgctgcgacttcggttgctgcgggtcttgggcttggtagactgggggcagcgagtgagcttagcaatctccatgttctgggaaaagtcgagggggaatattcgatgataaagccaggaccattgagcgaacgctttgctgaaacattttcaggcggagcttataaggaaataacattgtcccatgacaccactttttttagagggggtcaaagcggcactgagttggggcgatttttcagctatgaacgacctttaggggtactgcaaacacgtgtcgataaggcggtgttgccaaaatggccagacggttctgaatccgtgatagatagtttttatgagataaaaattcctgcaggctcgaaggtgtatgtcggagaggtaggctaccagtctgatattttccctggtggtactgagcaggttttcatccctgcgccttgggaaattccaggcgtggaaacagttaattttggggggttgaaatga

SEQ ID NO: 155810 - DNA, 1941 bp, Enterobacter cloacae
atgtcttctctatcgcaccctaagtacagggctgacatagatggtttaaggtcgatagcagttcttgcggtggttatttttcatgctttcccatcgcttttacctggaggctttgtaggtgttgatatattcttcatcatttcaggatatttaatatctactattatctttaacaatgttaacacaagctcttttagctttgttgacttctatatacgccgcgctaacagaatatttccgtcgctggtattagttctgctgtcatgctgggtgtttggctggttctctttatattcagatgagtttgcccatttaggtaaattgatggctggcggtgctggttttgtggctaacatcgtcctgttgtttgaaagtggttattttgatgccgcttcagagacaaagatccttttgcatttatggagcctaggcattgaagagcagttctatcttatctggccggtgctgctaatagtagcaaaaagactcaagtttaacttcctgtatgtgacgttactctgcatattaatttcatttatatattcagttaaaactcttccagttgaccctactcttgcgttttactcgccattgtcaaggttttgggagcttttgctgggtgcattacttgcatggatcacaataaatcagaaaaaaatttctcgtggtgaaataaacaaaggatatgcgctgcaacatgcagcgtcattttctggtgtagcattaatcactttatccttgatattcgtcagcaaaaacaattttcctggcgttatggctttagggcctaccattggagcaattctcatcataggctctggtcctttcgcctactttaaccggtatgtattatcatctcgcccactcgttttcatcgggataataagctacccgctatatttatggcactggccgatatttacatatctgagggtcatcaacggaacagagccaacatggttggttatgtctgctgctatcctggcctctatcgtcatgtccgtagcgacatactatttatgggaaaaaccaatccgatttagtaataaaaaagggataactgctatcatactgacgttgtctgttgcgatcatcggtttttctggatactacactttcaccagcaaagggattccgtcacgctcaacggttgagaacgccaagctcatcaactcccagttcgttggtgctgaatggaaattctctaaaaatgatatctgcctgaaccgctatccatttgaagacgcggataattacaagtggtggttctgcatgcagaatgaagacagatcacctgatgttttgattcttggaactagtttcgcaaatcatctattccctgggcttgttgataatgacccagagcataaaacattcctgtcaattggaacgtgcgaccctttcctcgacgaaaaacaatctgagtggatgccagctatccacccttgctatggttcacgtgcaggcgatcagtttagatttatcaataaagttattgagaataataaatccatacatactgttgtgattgatggtctttcagttaaccctgataaggagtacctgaacagaatcggcaattacgtgaaacatcttagtgacatggatatcaaaactatcattttcattcctcatgcgcggcctggttttaacaccaaagcttgctttgccagacctttcaaggagcctacaaattcatgtgtagtggatgcggatgaacataataagactgtaaaagcatatgaaacgttcgcacatgaactaagaaaacaatcaccaagtacagttttcttcgatcagagcaaagcctattgtgatggtaaggaatgccatttcataaaaaacagccttccattattcagggacgaaggtcattactcattttatggcagtgacctgataggaaaggaattctacaacttcattagaaaacaaaactga

SEQ ID NO: 155811 - DNA, 2628 bp, Enterobacter cloacae
atgaccactacaccaacaaatctgccagttccaagtgaatcacctatcgacctgaagtttaatgccggaaaaatcgatgagtacgttacatcgatgggctggacctataccgaccgtttcggagttaaacactacaccatcgaaggtgttaattatcttgcccagcaggtgatgaatgcctttggctacgtcccgcttacaggtgttacattcacaactggcgctaccctgaataaccctaacgaggttttattcaatacagcagataacagctattacaaatggacgggttcgtttgctggcggcccaaaggtagttcctgctaactcaacacctgaatctacgggtggggtcggcccgggtaaatggttgagcgttggtgatgctgttttgcgagggcaggtgtctgcgaaggatggatttaagttaattggctcctgctcaagcatgacagaactgcgaactgttgtgcctgagtatgacgggcagaaaatcctgctgctgggttattacgctgatcgccctgccagcaaactggagacatatgtctggtctgcgacatcgactgccactgatgatggcggcagggtggttgcagccaatggcgtaacgacagggcgctggatccttcagcagtcaggtaatgtctttgacgccagagtttttggtattcgtcctgaggctgcttattccggctcaatgactgacagcgcggctatgtttgcgaaagcacaggtaagcgttggcacgaacggcgttattcatttccctttgcctgacggctggacgagcgctcactatctgattgatgcggcgtactcgtataactgggctcagtcatggatttctgcagaccctggtgttgtcatccataatggagcaacgaacgacgacgaaggtaagaaaccacgtcttaaaagtgacgttgtttttaaccagaccacacccacttcaagtactgattacaccactaaacgcggctcgaatgattacgatctgaagtctgcaatcgcaactgctatcgccacggcagtgaacggaattggagcgaaaacgctaccaatgaactttacgcaaaccgcacgcgcaattcagtatagctctcttgatgccaactcatccggtatcaactacacatacactggcacgggtatgacaattcaggcagacaaaatttcctggtcagatgcagcggctgcaggatcgtcatggcagggtgtgagcttcgcgcttaaaacagggtcagagtttgaagtgctgctggagaatactggtaatggttcctcaggaacgatctttgtaggagcaaaaatgctggggcatgctggcgggtcgagcacaaccctaggtatgcggatgaccattactactacaactgccgatactgatagcacgaacatcgtattcactaatggtaacaccacactacgaacgataactgtatatcatcctgctgaaatcattaaggctggtgctaataatggggtacgcgcaggcgtgcgcatgcttgatgctagaaaaatagggctaactttaaacggtaagttgattcatacaatgagcacttctagcactcttgttcgagaaggcatcatagttatggatcagaatgcccgcggtagtatgcgtatcaagtacgggcatcataaaaaccgtaagctgaacccatatgcaatgccaaagacccttacctgtgtcggagacagcataacccgaggtgcgcgatcatcgaatgaatggccgcgcctgttagaggcatatggtgagcacatgcctggcatcggacgaatcagatcggttaccaacacgtcagtttcagggtggcgtcttcgtgattttgttatcaatattgccaactataacttcaccggctcttactatgttctcattcaactgggaacaaatgactgtcagggtaatgttgggttgtcgcagtattacaatgacgttgttactttcgggaataaggttctttccgatggagcattcccgatttttggtatgttccctaaatatacatcttccactattactggcggcggcaatgcaccagtgaacatgttacggatcgctcaataccaggcagttctacgctgggcgtgtgatgcaaatggattcgctttggcgtttcctgacgatttctttggggaaaactacgggtatttagggtcatttaacaacactgacaggtttagtgatatgtggatgaatgacagtatccacccaaacacaagggggcaaatagctatagccgctgcatttatgtcggcactttcccgtgagcttacatctccgagtgaagcttccatctcgcatcttgccaatctggcaagtggggtaacggcttacgcagaaaccacttatggccttcctactgtctccagaattgatgacacggtatacattactggtgccatagttggtggggcagttaacacgtctgtcatgagtattcctgattttgcactacctccacagcaggttgctgctacttgtttttccagggatgccggaactttgggtgtctgtcaggtttatgcaagaccaaatggacagttagttgtgggagagcagtacaaaagtgcaacggctggttggactgaaatcaacatttcatacaaagtgtaa

SEQ ID NO: 155812 - DNA, 546 bp, Enterobacter cloacae
atgaatcacccaagcattgttatcgaaaatgttcacgtcagaagtaatgagcacggaacctataacctgaacgatatgcacagagccgcaattgccggtggacttgccaagaagtggcaggtgcctagtcagtttatcggtgctgatggagtacaggcttttgtcgatgaggtttccaaagtgctaaaagacactttggagcaaaatcagatacttgatgttatacacggtggagctaatcgtgggacgtgggcgcatgagttgatcgccttaaagtatgccgcatggctttcggcgtctttcgaagtgaaagtttatcagaccttccgcgatgtcgtgatgggcaagctttccctctttgctgaggccaacaagcttgagttggagtatcagcataagaccaagcgtgtcagtacagcagctcgaattatgaataactggggcgttggcggtgaaaagcgccgtattgaatctgaaaggattcatatgcaggagcagattcagttggtcatccccggtctgccaaaaaaagacgaagcagcgtaa

SEQ ID NO: 155813 - DNA, 324 bp, Enterobacter cloacae
atgcgagccgttaaaattaaaattgatgaccagttttttttacttccagatggatttgattacgttttccccgattatatcaatgagcataaacccacgattgagcagtacatcgcagcagggaaagaaaccatagatgccatgaagaattacgggaaaactgatacaacagaacttcagaaacgtacgcgcctactgaaaaacgaactggcagaattcaagacacgaaccggcatcattggctttccgttcgattcaagagacgtagatctttacgcagcatcaaacgcgattgatattgttgcattgttcgatttgagttaa

SEQ ID NO: 155814 - DNA, 939 bp, Enterobacter cloacae
atgagcactattaccaaacaggccgtgcaagcagtcgccgatttgaaagccggttacacactcggccacgctgatgtggcaatcctcaacgagctggcgcgtatcgcgctggcatcgctcgaaacggaggctgtggctgatgttgttgcatggtcttcgccaaacgaggagagaacctgtgatgtgcgcctgcgtcgtcatgatatcaatgctggccctctgtacaccgcaccgccagcgccggtatctgatgaagaccttcttcacatggcagcgtctgcgattgacgacctgctcagcaacaaagacaggtctggtgccggggtgtgggcagatattcctgccaaattacgccgcgccgccatgcttcagggtgccgatggcaactctcaggtgatgaatgattatcctgaaaccttgccatgccctgtatcactggagccagggctgaaattaggaaagggagtggctaccaaaatattgcttgaggccttacagagtcgcgccaattattctgctgagattgaagttattaaagaggtctgtagagacatcaaggatggagattttcttgctgccgccaaaattaatagcagtagtgaacttgtaacgacggcttacaagttgccgaaaccaatcaaggaccatcgactcaactccggccctgatgctgacgattactatgctggctatcaggcggggtggaatgattctattggtgaggctgtcatttgcaactctccggtgattccggatggttgggtggcttgcagtgagcagatgccggagcagtttaaggccatcctggcattcaatgagtatggagaagtttggtctggtgcgtatgacaggtactggaatttctattgcgataatctgttagtagagcatgtcacgcactggatgccgctgccagcagcaccgcagcaggaggcatga

SEQ ID NO: 155815 - DNA, 225 bp, Enterobacter cloacae
atgatacgatttatttcgcgcatttatcacaacgtgttgctgttcttcgccgctttcactcaaagcgatgagatagcatcttatacccgtgcatacggtgtcacattgccctctccgccattcagacaattcccgacagtcttccatatttcctccatttttctgccgactgacctgactaaactagtatcattccccgaagtgtttcaggatgagaacgtataa

SEQ ID NO: 155816 - DNA, 576 bp, Enterobacter cloacae
atgaattgggcactagctatcgcgactatttttgctactcttttcagtccgttaattgccgttagagtgcaaaaacttatcgaaaaaaattccgaaaaaagaaacataaaagttaatatatttactgaacttatggccacaaggtcagccgcagctcgcctttccagtgagcatgttagagctcttaatatgatcgacttggcattttatggtgatataaaaggaagtatcaataaaagaacaaaatcagagaaaaaagtgcttgatgcatggaaagaatatttcactcacttatgcacaccctgtccagaaaatgatagcggtaacaccttgtggaataatactagcgataaattatttgtgaatttgctttctgttatggctgaagacataggctacgattttgatcgagttcatttacaaaacgcgatttatatgcctgttgcacatggacaaatgaatttagataatcaaaaaattcgcaaaggactcgcttccattttttctggtgaaactgcattgaagatggatgtaatttcttttcctaaatcctctggtgctcaaaagcctaaatag

SEQ ID NO: 155817 - DNA, 192 bp, Enterobacter cloacae
atgtcaacggttaaacgtgatcgaaatcagtcaaaatccggaaaagcaccgacttttcagattcgcattacgccagaactgaaggcgcaatttgaggctgctgcagaggctcaagggatgagtttggggaattggctcaagactttaggacgcaatgagttacgtaaaatgggtattgagccaaaaatgtag

SEQ ID NO: 155818 - DNA, 180 bp, Enterobacter cloacae
atgctgaccagcagcccgcagatcgactttgtgctgcgcggtattggctgggaggacatccatcccaggtcgttgcagcagttgcaggatatccacctcgcggcgggcgtgccggtggagaatgtcaccgtggtggtaccaaaggatggggtgtacgcggtgatggaggtgaaggtttag

SEQ ID NO: 155819 - DNA, 459 bp, Enterobacter cloacae
atgaaccctgtcgtgaatacttatctcgccgcccctaaagccgctatcacacacttcgactcttctcaatccgactcgctgccgtttccggttccgtcgggtgaaagtacagtgcatgcgtcgttaccgctcacgcctgctctaccgcaggcggtcaatggtcccattaacatcatgaccctcgcctccccctcacccgattatatgtggggagttacctggaccggcattacctatatcagtaccagcggtaatgcctttacacccgtagcacgccttcccgttccggggctgactcagtttcccatagacctgctggtgacactactcacccaacctctggattcacctggcgtgatcgaagggatctcttctcaactctcaccggttaccccttccgggggaattaacagtgcctattgccttgtggataacaccaataccttgttcgctaactaa

SEQ ID NO: 155820 - DNA, 1005 bp, Enterobacter cloacae
ttggggataagcattaaacgcacgctggatacctcggcatttattccggaaggacaggccatcacaggtctcgtgttgacctatgacgggaatctggttgtgctgggcacgcggtccatttcggtcgtttctcgcacattctctggcccggtgcataccctgacgctgggcgctgatgagtatgtttcaaactcggcggcggtagatgaacacggcggtatttatgtcgtctcggataagctgatgcataaagtcgtctggacaggcagcacgctctctgccgatccggccgatggcgcatgggtaagttcttatcccaccggtgatacctacccgaccatcttcggctcgggttcaggggctacgccgacattaatggggttcggcagcgatgccgataagctggtagtgatcaccgacggtaagaagcgaatgagtctggtggctttctggcgcgatgcgatcccaaccgggtttagcgagcgcattgcggggatcatcccggtaacctgcggtctgccgctgagcactgaatacatccagagcgatcagtccgtggcgattctggactacggtgcctttgtggtcaataatgtgggcgcaggcaccggtacgggaatcgcccttaccgacgcgctggcgcgcggcccgatccttgattcccctcagggcgttgagcgctttgcctgggatcccgtcagtcacagctggagctcaacctggagccgggctgatatctgctccaacaccatgatcccggccatcagctctgcgagtaatacggtttataccagcggttactatcgcaataacggcggatggaaggtggtaggtatggactggaataccgggcaaacagtgcacagtaccgtatttaacgacaatatctgcggcaacggcatttacgcgcagatggagtttatgccggatggcgatctcctgatgaatagcatcctggggccaatgagggtgcaattgcccggcggaaccgtgctgccgttatga

SEQ ID NO: 155821 - DNA, 219 bp, Enterobacter cloacae
atgggaagaattaaatctttaataatatcatcatcttttgacatggcaaagaaaagccataaatgtcaaagtaatgctggccacatcctgatacaaggtagcccgcgtttaaaagttaaaaatgggatgggttgggattattattgcaatgagtgtgcaaaaaaaataattgatagtgatattcaaagattatttgatttaagaaaaaaattccaataa

SEQ ID NO: 155822 - DNA, 1074 bp, Enterobacter cloacae
atggactatttcttctataatttgagccacgatataaacatccaatataatttagctcgcaaagatatgtacaagtgcctcaggttgccctttgacaaagtaaaaatcgacagagtgtgtgatgagaaaggtaacaatgcctcatatgtacgaatcacctacaatgagtgctacttttatttaagttattacgatttgagaccagtcacaccacattttaattgcattgaatgcattcccaaaaacagagatctttatatcattgtatatgaaatatcgcctaagaactataggatatgctggctaggagattgcgattgcgtcgagttcagaatgatggacactgaaagaaatcgtggaaagtctgcatctttagctgtgttgcttggtctgattttattttcactatctataggtgcatattactcatctagcattgacatatttgtatgttatgtcccatttttattactgagcttgtttggttttatcctgacactcttggatttttgtcatacctactccgctgtattcatccaatttcgaaatttgatgcgcaaaaaccttatgcaagaaaaaggtttgttttcctcttttataaacttaccatcaagttgccagcatgaacaagattatgagcttagcctaagattacctaaggaacttaaccgaagaacagttaccatagactctgtataccgggagaaaagaaatgtaactgtatacgagcccaacactggttcagacttatcttacactacaagctatataaaatgtatggtgaacatggtttgtgatggagaaaaatttacatttgaatataaggaagctgctggcgggcccgctccatttatcgcaaagggcgataaagccagattatattggtatggaccggaacaggaagtggttcctcgcgatcgcgaagatattactaatggaacacgtcttatctgtttacataatataacaacgaataacttctatgaaagtcgccactgtaatgaaccgggtaatgttttcaaagtagtgcagaagggaggacgtgatatgtataaccactactcgcaatgttaa

SEQ ID NO: 155823 - DNA, 1614 bp, Enterobacter cloacae
gtgacgacgaaagtgaaggtgaagaaaacccgggccgaacgtaagcagcatagccgggacatgcaggccaaacatgaagcggaaaaaaaggccgctaacctgcgtaatattctaaagagagacattctggccacgctgggtatccctaaaaatcacggtgggcgggcagctctttctacattcatcaccgagcacttactgaagggtgagagtcaggttcagattgttgccatgctaaccggcagcgaattgatgaagcgggcacagcttgccgaaatcgagcgcctgaagaagatcacggaactggccaatcaaacccgcagaaacgagatcaccaaccgggcgtttgagcgcctgggtatcacaacccggcatccaatgggcgatttagtgctgagcatggtgcgcgaactggcaaaccagaatttaaataccggtgagatagtagaacgcctgaatgataacgaaaccgtactggaatcgcgccgcctgcacaaagagaagcgagcggatcttgaacgtcagattgatgaaggtattgccgagcgcaaaaagacccgtgttgatatgcgggaagtgctcgcctacatggcccagaagaacggtacaacgtatacgcctcccgcagacacctggcgatctcctgaacatccgaatggcgattcaccgacccggcataatggaaaaatcagagagagccgtctgaccggcgctgaaagcacccagaaagaaaacccacgtcagtacggtttgcccaacctgaaaaccagtagcgcttccatcaacaaggccggaatgagtgaggccattaagctggtgggcggacgtgtgacggaatttcgcacctatctttatgagcatcgcgatacgggactacgcgctgatgtgctggctcgccggtttatggctgagtcaatgcaaggcaaaaagatggttgaccctgtgccggtcaatgaaccagataatctcccggctcccacacacgaacctgccaaacgtaaatggacgaaggaagaaaagcaggaagcgcgtgaccgtgcgctggccgcagcaagccaggtcggaaagcttaaagaagcggaaaccaacggcattacgcacgatgtagtgcgagaatcgcagccagcaccccagccagccctgatctccgtcgaagttgaacaatcccgcgtctccatgcaggaaccgtctgttgcgcccctggcgcaccctaaacgtgaaggctctacaacctgcgtggtgaccaggccggatcaggctgatttcgctgctaccgtccgtcgaaactgtaacgaccgctgcgtgattacaggagcaagcttacgccgcaggacagaggccgcacacctggtagagcatagtgctggtggtctggatcactggagtaatggcttgctgcttcgtatcgatctgcaccggctgtttgacgacaacgtccttgccatttgcccggagacgttgaccgtccacgttgaccctgtcgcgcaggccgaagatcccgatttgcagcaatacgatggccatgtgattaccgggctttgccgtccgatagacccggcgaatctcgtcatgcgctgggagcgttatcagcgccggttagaactgaccaagtaa

SEQ ID NO: 155824 - DNA, 267 bp, Enterobacter cloacae
gtgaattctgcccgggttttcccggcgattatcccggaatccatcaccgatattcttccctttatcctaataccggtgatggccaccggcacaaaatgcagggtgttccggcccggcgaagatgcggccgcaaaccagcacgaaagtgtcggtcggaaaaaggtgaagccaatgctggtggccgcacggaattcaggcgggcactcgacgttactcacccacgactccgggttaacggttcgactccgggtagcctggcccgggtga

SEQ ID NO: 155825 - DNA, 219 bp, Enterobacter cloacae
atgccgaatgggagagtgatttttaacaaaagaggccgatgggactggcttgatagcggttgtgatatagatgaggatgaattaaagcaggaagagtggtttgttggcgatatgtattatccgccagactttgaatacgatacgtcaatgcatgatcaccagattacagagtggttgtctaaacctgaagagctggtgcggtatgagcgagggcgttaa

SEQ ID NO: 155826 - DNA, 324 bp, Enterobacter cloacae
atgaagtcatttctgatcaaaatgtcaaacgcgcataacgaacacatccgggaagtcgcttccgtggatgaagctattcgtatcgcatccgaaagagcaaatgaaggtttctggcttccacccagccgggtctgcgaaatgagcaaggaacatgaaggccggtatacagtcggtgatgatggctggttccgccccatcgagctggcggttccagtcgaaatagaagaagtgaagtcgtcctacgggaacggtggttacgacatgatttccgtaggcaaatggatccagactcaatcaggctggcaaccgtcaccggctgtctga

SEQ ID NO: 155827 - DNA, 864 bp, Enterobacter cloacae
atgggtagaaaaaaacaatcaaaccgcagtgtatcagcgccagctgttgatgctgaaaaagaaattatcgacccgagatggaacatctttttctttgcggcaattgaccgaccgtgggtgcttaacccgcatcttttttacgctgaacaagcgcaggaacgtttgctgtcgcagttcagtgatgtggagatcaggagtgaagcgacaaagaaaggcgagtcatttatagagtcagctggagactggttcaatcctgattaccacgacgaaagtgacgtatacgagaatattgaacagattgaagcttgccactgggttgcgttgcgggaaatgaaggtcacggtcacgctttccctgaccgctgggatgtaccaccagtttgacaaggcattacgagatctgcttatccgggaggccagaagctggcggtggctcgacatggttgtgatatcagatttgatctggaacctcagttttccgaggcttatggatttgatggaatggctgggtattgaagtacgaaacatgccatgtttcccgttaatcagtgcatgtcatcaggttgtcaacgtttataaacatggagatggtgatgcccaccagaaactggttaatgctcacccggagtactactcagtatggcaatgcgaaggttatccgcaagagagaccagctcgccacgaagaacttgaagtttccgaggaacagtttagagaatttgccgaggcgataacggtgttctggaagagtctgccggaaggactatcttattcggggatgggaaaagagcctaagtggtttggcaaggcttatgaaaaagtgaagtgcgacaaagaaaaacgcgagcgtaaagcggaagaatag

SEQ ID NO: 155828 - DNA, 399 bp, Enterobacter cloacae
atgctaatttatgccgcagatctgattttacccttaaaaattctgctggtggtatttgtcgtgactatcataggcgctaccatcgggttgaaatttgtacgctccgaaaacaagatcgtttgcatgtggctcgtgccaataggctgtcttgggggaatttttgcattgatgatgtttccatcaattaccacaaatgatttgttgctcggcaagagatggtcggaagattgtcgcgtggtcgaaaaatacgaacgccacgcttttgaagcaccgacgaaccggctgatttgttcgggggttgatgagcatgttaattcagaaagttatgcggtattaacgaaagcttaccgggagcgggggggagaacttatttcgggatcccatagtgttgaaaactag

SEQ ID NO: 155829 - DNA, 486 bp, Enterobacter cloacae
atgacttcgacatttggtaagcagctgaagctttatgcagaccggcaaacgggcgcaaaacgtactgctcttgattttcaatatgtggtttcgcctggtaaggatgcgtttcccacggtgaacatcactatggctccgattgctgatggcgcaaaagaagcccaatgggagcttaagcgcgtcatccagctgaatcgctatgaattaactcaatgttgcgcggtattgttcgggctggaaaaggagatgagggcaaactttcacggaaccgataaaaacaaaggttttacgctcatcaacaatggtgcatccggctgcgggataaacttttctcatggtggggatatgctgacgcatatgttgaaccatgcccaaagaatggaagtaggggcatttattctgaaacggcaggcggatgcgtgggatatgagtgtcagtgacgttcttgcacttttgcgtcagtccgtggccatcaaacgggcataa

SEQ ID NO: 155830 - DNA, 867 bp, Enterobacter cloacae
atgaactcgaatgaagttcttcttttcaaggacgctattcccgacttcaatcagccgtcgactggaaagctgacggtgacaaaaaattcatcagtacaacctgtatcactgctccgcctgggcgtttttactcccagttgccgaacagaggcaacggtcacgctaaacgtgacggaagcgctatccagtctggaaattgcaaaacaggaagggtacacggacataaagatcaccggcccgatgctgaattatttccaggacttccggtgctggacagcaatcgtccattccttcagcgtatcgcctgatgcgctgaaaggtaaccggattaaaatgccctttagtgaatttgccaaactctgcggctacccatcaaaacgctacagcacgaaactgcgcaatgagatagccgattcgttgacgaagattcgctcaaaaagcattcggtttgagaagaacccggggatcaccaagttcaaagtagccgggttgctgaaagaggcggaatttgatggtgaaagtgattacatcatcctggaagccgacgaacgactctgggatttgtaccgttcagatcatcttactctgttgcggaagaaacccctggagctacttaccaggaatgaaacggctcaggcgctctatacattttttgaagcgctacctcaacatccagccccgatcacctttgacagacttcgacagcgtttactgctcaatgggcgcattgccgaacagaaccggaaaatgcgaactgctctcgatgtgcttgccagcatcggttacctgaaattttactacctggtggacaccagcgtacccaccattcagatcacggatcggaatcccaaactaacaggttcctga

SEQ ID NO: 155831 - DNA, 249 bp, Enterobacter cloacae
atgtacgcaactgcaaaagaaattatcgcaaagctgcaaaaaatgaaccctgacgaaaaggtgctagtccgtgtctggtacaagtctgatgttcaggagttagcaatagaccgaaacatgccgcaggtttcagctagcgaagctgagtcgaccttagcgttgatagaccgaactcacgatggtgatatcggtatcaactgggatgttgttcagagtggtattgagacagttcgtagtggccaaatttaa

SEQ ID NO: 155832 - DNA, 270 bp, Enterobacter cloacae
atgatgacaacagcagtgagctgccaagactcattgccgatgtcatggtgtcatgggtatcagcgatttgtctgtaccggcgattccgacaatggtagtgagcggtgtaagaccttccctgagaagctggtctggagagatgtcgatgatgacaacagtagtgagctatctagtctcattaccattgtcatgagtggtcaccccgcaatgacaacagtagtgaccgcgtcactcaataccgttgtcattaagctaaacaggattctctga

SEQ ID NO: 155833 - DNA, 630 bp, Enterobacter cloacae
gtggagtaccggagtgtccatgaatttatgacactaacccgcacgggaacccctgctgatgcccgccagttccggctggctgttaaagctaagggaatagctatctggcctgatgatgacccacgcgtagggcagcaatttgcacgtgacggcattcgctgggaagttcgtctgaagaccttccggcctgagagtcaggattcatttgacgatgacctggatgagaaagtctcaccaaaacgctttggatatcgccggtacggtgcgatgtcccgtcctgatcagaagaaattcagcgacagggtatacttcaactgcatggagcggtgtgtcgtcaccggtgtgaagacaaaatgcaggggagaagcagcacatctgattgagcatcataaagcgggctctgaccactggagtaatggcctgtggcttcgggcagatatacatcggttatacgacaacggcctgtgtgtgattaatcccagcaccctgacaatccatttccaccccactatcctggctaaggatgacgatctcatcgcgtatgaagctcggccaatattaccgacaagaaaacctgtaaaccctgcctggttaaaatcccggtgggatgaacttacctggccgaagtaa

SEQ ID NO: 155834 - DNA, 426 bp, Enterobacter cloacae
atgaaactcgaaaacattaacaaagagcagcagctctatgttcttaaatgtggctctattctatcaagctacggatttgatctcctgcatacaaaagcaaccgccgtagctgactggatggacgttgaagcaccagtagctgcactgggtacagaagaacattttgaacaatgtgcagaactcatgcggcgcgggcaggtatatgctaacgcttcccggaaatgctgccccggtaatcgttccccccaactaattgggcttgaaggttgtcgtgttagagtcactaccgatgacggtgaggaacgctgtttctgggttgcaaaaacgaccggatggatgccgggtcacctcgaagttccacgctcgaatacggcttatggccaccctgcacaaacgcattacaagtcagttcagactattcgataa

SEQ ID NO: 155835 - DNA, 303 bp, Enterobacter cloacae
atgtcagatttaattgcagcaagatatgatgaagtatcagcttccgagtttgaagatgatatggttgtcattgtcattaccgatgaacagagtgaagatattgaggttatttcagaccttgatgatcttttcgttaatactgaggttgtggttattgatggtgacgctttagaagtcgactatgataacgctggatatttttcatcagagaatagctatgaagtttcagtagacgatatgttattcgacaataccgttggtgagcaacttatggattgtggttttttcggcactcaaagctaa

SEQ ID NO: 155836 - DNA, 546 bp, Enterobacter cloacae
atgacacttcaaaaagccaacgaaaaacgtattgaaaacttcctagccaaacaaattcgtcataacggtaagattttatcaatgcgtgaatttatggattcactcattgctgacggctatagcccacgtgcaaaagcggaacagaaagtaggacaccccagcagccgtcaaacctttcgctggaacaacgagcagcaaagggagcaccagattaagcgagctctggggggtactgttctgaaatattcaatggtgtcatctgacggctcattttatgacattgaaaaaattgcctatgattacgtcattgaaaaaatgggcggggttaacgttaagccggaaacgatgtgttttgcgattttcaacagcccttcatcattgcggggcgggaagagagagcgctgtgtagctgtctatagccgcactgtggcaacagaggaacaacgggtcaggagcatgttatctactgacttcacgcattatgatctggtctggttcggtgaagccacttcccagaaggaagcgctggaactagccgagggataa

SEQ ID NO: 155837 - DNA, 525 bp, Enterobacter cloacae
atgtttgaacgtataagcaggtttttcgctggcgcaacaaaacaggagagggcggaaccgtcagtctctatacctgaacctgttactcttgagggtgataacgcgccatcagctatcgaacatgacagaaaaatagtccatgacagcagggtatttatacataggtctttaggctttatacttatggtatattctcccgaattattcagaaaagccattaatcatgacatatgtcttggctatatatatggttatatcatagcggcaataggtgacgacgaagagttatgtaaagcatcggaaaatcgtcgatgggatgttgtcgctgcctattatcgaagtttattggattattcagctgaagcttactatgagaaaactgtaaacgcgatggataattaccacttcaaacaagcaagaaatgtaagcgtaatggattatcacaaaaacaaaatcaatcctgatggcgataatcatcatttgcgttttctaatgaccgaaataattgaagatagggttgaataa

SEQ ID NO: 155838 - DNA, 192 bp, Enterobacter cloacae
atgtacaaacccaccagcgatgaatttaaagcagagatgaaacgcaaaggctggacgcggcaggcgctggcacagcgctggggcaagtccgaaagatggataagtaatatttcaggtaatgaggaacgcgagcagcattggaacgatgcgcttgcaggactaccagtattaaaaaaaaccaagaataagtga

SEQ ID NO: 155839 - DNA, 324 bp, Enterobacter cloacae
atgaacgtagatcagcggcaacgtattgagcaggaaattgcccgggcagcagcaaccgggttgattgaagcaggatatagcatctcggtattcgactcagaagagattgtgctgaagcgctctacgaacgtagaacgtattgttgaagccatgttctctactgatgaagactacttctatgcttatcgccctgaagaaactgaacgtgcaggttacgtccattttgtttacggcaatgagggatggaatgttatcagcgataacagcctgtcgcttgaaccggcgcttgaagccgctactgctctgtctgagtcttatgcctga

SEQ ID NO: 155840 - DNA, 3378 bp, Enterobacter cloacae
atgacgggtatcgtgcgcattgaacaaccggtagagcgaattgaacgtttccattctcttcaaggcggtcagtactggcgggcaaatgaagccattgctgaagagaacattgccgcttccgaagtactgctgattgaatcgctgcgttgggtcgacaacaaactgcatacggtcattctgcgcacccacccatcaaaacatggccaacacattcggtttgaatataccgatgaatctggccgcacttgtggcactacccgtagcttcactcagcaccgctttttgtttgatgacttcgttaacaaattcacctttgctgctgactcgaaagaagtccgcgaaagtgaagtgcaggcctgccagcagttggctcagaagctgaccgttgaactttccgaggcgatgacaaaccctgaacgcatgaaagagatcattgcggaacgccttgaaaaagagcagacagaaaaaagcgagaacaaactcaatactctacccgcgacgattgaccagtacacaaacctcgccaccggcccgttagaaaatgcgctgacatccggtgtcaatgaggaaagcattaagggaatgatggaagcggctcggcatggacataaactggccgtcatacaatctgaatggctacaaggtaagaataacgaaattaccagggccgttcaggccgtcgtaccctattaccaggaaatggctgcggcgcagctggccgcattcgaagagagcagggagaacgttgaatcgctgatgaaagggattgcgtctctggatcttttcatcggcaaagatgttgtcgtcaacacgataatcaaaggcaattcagccccgagcgacattcctctgacatttgtccagaaaaagctactgatggatgaggagctcgctgtctatctggatctgggagactggttcgatttcaccaaagcagatttattcgaccaggcactgcaaaaacacccgggcctaatcgagcagattttcccgacccaacgttgcgtactggttatggccgtcaccagacggcacgtcaattatcaggatccgtgggaggctgcggccaaagactttcaaaacagatgtgtcttcctgctggtacgagacggcgaaaatatttaccaggtatgcagcccggttgaatctcatctgggcgctcatacgctgttccctgaacgtgacgagcaggacgcgctttttcgcggttttgacggttctcgcatcaccttccgcgatgtagcttacactgaccggctgcgggcgcatgaaaagatggcgctgcactataaacgtttcctgatcctttgctgcgggctcgaccagcgtgagcgcctgtttggcgaattctatgatcgcagtagtaacattaatttcatctcgatggacttccaggagaaatattgccgctttattcatgacgcagatggaaccggtctgttgagtgacccggaggccgataccagaccatcgctggagtcctacattaagcaggcgaaccagcacctgcgttctggttcacgcgtcttttgtgagtggagacaggtcgttaatccggttaccgcacccggggcagctaaggatgattcaggtaacggctaccggggacattcattcacggttgatttcgttaaaagccgtagtaccagcgtggcataccagaagaatgaagagatctacgttgatgtgccagtcgttcagcacacctacagccgtaatgcgaagtcagacaaacgagaattcaatgccaaggtatgcctctcaaaattcagaacctctgatagccttggctatctttgcctggacacggtgaaatccgccgatctcgaatattacattcacaaccggcgtatccgggctaaccatctttattacatccggctcttcaaagaacttgcggcactgctgaagctggaagaaacgcatgaagaacaataccgaagcaaaatgctggcggctttaaacgccgggaacatcggtgacgaaaatgaccgggttgcggctgtagataaaacgattcagacgtggcgctgcgcaaaccgaggtgcatccctccaaagtggtctggaagatgagaagcaatggaaagcgctccttgccatgatggatttaattgcatggcgaggtcatgcaagcatcccgcaaattgaatgctactgtgagcaacttggaaactctcctctacggcttgtggtaatgccaaacggcaaactgggcctgtatgtagccccacgagctgaagaacgaaacgatgcagctgagaaacacaaatgggctatacgtgtggtattgagtctgacgcgtaccggtgtgaaagaggtatctcgctcatgggctctggttaacgaactgagcgtatctgaatgcaccctcaaagaatggccgctggtggatgagtggaaagggttaaagtctgtatttgaaagctacgaccggaaacttaaagctctggcagacattgaactgggccgtgagactctcaagcgtctgaatcccagcaaccaggaaggtctgagcgagctggcagaattgtggattaatgcttttgaagaaatgaacttctaccgaccgactggcgggatcgttcaaaagccagtaatgatgatcccgattggtcttattgtcgaccgtgaggagtggtcatacttatatcttggtacacgcggctctgcggtcgagtatatctatcagaatctgaatgataaggcactcaaggcccgggtagcccaccgtctgatttcaaattacgaggtcaaagagggtaagctcgataatcttgccaataagaaaacaagtctgggtctcttttgcacaaaacagcgcccggacatggccccttttagcgcagaccgaaacatagagacatatgggcctgatttcggcgttaaccatgctgtgcttacgcatatggtatcgtttaaatcgcagatagcgctgattcagcaagaggcagatcgcggcttacaccgtcgcttcacgatagccagcaacctggtcagttcagccggggagttgcttatcgatcaactgctcggcgatgcggcgcgagatgcagatgagccggtagatattcttgaggtggttattaacccagcgccaaccggtgaaccaggggcgaagctgaagaagaatggtgagacattctggcataagcactggtgtgatttgtgtaagccaggaaccgaagaaagcctggcactctcccacattcacgcgccggatcacgtcattacgcggacttcgttcagttccaaggaggatgccatcctcttcgtactcaagacgatgccgcaggccagaaaatacgaaaaggatttcttccgcgacaatgatttcgatgtacctgatgggattattgaacggtggatagaccgttaa

SEQ ID NO: 155841 - DNA, 246 bp, Enterobacter cloacae
atgcaagttgctaaaaacaagtacgccgttctggacagtgcgatcatgaaaatactcggcaaagagccggttccattttcactgattatgcttccagacgtagctggtgagtgttcccgactcgctgatgaggagaggaataagccgatgccattccgcattcttgaccggcggttacaggcgctaagaaaggctggcaaaattcagttcgagaccggaaaaggctgggtaaaccctctttcctga

SEQ ID NO: 155842 - DNA, 660 bp, Enterobacter cloacae
atgatcgttctcaaataccctccttacccatcgcccttctggttccggggggaaaaagataaaacgggtgtggttaccgaggttggaacagtttatgtggaagcaacaaaggataacctgctgctggtggagggcacactccctccggtaggtgcgactttgtttcttacacctgaccggttcgatattaaagctgaaactgagattgatagccgggcccgacgagaggaacaggccagacaacgtctgacacggcaagaagaagaacgacagcaaaaggccgctctcgatatgaagctgatgcaacaggtgcaagagcgaaacgctcgtttgtatcttccggtacgatggacaagcggattcaaatcggtgatttccgggctgacggaaaacagtagcggtaacggtataaaccggcgaactgtgattcacgtgcttttacttgaggacatacgtgatgggcgcctggtcagaaatgaaggggattttctttgcaccgccgcaggtggaagtaacggcaagctttgggttaacccagccacccatagtgatggtgagtacgggccttacgtatgtgaaataacgtgtaagcagtgtattaaggctgctctacgttggcaggataaaaataaggccgtcccaccggaatgtgttccgtag

SEQ ID NO: 155843 - DNA, 825 bp, Enterobacter cloacae
atgcgccagacaaaaatcgtaaatatattctatgccagtgctgaagagcttcagctaggcattaacgagatagatactgagattacgaccgctttgcagaacggcaatatggaagccgtcaaaaaagcaacgttacttaaaaacaccatgattagtctgctggacaacaaacagaagggcgagctggttcaagaaacgtgtacgtcaggcgaaaaggctgattcatcggtagaaataacggacgcaatggcctacgcgttccacgcggcatctggtgagggtgcaattggttccgatgatgttgaagagataaagcgtggtctgcgggtagttatcaatgagtgtggcctcacaaatcacctcgtaaagatccctgctggtttacacgatgcaacagctcagcttgtagttaacttcgcctctgagatggcgggtaagctttaccgggcccaggagaagtatggtcgtggggctgaatgggcaaaatctgactggaaggatgaatgcctcaaagagctccaccgacacctttcaaaaggtgatccacgtgatgtagcagcctactgcatgttttcgtggcatcacggttggctgacccacagcgaacaacctgctatagcggggctcagcgaaagagttctgttcgatagctttatgaaagatgattactcacctgattcaagtggttcagtatcagaggaagaagaaagggtctttcttgaggtgctctttcacatatggcaaggccgggccgcagttcagaatggattaactcaacaggaaatggatatcgtaatgaagtaccgggaacaaaatcagaaataa

SEQ ID NO: 155844 - DNA, 351 bp, Enterobacter cloacae
atgagtgcatacgtcgagcaggtatttaatgatgttgaaaaaatgcgtggcaaagttctggccgaccgattccgcatggtattcaaaaaaatccagcttgtgaagaacgacgactcagacgaggcctacaacctgaagcaacaggaaaacctagccgctgtcactgaacttcagaatgctggtggtttcattgattgggacatcaaggtcactaagtatagcaacacatccactcaggttgagttgcggcataaggtagatggtgtgctggtatggcgcgattttaccttcgtaagcgattttgtattcgaactcgctaaaaacgttgtctattcaaaagagacggtctga

SEQ ID NO: 155845 - DNA, 348 bp, Enterobacter cloacae
atggcagacagaactgatggaatgaaaggaagagcactgattaggcagttgtccggtatgccacccggcgttaacccattaaacgttcctcagccgcttaagcgaaccgtgtgcctggcaaaaggcatagtggatacatgggatagttttccatccgaaaacaaccttgcaatcgccctggaaaacgccgctgcaatatcacggctggcgataagcctcctgcaagaacgggaagtactgtaccggcagctggcatctcttggagtagaaccagagaaaatgaaacaatccgtcgaagccatcccgatggaaacgcttttaaaaagccttccaatgaggaaaaagtaa

SEQ ID NO: 155846 - DNA, 375 bp, Enterobacter cloacae
atgaaaatcatgctttcactaggctctgttgctattacgacagtagcatctatgttgttgctgtgcagccaggctaatggcagcaacgggaacaggcctttacggatcaacgaacctgttcagattactatcgaacaagtgatgtatcgcattgcaaatggtaaccagaatatcggcatgaaaatgcgtgaaaacccagtgctgttttcgggtcatgccggaatcagtgtagagctaagtgattttccgcccgggtcaaaatccgcgcccgtacccggaactaccgtaatgctgcgtaccgctttgtctggtcagacagaggcctgttatcagcagcactgctactcagccgaagtgaccacgtacaacgaatag

SEQ ID NO: 155847 - DNA, 2436 bp, Enterobacter cloacae
atgcaacaggtaatcgactttggcacatcagaaccgacccttgccccaatccttaccggggataaatgggatacggtttggcaaacactggctaatgacgaagacctgaattatgtcgatgccagcactggcacgagcatggccaatcttatcaccaccggcacaaacgccatttataaagcgcttactgacggctggactatgagcctggcgtattcatcaggaaaggactctgagtgcgttctgcacctcttcctgatggcgctggtaagggctacccgcaatggcacaaacatcagccagcatcactatgtgatccacaccgacacgggcatcgagaatccagccgtccgctggctggcagacacaaaactcgccgaacttgaggcattcgttgaaaagcaccagttaccgctgagcattgtaattggtaagcctggactgacatctgggtggactggccgcatcctttcagggcgaggattgccaacattttcaaatagttccgccagacagtgctcgatcgacttgaaggtcgatcctgcacgtcgggcccgtgccgagtacatgcgaggactgcctaaagccgttcgtcagcgcgtttgtctgctgctgggttcccgtgatgcagagagcacaacccgtgccatgaacatcgaaaaaaaaggcgggagcgctgaagacgttaaacagacaaaagagggcggtgagctctatccgatccgtcactggcatcaggggaacgtatgggaattcctgctatcgtccggggatgaggctcgttttgcgttacccagttacctgcctaacaataatgaaactgctgagctctacaaagaggctacgggcgaatgtgtctggacgggttctgaaaaagcaaaaagcgcctgtggttcacgatttggctgttacctttgccaggctgtagggctcgaccgctctatggaaaacctgctgaatgccgacccggagaaatatggctatatggctatcctgaaccggcttcagcgtttcattgccaaacgccgttatgcctgggaagaccgccatccagtgggccgcacggtatacgaaggtgggtatattaagatccagccagatgtatactcgccgaaattcctggaacgtctgttacacatctgctgtagcgccgactacgtagagcagcaacgcgccgatgacgttgccgagaaactcgcttacggcttgctggaagacaatgcgcataaccgtcgcatgtcccggcctcagttccgcatcgtcagcgaagaagccgttgtgcatgtcgatttcatgtgggctttccatcatttcaatgacaagccttttagggcactggagatctaccaccgcgtctgggcccacggcgagctggatctgttgactgatgaaccgacgatgcctgtagtccctcagtccccaatccctaaagcagtctggctgaaggtggggaaatttggcgatgactcactatttgatgggctggctgatcctgttgcggaaatgacctatttcgacggcggagatgacgaacgcgccgcacgtgtcatcaagacaagagacggccaccgtcgtgttgtcagtttcagcgaagataacgaagttaccgtagatgaagagtctgcaagctttgtgttatgggtggaatacccacgccttaaatctgctattgagagcggggcgtacaccgctgggagcgcggcgcagttctacctgcgtttcggcacggtatctctgtgcaaaggtaagtcagccttgtatcacaaaatgatgcagcgtggtcaaacctaccatcgactcggcctgaccggattccagtcgatggaagggatcacagctcgaaaagaccttcgcatcctctcgaccgagaaataccagcatgttctgaaaagaacgctggaggcccggatcattcgttttaaatggtgggctaacctcgctttcaccatccagtaccacatgacccgcatgacagaatttgggttctggctgcatcgcgtcttacgccaggaaagccataacgagcttatggacgagaaaacgctgtgcaaaaacagcctggaaactgtcctgatcaaccagaccaatgcctggtgtcttgtgatgagtgacgtgggcaacaaacctgatacatcaaatgcgctgcgccgctactggagacaggagcgggcccgagctttcgcgcactgtgcttcagtaccggaagtccttaaatcgctggtggctcgtgagatgttcaatatttatcgacgtgcgctttatgaactcaatagccataaagagttgagccttggcctgatacacatacaggaactggcaactcagaacgcggacgcgttacggatccatatcaaaataatgatgcggttaatcaggctgtggcaattgtcaggtttaacaagcattggtcagagtgaattttgtgaggcggcttaa

SEQ ID NO: 155848 - DNA, 366 bp, Enterobacter cloacae
atgacaaatgaaactcagaacaacgcatccgcacctgaagagttaatcacgcgtatatcgcaggtcattaaacgcaaggatggatctgaagtgaaaattactgctcaggctgcgttcggtgcagggttaactcgctctatcgatgtatatgttcttcgtcgggataatgctgattcaaactggcaaggttgcagtaatcgaccaaaagcaggatggcggaatatgtctgtagatgaatatatccgtgaagggcgctctgaaatgcttaaggcagttacgccgggagaaattctaaagctcacaaatgccattggcaaaccaatgagttgtcttgatcaattatttccatccccgattactaaataa

SEQ ID NO: 155849 - DNA, 201 bp, Enterobacter cloacae
atgaaaacgatactctcagctttattattcgttgtttcatggaatgcactggcacaggatgagggaaatagtggtgataaaaagcaacaggcaacggcaactattcaaatttcgattacaattttacccgaaccggtaaaaccaaagatcaccaaagaacaggtgagtgatacgctaaccgtcatttcttatgaatggtag

SEQ ID NO: 155850 - DNA, 1419 bp, Enterobacter cloacae
atgactatggcggacatctcgtttaccgaaacaggtgagacaaagcaaacagctgaatacagcttaaaaacccctccgcaatcgatagaagcggaacagtccgtgctgggcgggttaatgcttgaaaaccagagatgggatgatgtggcagaaatcgttagtgagcaggattttagttctcgaccgcatcgctcaattttctctgcaatgagatcgctcgttgcgaatcaattcccgattgatttgataaccctcgctgagcacatcgaaaacgagggagaaggtaagctggatagtctcggcggtttcgcctatctggcagaactgtcaaaaaatacgcccagtgcggcaaatataattgcctacgcgcagatcgtcagggaacgtgccgtaatcagggaaatgataaaagttgccaacgaaataaccgaggccggttacaacccggaaggtaggacaagtgacgaattgcttgatcttgcagaaagccggattttccagattgcagagcaaaggggaaataaaagcggtgggccggaaaatatcagcagcattctggacagaaccgttaccaagattgaagccttgttccagcgtccccatgacggggtcactggagttgataccggctacgtggacgtgaacaagaagacagccggtctacagccctcggatttgattattatcgctgccagaccctcaatggggaaaactacgtttgcaatgaacatctgcgagaatgtatcgctgacaaacgataagcccgtcatgattttcagcctggaaatgcctacggaacagctcatgatgcgctcactggcatcgctatcacgcgtcaaccagaccagcatccgaaccggacagctcgatgacgaggactgggcccggttatccggcacaatgggactgctgctggaaaaaaagaacatttacattgatgacagctctggcctaacacctatggacgttcgctcccgggcgcgtcgattgtcccgcgaacacggtgggcttagcctcattatgatcgactaccttcagttgatgcgtgtaccgtcgttatctgacaacagaactctggaaattgctgaaatctcccgatctctgaaagcactggcaaaagagctgaatgtaccggtaatcgctttatcgcaactaaaccgctcgcttgaacaacgtgccgataaacgtccggtaaactcagatttgcgagagtcaggctccattgagcaggatgctgacctgatcatgtttatttaccgtgatgaggtctatcacgaaaatagcgatatgaaaggtatagccgaaattatcataggtaaacagcgcaacgggcctatagggacagtacgtctcacatttaatggtcaatggtctcgatttgataattatggtggccctgagtatcatgatgacgactga

SEQ ID NO: 155851 - DNA, 369 bp, Enterobacter cloacae
atgaatgtatcggcgttgattagtagcctctatgtgaccgttatcgccgggcaggagctggaagcaaaagctctggagcatcacgaacgccgtacagctggtcgattttgccgaaaaacactttctgtccacgcggtgaagcgcaagcccggggtggaatttctggcgcggctgaaagtcaattacgcccgcgccaacctgacaaactgcgaccccggtacagtagccgagctgaggctggtgggccgctctgatgaagcgaatgagctctctgaagcaattctaaaggcaatagcatccagttacccggagttggtatcggaatgcgcacgacaattacaaaaacaaaagctattccagaacctctga

SEQ ID NO: 155852 - DNA, 522 bp, Enterobacter cloacae
atgggggtcgcgttgaatattcagactaattatatcgagctgcaaaattggctcgaaaaggcaaaaagtatttattcctcagcaggatgcccgcacgaaagagttgatgatggcattttaaaaattgcaatgcaggtagcggctattagaaaaacaaaaccagatatgctgcatgtattccttcaggagttaattactgagttcaagggttataaactcattcagtgccgattcaataaatccaattatgagcattttgttatgaccccggaaattcagattctgatcggtggtcttatggataaagcgtcagagggaataatgctggcttctatctgccacatgctacaggtagatacgttatccgaacttctaagcctaatcccaacgggaatgccagacaccgatgtactggatgcgctatggcgtgatcagaagacgcccgcaggactgaacctgcttgatgacttcgtacttctggataccgttgcgctggctaataagcgggggattgctgcatga

SEQ ID NO: 155853 - DNA, 1176 bp, Enterobacter cloacae
atgaacaccgacgttaaagctatcttcgaacaaagccgtaccctggaaaatctggaaggcgctgcggtactgatgcgcagcttagacaaagcgccatcatcactccgagcactgagcgatttcgtaaccaaagcgcgtaaaagcggcaatacggaacagttcgaagaagccgatatcgggcgtaacaacgtctttgcggtgagcccgtactggttgtttgtggaagagggactgaacctccgcgacgtaaattatgaccgtgcggtaatgttcaaacacgcttatctggaacgtcctcagtcagtgcctgtcatccgcgttaaaccagtagtagtggaaggcgtaacccgcctgaaaatcattgatggccaccaccgttttgctggcctgatgatggcgattgctgagggcgcgagcttccagaaaatcaccgtcgaggaatttgaaggcggcaaggacgaagaagtctacaacatgatcgagagcgccaactcccttcagttgaagatggtggaacgcgctgaaggcttcaagcgcctgattggctggggtcacaccattgagtcgattgctcagcgtctgggtgtctctctggtcaccgttcgccgcagtatcgtgctggcaaacgctgacttcagcatcaagatgctggtgaaagaagataaggtatctggtgacgttgccgttgacgttattaacgaatgtcagggtactgaccgcgacccgtatgaagtcctgatggaatccctgaaaaaggcagaaggagctgggaaaacccgcgtcactgccaaattcgtgagttccaagaaaaagactggcctgaaaccgaaagttatccgtaaaaccttcgacagcctgttgccaaccctgagccagctgcgcgaccagatcccgccgcagccggaaggtgagcatgaaaatcagatcgaaattacggaaaccgtgccggaagaagtcgtcttacgcctgactcctgaaatggcccgtactctgatggctaccctggctgaactggaatcagcaaaacaggcagaagatgctgaagctaatggtgacaacgacggtgatagtgctgaaaacaacggcggtgctgacgatgcgactgatgccgataccgatggcgctaaccagcagaatggtgaaactgaagagactcagctgcacccggtgtactaa

SEQ ID NO: 155854 - DNA, 687 bp, Enterobacter cloacae
atgtaccttctttccattttattatttacatttgtttatctgttatcctttaattctgttatagaggaaaatagagaccgctattccatacagacttttgcaatagtgatgatcacgatattcctgatatcaatgccagtaacaacaacttttgtgtcgttgatgcttgaagaaaaccagagagagcatcgtgatttgatttccttcctgcaaatcaattccgtttggttcgcaggagccggggggctggtggctatcttcttgtcagccctgacaatggttcgcctgaagcaaaaacgtatccgtcacaaaacatcgaaccttaacctcatcgttgtgggccttttcgcgggcgtagtctcttttgccagcgcgtataagcatctagctttcttcagtggggatgatgcgggagtgtttttatatgaggctataccagccatcgatgacatcgactgtaacgcgccaatactcctggtgaaatgggaacctgactcaaagaagccaactgcatggcgatgccctacgggcgttgcattcaatatcaatagtcctactccattcctaccttggggttcatatgaggaaggggagagttcaaaactaaatgaagtgatgacaattttgatgaaaaatgcggtcaaaatcgaaaaacgtcgccatcttgatgtcatcattacgagctaa

SEQ ID NO: 155855 - DNA, 750 bp, Enterobacter cloacae
atgacaccacgtcaaattatcctctcacatattacagctgagaaagcactcccacgaggaacgctgatctggttattctacgagaatgccgatgatttaatcagcctgaatgaagtgggcgataatcttgaaaggtggcatcaacgagttgggtcgcctgaagaaattcaggtgatactggatatgcctgatggcgattcagaagtctggctattcagcccaacaaaattattctccccacgggtaaaaacccccgttctgacagccagagatagggcagttgctcgctatggcgtttctcgcgttatgacggcggagaaagttgtttttctgtattcagggtatcttctgcacctctatagacaggcatatggtttcaccggccctgcgcctgaagttcgggtcaactggagtgccaaacattcatggggcggcaggagctcaatcactatttcaccatcgtccatttatcctgacagtgatacaccgcgctatcgctaccatgagtacgcacatatagagcagcgtaaggacatcggagcattttattcaatcaatcaactggatcatatcaaaggcgtagtggcacatgagcttgcgcacttttgccagcgccacactggaaaagataattttaaatttggttttccggtactccctgaaaaagatttcagaacggctcatggtgatgggtggcagttcttgtatgcatttttcagaacagaattaaataaaagaattcagcgataa

SEQ ID NO: 155856 - DNA, 318 bp, Enterobacter cloacae
atgactgatgaaaaccaaataaaggtgctgttttgcattctgcgtcgtcgattcgtggattatgtccctgagtttgaaaactgtgtagaagaacgggaagtcatcaatgaaacgccgaagggttaccgtatgtccgtctcctacggcacatcagtttacctgcacgcggattatgagtttttcgaatcacgtcaggcagcgtatcaatggtgcgcccgccgtgtgaccgctagcattgagaagatgaaacaaaaaatgcaggcggcagaagcaacaaaaataaaactgatagaagcatccgggaactgtggcgaataa

SEQ ID NO: 155857 - DNA, 174 bp, Enterobacter cloacae
atgaaaccgtttgggattttctattcagtagaaggctgcacttgttcactgtgccgctcgcgtggctatcgtaaaaacaatgcatacgatagatctcttcgtgtaagcaaacaccgcgcccgtcagcaggccaagcgtgaaatccgctccgccgtattcagcatcgacaattaa

SEQ ID NO: 155858 - DNA, 225 bp, Enterobacter cloacae
atgtttaagctaagtcccataagaaaaaaaacaaacaagctgcataaactccttaataacggctatcgtttcgtaatcatgcatgaagatgaaattattgaacccttccgctacgaaatagaagccagacgaaaactattctttggcagaaaactcctttctatttccgacctcatcgactcaataaacgatagtgtaaaaacccaagcaaaacgcgccccttaa

SEQ ID NO: 155859 - DNA, 1632 bp, Enterobacter cloacae
atggcactcacgataaaaacagaaacactaaaagctaccacaagcccaacatttgaggctttacgtaatcgttatagccaccgtagttctgacgatgagattgccgtcgatccgctatgtttatctcgggatgatctgaatgaacttttacaggcatgtcgtggtgatggagagtcaaaaaatcgacgagctcttgaatcgatcatcactgcactggaaggtgatttcgataagcctgtgagcagttttccggcattcggtcgtgtgttactacagtatctgaagtcaaatcgaattgatggctggatataccgacgcggtcatgacggcaacctgtaccccggtcttgttacagcaataaaagaagtaaaatcagaaaaaaactctgaccgtcccccatcactattgttacaaatcagctggtatgggttcggcgaatattcgcactccaaaaaggtttacggaacccagcttaccgccctgaatttcgagcctaatgaggtggcgcggcgcagtgtcgctaagacactggccgaccgtgatatctaccatgaaacgcatgagctgaaacaagagtacctggaacaactaacgcggtttaaggaagtggtcgacgggcaatttggcaatcagtttaaagcaaccggcagggctgtcagaatggaatcgtatagctacagcgaccggaatctggaaatagcagggcataaactgatacacgatttgcctgatagtgagtgcgatgcctacggtgcagaagtggagtcgcctctttttgaagatgaccagtttggccttttacccgaaattcctgtgcagcgttattttgatctctcgctgcaagactttatctggatacatgccaataacgtagaaccatacaagtatgataaagaactgccaaaaaagatggttttgccggaagaccaccgtgatttactcgatatactgaccacggatatcagcgctttcaccagcgatattgttgaagggaaaagcgcgggtaacatcatcatgtgcgtgggctcacccggacttgggaagacattaactgctgaagtgtatgcagaggtcattgaacggcccctgtactcaattcatgctggcgcactgggaaccaacgccgatgacattgagaaaaatctgcggacgattctgacccgggctaaacgctggaactgtgtcctgcttctggacgaagccgatgtgtttgtcatgcagcgtggagcatcactgactcaaaatgccatcgttgcggagttcctccgtacactggagtatttcgatgggttgatgttcatgacaagcaaccggggtagtgacatcgatgaggctatcataccaagatgcgctgcaatcattcactatgatgtgccggagaaatcagatgcccaaaagatctggaagattatgggtgagaactttggcgtgaacattcctgatgaactggtcagatcacttgtaaacacttacccagaacttccaccacgtgacatcaagatgttgctacggctcacgttgcgaatgagcgtgaaagagcaggggagtggtagcatcccgacactggatattgtgcggaaatgcgcgatgtttcgtgggatagaacgaaagggaaaagaaaaagccctgtga

SEQ ID NO: 155860 - DNA, 402 bp, Enterobacter cloacae
atgctttcggaaaaaattgtaaccctgttttcaaatgacgcattaaagcgtttcacgattcttgaggcttacgccgagctaaaacgtcagggtacttttagcgttttcctttcgttcatcgatcctcgtactgattgtctcgtagagggtaactttcaattctacccgaaccccgttaagacctactcaaacatgggagtatgctatctcactgaacatcttgggctaacgttaaaaatcccaagctctatggaatggtgggctacacatgaaaagtcaacatttcataaccaagacatcacctatctgaaggagggtgaatacgtaaaggcaaccattaaactggaaataggctcgcggatcagagttcctaatgcgttcgaagttgccccttccatgtga

SEQ ID NO: 155861 - DNA, 1005 bp, Enterobacter cloacae
atgagtgatgaacagcatatcggaaacgataaatcgcgttatctaaatacgccaaagcgaaccgatgtaggccaccgttccgggttagctaaccttaagagtccccctcgcattaagaaactctttacccttcataacgggcgaaaacttgaagctgagcacgtcactgtagcagctgaaaatgtcgctactgagaccgccgttcacccaatgaacccgcgaaatcaggaagcgcttaccacaaacgcagtacgagatatcctgcaacaaattgagtcaaggggtgttgatactgaaggtgttgccgttaaacgtgatggcgtgtacctgcttattgaaggtagccgcagacgtttttgctgtattgcggctcaaaaagatctgcctttatgggtgctaccagatgatctatcagctgaggacatcaaggcgattattaccgctgcacaaacatcacgccgattctcataccgagaggttgggcttcagtatctggaactaatgcaggaaaaaggattcaccaaaaatgaagagcttgccctctttcttggcataagccatgtgtcagtctttaaacgtattcaggcggcgcgtattgacggttcgttgatagctctgttcccggattatgaaggtataccaaactccttctacagccggttgtccaaacttcagaaatacgtagagagcaaccttttcattcttgcagatgtagttgatagggtgaaagaagaaattgctaatctggacatcagtgacatcccggaagcgcagaaaattgtcatggcgcagatcacaaaggcggttgaattactcgatcaaaagccacctgcaaaaagttgggaaacccgtgatctggctaattttgctaataaggacaaatacgcccgtatcagcaaaaatgcatcgggccgtaaagttcgctttgaatttaaccgaatgagtaccgagctcatggcagaaattgaagcatttattacggataaactgagtagcgaaaaataa

SEQ ID NO: 155862 - DNA, 270 bp, Enterobacter cloacae
atgaaagttaaagagcttatcgcccagcttcagctacacgaccctgatgctgttgtcgtaattgccggatttgaaacccagagtactggactggttgccgaggccgatactattaaagaatgcgtgacagttcctgtccaagcggacagcatgacgggtgaccgttcgttggcaaaggagggttcaccttctgtctggttgggatgggggaatgattaccgcacggagttcttcgttagtgccatcaacgacccggacgaattagcctaa

SEQ ID NO: 155863 - DNA, 522 bp, Enterobacter cloacae
atgaacactcagacaagaatcaaattgaaaggcctcaaaatctatactggcatgagccaggaaacagtctgctttaacgctactgtcctcttcgacgggctgagcataggtacagctgataatgatgggcatggtggcgaaactcgcgtactgttcgaaccaggaaaaaaagagctgttccgccaggccgaatcatatgcgaagggtcttctgccaatctgccttggcgaacacaatggcaagccatttctcatagactcaaacctgattgaagtaatcgaccagcttgtcagtgacgaggagcgtaaccggaaaactaaatcaagtttcaagaaggtttaccgcaagaaaatctgcgtcttacgcgaaggtagactttggacagtgggctacaaaagccaggctcaatacgcttcatacatcgcacaaatcaaaaaagaacatggccctgatatcgttatcctggacgatttggaacatgatgaagctttcgagctgtacagtaagcacttatacgcctga

SEQ ID NO: 155864 - DNA, 843 bp, Enterobacter cloacae
atgaggaagataaccaatctgattcgttccctcgttcgtcgtaacaaccgggtggcattaacgctttttccccgaatgttccggtacaaagcctttggcgtggttgaaacaggatctggttatccgcgacggcctgaacatcaggaatccaaagtttgtctactggcaggatatctcagagtccaggaagaaattcgtgcttctcaggcccgtctggctttactaaatactgaaatcgaaaaggagaatgctcaggagtacgcacgtaacaaaattccggcatcacggttggctcacttcaggctctggttcactcgccgatttggtaatgacacatcccgtttgattgagtccgtggacacctactgcgaggagcagaatccagtaatggatgagcaaccggctgtattgccattaccacgcggtcacctcccccatgcagatatccgtatgcgctccccgagcttccgccgagaggttagcgttcgcgatgtgcatgtccagtctcagttccgtgagttggtggataagaatttcggaagcctgtgcgcggtatcgggcaaacacctcaacggtgtgctggaggcagcacatattgaaccaacatccgtagcaggctgctataacgccagtaacggcattttgctatcaccaacattccacaggctgtttgacacaaacatgatgggtattgatcctgatacactacagattcacttcgccagcggtatagagttccctgagtatgaaggggtctgtataaaaccgttgttctacaatctggataaaaacaggctcggggcaagatggcttgaatttaaagtgaaatcacctgcggagtaa

SEQ ID NO: 155865 - DNA, 165 bp, Enterobacter cloacae
atgaaagcacaagctgttcgtaatcactcttttggctcactgaagctcagcgcaagcaatgcggcagcagccgcgctggcgcacccggtaacccatttcttcatgctgttcgccatcgtgatgtacctggtctatggcggtgtagtactcggcattaagccgtag

SEQ ID NO: 155866 - DNA, 444 bp, Enterobacter cloacae
atgacaaaagaagaatcacaattttatgctggtgcaatctgggccgcatcgaccatttaccggatgcattctgactcggtggtagcgaaagattttctccgtgaaattaacgatctggatgtggcagcaaaatgtggtgctgagtacgacgttctcccattacgcctgtttgttttgcgcgatttaccattgggccacgatgcggattatgaagccatcagcttcgggccggtagaccgtcacggcaatatcatctgcgatcactctcagacttcggtcaccgatatctccggccagcgagcgtatggggtttatgcccgccgtgcgggtgagtcgaatctgacgctcatcgacaatcttgatgatgaagaagaagccgaaccactggcgaaggtgctggctgaacagctccagcaaatcaaagaaggtcgctacgatatttaa

SEQ ID NO: 155867 - DNA, 279 bp, Enterobacter cloacae
atgcttctgaaaacgcagttcggcactgactcgggtatgatttatacccggaaggtgtatctgcattacaccgacactgacgggcattcacgcagcaagctgataaaaggttactactacccgggcgaagtcccggttgagtcgttttcagagcgggcacttgctcctggtatgcgccagctgttgagttgccgctgcggcgcaataaactgggtcgcaactggtggtatcaacgaataccaatgcgactgctgcgcaaaggaaataaccgtttactga

SEQ ID NO: 155868 - DNA, 843 bp, Enterobacter cloacae
atgacagacttcattgataaactggcagcgaatggtgtggcctttacccttcaggacggacgaatcatcgttgaaggcgatcttcgtgtcgggtttacgcttgagccagaagatccggcaattccctgcgactatattcccgcgaatctgaccgtgacgaacaccctgaccattctgtcgggcattcatagcatccctgccgggctggtggcccgcaatctgtttatcagctactctgagctggaatctctccctgacaacctgaccattaccggtacgctcatggcgaattcttcacgtcttaagtatctgccggaaaatctgacggtgggccgcgttctggacatcatgtgtactgatatcgcctatctgccggatacgctgaaagtagctggcagtatgatgctgtcaaacacccgtattaccactttgccggataacctgcatcttgaagaaaatctggccctcgaagccatgccgttgcaagcgttgccaaaaaacctgaaagtgggccacagcctgtatctggatgctgtggctctgaagcggatccctgagtgtatatcgtgccccgtgattaacctggttaaccctggtaattttgaaaatgtcgcgtcagtcaccggtatcggcggaaagcctaaccgccatgtctatgcgctacgtacagcgcttggcgttcgcgtatgcatgtacgatttgtctgtagacccggaaatatttggtctgctggtacgtggcatctatgatgaacccacggctgaactacttgataaggccgcacaacaatgtattcagcgtctggaggatatgtatgcttctgaaaacgcagttcggcactga

SEQ ID NO: 155869 - DNA, 318 bp, Enterobacter cloacae
atgccgaatctcttacgttatgaccaactggactcctcacgtcagccagcagcgcgggcatcagccgctagtggcgaattatggtgtgcccgcaacaacgtaaaaaagcaggcggcagcgtcaaaggccgcaattcaccaggcaatcaatgatcagcaccgcattacccggctgcgaaacaccttttcgctcgcgaaggatatgcgtgaaaagccggtcgtctggattgaaaagcgcatcctcgaaaatctgtgcatgttcaatgagcaggacgatatgtacctgttcacgcagcagaactttgtcagcaaactctga

SEQ ID NO: 155870 - DNA, 447 bp, Enterobacter cloacae
atgacgatgaaagttttttctccagacgttaccaaaacgaatcagcactgcttatggcaggttgctgggctggataatgacggtatcgcgctgatggataaaatcaatcacggtctcgatggcacagtagctaagcacatttctgaatgggctaacatcacgccgtctgagctgcgcaaaatgtcgggtatacctaatacgacgtttaatcgtagcatcaaagaccgtttcactgccgatcagagcgaacgtctggtgcgcattatccgcgtaattgaacgcgctgtagagctgtttgaaggtgacaaagaagcggcgcacaaatggctgaacgaagcgaaccgtggtctgagctggaaatcaccggcagagcttgtttcttctgagacaggtgcgcttgaagtgatgcgcctgattacgcgtattgagcacggggtatactcgtga

SEQ ID NO: 155871 - DNA, 459 bp, Enterobacter cloacae
gtgatcctttaccgactgaccaagacccgttatctgatgactgcgtggtctggtctgggtgcgaaagaaacggggggccgctggaacagcgtaggcactgcaatggtctacctgtctgaaacggccagccttaccatgcttgaaacgctggtacacattcacgcgccgcagttactggacgactttacactgctgagtcttgatgtaccggatgatcagatccagaccttcgacatgagccgtctccctgataactgggcgagtgaggatgctcctgctgagctggcgctctacggtgataactgggctgaaagcggttcttctatcgcgctgcgtattccaagtgcgttgtctccggttgaatttaactacttgctgaatccggcacaccctgaactctttgacctgatggctacggttaagaaaattccgttccggtttgattcccgcctgaaataa

SEQ ID NO: 155872 - DNA, 231 bp, Enterobacter cloacae
atgattcagaaagcgaaagtcgctaaagcgtttatctctgtaattgccttgttcgcctttgtctactggggacttgatcccgattcaatttgtcaggcagttggtgacgcatctcaaacctgcggttactccggcaagaatggcgatgcgagtctggttggttccgtgtttgctctgatgctgacggtgttggcgggtgcgatgctttgggcgtgggtcaggaaaggctaa

SEQ ID NO: 155873 - DNA, 267 bp, Enterobacter cloacae
atgaaactcaccgtatcgactcgcccggtaagaattgaagggaattatgtctctgtcgtctttaatcgttcccataactccatgccggaaacagcagaggttaaaaatgccgatcaggcgcgggcattcatcaacgattacatcgcccgtaatatcaacgaaacgccgatgcatctggtgctgacaaaagagggccgggcatttggcgggttcgacgcgctgaatagtagccttccgcccgcgattgaatcatcaacccgtttgtaa

SEQ ID NO: 155874 - DNA, 555 bp, Enterobacter cloacae
atgttaaatccagctatctgcgccatgttcatgtttcagggcttccagcatgaagtctcccgtctgaccgcattatcagtggctaatcctatccccctcaccttcaactgtgacagcgtacagacaatgatctgtgaaacgttggctggtggcgaaattgaatgtgctcactggatgttggatgccgcagagcagatctgtaaagcctgcgaacctgcgtatcaggcatctgaagaaccgggagtctggtactacgacattgctgaacgtctgggcgctgaagtggcctgccgttgcgtaaaaggtgatatcagcactgaccaattggtcgctgttgcagttaacctcactgagtcatggaacacgctgagcgaagacagcaatcaggagcctgattgcggatcatatgaaaataccgtcaggacgttggtagaacgtgctgatacagcagaagcggcttgcgtagaagcagtcagaatccttgatggtggtgagcggcaggcgttatcaaaggcgatagcaattcttcgccctgtggccgcaacgttgcagtag

SEQ ID NO: 155875 - DNA, 342 bp, Enterobacter cloacae
atgaattctgtctgtcttgattacgagaaagtggattttctggcgaatctcctgatccccaccctcgccagacaccccatcagtaacagtttcccggagcgcggcctcgcacttaaggaaaagcaccctgagctggtgggctggcccgagcgcaaactgggtgaagtggaaaattaccagaatgcactgtccagacagctaccgagcctgaacagcatgtccttgccggagtttatcgacttcattctcaccccgcatgtcgcggagtatgttcttgagcaggttggcactccgcttgctgaagaaaccatgcagctgtttatggcgaaagtgaaggcataa

SEQ ID NO: 155876 - DNA, 444 bp, Enterobacter cloacae
atgcagcacactgcaaccacacacccgcaaccggctaacaccgtgagtatcgtcagtacgacctacggtcagacgctggtggtactgaacgggaaatgtctctactgcgcaccaccagagcgaggagacgaagcccggcagctggcatcaaccactgccggggcactcaacgtgccggtcgatgtcgtccacctcgatacatttgctaccgatacaaccgaaagccagctgatggcccgctttgaaaaccagaatgccgggccgtggtatagccatgcgtttaccatcgcgttcagtgttgaatacccggcgaagagtagcgatgacattccaccagcggaattacaccgtgcattgatgaagcgggccagagagtttaccggtgatctggatgcgctggtggaagcctgcggggcatcttatgacagttatcagatggggtaa

SEQ ID NO: 155877 - DNA, 339 bp, Enterobacter cloacae
atgcaggaactcgactttgaccatatccagataaacctgaacccgcgagcgtgtgctgtcacacctatcccggaagacctgaaaagggagctggcttatctgggcgctatcgcagagagaaagaaattcgcggcaagcctgattgttaatctctacaacccggacgtttgcggggcgaatatgtacaaactcacggcctattgccgtaacgagtcatgcgatacccttcgcgatggcatgatgaccctgatacagctttgtgcatacatggagtcacatgagatctatggcgagacgtttgtcaaaaagctgattaaacaatgggagtttcgtaagtag

SEQ ID NO: 155878 - DNA, 327 bp, Enterobacter cloacae
atgagtcctgaagaagaaaaagtgctgcatcagcggctgatacagcttggcgatatgatgggggatggcctgcactatgagcgcgacggtcaatggatcacccgggagtacaaagccacgttgcgggcgctggggcttttgaaggctcccaagcgtaagcataacccgaccaaaacactcgctgtggatgagcgaatggcacaacgtgtgaaggacgtagcctgtacccagtgcgccgggaaactgaaacaggtgcgctccgggtctctgaaagcgcaatgcacccggtgcaaaaccaagttcaccctcctgaaaaccattaagtaa

SEQ ID NO: 155879 - DNA, 399 bp, Enterobacter cloacae
atgcacaatatctctgtcgaaatccctgcggccctcggcgtacatcctccttcaggagcggatgtcgtgcttatagacgatctgaataacgccctcgccggtgctggcttaccgcaactgaagatagagccgataacgtggacaccgccatcaggccgaccggtgatctaccggtctgaggttcccgatatcctgcgcattgcaggtataaaccctgacacctctgacatggtgaaaaccttctgttccgggccactgccgattgacgataacgagctggatgcccttctggagatgcgcgaacgggacggtcatagcgaaagcttcaggatcgcgctctgtggggcgctggacgcgattctcattcgactctactcagcagagcgtcagcttcgttga

SEQ ID NO: 155880 - DNA, 288 bp, Enterobacter cloacae
atgaaaattactgtgtttactgcccctgattgtccgaaatgtcgcatgacgcttacccgcttttctctggctggggtggacgtgaatgagatcccgctggtggacaacgcagatctcgttcgcctgacacaaaataccggtgcgccgctggtggtggtggtcaacgattcgggccgtgtgacgggttggggtgggttccggccagatcttattgcgacaactgccaatggctggagtgtcgggtcactcgatatccccccgtcgctggttaatcacgtccttcactga

SEQ ID NO: 155881 - DNA, 531 bp, Enterobacter cloacae
atgttccgattattacagaagtggttagtcaggtttacctatcaggacgatatagattgtatgtcgacccggcgctctgcgggcgagttctggctggaaatagatgcccgtcgtcactggattttcctggacatcgacggtgtactccaccgggcggaaaacgggtcactggagtttatgcctgtgctggatcacgtgctgacgcaatgcccgcagacgggaattatcctttccacaaactggcgtaccggcgtaccccgggagatggtgctgagtcatttccctgcgggtatacgcgatcggattgctggactcaatcccgatctggatgggctggtgaataaccacgtgcgttatcacgaatgcatggcggtcgttaaacggttcggcctacagcattacaccttcgtggacgataccgctcgactctttccaactgactgccctgccctgttcctgactcaccggcacgaggggctgaatgcaacgcagggtagcgctttgatagaccggattcggttaatgaaatga

SEQ ID NO: 155882 - DNA, 618 bp, Enterobacter cloacae
atgaaagaccgtttttatctggtcagcttgcgtgacaccgttggtagcaataccgcttttcatagccatcacggcagaggttacagcaccgatcagcgtaatgcccgggtttacacccgcgaggaagcacaacgcgcatggaatacgggacgggagtttgacctgccggttgatgccgatgcagtcgaccgccatctcgtgtttcatgttgatcatcagtttgtaccgggaaaaaccattctctccgaaagcgccaccaaatatgtcggcttcgttaatggccaatgggacggaaacgatctgttctggctggctgatgcgggtactaccacggatttttcccttgccagagtttttgactcaccacaggcagatagacctgatgtcgtctggttaccccatcacatccctgacgctgcaaagcgccctaccttcagtgttgagcggatagaccgccgtaaaatgacgcagggggccggtctgctgatgcctgcctggctgaaacgccaaaatcgccgacagtcaaaggggctgactcgctggaattgccccgggtgtggccgtatttcatggcaacagaatccgtatgattttgatggttgccggttctgcatatag

SEQ ID NO: 155883 - DNA, 555 bp, Enterobacter cloacae
atgttagcgattatcccggcagcaggcactgacaaggtttttaaaacctccctcaaacacgtgctcgatgaggacttcctgtttgcaatggcttcaaaagcaagcgcgacgtacatttcatcccatatcagcgatgacggtgagggcacagtgtttttcagtctgagcgactgggataacctcaagccttccttatcggctgatggctgggatggcgatacgatgcccggcttcattgatttgctggatgcaatcgcagcgcagggctataacaccgtcgaattccacatttctcacccactggtggttggcgcggtctggttcaccgatgagtattacttcacggttaccccgctggcgtatgaccttgccacgctggatggtcagtttgttctgccggatggctcttcctaccggctggatgaccttgatgaagtcagctatgacgaaatgaccgactactttgacggcattatcgaagtcgatggcgataccatgctgggtgtaaagcgtaacgacgatgacaccgtaaacgtcagcaaaatcgaaagctaa

SEQ ID NO: 155884 - DNA, 159 bp, Enterobacter cloacae
atgatgaagcaaaatgaactgctggaagtggcaaaagccatgcgcgattatattgatgccctccctaccgatgtcgttgcagcattaccggtgatgccgggatttgatcgagactgggccgacgaagtcatttacgaagccgaatccgccagcaaataa

SEQ ID NO: 155885 - DNA, 309 bp, Enterobacter cloacae
atgcaatataccgtttaccgcaatcccggcaacagccaggcatacccttacctgctggatatacagagcgacatcattggcgagttaaatacccgcctggtgatcccccttcatcggcttaaaaaaggagcctcggccccggttgcgcgattaactccggtcatacaggtggaagggaatgacgttatcctgatgacgcatgaaatggcttcagtccgcgtgaagcagctcggtcaggcggtcatggacgcatctccgttccggcacactatcaaaagtgcggtggacttcctgctggatggtttctga

SEQ ID NO: 155886 - DNA, 240 bp, Enterobacter cloacae
atgcaggctacagctgctcgccagaaaaaaaccgtcagtgtcacccttgagccaatgctcgtacagcaggcaaaagacgctgggattaacttgtccgccacgctggcagaagcgcttcagagcaaactgaaggccagtgcagcggaagaatggaaacgacagaatcgtgctggtattcaggagttgaaccgcatcactgaagagcatgggttactgtctgacgaatacaggacgttctga

SEQ ID NO: 155887 - DNA, 465 bp, Enterobacter cloacae
atgaaagattgtaacgctgagaaatatagctattcatgtcttttcgcagcggtatttagaccaggtgaaatgcctgtcatttccgcgttccgggcgcggtattgggctctaatcattcgatgggcattgcgtttcggttacaccgtttgcctgattggcagcactggaaccggaaaaagttacctcatcgaaagaacgctaccaggacggatcattgatgcccgactgttactggtaaagaatgattggcatggccctgtgccattcagtttgcgcggtgcaaagcccggcccagttggcattgatgagtcgtccagcttttcagaggaaacgctgcgtcagaacgcggagaacctgaaagaaagaggggtagtgtatacagcacaaagcattgataaagcagctaaagttgcagccaacctgccaaacaggcgtgtgttgcttatcatgattggaaaaacgtag

SEQ ID NO: 155888 - DNA, 672 bp, Enterobacter cloacae
atgaacataaattacagtattaataacagtgtgctcatgatgatgagtgagtttatgattacagcttttgtaatcgtaatactttttgtgattgtattagtatataacaaagcgtttaagtctgaattaagcataaaaatattttgttttagtcagttaacagccattttcatttccgtattagaaataacaacaaaaagaacaaatgctggaagtatcagtattacatggagtgacggcatccatcagttttatactcacgtttttctggggtttgctttttctttcttactttttttgcttggtctttatgactacaaaatgaaaggcaacaaagatggtttaaaggattgcaaaaaacatgttttaccgtgtttcatagggagttggttcgtattaataatattctttttctccgcttcgcctttgcgctatgaggagaatttgattacggatgctcgcgtcgtagcttcggatcccaatcgaaccacaattatctatgctgatgggttctactggctatttgatatggatagaaatgaatttgataagtctatatccagagagatagtcagaggcaactacaagatgttatgtacttcagatacaccagctacctgctgggcgggcagaaaattccccaaaaacacatcactggataaagttttatga

SEQ ID NO: 155889 - DNA, 633 bp, Enterobacter cloacae
atgaaaatacctctgggtaagacgttcccaattttttttatcttattggtggtggtgctggggggcgctatcgccgagaaactgctatgggagggacacctctatcccgattttcttatcagtgatgcctatgtggcgaaagatactcaattgcaggccagtaacgacacaacactgttgaagcagtgctacgctcagcacttaactggatgtgaaaagtattatagaagcttcagccaactggaggtcaggggtaacgatctcaagtcgctgtgtaaagtcctgacaaataacactgatctggacgtctttcagagtgatgctcaattgctggttcgttgctcacgatggaatgttttccgtgtaattccatttaaacctacagataacgcaactgataaatttaagccaatggtcgatatggttgggagctggatggcctacaaccggctctcaaaagagctacttcatgaagatccggtcgatatcttttttgttggactggatgagggaaaaaagcaactatccctgaaatattgctttaccggggttgatcaaattcctcctcaagtagctttccagcgatgtgacaccgagtcggatacgactaaaacccagagtgacaaatcatga

SEQ ID NO: 155890 - DNA, 234 bp, Enterobacter cloacae
atgggtagacctacaggcaatatcgtcagactcacaaaatcaacaggccgcagcagcgactttttcgggccatgtgagttgtgtggaaaacatatgtcagaagcattccgtacccgaaaagcgcgtgagtggcagcgtgaaaatggcgaactctattacggccatgattccgccgtcatgtatgcacatgaaaaatgcattctgaatctggaaagcaaatttacctcaaattaa

SEQ ID NO: 155891 - DNA, 459 bp, Enterobacter cloacae
atgaaattttacatcagcgacgttttatggaaatccgggcaggcattcattttctcgtttgtcactgctccggcagttgcgttactgctcattctgttctgcacagttcttaccagttcaccatccaaggtcttcctcgatcaggcccgtagtctggttggaaatgccaccagcacctcggtcatggtttgccctgaagagaaagcagtgtttgccgcgttccgctcctcagaatgccagcgacacgtggtgaatgccgatgatgccattaaacaatgggactcgctgttgctcaaaggctacctgatagtggcgggtatcgctcttatctgctggatggtaagcgaggcagttaactaccgcagaaagccgtggcgctatgggatccgtccctctgatatgacatttagctatacaaaactcgtgccgaaagaatccgatgatgacgcggataaataa

SEQ ID NO: 155892 - DNA, 696 bp, Enterobacter cloacae
atgcacccattcgattcggtcagagtaaaactgagttttgccggaaagccaccagcggctttactgcaaagcgccctatttcttgaaaatcagcgtcccgaatcctccagttggagcgacccgggcacggcgggtaatacactgcttcgcgacatcctccggtcacaaccggttgaactgagcactctacaaggcgtggttaatctgactactggcaacctcggtaaagccgaatgtagtgagttgcttgcactgatgggccttcgtagcttcggtgaagaagctgctgagttaatggttcgcaatgcgtcaatggtttttgcgagtggacaggctaatgcaaagaacctgattcgcatggaagtcactaaatcacaccttacttctgataagcaggtcattgtcagtactgaaacccttgagcggcgtatgtacgtcatgaacagcaacggtatctgcttcgtcgttgagcctgagatctgccttgatgccgagaaactgccgggcgcggatttctttatcactgaagacgaaatggatgctgcgggcgtgagccgctggggtgaaaacggcagtcagcactggcgatgcatggttacctggttcaatggcagtagcaccatcatgaacgaaatgggacacatgtacgagctcggtgatgaacctgaaattcggctcaatagcttcggtggataa

SEQ ID NO: 155893 - DNA, 192 bp, Enterobacter cloacae
atgtttactttagttctcgtgattgggctttattcaagtggtcttaatccaagtggtgtcacctctcagaaaatacctgactacaaaacctatgatgaatgccagagtgccgcgcctaaagcaaagcgtggggaaactatcaccatcttaagttattgcattccccagcctgcggataagacaaaggcgtaa

SEQ ID NO: 155894 - DNA, 321 bp, Enterobacter cloacae
atgcataaaattgaatgcccacgctgtctgggtggtaagggtgagatccgagcgttccggcacgttcaaggcggtgtgtgttttcgctgcaagggccgggggtatgtcgaggtgaaaaccatcccgaagccttctatccggtttgttgctatgcagaaatgggcaaatccagaggacgttaactacaacaatggggattttatcaggacgttctatttcaaggcccgaagtcaggctgaagcaacaaagaagcttcagaaaaaactcggcgcgtcaggtcgtgagttttatgccactcctgcggatgatgtccagcaataa

SEQ ID NO: 155895 - DNA, 2073 bp, Enterobacter cloacae
atgccagacaataaaccccggatgactgccgctgaaatgactgagcgagcctatcacttcttcctggacgcaaagggtctgtcccctcgtgccgggcaggtagacatgatggcgttttgcagcgcagtcgttaacgctacccccgctgaggagcagtatcgcgtcggggttattgaggccggtacggggacagggaaaacactcgggtattgtctgccgctgatccccctggcgatggaaaagcataagacgctgatcatctccacggcaaccgttgcgcttcaggaacaaatcatctccaaggatctgccagaaatacaggcgagagcgggcctgagcttctcctatgcgatggcgaagggccgtagccgttacttctgccagatgcgctgtgacgttcatatggaaagcgagatgaatgcctatggctacatccgcgatgatgtggaggatatcagcaaggcctttgctggtggtcactggacaggagagcgtgattcctatcctgatgagatcaatgaggcggtatggggtcgggtcaatgctattggcagtcagtgccctaaaaagcgttgcccacattatcaccgttgtccgttcttcctcgcccgcgccctgctggagtcggtggatgtggttatcgccaaccatgacatcgtattgtctgacctgtcactgggaggcggtattatccttcccccgcaggaagagtccatttatgtgttcgacgaaggtcaccacgttccgcagaaagcaattaaccactttgcgacctccgcctctctcgatgccagcaggcatttcatgagcgaaatcttcgacatggtaatgaccatgccagagtcctacggcgggactatggaaaagcacgtgcagcagctggtggagcttgcgggccatgccggtgatgagctcggtgagctgcgggggacacttttacgctccctgaactggcgaaacgatcacgaaatgccaaatggcacggaatcggacatctatcgcttcccggaaggtttcgttcctgaagatattgcggccctgtttaagcctgggttaaagacagtaaacgagatgcagaatatcgttgtgaaaatgacggcgattgtagatgaggccgggcgggatatcagcgaggaagaactggcccttcaaaagatggctgtcggcgagctggcaaatcgcctggcgggtatgcatcaggctctggcctcatactgcgggaataaaaccgtctctggtatgcctatggcccggtggattaacgtccgtcgtactaaacgcagcaccgaagtggtgattaattgcagtccggtctatgcgggcgaacacctgaaatccgagctctggtcgaaggcttatgccaccattgtgacctcggcaacaatccgctcccttagcaagtttgacgcattcctggagcaggccggtcttccagtcgatacacctaccctgctggcccgcagcccgtttgattaccagaacaacggcgtgttgttcatcccccgtatgcgctcggttccgaccaatcatgaagaacatacggcggagatcatcgaactccttcccaaactggtgcttcggcttcagggttgcctcgtgctgttcgcctcccgcaggcagatggaagaagtcagcaaggcgatgcctcaacacatttcaccgcttctgctgatacagggggcacttccaaaacgggaaatactgctgcgccataagctcagaatcgaccgtggtgagccgagcattatctttggtatggcttctttcagtgaaggggtggatctgcctggcgtgtactgcaacaacgtcatcattgccaagctgccttttagcgttccgaccgacccggtgggccagaccctgacggagtggctggagaaaaacgggcgtgatgctttccgggaaatctcgataccggaggcctgcctcaaactgacccagtccgttggtcggcttatccgcacagagagcgataccggcgcggtgactatcctggataaacgcctgaagacaaaagcctacgggaaagacatcctcgcatccctgccccctttcaggcgcgaaattcgttaa

SEQ ID NO: 155896 - DNA, 294 bp, Enterobacter cloacae
atggcaatcgacacagtttaccgcctgcggctcgatttcgacgtgtataacggcgatgtcatcgacaccaaagagcaggaagacaaagaccagatctccattgcgaaaatcacccaatttatcttcgatgcctccgttcggctcaagcttgatgcctgcgaaaccagcgatggcgggccagcacatgggccttactgtgttcttgagcactgcaaccgagctgtactggaacaggccgaaactgaaattaaacgctatgtgagacgctttaaaggccattcactggaagactga

SEQ ID NO: 155897 - DNA, 306 bp, Enterobacter cloacae
atgcagacactgaccgacgtattcagcgataaggcgaataaagcctttcattcgattttcgccgatttcctgcccaccagcgcggatggggtaatcacctttacggttcgcggctatggcggaaaaactgcctgcatgaccgtcccctctggaaccccggttttcgtctttggcactgaagagctcgccgacttccatcgctccgccgtggcgggtgaattctacatcgttgatcacggtggtttccgcaccctgaatcaacaggtagaacgtggccgcgtcccagtcatctacgacatcctctga

SEQ ID NO: 155898 - DNA, 273 bp, Enterobacter cloacae
atgaccgatgccattctctctgaagagctgtacttcaaatacctcaacacctacgaacgcgaaagcaggtttcgcattgactcttttcgctttgatggcgagcctcagtggacaaccaaattcggtcaagctcgcatccgcccttctcaggtacgtgtactgctctgccgctgcggggcaaacaactggaaagacgatggcaggttcgccaatgagtactgctgcgacagctgcggacagttcgtggaggtgctacagcataacgaccgttga

SEQ ID NO: 155899 - DNA, 276 bp, Enterobacter cloacae
atgaaaataagccagctggaagtcgggatgagtgtctggtcggttagccgggtaaatatgggcaacaccacacttaaaacagttgtcgtccacccggtcgtgattgtcgaagtccatgataaccacgtcatagccacctggaatggtaacgccccgcgtcgtttcggtgagtccgtcgttaagggctggaagaaagaaaagccgttgctgatccgtgaaggtttcgggcaaatgcgcctggctaccagggaagagaaagcgctggctggtaagtaa

SEQ ID NO: 155900 - DNA, 477 bp, Enterobacter cloacae
atgaccgacgctatccagactgcccctgaaagcttcagcctttcttccctgaccgacctgtatcgcacagtgcaggcaaccgagtcccacgctctttcaatgatgcgtgtccagagggggatcacctcctgggggagccgtcgtataactgaccgccgaactgaggggttcaccgtctttctggatgcgccggataacgccagccgtattactgttaaaacggagttcgtgctgaatgcagcaaagaccggccctgatacgtctaatgatctggtggtggaagcgcgtgaacattcaggctgggatgagagccggaattgtttcactgttacccgcgagatcggcgaactgcgggttaatgctggtggtgaaaatcatgctgctacacttcgtcagctgtggaagctgcttcacgcgcaggcaaaagcctaccagtccagaaatactgccggtaacgccacctggcttatgttctga

SEQ ID NO: 155901 - DNA, 459 bp, Enterobacter cloacae
atgtttaaaagtctgtctgaattgatgaccagcgttggcaagactgatgcgcataaagtctcgatagtccaggttaaaaccggtgtcacctcgtggggccgcaaaaaccagtcatcccggcctacggctgaataccagatctggatggatactcctgacaacgacagtcgtatcgtcctgaagctgaatttcgtgctgagttcccgccgtaaccagcctgagaagaatgcgcccctgaatattgaaatcagccagtacgctaactgggatacggtgaaacgcgcctgggcggaatgcgctcctgaacgctatatgcggctggagaatgaaacgacagatgagtttatgtccaccagcggggtctgggaagaagcatccgtcatcaccaatgacatgcagccggattaccgctacttctatccaggcacgtcctattacgtggcaaacgacagctactga

SEQ ID NO: 155902 - DNA, 267 bp, Enterobacter cloacae
atgagcgaagtaaagcacttcagcatcacgaaaaccgttgatttttacatcaatgaagcatccccggaaattattgcgggccgcaggatctatctggaaaccgtattgattcctcgccttcgtaccggccttgccgtgctcaataagatgggcctgaccgagcgtgaagatatggagctgcgcgatgtgtaccagcgtggcgtggaattttttgacaaattgttcgatggccctgtcccgcaggccaataccaccaccagccactaa

SEQ ID NO: 155903 - DNA, 594 bp, Enterobacter cloacae
atgaccaccagcaaagagaaaaatgtattctacgttcactactatgaatccgactccagtggtggcgaactgccactgatgcgcattgaagcggagaacgaagatgaagccaacctgatctgtcttcgcaacctcgcggatgtttatgacgttgatcatgacgacatcagtcttgaagacggcttcgaagtgaacggcaatagcgtttatctgcaaggtatctacccggcgacctcagagcaggcactggtagttgatgcggtatttaatatgacttctgtagaaccagtcgctgaggctgtgaccggcacggcggaatccgcctgcggtatcagcctggtctctgataaggtctggctggaaagctggttcgacctcgaagacaaatttgctgatcagatggcccacgtcgctgaagatgacaagtctgatacacgcttcttgctctaccgtgaccaggtcatcgatgtgcgtgaatgcgagacatcttctgtcccaggctgggatctccagttcggcttgagcggcggtacgcagatgctattcattcgcctttctgatgatggcgatcacgttgcactgggtctcgaataa

SEQ ID NO: 155904 - DNA, 336 bp, Enterobacter cloacae
atgagcaacgatattcataacaaaattgctgatgctttagcttctgttggtttaaaactttccgatggatatacccgggccgcactcttactgaagatgaaaggttcagttagtctcaattttgctgttgatggcaaacctgtcactgtcactctccatatgactgaatcgggtgatgttactgctaccactgattatgacgattcaaccgctactgccgcagcagcagccgcagccactacaacgccaacacaagagtcggtggaaaaaccagcagaagagtcggtggaagagccagaaaaaagtaatacacgaaaaggcccaaggcctaagtaa

SEQ ID NO: 155905 - DNA, 1173 bp, Enterobacter cloacae
atgaaaagaccaacggcacataaaaatgaccgtctgccggtgcgaagatctaaccctacaacgcctcaagcaagagagcgcgttattgccgggctggtggcctcagctacatctgacttcgtctacctcgttcagtggctgaaatcaggaaagcagaacggtgaccctctacagctatccagatgggatagcctgagaaatgcaataagccaccttgagacgcttgatgctggtgtacaacctgactggcgcaaagtcctcaccctggtgtcgcgggaaattcataccagccataatgtccaggcggttgttactcctccgtctaaaatcgccggtggtatactcagcaaccttaacgacatcagccagaagatagcgaccgggcttgcttcccctgacatgctcggcaggctcgattatatgcttcagttgaccgcaggcctggcaggtggtgatgatctgacgcaaagcatccgtaaggtttcagacagtgcagaaaaagccctacgtggttatgacaagccgcaggcaaaggccaaaacgcctaaaccggccccaccagctcctgcattccgggatgatcagacgttcaggcaagagtgtgcgccactgattggggttgatgacctctttgttctggctaattgccttattgcgatgtccgcccgcctgggccgttctcctgtcagcctagcgaaacgcgcagcgggtttaaaaggtgtgattaaacccgatatgctggctgacctgctggagctcttacagcaggacgtggatctgaccgccctggccccgccacccagggttaaagacgataatagccgcagtgatggaggtaagctcgtcggtttaaccggggtcgtcgaaggtggcgcgtcaatcggtgctgaagcgcagcgtatcatcaccgcagaactgaagaagcactcgccgctcacttcggcgcagcgcgtatctttcgataccgcccgtgcgggtctggcgctggagagcgatacattccgggttattgaagagatcagacgtattgcagcatcactcaactggagaccgctggctgtcgcggcccatgccgcgcataaatcgcctggtatccgcccggagattgccggggatgtgatcacgttgctggcgcaggatgaggccttaaccaccagcaagcctagccgttaa

SEQ ID NO: 155906 - DNA, 705 bp, Enterobacter cloacae
atgcaaggtacaccacgctggtggcagaacggtcgtcgggtgcaggccgttctcgcagagaatcagaccgcagatgtaaggctcaatatcggcccagaaaatgacttctggtttactgatgatggtaataatcctgttgctgtgcttagggttatcggcccggtctgtccactggatccgctaaaattcacctccagtatcactgatgtccttcctgaagatgtccatagctataaaaaagcccttcaggaacaccagatgataaaccggcctgtctcgttctatcttgcacttgccgatgcctggttgcttgttaacgaacagcagccggtttaccagttccgcatccgaaaccagtacaacggcatgactactgaatggaattccgttgcccgggacaaagtcattgaagtgattaagatgcagccggaaaccgctgaattccgggttctcgtcccatcggctcctgagcctgctgcgaatgcccggcagttgatctcagaaattgaaggtctgcgtgaagctattgggaaactctacccggcaaatactgatgtacgtcgtattgccagaaacagcggctggatgcatgtatacgacgacaccaatgccaaaatgaactttgcagacaatgccagaaataccccttatctcgatgcctttgtgactcaactgcatctcttcctcacagatgatcgagagtag

SEQ ID NO: 155907 - DNA, 384 bp, Enterobacter cloacae
atgctgccatttctcattttgctgttctgctcatcgcctgagacggcgcgaatgatcctaatctacgctaccgatgaatctgcggcccgcctccaggcgcttgaagatttcgcacgtctgaatgattcgggttttgctgcttccgcccaaaccccatatgagtgggagaatcctcacggtgaccagctctttattgagtcggtatacccggttccatccggcgatttatctgctatccgccgtatgctcggggatgacgatgccccatataccgacaagcaccttattgccggtttactggaggacagccgacgtatccagatgattgaaccgaatgccggtactctttctcgtattgctcaggcagagcagtaccttcagtag

SEQ ID NO: 155908 - DNA, 273 bp, Enterobacter cloacae
atgtctactcaaatctattgtgcggtgcttcgccatttcatgatgatggctgcatcctcccagcactcattgattgtgctgaagcaattatataacgcagagatttcatcgaaagctcacctggccggtctctccgtgtccgaagctgaagcgctcctggctctaccatccaccagctggcgcaaacgcgatgatgtaattcatgagctgaacattcgccttaagcaactcactagcgtagccacaccgccagctcaacaagtcgcaaactga

SEQ ID NO: 155909 - DNA, 417 bp, Enterobacter cloacae
atgtcaaacgttaaaccttattcctgggtagttcgcttcgatgttgctcctcagtgggtagctgacggctttatcatgacagataccacagctctcgaaatgctatctgatgttatcaactatgcaaacgatcacgaacttgccgcattggttatttcagcacccgatgcagaaagaatttccgaggagcaaggctatttggcttctaacaatgcggagctaatgcgtcaggtgctaatcggctcaccgcaggcatatgctaaagcatctgtggcaaataccctgctaaaggctataaccgcacttgagcaaacgcaggataataagcaggtcgttaaagaactgcattccagcctcgctttactgacgggcaataagcctatttcggacattatctggtttccaaccccagaataa

SEQ ID NO: 155910 - DNA, 564 bp, Enterobacter cloacae
atgtttaatttaatcgcgaaggctaaagaagcaggttatcaattctggatcagtgcctccaaggtactgacagttactaccggaaccgagatggggctgacgattattaaaactgtaactgatattaacccttgcttgctggtggcggagttaatgaaccttgggatcacgttatccccagataataattatttctgctggttggatagcgaaggtgtcctttgggccgttgaccgccaccatctctatcgaggaaatacaggggagcatggggtaaactgggatgtcgtctatcatcacggcatggtaattaatacccctgagcaggcatccatccttttcaaaattccccacattgggcgctttactgccactgtaatgtatagcgctggctatacacccgactgggctcttccagcctttgttgatttttctggtgaaccggatcatgaaacaatactgtcgtggttatccgaggtaggcattcgtaatgcaggaatgcatctcgaagatattgagtttctttctgttgaagaaaatcccgacgcttatatctctctttaa

SEQ ID NO: 155911 - DNA, 690 bp, Enterobacter cloacae
atgagtcacgagcgcattgaggtttttggtgatggaggcagctggatagccgaaaggcttaagtcattcaggttaacgatcttgggtcaaagtgagtcgttgtctatcgtcaggaacccgactgacaattctgcctgggtgactcacgatgataccggccttgttttatgtcccctccatgttgatggttcgttggccccggatatcgctgaagctactgagacggtggagaaatacatctcccgagtgagccctgcgggaatatcagcacggataaagcaagcccgtaaccacctggatagaattgccgcaccggtagactcacgttctgcggcagcactgttaagacgtggcggaatcccgattctctcactgcgaaccacggaatatctgaagtggtacgagttgttagcgagactggcgaaaggtcaggctctgtcaccatccatctgggtggataactaccttgccggtgatacaccagaaagtgcatgggctaatggacgcggactctatgagttaatcaacaatgggaatatgacatcagccaatacgattttcccggtctggtattctgtagctctcgcactgggaagattcacaacagaagaactacctgtgatgaacgcctggccgagctattgtgatggaacccgtgtggagagttttatccagttgtatcgtgattaa

SEQ ID NO: 155912 - DNA, 432 bp, Enterobacter cloacae
atgcaactcgtcgggtacatcaatgatctggaaaaggctcgtgatgcggttgattcagccgcagaacttctgtttaacgaggccaatagtcttcgggaggaatactgggacaaagctattgctgatgacgagaaggcacggtacagctttaacgtaaccaggcaaggaacaactatcaggatccgctgggccagattgacacctttgcgcaaagctggtggaggcattgatcgtgtcgttcccaaatacctacctctcaacaaaggcgaatcatatccaccagcgaaatttaaggatgcaagccagcgagaacttgcgcttatcgaactgtatgaaggtcagcttatttggttgcgtgatgagttacgaaaaaaccgtgcaattcggcaggcactttcacttcgaataactcacctaagaaaacagctttag

SEQ ID NO: 155913 - DNA, 1023 bp, Enterobacter cloacae
atgagcaatgacaaattggttgtctgcggaattgatattggatacagcaatgtaaaaattgctgtaggggattcagcggatgacaaacccacagtcagtatttatccggcctacgctacgaatgagccagtagatgatgtgcggctggtaaagcgtagctgcgaacatgaagtgttggtgtacccaggaggtaaagaatggcgggcttttaccgaacgccccgatgcgcgtgagctgcatgaccgttaccacatgacagaaatgtacctggcactatatctggcctcactggataaaatcactgctaaagcaggcaatgaaatcgacctggtagtaactggtttacctgtccgtcttgctaatgaaagtgaacgcgcgaaactgactgcgaggctcaccggtacgtttactattgcgccaggaaaaacagtgactgttaaaaaatgcctcgttcttcagcagggcgttggtgtcatcaatgacatcgttaacagaccgggccttatcagtcaggaagaattagagaagtcgaccattctcgtggttgaccctggcttcttctcgatggactacatcgcctttaagagcggaagcagggtatcaggctcttcaggttcatcattaaaagcaaccagtgcaattatcgaaagcattgtgaaccgccttaatgccgataacccggaagagcgaattgatgatctaccagaaattattgaaatcgctctccgtaacaatgagcagtctttctttaatgggttccgccacatttccctacgtcctctgcttgaagaagctattccctccatcgccagtgatgtagtcaaagagttgcgaaaatcgacaagggttctcgggccagtccatatcattgcagctgccggtggtgggacaaggttctacgaacagaccatacgagaagaattcccccgagccaggatcgtatcgagcccgttgcctgttgccagtaatgccattggtttctggaactatggcgttgacttgatgctttacggcgatgattga

SEQ ID NO: 155914 - DNA, 531 bp, Enterobacter cloacae
atgcaagttcgagtgacgattaatccaatactgtttccagagctgattaattatctggaatcaaaacagtctggccagcgcagcagttcactattggcgctggcaaaccgagcattgctagcaggtgacagttttatacccggtatcgtccgtgagacttcaaaaaaacgtaaatcagaacagaagaaatcagtccgtgggccgaatacagaaaatgagactggtctgatgactagtcagagagacggccacttacccaaagtaaatgaggacactgaaccaaaatttcgtcacgtggttagcaacgatatagtcaatacaggcccgccattttgtgtgggcagtgatattcaagagttcgaagttaaagatgaccagttatcgacggcgaaccttaccagtaagcctgagattgctggaaaaataccggatcccaatcctggagataaatcgggcgttggggagacaggcgacaatcaagatagcggcgttaatgaaaaggttacaccaaggcgtgttcgcataagttga

SEQ ID NO: 155915 - DNA, 561 bp, Enterobacter cloacae
atgcagatagcaacgaagagtttggtgctcgctttactatgtgctgcttactgcacgagtacgaacgccaggcttgtagatcttcgtggcacttcttgggaaaagcattcccagaaagagtgtggcctcgatccgtaccttctctacgcggtggcactcaccgagagtaaaaataatgcaggaaccaaggggtatgttgttcccagcccctgggcattgaacaactatgtttatgggtcgtattacccgacaagttatgaagatgcaaagagagcgctagcccgctatctctcagccactccggtaacagatattggaatcgttcaaattaattttcgttggaacggacagtatgttaaccatcctgaagaactcctggatgtcgatacaaacatccgaatcggggcaaagactttgtgtgcagccatcaaagctaaccctggcgatatagaactggcgataggtggatacaacactcaaaaccctaagttggaaggcaaggctcgtgaatatggtcagcgcgtattacgcgtatggaagaggcttatcgaaaatgattaa

SEQ ID NO: 155916 - DNA, 531 bp, Enterobacter cloacae
atgattaatcaaaatttgtattttctacagactgccatctcaattattacccgtgcgcaatcgttgtataaaagcccttttgagttagcagaaggagaccgggaatttttgatagagaaatctaatcaggccaagctcgctttatcgatggagaagtatgacttgcccatctttaatatctgtcatgatcccgagcgcaagatatctactgaggtagaaaaattcgttcgtcatgactcatacatcctacggcttgccctgctggtattcagtgttcgtgttttcattaatacggggactgttgcccaaacgttctactggtttgataatgaaaaaaccgtacagcttgtcgaacgtatggatgatgcacaaacaatcgatgcaatcataaccggcaaaatatattttaaacctattcgtccatttgccgatttagtagattgtgacttcagtacagttattggagcccccaacccaaccttagaattaacaggttacttacagtcgcgctattctcattggagtaattga

SEQ ID NO: 155917 - DNA, 531 bp, Enterobacter cloacae
atgaaggctgctcttgtccgggatgaagataaatttgctttaacacagaaaatggtaaaattaggatttcgtagaaagatcattgtgcattcgcttaatgcaagtgaccgtgttattgattttttgcgaaaagagttccatctgagtgatgtatcaatcggacgacttaaacattcagagacgctgctcaatacgacacataaaaaggttgaggcaaccaattttatgagcatctatctgcgtcgttcgaaagacccaaacaacagtgacaacatcgttgatgtggtgagtgcgttcgaaatctaccgggaactaaaccttaaattccgcccggaagaagcctcgaaaatgatgattgatgccaacgaggcctggactcttgctcgtgattttcgagctgaagaaatacgtatggtaaggtgttaccgttgcgatctttcatttatttcaccgcagagttgtgaccgtccacggaaaaaacatatttgtccgttctgctctgatacagaagctgaaaatgaaagctcgtaa

SEQ ID NO: 155918 - DNA, 771 bp, Enterobacter cloacae
atgaagaaaatctctggtcttgctttggtatcgctgatgttagttggttgcgcggcttctcaaccaccagctatgccggttgacagcaatccatctgatgctttgaaatttgcccgagcgatggatttacgtcagatcaccgatgctggcgatcaataccttatctataacggtttcgcgtccaatgggcagcttgtccctctcaaaaccccggttaaggctggtgaaaaaggtgtaaccaacctgggaggtaatggagtggccgatgtggctgcgggcttcgcgacacacacatctttcatccctgtgctgtctgttttaacggcccaacagcctactgctattgttgatggcgtggtgcgtgtcgcgtcatggaacggtaaatctcaggaagataatgagcgtgaggtcaatgcgattttctggaaaacactaacccggatggatggatacaaagttggtgggatgtgtgaggggaaaggcggtgctgttgaaaatgcagttcgtcggaaagcgacgaacggtgattgggtatcgtatgctgatatagctccaacgttgccgaaaccacctatcagcaccagcggtcaggtgacattcattatcggtaatgactgcttcaacctctatgcaacacgagcctctaacgtaggtctggttaaagaaatgagtaaagaactgggtgctcagcgggctctgttcttaccaggctctcctgaacatgaaccaatggtattcagtgacggtaagcaatacctgttcagaaagtaa

SEQ ID NO: 155919 - DNA, 2658 bp, Enterobacter cloacae
atgaaaaaccttttccgcaaaaaatggttttacagaccactctgcacaataacgatgttatgtcaccttggtgttgtatcctacgtgccgtatgccttttcagcaacgacccaggaaaacgttacatctgccactaatttctataaaacactgccgcaagtttcagctacgtcaaatggtacggttcagtatggaaaaggccaggccgttgatttgaactctgcttatccaaatcaaggttcatcaacttcactggatagcctgaaaggaacctacggagatgacagcaacacgctaaaactgggcaatacaaccaacgccaatctgaaaaccgaaaattcactgcgcggcgaagcttaccgaacgctggtgggctcaacgaaaactacagcaaacattaaacctgatgattccatctttgatggccataaagacttcctggagaatcaggataagtacatgcaagatcttggtgattgttctatgaccaagaccatgacgaataaggacaccgtcaaccatatccctgattatcgcgaatgtacccgtaccacaagtgtcagcggcacattcaccctctaccatccttacgttgccggtatgctctcgcattatagtggcgcggcgaacatcggttcttgcggcactaactgcatcgaactctggctcgggactgtcggtgataactactgggacggcaactgcacaatatttgaacaggcaatggccgtcactgtctacaatccccaggcagttaccagcgccaagatcatcagggctaaatgggatgattacatgcagatttatgtcggtggtacagataggggtagtttggtttgggcagggccaaaaggtttaaacgtcttcccgccagagacatcaggagcctgtgaattaaaaacaagctgggatcagtcgattaatgtagatgtaacagcacaaatccgaaataccccccaaaatggcgttcttaatttcaaaaaccgtgtgtcagtgactggcagcggcgaaggttatgctctcatttatatttactttgacccaaacaaaattatctcggataacgcctggactgttgataaacctgaacaattcgatacgttgctgaaggccatcaacgccgggtattgccagaattacacggtaacctgccgcgagacagtcattcctgatgcaaatgggtgcgcaaccataaatggcgcacgtatctgcgaaaaccagcttgctaagccgccgatcggaggtctctcacctttctgtaagtctgcaacggtagtttccaactgcggaaccgacggtggcgttaacaatacttgcaagcagtacgatgcaaacactgcatgtaaattcattaagtccacttgcataacaggtgcggagggtgacaaaaatgggtgctggcaggcaaccgaggtatgggattgcggaacggatgtcgttgtacccaatacctcctccaccgatacctatacttgtcctggcgctgtgcaatgccttaatgggtcttgcctacagccttctgctgaaccaagcggcgatttcaacaaagcagttgcaactcttcaggccgcaacttacgcattgaatgaaatgaagtgtggcgatgatactgacgaaaccaaccgttcctgcactctttttaaaggtgagtctgcacaatgtaaatcggcgatggggggatgggtggattgttgtgatcagcccgtagatgtcagctggattcagtatttgcagttgtcctactacactctaaaaattgctgatgctgtctctgtaaaagccggtatgttcgaacagggaaaaggtatttttgacatgggttccgaacttatgactaatgccatcgatacaataactcgaccagctatttccgctttcaacagtctggttgggtcggcaggtactgaagcggctcagcaagctacagaagcaggtttgtccggtttgatgaatcaggctataggagcgctgacgaaacaagttgctcaatggactcttgataccttcggccctgctgcgacgaatctgatatttgaaagtgcggcctctggcggtggcgcagccgtaacatcgtctggcctggctacatctgttcaattgtcgtcaactattgtttcggcaatatccgtggttggatatgcttacatggcgtaccagattgctaatatactggtcaacatcatctgggcttgtactcctgatgaatttaagcttgccgttaagaaagaaacaaaattggccgtgcatatatccagctggtgtgaaacaaagtttctgggtgtctgtatcgagaaacggtcaagttattgcacgtttgattctcagattggtcgcatcattcaggaacaagggagaccaatgttaggtatcggctggggggataaaaagaacccggattgtcgaccactgacgttagaagaatttggacggattgattttaacaaactcgatttgtcagagtggattggttcactttacgaggcgaaacttttacctaaagcgtcggaaataaatctggataagataaccggtaaaggaaacgtattgaatatagatggatctcgccagaactccctggagcgattccagagcggtgttgacagtatcgatgttgatgcggcgaaatctagcacagaggctgttttgaaaactcaatag

SEQ ID NO: 155920 - DNA, 198 bp, Enterobacter cloacae
atggacatgtttggtattactggccttatcccattatcggggccaagcgattcagattatggtggtggaaatggtaagaggggacgtggaaaaaatggcagaacgttcaagagcaaatgtgagcgtatgtgggagttttatattctgctctattctttactgagccttcctgtcgtatacatgttcgtgaccacataa

SEQ ID NO: 155921 - DNA, 3519 bp, Enterobacter cloacae
atgagtgaatggaacgtatatactgttggcaacattgaatttatttataatatattcaattccgttgccatgttattgaatgatggcacttacggatccttgtttaggatttcagcactcattggtgtaatttgtgtcgtgcttgctgctgctatatcagccgggaaatcattatccctttctcatatgtgtgtggccgtcgtgatgtattacctgtttttcagtgtatcgatgcgcaccaacattgaagatgttacaacgggtaagtttcgtgctgttgataatgtaccagcgggattagccgttgccgcatctgtactgtctactgttgggtatgcaactaccgagaagatggagcaggcattttctgtcccaagcatgactgagtatgggtctctggatccccttttcactctggccactttatacgacacattgaaaacgccaatgcgctggacgggtcaaactggtgcttacggtgatctggacgcaagcgtttcaaactatgtgaagaactgcgtaggcaacgatattattcgtgggtctaaaacctttgcttcaatgtatcgctctaatcaaggtgtatcagggctagcctcgaacgattccttccagcgggttgttatttacgacaatgtacgtagcggctggtctaccagtactgaagaatcttcaaatgggggctcactttatacctgttctgacgcgtacacgaaacttaaaggactcgctacccagaacgcttctagcctggactcagcttttgccagctcttataccgcatccgggcgcacttgcggtggtgcgccatgctcaggttcaggaaaagcccaggaagtactgaatttcttcaacataagtggcactgatattcgtgatttccaattgatgttggtcatgtaccctcatttcagggaactgccaatgtacggactcgaaagctcatttcgtggtactgctgctgtaactcgcgcccaaaccatgactcaacaggcattccaatggtcttcttctggttcatcattcttgagctggatgggttcatttatgccgattttccagggaataatatacgcactcgcaccatttatggccttccttttcggtctgggtattatgggtttgcgactggtgatgaagtacttcctcgttatcatctggacatggacttggcttcccctcgcagcggtcgtcaacatgtatgtgttaaacagtatccgtgatacgtcaagccaaattcttgtcagttcgggttctggcggacttagctttgctcagctttatcagctcctgtttgagactcaaaaaagtataggtcttgctggtaatttatacgcgatgatcccggccctgggtggattcattgtctggggcagttctgttgcctttaactctcttgcaagctcagcagcagcaccttcagctgccgatactaaaactctcgcacctgatgtcaccaacgctcctgcgataaacagtcgtggttccgatgttgaatttaacccaacacaaggaactatcatgggtgggtcttctggcactctccctgccattgacatgaaaaaggtcgctactcacaacctgtccagcgctaagcaagaactagattcagcatccagttccttgactgcccaatctggagcaatgattagccaggtggccagtaacatgaattctggtggacattcgcaagtttatagtgacgcttccaatgcagcatttgccagcctgagcagctcagatcgtgcccttgtcagttctgtggctaaagaacaaggtatttctgatatgcaggcgcttgtctctatcgccaaaggtgatgtgagtgtcggtggcggtgcgggaagttcaagtgctggtgttggtgttaaaggtggaatgtcacgttcagaggcagaaagcagtggcctgagtaatgacaacagtgctaagtacggttctacagacagcgcctcgtcgcacaaaatagacagtgcgacccagtcacgcatcgtcaataccgcagcaagtgcgatgtaccagtccttatcgcaagaaggtgagagttctcaatcgactcgttcttttgctgaggcaaatcaaagaatgcagtccgcacaaaagaacttccaggaagcaaactccttcgtttcaagtacctcaatgggccagacaatgaatgctgcgcaacttgctacagccattggtcgtaatcatgatgcacaagcaacattgactcaaaccctcgcggcgcacccggaactgtccagcaaaatcgccggtgatgcagcgagcctgacctctttaggtatgactcacgaagacgcgcatacctttgctcaattcaaagcagccagtgaacttggtgttgccggtgcagtagctgccaaagccgggttcattaacgctgattccagcccagtactgacgacaactgcatctgagcaataccgtggcgtgagtggtggagctgaaagcgctggtggccgcgcagttgctggtgcagcggacgttggcaactccgttaatgcagtaacaggccgatcttacggagcgcttggtgaagcacatgcgtcatcgtctgatggttatgggcaaggccaggttaatactgtcgggggacagaatagcggtgcagttgagcaaattcacaagggaaatgagggtgaagtcatgacgaaagcgggtaacaccgccgcaaatgatttcgaaaacaaccactataatcttggcggtattactggcgattttaataaactcgtttctcatgtcagtaatgcgttcaaagaaagcccggtatatgaacaggtacatgatcaggccagaaccatcgctggggaaattccgcttggtggagatgcaaaccgcgaagcggcgcgagattctattgtgaactactacgccatgactaaagctggagcgtctgagcaacaactttcccaggcccgcagtgacatgatggcacgtattcaactcgcgacgggtggtgaaaatgacaatggaacggttatgggcggaaatactgctcttgcccgtggtattgcagcccgtattgataatgccggtttagaccgttcagccaatgatggctccattattcaacaggctactactgcactgaataccgatcgccaaacccacgaatacaacaccggtggcatggccaacaaccttggagggatgcatcaggcatcaaatggaggttctgctgtgggtgatggcgtcccttacgcgatgggaacccacaaccagggatacggcgaggctgagacaatgaccgttaatgcccaaggtgctgaaggtcataatggtttaaaccagaactcaaactatggtgggtctgagacaacaaacattaatacccaaggcgctggtggtcatagtgattcaaataacggaggtacaatgttcagtgatccgccacctgcacgtgcaacccagtcgcatcaggagtatgtacctgtgcatccacgtaataaagagaacaatggaggtcatagtggtggaaatgacgacatgataatttcatcgagtaagtga

SEQ ID NO: 155922 - DNA, 1443 bp, Enterobacter cloacae
atgaagatttcgcgcaactataatataaagaatgtattccgtagaaacattcttgcaatttctatctgcctctccgggttgacagcttttcaatgcgaggccaccagcattagtactcagctagacagtatgttcggctctatgtcgaatgttacagctcccggtgattatcagagcgttacacgtgatggatataccggtggcggatttgttctacgtaataagctccgtacattgacacctattagtattagtctcccttctgcgtcgggaggatgtggagggatagaccttttcggcgggtcattctcgttcatcaacgctgatcagttcgtccagatgctacgtaatattgcttctaatgctgccggtctagctttccagttggccctgaacgctatggatgccgttctggataatgctatttcgaaaatgcaggcaatcatccagcagatgaacgatctgaccgcaaattcgtgtcagttagcgaaggggttgttagtcgacactgcctctgcatttggtgacagtgcaaaggttgctgtatcttctcagctgtcctctgatggcctctcagaccaatttaaagccatgtggggcaatatgggtggtggtaaagcacccgacgtacaaaaacaagaggcagggaaaagaaaggcatgtgacgattacggtaacattgtgtggtgtttgctccagaatggtagctttagtaatcaattcatcggctccgaagatgagcaaaaagaacttattatgtctatgaccggcaccatcatcgtcggtagccagttgggtacagataaagatgggtcagctaaaaagagtgtggttaggattgctccactcgcaacttcaaatgtcctggattcttttataaatggtgatgatagtttcgatttctggtcttgttcaggtcagactagtacttgtgagaatcccaaaaaacagaccaaaataattaaaggtctcgctgccaatatcacactcttctttatcgataacggatatttgagctcggccagaactggttcaaaccctggggatgctaaattacggcaagcaaactactacaacgtagctggtgctaccagtaaagcgactcaaattgcacgtcatgatttagccgcatcttattcctatatacgtgaactatctcctgtcatagcctattcagctgcttataactacctcagcgaaatgcttacggctgctgcgaccggcgcacggctccagcaggaaaatgataaatcggcgtcagtttattataaggatgctggagagctaatcgaaaaggcaaggcaaaatctgtatgtctcctataacgccatgatatcccgttatggtggcgaggcccgtatacctgaatcattcagcaactatatgacaacgcttccgcaggttcattatgaatctgaaggttctcttgatggctcgctctaa

SEQ ID NO: 155923 - DNA, 1101 bp, Enterobacter cloacae
atgaaatatcaatttttaactaaaatcattattcccctgctagtgggatttgctttttctacctcagttcttgcggatgagggtaacaccccaacgtctcaatcccctcagaccaccagtgacgacctcgctggtggtcaggcatttctgaatggaaaagaggaaggttggttctggcgtaaatcgccacctgagccagtgaagaaaaagccagtgaagttacctcctccgccgactttaccgcctcaagaaacgcctaaacaggttgctcaaacacctatggagtcgactccagaacctgccgcaactgaaaagcccggcccggctccgttcaccgtagcctggtttaatgaaaacattcagaaactacgcaaccaggccatcgacaatcctacccaagaaaacgttagggcatattttctggcccaacgcattatgctggataaagccagccgctttactgatatggctaggttggttacttctaccgaccccctcatagatgagaatagccgccgctcaacctcaacatttggggcaatggatcaatcgaatgaagctgaaaacaattcgagaacggtcataaaagacgtagcgacaaaagcaggattgtttttcttcttccgtggggaaaactgctccatatgcgtaaagcaagcttctgttatgaatacgtttagtttcatgacagacatgaaggtcatcccaatttcacttgatggtaaacctcttccagggaatatttacccggactggaggcctgattctggccaggcatcaaagctccaaatatcaaacgcacctgcgatagctctggcaatcccgccatctacaacacgcattgtctcatttgggcctatcagtgcagaccagttaatttcaagaacagtccttattgcccacgatgcagggatcatttctgaccagcaatataagagcaccttgccatataacgataccggctatatcgactcaaacattctgaatgacatgcctaaagacctaactcaacaacctgatgagtttatcaaatatatacaagctaaagctggctacggttcgacacctaacccaaatgctaataacccgggggaaaaatga

SEQ ID NO: 155924 - DNA, 300 bp, Enterobacter cloacae
atgccagcacacaaaatccctgcggtattagttaacgacgaccctaagaacatagttactgatgagctgttgcgtaaatatggaacacgcatgactctcgatgaggcttgctccgaaattggtgttaagtcggatagtgtagccaaacgtataggacaggtcagatataggcattatgcattaactcgccaacttgaaagtgcaagggtctttagtggaaaaaatagctttttctggacggagtctatcgcaagaataatttccgagggtaattccgatgaaatatcaatttttaactaa

SEQ ID NO: 155925 - DNA, 522 bp, Enterobacter cloacae
atgtatacttcaactactgctaaatcagatcatattgatagctttaataacgcacaaaaccgtatgttgatgaattacgaacgtgatgagtttgaacaagctcccgctgccgtactttatgatgctgtcggtgctgtcgtaaacgatgaatctgatattgatataatttttcgccttatggatatggaaggagaaatgttgtttctccgcgcaatgaaaaacctcggttgccaagagaatgttttttattacgcatctgaatctggtgcggtgctgactgctaacgatgcaacgttgcttgaatttgcttataacctgggcaaacatatcagcaatgagttctttacgcgtttcttgcgtaattctcagttagcccgtgaactcatcggtaacatcattcgtataggcaacgatgcccttaaatttccagatgacggcctgaatacagtatttgaatgctgtgtgatggagaattcatcctggaagaaccaaggccattttaaagataactttggtctttaa

SEQ ID NO: 155926 - DNA, 390 bp, Enterobacter cloacae
atgtttcattctgaaaccgaggatatctatggttttgtgtctggcgatatgtcattgcgacctcattcaatcgatagagatttgcaggacttaaggttactactcgccgatatggataccattaatattctgaacgaacgagggataggaactcagaaaaccatctttcatgtaacacaaaatgagtcgaaggcattaatgctggttactcgtttaacttactgccaaggtggtggacgatttactcaccctgaatgtgctcttcttgttgaacagataactgatctaggacgtaagttgggtaataaacatttcgatgcggcgatgaatgaagcaaaacgctttatagcgaatgaggctgacttcatgaaagaacaaactgtctggtag

SEQ ID NO: 155927 - DNA, 261 bp, Enterobacter cloacae
atgagtggctgcgcgttgatagagtataacaaccgcaccgccagaatacgcggtgaagttgcacaaggcgataagcattatattcagtatgctctcgctcactgggctgtcattgcaatcaggattcgcaatacagaccatcattttacccgattgccggttgatgagtggattgaaggaattgcaaaacaagtaaatccttctgaggctcgtgagcagatatttaatgctctattgcggtgtaagccgggtatcttctaa

SEQ ID NO: 155928 - DNA, 222 bp, Enterobacter cloacae
atggatatcccatgcattttgtttatatcaaatagtcggcattatgtaattactgaagactctgttatcgcttcatggccatcacgttctgataaagaaagtgagatcattcagcttaatgacggtcggattattactgcaaacaatgtacgacgatttaacttcatcgacatttcaaagatcgaaagcctgacggcgattgatgatggaattgtcttttaa

SEQ ID NO: 155929 - DNA, 309 bp, Enterobacter cloacae
atgaatattttaaaacatgacttcgatagttcctctgaactgctacaagcgggtttattgcttaatcaattggaggatctaatagggtttatttccacgaatgagttcaggaaaacctcaatcaatcagttcattgaggttgaggcatctgaacttatggtttttaacctatggcatccgatgtgtcccgatatcactgaggttcatttcttccgtgatatggattcaaattggtggccatacaagatttatgaactcatgtctgatataaccacccaaacccaattcattcctcgggtaaatcaataa

SEQ ID NO: 155930 - DNA, 501 bp, Enterobacter cloacae
atgtctgcaaccgcaaaatctaaagtggttcacgaaaatcaactctcattcatgagtattttcgatgccactgaaagtgaatatgatctgatatcagccgattcagaacataattatgaacttcgtttttcatcaaagatggcttacgaaataattcgggatagtatatatatcatgactgcataccgtagtactggtgagcagcgtgtggatgaaatcctctggatttgttcggaagaaaatcaggaagacttatgttcatttacgagttgctgcaaaatagcgggtcttgatccattcgaaacccggatggaaatcctgcacgagtggtcaagtgaattggcaaaacaagcaagactgattgcgtgtcatcactttactgctcccactaatatggaacatgttgcatcccaacgtattggatacgaaaaatacagaaaagcgttttatcacacttatcctaaagaggctgcgaagccgcttaagaataaacctctgtaa

SEQ ID NO: 155931 - DNA, 1914 bp, Enterobacter cloacae
atgggtatttataattcccttcctattgtcgcacgtgcattaagctctcagattggtcttaatgtttctgttggcggcaatgaagcatatgctacggagactggtgctggttttcttattaaccttccattcttcaaggacgctgaaatgttggcaaatccgttattagggtatgccgtacatgaagcagcacatatccgtttcactgattttggtgatcttaagatattcattcaagagcatatggagtcggataaatacaacgttgaggtacttagacacctggtcaatctttgcgaagatttgcgcattgaacgtgcgatgagttgtcgctatccaggtacattgaagtatctcaattcactgaatcattttttgttcagtgaagaagcggaatcctgtgataaagcttcatcggtatttctggataccctgcttacttgtggtttgaaccgcttcaacggtttaactatcccaacaaagcaagtgcgtgaagactttgaacgcatcttcgggctggagctgtacgacaaagctatgacggttatggctgaagcagtacaagcaacctcgattaaaaaggtgtttgaagttgcatgtcggttatatgacctcgcagtagatgcatttaacgaaactaatgagcaagaagaacctccgcaggatgataatcagggcgctgattatggtgacagcaaaggcgatgacagttcgtcagagccgggccagtcatccgacagttctgacaaaaatggggatggccagactgtaagttcaggcggtaatggcggctcgccgtcatcgtcagccggtcagaatgggccttcttcagatcctgatggtaataccggtggcgcaccagataaagaacatgggcaaaacgatagcgatgatgaaaacgataactcatcgtcaacgtcagctaatcgtaatactcctgcttccgactctggtgacaacaaagccggagcttcccaaccgggctcaaatgcttcgggtgaagcttctgtcgttaacatgtcccagggcggtaaagaccctttcgaaggaaccacatcgaatgaccttggccgtactggacagaacacttcagataagctcaatcagttaatcaaagacaaagtacccccgcatcaacgtatcgtttcacctactccatattcagtagcacctgcgaagcggcacgataccggtaatgcatccgtaagtttaggggtgcagatggctaccgggttacgccaatcacttcatgggttgttacagggtgtaagagcggtgagaagaacacatcgtgaaactggtcgtaagcttgattctcgactggttaccagtgccatgctgggcaatacgcgtctttttaaacataagtccaaggcagtagatgtcagttctgcttttactatcctgctggactctagcgggtcaatgagccggtcggttaaagaggctgaagccgctgttgtatcaatgttgtatgcgctcgatggtattcagggggtaactacctcggcataccatttcccacacgccgcacataatagcgtaggtctgttaaaaggacgggagcaaactttacggacagctataggaactcatcagtttggtattggtacgcaaggctgtactcctctttgcgaatcgttatggcctgcacttgcagacctgacgtcagctaaagcggatcgccatgtattggttatagcaactgatggccagcctgatgatatggcttctgcgcgagcgatgatacaaagcgctaaagatgatgacatcatcgttattggcatcggtttcggtgatgccagtgaccgcatgatgaaaagtctttttggtgataccggtgtttctgtcggttctgtttctgccttacgtagcaaactctttgaagtaacccgtaaagctctcatgtcttaa

SEQ ID NO: 155932 - DNA, 1356 bp, Enterobacter cloacae
atgactatcaaatccaatgccactcaggttctggaacaacttattctcgtttctctttctgatatcaccagtattagtggtcgtcgtaagctgaaaagagaagatcttggtaacagtgctgatttgccacctgatgtacttgtttcattaggtagcaagaaaatcattgacccacaactcatcaatccatttacccgcaagaagaattcagctcacgctttatgtcttgaagcgggtattaaatttatgggaggctatgcaattccagccgacaaggttaatgatttaattggtaaactgaatgtacttaagggcgagttttacgattacaaaaaggaatttatgaaagctgattttaatagctggattaattcttttgaagaaaagtatcgctctatacttttgcgtgatgctgcgatcgatttgtcttatatggatagccagatacaatttggctttactgcgattcatatcacaccttatggtaacagtgtcattcaggatggtttaactgggcaagttaaaagtttagcggatgaagtttatgaggatgtggctgatgttgttgaaggtttccttaaaaacaggaaccccgatgcgttttctcagcacacactaaatcctttacgccgctgcggcgataaactcgcttccctagctttcatcgcaccaagcgtccagtctcttagcgactatgttaatcaggtaatgaaagacattccgctaaccggcaaagtgacgggcaaaccttataacgacattctctctctcctcaataacctacgcgacccaattcatgcaaaacagtttgtagaactgctgtcatcagccagtactacagatggtaacgatgcgattgacccatcactttcaatgaaccttattggagatgatgatgccatgactttagcggccatttcggcaactcaggttcaggtagaaacgcttcctcctccgcatacagatgcgtttgcatctgctgtggtagtagaagatccgatcggattgcaaagcgttgattcactcgctgaagccccatctgttctggtagaaatcaatggttcagctgatacgtctttggcaatcgaaccggttaatacgtcggctgatactgacgttaacgacttgtccgatacccaggagcatggaattgttaatgacgctgtaataccggcgtttagtgcggttatggtcgatgatgattcatttttgggcggtgattcgattgtaccccgctctctgccagactcagctcttatttcgggtttggattctgaaaaagtcattgatggaaaagagcctgaaattgtaatttcgtcttcactcgatgatgacgaaacaataatggtgttttaa

SEQ ID NO: 155933 - DNA, 1080 bp, Enterobacter cloacae
atgactactaatttcgcaaacctgtctgttgaaatcatggcgcgctctacacctgtccacccttctgtatttggtattgttgttccagatcatcagatggataaagttaaaccgttccagggatttgactcagccaatccatttagtgcattcgtgcctaaacagaatgacgactatgtttttgaagcgtatttgcgttcatctgtactgatgtggattaactatccacaaaatcagtctctgtggatctctggcccaacaggttgtggcaaaaccagtgttgtcgaacaagtagcagcaagacttaactggcctgtcatgaaaactacagcttcacaagacctggatattaacaatctcattggcggtctccggcttcagtgtaatgaactgaccggtgataccaagactgtttttgttcatggcccactgacgctggcgtacaagtatggactgattttcctactcgatgagtacgatcaattagacccatcctgtgccaatgcctttaacgccatcctcgaaggagggaatttagttattcctgaaaccaacgaggtaattaaacagcacccgaacttcagatttgttgcaacggctaactcaattggtcagggcgattttactggcgtttatggcggtgtgaaaacattaaatgtggccaaccttgaccgctatatgtttatcactgctgactatatgccaaaagaaaccgagactaaattgattaccaaatatatccccgacaccaaagtcgcggagaaatttgttgacgttgcgaatatgattcgcggtctttttgtaggcaagaatatcaccggtgaaattgacactagtgtcaatactaacagtgcaaaactcccggacggtgttcttcccgacactcgtttatcagtaacgtgttcaactcgttcgctggtggcctggcttgaccgctactcaatgatgaaagctgcaaagatgccacgtgcattattaacagctttcgattatcagattggtaatcgtgcatcagcagatgataaaaaatctttgcatctcatcgttgaagctgtattcggttctgaagcacttaaataa

SEQ ID NO: 155934 - DNA, 378 bp, Enterobacter cloacae
atgtttcttgtaaatatgactgcatatcttgcatccccagaacaacgggaaatgggcgttattgatgtcgatcagcaagtatcacacgcattacgtgaactgttgacctttaatacctgtccttcagaagatgttatgaccgataaagctaaagaatttgctgaaatcgctacatcactctgtaataaatataaggctgatggtgtacttgtttatgccaaaacctattttatgcctgttctggtctctgcattgagagccagaggcatcgtttcttatgtaacgtatgcaccaaaggttaccagtgttgataacagtggcagtgttagccgcaattataagcatgtcgatttagtacgtgctgatattgctgcataa

SEQ ID NO: 155935 - DNA, 1110 bp, Enterobacter cloacae
atgtctgacatttatgaagtcgttgatgttgtgcagggctcaaaggaatggctcgaatggcgtaaaactggtgtgacagcaacatgctcccctattctgttagaggaggctggtgcaactaaaacgccctacgaactctatttgcaatacgctggcctgattaaggcagaagacctttctgtcattaaacaggttgatgctggtaaaaagcttgaagcacttgccagaagttactgcgaaaaagagattggacaaatcgccctgcctttctgtgtaaggaacaaaaagtatccttacatgattgcttcgctggatgggcagttcgacgatggttcaatccttgagataaagaatctttgcgagagcaaacatctttctattcttcagcttgaaaccaaatcgccagaattccgttattactactggcaagttcagcaccagctgctgacaacaggcgcaccccaggcgtatcttgtgttttggtcggccactgaccagaccaaggtctttaaaattatgccttcgaagaaagcgttttatcgagtccaggttgcctgcgaatacttctggaataaggttcagacaaaaacagctctaccgtttgataaggaaaaagatattttgcttatctctgaccctgaaatcatgtctcagacacaaggctttaagcttccagacgacctcgaagctcgtgtggtagacatagccagacaagttggaacattgcagcagatggagaaagagttggctttaaagaaaaagcagttcgaagaataccagaacgcggtcaatttattgatccagggtctaggtgcttctattggcttttcctataacgagctggttagaatcgatggctttggctttcgttttcttcagtctcgcgtaccggaaaaaccgagctacaaacgaatctgcgataaattatctattgaccccaaacatcatccagaatgttacggtcagtcatcggtacgaaattcgttaagtacctatgaatataaatcaactctgactgatactgtctacattcctttggatgacacttccgtactggtatctcctggtgcagaagagacagactcagcccaacaatacgttgttttttaa

SEQ ID NO: 155936 - DNA, 1557 bp, Enterobacter cloacae
atgtactcaaataaatcacgtagttctggttcattctcaaacaacaataaagggaacaccgatattgtcgttaagatagacagcattgctcgacatatgttgtcgctcgaaaagatgtttgcatccgcaggttccagttcacctcacatctcattcgaacgtgaatgcgtttttgcaaaacatattgtcaacaataataactacttggctgacatagcagttaataatccaaagtccttcgaaacagcattccttcagcttgcaagtagcggccttactcttgacccggcgcagaagcaggcttacctggttccacgcgatggtcgtgtcattcttgacgtgtcctatattgggctcagcaggatggccaccgatgaaggtttatgcgaagacattgtggctgaattagtttttgaaaaggactcatttaaaaccaatggtcgtcgttccagcccagaccacgaatttgacccctttgcttataaagggggactcgttctcacaaacaccgatcagggtgctttaggagatcgaggcatgttcaggggggcttatgtcgactatttaatgaaggatggacgtcatctggtatttttcattgaccttcaggatttagctcaatctcgggcgaaatccgaatcttgggcaaaagtggagaaacggcagtattcaccgtggactcagttcccttggaagatggtgctcaagtcagctattaagcagaccatacacttaattcctggtaaccgtactcgcctgagttcaatgattgaatatctgaacactgctggtggtgaaggtttccgtacagcaacaatacccgtcgcagctgctgaagctgaaatggaggttagacaagaagccaggacggctggtaatacggatactacaatccgaactgcaaagtctgatgataaagttattgaaggtgagtttaataagctccctgaagaacctgattcaaccgagcagcaggacatcaagagcaatacaccaaccgatgtttacgatacggctgagggaaatacacctccagctgacgtaaatggttcggctgatgatattctccctccacccggagaaaccaatgggcagtccaatgaagaaatgtctgagcatcccggggtcagaaaatgggctgaacgcagaattaaaaagttagtaagccgggcagaaaagacgcttggatacgaaactattttaaacgatgcaaaaagcagtttcgatctgaatgaaagtgagctggcattcgctcgcttatctttagaaaaatcccgtcggtcacttctcaaaaatcatttaactaacgcagtaggtagcttcgattttactcaagtacttaacttcatcgaaaaaatgggtaagggtgagtttaaaaccgacgcggccaaatgggtcggtgaagtccaagccgaatcaatggaaatacacaagttatatcttgaggctgttaatacatctgattttgtgaggctcaatgccgctctcaacaatgtgacatttccccctctaaaagaaatggtagaaggtcttattgaagatcttctggccgcttaa

SEQ ID NO: 155937 - DNA, 765 bp, Enterobacter cloacae
atgcaatccagagcaaagggtattgttgcgatagaacctaaatatgtgcctgcatctaacaatgcagattcatatatttatttccgtttgcgctgtgacatgtccattagcggcaagtctcagaccgagttctattcgataaaagcatttggtaaagtcgcggattttctacgcgataatattcaaatgaataccgaactgtatatcgaagcattagctcgatcattccgttatacaaaacatggtattgaccaaatgaggactgagtttcatgttttcatggctcgaatcattcagactggtcaatcaatagatacccgtgcaaatgaaactgtaaagccaccatctacatcaaccgtcacttcgctatcccctcaagtagcgcaaaaacttaaggacgatatgaagtggcagaaaatgtctgatgaagaggtaagaactgcttctgaaaaatggagaacagtatatgccgagcaaaagcagctgcaccctggaaaagagtctgtatcaccagacaacaataaaaattcagtagagaagataccagaagcttcgccgaagctggatgctaagaatagagccgtgcagacatcacgtccgcaagccgcaacctctaagcaccctgtcaacatgcaagcctggacaaatctgccagccgataattcgacagcagccgttattgtagctcgtatgaaacttaatgaaaaattaagctcctccgggcaagtaactttaactaacgcatattcatcagttcgcggttga

SEQ ID NO: 155938 - DNA, 501 bp, Enterobacter cloacae
atgacaattgtctatggtagtagcattgagccgggtggtatggaactggatgattacacaatgattgcagagtgtgaaaattgtgggaaagactgccgacatcggatttatgaagactgtgttgcaggggcaataaaccagagattctcttatacgtgtaatcactgcggttatcattcctgtaacgctgaagtatgtgacgtatgcgatagcatcgaatgcgaagaacatgctggtcgttatcagtctaatattttcttcgaaatgcatgagctcattgagctcatgaaaatagagggagatatactggcaatcagagcaaaaatcaatgtaggcgctcacgactttggagatctttcaaagttagatgattgcctgcataggctcacctttccaggttactatgaacggcgaaatactgatctctataaagagatatcagatgcttcaaccgacatggcaatccaaacatggaagcgtctggaacgcttgttatgctaa

SEQ ID NO: 155939 - DNA, 612 bp, Enterobacter cloacae
atgtctgacccaatctcattaatggcaggtatcgtattttttggtgctgtgtattaccgtgccgaatatatcagattccttggcccaatctggctggcaatttttataacggaacgcggtttactgttcactggtctcggttttgttaccgcgactgtatgtgtagttgttgctttactcgttatttataattcattctttaccaagtctgggaaaaaatctaatgaagcaactaatggaaacatggttgaaggtgtttctcgggctgggtcaaataatgacaaagccaaatatgcaaaccatcgttttgaaggaaagcttgtttaccacggtctcgaaaactggaaacacgatcctaataacgataaatcgtatttagtcacaatacgtagtggtgggaaagaccatgaaatttgggctgttgggctcaaaaatgctgttgagacttgtggagcacaagttggtgatattgtttcagtctggaaagagtctgaagtaagaaccgacaaagcacaagtgtttgacgaaagcggtaaggttacagggtatcgtactctccttaacgaaaaacgtcgcggcatttgggttatgcaagtactcgccgaaagctaa

SEQ ID NO: 155940 - DNA, 747 bp, Enterobacter cloacae
atggctaaagcaccggtacaaaccgtaaaacaagctaaaaagagtggggctcaggataaccgaacccctaactctcgtgtcgaatattccaatcctgaagctgtcgtgaaatttactcttcacacccaggaaggtattcgggtacagtcccgtaattttaacattatctcccaggctctcttcaatctgaccaataacagccgagcccttgaacggcttggcactaaatacagtggtgcgattgaacgtacactgaaggcggttaacgaagtaatcgacatgcctgagaaagaactggaaaataacattgctattctgaaccgtgcggtaaaagaagaagaagaacgcagcagcctcaatgaagtcgggtatacccatccaaaagaacatgaggttcgcatcagaacgccgcaagcgctgcgggttatccgcattattcagaactttgataaattgcaccagatcatcgataccctctggttaaataactgttttaatcaggatgaggtcgaggagtttaagtctcgtcttcataatctcattcgtgatctggcagcatcactcaaacgtcacgcgcaggcatctgctgatgagcttaatcaggccaatggccgggccgctgaaaaagaattggctggaagcactgagacagaacctacccaggtagaccaggaaacaaaggtgttgcaggatgccagtaatgaagcgaatgatgatcagaatgaggccattaaacggcaggcttaa

SEQ ID NO: 155941 - DNA, 1068 bp, Enterobacter cloacae
atgaaaaaaattctctcagttctgaaatcacccaagaccctggtgctcgcatgtctggcttttactatgccggtttttgcggctgacgtttcatcacccgtacagaacaaggtctgtcatgataaccaagtcttatcagcgaaactcattacggatgtttgctggaactgtattttcccgataaagcttgccggtattaatctgtcgatgacaggtactgcacctgacaatgcagcatcagggacagtatgtgcctgtaaggatggattgaacgtctatcacccgggtgtattgaccgcgatgtgggaaccgagaaagctcatcgagttaacgagaacacccgggtgcatgtcatccctaggaggggtaacactcgaccttggtaatgatttgcagtttggcccgcagaccgatggagcagccgaggaacagcgggagcgtttctcaataagtttctacaacgcacatatgtatgctatgccgttattaagaatgttggatatgtatctacccggtcaatgtaatgccgacccatacagcgattttgatatcattaatttcacggagattgacccgacctggaataatacgatgctggcattcttccagaacccggaatcagcagctgtggctaacgtgatagcaatgcaggcttgcgccggtgaagcagcggcacaatttgcaggtaaacagccaatagactcactttggtggtgtgccggttcctggggtgggcagtatcctttaactggatcggtacggagtatggatgcccccagaacaaccagcctggtcgggatccgtatgctggccgcagaacatcgtcgtggactggcctaccgttcgatgggaaacgatactgtttgtcgctccaagatttacccaacgttgccaaagcaacagtacaaattgaatatgttctaccctaccccggagacaaaaaacagtcatgaggtcggtgagtccccataccaatggcaaggtgggcctttccgttatccaaccggtaaaggccaggacagcacctacatgattttccagtgggtagattgttgccgcacaatgtaa

SEQ ID NO: 155942 - DNA, 1314 bp, Enterobacter cloacae
atggtaaaaaaaacaccttttcgactttcgatattggcatttgtaaccgctgttgttttcactccagtctgggccgaaaacactggtatctatttaagtgatctgccgtcaagaccggtatccaacttagataatattccgacaagaccggctaataactactcagtcactgacattcaaaaagctaagcgtcaattatctgcaactgaaatgaaagatattgacagtctcataaaagcggctcgtgataatcaaaatgccactgccgaccgcgctactgacacggttaaagataatcgaaaaatgatgggtgaaatgcccgagtataaaaatacagatgaactagtcgatgatgcggtaagaggagcgttagcaaagtctgatatgactaacgagaaacaaaataagccagccggtgattttatttatattctcgtctccgcgtctctcagcgatgctgaaatcaccgacattctcaagttatacgatggacgcacggatatcgctctggttgtccagggggcaaaagataaaaagaacctgcttgatgaacttacccactggcagaaactttccttcgactccaagtcttctctggccgtaaacctcgatccaactgtattcaaaaactacaacgttagttctgtaccgaccattatccatgaaaaagatggtgagctggtggccagggtgacaggcatctatgacatcgcgtacctgaaagacaagaccggcgaccttggtgtggccgggcccgctgttggggtcgtagagaagaaccttattgatgaactacaggagagtgtcgctaaactcgattttgatggcatgaagaaaaaggccattgataactactggccccgccaggttttccaggaattcccggaagcgacaaagcgagctaccagaaccatcgatccgacggtcattatccctcaaaacattacttcacctaacggcgatatcgttgcaaaacgggggcgatttaacccgctaactgtgatgccatttaccatcaagctaatctttttcgatgcacgtgaagaatggcaacgccagttcgccaggtatcagtttgaacatacaccagcctccctcacgccaatactggtcacgacaaacgtgtatggtgatggctggcagaccttccgtgacaccaagaaagaatacggtgacttcgcaaggctatacatgattcagccaggcatggccgaacattatggtttgataaacgtgcccagcgttgtgacagccgacagtaagcgattcattaatgatgaatattcacgcaaagattttgaggagctgaaatga

SEQ ID NO: 155943 - DNA, 330 bp, Enterobacter cloacae
atggacaaatcaatcgtcaaagggaaaatttacgcctttcattctgagctaatgcaaccatatggcaaagggctgaaaattgttgatggcattgcgggagacacagtctccgttgatcccgaagagactgcaattaacggctctatggtcggtgagggactggcattagcagcagaatctggccataccgaacaggagctaacgcgtagtggtgtcgtaccgaatggtcgcctgtggatgatggggcgcaccagatacagttttgattccaggtactggggatcattagacgagtcacaaattataggccgagcgtatccattatggtaa

SEQ ID NO: 155944 - DNA, 273 bp, Enterobacter cloacae
atgattaaaaccgctgcaattgcgctgctttttggtttcatcggagccgccctttttgggcggttattcccaccagcctcgccctatgactatgttgcagtcatcaactttatggacgataaaggtcaaccgttaggtgaagcccagtcaaggctggtattagcccgcgctgagaaactgtcagaggcggggtatcttgtgctcaatgcctcagccctttatagctaccctacggggctcaagatcccccagaccatcaacactcagcaatag

SEQ ID NO: 155945 - DNA, 2487 bp, Enterobacter cloacae
atgagtgaatctttaatttttcagcgactcaaaaacctgaagcgtttttctgacttgtgtcctgtacgtgcatatgacgaatccaatcatttgtttatgtgcgacaacaaatatgttggtttcggatttgtttgtcgtcccttaagcgggacaaccggcaaggagatgactaaccttcaaacgttgctgtcttccaacttccccgccaaaactatcgttcagtttgacctggttgcaagcccaaacatcgtacagaaaattaaccggatggacgtattgcgtatggattgccgggacgcaatcctgcgtaacgcaatttataaccgctctaaattccttttgaaaagcaccgaaacgccgatgaagcgaaccgggactcgcgtccgaaattgtgtgcttctcattacagtaaaaattccgatcaaatataactatgaaatgcgtgaagaagaattcaatcacgttaacgagctgcggaatgtgttcgaaacgacgctgagcatcactggtttgtgtcccggtgcattgacgcgtgaaagttacatcgatgttctgagctccatttgcaaccagggtgaaagcgcctcctggagagaccggacgccggtacagccacaagaagacaagtacatttcagaacagttagtcgaccacgatcgcatgtttttcattaagaaagactattgcggttttggtgatccgacagattccgagcttcgtggagaagcacctacaccgacaacgtttgtgaaaacattgagtgcgcgaaaattcccgaaaagattctttcccgggcaagcgcaatactttctcggcgatatgatgagtggtgttactggaattaaatcatcctgcatcatctcaatgagcctgattttctttgatcagcaaagtgaaaaaactaaattcacctcgaaacgtaactgggttgttcagcaaaccagtggcccattaattaagtgggttccatcactcataaacttgcgtgagggcttcgatcttcttagcgaaaaagttgataacaacgacccaatttgcaaagccaaatttacggtatcaatcttctctaactcaaaagatggcgtgttacgcgctgctcaggaagctgcaagttatctgaacacctatcagtttaagatgatcccagatacctactatgttgcgccaattttcctgtcagctctgccaatgtttaacgaagcatcagcagaaaagtccattggccgatatcgaacaatggcactcagtgaagcgatggtactttcacctctctatgcagattggcaaggtacagacaaacccgccttaatgctgacatcgcgctctggccagatccaatcactggacttgtttgattctgatactaactataacgcctgtatcgcagctgagtcggggtcgggtaagtcattcctgacaaactacattatcaccgcctacagaagcctcggggctaaagtctggtgtattgatgtaggtgactcgtacaaaaatatctgtgagacctaccagggcgattatctcgacttcaatcccaaaaccaggccatgtcttaacttcttcgaactgatcgaagactatttcggtgagtctgaagatgatgactccagtggcggtgaagaagatctgatcatcggattgttatcggtgatggcagctcctaaagaaggtctgaattcattcgaagagtctcgacttaaacaacatgtagctgatcttgtccgtgtacacaagaagctgaccaccgttgatatggttgctgattcactgctgaaagatgaagataaagacattaaacgtattggccatcagctctatccgttcacgagtgcgggccagtacgggaagtactttgttggtaagaacaatatcgacttcaaaaatccgttcactgtacttgaactttcccgactggaaagttcagaacaccttaaacaggttgtcctccttcagctgatttatcaaatccagcaggacatgttcatgggcgaccgtagccagatgaagctggtcattatcgatgaggcctgggcattgttatcaggaaatatcggggcgttcatcgagaaaggttatcgccggttccgtaaatataacggagctgcaattaccatcacccagtctatcaacgatatttacaaagatagtatcgggaaatcgatcgcagataactcagcctttatgctcttgctggggcaaagtgaatccgcagtgaacgaagctgaagcaaataaacgtctggcgctggacgaggctggttaccggttccttaaaaccgttcgttccacgaaaggtgtctactcagaaatctttgtcatttctaaagcgggccagggtatttgcagacttgtggttgacccattcagcttacttctctattcgactgacccgaaagacgttgccgcgatcaaagacagaaagtcccgggggatcaataccgaagaggctatcaacgaaattctggttgagcgggggttagccgcatga

SEQ ID NO: 155946 - DNA, 765 bp, Enterobacter cloacae
atgaactttatcaaacatgtcgcgactgcggcacttttggtggcactttctgcatcagcttctgtattcgccgatacagtaaaaacaaacaccgggaatatcgatacgattttcaatgaaaaagcgttcaagaacattcctcagaattcgcaggaagtaaaacgttttgtcgtccctactaacggcatcatcgcactagagattgatgggaaagttaatttgctgtcttctaatggccgcttcgttatacagggaacgctctatgacacatgggctaaaaagcctctgaccaccatgagcgaaataaccaagaacgccagcatcattccgatgaaagagctgaacctaaatatcgcggacttgcgcccagccgtatggggcgatgggcctaaaaaggtcatgatatttaccgcacctggttgtgaagcctgtgcagccccactttcagcacttgctgacctcgacccgaaagaattcaccgttagcgttctgtcgctcggagctctgggcccggcaagccagcagcgaaatattgaattgtattgtgcatccgaccgctaccgcgcaggccgcgcaattatcagcggaaattccactcagaaattcgaccaggtaaagaactgcgatatgcaggctctggctcgacgtgaagttacggctcagatactaggtgtcagcatgatccctttcattgtgcgtgatgacggctcctacgtactcggctcaccaaaacaaggcctcaaaaactttatcgagaacaagtaa

SEQ ID NO: 155947 - DNA, 1599 bp, Enterobacter cloacae
atgaaacaaaagtcattatatattgctattgttctggcacttcattgtgctgtagccgtggcagataactcaatcgatagcacccaaattgacgaagttactgtaaatggtgatggcaataacatttcagggctaacaccctgtgcaaccccatcaaactgtaaatcaccactcggcaactcaagtgtttcagggaataacaacacaattacttcgttaacaaactatattattaccggaagcaataatgacttatcatttagttacgacccaagccaattctggaatgactacgccaatagtttcaatgtttacgggaataataatactggcactggtctttttgatttgaatctggttgggagtgacaataaagttctaggacaaaaccttgccgttatgggttatagcaataacgtttcaggaagtgcattgcaagtaataggctcttataacgaactggatatggtaggtatgggagcaattcttggttccagaaacactgctactaattacgctggttctataatgggtacattcaatacggtgagtggtggttcctacgctttgactatcggttccttaaacaatattacagctgcaccgattaatgacccctctgctgtttttaaatttggcaacatcacaatcggcacaattaataccattgattccgacgaatcgatcgtgcttggcaactacaatactgtatccgatgataacgcaattgttattggtaattatgcttctgcttcaaatggaggtatttccattgggaacggttcattctccaatagtgctgataccgtatcgtttggttcagctacggtacaaagaacactgactaatgttgctgatggttccagccggtatgatgcggtgaactatggtcagctcatgaattccgttagttcacttcaggcgtacactgatagtgccatcagttcgtacctttcatccattggctctggctctaacacaacgccacctactacaggcggaaataacaataacggtacggacggcagcgggacaggaagtggtacagggtctggtagcagtaacgacaatagccagactgccacggatactaatacttataccgacgagcgtgaagtgtcgatcaacgctcgtaccgacagtctaattgcaactgaaagcgcatcccgagttgctggcgatgctcaaactcttgtaagtgcaaacagtcatacggatgcccgtgaatctgtcatcaactcaaggactgatttccttgtcgatactgagcgccagtcacggattgatggtgaccgacagaccttggcttcagctaatagctacacaaaccagaagttctctgaccttaaaaagacggttgaccgtaatgataaaagagcaaaagcaggctcagcaagcgcaattgctatcgcttcaattcccttcctcaataacgtgtcgggttttggcatggcgatgggcgcgtaccgagaccagggggcaatttcgggaggagcgaattacgctatcaatgaaaaagtaaacgtccgctttagcatgtcggctgatacagccggtggtgttggagctggtgcaggatttgcggttggcttccagtaa

SEQ ID NO: 155948 - DNA, 567 bp, Enterobacter cloacae
atgatgacgaagaaaattgtatcggcattgtttttagttagtgccggttttgcgatgtcgggttgctcactactgggccagaacgatgaatatggatgcaagggaatgcccaattcggtcacatgtatgaatgtccgagatgtgtatgccctgaccgatggagatgattaccaggagcagattgacaccgcatctgaaaaccaactttcgggaaagcctgtggaggttaagcggctgcgcactacagccgggaacggtggacggaatactgccgatggtggtcgatacgtccctgtgcctgctactgctgctgatcctcaacccatccgaacgcaatctatcgtcatgcgggtgctggttgacccctatgagaccgcagatggagaccttaacgtccctggctacgtctataccgagattgagccgcgtcgttgggaagtcggtgcaagaaatagtgccacatcaactgctgttatcagaccaatgtctgcaccggttgccgctgctccagcacaatcccagggtgagacatcacaacctcctcagaaagggagttacattaaataa

SEQ ID NO: 155949 - DNA, 1398 bp, Enterobacter cloacae
atgcttatccccttaaaagagaaatgggcctcaatttcagcaaagcataaaaaatgggttttatgggctggcgtatttactttcgccgttctttttttgctcttggttatacccgactcagctggcccccgaaatcgagcgccacaagaaaaagtgattgccagcgtccttaccgatggtgataccaatggagttagccagaatgctattgcggcgcgaattcgcgcactcgacaagaccattaaagagcaaggtcaactgattaaaacgttaaccgagaaatatggtgctgatcagacagctcagcgtcttagcaatctggagaacaaccagaaaaaatcaggcgctgaggttgcagctattaagaaacgcgttgataccgtctctaaccctgtgccttactcacaacagtctcgcggagcgacaccactggctggaaacggccaacgtaacgtccctactctgtataaacctgaagagatatctgccccttcagttgcgccaagaaactcaggaagtttcaataacgggaaaacattacagcgcgtatacgaagatgcggccccccctgtcgtaccggaacccgcagcaaaccagcgtcagcagaaagggaaggatggcaaagcagtaccaagccaggcaactcctgaaatcatcactgtacaggaagatattgaagccgcacccgttgctgacgaagatgataaccccgagaaccagacctaccttcctgcaacgtcgatcataagtactgttttgattgcggggatggatgcaccaacatctcgtgatgcacgaaaagacccttatccggcgctggccagggtgaaaaaggatgcaattctcccaaaccgtttccgtgcagatatacgtgaatgcggaatgcttgcagctgggttcggtgatttgtcctccgaaagagcttatttcagatcggaagtcataacgtgcattcgggatgacggtgcagtttttgaagccccactcgtagcctacgctgttggtgaagatggtaaatcaggtgttcgtggtcgactggttaccaaacaagggcaatacctggcacgagccctgaccgctggcttcctacaggctgcatctcagctctttaacgtacagagtattccgacaatcagtattaaacgcgatggagatagtagtgacgctactccttaccagcaggttatgagctctgacgcactccagggcgcagcagtttctggcgtaggtggcgcattgaatcgtcttgccgatttctatatgcaaatggccggtgaccttttccctgtaattgaaattgatccaggccgtagtgttgattttattgtgcaaaaaggggtcatgctgaaattcacacgtgttacttcaaaaactcaaaccgttgggggcaagaaatga

SEQ ID NO: 155950 - DNA, 1119 bp, Enterobacter cloacae
atgttgaatagtaaacgcataattatcctgttgcttaccgcgtcgtccacattagcgacccatagcgtaacggcgggcgaaatgtctgttgatcaaggcatggtatttgagcagcctgatgcgcagtcgcaacccaaagtcactgcaaaactcgcctctcgaccagcatcctcaactcaggcaatgctcagcacagaaacacgcccatatcctgacaactatacaccaccagcaagtaactctatcaatggcgggagtgaaccagctattgatggccgtaatattcaaccagtacctgctgcaattgccagtcccgttccactcacaaaagaagtcattccttctcggctggaatatatcgttgcgcctggcgtgaacaccctcgtaccgatttcgattaaccagatcaaccggcttgttacaccgtttgaacaccctgtagtgcagaaagttaaacaggagggtgtaactgtaaatgtaaaagataacgctctctacgtttccacctcagacagtaacccggcaagtctctatatcagtgagaaaggtgacgaaagtgtagcgatctccgtgtcgttagtacctcagaaaattgcaccggtgcaagccactctcatgctttcacgaaagctgaacaacacgagtacttctggtgttatgcctgcggcatataacaactatggtggaagcgaagtcaaagccaggcgatgggaacagaaagataattacatcgagacgattcgcaacataatgcgaaccatcgcgcttggggacattccacccggatactctctgggaaatctctcttcaggagttggtatcccgaactgtaatttccgcacgggtactgaccaggatcagattcgctactcctttgcaaatggccagtatcttcagggtagtcaattcagtgtcatcatcggcgttgcacaaaacactggttcatcaacagtaatggttgatgaatcactctgcacccatcctcagcttgcagcaagagcactatggagtcgcaacactctccagcctggccagcgaactgaagcttacttcgttatccgcaacatccagccaaacgaacaagctaacgattccatgcgccctaaactcgcggagtaa

SEQ ID NO: 155951 - DNA, 627 bp, Enterobacter cloacae
atgaatatccataatttcaaaaaagggttagttggacttcagttagaaaacaaaagtttcaagttaatctctgcctcaatgattctggcaaaccttgtacttggttatgctctgttagccaaaacacaacccatcactattattccgccaaaccttacagaaacagcctggctggatgaaaaagccgccagcagctcttatatgaaggcatgggcgttatatatagccgacagttttggaaatgctaacccagccactttagatctactcaagaattctatcggcccgtttcttgacgcttcaatttacacaaaagttatgaaagcaatggacgaccagattgaccaaattaagcgcgaccgaatctcgctttcttttaatccggtcggggttatcaccgacccgttagcagttggtactttttatgtcaccggtaaccaaactctcgaaggtatcaccggcaaaccatcgaccacgccagtctattacgagattactgttaacgtaaaaggctaccggcccattattacgttcattgagataaagagtggcaaaccgttgctgccaagtgaagaagataaacacaaaggtcaaaggcagaaatcttcggcagctcgaacttcctga

SEQ ID NO: 155952 - DNA, 285 bp, Enterobacter cloacae
atggaacctgtttatatttctcactcgattgacgaaccaccaaagttatttttttggtcgattgatgaagccatgccatttttcgttgctctcgcggttgggattatcactggacgattattaccgatgataattctgggtgttgtagtttcacgtgtttatggcggttttctggcgcgagcttctgagaaatattttatgcacctctgttactggaaattcggagtcacattcggtggtggcacttttgtacctgaatccttcgaccgggagtttattgtatga

SEQ ID NO: 155953 - DNA, 819 bp, Enterobacter cloacae
atgaaaaagaacattttgaactctcttatatttggaattccgctcatggttatggtaagcacggctgcattttttacttaccaaatcgatagacagtcccaacttcttaatgacctagcgatcgttgctgagactcacaagcccgtagtaaacaacaaaagcgaactactggacgcatttgcaaaatacattaatgcagcgggcctaaaacctgaatcgcagaaacaatccaatgtcggttaccggactggaaacaaacccgataccgcctatgcgccttctacggacaacgaacgtatttatgggaacccggatgctcagttctatatcattgagtattccgattttgaatgtcagtactgcaaacaacatttcccaatcgttatggatctcgtggattcatcacaagggaatattgcgatggttttcaaacatgttcctgttcacgggcaggcttcccgtactgaagctttagcagcggagtgtgctgttgagcagggaggaaatccatctttcttccagttatctaaagcgttattccgctacagccaatctgacgggcacggtcttagcgcaccgctagaccaaatcgcccgcgaaactggtttagacccgaaccgcttacttgaatgtatcaatgcggccaggccgtccagcaagatagccgacgacgttcgtgaagcaggtcagcttggtatccaaaagacccctacaaacattgttgtctacggtgataagtcagccattgttcagggcgcagtagatggagcaggccttatgcaaatgatggctcagcttgcaggctctggtcagaaatag

SEQ ID NO: 155954 - DNA, 294 bp, Enterobacter cloacae
atgactaattcgaaaccatttattctttctgccctgctctgcctgacgtttaccgtagggatgattagctatttgctaatttctgatgtcccagaaaaaatccgtatcctcaatcagaagatcacggcatcaacttaccctcagtcacgggatgtcctgaacaaagacatggctgaaatcatactgccctatcttaaaaagcaaaaagctgctgaggcgtctcaggtcaaagtccaaaagccaaacgaaatctatacgccggaacaattgcagcaatcaagaggctacaaatga

SEQ ID NO: 155955 - DNA, 651 bp, Enterobacter cloacae
atgtctgataagttgaatgaggaaaagtggcctaagacgataaagacactgatcatctggagttcgacgattctcctttttatctctgtcttctttccggttgagtattttaagtctaatgctctgaaagaaatcgcatggggtcataaaatgataggcgaaaaagatttcgtcatggtattgcaaaaggctcgcgacaattatactgaagcatttgtaaatacggggattgataaggcgttaaaggatttttaccagcttcctcccagcgacatggccaaccacggcgggccactgaaatactttgttgggcttttccagaacattgccgagaacctgaattattggctctacatgattatgtatcgtttaacacttgatatgtattggttaccgtacatggccgtggtcatcatcccgtctctgtttgcaggggtaatgcggtggatggcaaaaagatataactttggatatgccagtccgtttcttaaccgtcgtagcatggtattgattggctggggtgtatatagcgttctcctgtcgctttttataccgttacctgtgcctccaatgatcggggcactcataatgatagtaatgattcctattggttcatctctacttatttcaaacctaccaaaacgtatttaa

SEQ ID NO: 155956 - DNA, 387 bp, Enterobacter cloacae
atgattaaaaccaaaactctattaaagcgtaaagatgatcaagcctcatatgacggtttgaccatgatctggccatgtgttgatggcatcactgggcaaatgttagctctactgaaaacccttactcctgatgaacgcgttggtgcagcagtgagctccgctatcaaagcttatcatcaggacaacgagcaggagctgaatgactgggagcggcttgcgatctatatcattgagcttggcttgttcgtttgccgggaacttcaacacacgttgaatttctgtgaaattacttcacggataaatctcccgagaaagctaaccaacgaactgattatccaggctgggaggaaggcgaagattggggatatcgaatgtctgataagttga

SEQ ID NO: 155957 - DNA, 1977 bp, Enterobacter cloacae
atgagtgagtggaaatataacttacgttggcgcacaaattttgaaggccttgagactcttggttggacagcaggtatagccgcaactatcggggttaatacactgtttaacatgccatctctaccctgttacctctcagttgcagtccaggctgcttatggtattcgtagtctcccggcagcatgggatatttatacgcacaaacgccgcctgaagcgaaaaccaaaaccactcgtaatggacatgaaatcatttatcgaacagatgattcgtgagcctgacagctatcttatttgcagaggctttgagtggggccagaatgagggtcaactggcatctgagttgataaagcgtgacataaagaaatttgtagccaaaccatccaaaaattttatgggcctcggctggattcatgcgctaggtaaaaaaaacgaatggatcggaatttctgaagaacttttatcgttgcatacgcttataactggcacaaccggctcaggcaaaacaacatattttaaactacttattcttcaagccgcactaaaaaaacaaccactaatcctcattgaccccaaaaatgatgaagaactggctgaatggatgaagttctgtctggaattggtggatcgctcaacgaaatataattacgtttcattggcgcatcctgaaaaatcagctcgaatatctccaattactaactacactcaggctggcgaggtagctaacagaattacatcggttattcaacgtgctgatagtacgagcgatccgtttgtttcatttggtattatgtcattaactacggttgttgagctgatgaaaatctgtgaaatcaaaccgactttacgcaatattaaatcacaactgagtgctgacatctcttcattagcatctctattgattatggccatcactaaattcggccacaagactttaggagagtccgatttcgacattattttacaggcgaaaattgaccgttactcgtctaaaattaaaggcccaaaagaaatagcagaaatatgtgcagacatttaccgaaatgacattaaaggtaataaagggaaaggcgatacttcaattgaagccggtattgatatgttcggtcatcagcgcgaacacttccagaaaatgattctgaacgtgatgccaattcttagtcaactaactcaagggtttatgtcagagttgttatcccctgacagtgctgatgaagatgaactgaatgatactcgtccaatttcgaatattcaggatatcatcactaccgggggaatgttgtatttggggttaaattcccttgcagatgctgagactggatctgcggtcggttctattttcctgtctgatataacatctgttagctcgactgtgtacaattttttaaaacctggtggtcaggacttggcttctgtaatggtgttaatcgatgaagcagctgaagttattaatgaccaagttattaaaatgttgaataaaacccgtggtgctgggttccgcttatttatttcgtcgcaatcgacttccgacttcgaagcccgtctcggttcagaagccaaaatgaagcaggttataaccaatacgaaccactttacggcgctacgcacaccagatcctgatgcccaggaagcagtcatgaaacgagtaccaccgacaaagttcaaatatattatgcgtggtcatggctccagcgcaggtgcagatcctgaacaaatcaccggcagtgtcggggaacgattgatggaggaagaaggcgagttatttcaatctcaactgctaggttggttacccaacctcgaatgcatggccataaatcaggctaataaaatagtaaaaggtaaagtccccgtcatattaatgccgaggaatgagtccgagttaagcgatgtccgaactatcgctaaaaagtacctttcaatctacgaacgtcaacaaaaggttcgtggtgaaaaatcacgtatcagcgccgaggggtaa

SEQ ID NO: 155958 - DNA, 2703 bp, Enterobacter cloacae
atgctgagacacattaaaaatattctgaatacttttttgcctgataacaaaaaggctaccactgatctattcggtgacgaaatcgatatgtcagtagatgaagaaatcgggaaactcatttcatcacgagataatatgcgctatccggcaagcgaaatcggattcccggctcaagtaccgggtgagtacgtattacgtcattaccagaaaccacttgtgatggcgattaaacgagaactggatattagggactctgagtttaatcagcttattcttcctatgctgataaatttcgctaactttgttcacctcttcccggcatccgaaaaccatcatcaccgtgctgcaaccggattgttgcgtcattcattggaagtgtgtttccagtgtatccggcgttctaaaaacatcgagtttgattcaatggcggttcccgtacataaatcaaatcgtgcattagcatggcgacttgcagtcgcagctggtgggctacttcatgacctcgggaaaccatttaccgattttgaagtatggaacgaagacgggaaaattcactggcctccaggccatgaaccaatccatgtctgggcaaaagagaacaatgtaaaaagatactatcttgtatggaaaccaggccgtcaccgccagcatacctccagcacgagtaatatgttgttgatgatcatgccaaaagaaatgcatgtttaccttcttaacggcgggaatgatattttcaatgaattgacccgggcactgaatgccagtgcgcagctcaatgcagaaaaaatcagtggtcaggacgttaaaaacaagatcctcactaccattaaggccgccgactcagcatccgttaactatgatatgcggcaatacgccggtgatgcgattcgtgcaagccagtcaggtgtacctgcggttcagcgtgtagttgatgccatgcgccatagattgaaaaaaggagattggattcccaacaagccaggaagccctgtatgggtgactacctatggcgtattcatcgtctggggtgttgcggtcaaggatattattgagaccgttaggaactccggcgctgttattccacaaacccagaatagtctggctgacctgatgctaagttatcatctctgtcgaccaaacgttcaccaggacgatgacactgcatactggcgtattgcccctcatatcttgaatgataaaagttcaagagaaagcaaagaccctaaagttgcgttgagctgcatccttctgatatctccagaagtactatttgtcgatactgttgaccctctaccatgcagcagccgcatccgtattgaaggtaaatgggtggaatacctgaccgggaggccaaaccagccaaaactcgtcgaaagcgaaccctacattggtcagaagccggttccgtcaaccggaataccgaatgaggtcgaccgctcagttttacagggcggaacaatcattgctgatgaacaggaatctccactggagagtatttttggaaaccgacaggttacgccggaaaacgcccacgaactgctgcataagctcaatctgctttctgatgaggactacaatcgtgtaaaggaaagaaataccagtaccaaaaatcaaaaagattgtctggatgacactaattcaccaacaactgagctggcgggcagcggggaatcaaaagggctcaaagataatcaaccaaagccagtgtcggagaataatgaacccaagcgccgtctttccctcaaagaaaccctggcatcggcacaaacagagattgagttctctgtacccagttcacttataaaagaaccaaaccataaaactctgaacgaaacccttgagtttcattcaatcatcaactcgtataatagcaacgaaccaacttcaagcgatgcattggatcagacccagccctcacctacccgtcaggcattaaaggaaattcagctgcaccaggatgctgtcgataccggcattcagtctggtgaggtaattgatgattattcaatttacgaagattatgattccatgtggcaggatgacgtgaaagctgataacgattttggttactcggctcatgcggatacttcggccaacataccggctaacgtaaaattttacgataaatttagtcagctatacgtatctggtcttgaagcggccaaagaatttctcgttaaatatgttaccgaccactcagacgatcttttcattgaatcaggccacttaatcattgctattgataaagattttgatgagcgtaattatgctctgcttcaggactccaactggttatggcaaaggtttatggaagccccagcccagtattatttccatcgtactcagaagtgcttatatctcagaaaagaacttaataatgatatcgacttgctgatggatgggaagtttaacgatctgctttactctgctttaactgatgtttctgataaagattacaacattacagatttatgcaatgaaatgatttcaaaaggtatgctgaagcgaacctattctggagagcctgtcattgccgtaagcgttgccttaaagcgacgtattgcggatgaactcggcattgatattactcaattgcagaagattatgctgatgcactttgatttctattcaaagaccggtgttgactacattcttcctaatagtgaacgaatgcataatcaaatggtggataaagatgagtga

SEQ ID NO: 155959 - DNA, 570 bp, Enterobacter cloacae
atgaaattggcgaataaaattgttttgcccctgctggtggttattaccggcgtaatcaccagcggttgcagtgggacaggtaagccacaacgtacttacctcgacgaaacgcgcaatctccccgccagggccgagtacccctaccagtatcagtactccgaatcctggcgtggtacagaacgcggtggcgcggctatacgttaccctgggtatgagcatacgctcgtgagtccgtatgccatcaatgatccatccgggaagcgatatgtggcacatgacaattacacccaggtcttgctcacttcagtggcaaacacaaagtatgccaatgggccgcgtggcacgttcacacagaccccagcattttgcggggaaaatacctttctccttcctaataacacacagaacgccagtagggctgaatacctccgtatcaaagataaatactgctcaacacctggctatcggttaagtgcccacgaattaaatgtgctttccagtggtgaaccggaagagctgcggaaatatcgaattcagatgcagatcgataaccaacaacctaagtcctaa

SEQ ID NO: 155960 - DNA, 900 bp, Enterobacter cloacae
atggataagcaaagaaatgaaaagtgcagttctggaaataaaacaatttttgcctgggccgggggaatcgttgttgtaatcggaatggtttggttgatggtaattagttttatctcgtacaaaacccaggtgatgaccaatcaactgctggataaaattagtacatcgctggccaagaaccccgcagttcaacagggagtgaacggaaatattcaggacgaagtaaagggtgctcttaagtctatcgccgaccaaaagctcgcggaagaacgaaaggcactctataaaggctgggacaaagcaaataaaaatactgatggccgttatatctatggcgagcctggcgctcggttttcgttgatcaactatgaagatctggagtgtccattctgcaaacgcttcaaagaaacgccgaagtatatcgttgataccgcgacagccggggctgttaactgggaatggcgtcattaccctatgtcattccatgagccggtcgcatcgaagggcgcagctgttgctgagtgtattgcggagcagaaagggccgagtgctttctgggccgttactgattattggtttaaccatactgaaacaaacggtaaaggttttaaggatgcggacagcatcccagcactgtttgaggtagaccaggcgaaatttgatacctgtatgggcagtactgaagtgattaagcgcattaagcaggatatggaggccggttcagctgccggtgttgatggtacaccaaccacgattgtgcgtgataatgtcaccggtaaagaagtctctgttgtaggcgcacagcccttctcaaaattcgttgaagtgatccagtctatggttgtcgattctcagagagacacatcaggcgaagcctcaccagctcaacaagataaatag

SEQ ID NO: 155961 - DNA, 1476 bp, Enterobacter cloacae
atgccggtaactgatgaacagaacgtgatcataggtttcaaacctacacctggcagtattgtttcagtacaggcatacgcggggtctggtaagacctttacactaaaagaattcgcggatgcaaacccctcactcaaaattctctatatcgtttttaataaagctattaaagatgatgcaaaaaagaaattcccaaaaaacgtcgagtgtaaaacatctcatggtttggccgtgacccggtacaaacactttgctcataaatacagacagtttatatccgtgagcgaataccgcgcaatgatgggtgaagatgactggagagtggttaagcttgcaataaatgggcttacccatttcatgaattcagatgaacacgaaattactactgaacacgtacttaaagacttaagtaaaaccgataaaatatctcaaagcaggttggatcaagcgctacgtgcagcaaaacgtacatggcaaatgcaatctgacccactcaacgatgcctattgctcaccgaataccatcctcaagttgttccagttatcgaacccagccctagaccagttctacaatgtcattctcttcgacgaatcgcaggacgcaaatccggtaacgatcgatatcgttcttagaaacaactgctgcaaagtttttgtcggcgaccagcaccaagtgataaaccgctggcgcggtgcggaaaacgcccttgagattgttgaagaccacggggctcaggttatgcgcctgactaagtcattccggtttgggcctcttgttgcagcactggccaacgttgtgctgtcaatgaagggtgaaacgttccccttggtaggcctgggtagtcttgatgctatcgttgagccatcggcgatacaggatcaaaacttttacgccatcatcagccgcacctacatgggagtcatacaatctgcctacgagtcgattatgtggggcaaacgggtgatgtggaatggaggtatttcaaaataccgtctcgacgagctccttgatttacatgcgctaaaaacaggtaacattgctgctattaaaaataaccgtatcactacggaatacgggaactgggcaaattttttagagatcgcagaaaccaccaaggacgtggacatggtgcgggcgattaagttaatggaagtctatgctgatatccccgggatggttgagaccatgaggatgaatgaagccagaacagaaaaggaagctgatttaattgttaccacagcccatacctcgaagggaaaggaatttgaccatgtcatcatcaatgacgacttcccatccattatagaagccgttgtgatgaagaagccacgggaagtaattattgacgaacttaatctgctgtacgtaactattaccagaaccaagaaatctgtaaacatcaatacttcgttaatggagctattagaagaataccgaagtcgtattgagcgaaatgtttcagtagtgataatctga

SEQ ID NO: 155962 - DNA, 288 bp, Enterobacter cloacae
atgttttatttatcgtcctttgtctggatgtcaatctggagtctgatttcgatttacatctattacaaagataaaaaggccgcgactgctggcgagtaccgtgtggatgaactgacgctggatgcgctcattgtgctgggcgggtggccaggttgtttcattgctcaacgaatgtttaaacacaaaacacgcagtgcttaccaacgtcggttccgggttatcgttgcggtctggatagttctttacatcggattatggaattttctatgggcgggaaataaaatatga

SEQ ID NO: 155963 - DNA, 336 bp, Enterobacter cloacae
atgaacgctatcaaatttgagaagtttaaaaccccgctggtgatcaccggcattctgattcttgccattgttaccgctcacgcttctggttcaacccaggcaggttttgacgatgtatggctcaaaatctctgattacatgcagggttctctgggtaaggtgctgatcggtcttatcgttctggttggtctcgcagctgctgttgtacgtcagagtctgatgtcactggcggttgctgttggtggtgcgatctccctgtactactcaccggacattatcaatggcatgatggccgcatcccacgcagtgcaaaccactttaccggcattcatgtaa

SEQ ID NO: 155964 - DNA, 573 bp, Enterobacter cloacae
atgttgaaatcagaggtgttggtcagtacgttgacatcgttgggattattatttttttctacttttgcacaggctgataatccaacagaagtaatgctaccggctggtggcgttagagtcgttgtcggattttcacctgaagggtctgcacagaaagcaatactggatctgatcaattcagctcagcaggaaatccgtatggcggcatactcttttacgtcacccgtaattgcgaaagcattaattaatgctcaccgaaggggagtagatgtcaggatcgtagttgacaaagggcaaaataataaccgatatgcagtctcgactatgaatacagtagttaacgcgggcattccgttacggacgaatgatcaatttcttctgcaccatgataagtatttgtgtgttgataggatatctgttgaaaccggtagttataattactcaagttcggctttcaataaaaatagtgaaaatagccttgtactttataacgcaccagatgttacagcgctgtatctggcccactgggaatctcgttggactggtggtgtggattacatacctaattattga

SEQ ID NO: 155965 - DNA, 693 bp, Enterobacter cloacae
atgacagattcatgcatcgacggcttaaggctggtttcgaccagttaccacattggtttaccctggattgaatggtcagaggcgagatcctacatcgtatgccgagcactggtagatcagggcgtaattgccggaactgctactataggaacacgtcgaaaaaaggtcaaagaacgcatcaatccaggagatcgtgggttataccaagtcactgaaactcagtacggatggatagcacttaagggtggtggcgtgatcgatccctgcggctttcttggtaactctttttccggcccggaaccccagttttgtatccttgagaatgatgagtgctatatcaggggtataaatcctgttcagtgcccgagaactcacttacctgaacatcttgtaagtgatgagttattcccgctaacacgcggtgttatgcgcgatacatgcagccgtctgctgggttacaggttgcatatacagggattgactatgtcagaggcagcataccttctgtcgagaccgcttaccgattttgaccggtacagccgcctggtatatgaatactttattaaaatgggactaagcagcattatgccattaagcaacatcaaaatgctgcatccgaatttagcccgtaaaggttggcgttcattttataacgacctggatatggacgaacttgaagcgtttcttaaatga

SEQ ID NO: 155966 - DNA, 1329 bp, Enterobacter cloacae
atgacgagtgaaaaacgtggcacaagtgctgaatacggccaggagaaattacgcgaacgcgcagcgcagaatgctggagatgaaacccccagtgttaaggcgcgattttctaaaaaaaccttgagtatcctggttgccggtatctttgcggtaagcacattaggcgcatttattttaatgaatggtaaaccagacaaagaaccgaacctatctatcgtcgaagttgcaaagagtgggatcagcgttaacccggatattgcaaaacaacatggtatcgatgtggatgacgatgaccttgataccgatgaggctgggcctcagccaacactgacacttcctatcacaaataatgaacaggaacccgcatcagcgccccctgatgatgataaaagtgaacctactgtcacaaagcaagatagcgccggtgtttcccctgcatcgtctgataatcttggcgatcagatgctaaaaatggccacaaccacgccaccagctaacccggatgcaaattcaccagttgtatctaagtcagatcctgctacgcagtcattggttgactcaattaaggctgaacctgggtttactgacggtagcgaggtttcacaaaacgcagagcaacctggaacggttgagataactcctgcacaggaaatcgctaaaaaagcactatctggggccactagtgaagccccggcttcagctccagttacagcagaaccaaatcaacacgctgcggcgcagaccaacccggttcaaacaccgccatcacctaccacacgtgatattgcaggtgttgaaaacatcactaaagatacctctggccatcaaattgacccagctgagttcggttatacggaacccactaaaactactgctacgtcagactataaagcagcatcagaaggctatacagcccaacagtttgttgttcaggagaagaatgcgcttactggcgctgacctggactatagtgggcactttaaaactgttgaatacaattcgcagggacaaaatacggtattcgtttattcaaccttttcatcaaaagtattcttgttaccatcgaaaggtaaggtcaacgtatacctttctgatgaaaaaggttggtcagtctcactcctcccaggaaatatcctgcgggtacagcgttctgaaaacaagggggcatggtcgcaggcaaccgacctctttgtactcaatggcgaaaactcctactcgttgattcttcaggctgttggcgatcctgataaacgaaccgattccctcaaattcacaaaaaaggaactttctaagcaaacggacaagttggccaaaaaatccaaagcctga

SEQ ID NO: 155967 - DNA, 1095 bp, Enterobacter cloacae
atgaatggtgaccatatggtttttagaaaattggcagcaaaaggaatgtcccgatgcgccaaattccagtggtgctttttcctgctagcgtcattagctttattctttctacatgatggcccgttggtcattgcgggcctctttattacacaattgtctctccagatgtcgatgacccgtacaggaaaggaagtcttcggcgttatttttaatatccagtcatggagaaacagtggtgctagccagcaaacctattttttccggtggtatatcggcttcccgatttcctgcttgctatatattctttctcttactaattatgtgtacgttccaggcgatttgtattatcagtttattgcaagcagtactgatgacctagcactcgtaatgaatcgttttgctgtaggcgtgagtaacatactccctgaaatccttcgaggcgcatctctaaccctttcgatgatgatgtttgtcgcaacattgctaaaaaatgtacaacttgctgaagtacgtcgaatttactcctccattcaggatggaaatgattcccagaaaattctctcgaatatgacatgggagcaattcgaaaagattataagactgcatttcgaactcaatggctacaaagcaactctgactaatacaggagctgacggcggagtcgacattctgctgcaaaaagatggtcgccgcgaaatggtacagtgcaaattatggaaaaccagcaaagtaggagtctcggtagtccgcgaaatttacggtgtagtgcaagccaatgcatatgagcggggttatatcatcacctctgggttctttactcaggatgcatgggaattcgctcttagcgcaaatgttaaaggaacattatcgcttatcgatggttccagacttctgaaaataatcaaggataaagaaatccccccgcctgccactgagataataaatgttggtccaggtgagaatcaaatatacgatcttaatgtcatacctagctgtccccgttgccatagcaaaatggttagaagaatgtcgaatggaaattatttctatggttgctcggcttacccaatttgtaaaggaacccgtaacctctag

SEQ ID NO: 155968 - DNA, 369 bp, Enterobacter cloacae
atgaactctctactccagcgtgttgtgatttacgccattgtgattctgatatgtagcgtttattgcgttctgtactttgtgccgctcacttccataaagacgatcaacgccataggcattgcaaacttagtggtactggcgttactcacatggttgttagtaagaccacggttgttccaattgtggggtgggtatcttgtactgtcagcaatttatttaggtgcgatttaccctgattttccatatgttgaagaaatcatcgtttatacatttgccctgatttgtttatcagtcatgttttacgatgtattcattgataactgtaatgggatactgaggcgcacctttcttagaattaattctgaatga

SEQ ID NO: 155969 - DNA, 309 bp, Enterobacter cloacae
atgaaatctatcacgactgttcttttatgcttccttatcctgggttgtggaagtcgggataaattaccaattcccgcaaccaaggcaataaacgcgcttccagatgcgatggcaaccctttctaatgctggtctctggaatgaaaatgaactttctggcgctgaattccttgaaaacagtgacagaagtatgatagttgcgaacttaacgagcgttccatgcagaatggtgttcagttacgtcaagacttcaaatcatccttattggatgccgagccaaattgcttgtgagggagatgagaatgattaa

SEQ ID NO: 155970 - DNA, 636 bp, Enterobacter cloacae
atgatgatcgaaaccttttacaaaaccaataatgtggaggtcagaagcacttacgaggaggtactatctgcctaccaattgtggttcaggttaacaaaccagctctgtaacgatgaaggattcgaaggttttactgctcatgatttttgtgtgcctgatttgtttctgcgatcagtcgaatgccatatccaacgtgtgtctggtttccgtcaattcaaagagcaatgcttaattagccccgacaatactattccttttgccctaagaacagaccatgaacatggctctgcgctattcaataggtttaatgatatatcgaagtctgcactgacatcgctgggtatcgatccaatacgctttggtaacccaccatttggttttgcgaaggctgtattttcgattctgaaaattcaccatgaagcaaaattaaatggattagttgggtacagccagttgtgggcacttgaaaaccagttcgacgaaatcctgtttgtttgttctctacccgtagcaggctgcgggagaattccattttatgaggctccagccatccctccttactggatacccatcacgggaactgaagccatcgacctctttaatacccacaacaccaaaatgaggaagagagaatga

SEQ ID NO: 155971 - DNA, 729 bp, Enterobacter cloacae
atgaaaccgttaattattgtttttatcatctctgcactttacctctcttatcagctgataaggtctcgtcgtccaaaacattggttgatagtttcctcctcattgtcgcttgcggttattgtgtcctttcagtttctcggcggtgtattcctgatcccgacagaatccatgtacccaactataaaacctggagacttggttatcgctcagcgtgtaggtggtttattcgatcatcgcgctattaggcgtggggacgtactcgtttttaacgccccttctgttcccggcgtttactatgtcaaacgcgtattaggtattcctggcgataccgtcacatacaacgaagagaaaatcttctcgataaacggtaaacaaaacggaaaccagattaaaaaagatggttttactactcaataccaggcagataccgacactgccggtcaaagttatatcttccagacagataaccgtatcggctacgtgaaaacgggtaagaaatggatcattcccgaaggatactactttatggccggtgataaccgagaccattcgcttgattcccgttactgggacaatccccctggcacacctaggaacctcagaggtctcattccccatgatagtctcgtagggcgagtaaatttcaggatcgtcaatttaggctttctggcgcgtggggattcaggtgaccgttccattaaacaacgacagcagccgcatcaaaggtaa

SEQ ID NO: 155972 - DNA, 417 bp, Enterobacter cloacae
atggttaaatttatacccattatggtggtagcgggcagaacgcaggccaactctattgccaggtttctactggattcagtgctggtgtggtcattattgtgctggctcaatacaattattccattctatgtgccgttggtaataaccattacaacatgcacaatttatgcacgagttggttataaagtatttttcaagccgttaaccttcatgaaaactagaagtttttatgtcgatgctgaaaaaccaacagttcaactcaattacacattagctggtgggcaggcgaaccaatttttcactttagcccaaaaaaccaccagcatccattttgtttaccttttcacctgtctcgtatacctgtttttgggtaaatcgctctctaattacgcaaaaaatattaagcgtggtatataa

SEQ ID NO: 155973 - DNA, 771 bp, Enterobacter cloacae
atgagcagtgatgccactaagatggttgaagcctttgttaaagacccattaagttacgatagatttgggccagagcttatttcaaatcaaaaatgtgtcctcaacatcaatgggcatgaaatgtcaattgatgaagcagttaagatgagtgatattgaaaagtcgctcttagatgaaatttaccatctcatagacgcaatgacaaaagcggaagtcaatttctcaaagggaaaaaagaatctttttcgtcggatgttcgatcatttaacaggttccgaaatcttacggaaagcccagctagatatttataacaaagtagttatgaaactatgcgaacggatacctgatcatttcaaaatgctaaccgctcatgctgaaatcacgaagggtttggaggcaatctatgcgcaagatattcatcagctagaggttttcatagatgttgttgagtcatatctgaaaaataagaacgagtgtgactatagtgtcacaagcaatgaatatatggcaattaacaggctacggataagagttaataactttcagggagttcttgttggtttaaaactaagtcaggttcaagcacaaatgagctatgaaacagctgtcgatgtaaaagatagccttcgagatattaaagataatttattacctatgtgggaagggcaggctaagaacatcaacgccagtggtgtttgtagtggtattgatgaagtggctcatgaaaaattcaagaagctggtcaataaattaaataagaacataaggtga

SEQ ID NO: 155974 - DNA, 1116 bp, Enterobacter cloacae
atgaagatcataaatagtattgatatattagatgtcaaagtggctaaggaatttgataaatatgctgttgatgtaagtatggaatcatcaataaaagatgcagtcagatctttccagattggtgatattgatgccgcgcataactttggacgattggaggacactactgatattaattatcttgataacctccttctcagcgtcagctcatcatctcagggcaagaagggagagactctgaatgagattgttgcactggctcgtgaagtcagtaatgcagtcgaaccaagttatcttcaaaagaaactgtcacggataccgtatgttgggcctttcataatgaaagccatcggtcttcattttagtgcaatgtcaagatttgattcagttaaaggacaaatcgatattttaacctcggatatcgaaagcatatcggaggggttgtttgaaatgaataaaaatattgatggaatgtatgaccaagctttaactagtgtaaaaaatacaggggttaacattgtagctgcctattacattctggagaagttacaaacagttcaggcttctattcgtaaggaactaaaaaatcagcctgataataccatgctgagcatggaagcaatgaatattgaacatcaaatcgccctcataacaaaacgtcgaaatgacatgatcacggaacaacaaaaggcatttgaagacctaaagatgatgaaaatgatgaagttcaataacctctcgatggtagaccagtttgaaactattattaaagtaacgataccatcttctaaacgcagccatcttattattgaccaggccgaaaggagtgataaaagctcattactgattcaggcaattggtgattctgtaaatcaacaagccagacgtcaagctttgttagtaaaagagagcagtattcgtgtagccaaaacagctaatcgtactgtatatgatgttgagacaattgattacatatcaaaccagatcaatgaggccggtcgagaaattaaaaaaatccacgaccgagccaagacgcaacatacccagcttgaagctcgcgcagcgcaatggaaggagaagcgttttatggtagcaaaagaactgtcttccaaataa

SEQ ID NO: 155975 - DNA, 204 bp, Enterobacter cloacae
atgcagcaaacccgcttttcagaggctgacaacgcttacagggtgggttgtaagacgaagcggaatagcggattctatctctgtcgacaggacgccgacacgagaaacgaacatcaggatgatggcgcttctcacacaggacacgtcaggatggcgctgcaggaaggcttcaggatgaagcaaaggatcacgcaggacgcgtaa

SEQ ID NO: 155976 - DNA, 273 bp, Enterobacter cloacae
atggtgccgtggttcgttattctgattagccagctgcgtttccgccatgcgcataaacaggcgattgccagccatccgttccgctcgattctgttcccgtatgcgaactatttgacgatggcgttcctgatttgcgtattaatcgggatgtactttaatgatgatacccgcatgtcgctgtttgtcgggatgatcttcctggcggcagtcactgcagcctataagctatttgggctggggcgccgcggcaccacgcagaaagtggaggaataa

SEQ ID NO: 155977 - DNA, 219 bp, Enterobacter cloacae
atgtttacacctgtccccgctccgaagagcaagggacagtggcaacacaacttatttgttcagttccgcggtcatatgtacgcggttaccagagaatgcctgagtaattttgtaagaggacgcgcccgcttcctgagcctgagcagcgattttcgcttctgcgccatccagcgtggaggcggaagcggtgacagtctgagcagcgaaagaaccgaatga

SEQ ID NO: 155978 - DNA, 288 bp, Enterobacter cloacae; identical to SEQ ID NO: 25055

SEQ ID NO: 155979 - DNA, 264 bp, Enterobacter cloacae; identical to SEQ ID NO: 34918

SEQ ID NO: 155980 - DNA, 549 bp, Enterobacter cloacae
atgaaaattgtagaaactcctttggatggcttggttttgatcgaacccaccgtttttggtgatgcacgtggttatttttacgaaatgtaccacagaagagcctatcaaaatgccggaattgatgtcgaatttgtgcaagataatcgttcagcatcccaacaaggagttttgcgaggacttcattttcagaaaaaaaatcctcagggtaaattggttacagcgttgcgaggtgaggtttttgacgtcgcagtagatatacgtcctaattcttccacgtttggacaacactatagtgtgatattgagtgaagataataaactccagatgtatatcccacctggctttgcacatggatttgctgtactcagtgattatgccgagttctactataaatgcactacatactatgatccagaaagtgaatccgggatctcctggaatgatgaaacaattgctatagactggcctatcaaaaaacctatcctatctgcaaaggataaaatattaggtagcttccaggattataaaaatatgctggagaataagtaa

SEQ ID NO: 155981 - DNA, 315 bp, Enterobacter cloacae
atgaataaatatttaccctttgccatattggcggggatcgctacgtctttttccagttgggcaattaatgtgggtgatatcacgtcgataatgacttccgagcagagttcattatcgaaagagattatcaacacgacgaattccgcacgctatgtcagcgttacggtgaaacgactctcatcaccgttgcctgatggcaccgaaataagcattaatccaggcgaattactgtctacacccgccagccttattcttccaggcgacgcgaaagatgttttccgctttttctataaagggccagaggatgataaataa

SEQ ID NO: 155982 - DNA, 132 bp, Enterobacter cloacae
atgtttaatggcgtgatgcaccagtgccgccgggaaattttatgggcttcgcagggcaagttgagggcacaaaaaagcccgcagggcttgcgccgtgcgggctttcaggacttcatcagtcgactctggtga

SEQ ID NO: 155983 - DNA, 294 bp, Enterobacter cloacae
gtgctggctttagccgtaacgaatatgacgaatgacgtctttttcaaagtgggccagataaccctgattggcctttccgctaagaatgcgattctggttatcgaattcgcgaaacaattgatgaaagaaggaaagacccttattgatgcgacattgattgcattgaagcagcgcttgtggtcaatacggattacttctctggttttcacattaaacactgttccgctgatgcttaccatggggccagtgacagcacaaagcatgcgatcggtaccagtgtattcggcgggatga

SEQ ID NO: 155984 - DNA, 486 bp, Enterobacter cloacae
ttgtacagaatgacaggagttgctgttttaagtcttacgctgatgggatgcagttctatgccctcagaaaacagaacgcagtacctgataacggaaatgcggtcaccagtttcaggaccaaccacagtaactgtaaccgcggaaagccttctgaaaaaagacaatacccgtaatttgctactgtacgcactccgtccgttgcctggtaaagtattcacctctgatctggacagaaaatttgcagcagcgacgatctatatcgatttttacccacataaaggaaacagtacggccgaaatcagtggtgagataaattactatgatcacgagcaatacgtgaatgcccatctggtaggaggtgttgtcaggacaataccacttgcaccacagaccatcccgctgacactcaataagccattattaatcagtctgccacatggcatccactattccgtcatgctgacggacagccagcctagaacatag

SEQ ID NO: 155985 - DNA, 189 bp, Enterobacter cloacae
atgtttgattattttaacagaccatttgacactttcgactgggcgctgattataggatgcggaatcctttttgtcgggcactttatctggaaaatcttcttcagcgatgaaggccgtaggaaaattgataatgaagcgccgcctccaatcatgactcagaaagtagatgatgaaacggatggtaaataa

SEQ ID NO: 155986 - DNA, 1191 bp, Enterobacter cloacae
atgaagaagaaattaccgtcatggtcaccagctgaagatctgaagcttataaaagggcttaaggatggttactcatttgcagcgcttacgtccattcttggatacaatgaaaggataatccagttaagatgtatcgagttggatttataccttctcataagagaaaatctctccgagcctaacgaaattaccctcaagcctaactcttcaatcagagtgccaccggctgaaccagcttcaggtataactcttaaaaccctgctagataatggatgggtagcacactgcataaatggtgaaaatgttctgtactctccagaatggtggcgaacaagaaacacaagcctgttagtacccgaagatgaggatactgatcagctacataagaaaacatcttcacacctcattaccggtaaaccgtggactcctgacgatactcgggtcttacttaaggcgatacaacatggtatcagtaaaacggcacttgccgagcttaccttaagaagccatcaatccactcttcagcaacttatagagcttggaatgattaccgtgggcgctgaagacgattcatctagtacggttatatggttaaataaaaaaataagttctgcgaaattatcaaaaaaacgttttcttgatgtcctgccactaatcgaattcggctggcacattgatggattcgaccttaccgccccagattggtggagcaagcatatagtgcttaatgaaattatctatgaaaccgtaccagataaaaccatttcaaattacccggccagaactgacattgattgtgatagtgaaaaaccacaacaaattaaggaaagatcagtgcctgaacggaaccaaagagaaccacaaaaaccagccaaatgggtatgtggaaactataagtttttaattacacttctatctgagcatcgttcaatagaagtgattgccaagaaaatgaataggacagatggcgcgattaggtcacgtctacagcatatcggtataacgcgttacgagaaaccaacaaaacctggtgaaaaaggaagtgtcattaaagctacatcaatttctacagatatcttcagaaaccagccattttttgtgaagagattactcatagatgccggatggtctgaaaaaaacaatgaattgcattgcccggtctggtggagcaattatccacacaacgtttaa

SEQ ID NO: 155987 - DNA, 399 bp, Enterobacter cloacae
atgaaaaacctcattaatgatgttgcgactgaagcacgggcattactgaacggtatcctcgctgactgtgataccgatgacacaacgggcacatgcctatttgccagtctgctattagctcgtctggcacatagcaaagggttatcagctgtgattagaggtggcgatgggaaatctgacggcgggttattcactatgtatggcgggttcggtcattactggtgtgagatctccaacaacgatgaattccatattgttgatatatcggcagatcaatttggcttcgaaggagttatcgttaagaacatcaaagaggtagaaggctggccacgttacatccctggaaaccaggatgtcgtaaatgctggagttgaggagctcttcaaccacggatactaa

SEQ ID NO: 155988 - DNA, 507 bp, Enterobacter cloacae
atgaataaaatgaagtacagtgcagtattgaatgaatggaattttaagtatgattctgctgaaagattcggtgactcacactttctttatatccataatttcatgaacgatcagagccagttacttggtattatcatagctgattttttgaaggttcctcagatagaacttcttcctattcagaccgccatagataaccttgtaaggttattaaaggttcagacatccaggtcgttaacgtctgatgagggtgttgatcttgctcaattcctcactcagtacctcagacagacacaatcttatgctgcggtttcaagtatgtgtccggttggtcaaaagttgaattttttcctgaacatctacccaagaaaaggtaataaagagttttcttttcgattattcgcaatcaccacactcaatgaaattacaagcgtgtctgaatttgttgaaatggcacatagtactcaacaaagtgatctgattaataatcctggttattttgtttga

SEQ ID NO: 155989 - DNA, 222 bp, Enterobacter cloacae
atggcaaagaaaaacatacatcaggaagagattgtattcgcgaagaaacagcttgttctccttgcaacattaaaagggaaggtaagtgaattgattctaaagtgggaagggaacattggagctgagactcctgactatcatcttttaatgaaccaacttgagtcagtagaaaagcaaatattttctaagattggtgcttggaaaaagacatctttgctttga

SEQ ID NO: 155990 - DNA, 426 bp, Enterobacter cloacae
atgttcataacccctgaagttgcttatgtctgcgagctgttacataaatatgatgtacttccactcgaatgtgatggtcatactatggttgtaagttgcctgctagatagattctgtataccgcaccagcgcatcgttggagaagtaacgttggctggaactggccagataattcgacctcatctgtggatagagtatgacgaatacataatagattaccgcctccgcatgtgggcaaggaaaaccgaagataatgttagtctagtgcctcatggcatctttatcgaagataaaagtcaggcaatttacactgctcaaagaattgcaaataaagccatgatatcagactcgataattgattttatgacagatgggttatggactaagattctcctagaaatccctggtaaaaaaagaattacataa

SEQ ID NO: 155991 - DNA, 276 bp, Enterobacter cloacae
atgtcatacctcggttcgtcggtactggtagtcgcaaccatttcagtgaagaccccaggcaaaggatttttcagacagttactctcgaaattaaaagaagcagctgagacaaataactacatcttaaaggttgagaatgtcatcagcaccgaacttagggagtttcttatcagagagggtttttcatttcctggtgaacggtggatgtgcggttccggctactgggctccatcatcacttaggcttaatgaccaattaagcaccctccccgtctaa

SEQ ID NO: 155992 - DNA, 315 bp, Enterobacter cloacae
atggctaatgaagatctcccctctgggtgcaaacgctgtaaaggatgcaatcaggttaaacccttcgaagaattcggtaaggaacttaagggtaagtttggccttaaaagtaaatgcaagttgtgcattagcgataaaaacagaaattatgctgccggttccggtgcaggtgtaaaactccaaaacaataaaaaataccagaccgagcataagagtgaactggcagaaaagatgagagtaagacgggcaaagaaaaaatttggagataactatgaagcatatctagcatctttagaaaggattaaaaacctctga

SEQ ID NO: 155993 - DNA, 963 bp, Enterobacter cloacae
atgatgaacatcgcttgtgatgacggctcaacgaacgtaaaacttgcctggattgagaatggtgaaatcaaaactcatgtttcgcagaacgccttccgcgaaggctgggctactccactcgcatttggtggtaaaactatctacaactatctcattgatgggcggaaatttactcacgacattggttcaacatctgcaattacaacaacgcatacctctttccagttcgacgctgtaagtcgcgtagcaattcatcatgcccttttgacttccggtcttgagccacaggatgttgaacttacagtgacactgccggtggccatgttcttcacgagcgatgcgcagttgaacgaagctaatattgaaaagaaaaaggccaacgttatgggcccaataaccctgaataatggcgaaacttttcatgttgtaaaagttaacgtaatgcctgaatcagtacctgcggctgaatatctgattgatcctaaaacaaccacgcagcttacacgaaccctggttgtcgatctggggggaacaaccctagacctggccatcattcagggggcaatggagggcatatctgatatctttggcaacagcgatgttggcgtttcacgagtgacaaaagctgttatggctgcgctccaggatgcccagtctccaagtagttatgccattgcggatatcatcattaaaaaccgtcatgatagagcgttgattgcttctgcggtcaatgatcactctaaaattgatgccatcattgacgttatcgattctgagtcgaaaaatctggccgaagctgttgcagctgatatacgtcgtcagaacagcgtccacaaaatcatactggccgggggcggtgctgagctcatccattctcatattgtcgaactattccctaagctggatgtcatcaaagcgcctgacgcgcagctcgcgctcgtcaaagcaatggcaagcgtctaa

SEQ ID NO: 155994 - DNA, 387 bp, Enterobacter cloacae
atggaagaagataaacgtttactcgtctggctccgccccggcaataatccagaagacggtaaagctcttgatattatggagcgcttaccccgccgatcccggggggaattttaccgtaaggcactggtaattgcgtctgccttgcatgagctcgaccctcggttaataaatttgctggccgcacaaaccacgacatcgtttaatgccgaaacgctgagcaacattctgtcgcaaacgctgggcattgccgttgaacggaattcttcaccagtggaaacccaggccacaggtatccgagcaacaaccatcattgattcggataagcctgctgagcagaaagaaccaattcctaaaccctccctgatgatgcaaaccctcaaacgttga

SEQ ID NO: 155995 - DNA, 711 bp, Enterobacter cloacae
atgattacaaaagcttcctcaaaaaccccagggaatttaccggaactaattagttactctccgtcaggcagacctagcttaacgagacgagttgaagatcgccttaaatgcgcccttatcctcggctacctcaagcccggtgataagttggtaacaaaaaacatcgccgatgctatgaaaatgagcgtcacgcccgtccgtgaaagcctgatacgtctgtctgccagtagtgctcttgctttgactccatcacatgccttttttgttcccatcatcaccagtgagcagttcaacgagtacatgagaatgaggcgattgattgagccagaactggcagaaaaggccgtactgaaaatggatgccaatggctttgaagaatgcctgtctttgtgccaaaagctgcgttccgcatatgaacgtagggatgtttatctggcgcaccagctaaacctcactctgcggctgaagctttacatatacgccggtctgcctgagtttttcaaaattgtaacccaactgtggattaacctgtggccaactctgagttacacgttcgaatctgactcggaggataaatggccaatatttttctcgtcgcttgaactcgctctttcaaacagggatgcaggggcagcagcagatgccattagagagtcactggataaggggttgcggatctatctcagcttgttaaccgagcaaggtgagtaa

SEQ ID NO: 155996 - DNA, 606 bp, Enterobacter cloacae
atggcgaagatcaggatcactcatcgttatgacatcaataaagacatgttctatggcgtagaaactaaccagccatatgaaaaggttgttcagaggttagcttatctccaattgattcattccacgttgcctgattttccctacatggctaattgcctggaacaggccgatgcagtagaactctattgtcgaatctttggtggtattcctttaaacacaaatcaacattataccgcagagattgatttatataggaactgggaaatagatacacgcgaactcgttaatgacattaattgccaaaattcaattgccatttccggctgcgtagaaaaaatatttaaatacattgttgaaaactctgttcagatctatcagctcacaaaagaagcttataaattagggcagggcatgactaataatgaaaaagaagaaatggctcttttactgatttatatggattggcaacttcaaaggatggatcgtgttttaatgggagaaaaaattcaaaaggaatgggattggcacgattttgagggaaggttgatttcagacatttcgtatacacacaccggacaacctgacctatacatccacaaagattaa

SEQ ID NO: 155997 - DNA, 423 bp, Enterobacter cloacae
atgagaaaaataatattaaatgcggttgtttgtttatttgcaattaatgcatcaagtttcgcaatatcagcggaaagctctccatctcgtgacgaactgaatgacgtgatgaaagttcatgcttccgagattgctgctgttatcgcatgtaaagactacctcgaaaatggcgaggaacgtttgactgaagcgaaatcaaaagctggccgtgtactgggtaagatggtaggcaatcaagccaagggtagcgagtatgctagtcggattctggtaactgttaacgaagctaagccagatgagcaactgaaggctgaattcgacaaggtcaaccttgaccactcagtccgcgttgcaaaatgcgctcagctagtagctggtaatgccgcacgtgcggacgatgctgatatcaattatctgaattaa

SEQ ID NO: 155998 - DNA, 756 bp, Enterobacter cloacae
atgtcagcatttctcatcaataaattatctttcgaagataccaaacaaataatgttgtcctccatgaaaacaatggcatctcttcatggtattttggcaatattcttgccgataattgctggtggtggactcctgacactcatcatgaaaaatgtgacaatggaggggcttgcattttttatcttacagccagttgtactcaccctctaccttacggctatcttatgccgatatcaaagctcagagctaagattgaatatctgggaagaactacgcaactttatcgttgtgttagtttatgcattattcctgaccgtactaatgatcgtaatattgtggttagtcaaatttatgattgcttcagcggttgcgggtgaaaccaaccatgttgaatataaacaaccaacattaacaagcattagtctggcttactccaacctaatagtgtatttcaatatgtacgcccttgccactttgagcgtatttatcgctacgccaatgctcgttttattcataccaacagttacgcggtgtaaaggttctctgctgaaaagtataccagtcatttgtaaaagtacttttatgaatattgggccgttgttcgcattttcagctatctctggtgttgttttactttcgtggtcatacttttcgctcaggtatgaatggttaatcccggcagcaactatacctctggcctacttatcaatattgaattaccagctgtctgaagcagcattgcctcgtaaccaataa

SEQ ID NO: 155999 - DNA, 1710 bp, Enterobacter cloacae
atgaacctaccgacagctgtattagcgaataacgatgaaaatgaatcagacgtcctcagcctttatgctaatcccgtagacagtcaaagtggcctcattgaacatgacggctttcaaaaactaaatgccatgcgcgatctgctggtggaatacaacacaacactgaagcacatgcaggccatgtatgatgcagtgatgcggaaccggcatgatgaagcatggcgcatgttctgtgattcttgtgacaattccatcaaatatacgctggctgtagaaaatttgttctgtatagaacgggcccgctgtgctctcgatgaaaagtactggcaaaagctgctcgatctgaccggcgtaaaaccatttatgcccaccgaaagatacgatgactggaacgaaggattaagggcatggcgaaaatcatcagaatcaaattttgagaagcttaagcctgtacccttcaacgaagaaagtatcttttctaccgcattcgcattgaatgaagagaaaaaagactacttcgcccagatggttcatggtgtgtttgaaaagctctccgctctgcataagactaaccgtgcccagggcttcagcaacaaactcatcatagccagctgcttaccaagtagagataaccgcagatcctatgactatctcaactattttaatgaccttcgtaaggttattggactgatgtatggacgaagcggtgctgaggatgtgaattcggctgcggtcaaagagtacatgatgagtaaccctggcgaatgggtaagtattgataacgatagtcttaaagtgaaggggtttattaacggcaatgtgcatatcctgattgaggaggaaacttgtgacaatctcaatctggtactatcccatttaatgccaggctgcattcctctcgatcgccgatacaccaccggccataactccgcaagaactgtaaaaaccaatgaatatcggtcgcagttgatatcattctctgctgttaactccttaatatcatatgccactgaccatttgaacgcgggcaaacacctgtcaccggggccgcacacttttatcctgcgggacaaccagtctgttagtgagaaaaaagaactggtgaacatatgggagtcattgggtgctgtcagaagatatagagaagtatatgactttgactttagccccgttgaagcattcaaacttctggcattacatggttctatacctgaccgctatacgcaccagttctatgcaacggtcggagaactccagaaacgagcaattgatgaatgtatggtggcttcaggtatgcgtttgctggaaccgaatatcggtcttggtgcgctactgaaagggttaccagagggggtggatgttactggttttgatatacaccccgcagctgttgcaattactggcctgcgctggaacgtcacccttaatgattttctattggtcaagcctgaaaataccggcttgtttgaaagaattctgatgaatcctccatttagtgactcacgctggattgcacattttcaacatgcgatgagattcctgaaaccgggaggacgcttgatagcaatactgccagggagcgcaaaggagcatcttttaacccgagaagctgggcccggttacgacatcaatattctgggttgctatgacaacgcctttgaaggaaccgcagaatccataaaacttttctccgttgatgcccatgaatag

SEQ ID NO: 156000 - DNA, 585 bp, Enterobacter cloacae
atgtcacgacaagaagccgcaacgcagttatttatgtctgcaccaccagcaagtattgatgtcgttattgagcagctggaaagggacgctcaagcagccggtatcgatatccatacaatctctgtaatggccagcctgttacgtgatcgaatagaagcatacagtgacgtgcttaaaatcgagcctgagcgggtgatacacgcacttgaggtactgcgaggtacggaagtgccgtgggctttttacactccgtccaggctacctgagcttgaagatgttcattgctgggaaactcctcacgattttgaccaagacctaggtgaacaccagctgcggcgctatatttgccctaaatgcgagcatgaatcaaccgacccaatgcgctgcacggctggccatgctcctggagttaaccagtatcctgaaagctgtgatgccactatctggaattcgcccgattcttgggatagtattaaccctataataaaattaattatcaaatctacgttcctggctgacctgactgttcatacaatcttctatccgaaagggttgaagcttcctgaaattcaggacgttgagtag

SEQ ID NO: 156001 - DNA, 441 bp, Enterobacter cloacae
atgactgctaaccaacgtaaacgtccttcgcgtaacaatcgagctgtccagttaacgtccgagcagctggtagaagcgaagacgcttgacctgaaagcccaccattcgtttaaaaaccttatgggtcttgctgcaatcagtgtcgtggtgtttgtctgtcttggctccttgatccataaacaacgctcagtaatgaacgaatgggacctgggtgaagtgatcagaggcgttgatttgaaagccggaaccctcgcaaaaaacaactttttcatcaccaacaaagggcagtttgaagcaagtggcgttacagtgtcacttacgggtacaaaactgaaattacagcagcatcaggacggaaaatattacgtttgtaattctgcaacaggtgattgtgttctggtatccgatgtacaagctgaaaaaattcgtgaccagctgtag

SEQ ID NO: 156002 - DNA, 483 bp, Enterobacter cloacae
atgactaatcatacaaactggactggagacctgaccgaaggcgcaactatatttgtagccacaccagatggccagctcagcaaatgtagagtcgagtccgttcgagaccgacatttctcggtcgagggtattgaacgtgaattcgataagttgaatgcctgctcagttgatgggttactacactcttaccccgacgatttcgagtcgagggagttatttggtctgtgccagcaaaaaaacaggctcaagtctctgcaaattgattcattatcgttacagcaagtccagtacatgctggctggcctggaacttgccaggaagagatatggataccagtaccgaggcagcaaagccgtagataccaatcagaagggtagactggccatgagcattgatgattcgcttcacccaattcagatcgcttatatactggcaggtttaaaattatctctccttcaaacagaggtgaaccatgactgctaa

SEQ ID NO: 156003 - DNA, 429 bp, Enterobacter cloacae
atgtctctgtcaaaaaaacaaagaatagtactgagggctaaatttggtggtcgatgtgcatattgtggcgaggtactgaaagaaaaaggttggcacgctgatcacgtagaacctgtgctaaggaaatccgtccaggatatgcaagctgcggccagagggaaatttaagcttaaggctaccggtgaagtgtttaatgaaagtgccaactgcttagaaaatcttttcccagcctgtgcgccctgcaatctgctcaaaacaacatattcactggaaatgttccgcaaacaaataagtttacaggttgaaagggcacggaagagtagtatgaatttcagaacggcagaaagattcggccagataagcattgtagagaaacccattgttttctggtttgaacagtattcagagaaaaatggtgctatcaaataa

SEQ ID NO: 156004 - DNA, 603 bp, Enterobacter cloacae
atgactctaaaatatataatcgctctcgcaatatttctgacatttgtgtgctttgcagctttcatacttatctacgcgagtcgaacaaaacgagaacaacaacaaactcagcaacctttggacgagcatgatcagcaggcagatattaatgccgatgccgacgagaacgccgcacttgatgggttgagcgagtacttcatcaaaaaaaattcgatattgccaaaagtcctgatggatctttatgtgcgcttgagtgcggtgttcaatggtcagtacattatcgcaccccaggtgcttgcccgggacttagtagagctggagctcgaagatgaaccggttgccccggttgacgtacttcaggcgcaacagtacgcagatgaattcgtgttcgattttgttctctccgatgcgcataccggggaactagtgctagcaatgatcaatgaagatgctatcagcgctcagcctgaaggagagttcattattgccctttttaaaagaactcacattcctgtctttcgctatgaaacgttgtcaggcttggacgataacgccctggcagtcaacatcgctgaatcaatagacgatggccgattctcttag

SEQ ID NO: 156005 - DNA, 879 bp, Enterobacter cloacae
atgattacagctacagaactccaagagttatcacgccaggttgaaaatgctaacattgcccgagccctggcagttaaagagttggttaaagagacaagagatcgtcagttttcattgtgggcgctatttattggtctcttcagagagacaccggcgcgaaaaaagctgaacgaatgtgaattgcatcttaacctgctgctgccaaaatgcaggagcatctttcttcaatacgtagttatgtcctcgttggaagaaatttcgaaatcaccagattgtgagatttatcagcatctagtcaactgctggaaagaagctcagataaaatataacgagtcaggcagacgactcaaacttgcagaaaatgcccgtgaactattaaaaacagcaaaggatgaatgtaatagtgcttccacaactgaatttctggatatggttactaccagtaaagcaatatccatactttcagcaatagacacatcctctgcgagtagttcgttaaagagagctatgggtgcgcttaagcgattagcagatgaaatgcctgcccggcaatcacctattgattcaaatttaccagatgacacgcttgatctgtttgtcgatctgactataaatcctgttattgatattctctcctggttaaatattgaaaagctggataatgccgaagtgcagtgcagcaaagccttaaagaaacttcagacgttattaggacaactgggtgctgagcatgatttgagaactaaggattatcaatctcaattagatacgcttaagagaattgaacaaccatacatcaaaaaggtgatgcggcatatacccgaaaatatgaagttcaaggagcctgagtatctccagactataggaatgaacccatga

SEQ ID NO: 156006 - DNA, 984 bp, Enterobacter cloacae
atgagccaatttaaacccaaaagccttgtagtctaccgcatccaaaaagctctggaattagacaagctggatgaacagttaagtgagttgaaatacactccctgcgggcctaatgatatggcacggtcaggatggatcccgccattgggtgaagatgtcgagctgttaaagcatgagtcgaataatctcattcttctgactgttaagcacgaatcgaaaatacttcctcccgcgaccatcaaagaaattgtgcgaacccgggttcagaaactggagaaagagcaaaaccgcaggctaaagaaaatggagatccaggccgtcaacgatgccgtgctcgctgagctcataccaaaggctttcagcaaatacagcactacaaacatttgggtggatactaaatcacgtctactgcttgttgagaccaccagccataaaaaagcagatgatgtaacagctttgctacgtaaaactattggctcacttccaattatcccattcacgctggaaacgccggtagaactgacgttaacagagtgggtcaaaacaggaagtctgccgcctggcctagctttatgcgacgaagccacgctcaaagatgtgctcgaaaacgggggggtcgttacaacaaaacgccaggatttgatatgtgatgagatcgctcatcacatcgaggccggaaagcttgtgacaaaggttgcactgggctggatgaaccagatgtttttcatcctgaatgacaatttcatcttttcacgactgacctttacggaagaacttattgaacagaacgatgacatttcgccagaagatcacgcccaaagatttgatgccgatttcgttttgtttacctctgttgttatggaggttctggacacaatgataaaagccctcgggggtgaaagcccaggactcatcacaacgccgtcagacgaacaacaaggtgtcgcggcagaagccaaacaaccagaaaaaaccttccattaa

SEQ ID NO: 156007 - DNA, 231 bp, Enterobacter cloacae
atgaaacgcttccattgttctgaaaagctgcataacccagagactgagaaattttgtcaggatatcgccgaacaatatcggacagcacctgatattgccgtggcgcagtttaaacaagtgctgagctctaagcctctaacttactgggagtgtgtcgtgatccgcgagcgtgtctctgaccttattaaaattaatcaagcaacagctgagggccacgatgagccaatttaa

SEQ ID NO: 156008 - DNA, 822 bp, Enterobacter cloacae
atgaaaagcgttctgaagtgggtaggagccaaacacaacattatggcaagtcttaagcatgtactaccgaaaggtggtcggcttattgagccctttggcggttcaggcgctgtaatgatgaatacgaattacccagaatacattttggccgatattaatagcgacctgatcgatacataccagagtatttttaagtcgcctgaaaaggtactttctgagcttaaacgcctttactgtctcgggcgttctgaggacgcctattatgagctgcgaagccagttcaataatcatgatagtgcaagtgacactcaagctgctctgtttatctatctgaataggtttggccatcgcggactatgccgatacaaccggaaaggcatctttaacgtcccctggggttattacgccaacccctatctcccagagacagagttatacgcaatggctgagaaaatgtcctcagcaactttactttgcgccagcttccagaccacgctatcaatggcccgcccgggtgatgtggtgtattgcgacccaccatatgttaatcccggcagattcacggcttaccatgccagcggttttacacccgctatgcagattgagcttaccaaactgctccagttgctgcctgaacgcggggttcatgtcatcgcatcatgccacgatgcgcctgatattcgtgagctttatcaagccttcgctattcatggtgtgactgcccggagaagcatatttaaaggcagcggggatgggaaaaaagcttcagaaatcttcgcggtcaaattagcggataactcgaaaaagggagctgcggcatga

SEQ ID NO: 156009 - DNA, 1269 bp, Enterobacter cloacae
atgacagacgcatctacaatagacgcagttcaaccaaaggcaagacgcttatcatttaaagagcttccagggtttgatatttctgctgaagcacttctcaaaattatcgaaatgccgtgtatggttattcgccggtctcctgcaatgaaagtactggagatgatcacgctgcggttacgtggggattgtctttctgcccttggcattgacttaaactctgcccaaattaccagtaaagggacggtatcggggggcaatggtgatatggacgtatcagtacctgcaacacaactcttttctttaatccgcaacatgcgcggcgaagatgaaattaacgtccgcttccatgcggcaaaaaaccatcttgtcattcgcaccgacaaaaactcctataacatcccggtttgcttagaccatatacccgaaattcaggctgagacgctggaacataattacagcgtttactttccaacgcagatgctgagtcagattatcaagcgtgtcagccacgctgcggctcagaacgatgtccgcttttatatgaatggggtctacctcggtatcgataatggccaatttattgctgtagccactgatggacatcgtatggccgtcagttctcatgatatcgacttcagcgatgacgtgggcgatgagattcaatctccgacagctcctacctctatcagtaacacgaatgcaggtgtgattttacccaacggggttttccccgtgctccataaaatcctgagcggtagccagggtcaattcaaaattgactacagcaaccgtaacctgacatttacgctcggaagccatacagtcatttcaaatcttgtcgatggccgttacccggactggaagcgcgtggccagcacggtagccaaaaatactgaactgtttaaggttgatccttctgaactcaccaccgcactaaaacgcgcaaccccattgcttaaagagggctcgccaaacaacaccagtgtttgtgtgatgtcattcaaagacaacgccctacagcttaagtcgcccggctcaaatgcaatcagttgcaaagaggtgatggacattgcgaaagaggcaggcgagcccgaaacaattgttgatatcggtatgaatgccgattacctcctggaatcactggcaagcctgggggcgtgttcggaagaaggagaagccgcacagattgctttgcgtgatacaacgaccggcatattgatttcagtaaacaaaaacaattacgacatcatcatgcctgtccgtgtctga

SEQ ID NO: 156010 - DNA, 300 bp, Enterobacter cloacae
atgttcaccatgacgaatttcgcgtccaatattcttgacatggtttttctatcagaaatggaaggggaactcatttatataaaagcgcttagcggcgttactggttacgttcctcagatccatcttttccgcctccagcttatcgcatttgatataggttggtactacgagtacagattgaattcaggcaacctcattataaaggaaattgttgaggccatcacatctcttggatgtgctttaaatgaataccaatggcagttcgcgtttgaattaggttatcgccgtcaccacaaataa
